United States Patent Application Publication US 2004/0241651 A1 - sequence listing, part 6

SEQ ID NO: 147233 - DNA, 13 bp, Artificial Sequence
  Oligonucleotide for detection of SNP TSC0037185
aaaaaataatata

SEQ ID NO: 147234 - DNA, 13 bp, Artificial Sequence
  Oligonucleotide for detection of SNP TSC0037185
tatattatttttt

SEQ ID NO: 147235 - DNA, 13 bp, Artificial Sequence
  Oligonucleotide for detection of SNP TSC0037187
tttattgaaatta

SEQ ID NO: 147236 - DNA, 13 bp, Artificial Sequence
  Oligonucleotide for detection of SNP TSC0037187
taatttcaataaa

SEQ ID NO: 147237 - DNA, 13 bp, Artificial Sequence
  Oligonucleotide for detection of SNP TSC0037187
tttatttaaatta

SEQ ID NO: 147238 - DNA, 13 bp, Artificial Sequence
  Oligonucleotide for detection of SNP TSC0037187
taatttaaataaa

SEQ ID NO: 147239 - DNA, 13 bp, Artificial Sequence
  Oligonucleotide for detection of SNP TSC0037187
tggttttaatgga

SEQ ID NO: 147240 - DNA, 13 bp, Artificial Sequence
  Oligonucleotide for detection of SNP TSC0037187
tccattaaaacca

SEQ ID NO: 147241 - DNA, 13 bp, Artificial Sequence
  Oligonucleotide for detection of SNP TSC0037187
tggtttaaatgga

SEQ ID NO: 147242 - DNA, 13 bp, Artificial Sequence
  Oligonucleotide for detection of SNP TSC0037187
tccatttaaacca

SEQ ID NO: 147243 - DNA, 13 bp, Artificial Sequence
  Oligonucleotide for detection of SNP TSC0037189
aaaataagatatt

SEQ ID NO: 147244 - DNA, 13 bp, Artificial Sequence
  Oligonucleotide for detection of SNP TSC0037189
aatatcttatttt

SEQ ID NO: 147245 - DNA, 13 bp, Artificial Sequence
  Oligonucleotide for detection of SNP TSC0037189
aaaataggatatt

SEQ ID NO: 147246 - DNA, 13 bp, Artificial Sequence
  Oligonucleotide for detection of SNP TSC0037189
aatatcctatttt

SEQ ID NO: 147247 - DNA, 13 bp, Artificial Sequence
  Oligonucleotide for detection of SNP TSC0037190
tgttatgttgatt

SEQ ID NO: 147248 - DNA, 13 bp, Artificial Sequence
  Oligonucleotide for detection of SNP TSC0037190
aatcaacataaca

SEQ ID NO: 147249 - DNA, 13 bp, Artificial Sequence
  Oligonucleotide for detection of SNP TSC0037190
tgttattttgatt

SEQ ID NO: 147250 - DNA, 13 bp, Artificial Sequence
  Oligonucleotide for detection of SNP TSC0037190
aatcaaaataaca

SEQ ID NO: 147251 - DNA, 13 bp, Artificial Sequence
  Oligonucleotide for detection of SNP TSC0037190
cgttatgttgatt

SEQ ID NO: 147252 - DNA, 13 bp, Artificial Sequence
  Oligonucleotide for detection of SNP TSC0037190
aatcaacataacg

SEQ ID NO: 147253 - DNA, 13 bp, Artificial Sequence
  Oligonucleotide for detection of SNP TSC0037190
cgttattttgatt

SEQ ID NO: 147254 - DNA, 13 bp, Artificial Sequence
  Oligonucleotide for detection of SNP TSC0037190
aatcaaaataacg

SEQ ID NO: 147255 - DNA, 13 bp, Artificial Sequence
  Oligonucleotide for detection of SNP TSC0037190
aattaatataatg

SEQ ID NO: 147256 - DNA, 13 bp, Artificial Sequence
  Oligonucleotide for detection of SNP TSC0037190
cattatattaatt

SEQ ID NO: 147257 - DNA, 13 bp, Artificial Sequence
  Oligonucleotide for detection of SNP TSC0037190
aattaaaataatg

SEQ ID NO: 147258 - DNA, 13 bp, Artificial Sequence
  Oligonucleotide for detection of SNP TSC0037190
cattattttaatt

SEQ ID NO: 147259 - DNA, 13 bp, Artificial Sequence
  Oligonucleotide for detection of SNP TSC0037190
aattaatataacg

SEQ ID NO: 147260 - DNA, 13 bp, Artificial Sequence
  Oligonucleotide for detection of SNP TSC0037190
cgttatattaatt

SEQ ID NO: 147261 - DNA, 13 bp, Artificial Sequence
  Oligonucleotide for detection of SNP TSC0037190
aattaaaataacg

SEQ ID NO: 147262 - DNA, 13 bp, Artificial Sequence
  Oligonucleotide for detection of SNP TSC0037190
cgttattttaatt

SEQ ID NO: 147263 - DNA, 13 bp, Artificial Sequence
  Oligonucleotide for detection of SNP TSC0037191
tttgaagttttgg

SEQ ID NO: 147264 - DNA, 13 bp, Artificial Sequence
  Oligonucleotide for detection of SNP TSC0037191
ccaaaacttcaaa

SEQ ID NO: 147265 - DNA, 13 bp, Artificial Sequence
  Oligonucleotide for detection of SNP TSC0037191
ttaaaagtttaaa

SEQ ID NO: 147266 - DNA, 13 bp, Artificial Sequence
  Oligonucleotide for detection of SNP TSC0037191
tttaaacttttaa

SEQ ID NO: 147267 - DNA, 13 bp, Artificial Sequence
  Oligonucleotide for detection of SNP TSC0037191
ttaaaattttaaa

SEQ ID NO: 147268 - DNA, 13 bp, Artificial Sequence
  Oligonucleotide for detection of SNP TSC0037191
tttaaaattttaa

SEQ ID NO: 147269 - DNA, 13 bp, Artificial Sequence
  Oligonucleotide for detection of SNP TSC0037194
tttaaatagaaaa

SEQ ID NO: 147270 - DNA, 13 bp, Artificial Sequence
  Oligonucleotide for detection of SNP TSC0037194
ttttctatttaaa

SEQ ID NO: 147271 - DNA, 13 bp, Artificial Sequence
  Oligonucleotide for detection of SNP TSC0037194
tttaaagagaaaa

SEQ ID NO: 147272 - DNA, 13 bp, Artificial Sequence
  Oligonucleotide for detection of SNP TSC0037194
ttttctctttaaa

SEQ ID NO: 147273 - DNA, 13 bp, Artificial Sequence
  Oligonucleotide for detection of SNP TSC0037196
aattttgtttaag

SEQ ID NO: 147274 - DNA, 13 bp, Artificial Sequence
  Oligonucleotide for detection of SNP TSC0037196
cttaaacaaaatt

SEQ ID NO: 147275 - DNA, 13 bp, Artificial Sequence
  Oligonucleotide for detection of SNP TSC0037196
aattttatttaag

SEQ ID NO: 147276 - DNA, 13 bp, Artificial Sequence
  Oligonucleotide for detection of SNP TSC0037196
cttaaataaaatt

SEQ ID NO: 147277 - DNA, 13 bp, Artificial Sequence
  Oligonucleotide for detection of SNP TSC0037197
gaaggatagtaga

SEQ ID NO: 147278 - DNA, 13 bp, Artificial Sequence
  Oligonucleotide for detection of SNP TSC0037197
tctactatccttc

SEQ ID NO: 147279 - DNA, 13 bp, Artificial Sequence
  Oligonucleotide for detection of SNP TSC0037197
gaaggaaagtaga

SEQ ID NO: 147280 - DNA, 13 bp, Artificial Sequence
  Oligonucleotide for detection of SNP TSC0037197
tctactttccttc

SEQ ID NO: 147281 - DNA, 13 bp, Artificial Sequence
  Oligonucleotide for detection of SNP TSC0037198
tttataagttgty

SEQ ID NO: 147282 - DNA, 13 bp, Artificial Sequence
  Oligonucleotide for detection of SNP TSC0037198
racaacttataaa

SEQ ID NO: 147283 - DNA, 13 bp, Artificial Sequence
  Oligonucleotide for detection of SNP TSC0037198
tttatatgttgty

SEQ ID NO: 147284 - DNA, 13 bp, Artificial Sequence
  Oligonucleotide for detection of SNP TSC0037198
racaacatataaa

SEQ ID NO: 147285 - DNA, 13 bp, Artificial Sequence
  Oligonucleotide for detection of SNP TSC0037198
ggtagtttgtaag

SEQ ID NO: 147286 - DNA, 13 bp, Artificial Sequence
  Oligonucleotide for detection of SNP TSC0037198
cttacaaactacc

SEQ ID NO: 147287 - DNA, 13 bp, Artificial Sequence
  Oligonucleotide for detection of SNP TSC0037198
ggtagtatgtaag

SEQ ID NO: 147288 - DNA, 13 bp, Artificial Sequence
  Oligonucleotide for detection of SNP TSC0037198
cttacatactacc

SEQ ID NO: 147289 - DNA, 13 bp, Artificial Sequence
  Oligonucleotide for detection of SNP TSC0037199
gatttttgttgtt

SEQ ID NO: 147290 - DNA, 13 bp, Artificial Sequence
  Oligonucleotide for detection of SNP TSC0037199
aacaacaaaaatc

SEQ ID NO: 147291 - DNA, 13 bp, Artificial Sequence
  Oligonucleotide for detection of SNP TSC0037199
gattttcgttgtt

SEQ ID NO: 147292 - DNA, 13 bp, Artificial Sequence
  Oligonucleotide for detection of SNP TSC0037199
aacaacgaaaatc

SEQ ID NO: 147293 - DNA, 13 bp, Artificial Sequence
  Oligonucleotide for detection of SNP TSC0037199
agtagtggaggty

SEQ ID NO: 147294 - DNA, 13 bp, Artificial Sequence
  Oligonucleotide for detection of SNP TSC0037199
racctccactact

SEQ ID NO: 147295 - DNA, 13 bp, Artificial Sequence
  Oligonucleotide for detection of SNP TSC0037199
agtagtagaggty

SEQ ID NO: 147296 - DNA, 13 bp, Artificial Sequence
  Oligonucleotide for detection of SNP TSC0037199
racctctactact

SEQ ID NO: 147297 - DNA, 13 bp, Artificial Sequence
  Oligonucleotide for detection of SNP TSC0037199
agtagcggaggty

SEQ ID NO: 147298 - DNA, 13 bp, Artificial Sequence
  Oligonucleotide for detection of SNP TSC0037199
racctccgctact

SEQ ID NO: 147299 - DNA, 13 bp, Artificial Sequence
  Oligonucleotide for detection of SNP TSC0037201
aaattgagtattt

SEQ ID NO: 147300 - DNA, 13 bp, Artificial Sequence
  Oligonucleotide for detection of SNP TSC0037201
aaatactcaattt

SEQ ID NO: 147301 - DNA, 13 bp, Artificial Sequence
  Oligonucleotide for detection of SNP TSC0037201
aaattgtgtattt

SEQ ID NO: 147302 - DNA, 13 bp, Artificial Sequence
  Oligonucleotide for detection of SNP TSC0037201
aaatacacaattt

SEQ ID NO: 147303 - DNA, 13 bp, Artificial Sequence
  Oligonucleotide for detection of SNP TSC0037201
aaattgcgtattt

SEQ ID NO: 147304 - DNA, 13 bp, Artificial Sequence
  Oligonucleotide for detection of SNP TSC0037201
aaatacgcaattt

SEQ ID NO: 147305 - DNA, 13 bp, Artificial Sequence
  Oligonucleotide for detection of SNP TSC0037201
aaatatttagttt

SEQ ID NO: 147306 - DNA, 13 bp, Artificial Sequence
  Oligonucleotide for detection of SNP TSC0037201
aaactaaatattt

SEQ ID NO: 147307 - DNA, 13 bp, Artificial Sequence
  Oligonucleotide for detection of SNP TSC0037201
aaatatgtagttt

SEQ ID NO: 147308 - DNA, 13 bp, Artificial Sequence
  Oligonucleotide for detection of SNP TSC0037201
aaactacatattt

SEQ ID NO: 147309 - DNA, 13 bp, Artificial Sequence
  Oligonucleotide for detection of SNP TSC0037201
aaatacgtagttt

SEQ ID NO: 147310 - DNA, 13 bp, Artificial Sequence
  Oligonucleotide for detection of SNP TSC0037201
aaactacgtattt

SEQ ID NO: 147311 - DNA, 13 bp, Artificial Sequence
  Oligonucleotide for detection of SNP TSC0037202
atgttatggtgta

SEQ ID NO: 147312 - DNA, 13 bp, Artificial Sequence
  Oligonucleotide for detection of SNP TSC0037202
tacaccataacat

SEQ ID NO: 147313 - DNA, 13 bp, Artificial Sequence
  Oligonucleotide for detection of SNP TSC0037202
atgttacggtgta

SEQ ID NO: 147314 - DNA, 13 bp, Artificial Sequence
  Oligonucleotide for detection of SNP TSC0037202
tacaccgtaacat

SEQ ID NO: 147315 - DNA, 13 bp, Artificial Sequence
  Oligonucleotide for detection of SNP TSC0037202
tatattgtaatat

SEQ ID NO: 147316 - DNA, 13 bp, Artificial Sequence
  Oligonucleotide for detection of SNP TSC0037202
atattacaatata

SEQ ID NO: 147317 - DNA, 13 bp, Artificial Sequence
  Oligonucleotide for detection of SNP TSC0037202
tatattataatat

SEQ ID NO: 147318 - DNA, 13 bp, Artificial Sequence
  Oligonucleotide for detection of SNP TSC0037202
atattataatata

SEQ ID NO: 147319 - DNA, 13 bp, Artificial Sequence
  Oligonucleotide for detection of SNP TSC0037202
tatatcgtaatat

SEQ ID NO: 147320 - DNA, 13 bp, Artificial Sequence
  Oligonucleotide for detection of SNP TSC0037202
atattacgatata

SEQ ID NO: 147321 - DNA, 13 bp, Artificial Sequence
  Oligonucleotide for detection of SNP TSC0037206
tttaatgtttaaa

SEQ ID NO: 147322 - DNA, 13 bp, Artificial Sequence
  Oligonucleotide for detection of SNP TSC0037206
tttaaacattaaa

SEQ ID NO: 147323 - DNA, 13 bp, Artificial Sequence
  Oligonucleotide for detection of SNP TSC0037206
tttggggattaag

SEQ ID NO: 147324 - DNA, 13 bp, Artificial Sequence
  Oligonucleotide for detection of SNP TSC0037206
cttaatccccaaa

SEQ ID NO: 147325 - DNA, 13 bp, Artificial Sequence
  Oligonucleotide for detection of SNP TSC0037206
tttgggtattaag

SEQ ID NO: 147326 - DNA, 13 bp, Artificial Sequence
  Oligonucleotide for detection of SNP TSC0037206
cttaatacccaaa

SEQ ID NO: 147327 - DNA, 13 bp, Artificial Sequence
  Oligonucleotide for detection of SNP TSC0037212
gaaaaaaatagaa

SEQ ID NO: 147328 - DNA, 13 bp, Artificial Sequence
  Oligonucleotide for detection of SNP TSC0037212
ttctatttttttc

SEQ ID NO: 147329 - DNA, 13 bp, Artificial Sequence
  Oligonucleotide for detection of SNP TSC0037212
gaaaaatatagaa

SEQ ID NO: 147330 - DNA, 13 bp, Artificial Sequence
  Oligonucleotide for detection of SNP TSC0037212
ttctatatttttc

SEQ ID NO: 147331 - DNA, 13 bp, Artificial Sequence
  Oligonucleotide for detection of SNP TSC0037213
aataaatggagaa

SEQ ID NO: 147332 - DNA, 13 bp, Artificial Sequence
  Oligonucleotide for detection of SNP TSC0037213
ttctccatttatt

SEQ ID NO: 147333 - DNA, 13 bp, Artificial Sequence
  Oligonucleotide for detection of SNP TSC0037213
aataaacggagaa

SEQ ID NO: 147334 - DNA, 13 bp, Artificial Sequence
  Oligonucleotide for detection of SNP TSC0037213
ttctccgtttatt

SEQ ID NO: 147335 - DNA, 13 bp, Artificial Sequence
  Oligonucleotide for detection of SNP TSC0037214
tttttgataatat

SEQ ID NO: 147336 - DNA, 13 bp, Artificial Sequence
  Oligonucleotide for detection of SNP TSC0037214
atattatcaaaaa

SEQ ID NO: 147337 - DNA, 13 bp, Artificial Sequence
  Oligonucleotide for detection of SNP TSC0037214
tttttggtaatat

SEQ ID NO: 147338 - DNA, 13 bp, Artificial Sequence
  Oligonucleotide for detection of SNP TSC0037214
atattaccaaaaa

SEQ ID NO: 147339 - DNA, 13 bp, Artificial Sequence
  Oligonucleotide for detection of SNP TSC0037219
ttgatagttttag

SEQ ID NO: 147340 - DNA, 13 bp, Artificial Sequence
  Oligonucleotide for detection of SNP TSC0037219
ctaaaactatcaa

SEQ ID NO: 147341 - DNA, 13 bp, Artificial Sequence
  Oligonucleotide for detection of SNP TSC0037219
ttgataattttag

SEQ ID NO: 147342 - DNA, 13 bp, Artificial Sequence
  Oligonucleotide for detection of SNP TSC0037219
ctaaaattatcaa

SEQ ID NO: 147343 - DNA, 13 bp, Artificial Sequence
  Oligonucleotide for detection of SNP TSC0037221
agagttggaattt

SEQ ID NO: 147344 - DNA, 13 bp, Artificial Sequence
  Oligonucleotide for detection of SNP TSC0037221
aaattccaactct

SEQ ID NO: 147345 - DNA, 13 bp, Artificial Sequence
  Oligonucleotide for detection of SNP TSC0037221
agagttagaattt

SEQ ID NO: 147346 - DNA, 13 bp, Artificial Sequence
  Oligonucleotide for detection of SNP TSC0037221
aaattctaactct

SEQ ID NO: 147347 - DNA, 13 bp, Artificial Sequence
  Oligonucleotide for detection of SNP TSC0037222
tagggttattaay

SEQ ID NO: 147348 - DNA, 13 bp, Artificial Sequence
  Oligonucleotide for detection of SNP TSC0037222
rttaataacccta

SEQ ID NO: 147349 - DNA, 13 bp, Artificial Sequence
  Oligonucleotide for detection of SNP TSC0037222
tagggtgattaay

SEQ ID NO: 147350 - DNA, 13 bp, Artificial Sequence
  Oligonucleotide for detection of SNP TSC0037222
rttaatcacccta

SEQ ID NO: 147351 - DNA, 13 bp, Artificial Sequence
  Oligonucleotide for detection of SNP TSC0037222
tagggcgattaay

SEQ ID NO: 147352 - DNA, 13 bp, Artificial Sequence
  Oligonucleotide for detection of SNP TSC0037222
rttaatcgcccta

SEQ ID NO: 147353 - DNA, 13 bp, Artificial Sequence
  Oligonucleotide for detection of SNP TSC0037222
gttggtggtttta

SEQ ID NO: 147354 - DNA, 13 bp, Artificial Sequence
  Oligonucleotide for detection of SNP TSC0037222
taaaaccaccaac

SEQ ID NO: 147355 - DNA, 13 bp, Artificial Sequence
  Oligonucleotide for detection of SNP TSC0037222
gttggttgtttta

SEQ ID NO: 147356 - DNA, 13 bp, Artificial Sequence
  Oligonucleotide for detection of SNP TSC0037222
taaaacaaccaac

SEQ ID NO: 147357 - DNA, 13 bp, Artificial Sequence
  Oligonucleotide for detection of SNP TSC0037222
gttggtcgtttta

SEQ ID NO: 147358 - DNA, 13 bp, Artificial Sequence
  Oligonucleotide for detection of SNP TSC0037222
taaaacgaccaac

SEQ ID NO: 147359 - DNA, 13 bp, Artificial Sequence
  Oligonucleotide for detection of SNP TSC0037224
tgatgatgtgtty

SEQ ID NO: 147360 - DNA, 13 bp, Artificial Sequence
  Oligonucleotide for detection of SNP TSC0037224
raacacatcatca

SEQ ID NO: 147361 - DNA, 13 bp, Artificial Sequence
  Oligonucleotide for detection of SNP TSC0037224
tgatgacgtgtty

SEQ ID NO: 147362 - DNA, 13 bp, Artificial Sequence
  Oligonucleotide for detection of SNP TSC0037224
raacacgtcatca

SEQ ID NO: 147363 - DNA, 13 bp, Artificial Sequence
  Oligonucleotide for detection of SNP TSC0037224
gaatatgttatta

SEQ ID NO: 147364 - DNA, 13 bp, Artificial Sequence
  Oligonucleotide for detection of SNP TSC0037224
taataacatattc

SEQ ID NO: 147365 - DNA, 13 bp, Artificial Sequence
  Oligonucleotide for detection of SNP TSC0037224
gaatatattatta

SEQ ID NO: 147366 - DNA, 13 bp, Artificial Sequence
  Oligonucleotide for detection of SNP TSC0037224
taataatatattc

SEQ ID NO: 147367 - DNA, 13 bp, Artificial Sequence
  Oligonucleotide for detection of SNP TSC0037224
gaatacgttatta

SEQ ID NO: 147368 - DNA, 13 bp, Artificial Sequence
  Oligonucleotide for detection of SNP TSC0037224
taataacgtattc

SEQ ID NO: 147369 - DNA, 13 bp, Artificial Sequence
  Oligonucleotide for detection of SNP TSC0037225
gaagtaggtttgg

SEQ ID NO: 147370 - DNA, 13 bp, Artificial Sequence
  Oligonucleotide for detection of SNP TSC0037225
ccaaacctacttc

SEQ ID NO: 147371 - DNA, 13 bp, Artificial Sequence
  Oligonucleotide for detection of SNP TSC0037225
gaagtatgtttgg

SEQ ID NO: 147372 - DNA, 13 bp, Artificial Sequence
  Oligonucleotide for detection of SNP TSC0037225
ccaaacatacttc

SEQ ID NO: 147373 - DNA, 13 bp, Artificial Sequence
  Oligonucleotide for detection of SNP TSC0037225
ttaggtttgttty

SEQ ID NO: 147374 - DNA, 13 bp, Artificial Sequence
  Oligonucleotide for detection of SNP TSC0037225
raaacaaacctaa

SEQ ID NO: 147375 - DNA, 13 bp, Artificial Sequence
  Oligonucleotide for detection of SNP TSC0037225
ttaggtatgttty

SEQ ID NO: 147376 - DNA, 13 bp, Artificial Sequence
  Oligonucleotide for detection of SNP TSC0037225
raaacatacctaa

SEQ ID NO: 147377 - DNA, 13 bp, Artificial Sequence
  Oligonucleotide for detection of SNP TSC0037227
atgtttgtaatgy

SEQ ID NO: 147378 - DNA, 13 bp, Artificial Sequence
  Oligonucleotide for detection of SNP TSC0037227
rcattacaaacat

SEQ ID NO: 147379 - DNA, 13 bp, Artificial Sequence
  Oligonucleotide for detection of SNP TSC0037227
atgtttataatgy

SEQ ID NO: 147380 - DNA, 13 bp, Artificial Sequence
  Oligonucleotide for detection of SNP TSC0037227
rcattataaacat

SEQ ID NO: 147381 - DNA, 13 bp, Artificial Sequence
  Oligonucleotide for detection of SNP TSC0037230
ttgaggggtttay

SEQ ID NO: 147382 - DNA, 13 bp, Artificial Sequence
  Oligonucleotide for detection of SNP TSC0037230
rtaaacccctcaa

SEQ ID NO: 147383 - DNA, 13 bp, Artificial Sequence
  Oligonucleotide for detection of SNP TSC0037230
ttgaggagtttay

SEQ ID NO: 147384 - DNA, 13 bp, Artificial Sequence
  Oligonucleotide for detection of SNP TSC0037230
rtaaactcctcaa

SEQ ID NO: 147385 - DNA, 13 bp, Artificial Sequence
  Oligonucleotide for detection of SNP TSC0037230
tcgaggggtttay

SEQ ID NO: 147386 - DNA, 13 bp, Artificial Sequence
  Oligonucleotide for detection of SNP TSC0037230
rtaaacccctcga

SEQ ID NO: 147387 - DNA, 13 bp, Artificial Sequence
  Oligonucleotide for detection of SNP TSC0037230
tcgaggagtttay

SEQ ID NO: 147388 - DNA, 13 bp, Artificial Sequence
  Oligonucleotide for detection of SNP TSC0037230
rtaaactcctcga

SEQ ID NO: 147389 - DNA, 13 bp, Artificial Sequence
  Oligonucleotide for detection of SNP TSC0037231
ttgttaatagtaa

SEQ ID NO: 147390 - DNA, 13 bp, Artificial Sequence
  Oligonucleotide for detection of SNP TSC0037231
ttactattaacaa

SEQ ID NO: 147391 - DNA, 13 bp, Artificial Sequence
  Oligonucleotide for detection of SNP TSC0037231
ttgttagtagtaa

SEQ ID NO: 147392 - DNA, 13 bp, Artificial Sequence
  Oligonucleotide for detection of SNP TSC0037231
ttactactaacaa

SEQ ID NO: 147393 - DNA, 13 bp, Artificial Sequence
  Oligonucleotide for detection of SNP TSC0037238
aaagttggaagta

SEQ ID NO: 147394 - DNA, 13 bp, Artificial Sequence
  Oligonucleotide for detection of SNP TSC0037238
tacttccaacttt

SEQ ID NO: 147395 - DNA, 13 bp, Artificial Sequence
  Oligonucleotide for detection of SNP TSC0037238
aaagtttgaagta

SEQ ID NO: 147396 - DNA, 13 bp, Artificial Sequence
  Oligonucleotide for detection of SNP TSC0037238
tacttcaaacttt

SEQ ID NO: 147397 - DNA, 13 bp, Artificial Sequence
  Oligonucleotide for detection of SNP TSC0037238
tgtttttagtttt

SEQ ID NO: 147398 - DNA, 13 bp, Artificial Sequence
  Oligonucleotide for detection of SNP TSC0037238
aaaactaaaaaca

SEQ ID NO: 147399 - DNA, 13 bp, Artificial Sequence
  Oligonucleotide for detection of SNP TSC0037242
atattaaaatata

SEQ ID NO: 147400 - DNA, 13 bp, Artificial Sequence
  Oligonucleotide for detection of SNP TSC0037242
tatattttaatat

SEQ ID NO: 147401 - DNA, 13 bp, Artificial Sequence
  Oligonucleotide for detection of SNP TSC0037242
atattagaatata

SEQ ID NO: 147402 - DNA, 13 bp, Artificial Sequence
  Oligonucleotide for detection of SNP TSC0037242
tatattctaatat

SEQ ID NO: 147403 - DNA, 13 bp, Artificial Sequence
  Oligonucleotide for detection of SNP TSC0037243
tttaatggttttg

SEQ ID NO: 147404 - DNA, 13 bp, Artificial Sequence
  Oligonucleotide for detection of SNP TSC0037243
caaaaccattaaa

SEQ ID NO: 147405 - DNA, 13 bp, Artificial Sequence
  Oligonucleotide for detection of SNP TSC0037243
taggattattagg

SEQ ID NO: 147406 - DNA, 13 bp, Artificial Sequence
  Oligonucleotide for detection of SNP TSC0037243
cctaataatccta

SEQ ID NO: 147407 - DNA, 13 bp, Artificial Sequence
  Oligonucleotide for detection of SNP TSC0037243
taggataattagg

SEQ ID NO: 147408 - DNA, 13 bp, Artificial Sequence
  Oligonucleotide for detection of SNP TSC0037243
cctaattatccta

SEQ ID NO: 147409 - DNA, 13 bp, Artificial Sequence
  Oligonucleotide for detection of SNP TSC0037244
aggattttaggtt

SEQ ID NO: 147410 - DNA, 13 bp, Artificial Sequence
  Oligonucleotide for detection of SNP TSC0037244
aacctaaaatcct

SEQ ID NO: 147411 - DNA, 13 bp, Artificial Sequence
  Oligonucleotide for detection of SNP TSC0037244
aggattgtaggtt

SEQ ID NO: 147412 - DNA, 13 bp, Artificial Sequence
  Oligonucleotide for detection of SNP TSC0037244
aacctacaatcct

SEQ ID NO: 147413 - DNA, 13 bp, Artificial Sequence
  Oligonucleotide for detection of SNP TSC0037244
agtttagagtttt

SEQ ID NO: 147414 - DNA, 13 bp, Artificial Sequence
  Oligonucleotide for detection of SNP TSC0037244
aaaactctaaact

SEQ ID NO: 147415 - DNA, 13 bp, Artificial Sequence
  Oligonucleotide for detection of SNP TSC0037244
agtttatagtttt

SEQ ID NO: 147416 - DNA, 13 bp, Artificial Sequence
  Oligonucleotide for detection of SNP TSC0037244
aaaactataaact

SEQ ID NO: 147417 - DNA, 13 bp, Artificial Sequence
  Oligonucleotide for detection of SNP TSC0037245
aggttttggatgy

SEQ ID NO: 147418 - DNA, 13 bp, Artificial Sequence
  Oligonucleotide for detection of SNP TSC0037245
rcatccaaaacct

SEQ ID NO: 147419 - DNA, 13 bp, Artificial Sequence
  Oligonucleotide for detection of SNP TSC0037245
aggtttcggatgy

SEQ ID NO: 147420 - DNA, 13 bp, Artificial Sequence
  Oligonucleotide for detection of SNP TSC0037245
rcatccgaaacct

SEQ ID NO: 147421 - DNA, 13 bp, Artificial Sequence
  Oligonucleotide for detection of SNP TSC0037245
gtatttggagttt

SEQ ID NO: 147422 - DNA, 13 bp, Artificial Sequence
  Oligonucleotide for detection of SNP TSC0037245
aaactccaaatac

SEQ ID NO: 147423 - DNA, 13 bp, Artificial Sequence
  Oligonucleotide for detection of SNP TSC0037245
gtatttagagttt

SEQ ID NO: 147424 - DNA, 13 bp, Artificial Sequence
  Oligonucleotide for detection of SNP TSC0037245
aaactctaaatac

SEQ ID NO: 147425 - DNA, 13 bp, Artificial Sequence
  Oligonucleotide for detection of SNP TSC0037245
gtattcggagttt

SEQ ID NO: 147426 - DNA, 13 bp, Artificial Sequence
  Oligonucleotide for detection of SNP TSC0037245
aaactccgaatac

SEQ ID NO: 147427 - DNA, 13 bp, Artificial Sequence
  Oligonucleotide for detection of SNP TSC0037246
atgagcgatttat

SEQ ID NO: 147428 - DNA, 13 bp, Artificial Sequence
  Oligonucleotide for detection of SNP TSC0037246
ataaatcgctcat

SEQ ID NO: 147429 - DNA, 13 bp, Artificial Sequence
  Oligonucleotide for detection of SNP TSC0037246
atagattgtttat

SEQ ID NO: 147430 - DNA, 13 bp, Artificial Sequence
  Oligonucleotide for detection of SNP TSC0037246
ataaacaatctat

SEQ ID NO: 147431 - DNA, 13 bp, Artificial Sequence
  Oligonucleotide for detection of SNP TSC0037246
atagatcgtttat

SEQ ID NO: 147432 - DNA, 13 bp, Artificial Sequence
  Oligonucleotide for detection of SNP TSC0037246
ataaacgatctat

SEQ ID NO: 147433 - DNA, 13 bp, Artificial Sequence
  Oligonucleotide for detection of SNP TSC0037247
gagttttgtagga

SEQ ID NO: 147434 - DNA, 13 bp, Artificial Sequence
  Oligonucleotide for detection of SNP TSC0037247
tcctacaaaactc

SEQ ID NO: 147435 - DNA, 13 bp, Artificial Sequence
  Oligonucleotide for detection of SNP TSC0037247
gagtttcgtagga

SEQ ID NO: 147436 - DNA, 13 bp, Artificial Sequence
  Oligonucleotide for detection of SNP TSC0037247
tcctacgaaactc

SEQ ID NO: 147437 - DNA, 13 bp, Artificial Sequence
  Oligonucleotide for detection of SNP TSC0037247
ttttgcggggtty

SEQ ID NO: 147438 - DNA, 13 bp, Artificial Sequence
  Oligonucleotide for detection of SNP TSC0037247
raaccccgcaaaa

SEQ ID NO: 147439 - DNA, 13 bp, Artificial Sequence
  Oligonucleotide for detection of SNP TSC0037248
ttttgagtttttg

SEQ ID NO: 147440 - DNA, 13 bp, Artificial Sequence
  Oligonucleotide for detection of SNP TSC0037248
caaaaactcaaaa

SEQ ID NO: 147441 - DNA, 13 bp, Artificial Sequence
  Oligonucleotide for detection of SNP TSC0037249
agtaaagagagtg

SEQ ID NO: 147442 - DNA, 13 bp, Artificial Sequence
  Oligonucleotide for detection of SNP TSC0037249
cactctctttact

SEQ ID NO: 147443 - DNA, 13 bp, Artificial Sequence
  Oligonucleotide for detection of SNP TSC0037249
agtaaatagagtg

SEQ ID NO: 147444 - DNA, 13 bp, Artificial Sequence
  Oligonucleotide for detection of SNP TSC0037249
cactctatttact

SEQ ID NO: 147445 - DNA, 13 bp, Artificial Sequence
  Oligonucleotide for detection of SNP TSC0037250
gattaggttgtta

SEQ ID NO: 147446 - DNA, 13 bp, Artificial Sequence
  Oligonucleotide for detection of SNP TSC0037250
taacaacctaatc

SEQ ID NO: 147447 - DNA, 13 bp, Artificial Sequence
  Oligonucleotide for detection of SNP TSC0037250
gattagattgtta

SEQ ID NO: 147448 - DNA, 13 bp, Artificial Sequence
  Oligonucleotide for detection of SNP TSC0037250
taacaatctaatc

SEQ ID NO: 147449 - DNA, 13 bp, Artificial Sequence
  Oligonucleotide for detection of SNP TSC0037254
gggtataatgtgt

SEQ ID NO: 147450 - DNA, 13 bp, Artificial Sequence
  Oligonucleotide for detection of SNP TSC0037254
acacattataccc

SEQ ID NO: 147451 - DNA, 13 bp, Artificial Sequence
  Oligonucleotide for detection of SNP TSC0037254
gggtattatgtgt

SEQ ID NO: 147452 - DNA, 13 bp, Artificial Sequence
  Oligonucleotide for detection of SNP TSC0037254
acacataataccc

SEQ ID NO: 147453 - DNA, 13 bp, Artificial Sequence
  Oligonucleotide for detection of SNP TSC0037254
atatattatatty

SEQ ID NO: 147454 - DNA, 13 bp, Artificial Sequence
  Oligonucleotide for detection of SNP TSC0037254
raatataatatat

SEQ ID NO: 147455 - DNA, 13 bp, Artificial Sequence
  Oligonucleotide for detection of SNP TSC0037254
atatatgatatty

SEQ ID NO: 147456 - DNA, 13 bp, Artificial Sequence
  Oligonucleotide for detection of SNP TSC0037254
raatatcatatat

SEQ ID NO: 147457 - DNA, 13 bp, Artificial Sequence
  Oligonucleotide for detection of SNP TSC0037255
tttgggggggtgg

SEQ ID NO: 147458 - DNA, 13 bp, Artificial Sequence
  Oligonucleotide for detection of SNP TSC0037255
ccacccccccaaa

SEQ ID NO: 147459 - DNA, 13 bp, Artificial Sequence
  Oligonucleotide for detection of SNP TSC0037255
tttgggtgggtgg

SEQ ID NO: 147460 - DNA, 13 bp, Artificial Sequence
  Oligonucleotide for detection of SNP TSC0037255
ccacccacccaaa

SEQ ID NO: 147461 - DNA, 13 bp, Artificial Sequence
  Oligonucleotide for detection of SNP TSC0037255
ttatttttttagg

SEQ ID NO: 147462 - DNA, 13 bp, Artificial Sequence
  Oligonucleotide for detection of SNP TSC0037255
cctaaaaaaataa

SEQ ID NO: 147463 - DNA, 13 bp, Artificial Sequence
  Oligonucleotide for detection of SNP TSC0037255
ttatttatttagg

SEQ ID NO: 147464 - DNA, 13 bp, Artificial Sequence
  Oligonucleotide for detection of SNP TSC0037255
cctaaataaataa

SEQ ID NO: 147465 - DNA, 13 bp, Artificial Sequence
  Oligonucleotide for detection of SNP TSC0037256
ttgggggggtggg

SEQ ID NO: 147466 - DNA, 13 bp, Artificial Sequence
  Oligonucleotide for detection of SNP TSC0037256
cccacccccccaa

SEQ ID NO: 147467 - DNA, 13 bp, Artificial Sequence
  Oligonucleotide for detection of SNP TSC0037256
ttggggtggtggg

SEQ ID NO: 147468 - DNA, 13 bp, Artificial Sequence
  Oligonucleotide for detection of SNP TSC0037256
cccaccaccccaa

SEQ ID NO: 147469 - DNA, 13 bp, Artificial Sequence
  Oligonucleotide for detection of SNP TSC0037256
tttatttttttag

SEQ ID NO: 147470 - DNA, 13 bp, Artificial Sequence
  Oligonucleotide for detection of SNP TSC0037256
ctaaaaaaataaa

SEQ ID NO: 147471 - DNA, 13 bp, Artificial Sequence
  Oligonucleotide for detection of SNP TSC0037257
aaatttatgatta

SEQ ID NO: 147472 - DNA, 13 bp, Artificial Sequence
  Oligonucleotide for detection of SNP TSC0037257
taatcataaattt

SEQ ID NO: 147473 - DNA, 13 bp, Artificial Sequence
  Oligonucleotide for detection of SNP TSC0037257
aaatttgtgatta

SEQ ID NO: 147474 - DNA, 13 bp, Artificial Sequence
  Oligonucleotide for detection of SNP TSC0037257
taatcacaaattt

SEQ ID NO: 147475 - DNA, 13 bp, Artificial Sequence
  Oligonucleotide for detection of SNP TSC0037257
aaattcgtgatta

SEQ ID NO: 147476 - DNA, 13 bp, Artificial Sequence
  Oligonucleotide for detection of SNP TSC0037257
taatcacgaattt

SEQ ID NO: 147477 - DNA, 13 bp, Artificial Sequence
  Oligonucleotide for detection of SNP TSC0037257
tgattatgggttt

SEQ ID NO: 147478 - DNA, 13 bp, Artificial Sequence
  Oligonucleotide for detection of SNP TSC0037257
aaacccataatca

SEQ ID NO: 147479 - DNA, 13 bp, Artificial Sequence
  Oligonucleotide for detection of SNP TSC0037257
tgattacgggttt

SEQ ID NO: 147480 - DNA, 13 bp, Artificial Sequence
  Oligonucleotide for detection of SNP TSC0037257
aaacccgtaatca

SEQ ID NO: 147481 - DNA, 13 bp, Artificial Sequence
  Oligonucleotide for detection of SNP TSC0037259
ttggtagagatta

SEQ ID NO: 147482 - DNA, 13 bp, Artificial Sequence
  Oligonucleotide for detection of SNP TSC0037259
taatctctaccaa

SEQ ID NO: 147483 - DNA, 13 bp, Artificial Sequence
  Oligonucleotide for detection of SNP TSC0037260
ttttaatgtttaa

SEQ ID NO: 147484 - DNA, 13 bp, Artificial Sequence
  Oligonucleotide for detection of SNP TSC0037260
ttaaacattaaaa

SEQ ID NO: 147485 - DNA, 13 bp, Artificial Sequence
  Oligonucleotide for detection of SNP TSC0037260
ttttaacgtttaa

SEQ ID NO: 147486 - DNA, 13 bp, Artificial Sequence
  Oligonucleotide for detection of SNP TSC0037260
ttaaacgttaaaa

SEQ ID NO: 147487 - DNA, 13 bp, Artificial Sequence
  Oligonucleotide for detection of SNP TSC0037260
ttaggtgttggag

SEQ ID NO: 147488 - DNA, 13 bp, Artificial Sequence
  Oligonucleotide for detection of SNP TSC0037260
ctccaacacctaa

SEQ ID NO: 147489 - DNA, 13 bp, Artificial Sequence
  Oligonucleotide for detection of SNP TSC0037260
ttaggtattggag

SEQ ID NO: 147490 - DNA, 13 bp, Artificial Sequence
  Oligonucleotide for detection of SNP TSC0037260
ctccaatacctaa

SEQ ID NO: 147491 - DNA, 13 bp, Artificial Sequence
  Oligonucleotide for detection of SNP TSC0037260
ttaggcgttggag

SEQ ID NO: 147492 - DNA, 13 bp, Artificial Sequence
  Oligonucleotide for detection of SNP TSC0037260
ctccaacgcctaa

SEQ ID NO: 147493 - DNA, 13 bp, Artificial Sequence
  Oligonucleotide for detection of SNP TSC0037263
tttatggggggaa

SEQ ID NO: 147494 - DNA, 13 bp, Artificial Sequence
  Oligonucleotide for detection of SNP TSC0037263
ttccccccataaa

SEQ ID NO: 147495 - DNA, 13 bp, Artificial Sequence
  Oligonucleotide for detection of SNP TSC0037263
tttatgaggggaa

SEQ ID NO: 147496 - DNA, 13 bp, Artificial Sequence
  Oligonucleotide for detection of SNP TSC0037263
ttcccctcataaa

SEQ ID NO: 147497 - DNA, 13 bp, Artificial Sequence
  Oligonucleotide for detection of SNP TSC0037264
gatggaagaaatt

SEQ ID NO: 147498 - DNA, 13 bp, Artificial Sequence
  Oligonucleotide for detection of SNP TSC0037264
aatttcttccatc

SEQ ID NO: 147499 - DNA, 13 bp, Artificial Sequence
  Oligonucleotide for detection of SNP TSC0037264
gatggaggaaatt

SEQ ID NO: 147500 - DNA, 13 bp, Artificial Sequence
  Oligonucleotide for detection of SNP TSC0037264
aatttcctccatc

SEQ ID NO: 147501 - DNA, 13 bp, Artificial Sequence
  Oligonucleotide for detection of SNP TSC0037268
ttttggagattta

SEQ ID NO: 147502 - DNA, 13 bp, Artificial Sequence
  Oligonucleotide for detection of SNP TSC0037268
taaatctccaaaa

SEQ ID NO: 147503 - DNA, 13 bp, Artificial Sequence
  Oligonucleotide for detection of SNP TSC0037268
ttttggggattta

SEQ ID NO: 147504 - DNA, 13 bp, Artificial Sequence
  Oligonucleotide for detection of SNP TSC0037268
taaatccccaaaa

SEQ ID NO: 147505 - DNA, 13 bp, Artificial Sequence
  Oligonucleotide for detection of SNP TSC0037269
tttaggtaggaat

SEQ ID NO: 147506 - DNA, 13 bp, Artificial Sequence
  Oligonucleotide for detection of SNP TSC0037269
attcctacctaaa

SEQ ID NO: 147507 - DNA, 13 bp, Artificial Sequence
  Oligonucleotide for detection of SNP TSC0037269
tttaggaaggaat

SEQ ID NO: 147508 - DNA, 13 bp, Artificial Sequence
  Oligonucleotide for detection of SNP TSC0037269
attccttcctaaa

SEQ ID NO: 147509 - DNA, 13 bp, Artificial Sequence
  Oligonucleotide for detection of SNP TSC0037270
aatttttatggta

SEQ ID NO: 147510 - DNA, 13 bp, Artificial Sequence
  Oligonucleotide for detection of SNP TSC0037270
taccataaaaatt

SEQ ID NO: 147511 - DNA, 13 bp, Artificial Sequence
  Oligonucleotide for detection of SNP TSC0037270
aattttgatggta

SEQ ID NO: 147512 - DNA, 13 bp, Artificial Sequence
  Oligonucleotide for detection of SNP TSC0037270
taccatcaaaatt

SEQ ID NO: 147513 - DNA, 13 bp, Artificial Sequence
  Oligonucleotide for detection of SNP TSC0037270
aatttttacggta

SEQ ID NO: 147514 - DNA, 13 bp, Artificial Sequence
  Oligonucleotide for detection of SNP TSC0037270
taccgtaaaaatt

SEQ ID NO: 147515 - DNA, 13 bp, Artificial Sequence
  Oligonucleotide for detection of SNP TSC0037270
aattttgacggta

SEQ ID NO: 147516 - DNA, 13 bp, Artificial Sequence
  Oligonucleotide for detection of SNP TSC0037270
taccgtcaaaatt

SEQ ID NO: 147517 - DNA, 13 bp, Artificial Sequence
  Oligonucleotide for detection of SNP TSC0037270
tgttgtgagaatt

SEQ ID NO: 147518 - DNA, 13 bp, Artificial Sequence
  Oligonucleotide for detection of SNP TSC0037270
aattctcacaaca

SEQ ID NO: 147519 - DNA, 13 bp, Artificial Sequence
  Oligonucleotide for detection of SNP TSC0037270
tgttgttagaatt

SEQ ID NO: 147520 - DNA, 13 bp, Artificial Sequence
  Oligonucleotide for detection of SNP TSC0037270
aattctaacaaca

SEQ ID NO: 147521 - DNA, 13 bp, Artificial Sequence
  Oligonucleotide for detection of SNP TSC0037270
tgtcgtgagaatt

SEQ ID NO: 147522 - DNA, 13 bp, Artificial Sequence
  Oligonucleotide for detection of SNP TSC0037270
aattctcacgaca

SEQ ID NO: 147523 - DNA, 13 bp, Artificial Sequence
  Oligonucleotide for detection of SNP TSC0037270
tgtcgttagaatt

SEQ ID NO: 147524 - DNA, 13 bp, Artificial Sequence
  Oligonucleotide for detection of SNP TSC0037270
aattctaacgaca

SEQ ID NO: 147525 - DNA, 13 bp, Artificial Sequence
  Oligonucleotide for detection of SNP TSC0037271
agatttagattgg

SEQ ID NO: 147526 - DNA, 13 bp, Artificial Sequence
  Oligonucleotide for detection of SNP TSC0037271
ccaatctaaatct

SEQ ID NO: 147527 - DNA, 13 bp, Artificial Sequence
  Oligonucleotide for detection of SNP TSC0037271
agattttgattgg

SEQ ID NO: 147528 - DNA, 13 bp, Artificial Sequence
  Oligonucleotide for detection of SNP TSC0037271
ccaatcaaaatct

SEQ ID NO: 147529 - DNA, 13 bp, Artificial Sequence
  Oligonucleotide for detection of SNP TSC0037271
ttagtttggattt

SEQ ID NO: 147530 - DNA, 13 bp, Artificial Sequence
  Oligonucleotide for detection of SNP TSC0037271
aaatccaaactaa

SEQ ID NO: 147531 - DNA, 13 bp, Artificial Sequence
  Oligonucleotide for detection of SNP TSC0037271
ttagttaggattt

SEQ ID NO: 147532 - DNA, 13 bp, Artificial Sequence
  Oligonucleotide for detection of SNP TSC0037271
aaatcctaactaa

SEQ ID NO: 147533 - DNA, 13 bp, Artificial Sequence
  Oligonucleotide for detection of SNP TSC0037272
ataaatgataatt

SEQ ID NO: 147534 - DNA, 13 bp, Artificial Sequence
  Oligonucleotide for detection of SNP TSC0037272
aattatcatttat

SEQ ID NO: 147535 - DNA, 13 bp, Artificial Sequence
  Oligonucleotide for detection of SNP TSC0037272
ataaataataatt

SEQ ID NO: 147536 - DNA, 13 bp, Artificial Sequence
  Oligonucleotide for detection of SNP TSC0037272
aattattatttat

SEQ ID NO: 147537 - DNA, 13 bp, Artificial Sequence
  Oligonucleotide for detection of SNP TSC0037275
gtattaattgaga

SEQ ID NO: 147538 - DNA, 13 bp, Artificial Sequence
  Oligonucleotide for detection of SNP TSC0037275
tctcaattaatac

SEQ ID NO: 147539 - DNA, 13 bp, Artificial Sequence
  Oligonucleotide for detection of SNP TSC0037275
gtattagttgaga

SEQ ID NO: 147540 - DNA, 13 bp, Artificial Sequence
  Oligonucleotide for detection of SNP TSC0037275
tctcaactaatac

SEQ ID NO: 147541 - DNA, 13 bp, Artificial Sequence
  Oligonucleotide for detection of SNP TSC0037276
gtattgtgataag

SEQ ID NO: 147542 - DNA, 13 bp, Artificial Sequence
  Oligonucleotide for detection of SNP TSC0037276
cttatcacaatac

SEQ ID NO: 147543 - DNA, 13 bp, Artificial Sequence
  Oligonucleotide for detection of SNP TSC0037276
gtattgcgataag

SEQ ID NO: 147544 - DNA, 13 bp, Artificial Sequence
  Oligonucleotide for detection of SNP TSC0037276
cttatcgcaatac

SEQ ID NO: 147545 - DNA, 13 bp, Artificial Sequence
  Oligonucleotide for detection of SNP TSC0037276
tttattgtaatay

SEQ ID NO: 147546 - DNA, 13 bp, Artificial Sequence
  Oligonucleotide for detection of SNP TSC0037276
rtattacaataaa

SEQ ID NO: 147547 - DNA, 13 bp, Artificial Sequence
  Oligonucleotide for detection of SNP TSC0037276
tttattataatay

SEQ ID NO: 147548 - DNA, 13 bp, Artificial Sequence
  Oligonucleotide for detection of SNP TSC0037276
rtattataataaa

SEQ ID NO: 147549 - DNA, 13 bp, Artificial Sequence
  Oligonucleotide for detection of SNP TSC0037276
tttatcgtaatay

SEQ ID NO: 147550 - DNA, 13 bp, Artificial Sequence
  Oligonucleotide for detection of SNP TSC0037276
rtattacgataaa

SEQ ID NO: 147551 - DNA, 13 bp, Artificial Sequence
  Oligonucleotide for detection of SNP TSC0037279
gtagttaagttga

SEQ ID NO: 147552 - DNA, 13 bp, Artificial Sequence
  Oligonucleotide for detection of SNP TSC0037279
tcaacttaactac

SEQ ID NO: 147553 - DNA, 13 bp, Artificial Sequence
  Oligonucleotide for detection of SNP TSC0037279
gtagtttagttga

SEQ ID NO: 147554 - DNA, 13 bp, Artificial Sequence
  Oligonucleotide for detection of SNP TSC0037279
tcaactaaactac

SEQ ID NO: 147555 - DNA, 13 bp, Artificial Sequence
  Oligonucleotide for detection of SNP TSC0037279
ttaatttggttay

SEQ ID NO: 147556 - DNA, 13 bp, Artificial Sequence
  Oligonucleotide for detection of SNP TSC0037279
rtaaccaaattaa

SEQ ID NO: 147557 - DNA, 13 bp, Artificial Sequence
  Oligonucleotide for detection of SNP TSC0037279
ttaattgggttay

SEQ ID NO: 147558 - DNA, 13 bp, Artificial Sequence
  Oligonucleotide for detection of SNP TSC0037279
rtaacccaattaa

SEQ ID NO: 147559 - DNA, 13 bp, Artificial Sequence
  Oligonucleotide for detection of SNP TSC0037280
aaggttataaggy

SEQ ID NO: 147560 - DNA, 13 bp, Artificial Sequence
  Oligonucleotide for detection of SNP TSC0037280
rccttataacctt

SEQ ID NO: 147561 - DNA, 13 bp, Artificial Sequence
  Oligonucleotide for detection of SNP TSC0037280
aaggttgtaaggy

SEQ ID NO: 147562 - DNA, 13 bp, Artificial Sequence
  Oligonucleotide for detection of SNP TSC0037280
rccttacaacctt

SEQ ID NO: 147563 - DNA, 13 bp, Artificial Sequence
  Oligonucleotide for detection of SNP TSC0037281
aagagagttaggg

SEQ ID NO: 147564 - DNA, 13 bp, Artificial Sequence
  Oligonucleotide for detection of SNP TSC0037281
ccctaactctctt

SEQ ID NO: 147565 - DNA, 13 bp, Artificial Sequence
  Oligonucleotide for detection of SNP TSC0037281
aagagaattaggg

SEQ ID NO: 147566 - DNA, 13 bp, Artificial Sequence
  Oligonucleotide for detection of SNP TSC0037281
ccctaattctctt

SEQ ID NO: 147567 - DNA, 13 bp, Artificial Sequence
  Oligonucleotide for detection of SNP TSC0037284
taaattggggtaa

SEQ ID NO: 147568 - DNA, 13 bp, Artificial Sequence
  Oligonucleotide for detection of SNP TSC0037284
ttaccccaattta

SEQ ID NO: 147569 - DNA, 13 bp, Artificial Sequence
  Oligonucleotide for detection of SNP TSC0037284
taaatttgggtaa

SEQ ID NO: 147570 - DNA, 13 bp, Artificial Sequence
  Oligonucleotide for detection of SNP TSC0037284
ttacccaaattta

SEQ ID NO: 147571 - DNA, 13 bp, Artificial Sequence
  Oligonucleotide for detection of SNP TSC0037284
ttgttttagttta

SEQ ID NO: 147572 - DNA, 13 bp, Artificial Sequence
  Oligonucleotide for detection of SNP TSC0037284
taaactaaaacaa

SEQ ID NO: 147573 - DNA, 13 bp, Artificial Sequence
  Oligonucleotide for detection of SNP TSC0037285
ataagaaaagtga

SEQ ID NO: 147574 - DNA, 13 bp, Artificial Sequence
  Oligonucleotide for detection of SNP TSC0037285
tcacttttcttat

SEQ ID NO: 147575 - DNA, 13 bp, Artificial Sequence
  Oligonucleotide for detection of SNP TSC0037285
ataagagaagtga

SEQ ID NO: 147576 - DNA, 13 bp, Artificial Sequence
  Oligonucleotide for detection of SNP TSC0037285
tcacttctcttat

SEQ ID NO: 147577 - DNA, 13 bp, Artificial Sequence
  Oligonucleotide for detection of SNP TSC0037287
ttgttaatgaatg

SEQ ID NO: 147578 - DNA, 13 bp, Artificial Sequence
  Oligonucleotide for detection of SNP TSC0037287
cattcattaacaa

SEQ ID NO: 147579 - DNA, 13 bp, Artificial Sequence
  Oligonucleotide for detection of SNP TSC0037287
ttgttattgaatg

SEQ ID NO: 147580 - DNA, 13 bp, Artificial Sequence
  Oligonucleotide for detection of SNP TSC0037287
cattcaataacaa

SEQ ID NO: 147581 - DNA, 13 bp, Artificial Sequence
  Oligonucleotide for detection of SNP TSC0037287
tatttaatgatag

SEQ ID NO: 147582 - DNA, 13 bp, Artificial Sequence
  Oligonucleotide for detection of SNP TSC0037287
ctatcattaaata

SEQ ID NO: 147583 - DNA, 13 bp, Artificial Sequence
  Oligonucleotide for detection of SNP TSC0037288
tattttgatgttt

SEQ ID NO: 147584 - DNA, 13 bp, Artificial Sequence
  Oligonucleotide for detection of SNP TSC0037288
aaacatcaaaata

SEQ ID NO: 147585 - DNA, 13 bp, Artificial Sequence
  Oligonucleotide for detection of SNP TSC0037290
aaataatgtttga

SEQ ID NO: 147586 - DNA, 13 bp, Artificial Sequence
  Oligonucleotide for detection of SNP TSC0037290
tcaaacattattt

SEQ ID NO: 147587 - DNA, 13 bp, Artificial Sequence
  Oligonucleotide for detection of SNP TSC0037290
aaataaagtttga

SEQ ID NO: 147588 - DNA, 13 bp, Artificial Sequence
  Oligonucleotide for detection of SNP TSC0037290
tcaaactttattt

SEQ ID NO: 147589 - DNA, 13 bp, Artificial Sequence
  Oligonucleotide for detection of SNP TSC0037291
atgtattttttty

SEQ ID NO: 147590 - DNA, 13 bp, Artificial Sequence
  Oligonucleotide for detection of SNP TSC0037291
raaaaaaatacat

SEQ ID NO: 147591 - DNA, 13 bp, Artificial Sequence
  Oligonucleotide for detection of SNP TSC0037291
atgtatgttttty

SEQ ID NO: 147592 - DNA, 13 bp, Artificial Sequence
  Oligonucleotide for detection of SNP TSC0037291
raaaaacatacat

SEQ ID NO: 147593 - DNA, 13 bp, Artificial Sequence
  Oligonucleotide for detection of SNP TSC0037291
gaaaaggatatat

SEQ ID NO: 147594 - DNA, 13 bp, Artificial Sequence
  Oligonucleotide for detection of SNP TSC0037291
atatatccttttc

SEQ ID NO: 147595 - DNA, 13 bp, Artificial Sequence
  Oligonucleotide for detection of SNP TSC0037291
gaaaagtatatat

SEQ ID NO: 147596 - DNA, 13 bp, Artificial Sequence
  Oligonucleotide for detection of SNP TSC0037291
atatatacttttc

SEQ ID NO: 147597 - DNA, 13 bp, Artificial Sequence
  Oligonucleotide for detection of SNP TSC0037295
gtataagtagata

SEQ ID NO: 147598 - DNA, 13 bp, Artificial Sequence
  Oligonucleotide for detection of SNP TSC0037295
tatctacttatac

SEQ ID NO: 147599 - DNA, 13 bp, Artificial Sequence
  Oligonucleotide for detection of SNP TSC0037295
gtataaatagata

SEQ ID NO: 147600 - DNA, 13 bp, Artificial Sequence
  Oligonucleotide for detection of SNP TSC0037295
tatctatttatac

SEQ ID NO: 147601 - DNA, 13 bp, Artificial Sequence
  Oligonucleotide for detection of SNP TSC0037298
tttattatgggtt

SEQ ID NO: 147602 - DNA, 13 bp, Artificial Sequence
  Oligonucleotide for detection of SNP TSC0037298
aacccataataaa

SEQ ID NO: 147603 - DNA, 13 bp, Artificial Sequence
  Oligonucleotide for detection of SNP TSC0037298
tttattgtgggtt

SEQ ID NO: 147604 - DNA, 13 bp, Artificial Sequence
  Oligonucleotide for detection of SNP TSC0037298
aacccacaataaa

SEQ ID NO: 147605 - DNA, 13 bp, Artificial Sequence
  Oligonucleotide for detection of SNP TSC0037298
tttatcgtgggtt

SEQ ID NO: 147606 - DNA, 13 bp, Artificial Sequence
  Oligonucleotide for detection of SNP TSC0037298
aacccacgataaa

SEQ ID NO: 147607 - DNA, 13 bp, Artificial Sequence
  Oligonucleotide for detection of SNP TSC0037300
attatattttatt

SEQ ID NO: 147608 - DNA, 13 bp, Artificial Sequence
  Oligonucleotide for detection of SNP TSC0037300
aataaaatataat

SEQ ID NO: 147609 - DNA, 13 bp, Artificial Sequence
  Oligonucleotide for detection of SNP TSC0037300
agtgagttatgat

SEQ ID NO: 147610 - DNA, 13 bp, Artificial Sequence
  Oligonucleotide for detection of SNP TSC0037300
atcataactcact

SEQ ID NO: 147611 - DNA, 13 bp, Artificial Sequence
  Oligonucleotide for detection of SNP TSC0037300
agtgagatatgat

SEQ ID NO: 147612 - DNA, 13 bp, Artificial Sequence
  Oligonucleotide for detection of SNP TSC0037300
atcatatctcact

SEQ ID NO: 147613 - DNA, 13 bp, Artificial Sequence
  Oligonucleotide for detection of SNP TSC0037302
ttttttggtgtga

SEQ ID NO: 147614 - DNA, 13 bp, Artificial Sequence
  Oligonucleotide for detection of SNP TSC0037302
tcacaccaaaaaa

SEQ ID NO: 147615 - DNA, 13 bp, Artificial Sequence
  Oligonucleotide for detection of SNP TSC0037302
ttttttagcgtga

SEQ ID NO: 147616 - DNA, 13 bp, Artificial Sequence
  Oligonucleotide for detection of SNP TSC0037302
tcacgctaaaaaa

SEQ ID NO: 147617 - DNA, 13 bp, Artificial Sequence
  Oligonucleotide for detection of SNP TSC0037302
ttttttggcgtga

SEQ ID NO: 147618 - DNA, 13 bp, Artificial Sequence
  Oligonucleotide for detection of SNP TSC0037302
tcacgccaaaaaa

SEQ ID NO: 147619 - DNA, 13 bp, Artificial Sequence
  Oligonucleotide for detection of SNP TSC0037303
ttagttttgttaa

SEQ ID NO: 147620 - DNA, 13 bp, Artificial Sequence
  Oligonucleotide for detection of SNP TSC0037303
ttaacaaaactaa

SEQ ID NO: 147621 - DNA, 13 bp, Artificial Sequence
  Oligonucleotide for detection of SNP TSC0037303
ttagttgtgttaa

SEQ ID NO: 147622 - DNA, 13 bp, Artificial Sequence
  Oligonucleotide for detection of SNP TSC0037303
ttaacacaactaa

SEQ ID NO: 147623 - DNA, 13 bp, Artificial Sequence
  Oligonucleotide for detection of SNP TSC0037303
ttaatagaattga

SEQ ID NO: 147624 - DNA, 13 bp, Artificial Sequence
  Oligonucleotide for detection of SNP TSC0037303
tcaattctattaa

SEQ ID NO: 147625 - DNA, 13 bp, Artificial Sequence
  Oligonucleotide for detection of SNP TSC0037303
ttaatataattga

SEQ ID NO: 147626 - DNA, 13 bp, Artificial Sequence
  Oligonucleotide for detection of SNP TSC0037303
tcaattatattaa

SEQ ID NO: 147627 - DNA, 13 bp, Artificial Sequence
  Oligonucleotide for detection of SNP TSC0037305
tataaggataaaa

SEQ ID NO: 147628 - DNA, 13 bp, Artificial Sequence
  Oligonucleotide for detection of SNP TSC0037305
ttttatccttata

SEQ ID NO: 147629 - DNA, 13 bp, Artificial Sequence
  Oligonucleotide for detection of SNP TSC0037305
tataagaataaaa

SEQ ID NO: 147630 - DNA, 13 bp, Artificial Sequence
  Oligonucleotide for detection of SNP TSC0037305
ttttattcttata

SEQ ID NO: 147631 - DNA, 13 bp, Artificial Sequence
  Oligonucleotide for detection of SNP TSC0037308
gttgttaatagtg

SEQ ID NO: 147632 - DNA, 13 bp, Artificial Sequence
  Oligonucleotide for detection of SNP TSC0037308
cactattaacaac

SEQ ID NO: 147633 - DNA, 13 bp, Artificial Sequence
  Oligonucleotide for detection of SNP TSC0037308
gttgttgatagtg

SEQ ID NO: 147634 - DNA, 13 bp, Artificial Sequence
  Oligonucleotide for detection of SNP TSC0037308
cactatcaacaac

SEQ ID NO: 147635 - DNA, 13 bp, Artificial Sequence
  Oligonucleotide for detection of SNP TSC0037308
gttgtcgatagtg

SEQ ID NO: 147636 - DNA, 13 bp, Artificial Sequence
  Oligonucleotide for detection of SNP TSC0037308
cactatcgacaac

SEQ ID NO: 147637 - DNA, 13 bp, Artificial Sequence
  Oligonucleotide for detection of SNP TSC0037308
tattattggtagy

SEQ ID NO: 147638 - DNA, 13 bp, Artificial Sequence
  Oligonucleotide for detection of SNP TSC0037308
rctaccaataata

SEQ ID NO: 147639 - DNA, 13 bp, Artificial Sequence
  Oligonucleotide for detection of SNP TSC0037308
tattatcggtagy

SEQ ID NO: 147640 - DNA, 13 bp, Artificial Sequence
  Oligonucleotide for detection of SNP TSC0037308
rctaccgataata

SEQ ID NO: 147641 - DNA, 13 bp, Artificial Sequence
  Oligonucleotide for detection of SNP TSC0037309
tattgtggaaggy

SEQ ID NO: 147642 - DNA, 13 bp, Artificial Sequence
  Oligonucleotide for detection of SNP TSC0037309
rccttccacaata

SEQ ID NO: 147643 - DNA, 13 bp, Artificial Sequence
  Oligonucleotide for detection of SNP TSC0037309
tattgttgaaggy

SEQ ID NO: 147644 - DNA, 13 bp, Artificial Sequence
  Oligonucleotide for detection of SNP TSC0037309
rccttcaacaata

SEQ ID NO: 147645 - DNA, 13 bp, Artificial Sequence
  Oligonucleotide for detection of SNP TSC0037309
tattgcggaaggy

SEQ ID NO: 147646 - DNA, 13 bp, Artificial Sequence
  Oligonucleotide for detection of SNP TSC0037309
rccttccgcaata

SEQ ID NO: 147647 - DNA, 13 bp, Artificial Sequence
  Oligonucleotide for detection of SNP TSC0037309
gttttttgtagtg

SEQ ID NO: 147648 - DNA, 13 bp, Artificial Sequence
  Oligonucleotide for detection of SNP TSC0037309
cactacaaaaaac

SEQ ID NO: 147649 - DNA, 13 bp, Artificial Sequence
  Oligonucleotide for detection of SNP TSC0037309
gtttttagtagtg

SEQ ID NO: 147650 - DNA, 13 bp, Artificial Sequence
  Oligonucleotide for detection of SNP TSC0037309
cactactaaaaac

SEQ ID NO: 147651 - DNA, 13 bp, Artificial Sequence
  Oligonucleotide for detection of SNP TSC0037309
gtttttcgtagtg

SEQ ID NO: 147652 - DNA, 13 bp, Artificial Sequence
  Oligonucleotide for detection of SNP TSC0037309
cactacgaaaaac

SEQ ID NO: 147653 - DNA, 13 bp, Artificial Sequence
  Oligonucleotide for detection of SNP TSC0037310
agatttgaaagty

SEQ ID NO: 147654 - DNA, 13 bp, Artificial Sequence
  Oligonucleotide for detection of SNP TSC0037310
ractttcaaatct

SEQ ID NO: 147655 - DNA, 13 bp, Artificial Sequence
  Oligonucleotide for detection of SNP TSC0037310
agatttaaaagty

SEQ ID NO: 147656 - DNA, 13 bp, Artificial Sequence
  Oligonucleotide for detection of SNP TSC0037310
racttttaaatct

SEQ ID NO: 147657 - DNA, 13 bp, Artificial Sequence
  Oligonucleotide for detection of SNP TSC0037311
agggtaaaattga

SEQ ID NO: 147658 - DNA, 13 bp, Artificial Sequence
  Oligonucleotide for detection of SNP TSC0037311
tcaattttaccct

SEQ ID NO: 147659 - DNA, 13 bp, Artificial Sequence
  Oligonucleotide for detection of SNP TSC0037311
agggtataattga

SEQ ID NO: 147660 - DNA, 13 bp, Artificial Sequence
  Oligonucleotide for detection of SNP TSC0037311
tcaattataccct

SEQ ID NO: 147661 - DNA, 13 bp, Artificial Sequence
  Oligonucleotide for detection of SNP TSC0037311
ttaattttatttt

SEQ ID NO: 147662 - DNA, 13 bp, Artificial Sequence
  Oligonucleotide for detection of SNP TSC0037311
aaaataaaattaa

SEQ ID NO: 147663 - DNA, 13 bp, Artificial Sequence
  Oligonucleotide for detection of SNP TSC0037312
aaatatttgtgta

SEQ ID NO: 147664 - DNA, 13 bp, Artificial Sequence
  Oligonucleotide for detection of SNP TSC0037312
tacacaaatattt

SEQ ID NO: 147665 - DNA, 13 bp, Artificial Sequence
  Oligonucleotide for detection of SNP TSC0037312
aaatatgtgtgta

SEQ ID NO: 147666 - DNA, 13 bp, Artificial Sequence
  Oligonucleotide for detection of SNP TSC0037312
tacacacatattt

SEQ ID NO: 147667 - DNA, 13 bp, Artificial Sequence
  Oligonucleotide for detection of SNP TSC0037312
aaatacgtgtgta

SEQ ID NO: 147668 - DNA, 13 bp, Artificial Sequence
  Oligonucleotide for detection of SNP TSC0037312
tacacacgtattt

SEQ ID NO: 147669 - DNA, 13 bp, Artificial Sequence
  Oligonucleotide for detection of SNP TSC0037312
tgtataagtgttt

SEQ ID NO: 147670 - DNA, 13 bp, Artificial Sequence
  Oligonucleotide for detection of SNP TSC0037312
aaacacttataca

SEQ ID NO: 147671 - DNA, 13 bp, Artificial Sequence
  Oligonucleotide for detection of SNP TSC0037312
tgtatatgtgttt

SEQ ID NO: 147672 - DNA, 13 bp, Artificial Sequence
  Oligonucleotide for detection of SNP TSC0037312
aaacacatataca

SEQ ID NO: 147673 - DNA, 13 bp, Artificial Sequence
  Oligonucleotide for detection of SNP TSC0037312
tgtatacgtgttt

SEQ ID NO: 147674 - DNA, 13 bp, Artificial Sequence
  Oligonucleotide for detection of SNP TSC0037312
aaacacgtataca

SEQ ID NO: 147675 - DNA, 13 bp, Artificial Sequence
  Oligonucleotide for detection of SNP TSC0037314
tgtattattttta

SEQ ID NO: 147676 - DNA, 13 bp, Artificial Sequence
  Oligonucleotide for detection of SNP TSC0037314
taaaaataataca

SEQ ID NO: 147677 - DNA, 13 bp, Artificial Sequence
  Oligonucleotide for detection of SNP TSC0037314
tgtattgttttta

SEQ ID NO: 147678 - DNA, 13 bp, Artificial Sequence
  Oligonucleotide for detection of SNP TSC0037314
taaaaacaataca

SEQ ID NO: 147679 - DNA, 13 bp, Artificial Sequence
  Oligonucleotide for detection of SNP TSC0037314
tgtatcgttttta

SEQ ID NO: 147680 - DNA, 13 bp, Artificial Sequence
  Oligonucleotide for detection of SNP TSC0037314
taaaaacgataca

SEQ ID NO: 147681 - DNA, 13 bp, Artificial Sequence
  Oligonucleotide for detection of SNP TSC0037314
tggagatggtgta

SEQ ID NO: 147682 - DNA, 13 bp, Artificial Sequence
  Oligonucleotide for detection of SNP TSC0037314
tacaccatctcca

SEQ ID NO: 147683 - DNA, 13 bp, Artificial Sequence
  Oligonucleotide for detection of SNP TSC0037314
tggagacggtgta

SEQ ID NO: 147684 - DNA, 13 bp, Artificial Sequence
  Oligonucleotide for detection of SNP TSC0037314
tacaccgtctcca

SEQ ID NO: 147685 - DNA, 13 bp, Artificial Sequence
  Oligonucleotide for detection of SNP TSC0037315
gattagtgtggay

SEQ ID NO: 147686 - DNA, 13 bp, Artificial Sequence
  Oligonucleotide for detection of SNP TSC0037315
rtccacactaatc

SEQ ID NO: 147687 - DNA, 13 bp, Artificial Sequence
  Oligonucleotide for detection of SNP TSC0037315
gattagcgtggay

SEQ ID NO: 147688 - DNA, 13 bp, Artificial Sequence
  Oligonucleotide for detection of SNP TSC0037315
rtccacgctaatc

SEQ ID NO: 147689 - DNA, 13 bp, Artificial Sequence
  Oligonucleotide for detection of SNP TSC0037315
gtttatgttggty

SEQ ID NO: 147690 - DNA, 13 bp, Artificial Sequence
  Oligonucleotide for detection of SNP TSC0037315
raccaacataaac

SEQ ID NO: 147691 - DNA, 13 bp, Artificial Sequence
  Oligonucleotide for detection of SNP TSC0037315
gtttatattggty

SEQ ID NO: 147692 - DNA, 13 bp, Artificial Sequence
  Oligonucleotide for detection of SNP TSC0037315
raccaatataaac

SEQ ID NO: 147693 - DNA, 13 bp, Artificial Sequence
  Oligonucleotide for detection of SNP TSC0037315
gtttacgttggty

SEQ ID NO: 147694 - DNA, 13 bp, Artificial Sequence
  Oligonucleotide for detection of SNP TSC0037315
raccaacgtaaac

SEQ ID NO: 147695 - DNA, 13 bp, Artificial Sequence
  Oligonucleotide for detection of SNP TSC0037316
atttatattatty

SEQ ID NO: 147696 - DNA, 13 bp, Artificial Sequence
  Oligonucleotide for detection of SNP TSC0037316
raataatataaat

SEQ ID NO: 147697 - DNA, 13 bp, Artificial Sequence
  Oligonucleotide for detection of SNP TSC0037316
atttatgttatty

SEQ ID NO: 147698 - DNA, 13 bp, Artificial Sequence
  Oligonucleotide for detection of SNP TSC0037316
raataacataaat

SEQ ID NO: 147699 - DNA, 13 bp, Artificial Sequence
  Oligonucleotide for detection of SNP TSC0037316
atttacgttatty

SEQ ID NO: 147700 - DNA, 13 bp, Artificial Sequence
  Oligonucleotide for detection of SNP TSC0037316
raataacgtaaat

SEQ ID NO: 147701 - DNA, 13 bp, Artificial Sequence
  Oligonucleotide for detection of SNP TSC0037316
gagtggtgtgaat

SEQ ID NO: 147702 - DNA, 13 bp, Artificial Sequence
  Oligonucleotide for detection of SNP TSC0037316
attcacaccactc

SEQ ID NO: 147703 - DNA, 13 bp, Artificial Sequence
  Oligonucleotide for detection of SNP TSC0037316
gagtggcgtgaat

SEQ ID NO: 147704 - DNA, 13 bp, Artificial Sequence
  Oligonucleotide for detection of SNP TSC0037316
attcacgccactc

SEQ ID NO: 147705 - DNA, 13 bp, Artificial Sequence
  Oligonucleotide for detection of SNP TSC0037318
ttgtatatttgta

SEQ ID NO: 147706 - DNA, 13 bp, Artificial Sequence
  Oligonucleotide for detection of SNP TSC0037318
tacaaatatacaa

SEQ ID NO: 147707 - DNA, 13 bp, Artificial Sequence
  Oligonucleotide for detection of SNP TSC0037318
ttgtacgtttgta

SEQ ID NO: 147708 - DNA, 13 bp, Artificial Sequence
  Oligonucleotide for detection of SNP TSC0037318
tacaaacgtacaa

SEQ ID NO: 147709 - DNA, 13 bp, Artificial Sequence
  Oligonucleotide for detection of SNP TSC0037318
tgtagatgtatag

SEQ ID NO: 147710 - DNA, 13 bp, Artificial Sequence
  Oligonucleotide for detection of SNP TSC0037318
ctatacatctaca

SEQ ID NO: 147711 - DNA, 13 bp, Artificial Sequence
  Oligonucleotide for detection of SNP TSC0037318
tgtagacgtatag

SEQ ID NO: 147712 - DNA, 13 bp, Artificial Sequence
  Oligonucleotide for detection of SNP TSC0037318
ctatacgtctaca

SEQ ID NO: 147713 - DNA, 13 bp, Artificial Sequence
  Oligonucleotide for detection of SNP TSC0037319
aagtagattttag

SEQ ID NO: 147714 - DNA, 13 bp, Artificial Sequence
  Oligonucleotide for detection of SNP TSC0037319
ctaaaatctactt

SEQ ID NO: 147715 - DNA, 13 bp, Artificial Sequence
  Oligonucleotide for detection of SNP TSC0037319
aagtagtttttag

SEQ ID NO: 147716 - DNA, 13 bp, Artificial Sequence
  Oligonucleotide for detection of SNP TSC0037319
ctaaaaactactt

SEQ ID NO: 147717 - DNA, 13 bp, Artificial Sequence
  Oligonucleotide for detection of SNP TSC0037319
ttagaatttgttt

SEQ ID NO: 147718 - DNA, 13 bp, Artificial Sequence
  Oligonucleotide for detection of SNP TSC0037319
aaacaaattctaa

SEQ ID NO: 147719 - DNA, 13 bp, Artificial Sequence
  Oligonucleotide for detection of SNP TSC0037319
ttagaaattgttt

SEQ ID NO: 147720 - DNA, 13 bp, Artificial Sequence
  Oligonucleotide for detection of SNP TSC0037319
aaacaatttctaa

SEQ ID NO: 147721 - DNA, 13 bp, Artificial Sequence
  Oligonucleotide for detection of SNP TSC0037320
tattgtattttcg

SEQ ID NO: 147722 - DNA, 13 bp, Artificial Sequence
  Oligonucleotide for detection of SNP TSC0037320
cgaaaatacaata

SEQ ID NO: 147723 - DNA, 13 bp, Artificial Sequence
  Oligonucleotide for detection of SNP TSC0037320
tattgttttttcg

SEQ ID NO: 147724 - DNA, 13 bp, Artificial Sequence
  Oligonucleotide for detection of SNP TSC0037320
cgaaaaaacaata

SEQ ID NO: 147725 - DNA, 13 bp, Artificial Sequence
  Oligonucleotide for detection of SNP TSC0037320
tgagagtgtagtg

SEQ ID NO: 147726 - DNA, 13 bp, Artificial Sequence
  Oligonucleotide for detection of SNP TSC0037320
cactacactctca

SEQ ID NO: 147727 - DNA, 13 bp, Artificial Sequence
  Oligonucleotide for detection of SNP TSC0037320
tgagagggtagtg

SEQ ID NO: 147728 - DNA, 13 bp, Artificial Sequence
  Oligonucleotide for detection of SNP TSC0037320
cactaccctctca

SEQ ID NO: 147729 - DNA, 13 bp, Artificial Sequence
  Oligonucleotide for detection of SNP TSC0037320
cgagagtgtagtg

SEQ ID NO: 147730 - DNA, 13 bp, Artificial Sequence
  Oligonucleotide for detection of SNP TSC0037320
cactacactctcg

SEQ ID NO: 147731 - DNA, 13 bp, Artificial Sequence
  Oligonucleotide for detection of SNP TSC0037320
cgagagggtagtg

SEQ ID NO: 147732 - DNA, 13 bp, Artificial Sequence
  Oligonucleotide for detection of SNP TSC0037320
cactaccctctcg

SEQ ID NO: 147733 - DNA, 13 bp, Artificial Sequence
  Oligonucleotide for detection of SNP TSC0037321
ttagttatggttg

SEQ ID NO: 147734 - DNA, 13 bp, Artificial Sequence
  Oligonucleotide for detection of SNP TSC0037321
caaccataactaa

SEQ ID NO: 147735 - DNA, 13 bp, Artificial Sequence
  Oligonucleotide for detection of SNP TSC0037321
ttagttttggttg

SEQ ID NO: 147736 - DNA, 13 bp, Artificial Sequence
  Oligonucleotide for detection of SNP TSC0037321
caaccaaaactaa

SEQ ID NO: 147737 - DNA, 13 bp, Artificial Sequence
  Oligonucleotide for detection of SNP TSC0037321
ttagttatggtcg

SEQ ID NO: 147738 - DNA, 13 bp, Artificial Sequence
  Oligonucleotide for detection of SNP TSC0037321
cgaccataactaa

SEQ ID NO: 147739 - DNA, 13 bp, Artificial Sequence
  Oligonucleotide for detection of SNP TSC0037321
ttagttttggtcg

SEQ ID NO: 147740 - DNA, 13 bp, Artificial Sequence
  Oligonucleotide for detection of SNP TSC0037321
cgaccaaaactaa

SEQ ID NO: 147741 - DNA, 13 bp, Artificial Sequence
  Oligonucleotide for detection of SNP TSC0037321
tgattatggttag

SEQ ID NO: 147742 - DNA, 13 bp, Artificial Sequence
  Oligonucleotide for detection of SNP TSC0037321
ctaaccataatca

SEQ ID NO: 147743 - DNA, 13 bp, Artificial Sequence
  Oligonucleotide for detection of SNP TSC0037321
tgattagggttag

SEQ ID NO: 147744 - DNA, 13 bp, Artificial Sequence
  Oligonucleotide for detection of SNP TSC0037321
ctaaccctaatca

SEQ ID NO: 147745 - DNA, 13 bp, Artificial Sequence
  Oligonucleotide for detection of SNP TSC0037321
cgattatggttag

SEQ ID NO: 147746 - DNA, 13 bp, Artificial Sequence
  Oligonucleotide for detection of SNP TSC0037321
ctaaccataatcg

SEQ ID NO: 147747 - DNA, 13 bp, Artificial Sequence
  Oligonucleotide for detection of SNP TSC0037321
cgattagggttag

SEQ ID NO: 147748 - DNA, 13 bp, Artificial Sequence
  Oligonucleotide for detection of SNP TSC0037321
ctaaccctaatcg

SEQ ID NO: 147749 - DNA, 13 bp, Artificial Sequence
  Oligonucleotide for detection of SNP TSC0037322
atattggttatta

SEQ ID NO: 147750 - DNA, 13 bp, Artificial Sequence
  Oligonucleotide for detection of SNP TSC0037322
taataaccaatat

SEQ ID NO: 147751 - DNA, 13 bp, Artificial Sequence
  Oligonucleotide for detection of SNP TSC0037322
atattgattatta

SEQ ID NO: 147752 - DNA, 13 bp, Artificial Sequence
  Oligonucleotide for detection of SNP TSC0037322
taataatcaatat

SEQ ID NO: 147753 - DNA, 13 bp, Artificial Sequence
  Oligonucleotide for detection of SNP TSC0037323
aaagaaggttttg

SEQ ID NO: 147754 - DNA, 13 bp, Artificial Sequence
  Oligonucleotide for detection of SNP TSC0037323
caaaaccttcttt

SEQ ID NO: 147755 - DNA, 13 bp, Artificial Sequence
  Oligonucleotide for detection of SNP TSC0037323
aaagaaagttttg

SEQ ID NO: 147756 - DNA, 13 bp, Artificial Sequence
  Oligonucleotide for detection of SNP TSC0037323
caaaactttcttt

SEQ ID NO: 147757 - DNA, 13 bp, Artificial Sequence
  Oligonucleotide for detection of SNP TSC0037324
tttttgggtggty

SEQ ID NO: 147758 - DNA, 13 bp, Artificial Sequence
  Oligonucleotide for detection of SNP TSC0037324
raccacccaaaaa

SEQ ID NO: 147759 - DNA, 13 bp, Artificial Sequence
  Oligonucleotide for detection of SNP TSC0037324
tttttgagtggty

SEQ ID NO: 147760 - DNA, 13 bp, Artificial Sequence
  Oligonucleotide for detection of SNP TSC0037324
raccactcaaaaa

SEQ ID NO: 147761 - DNA, 13 bp, Artificial Sequence
  Oligonucleotide for detection of SNP TSC0037324
ttttcgggtggty

SEQ ID NO: 147762 - DNA, 13 bp, Artificial Sequence
  Oligonucleotide for detection of SNP TSC0037324
raccacccgaaaa

SEQ ID NO: 147763 - DNA, 13 bp, Artificial Sequence
  Oligonucleotide for detection of SNP TSC0037324
ttttcgagtggty

SEQ ID NO: 147764 - DNA, 13 bp, Artificial Sequence
  Oligonucleotide for detection of SNP TSC0037324
raccactcgaaaa

SEQ ID NO: 147765 - DNA, 13 bp, Artificial Sequence
  Oligonucleotide for detection of SNP TSC0037324
tttttgggcggty

SEQ ID NO: 147766 - DNA, 13 bp, Artificial Sequence
  Oligonucleotide for detection of SNP TSC0037324
raccgcccaaaaa

SEQ ID NO: 147767 - DNA, 13 bp, Artificial Sequence
  Oligonucleotide for detection of SNP TSC0037324
tttttgagcggty

SEQ ID NO: 147768 - DNA, 13 bp, Artificial Sequence
  Oligonucleotide for detection of SNP TSC0037324
raccgctcaaaaa

SEQ ID NO: 147769 - DNA, 13 bp, Artificial Sequence
  Oligonucleotide for detection of SNP TSC0037324
ttttcgggcggty

SEQ ID NO: 147770 - DNA, 13 bp, Artificial Sequence
  Oligonucleotide for detection of SNP TSC0037324
raccgcccgaaaa

SEQ ID NO: 147771 - DNA, 13 bp, Artificial Sequence
  Oligonucleotide for detection of SNP TSC0037324
ttttcgagcggty

SEQ ID NO: 147772 - DNA, 13 bp, Artificial Sequence
  Oligonucleotide for detection of SNP TSC0037324
raccgctcgaaaa

SEQ ID NO: 147773 - DNA, 13 bp, Artificial Sequence
  Oligonucleotide for detection of SNP TSC0037326
tttgaatagttgg

SEQ ID NO: 147774 - DNA, 13 bp, Artificial Sequence
  Oligonucleotide for detection of SNP TSC0037326
ccaactattcaaa

SEQ ID NO: 147775 - DNA, 13 bp, Artificial Sequence
  Oligonucleotide for detection of SNP TSC0037326
tttgaagagttgg

SEQ ID NO: 147776 - DNA, 13 bp, Artificial Sequence
  Oligonucleotide for detection of SNP TSC0037326
ccaactcttcaaa

SEQ ID NO: 147777 - DNA, 13 bp, Artificial Sequence
  Oligonucleotide for detection of SNP TSC0037326
ttaattgtttaaa

SEQ ID NO: 147778 - DNA, 13 bp, Artificial Sequence
  Oligonucleotide for detection of SNP TSC0037326
tttaaacaattaa

SEQ ID NO: 147779 - DNA, 13 bp, Artificial Sequence
  Oligonucleotide for detection of SNP TSC0037326
ttaattttttaaa

SEQ ID NO: 147780 - DNA, 13 bp, Artificial Sequence
  Oligonucleotide for detection of SNP TSC0037326
tttaaaaaattaa

SEQ ID NO: 147781 - DNA, 13 bp, Artificial Sequence
  Oligonucleotide for detection of SNP TSC0037328
attagtaatattt

SEQ ID NO: 147782 - DNA, 13 bp, Artificial Sequence
  Oligonucleotide for detection of SNP TSC0037328
aaatattactaat

SEQ ID NO: 147783 - DNA, 13 bp, Artificial Sequence
  Oligonucleotide for detection of SNP TSC0037328
attagtgatattt

SEQ ID NO: 147784 - DNA, 13 bp, Artificial Sequence
  Oligonucleotide for detection of SNP TSC0037328
aaatatcactaat

SEQ ID NO: 147785 - DNA, 13 bp, Artificial Sequence
  Oligonucleotide for detection of SNP TSC0037328
attagcgatattt

SEQ ID NO: 147786 - DNA, 13 bp, Artificial Sequence
  Oligonucleotide for detection of SNP TSC0037328
aaatatcgctaat

SEQ ID NO: 147787 - DNA, 13 bp, Artificial Sequence
  Oligonucleotide for detection of SNP TSC0037328
aaatattgttgat

SEQ ID NO: 147788 - DNA, 13 bp, Artificial Sequence
  Oligonucleotide for detection of SNP TSC0037328
atcaacaatattt

SEQ ID NO: 147789 - DNA, 13 bp, Artificial Sequence
  Oligonucleotide for detection of SNP TSC0037328
aaatatcgttgat

SEQ ID NO: 147790 - DNA, 13 bp, Artificial Sequence
  Oligonucleotide for detection of SNP TSC0037328
atcaacgatattt

SEQ ID NO: 147791 - DNA, 13 bp, Artificial Sequence
  Oligonucleotide for detection of SNP TSC0037329
ggggaaggaatgg

SEQ ID NO: 147792 - DNA, 13 bp, Artificial Sequence
  Oligonucleotide for detection of SNP TSC0037329
ccattccttcccc

SEQ ID NO: 147793 - DNA, 13 bp, Artificial Sequence
  Oligonucleotide for detection of SNP TSC0037329
ggggaaagaatgg

SEQ ID NO: 147794 - DNA, 13 bp, Artificial Sequence
  Oligonucleotide for detection of SNP TSC0037329
ccattctttcccc

SEQ ID NO: 147795 - DNA, 13 bp, Artificial Sequence
  Oligonucleotide for detection of SNP TSC0037329
ggggaaggaacgg

SEQ ID NO: 147796 - DNA, 13 bp, Artificial Sequence
  Oligonucleotide for detection of SNP TSC0037329
ccgttccttcccc

SEQ ID NO: 147797 - DNA, 13 bp, Artificial Sequence
  Oligonucleotide for detection of SNP TSC0037329
ggggaaagaacgg

SEQ ID NO: 147798 - DNA, 13 bp, Artificial Sequence
  Oligonucleotide for detection of SNP TSC0037329
ccgttctttcccc

SEQ ID NO: 147799 - DNA, 13 bp, Artificial Sequence
  Oligonucleotide for detection of SNP TSC0037331
gtaaaatgaaaag

SEQ ID NO: 147800 - DNA, 13 bp, Artificial Sequence
  Oligonucleotide for detection of SNP TSC0037331
cttttcattttac

SEQ ID NO: 147801 - DNA, 13 bp, Artificial Sequence
  Oligonucleotide for detection of SNP TSC0037331
gtaaaaagaaaag

SEQ ID NO: 147802 - DNA, 13 bp, Artificial Sequence
  Oligonucleotide for detection of SNP TSC0037331
cttttctttttac

SEQ ID NO: 147803 - DNA, 13 bp, Artificial Sequence
  Oligonucleotide for detection of SNP TSC0037331
gtaaaacgaaaag

SEQ ID NO: 147804 - DNA, 13 bp, Artificial Sequence
  Oligonucleotide for detection of SNP TSC0037331
cttttcgttttac

SEQ ID NO: 147805 - DNA, 13 bp, Artificial Sequence
  Oligonucleotide for detection of SNP TSC0037332
tttttagtttaga

SEQ ID NO: 147806 - DNA, 13 bp, Artificial Sequence
  Oligonucleotide for detection of SNP TSC0037332
tctaaactaaaaa

SEQ ID NO: 147807 - DNA, 13 bp, Artificial Sequence
  Oligonucleotide for detection of SNP TSC0037332
tttttaatttaga

SEQ ID NO: 147808 - DNA, 13 bp, Artificial Sequence
  Oligonucleotide for detection of SNP TSC0037332
tctaaattaaaaa

SEQ ID NO: 147809 - DNA, 13 bp, Artificial Sequence
  Oligonucleotide for detection of SNP TSC0037333
gtagatataatag

SEQ ID NO: 147810 - DNA, 13 bp, Artificial Sequence
  Oligonucleotide for detection of SNP TSC0037333
ctattatatctac

SEQ ID NO: 147811 - DNA, 13 bp, Artificial Sequence
  Oligonucleotide for detection of SNP TSC0037333
gtagatgtaatag

SEQ ID NO: 147812 - DNA, 13 bp, Artificial Sequence
  Oligonucleotide for detection of SNP TSC0037333
ctattacatctac

SEQ ID NO: 147813 - DNA, 13 bp, Artificial Sequence
  Oligonucleotide for detection of SNP TSC0037333
gtagacgtaatag

SEQ ID NO: 147814 - DNA, 13 bp, Artificial Sequence
  Oligonucleotide for detection of SNP TSC0037333
ctattacgtctac

SEQ ID NO: 147815 - DNA, 13 bp, Artificial Sequence
  Oligonucleotide for detection of SNP TSC0037333
ttgttatgtttgy

SEQ ID NO: 147816 - DNA, 13 bp, Artificial Sequence
  Oligonucleotide for detection of SNP TSC0037333
rcaaacataacaa

SEQ ID NO: 147817 - DNA, 13 bp, Artificial Sequence
  Oligonucleotide for detection of SNP TSC0037333
ttgttacgtttgy

SEQ ID NO: 147818 - DNA, 13 bp, Artificial Sequence
  Oligonucleotide for detection of SNP TSC0037333
rcaaacgtaacaa

SEQ ID NO: 147819 - DNA, 13 bp, Artificial Sequence
  Oligonucleotide for detection of SNP TSC0037334
agttatatagtgt

SEQ ID NO: 147820 - DNA, 13 bp, Artificial Sequence
  Oligonucleotide for detection of SNP TSC0037334
acactatataact

SEQ ID NO: 147821 - DNA, 13 bp, Artificial Sequence
  Oligonucleotide for detection of SNP TSC0037334
agttatttagtgt

SEQ ID NO: 147822 - DNA, 13 bp, Artificial Sequence
  Oligonucleotide for detection of SNP TSC0037334
acactaaataact

SEQ ID NO: 147823 - DNA, 13 bp, Artificial Sequence
  Oligonucleotide for detection of SNP TSC0037334
atattgtgtagtt

SEQ ID NO: 147824 - DNA, 13 bp, Artificial Sequence
  Oligonucleotide for detection of SNP TSC0037334
aactacacaatat

SEQ ID NO: 147825 - DNA, 13 bp, Artificial Sequence
  Oligonucleotide for detection of SNP TSC0037334
atattgggtagtt

SEQ ID NO: 147826 - DNA, 13 bp, Artificial Sequence
  Oligonucleotide for detection of SNP TSC0037334
aactacccaatat

SEQ ID NO: 147827 - DNA, 13 bp, Artificial Sequence
  Oligonucleotide for detection of SNP TSC0037335
aggtagatgatgy

SEQ ID NO: 147828 - DNA, 13 bp, Artificial Sequence
  Oligonucleotide for detection of SNP TSC0037335
rcatcatctacct

SEQ ID NO: 147829 - DNA, 13 bp, Artificial Sequence
  Oligonucleotide for detection of SNP TSC0037335
aggtagttgatgy

SEQ ID NO: 147830 - DNA, 13 bp, Artificial Sequence
  Oligonucleotide for detection of SNP TSC0037335
rcatcaactacct

SEQ ID NO: 147831 - DNA, 13 bp, Artificial Sequence
  Oligonucleotide for detection of SNP TSC0037335
gtattatttgttt

SEQ ID NO: 147832 - DNA, 13 bp, Artificial Sequence
  Oligonucleotide for detection of SNP TSC0037335
aaacaaataatac

SEQ ID NO: 147833 - DNA, 13 bp, Artificial Sequence
  Oligonucleotide for detection of SNP TSC0037335
gtattaattgttt

SEQ ID NO: 147834 - DNA, 13 bp, Artificial Sequence
  Oligonucleotide for detection of SNP TSC0037335
aaacaattaatac

SEQ ID NO: 147835 - DNA, 13 bp, Artificial Sequence
  Oligonucleotide for detection of SNP TSC0037336
ttggttgatagag

SEQ ID NO: 147836 - DNA, 13 bp, Artificial Sequence
  Oligonucleotide for detection of SNP TSC0037336
ctctatcaaccaa

SEQ ID NO: 147837 - DNA, 13 bp, Artificial Sequence
  Oligonucleotide for detection of SNP TSC0037336
ttggttaatagag

SEQ ID NO: 147838 - DNA, 13 bp, Artificial Sequence
  Oligonucleotide for detection of SNP TSC0037336
ctctattaaccaa

SEQ ID NO: 147839 - DNA, 13 bp, Artificial Sequence
  Oligonucleotide for detection of SNP TSC0037340
agtttaattgtag

SEQ ID NO: 147840 - DNA, 13 bp, Artificial Sequence
  Oligonucleotide for detection of SNP TSC0037340
ctacaattaaact

SEQ ID NO: 147841 - DNA, 13 bp, Artificial Sequence
  Oligonucleotide for detection of SNP TSC0037340
agtttagttgtag

SEQ ID NO: 147842 - DNA, 13 bp, Artificial Sequence
  Oligonucleotide for detection of SNP TSC0037340
ctacaactaaact

SEQ ID NO: 147843 - DNA, 13 bp, Artificial Sequence
  Oligonucleotide for detection of SNP TSC0037341
atatttatggtty

SEQ ID NO: 147844 - DNA, 13 bp, Artificial Sequence
  Oligonucleotide for detection of SNP TSC0037341
raaccataaatat

SEQ ID NO: 147845 - DNA, 13 bp, Artificial Sequence
  Oligonucleotide for detection of SNP TSC0037341
atatttttggtty

SEQ ID NO: 147846 - DNA, 13 bp, Artificial Sequence
  Oligonucleotide for detection of SNP TSC0037341
raaccaaaaatat

SEQ ID NO: 147847 - DNA, 13 bp, Artificial Sequence
  Oligonucleotide for detection of SNP TSC0037341
atatttacggtty

SEQ ID NO: 147848 - DNA, 13 bp, Artificial Sequence
  Oligonucleotide for detection of SNP TSC0037341
raaccgtaaatat

SEQ ID NO: 147849 - DNA, 13 bp, Artificial Sequence
  Oligonucleotide for detection of SNP TSC0037341
atattttcggtty

SEQ ID NO: 147850 - DNA, 13 bp, Artificial Sequence
  Oligonucleotide for detection of SNP TSC0037341
raaccgaaaatat

SEQ ID NO: 147851 - DNA, 13 bp, Artificial Sequence
  Oligonucleotide for detection of SNP TSC0037341
gaattgtgagtat

SEQ ID NO: 147852 - DNA, 13 bp, Artificial Sequence
  Oligonucleotide for detection of SNP TSC0037341
atactcacaattc

SEQ ID NO: 147853 - DNA, 13 bp, Artificial Sequence
  Oligonucleotide for detection of SNP TSC0037341
gaattgagagtat

SEQ ID NO: 147854 - DNA, 13 bp, Artificial Sequence
  Oligonucleotide for detection of SNP TSC0037341
atactctcaattc

SEQ ID NO: 147855 - DNA, 13 bp, Artificial Sequence
  Oligonucleotide for detection of SNP TSC0037341
gaatcgtgagtat

SEQ ID NO: 147856 - DNA, 13 bp, Artificial Sequence
  Oligonucleotide for detection of SNP TSC0037341
atactcacgattc

SEQ ID NO: 147857 - DNA, 13 bp, Artificial Sequence
  Oligonucleotide for detection of SNP TSC0037341
gaatcgagagtat

SEQ ID NO: 147858 - DNA, 13 bp, Artificial Sequence
  Oligonucleotide for detection of SNP TSC0037341
atactctcgattc

SEQ ID NO: 147859 - DNA, 13 bp, Artificial Sequence
  Oligonucleotide for detection of SNP TSC0037342
tatttatggttta

SEQ ID NO: 147860 - DNA, 13 bp, Artificial Sequence
  Oligonucleotide for detection of SNP TSC0037342
taaaccataaata

SEQ ID NO: 147861 - DNA, 13 bp, Artificial Sequence
  Oligonucleotide for detection of SNP TSC0037342
tatttacggttta

SEQ ID NO: 147862 - DNA, 13 bp, Artificial Sequence
  Oligonucleotide for detection of SNP TSC0037342
taaaccgtaaata

SEQ ID NO: 147863 - DNA, 13 bp, Artificial Sequence
  Oligonucleotide for detection of SNP TSC0037342
tgaattgtgagta

SEQ ID NO: 147864 - DNA, 13 bp, Artificial Sequence
  Oligonucleotide for detection of SNP TSC0037342
tactcacaattca

SEQ ID NO: 147865 - DNA, 13 bp, Artificial Sequence
  Oligonucleotide for detection of SNP TSC0037342
tgaattatgagta

SEQ ID NO: 147866 - DNA, 13 bp, Artificial Sequence
  Oligonucleotide for detection of SNP TSC0037342
tactcataattca

SEQ ID NO: 147867 - DNA, 13 bp, Artificial Sequence
  Oligonucleotide for detection of SNP TSC0037342
tgaatcgtgagta

SEQ ID NO: 147868 - DNA, 13 bp, Artificial Sequence
  Oligonucleotide for detection of SNP TSC0037342
tactcacgattca

SEQ ID NO: 147869 - DNA, 13 bp, Artificial Sequence
  Oligonucleotide for detection of SNP TSC0037343
atttattatttga

SEQ ID NO: 147870 - DNA, 13 bp, Artificial Sequence
  Oligonucleotide for detection of SNP TSC0037343
tcaaataataaat

SEQ ID NO: 147871 - DNA, 13 bp, Artificial Sequence
  Oligonucleotide for detection of SNP TSC0037343
atttataatttga

SEQ ID NO: 147872 - DNA, 13 bp, Artificial Sequence
  Oligonucleotide for detection of SNP TSC0037343
tcaaattataaat

SEQ ID NO: 147873 - DNA, 13 bp, Artificial Sequence
  Oligonucleotide for detection of SNP TSC0037344
tattgtagttttt

SEQ ID NO: 147874 - DNA, 13 bp, Artificial Sequence
  Oligonucleotide for detection of SNP TSC0037344
aaaaactacaata

SEQ ID NO: 147875 - DNA, 13 bp, Artificial Sequence
  Oligonucleotide for detection of SNP TSC0037345
tgtatttgaagaa

SEQ ID NO: 147876 - DNA, 13 bp, Artificial Sequence
  Oligonucleotide for detection of SNP TSC0037345
ttcttcaaataca

SEQ ID NO: 147877 - DNA, 13 bp, Artificial Sequence
  Oligonucleotide for detection of SNP TSC0037345
tgtattcgaagaa

SEQ ID NO: 147878 - DNA, 13 bp, Artificial Sequence
  Oligonucleotide for detection of SNP TSC0037345
ttcttcgaataca

SEQ ID NO: 147879 - DNA, 13 bp, Artificial Sequence
  Oligonucleotide for detection of SNP TSC0037346
agttggaatattt

SEQ ID NO: 147880 - DNA, 13 bp, Artificial Sequence
  Oligonucleotide for detection of SNP TSC0037346
aaatattccaact

SEQ ID NO: 147881 - DNA, 13 bp, Artificial Sequence
  Oligonucleotide for detection of SNP TSC0037346
agttgggatattt

SEQ ID NO: 147882 - DNA, 13 bp, Artificial Sequence
  Oligonucleotide for detection of SNP TSC0037346
aaatatcccaact

SEQ ID NO: 147883 - DNA, 13 bp, Artificial Sequence
  Oligonucleotide for detection of SNP TSC0037347
ataagtatataaa

SEQ ID NO: 147884 - DNA, 13 bp, Artificial Sequence
  Oligonucleotide for detection of SNP TSC0037347
tttatatacttat

SEQ ID NO: 147885 - DNA, 13 bp, Artificial Sequence
  Oligonucleotide for detection of SNP TSC0037347
ataagtgtataaa

SEQ ID NO: 147886 - DNA, 13 bp, Artificial Sequence
  Oligonucleotide for detection of SNP TSC0037347
tttatacacttat

SEQ ID NO: 147887 - DNA, 13 bp, Artificial Sequence
  Oligonucleotide for detection of SNP TSC0037350
ggaaatataatgt

SEQ ID NO: 147888 - DNA, 13 bp, Artificial Sequence
  Oligonucleotide for detection of SNP TSC0037350
acattatatttcc

SEQ ID NO: 147889 - DNA, 13 bp, Artificial Sequence
  Oligonucleotide for detection of SNP TSC0037350
ggaaatttaatgt

SEQ ID NO: 147890 - DNA, 13 bp, Artificial Sequence
  Oligonucleotide for detection of SNP TSC0037350
acattaaatttcc

SEQ ID NO: 147891 - DNA, 13 bp, Artificial Sequence
  Oligonucleotide for detection of SNP TSC0037350
ggaaatataacgt

SEQ ID NO: 147892 - DNA, 13 bp, Artificial Sequence
  Oligonucleotide for detection of SNP TSC0037350
acgttatatttcc

SEQ ID NO: 147893 - DNA, 13 bp, Artificial Sequence
  Oligonucleotide for detection of SNP TSC0037350
ggaaatttaacgt

SEQ ID NO: 147894 - DNA, 13 bp, Artificial Sequence
  Oligonucleotide for detection of SNP TSC0037350
acgttaaatttcc

SEQ ID NO: 147895 - DNA, 13 bp, Artificial Sequence
  Oligonucleotide for detection of SNP TSC0037350
atgttatatttty

SEQ ID NO: 147896 - DNA, 13 bp, Artificial Sequence
  Oligonucleotide for detection of SNP TSC0037350
raaaatataacat

SEQ ID NO: 147897 - DNA, 13 bp, Artificial Sequence
  Oligonucleotide for detection of SNP TSC0037350
atgttagatttty

SEQ ID NO: 147898 - DNA, 13 bp, Artificial Sequence
  Oligonucleotide for detection of SNP TSC0037350
raaaatctaacat

SEQ ID NO: 147899 - DNA, 13 bp, Artificial Sequence
  Oligonucleotide for detection of SNP TSC0037350
acgttatatttty

SEQ ID NO: 147900 - DNA, 13 bp, Artificial Sequence
  Oligonucleotide for detection of SNP TSC0037350
raaaatataacgt

SEQ ID NO: 147901 - DNA, 13 bp, Artificial Sequence
  Oligonucleotide for detection of SNP TSC0037350
acgttagatttty

SEQ ID NO: 147902 - DNA, 13 bp, Artificial Sequence
  Oligonucleotide for detection of SNP TSC0037350
raaaatctaacgt

SEQ ID NO: 147903 - DNA, 13 bp, Artificial Sequence
  Oligonucleotide for detection of SNP TSC0037351
tttatgattttty

SEQ ID NO: 147904 - DNA, 13 bp, Artificial Sequence
  Oligonucleotide for detection of SNP TSC0037351
raaaaatcataaa

SEQ ID NO: 147905 - DNA, 13 bp, Artificial Sequence
  Oligonucleotide for detection of SNP TSC0037351
tttatggttttty

SEQ ID NO: 147906 - DNA, 13 bp, Artificial Sequence
  Oligonucleotide for detection of SNP TSC0037351
raaaaaccataaa

SEQ ID NO: 147907 - DNA, 13 bp, Artificial Sequence
  Oligonucleotide for detection of SNP TSC0037352
atttgtattatgt

SEQ ID NO: 147908 - DNA, 13 bp, Artificial Sequence
  Oligonucleotide for detection of SNP TSC0037352
acataatacaaat

SEQ ID NO: 147909 - DNA, 13 bp, Artificial Sequence
  Oligonucleotide for detection of SNP TSC0037352
atttgtgttatgt

SEQ ID NO: 147910 - DNA, 13 bp, Artificial Sequence
  Oligonucleotide for detection of SNP TSC0037352
acataacacaaat

SEQ ID NO: 147911 - DNA, 13 bp, Artificial Sequence
  Oligonucleotide for detection of SNP TSC0037352
atttgcgttatgt

SEQ ID NO: 147912 - DNA, 13 bp, Artificial Sequence
  Oligonucleotide for detection of SNP TSC0037352
acataacgcaaat

SEQ ID NO: 147913 - DNA, 13 bp, Artificial Sequence
  Oligonucleotide for detection of SNP TSC0037352
atatgatgtagat

SEQ ID NO: 147914 - DNA, 13 bp, Artificial Sequence
  Oligonucleotide for detection of SNP TSC0037352
atctacatcatat

SEQ ID NO: 147915 - DNA, 13 bp, Artificial Sequence
  Oligonucleotide for detection of SNP TSC0037352
atatgacgtagat

SEQ ID NO: 147916 - DNA, 13 bp, Artificial Sequence
  Oligonucleotide for detection of SNP TSC0037352
atctacgtcatat

SEQ ID NO: 147917 - DNA, 13 bp, Artificial Sequence
  Oligonucleotide for detection of SNP TSC0037353
tttaattaaaggt

SEQ ID NO: 147918 - DNA, 13 bp, Artificial Sequence
  Oligonucleotide for detection of SNP TSC0037353
acctttaattaaa

SEQ ID NO: 147919 - DNA, 13 bp, Artificial Sequence
  Oligonucleotide for detection of SNP TSC0037353
tttaatgaaaggt

SEQ ID NO: 147920 - DNA, 13 bp, Artificial Sequence
  Oligonucleotide for detection of SNP TSC0037353
acctttcattaaa

SEQ ID NO: 147921 - DNA, 13 bp, Artificial Sequence
  Oligonucleotide for detection of SNP TSC0037353
atttttgattaag

SEQ ID NO: 147922 - DNA, 13 bp, Artificial Sequence
  Oligonucleotide for detection of SNP TSC0037353
cttaatcaaaaat

SEQ ID NO: 147923 - DNA, 13 bp, Artificial Sequence
  Oligonucleotide for detection of SNP TSC0037353
attttttattaag

SEQ ID NO: 147924 - DNA, 13 bp, Artificial Sequence
  Oligonucleotide for detection of SNP TSC0037353
cttaataaaaaat

SEQ ID NO: 147925 - DNA, 13 bp, Artificial Sequence
  Oligonucleotide for detection of SNP TSC0037354
taaatttaaagty

SEQ ID NO: 147926 - DNA, 13 bp, Artificial Sequence
  Oligonucleotide for detection of SNP TSC0037354
ractttaaattta

SEQ ID NO: 147927 - DNA, 13 bp, Artificial Sequence
  Oligonucleotide for detection of SNP TSC0037354
taaattgaaagty

SEQ ID NO: 147928 - DNA, 13 bp, Artificial Sequence
  Oligonucleotide for detection of SNP TSC0037354
ractttcaattta

SEQ ID NO: 147929 - DNA, 13 bp, Artificial Sequence
  Oligonucleotide for detection of SNP TSC0037354
gatttttagtttg

SEQ ID NO: 147930 - DNA, 13 bp, Artificial Sequence
  Oligonucleotide for detection of SNP TSC0037354
caaactaaaaatc

SEQ ID NO: 147931 - DNA, 13 bp, Artificial Sequence
  Oligonucleotide for detection of SNP TSC0037356
atatattggggta

SEQ ID NO: 147932 - DNA, 13 bp, Artificial Sequence
  Oligonucleotide for detection of SNP TSC0037356
taccccaatatat

SEQ ID NO: 147933 - DNA, 13 bp, Artificial Sequence
  Oligonucleotide for detection of SNP TSC0037356
atatatcggggta

SEQ ID NO: 147934 - DNA, 13 bp, Artificial Sequence
  Oligonucleotide for detection of SNP TSC0037356
taccccgatatat

SEQ ID NO: 147935 - DNA, 13 bp, Artificial Sequence
  Oligonucleotide for detection of SNP TSC0037356
tattttggtatgt

SEQ ID NO: 147936 - DNA, 13 bp, Artificial Sequence
  Oligonucleotide for detection of SNP TSC0037356
acataccaaaata

SEQ ID NO: 147937 - DNA, 13 bp, Artificial Sequence
  Oligonucleotide for detection of SNP TSC0037356
tattttagtatgt

SEQ ID NO: 147938 - DNA, 13 bp, Artificial Sequence
  Oligonucleotide for detection of SNP TSC0037356
acatactaaaata

SEQ ID NO: 147939 - DNA, 13 bp, Artificial Sequence
  Oligonucleotide for detection of SNP TSC0037356
tatttcggtatgt

SEQ ID NO: 147940 - DNA, 13 bp, Artificial Sequence
  Oligonucleotide for detection of SNP TSC0037356
acataccgaaata

SEQ ID NO: 147941 - DNA, 13 bp, Artificial Sequence
  Oligonucleotide for detection of SNP TSC0037358
atgagttattgtg

SEQ ID NO: 147942 - DNA, 13 bp, Artificial Sequence
  Oligonucleotide for detection of SNP TSC0037358
cacaataactcat

SEQ ID NO: 147943 - DNA, 13 bp, Artificial Sequence
  Oligonucleotide for detection of SNP TSC0037358
atgagtgattgtg

SEQ ID NO: 147944 - DNA, 13 bp, Artificial Sequence
  Oligonucleotide for detection of SNP TSC0037358
cacaatcactcat

SEQ ID NO: 147945 - DNA, 13 bp, Artificial Sequence
  Oligonucleotide for detection of SNP TSC0037358
atgagttatcgtg

SEQ ID NO: 147946 - DNA, 13 bp, Artificial Sequence
  Oligonucleotide for detection of SNP TSC0037358
cacgataactcat

SEQ ID NO: 147947 - DNA, 13 bp, Artificial Sequence
  Oligonucleotide for detection of SNP TSC0037358
atgagcgattgtg

SEQ ID NO: 147948 - DNA, 13 bp, Artificial Sequence
  Oligonucleotide for detection of SNP TSC0037358
cacaatcgctcat

SEQ ID NO: 147949 - DNA, 13 bp, Artificial Sequence
  Oligonucleotide for detection of SNP TSC0037358
atgagttattgcg

SEQ ID NO: 147950 - DNA, 13 bp, Artificial Sequence
  Oligonucleotide for detection of SNP TSC0037358
cgcaataactcat

SEQ ID NO: 147951 - DNA, 13 bp, Artificial Sequence
  Oligonucleotide for detection of SNP TSC0037358
atgagtgatcgtg

SEQ ID NO: 147952 - DNA, 13 bp, Artificial Sequence
  Oligonucleotide for detection of SNP TSC0037358
cacgatcactcat

SEQ ID NO: 147953 - DNA, 13 bp, Artificial Sequence
  Oligonucleotide for detection of SNP TSC0037358
atgagttatcgcg

SEQ ID NO: 147954 - DNA, 13 bp, Artificial Sequence
  Oligonucleotide for detection of SNP TSC0037358
cgcgataactcat

SEQ ID NO: 147955 - DNA, 13 bp, Artificial Sequence
  Oligonucleotide for detection of SNP TSC0037358
atgagtgattgcg

SEQ ID NO: 147956 - DNA, 13 bp, Artificial Sequence
  Oligonucleotide for detection of SNP TSC0037358
cgcaatcactcat

SEQ ID NO: 147957 - DNA, 13 bp, Artificial Sequence
  Oligonucleotide for detection of SNP TSC0037358
atgagcgatcgtg

SEQ ID NO: 147958 - DNA, 13 bp, Artificial Sequence
  Oligonucleotide for detection of SNP TSC0037358
cacgatcgctcat

SEQ ID NO: 147959 - DNA, 13 bp, Artificial Sequence
  Oligonucleotide for detection of SNP TSC0037358
atgagcgattgcg

SEQ ID NO: 147960 - DNA, 13 bp, Artificial Sequence
  Oligonucleotide for detection of SNP TSC0037358
cgcaatcgctcat

SEQ ID NO: 147961 - DNA, 13 bp, Artificial Sequence
  Oligonucleotide for detection of SNP TSC0037358
atgagtgatcgcg

SEQ ID NO: 147962 - DNA, 13 bp, Artificial Sequence
  Oligonucleotide for detection of SNP TSC0037358
cgcgatcactcat

SEQ ID NO: 147963 - DNA, 13 bp, Artificial Sequence
  Oligonucleotide for detection of SNP TSC0037358
atgagcgatcgcg

SEQ ID NO: 147964 - DNA, 13 bp, Artificial Sequence
  Oligonucleotide for detection of SNP TSC0037358
cgcgatcgctcat

SEQ ID NO: 147965 - DNA, 13 bp, Artificial Sequence
  Oligonucleotide for detection of SNP TSC0037358
tgtggtggtttat

SEQ ID NO: 147966 - DNA, 13 bp, Artificial Sequence
  Oligonucleotide for detection of SNP TSC0037358
ataaaccaccaca

SEQ ID NO: 147967 - DNA, 13 bp, Artificial Sequence
  Oligonucleotide for detection of SNP TSC0037358
cgtggtggtttat

SEQ ID NO: 147968 - DNA, 13 bp, Artificial Sequence
  Oligonucleotide for detection of SNP TSC0037358
ataaaccaccacg

SEQ ID NO: 147969 - DNA, 13 bp, Artificial Sequence
  Oligonucleotide for detection of SNP TSC0037358
cgtggttgtttat

SEQ ID NO: 147970 - DNA, 13 bp, Artificial Sequence
  Oligonucleotide for detection of SNP TSC0037358
ataaacaaccacg

SEQ ID NO: 147971 - DNA, 13 bp, Artificial Sequence
  Oligonucleotide for detection of SNP TSC0037358
tgcggtggtttat

SEQ ID NO: 147972 - DNA, 13 bp, Artificial Sequence
  Oligonucleotide for detection of SNP TSC0037358
ataaaccaccgca

SEQ ID NO: 147973 - DNA, 13 bp, Artificial Sequence
  Oligonucleotide for detection of SNP TSC0037358
tgcggttgtttat

SEQ ID NO: 147974 - DNA, 13 bp, Artificial Sequence
  Oligonucleotide for detection of SNP TSC0037358
ataaacaaccgca

SEQ ID NO: 147975 - DNA, 13 bp, Artificial Sequence
  Oligonucleotide for detection of SNP TSC0037358
cgcggtggtttat

SEQ ID NO: 147976 - DNA, 13 bp, Artificial Sequence
  Oligonucleotide for detection of SNP TSC0037358
ataaaccaccgcg

SEQ ID NO: 147977 - DNA, 13 bp, Artificial Sequence
  Oligonucleotide for detection of SNP TSC0037358
cgcggttgtttat

SEQ ID NO: 147978 - DNA, 13 bp, Artificial Sequence
  Oligonucleotide for detection of SNP TSC0037358
ataaacaaccgcg

SEQ ID NO: 147979 - DNA, 13 bp, Artificial Sequence
  Oligonucleotide for detection of SNP TSC0037358
cgtggtcgtttat

SEQ ID NO: 147980 - DNA, 13 bp, Artificial Sequence
  Oligonucleotide for detection of SNP TSC0037358
ataaacgaccacg

SEQ ID NO: 147981 - DNA, 13 bp, Artificial Sequence
  Oligonucleotide for detection of SNP TSC0037358
tgcggtcgtttat

SEQ ID NO: 147982 - DNA, 13 bp, Artificial Sequence
  Oligonucleotide for detection of SNP TSC0037358
ataaacgaccgca

SEQ ID NO: 147983 - DNA, 13 bp, Artificial Sequence
  Oligonucleotide for detection of SNP TSC0037358
cgcggtcgtttat

SEQ ID NO: 147984 - DNA, 13 bp, Artificial Sequence
  Oligonucleotide for detection of SNP TSC0037358
ataaacgaccgcg

SEQ ID NO: 147985 - DNA, 13 bp, Artificial Sequence
  Oligonucleotide for detection of SNP TSC0037359
ttatttgttttga

SEQ ID NO: 147986 - DNA, 13 bp, Artificial Sequence
  Oligonucleotide for detection of SNP TSC0037359
tcaaaacaaataa

SEQ ID NO: 147987 - DNA, 13 bp, Artificial Sequence
  Oligonucleotide for detection of SNP TSC0037359
ttattttttttga

SEQ ID NO: 147988 - DNA, 13 bp, Artificial Sequence
  Oligonucleotide for detection of SNP TSC0037359
tcaaaaaaaataa

SEQ ID NO: 147989 - DNA, 13 bp, Artificial Sequence
  Oligonucleotide for detection of SNP TSC0037359
ttaaaataagtgg

SEQ ID NO: 147990 - DNA, 13 bp, Artificial Sequence
  Oligonucleotide for detection of SNP TSC0037359
ccacttattttaa

SEQ ID NO: 147991 - DNA, 13 bp, Artificial Sequence
  Oligonucleotide for detection of SNP TSC0037359
ttaaaaaaagtgg

SEQ ID NO: 147992 - DNA, 13 bp, Artificial Sequence
  Oligonucleotide for detection of SNP TSC0037359
ccactttttttaa

SEQ ID NO: 147993 - DNA, 13 bp, Artificial Sequence
  Oligonucleotide for detection of SNP TSC0037363
atatagggtattg

SEQ ID NO: 147994 - DNA, 13 bp, Artificial Sequence
  Oligonucleotide for detection of SNP TSC0037363
caataccctatat

SEQ ID NO: 147995 - DNA, 13 bp, Artificial Sequence
  Oligonucleotide for detection of SNP TSC0037363
atatagtgtattg

SEQ ID NO: 147996 - DNA, 13 bp, Artificial Sequence
  Oligonucleotide for detection of SNP TSC0037363
caatacactatat

SEQ ID NO: 147997 - DNA, 13 bp, Artificial Sequence
  Oligonucleotide for detection of SNP TSC0037363
tagtgtattgtgt

SEQ ID NO: 147998 - DNA, 13 bp, Artificial Sequence
  Oligonucleotide for detection of SNP TSC0037363
acacaatacacta

SEQ ID NO: 147999 - DNA, 13 bp, Artificial Sequence
  Oligonucleotide for detection of SNP TSC0037364
gtagtagtgggta

SEQ ID NO: 148000 - DNA, 13 bp, Artificial Sequence
  Oligonucleotide for detection of SNP TSC0037364
tacccactactac

SEQ ID NO: 148001 - DNA, 13 bp, Artificial Sequence
  Oligonucleotide for detection of SNP TSC0037364
gtagtaatgggta

SEQ ID NO: 148002 - DNA, 13 bp, Artificial Sequence
  Oligonucleotide for detection of SNP TSC0037364
tacccattactac

SEQ ID NO: 148003 - DNA, 13 bp, Artificial Sequence
  Oligonucleotide for detection of SNP TSC0037367
ttggaaaattttt

SEQ ID NO: 148004 - DNA, 13 bp, Artificial Sequence
  Oligonucleotide for detection of SNP TSC0037367
aaaaattttccaa

SEQ ID NO: 148005 - DNA, 13 bp, Artificial Sequence
  Oligonucleotide for detection of SNP TSC0037367
ttggaagattttt

SEQ ID NO: 148006 - DNA, 13 bp, Artificial Sequence
  Oligonucleotide for detection of SNP TSC0037367
aaaaatcttccaa

SEQ ID NO: 148007 - DNA, 13 bp, Artificial Sequence
  Oligonucleotide for detection of SNP TSC0037369
tatataataagtt

SEQ ID NO: 148008 - DNA, 13 bp, Artificial Sequence
  Oligonucleotide for detection of SNP TSC0037369
aacttattatata

SEQ ID NO: 148009 - DNA, 13 bp, Artificial Sequence
  Oligonucleotide for detection of SNP TSC0037369
tatatagtaagtt

SEQ ID NO: 148010 - DNA, 13 bp, Artificial Sequence
  Oligonucleotide for detection of SNP TSC0037369
aacttactatata

SEQ ID NO: 148011 - DNA, 13 bp, Artificial Sequence
  Oligonucleotide for detection of SNP TSC0037370
ggtaagtggggag

SEQ ID NO: 148012 - DNA, 13 bp, Artificial Sequence
  Oligonucleotide for detection of SNP TSC0037370
ctccccacttacc

SEQ ID NO: 148013 - DNA, 13 bp, Artificial Sequence
  Oligonucleotide for detection of SNP TSC0037370
ggtaaggggggag

SEQ ID NO: 148014 - DNA, 13 bp, Artificial Sequence
  Oligonucleotide for detection of SNP TSC0037370
ctccccccttacc

SEQ ID NO: 148015 - DNA, 13 bp, Artificial Sequence
  Oligonucleotide for detection of SNP TSC0037370
ggtaagcggggag

SEQ ID NO: 148016 - DNA, 13 bp, Artificial Sequence
  Oligonucleotide for detection of SNP TSC0037370
ctccccgcttacc

SEQ ID NO: 148017 - DNA, 13 bp, Artificial Sequence
  Oligonucleotide for detection of SNP TSC0037373
gtgttagttttta

SEQ ID NO: 148018 - DNA, 13 bp, Artificial Sequence
  Oligonucleotide for detection of SNP TSC0037373
taaaaactaacac

SEQ ID NO: 148019 - DNA, 13 bp, Artificial Sequence
  Oligonucleotide for detection of SNP TSC0037373
gtgttatttttta

SEQ ID NO: 148020 - DNA, 13 bp, Artificial Sequence
  Oligonucleotide for detection of SNP TSC0037373
taaaaaataacac

SEQ ID NO: 148021 - DNA, 13 bp, Artificial Sequence
  Oligonucleotide for detection of SNP TSC0037373
tagggattaatay

SEQ ID NO: 148022 - DNA, 13 bp, Artificial Sequence
  Oligonucleotide for detection of SNP TSC0037373
rtattaatcccta

SEQ ID NO: 148023 - DNA, 13 bp, Artificial Sequence
  Oligonucleotide for detection of SNP TSC0037373
tagggaataatay

SEQ ID NO: 148024 - DNA, 13 bp, Artificial Sequence
  Oligonucleotide for detection of SNP TSC0037373
rtattattcccta

SEQ ID NO: 148025 - DNA, 13 bp, Artificial Sequence
  Oligonucleotide for detection of SNP TSC0037377
tgttagaaggaat

SEQ ID NO: 148026 - DNA, 13 bp, Artificial Sequence
  Oligonucleotide for detection of SNP TSC0037377
attccttctaaca

SEQ ID NO: 148027 - DNA, 13 bp, Artificial Sequence
  Oligonucleotide for detection of SNP TSC0037377
tgttaggaggaat

SEQ ID NO: 148028 - DNA, 13 bp, Artificial Sequence
  Oligonucleotide for detection of SNP TSC0037377
attcctcctaaca

SEQ ID NO: 148029 - DNA, 13 bp, Artificial Sequence
  Oligonucleotide for detection of SNP TSC0037378
tagggagaatata

SEQ ID NO: 148030 - DNA, 13 bp, Artificial Sequence
  Oligonucleotide for detection of SNP TSC0037378
tatattctcccta

SEQ ID NO: 148031 - DNA, 13 bp, Artificial Sequence
  Oligonucleotide for detection of SNP TSC0037378
tagggaaaatata

SEQ ID NO: 148032 - DNA, 13 bp, Artificial Sequence
  Oligonucleotide for detection of SNP TSC0037378
tatattttcccta

SEQ ID NO: 148033 - DNA, 13 bp, Artificial Sequence
  Oligonucleotide for detection of SNP TSC0037382
aatttatgtagta

SEQ ID NO: 148034 - DNA, 13 bp, Artificial Sequence
  Oligonucleotide for detection of SNP TSC0037382
tactacataaatt

SEQ ID NO: 148035 - DNA, 13 bp, Artificial Sequence
  Oligonucleotide for detection of SNP TSC0037382
aatttacgtagta

SEQ ID NO: 148036 - DNA, 13 bp, Artificial Sequence
  Oligonucleotide for detection of SNP TSC0037382
tactacgtaaatt

SEQ ID NO: 148037 - DNA, 13 bp, Artificial Sequence
  Oligonucleotide for detection of SNP TSC0037382
tattatgtaagtt

SEQ ID NO: 148038 - DNA, 13 bp, Artificial Sequence
  Oligonucleotide for detection of SNP TSC0037382
aacttacataata

SEQ ID NO: 148039 - DNA, 13 bp, Artificial Sequence
  Oligonucleotide for detection of SNP TSC0037382
tattatataagtt

SEQ ID NO: 148040 - DNA, 13 bp, Artificial Sequence
  Oligonucleotide for detection of SNP TSC0037382
aacttatataata

SEQ ID NO: 148041 - DNA, 13 bp, Artificial Sequence
  Oligonucleotide for detection of SNP TSC0037382
tattacgtaagtt

SEQ ID NO: 148042 - DNA, 13 bp, Artificial Sequence
  Oligonucleotide for detection of SNP TSC0037382
aacttacgtaata

SEQ ID NO: 148043 - DNA, 13 bp, Artificial Sequence
  Oligonucleotide for detection of SNP TSC0037384
ttaatatggtagy

SEQ ID NO: 148044 - DNA, 13 bp, Artificial Sequence
  Oligonucleotide for detection of SNP TSC0037384
rctaccatattaa

SEQ ID NO: 148045 - DNA, 13 bp, Artificial Sequence
  Oligonucleotide for detection of SNP TSC0037384
ttaatacggtagy

SEQ ID NO: 148046 - DNA, 13 bp, Artificial Sequence
  Oligonucleotide for detection of SNP TSC0037384
rctaccgtattaa

SEQ ID NO: 148047 - DNA, 13 bp, Artificial Sequence
  Oligonucleotide for detection of SNP TSC0037384
gttattgtattga

SEQ ID NO: 148048 - DNA, 13 bp, Artificial Sequence
  Oligonucleotide for detection of SNP TSC0037384
tcaatacaataac

SEQ ID NO: 148049 - DNA, 13 bp, Artificial Sequence
  Oligonucleotide for detection of SNP TSC0037384
gttattatattga

SEQ ID NO: 148050 - DNA, 13 bp, Artificial Sequence
  Oligonucleotide for detection of SNP TSC0037384
tcaatataataac

SEQ ID NO: 148051 - DNA, 13 bp, Artificial Sequence
  Oligonucleotide for detection of SNP TSC0037384
gttatcgtattga

SEQ ID NO: 148052 - DNA, 13 bp, Artificial Sequence
  Oligonucleotide for detection of SNP TSC0037384
tcaatacgataac

SEQ ID NO: 148053 - DNA, 13 bp, Artificial Sequence
  Oligonucleotide for detection of SNP TSC0037386
agttttattagtg

SEQ ID NO: 148054 - DNA, 13 bp, Artificial Sequence
  Oligonucleotide for detection of SNP TSC0037386
cactaataaaact

SEQ ID NO: 148055 - DNA, 13 bp, Artificial Sequence
  Oligonucleotide for detection of SNP TSC0037386
agttttgttagtg

SEQ ID NO: 148056 - DNA, 13 bp, Artificial Sequence
  Oligonucleotide for detection of SNP TSC0037386
cactaacaaaact

SEQ ID NO: 148057 - DNA, 13 bp, Artificial Sequence
  Oligonucleotide for detection of SNP TSC0037386
agtttcgttagtg

SEQ ID NO: 148058 - DNA, 13 bp, Artificial Sequence
  Oligonucleotide for detection of SNP TSC0037386
cactaacgaaact

SEQ ID NO: 148059 - DNA, 13 bp, Artificial Sequence
  Oligonucleotide for detection of SNP TSC0037386
tattggtgagatt

SEQ ID NO: 148060 - DNA, 13 bp, Artificial Sequence
  Oligonucleotide for detection of SNP TSC0037386
aatctcaccaata

SEQ ID NO: 148061 - DNA, 13 bp, Artificial Sequence
  Oligonucleotide for detection of SNP TSC0037386
tattggcgagatt

SEQ ID NO: 148062 - DNA, 13 bp, Artificial Sequence
  Oligonucleotide for detection of SNP TSC0037386
aatctcgccaata

SEQ ID NO: 148063 - DNA, 13 bp, Artificial Sequence
  Oligonucleotide for detection of SNP TSC0037389
ttattgatagttt

SEQ ID NO: 148064 - DNA, 13 bp, Artificial Sequence
  Oligonucleotide for detection of SNP TSC0037389
aaactatcaataa

SEQ ID NO: 148065 - DNA, 13 bp, Artificial Sequence
  Oligonucleotide for detection of SNP TSC0037389
ttattggtagttt

SEQ ID NO: 148066 - DNA, 13 bp, Artificial Sequence
  Oligonucleotide for detection of SNP TSC0037389
aaactaccaataa

SEQ ID NO: 148067 - DNA, 13 bp, Artificial Sequence
  Oligonucleotide for detection of SNP TSC0037390
ttgtttaatatgy

SEQ ID NO: 148068 - DNA, 13 bp, Artificial Sequence
  Oligonucleotide for detection of SNP TSC0037390
rcatattaaacaa

SEQ ID NO: 148069 - DNA, 13 bp, Artificial Sequence
  Oligonucleotide for detection of SNP TSC0037390
ttgtttgatatgy

SEQ ID NO: 148070 - DNA, 13 bp, Artificial Sequence
  Oligonucleotide for detection of SNP TSC0037390
rcatatcaaacaa

SEQ ID NO: 148071 - DNA, 13 bp, Artificial Sequence
  Oligonucleotide for detection of SNP TSC0037390
ttgtttaatacgy

SEQ ID NO: 148072 - DNA, 13 bp, Artificial Sequence
  Oligonucleotide for detection of SNP TSC0037390
rcgtattaaacaa

SEQ ID NO: 148073 - DNA, 13 bp, Artificial Sequence
  Oligonucleotide for detection of SNP TSC0037390
ttgttcgatatgy

SEQ ID NO: 148074 - DNA, 13 bp, Artificial Sequence
  Oligonucleotide for detection of SNP TSC0037390
rcatatcgaacaa

SEQ ID NO: 148075 - DNA, 13 bp, Artificial Sequence
  Oligonucleotide for detection of SNP TSC0037390
ttgtttgatacgy

SEQ ID NO: 148076 - DNA, 13 bp, Artificial Sequence
  Oligonucleotide for detection of SNP TSC0037390
rcgtatcaaacaa

SEQ ID NO: 148077 - DNA, 13 bp, Artificial Sequence
  Oligonucleotide for detection of SNP TSC0037390
ttgttcgatacgy

SEQ ID NO: 148078 - DNA, 13 bp, Artificial Sequence
  Oligonucleotide for detection of SNP TSC0037390
rcgtatcgaacaa

SEQ ID NO: 148079 - DNA, 13 bp, Artificial Sequence
  Oligonucleotide for detection of SNP TSC0037390
gtgtattgaataa

SEQ ID NO: 148080 - DNA, 13 bp, Artificial Sequence
  Oligonucleotide for detection of SNP TSC0037390
ttattcaatacac

SEQ ID NO: 148081 - DNA, 13 bp, Artificial Sequence
  Oligonucleotide for detection of SNP TSC0037390
gcgtattgaataa

SEQ ID NO: 148082 - DNA, 13 bp, Artificial Sequence
  Oligonucleotide for detection of SNP TSC0037390
ttattcaatacgc

SEQ ID NO: 148083 - DNA, 13 bp, Artificial Sequence
  Oligonucleotide for detection of SNP TSC0037390
gtgtatcgaataa

SEQ ID NO: 148084 - DNA, 13 bp, Artificial Sequence
  Oligonucleotide for detection of SNP TSC0037390
ttattcgatacac

SEQ ID NO: 148085 - DNA, 13 bp, Artificial Sequence
  Oligonucleotide for detection of SNP TSC0037390
gcgtatcgaataa

SEQ ID NO: 148086 - DNA, 13 bp, Artificial Sequence
  Oligonucleotide for detection of SNP TSC0037390
ttattcgatacgc

SEQ ID NO: 148087 - DNA, 13 bp, Artificial Sequence
  Oligonucleotide for detection of SNP TSC0037391
tttttttaagaaa

SEQ ID NO: 148088 - DNA, 13 bp, Artificial Sequence
  Oligonucleotide for detection of SNP TSC0037391
tttcttaaaaaaa

SEQ ID NO: 148089 - DNA, 13 bp, Artificial Sequence
  Oligonucleotide for detection of SNP TSC0037392
ttatttgttgtat

SEQ ID NO: 148090 - DNA, 13 bp, Artificial Sequence
  Oligonucleotide for detection of SNP TSC0037392
atacaacaaataa

SEQ ID NO: 148091 - DNA, 13 bp, Artificial Sequence
  Oligonucleotide for detection of SNP TSC0037392
ttattttttgtat

SEQ ID NO: 148092 - DNA, 13 bp, Artificial Sequence
  Oligonucleotide for detection of SNP TSC0037392
atacaaaaaataa

SEQ ID NO: 148093 - DNA, 13 bp, Artificial Sequence
  Oligonucleotide for detection of SNP TSC0037392
atataataggtga

SEQ ID NO: 148094 - DNA, 13 bp, Artificial Sequence
  Oligonucleotide for detection of SNP TSC0037392
tcacctattatat

SEQ ID NO: 148095 - DNA, 13 bp, Artificial Sequence
  Oligonucleotide for detection of SNP TSC0037392
atataaaaggtga

SEQ ID NO: 148096 - DNA, 13 bp, Artificial Sequence
  Oligonucleotide for detection of SNP TSC0037392
tcaccttttatat

SEQ ID NO: 148097 - DNA, 13 bp, Artificial Sequence
  Oligonucleotide for detection of SNP TSC0037394
tttgttaaatgga

SEQ ID NO: 148098 - DNA, 13 bp, Artificial Sequence
  Oligonucleotide for detection of SNP TSC0037394
tccatttaacaaa

SEQ ID NO: 148099 - DNA, 13 bp, Artificial Sequence
  Oligonucleotide for detection of SNP TSC0037394
tttgtttaatgga

SEQ ID NO: 148100 - DNA, 13 bp, Artificial Sequence
  Oligonucleotide for detection of SNP TSC0037394
tccattaaacaaa

SEQ ID NO: 148101 - DNA, 13 bp, Artificial Sequence
  Oligonucleotide for detection of SNP TSC0037394
ttcgttaaatgga

SEQ ID NO: 148102 - DNA, 13 bp, Artificial Sequence
  Oligonucleotide for detection of SNP TSC0037394
tccatttaacgaa

SEQ ID NO: 148103 - DNA, 13 bp, Artificial Sequence
  Oligonucleotide for detection of SNP TSC0037394
ttcgtttaatgga

SEQ ID NO: 148104 - DNA, 13 bp, Artificial Sequence
  Oligonucleotide for detection of SNP TSC0037394
tccattaaacgaa

SEQ ID NO: 148105 - DNA, 13 bp, Artificial Sequence
  Oligonucleotide for detection of SNP TSC0037394
tttatttaatgag

SEQ ID NO: 148106 - DNA, 13 bp, Artificial Sequence
  Oligonucleotide for detection of SNP TSC0037394
ctcattaaataaa

SEQ ID NO: 148107 - DNA, 13 bp, Artificial Sequence
  Oligonucleotide for detection of SNP TSC0037394
tttattaaatgag

SEQ ID NO: 148108 - DNA, 13 bp, Artificial Sequence
  Oligonucleotide for detection of SNP TSC0037394
ctcatttaataaa

SEQ ID NO: 148109 - DNA, 13 bp, Artificial Sequence
  Oligonucleotide for detection of SNP TSC0037394
tttatttaacgag

SEQ ID NO: 148110 - DNA, 13 bp, Artificial Sequence
  Oligonucleotide for detection of SNP TSC0037394
ctcgttaaataaa

SEQ ID NO: 148111 - DNA, 13 bp, Artificial Sequence
  Oligonucleotide for detection of SNP TSC0037394
tttattaaacgag

SEQ ID NO: 148112 - DNA, 13 bp, Artificial Sequence
  Oligonucleotide for detection of SNP TSC0037394
ctcgtttaataaa

SEQ ID NO: 148113 - DNA, 13 bp, Artificial Sequence
  Oligonucleotide for detection of SNP TSC0037396
ttattagtattty

SEQ ID NO: 148114 - DNA, 13 bp, Artificial Sequence
  Oligonucleotide for detection of SNP TSC0037396
raaatactaataa

SEQ ID NO: 148115 - DNA, 13 bp, Artificial Sequence
  Oligonucleotide for detection of SNP TSC0037396
ttattaatattty

SEQ ID NO: 148116 - DNA, 13 bp, Artificial Sequence
  Oligonucleotide for detection of SNP TSC0037396
raaatattaataa

SEQ ID NO: 148117 - DNA, 13 bp, Artificial Sequence
  Oligonucleotide for detection of SNP TSC0037397
ttaagtatgatta

SEQ ID NO: 148118 - DNA, 13 bp, Artificial Sequence
  Oligonucleotide for detection of SNP TSC0037397
taatcatacttaa

SEQ ID NO: 148119 - DNA, 13 bp, Artificial Sequence
  Oligonucleotide for detection of SNP TSC0037400
ttaggtggaggtg

SEQ ID NO: 148120 - DNA, 13 bp, Artificial Sequence
  Oligonucleotide for detection of SNP TSC0037400
cacctccacctaa

SEQ ID NO: 148121 - DNA, 13 bp, Artificial Sequence
  Oligonucleotide for detection of SNP TSC0037400
ttaggttgaggtg

SEQ ID NO: 148122 - DNA, 13 bp, Artificial Sequence
  Oligonucleotide for detection of SNP TSC0037400
cacctcaacctaa

SEQ ID NO: 148123 - DNA, 13 bp, Artificial Sequence
  Oligonucleotide for detection of SNP TSC0037400
tatttttatttgg

SEQ ID NO: 148124 - DNA, 13 bp, Artificial Sequence
  Oligonucleotide for detection of SNP TSC0037400
ccaaataaaaata

SEQ ID NO: 148125 - DNA, 13 bp, Artificial Sequence
  Oligonucleotide for detection of SNP TSC0037400
tattttaatttgg

SEQ ID NO: 148126 - DNA, 13 bp, Artificial Sequence
  Oligonucleotide for detection of SNP TSC0037400
ccaaattaaaata

SEQ ID NO: 148127 - DNA, 13 bp, Artificial Sequence
  Oligonucleotide for detection of SNP TSC0037402
ttttttagggggg

SEQ ID NO: 148128 - DNA, 13 bp, Artificial Sequence
  Oligonucleotide for detection of SNP TSC0037402
cccccctaaaaaa

SEQ ID NO: 148129 - DNA, 13 bp, Artificial Sequence
  Oligonucleotide for detection of SNP TSC0037403
agttggtgttata

SEQ ID NO: 148130 - DNA, 13 bp, Artificial Sequence
  Oligonucleotide for detection of SNP TSC0037403
tataacaccaact

SEQ ID NO: 148131 - DNA, 13 bp, Artificial Sequence
  Oligonucleotide for detection of SNP TSC0037403
agttggcgttata

SEQ ID NO: 148132 - DNA, 13 bp, Artificial Sequence
  Oligonucleotide for detection of SNP TSC0037403
tataacgccaact

SEQ ID NO: 148133 - DNA, 13 bp, Artificial Sequence
  Oligonucleotide for detection of SNP TSC0037403
tgtgatgttagtt

SEQ ID NO: 148134 - DNA, 13 bp, Artificial Sequence
  Oligonucleotide for detection of SNP TSC0037403
aactaacatcaca

SEQ ID NO: 148135 - DNA, 13 bp, Artificial Sequence
  Oligonucleotide for detection of SNP TSC0037403
tgtgacgttagtt

SEQ ID NO: 148136 - DNA, 13 bp, Artificial Sequence
  Oligonucleotide for detection of SNP TSC0037403
aactaacgtcaca

SEQ ID NO: 148137 - DNA, 13 bp, Artificial Sequence
  Oligonucleotide for detection of SNP TSC0037404
ttgtatatgtttt

SEQ ID NO: 148138 - DNA, 13 bp, Artificial Sequence
  Oligonucleotide for detection of SNP TSC0037404
aaaacatatacaa

SEQ ID NO: 148139 - DNA, 13 bp, Artificial Sequence
  Oligonucleotide for detection of SNP TSC0037404
ttgtatgtgtttt

SEQ ID NO: 148140 - DNA, 13 bp, Artificial Sequence
  Oligonucleotide for detection of SNP TSC0037404
aaaacacatacaa

SEQ ID NO: 148141 - DNA, 13 bp, Artificial Sequence
  Oligonucleotide for detection of SNP TSC0037405
gggtatatgggay

SEQ ID NO: 148142 - DNA, 13 bp, Artificial Sequence
  Oligonucleotide for detection of SNP TSC0037405
rtcccatataccc

SEQ ID NO: 148143 - DNA, 13 bp, Artificial Sequence
  Oligonucleotide for detection of SNP TSC0037405
gggtatgtgggay

SEQ ID NO: 148144 - DNA, 13 bp, Artificial Sequence
  Oligonucleotide for detection of SNP TSC0037405
rtcccacataccc

SEQ ID NO: 148145 - DNA, 13 bp, Artificial Sequence
  Oligonucleotide for detection of SNP TSC0037407
ttagggattaaat

SEQ ID NO: 148146 - DNA, 13 bp, Artificial Sequence
  Oligonucleotide for detection of SNP TSC0037407
atttaatccctaa

SEQ ID NO: 148147 - DNA, 13 bp, Artificial Sequence
  Oligonucleotide for detection of SNP TSC0037407
ttaggggttaaat

SEQ ID NO: 148148 - DNA, 13 bp, Artificial Sequence
  Oligonucleotide for detection of SNP TSC0037407
atttaacccctaa

SEQ ID NO: 148149 - DNA, 13 bp, Artificial Sequence
  Oligonucleotide for detection of SNP TSC0037408
ttatttgttggtg

SEQ ID NO: 148150 - DNA, 13 bp, Artificial Sequence
  Oligonucleotide for detection of SNP TSC0037408
caccaacaaataa

SEQ ID NO: 148151 - DNA, 13 bp, Artificial Sequence
  Oligonucleotide for detection of SNP TSC0037408
ttattttttggtg

SEQ ID NO: 148152 - DNA, 13 bp, Artificial Sequence
  Oligonucleotide for detection of SNP TSC0037408
caccaaaaaataa

SEQ ID NO: 148153 - DNA, 13 bp, Artificial Sequence
  Oligonucleotide for detection of SNP TSC0037408
tattaataaatga

SEQ ID NO: 148154 - DNA, 13 bp, Artificial Sequence
  Oligonucleotide for detection of SNP TSC0037408
tcatttattaata

SEQ ID NO: 148155 - DNA, 13 bp, Artificial Sequence
  Oligonucleotide for detection of SNP TSC0037408
tattaaaaaatga

SEQ ID NO: 148156 - DNA, 13 bp, Artificial Sequence
  Oligonucleotide for detection of SNP TSC0037408
tcattttttaata

SEQ ID NO: 148157 - DNA, 13 bp, Artificial Sequence
  Oligonucleotide for detection of SNP TSC0037409
taagatatggtag

SEQ ID NO: 148158 - DNA, 13 bp, Artificial Sequence
  Oligonucleotide for detection of SNP TSC0037409
ctaccatatctta

SEQ ID NO: 148159 - DNA, 13 bp, Artificial Sequence
  Oligonucleotide for detection of SNP TSC0037409
taagatgtggtag

SEQ ID NO: 148160 - DNA, 13 bp, Artificial Sequence
  Oligonucleotide for detection of SNP TSC0037409
ctaccacatctta

SEQ ID NO: 148161 - DNA, 13 bp, Artificial Sequence
  Oligonucleotide for detection of SNP TSC0037409
taagacgtggtag

SEQ ID NO: 148162 - DNA, 13 bp, Artificial Sequence
  Oligonucleotide for detection of SNP TSC0037409
ctaccacgtctta

SEQ ID NO: 148163 - DNA, 13 bp, Artificial Sequence
  Oligonucleotide for detection of SNP TSC0037409
ttgttatgtttta

SEQ ID NO: 148164 - DNA, 13 bp, Artificial Sequence
  Oligonucleotide for detection of SNP TSC0037409
taaaacataacaa

SEQ ID NO: 148165 - DNA, 13 bp, Artificial Sequence
  Oligonucleotide for detection of SNP TSC0037409
ttgttacgtttta

SEQ ID NO: 148166 - DNA, 13 bp, Artificial Sequence
  Oligonucleotide for detection of SNP TSC0037409
taaaacgtaacaa

SEQ ID NO: 148167 - DNA, 13 bp, Artificial Sequence
  Oligonucleotide for detection of SNP TSC0037410
tagaaaatagttt

SEQ ID NO: 148168 - DNA, 13 bp, Artificial Sequence
  Oligonucleotide for detection of SNP TSC0037410
aaactattttcta

SEQ ID NO: 148169 - DNA, 13 bp, Artificial Sequence
  Oligonucleotide for detection of SNP TSC0037410
tagaaagtagttt

SEQ ID NO: 148170 - DNA, 13 bp, Artificial Sequence
  Oligonucleotide for detection of SNP TSC0037410
aaactactttcta

SEQ ID NO: 148171 - DNA, 13 bp, Artificial Sequence
  Oligonucleotide for detection of SNP TSC0037411
agtaaggtgggaa

SEQ ID NO: 148172 - DNA, 13 bp, Artificial Sequence
  Oligonucleotide for detection of SNP TSC0037411
ttcccaccttact

SEQ ID NO: 148173 - DNA, 13 bp, Artificial Sequence
  Oligonucleotide for detection of SNP TSC0037411
agtaagttgggaa

SEQ ID NO: 148174 - DNA, 13 bp, Artificial Sequence
  Oligonucleotide for detection of SNP TSC0037411
ttcccaacttact

SEQ ID NO: 148175 - DNA, 13 bp, Artificial Sequence
  Oligonucleotide for detection of SNP TSC0037413
ttttaatttttat

SEQ ID NO: 148176 - DNA, 13 bp, Artificial Sequence
  Oligonucleotide for detection of SNP TSC0037413
ataaaaattaaaa

SEQ ID NO: 148177 - DNA, 13 bp, Artificial Sequence
  Oligonucleotide for detection of SNP TSC0037413
ataaaagttgaaa

SEQ ID NO: 148178 - DNA, 13 bp, Artificial Sequence
  Oligonucleotide for detection of SNP TSC0037413
tttcaacttttat

SEQ ID NO: 148179 - DNA, 13 bp, Artificial Sequence
  Oligonucleotide for detection of SNP TSC0037413
ataaaatttgaaa

SEQ ID NO: 148180 - DNA, 13 bp, Artificial Sequence
  Oligonucleotide for detection of SNP TSC0037413
tttcaaattttat

SEQ ID NO: 148181 - DNA, 13 bp, Artificial Sequence
  Oligonucleotide for detection of SNP TSC0037415
tatagtagattty

SEQ ID NO: 148182 - DNA, 13 bp, Artificial Sequence
  Oligonucleotide for detection of SNP TSC0037415
raaatctactata

SEQ ID NO: 148183 - DNA, 13 bp, Artificial Sequence
  Oligonucleotide for detection of SNP TSC0037415
tatagtggattty

SEQ ID NO: 148184 - DNA, 13 bp, Artificial Sequence
  Oligonucleotide for detection of SNP TSC0037415
raaatccactata

SEQ ID NO: 148185 - DNA, 13 bp, Artificial Sequence
  Oligonucleotide for detection of SNP TSC0037416
aaagtatggagtg

SEQ ID NO: 148186 - DNA, 13 bp, Artificial Sequence
  Oligonucleotide for detection of SNP TSC0037416
cactccatacttt

SEQ ID NO: 148187 - DNA, 13 bp, Artificial Sequence
  Oligonucleotide for detection of SNP TSC0037416
aaagtacggagtg

SEQ ID NO: 148188 - DNA, 13 bp, Artificial Sequence
  Oligonucleotide for detection of SNP TSC0037416
cactccgtacttt

SEQ ID NO: 148189 - DNA, 13 bp, Artificial Sequence
  Oligonucleotide for detection of SNP TSC0037417
atttttaaaaatt

SEQ ID NO: 148190 - DNA, 13 bp, Artificial Sequence
  Oligonucleotide for detection of SNP TSC0037417
aatttttaaaaat

SEQ ID NO: 148191 - DNA, 13 bp, Artificial Sequence
  Oligonucleotide for detection of SNP TSC0037417
attttttaaaatt

SEQ ID NO: 148192 - DNA, 13 bp, Artificial Sequence
  Oligonucleotide for detection of SNP TSC0037417
aattttaaaaaat

SEQ ID NO: 148193 - DNA, 13 bp, Artificial Sequence
  Oligonucleotide for detection of SNP TSC0037417
agtttttaaaaat

SEQ ID NO: 148194 - DNA, 13 bp, Artificial Sequence
  Oligonucleotide for detection of SNP TSC0037417
atttttaaaaact

SEQ ID NO: 148195 - DNA, 13 bp, Artificial Sequence
  Oligonucleotide for detection of SNP TSC0037417
agttttaaaaaat

SEQ ID NO: 148196 - DNA, 13 bp, Artificial Sequence
  Oligonucleotide for detection of SNP TSC0037417
attttttaaaact

SEQ ID NO: 148197 - DNA, 13 bp, Artificial Sequence
  Oligonucleotide for detection of SNP TSC0037418
ttaaaaattatat

SEQ ID NO: 148198 - DNA, 13 bp, Artificial Sequence
  Oligonucleotide for detection of SNP TSC0037418
atataatttttaa

SEQ ID NO: 148199 - DNA, 13 bp, Artificial Sequence
  Oligonucleotide for detection of SNP TSC0037419
aaatgtattgagy

SEQ ID NO: 148200 - DNA, 13 bp, Artificial Sequence
  Oligonucleotide for detection of SNP TSC0037419
rctcaatacattt

SEQ ID NO: 148201 - DNA, 13 bp, Artificial Sequence
  Oligonucleotide for detection of SNP TSC0037419
aaatgtgttgagy

SEQ ID NO: 148202 - DNA, 13 bp, Artificial Sequence
  Oligonucleotide for detection of SNP TSC0037419
rctcaacacattt

SEQ ID NO: 148203 - DNA, 13 bp, Artificial Sequence
  Oligonucleotide for detection of SNP TSC0037419
aaatgcgttgagy

SEQ ID NO: 148204 - DNA, 13 bp, Artificial Sequence
  Oligonucleotide for detection of SNP TSC0037419
rctcaacgcattt

SEQ ID NO: 148205 - DNA, 13 bp, Artificial Sequence
  Oligonucleotide for detection of SNP TSC0037419
gtttaatgtattt

SEQ ID NO: 148206 - DNA, 13 bp, Artificial Sequence
  Oligonucleotide for detection of SNP TSC0037419
aaatacattaaac

SEQ ID NO: 148207 - DNA, 13 bp, Artificial Sequence
  Oligonucleotide for detection of SNP TSC0037419
gtttaacgtattt

SEQ ID NO: 148208 - DNA, 13 bp, Artificial Sequence
  Oligonucleotide for detection of SNP TSC0037419
aaatacgttaaac

SEQ ID NO: 148209 - DNA, 13 bp, Artificial Sequence
  Oligonucleotide for detection of SNP TSC0037420
atagaatgaaaay

SEQ ID NO: 148210 - DNA, 13 bp, Artificial Sequence
  Oligonucleotide for detection of SNP TSC0037420
rttttcattctat

SEQ ID NO: 148211 - DNA, 13 bp, Artificial Sequence
  Oligonucleotide for detection of SNP TSC0037420
atagaaggaaaay

SEQ ID NO: 148212 - DNA, 13 bp, Artificial Sequence
  Oligonucleotide for detection of SNP TSC0037420
rttttccttctat

SEQ ID NO: 148213 - DNA, 13 bp, Artificial Sequence
  Oligonucleotide for detection of SNP TSC0037420
atagaacgaaaay

SEQ ID NO: 148214 - DNA, 13 bp, Artificial Sequence
  Oligonucleotide for detection of SNP TSC0037420
rttttcgttctat

SEQ ID NO: 148215 - DNA, 13 bp, Artificial Sequence
  Oligonucleotide for detection of SNP TSC0037420
gttttcgttttat

SEQ ID NO: 148216 - DNA, 13 bp, Artificial Sequence
  Oligonucleotide for detection of SNP TSC0037420
ataaaacgaaaac

SEQ ID NO: 148217 - DNA, 13 bp, Artificial Sequence
  Oligonucleotide for detection of SNP TSC0037421
aatataattgata

SEQ ID NO: 148218 - DNA, 13 bp, Artificial Sequence
  Oligonucleotide for detection of SNP TSC0037421
tatcaattatatt

SEQ ID NO: 148219 - DNA, 13 bp, Artificial Sequence
  Oligonucleotide for detection of SNP TSC0037421
aatatagttgata

SEQ ID NO: 148220 - DNA, 13 bp, Artificial Sequence
  Oligonucleotide for detection of SNP TSC0037421
tatcaactatatt

SEQ ID NO: 148221 - DNA, 13 bp, Artificial Sequence
  Oligonucleotide for detection of SNP TSC0037422
ttttagttttata

SEQ ID NO: 148222 - DNA, 13 bp, Artificial Sequence
  Oligonucleotide for detection of SNP TSC0037422
tataaaactaaaa

SEQ ID NO: 148223 - DNA, 13 bp, Artificial Sequence
  Oligonucleotide for detection of SNP TSC0037422
ttttaggtttata

SEQ ID NO: 148224 - DNA, 13 bp, Artificial Sequence
  Oligonucleotide for detection of SNP TSC0037422
tataaacctaaaa

SEQ ID NO: 148225 - DNA, 13 bp, Artificial Sequence
  Oligonucleotide for detection of SNP TSC0037422
tataaagttgaaa

SEQ ID NO: 148226 - DNA, 13 bp, Artificial Sequence
  Oligonucleotide for detection of SNP TSC0037422
tttcaactttata

SEQ ID NO: 148227 - DNA, 13 bp, Artificial Sequence
  Oligonucleotide for detection of SNP TSC0037422
tataaatttgaaa

SEQ ID NO: 148228 - DNA, 13 bp, Artificial Sequence
  Oligonucleotide for detection of SNP TSC0037422
tttcaaatttata

SEQ ID NO: 148229 - DNA, 13 bp, Artificial Sequence
  Oligonucleotide for detection of SNP TSC0037423
ggttatatattta

SEQ ID NO: 148230 - DNA, 13 bp, Artificial Sequence
  Oligonucleotide for detection of SNP TSC0037423
taaatatataacc

SEQ ID NO: 148231 - DNA, 13 bp, Artificial Sequence
  Oligonucleotide for detection of SNP TSC0037423
ggttatgtattta

SEQ ID NO: 148232 - DNA, 13 bp, Artificial Sequence
  Oligonucleotide for detection of SNP TSC0037423
taaatacataacc

SEQ ID NO: 148233 - DNA, 13 bp, Artificial Sequence
  Oligonucleotide for detection of SNP TSC0037426
attgttgtagtaa

SEQ ID NO: 148234 - DNA, 13 bp, Artificial Sequence
  Oligonucleotide for detection of SNP TSC0037426
ttactacaacaat

SEQ ID NO: 148235 - DNA, 13 bp, Artificial Sequence
  Oligonucleotide for detection of SNP TSC0037426
attgttatagtaa

SEQ ID NO: 148236 - DNA, 13 bp, Artificial Sequence
  Oligonucleotide for detection of SNP TSC0037426
ttactataacaat

SEQ ID NO: 148237 - DNA, 13 bp, Artificial Sequence
  Oligonucleotide for detection of SNP TSC0037427
atgttttttagtt

SEQ ID NO: 148238 - DNA, 13 bp, Artificial Sequence
  Oligonucleotide for detection of SNP TSC0037427
aactaaaaaacat

SEQ ID NO: 148239 - DNA, 13 bp, Artificial Sequence
  Oligonucleotide for detection of SNP TSC0037427
atgtttgttagtt

SEQ ID NO: 148240 - DNA, 13 bp, Artificial Sequence
  Oligonucleotide for detection of SNP TSC0037427
aactaacaaacat

SEQ ID NO: 148241 - DNA, 13 bp, Artificial Sequence
  Oligonucleotide for detection of SNP TSC0037427
agttaggagatat

SEQ ID NO: 148242 - DNA, 13 bp, Artificial Sequence
  Oligonucleotide for detection of SNP TSC0037427
atatctcctaact

SEQ ID NO: 148243 - DNA, 13 bp, Artificial Sequence
  Oligonucleotide for detection of SNP TSC0037427
agttagtagatat

SEQ ID NO: 148244 - DNA, 13 bp, Artificial Sequence
  Oligonucleotide for detection of SNP TSC0037427
atatctactaact

SEQ ID NO: 148245 - DNA, 13 bp, Artificial Sequence
  Oligonucleotide for detection of SNP TSC0037431
taagattgagaty

SEQ ID NO: 148246 - DNA, 13 bp, Artificial Sequence
  Oligonucleotide for detection of SNP TSC0037431
ratctcaatctta

SEQ ID NO: 148247 - DNA, 13 bp, Artificial Sequence
  Oligonucleotide for detection of SNP TSC0037431
taagatcgagaty

SEQ ID NO: 148248 - DNA, 13 bp, Artificial Sequence
  Oligonucleotide for detection of SNP TSC0037431
ratctcgatctta

SEQ ID NO: 148249 - DNA, 13 bp, Artificial Sequence
  Oligonucleotide for detection of SNP TSC0037432
atttttaggtgtt

SEQ ID NO: 148250 - DNA, 13 bp, Artificial Sequence
  Oligonucleotide for detection of SNP TSC0037432
aacacctaaaaat

SEQ ID NO: 148251 - DNA, 13 bp, Artificial Sequence
  Oligonucleotide for detection of SNP TSC0037432
atttttgggtgtt

SEQ ID NO: 148252 - DNA, 13 bp, Artificial Sequence
  Oligonucleotide for detection of SNP TSC0037432
aacacccaaaaat

SEQ ID NO: 148253 - DNA, 13 bp, Artificial Sequence
  Oligonucleotide for detection of SNP TSC0037433
tagtaaataaagt

SEQ ID NO: 148254 - DNA, 13 bp, Artificial Sequence
  Oligonucleotide for detection of SNP TSC0037433
actttatttacta

SEQ ID NO: 148255 - DNA, 13 bp, Artificial Sequence
  Oligonucleotide for detection of SNP TSC0037433
tagtaagtaaagt

SEQ ID NO: 148256 - DNA, 13 bp, Artificial Sequence
  Oligonucleotide for detection of SNP TSC0037433
actttacttacta

SEQ ID NO: 148257 - DNA, 13 bp, Artificial Sequence
  Oligonucleotide for detection of SNP TSC0037434
tgtatattatgtt

SEQ ID NO: 148258 - DNA, 13 bp, Artificial Sequence
  Oligonucleotide for detection of SNP TSC0037434
aacataatataca

SEQ ID NO: 148259 - DNA, 13 bp, Artificial Sequence
  Oligonucleotide for detection of SNP TSC0037434
tgtatagtatgtt

SEQ ID NO: 148260 - DNA, 13 bp, Artificial Sequence
  Oligonucleotide for detection of SNP TSC0037434
aacatactataca

SEQ ID NO: 148261 - DNA, 13 bp, Artificial Sequence
  Oligonucleotide for detection of SNP TSC0037434
aatatggtgtata

SEQ ID NO: 148262 - DNA, 13 bp, Artificial Sequence
  Oligonucleotide for detection of SNP TSC0037434
tatacaccatatt

SEQ ID NO: 148263 - DNA, 13 bp, Artificial Sequence
  Oligonucleotide for detection of SNP TSC0037434
aatatgttgtata

SEQ ID NO: 148264 - DNA, 13 bp, Artificial Sequence
  Oligonucleotide for detection of SNP TSC0037434
tatacaacatatt

SEQ ID NO: 148265 - DNA, 13 bp, Artificial Sequence
  Oligonucleotide for detection of SNP TSC0037435
tagtaggagaaay

SEQ ID NO: 148266 - DNA, 13 bp, Artificial Sequence
  Oligonucleotide for detection of SNP TSC0037435
rtttctcctacta

SEQ ID NO: 148267 - DNA, 13 bp, Artificial Sequence
  Oligonucleotide for detection of SNP TSC0037435
tagtagtagaaay

SEQ ID NO: 148268 - DNA, 13 bp, Artificial Sequence
  Oligonucleotide for detection of SNP TSC0037435
rtttctactacta

SEQ ID NO: 148269 - DNA, 13 bp, Artificial Sequence
  Oligonucleotide for detection of SNP TSC0037435
gtttttattgtta

SEQ ID NO: 148270 - DNA, 13 bp, Artificial Sequence
  Oligonucleotide for detection of SNP TSC0037435
taacaataaaaac

SEQ ID NO: 148271 - DNA, 13 bp, Artificial Sequence
  Oligonucleotide for detection of SNP TSC0037436
gaaggtatatatt

SEQ ID NO: 148272 - DNA, 13 bp, Artificial Sequence
  Oligonucleotide for detection of SNP TSC0037436
aatatataccttc

SEQ ID NO: 148273 - DNA, 13 bp, Artificial Sequence
  Oligonucleotide for detection of SNP TSC0037436
gaaggtttatatt

SEQ ID NO: 148274 - DNA, 13 bp, Artificial Sequence
  Oligonucleotide for detection of SNP TSC0037436
aatataaaccttc

SEQ ID NO: 148275 - DNA, 13 bp, Artificial Sequence
  Oligonucleotide for detection of SNP TSC0037436
agtgtgtatttty

SEQ ID NO: 148276 - DNA, 13 bp, Artificial Sequence
  Oligonucleotide for detection of SNP TSC0037436
raaaatacacact

SEQ ID NO: 148277 - DNA, 13 bp, Artificial Sequence
  Oligonucleotide for detection of SNP TSC0037436
agtgtgaatttty

SEQ ID NO: 148278 - DNA, 13 bp, Artificial Sequence
  Oligonucleotide for detection of SNP TSC0037436
raaaattcacact

SEQ ID NO: 148279 - DNA, 13 bp, Artificial Sequence
  Oligonucleotide for detection of SNP TSC0037438
ttatttgtgattt

SEQ ID NO: 148280 - DNA, 13 bp, Artificial Sequence
  Oligonucleotide for detection of SNP TSC0037438
aaatcacaaataa

SEQ ID NO: 148281 - DNA, 13 bp, Artificial Sequence
  Oligonucleotide for detection of SNP TSC0037439
aattatatatata

SEQ ID NO: 148282 - DNA, 13 bp, Artificial Sequence
  Oligonucleotide for detection of SNP TSC0037439
tatatatataatt

SEQ ID NO: 148283 - DNA, 13 bp, Artificial Sequence
  Oligonucleotide for detection of SNP TSC0037439
aattatgtatata

SEQ ID NO: 148284 - DNA, 13 bp, Artificial Sequence
  Oligonucleotide for detection of SNP TSC0037439
tatatacataatt

SEQ ID NO: 148285 - DNA, 13 bp, Artificial Sequence
  Oligonucleotide for detection of SNP TSC0037440
gagaaagttggay

SEQ ID NO: 148286 - DNA, 13 bp, Artificial Sequence
  Oligonucleotide for detection of SNP TSC0037440
rtccaactttctc

SEQ ID NO: 148287 - DNA, 13 bp, Artificial Sequence
  Oligonucleotide for detection of SNP TSC0037440
gagaaatttggay

SEQ ID NO: 148288 - DNA, 13 bp, Artificial Sequence
  Oligonucleotide for detection of SNP TSC0037440
rtccaaatttctc

SEQ ID NO: 148289 - DNA, 13 bp, Artificial Sequence
  Oligonucleotide for detection of SNP TSC0037440
gtttaatttttty

SEQ ID NO: 148290 - DNA, 13 bp, Artificial Sequence
  Oligonucleotide for detection of SNP TSC0037440
raaaaaattaaac

SEQ ID NO: 148291 - DNA, 13 bp, Artificial Sequence
  Oligonucleotide for detection of SNP TSC0037440
gtttaaattttty

SEQ ID NO: 148292 - DNA, 13 bp, Artificial Sequence
  Oligonucleotide for detection of SNP TSC0037440
raaaaatttaaac

SEQ ID NO: 148293 - DNA, 13 bp, Artificial Sequence
  Oligonucleotide for detection of SNP TSC0037442
gtttggagttagg

SEQ ID NO: 148294 - DNA, 13 bp, Artificial Sequence
  Oligonucleotide for detection of SNP TSC0037442
cctaactccaaac

SEQ ID NO: 148295 - DNA, 13 bp, Artificial Sequence
  Oligonucleotide for detection of SNP TSC0037442
gtttggggttagg

SEQ ID NO: 148296 - DNA, 13 bp, Artificial Sequence
  Oligonucleotide for detection of SNP TSC0037442
cctaaccccaaac

SEQ ID NO: 148297 - DNA, 13 bp, Artificial Sequence
  Oligonucleotide for detection of SNP TSC0037443
tgtagttttattg

SEQ ID NO: 148298 - DNA, 13 bp, Artificial Sequence
  Oligonucleotide for detection of SNP TSC0037443
caataaaactaca

SEQ ID NO: 148299 - DNA, 13 bp, Artificial Sequence
  Oligonucleotide for detection of SNP TSC0037443
tgtagtgttattg

SEQ ID NO: 148300 - DNA, 13 bp, Artificial Sequence
  Oligonucleotide for detection of SNP TSC0037443
caataacactaca

SEQ ID NO: 148301 - DNA, 13 bp, Artificial Sequence
  Oligonucleotide for detection of SNP TSC0037443
tagtgagattgta

SEQ ID NO: 148302 - DNA, 13 bp, Artificial Sequence
  Oligonucleotide for detection of SNP TSC0037443
tacaatctcacta

SEQ ID NO: 148303 - DNA, 13 bp, Artificial Sequence
  Oligonucleotide for detection of SNP TSC0037443
tagtgatattgta

SEQ ID NO: 148304 - DNA, 13 bp, Artificial Sequence
  Oligonucleotide for detection of SNP TSC0037443
tacaatatcacta

SEQ ID NO: 148305 - DNA, 13 bp, Artificial Sequence
  Oligonucleotide for detection of SNP TSC0037444
atttttatagaty

SEQ ID NO: 148306 - DNA, 13 bp, Artificial Sequence
  Oligonucleotide for detection of SNP TSC0037444
ratctataaaaat

SEQ ID NO: 148307 - DNA, 13 bp, Artificial Sequence
  Oligonucleotide for detection of SNP TSC0037444
atttttgtagaty

SEQ ID NO: 148308 - DNA, 13 bp, Artificial Sequence
  Oligonucleotide for detection of SNP TSC0037444
ratctacaaaaat

SEQ ID NO: 148309 - DNA, 13 bp, Artificial Sequence
  Oligonucleotide for detection of SNP TSC0037444
attttcgtagaty

SEQ ID NO: 148310 - DNA, 13 bp, Artificial Sequence
  Oligonucleotide for detection of SNP TSC0037444
ratctacgaaaat

SEQ ID NO: 148311 - DNA, 13 bp, Artificial Sequence
  Oligonucleotide for detection of SNP TSC0037444
gatttatggaaat

SEQ ID NO: 148312 - DNA, 13 bp, Artificial Sequence
  Oligonucleotide for detection of SNP TSC0037444
atttccataaatc

SEQ ID NO: 148313 - DNA, 13 bp, Artificial Sequence
  Oligonucleotide for detection of SNP TSC0037444
gatttacggaaat

SEQ ID NO: 148314 - DNA, 13 bp, Artificial Sequence
  Oligonucleotide for detection of SNP TSC0037444
atttccgtaaatc

SEQ ID NO: 148315 - DNA, 13 bp, Artificial Sequence
  Oligonucleotide for detection of SNP TSC0037445
aagtttattttgg

SEQ ID NO: 148316 - DNA, 13 bp, Artificial Sequence
  Oligonucleotide for detection of SNP TSC0037445
ccaaaataaactt

SEQ ID NO: 148317 - DNA, 13 bp, Artificial Sequence
  Oligonucleotide for detection of SNP TSC0037445
aagttttttttgg

SEQ ID NO: 148318 - DNA, 13 bp, Artificial Sequence
  Oligonucleotide for detection of SNP TSC0037445
ccaaaaaaaactt

SEQ ID NO: 148319 - DNA, 13 bp, Artificial Sequence
  Oligonucleotide for detection of SNP TSC0037445
ttagaatgagttt

SEQ ID NO: 148320 - DNA, 13 bp, Artificial Sequence
  Oligonucleotide for detection of SNP TSC0037445
aaactcattctaa

SEQ ID NO: 148321 - DNA, 13 bp, Artificial Sequence
  Oligonucleotide for detection of SNP TSC0037445
ttagaaagagttt

SEQ ID NO: 148322 - DNA, 13 bp, Artificial Sequence
  Oligonucleotide for detection of SNP TSC0037445
aaactctttctaa

SEQ ID NO: 148323 - DNA, 13 bp, Artificial Sequence
  Oligonucleotide for detection of SNP TSC0037446
ttatatttttagy

SEQ ID NO: 148324 - DNA, 13 bp, Artificial Sequence
  Oligonucleotide for detection of SNP TSC0037446
rctaaaaatataa

SEQ ID NO: 148325 - DNA, 13 bp, Artificial Sequence
  Oligonucleotide for detection of SNP TSC0037446
ttatatgtttagy

SEQ ID NO: 148326 - DNA, 13 bp, Artificial Sequence
  Oligonucleotide for detection of SNP TSC0037446
rctaaacatataa

SEQ ID NO: 148327 - DNA, 13 bp, Artificial Sequence
  Oligonucleotide for detection of SNP TSC0037446
gttaaggatgtag

SEQ ID NO: 148328 - DNA, 13 bp, Artificial Sequence
  Oligonucleotide for detection of SNP TSC0037446
ctacatccttaac

SEQ ID NO: 148329 - DNA, 13 bp, Artificial Sequence
  Oligonucleotide for detection of SNP TSC0037446
gttaagtatgtag

SEQ ID NO: 148330 - DNA, 13 bp, Artificial Sequence
  Oligonucleotide for detection of SNP TSC0037446
ctacatacttaac

SEQ ID NO: 148331 - DNA, 13 bp, Artificial Sequence
  Oligonucleotide for detection of SNP TSC0037447
atgatatgtagga

SEQ ID NO: 148332 - DNA, 13 bp, Artificial Sequence
  Oligonucleotide for detection of SNP TSC0037447
tcctacatatcat

SEQ ID NO: 148333 - DNA, 13 bp, Artificial Sequence
  Oligonucleotide for detection of SNP TSC0037447
atgatacgtagga

SEQ ID NO: 148334 - DNA, 13 bp, Artificial Sequence
  Oligonucleotide for detection of SNP TSC0037447
tcctacgtatcat

SEQ ID NO: 148335 - DNA, 13 bp, Artificial Sequence
  Oligonucleotide for detection of SNP TSC0037447
ttttgtgtattat

SEQ ID NO: 148336 - DNA, 13 bp, Artificial Sequence
  Oligonucleotide for detection of SNP TSC0037447
ataatacacaaaa

SEQ ID NO: 148337 - DNA, 13 bp, Artificial Sequence
  Oligonucleotide for detection of SNP TSC0037447
ttttgtatattat

SEQ ID NO: 148338 - DNA, 13 bp, Artificial Sequence
  Oligonucleotide for detection of SNP TSC0037447
ataatatacaaaa

SEQ ID NO: 148339 - DNA, 13 bp, Artificial Sequence
  Oligonucleotide for detection of SNP TSC0037447
ttttgcgtattat

SEQ ID NO: 148340 - DNA, 13 bp, Artificial Sequence
  Oligonucleotide for detection of SNP TSC0037447
ataatacgcaaaa

SEQ ID NO: 148341 - DNA, 13 bp, Artificial Sequence
  Oligonucleotide for detection of SNP TSC0037448
gtatttagtgata

SEQ ID NO: 148342 - DNA, 13 bp, Artificial Sequence
  Oligonucleotide for detection of SNP TSC0037448
tatcactaaatac

SEQ ID NO: 148343 - DNA, 13 bp, Artificial Sequence
  Oligonucleotide for detection of SNP TSC0037448
gtatttggtgata

SEQ ID NO: 148344 - DNA, 13 bp, Artificial Sequence
  Oligonucleotide for detection of SNP TSC0037448
tatcaccaaatac

SEQ ID NO: 148345 - DNA, 13 bp, Artificial Sequence
  Oligonucleotide for detection of SNP TSC0037448
gtattcggtgata

SEQ ID NO: 148346 - DNA, 13 bp, Artificial Sequence
  Oligonucleotide for detection of SNP TSC0037448
tatcaccgaatac

SEQ ID NO: 148347 - DNA, 13 bp, Artificial Sequence
  Oligonucleotide for detection of SNP TSC0037448
tattattgaatay

SEQ ID NO: 148348 - DNA, 13 bp, Artificial Sequence
  Oligonucleotide for detection of SNP TSC0037448
rtattcaataata

SEQ ID NO: 148349 - DNA, 13 bp, Artificial Sequence
  Oligonucleotide for detection of SNP TSC0037448
tattatcgaatay

SEQ ID NO: 148350 - DNA, 13 bp, Artificial Sequence
  Oligonucleotide for detection of SNP TSC0037448
rtattcgataata

SEQ ID NO: 148351 - DNA, 13 bp, Artificial Sequence
  Oligonucleotide for detection of SNP TSC0037449
gtttatatgtata

SEQ ID NO: 148352 - DNA, 13 bp, Artificial Sequence
  Oligonucleotide for detection of SNP TSC0037449
tatacatataaac

SEQ ID NO: 148353 - DNA, 13 bp, Artificial Sequence
  Oligonucleotide for detection of SNP TSC0037449
gtttatttgtata

SEQ ID NO: 148354 - DNA, 13 bp, Artificial Sequence
  Oligonucleotide for detection of SNP TSC0037449
tatacaaataaac

SEQ ID NO: 148355 - DNA, 13 bp, Artificial Sequence
  Oligonucleotide for detection of SNP TSC0037449
tgtatatatagay

SEQ ID NO: 148356 - DNA, 13 bp, Artificial Sequence
  Oligonucleotide for detection of SNP TSC0037449
rtctatatataca

SEQ ID NO: 148357 - DNA, 13 bp, Artificial Sequence
  Oligonucleotide for detection of SNP TSC0037449
tgtataaatagay

SEQ ID NO: 148358 - DNA, 13 bp, Artificial Sequence
  Oligonucleotide for detection of SNP TSC0037449
rtctatttataca

SEQ ID NO: 148359 - DNA, 13 bp, Artificial Sequence
  Oligonucleotide for detection of SNP TSC0037450
taataaagttgaa

SEQ ID NO: 148360 - DNA, 13 bp, Artificial Sequence
  Oligonucleotide for detection of SNP TSC0037450
ttcaactttatta

SEQ ID NO: 148361 - DNA, 13 bp, Artificial Sequence
  Oligonucleotide for detection of SNP TSC0037450
taataatgttgaa

SEQ ID NO: 148362 - DNA, 13 bp, Artificial Sequence
  Oligonucleotide for detection of SNP TSC0037450
ttcaacattatta

SEQ ID NO: 148363 - DNA, 13 bp, Artificial Sequence
  Oligonucleotide for detection of SNP TSC0037450
tttagttttatta

SEQ ID NO: 148364 - DNA, 13 bp, Artificial Sequence
  Oligonucleotide for detection of SNP TSC0037450
taataaaactaaa

SEQ ID NO: 148365 - DNA, 13 bp, Artificial Sequence
  Oligonucleotide for detection of SNP TSC0037451
tatatttgttatg

SEQ ID NO: 148366 - DNA, 13 bp, Artificial Sequence
  Oligonucleotide for detection of SNP TSC0037451
cataacaaatata

SEQ ID NO: 148367 - DNA, 13 bp, Artificial Sequence
  Oligonucleotide for detection of SNP TSC0037451
tatattcgttatg

SEQ ID NO: 148368 - DNA, 13 bp, Artificial Sequence
  Oligonucleotide for detection of SNP TSC0037451
cataacgaatata

SEQ ID NO: 148369 - DNA, 13 bp, Artificial Sequence
  Oligonucleotide for detection of SNP TSC0037451
tatagtgagtatg

SEQ ID NO: 148370 - DNA, 13 bp, Artificial Sequence
  Oligonucleotide for detection of SNP TSC0037451
catactcactata

SEQ ID NO: 148371 - DNA, 13 bp, Artificial Sequence
  Oligonucleotide for detection of SNP TSC0037451
tatagtaagtatg

SEQ ID NO: 148372 - DNA, 13 bp, Artificial Sequence
  Oligonucleotide for detection of SNP TSC0037451
catacttactata

SEQ ID NO: 148373 - DNA, 13 bp, Artificial Sequence
  Oligonucleotide for detection of SNP TSC0037451
tatagcgagtatg

SEQ ID NO: 148374 - DNA, 13 bp, Artificial Sequence
  Oligonucleotide for detection of SNP TSC0037451
catactcgctata

SEQ ID NO: 148375 - DNA, 13 bp, Artificial Sequence
  Oligonucleotide for detection of SNP TSC0037453
atttttatgttay

SEQ ID NO: 148376 - DNA, 13 bp, Artificial Sequence
  Oligonucleotide for detection of SNP TSC0037453
rtaacataaaaat

SEQ ID NO: 148377 - DNA, 13 bp, Artificial Sequence
  Oligonucleotide for detection of SNP TSC0037453
atttttttgttay

SEQ ID NO: 148378 - DNA, 13 bp, Artificial Sequence
  Oligonucleotide for detection of SNP TSC0037453
rtaacaaaaaaat

SEQ ID NO: 148379 - DNA, 13 bp, Artificial Sequence
  Oligonucleotide for detection of SNP TSC0037453
gtagtatgaaaat

SEQ ID NO: 148380 - DNA, 13 bp, Artificial Sequence
  Oligonucleotide for detection of SNP TSC0037453
attttcatactac

SEQ ID NO: 148381 - DNA, 13 bp, Artificial Sequence
  Oligonucleotide for detection of SNP TSC0037453
gtagtaggaaaat

SEQ ID NO: 148382 - DNA, 13 bp, Artificial Sequence
  Oligonucleotide for detection of SNP TSC0037453
attttcctactac

SEQ ID NO: 148383 - DNA, 13 bp, Artificial Sequence
  Oligonucleotide for detection of SNP TSC0037454
aggattatttgtg

SEQ ID NO: 148384 - DNA, 13 bp, Artificial Sequence
  Oligonucleotide for detection of SNP TSC0037454
cacaaataatcct

SEQ ID NO: 148385 - DNA, 13 bp, Artificial Sequence
  Oligonucleotide for detection of SNP TSC0037455
attagtatttaat

SEQ ID NO: 148386 - DNA, 13 bp, Artificial Sequence
  Oligonucleotide for detection of SNP TSC0037455
attaaatactaat

SEQ ID NO: 148387 - DNA, 13 bp, Artificial Sequence
  Oligonucleotide for detection of SNP TSC0037455
attagtttttaat

SEQ ID NO: 148388 - DNA, 13 bp, Artificial Sequence
  Oligonucleotide for detection of SNP TSC0037455
attaaaaactaat

SEQ ID NO: 148389 - DNA, 13 bp, Artificial Sequence
  Oligonucleotide for detection of SNP TSC0037455
attaagtattaat

SEQ ID NO: 148390 - DNA, 13 bp, Artificial Sequence
  Oligonucleotide for detection of SNP TSC0037455
attaatacttaat

SEQ ID NO: 148391 - DNA, 13 bp, Artificial Sequence
  Oligonucleotide for detection of SNP TSC0037455
attaaggattaat

SEQ ID NO: 148392 - DNA, 13 bp, Artificial Sequence
  Oligonucleotide for detection of SNP TSC0037455
attaatccttaat

SEQ ID NO: 148393 - DNA, 13 bp, Artificial Sequence
  Oligonucleotide for detection of SNP TSC0037456
atttttatttgta

SEQ ID NO: 148394 - DNA, 13 bp, Artificial Sequence
  Oligonucleotide for detection of SNP TSC0037456
tacaaataaaaat

SEQ ID NO: 148395 - DNA, 13 bp, Artificial Sequence
  Oligonucleotide for detection of SNP TSC0037456
atttttgtttgta

SEQ ID NO: 148396 - DNA, 13 bp, Artificial Sequence
  Oligonucleotide for detection of SNP TSC0037456
tacaaacaaaaat

SEQ ID NO: 148397 - DNA, 13 bp, Artificial Sequence
  Oligonucleotide for detection of SNP TSC0037457
agttttaatatat

SEQ ID NO: 148398 - DNA, 13 bp, Artificial Sequence
  Oligonucleotide for detection of SNP TSC0037457
atatattaaaact

SEQ ID NO: 148399 - DNA, 13 bp, Artificial Sequence
  Oligonucleotide for detection of SNP TSC0037457
agttttgatatat

SEQ ID NO: 148400 - DNA, 13 bp, Artificial Sequence
  Oligonucleotide for detection of SNP TSC0037457
atatatcaaaact

SEQ ID NO: 148401 - DNA, 13 bp, Artificial Sequence
  Oligonucleotide for detection of SNP TSC0037458
taaagtgttttay

SEQ ID NO: 148402 - DNA, 13 bp, Artificial Sequence
  Oligonucleotide for detection of SNP TSC0037458
rtaaaacacttta

SEQ ID NO: 148403 - DNA, 13 bp, Artificial Sequence
  Oligonucleotide for detection of SNP TSC0037458
taaagtattttay

SEQ ID NO: 148404 - DNA, 13 bp, Artificial Sequence
  Oligonucleotide for detection of SNP TSC0037458
rtaaaatacttta

SEQ ID NO: 148405 - DNA, 13 bp, Artificial Sequence
  Oligonucleotide for detection of SNP TSC0037461
aagaaatataggg

SEQ ID NO: 148406 - DNA, 13 bp, Artificial Sequence
  Oligonucleotide for detection of SNP TSC0037461
ccctatatttctt

SEQ ID NO: 148407 - DNA, 13 bp, Artificial Sequence
  Oligonucleotide for detection of SNP TSC0037461
aagaaaaataggg

SEQ ID NO: 148408 - DNA, 13 bp, Artificial Sequence
  Oligonucleotide for detection of SNP TSC0037461
ccctatttttctt

SEQ ID NO: 148409 - DNA, 13 bp, Artificial Sequence
  Oligonucleotide for detection of SNP TSC0037462
tgtatgtgtgtgt

SEQ ID NO: 148410 - DNA, 13 bp, Artificial Sequence
  Oligonucleotide for detection of SNP TSC0037462
acacacacataca

SEQ ID NO: 148411 - DNA, 13 bp, Artificial Sequence
  Oligonucleotide for detection of SNP TSC0037462
tgtatgcgtgtgt

SEQ ID NO: 148412 - DNA, 13 bp, Artificial Sequence
  Oligonucleotide for detection of SNP TSC0037462
acacacgcataca

SEQ ID NO: 148413 - DNA, 13 bp, Artificial Sequence
  Oligonucleotide for detection of SNP TSC0037463
atgtatatattty

SEQ ID NO: 148414 - DNA, 13 bp, Artificial Sequence
  Oligonucleotide for detection of SNP TSC0037463
raaatatatacat

SEQ ID NO: 148415 - DNA, 13 bp, Artificial Sequence
  Oligonucleotide for detection of SNP TSC0037463
atgtatttattty

SEQ ID NO: 148416 - DNA, 13 bp, Artificial Sequence
  Oligonucleotide for detection of SNP TSC0037463
raaataaatacat

SEQ ID NO: 148417 - DNA, 13 bp, Artificial Sequence
  Oligonucleotide for detection of SNP TSC0037463
gaagtgtatatat

SEQ ID NO: 148418 - DNA, 13 bp, Artificial Sequence
  Oligonucleotide for detection of SNP TSC0037463
atatatacacttc

SEQ ID NO: 148419 - DNA, 13 bp, Artificial Sequence
  Oligonucleotide for detection of SNP TSC0037463
gaagtgaatatat

SEQ ID NO: 148420 - DNA, 13 bp, Artificial Sequence
  Oligonucleotide for detection of SNP TSC0037463
atatattcacttc

SEQ ID NO: 148421 - DNA, 13 bp, Artificial Sequence
  Oligonucleotide for detection of SNP TSC0037464
tgttggagtttaa

SEQ ID NO: 148422 - DNA, 13 bp, Artificial Sequence
  Oligonucleotide for detection of SNP TSC0037464
ttaaactccaaca

SEQ ID NO: 148423 - DNA, 13 bp, Artificial Sequence
  Oligonucleotide for detection of SNP TSC0037464
tgttggggtttaa

SEQ ID NO: 148424 - DNA, 13 bp, Artificial Sequence
  Oligonucleotide for detection of SNP TSC0037464
ttaaaccccaaca

SEQ ID NO: 148425 - DNA, 13 bp, Artificial Sequence
  Oligonucleotide for detection of SNP TSC0037464
cgttggagtttaa

SEQ ID NO: 148426 - DNA, 13 bp, Artificial Sequence
  Oligonucleotide for detection of SNP TSC0037464
ttaaactccaacg

SEQ ID NO: 148427 - DNA, 13 bp, Artificial Sequence
  Oligonucleotide for detection of SNP TSC0037464
cgttggggtttaa

SEQ ID NO: 148428 - DNA, 13 bp, Artificial Sequence
  Oligonucleotide for detection of SNP TSC0037464
ttaaaccccaacg

SEQ ID NO: 148429 - DNA, 13 bp, Artificial Sequence
  Oligonucleotide for detection of SNP TSC0037465
gtaaatgtattta

SEQ ID NO: 148430 - DNA, 13 bp, Artificial Sequence
  Oligonucleotide for detection of SNP TSC0037465
taaatacatttac

SEQ ID NO: 148431 - DNA, 13 bp, Artificial Sequence
  Oligonucleotide for detection of SNP TSC0037468
taagatagtttat

SEQ ID NO: 148432 - DNA, 13 bp, Artificial Sequence
  Oligonucleotide for detection of SNP TSC0037468
ataaactatctta

SEQ ID NO: 148433 - DNA, 13 bp, Artificial Sequence
  Oligonucleotide for detection of SNP TSC0037468
taagattgtttat

SEQ ID NO: 148434 - DNA, 13 bp, Artificial Sequence
  Oligonucleotide for detection of SNP TSC0037468
ataaacaatctta

SEQ ID NO: 148435 - DNA, 13 bp, Artificial Sequence
  Oligonucleotide for detection of SNP TSC0037468
atgaattgtttta

SEQ ID NO: 148436 - DNA, 13 bp, Artificial Sequence
  Oligonucleotide for detection of SNP TSC0037468
taaaacaattcat

SEQ ID NO: 148437 - DNA, 13 bp, Artificial Sequence
  Oligonucleotide for detection of SNP TSC0037468
atgaatagtttta

SEQ ID NO: 148438 - DNA, 13 bp, Artificial Sequence
  Oligonucleotide for detection of SNP TSC0037468
taaaactattcat

SEQ ID NO: 148439 - DNA, 13 bp, Artificial Sequence
  Oligonucleotide for detection of SNP TSC0037469
aatgaatggttga

SEQ ID NO: 148440 - DNA, 13 bp, Artificial Sequence
  Oligonucleotide for detection of SNP TSC0037469
tcaaccattcatt

SEQ ID NO: 148441 - DNA, 13 bp, Artificial Sequence
  Oligonucleotide for detection of SNP TSC0037469
aacgaatggttga

SEQ ID NO: 148442 - DNA, 13 bp, Artificial Sequence
  Oligonucleotide for detection of SNP TSC0037469
tcaaccattcgtt

SEQ ID NO: 148443 - DNA, 13 bp, Artificial Sequence
  Oligonucleotide for detection of SNP TSC0037469
aatgaacggttga

SEQ ID NO: 148444 - DNA, 13 bp, Artificial Sequence
  Oligonucleotide for detection of SNP TSC0037469
tcaaccgttcatt

SEQ ID NO: 148445 - DNA, 13 bp, Artificial Sequence
  Oligonucleotide for detection of SNP TSC0037469
aacgaacggttga

SEQ ID NO: 148446 - DNA, 13 bp, Artificial Sequence
  Oligonucleotide for detection of SNP TSC0037469
tcaaccgttcgtt

SEQ ID NO: 148447 - DNA, 13 bp, Artificial Sequence
  Oligonucleotide for detection of SNP TSC0037469
ttaattgtttgtt

SEQ ID NO: 148448 - DNA, 13 bp, Artificial Sequence
  Oligonucleotide for detection of SNP TSC0037469
aacaaacaattaa

SEQ ID NO: 148449 - DNA, 13 bp, Artificial Sequence
  Oligonucleotide for detection of SNP TSC0037469
ttaattatttgtt

SEQ ID NO: 148450 - DNA, 13 bp, Artificial Sequence
  Oligonucleotide for detection of SNP TSC0037469
aacaaataattaa

SEQ ID NO: 148451 - DNA, 13 bp, Artificial Sequence
  Oligonucleotide for detection of SNP TSC0037469
ttaatcgtttgtt

SEQ ID NO: 148452 - DNA, 13 bp, Artificial Sequence
  Oligonucleotide for detection of SNP TSC0037469
aacaaacgattaa

SEQ ID NO: 148453 - DNA, 13 bp, Artificial Sequence
  Oligonucleotide for detection of SNP TSC0037469
ttaattattcgtt

SEQ ID NO: 148454 - DNA, 13 bp, Artificial Sequence
  Oligonucleotide for detection of SNP TSC0037469
aacgaataattaa

SEQ ID NO: 148455 - DNA, 13 bp, Artificial Sequence
  Oligonucleotide for detection of SNP TSC0037469
ttaattgttcgtt

SEQ ID NO: 148456 - DNA, 13 bp, Artificial Sequence
  Oligonucleotide for detection of SNP TSC0037469
aacgaacaattaa

SEQ ID NO: 148457 - DNA, 13 bp, Artificial Sequence
  Oligonucleotide for detection of SNP TSC0037469
ttaatcgttcgtt

SEQ ID NO: 148458 - DNA, 13 bp, Artificial Sequence
  Oligonucleotide for detection of SNP TSC0037469
aacgaacgattaa

SEQ ID NO: 148459 - DNA, 13 bp, Artificial Sequence
  Oligonucleotide for detection of SNP TSC0037470
atatatgtataty

SEQ ID NO: 148460 - DNA, 13 bp, Artificial Sequence
  Oligonucleotide for detection of SNP TSC0037470
ratatacatatat

SEQ ID NO: 148461 - DNA, 13 bp, Artificial Sequence
  Oligonucleotide for detection of SNP TSC0037470
atatatatataty

SEQ ID NO: 148462 - DNA, 13 bp, Artificial Sequence
  Oligonucleotide for detection of SNP TSC0037470
ratatatatatat

SEQ ID NO: 148463 - DNA, 13 bp, Artificial Sequence
  Oligonucleotide for detection of SNP TSC0037471
tatattgaaatty

SEQ ID NO: 148464 - DNA, 13 bp, Artificial Sequence
  Oligonucleotide for detection of SNP TSC0037471
raatttcaatata

SEQ ID NO: 148465 - DNA, 13 bp, Artificial Sequence
  Oligonucleotide for detection of SNP TSC0037471
tatattaaaatty

SEQ ID NO: 148466 - DNA, 13 bp, Artificial Sequence
  Oligonucleotide for detection of SNP TSC0037471
raattttaatata

SEQ ID NO: 148467 - DNA, 13 bp, Artificial Sequence
  Oligonucleotide for detection of SNP TSC0037472
gtgagaattttta

SEQ ID NO: 148468 - DNA, 13 bp, Artificial Sequence
  Oligonucleotide for detection of SNP TSC0037472
taaaaattctcac

SEQ ID NO: 148469 - DNA, 13 bp, Artificial Sequence
  Oligonucleotide for detection of SNP TSC0037472
gtgagatttttta

SEQ ID NO: 148470 - DNA, 13 bp, Artificial Sequence
  Oligonucleotide for detection of SNP TSC0037472
taaaaaatctcac

SEQ ID NO: 148471 - DNA, 13 bp, Artificial Sequence
  Oligonucleotide for detection of SNP TSC0037472
tagagatttttay

SEQ ID NO: 148472 - DNA, 13 bp, Artificial Sequence
  Oligonucleotide for detection of SNP TSC0037472
rtaaaaatctcta

SEQ ID NO: 148473 - DNA, 13 bp, Artificial Sequence
  Oligonucleotide for detection of SNP TSC0037472
tagagagttttay

SEQ ID NO: 148474 - DNA, 13 bp, Artificial Sequence
  Oligonucleotide for detection of SNP TSC0037472
rtaaaactctcta

SEQ ID NO: 148475 - DNA, 13 bp, Artificial Sequence
  Oligonucleotide for detection of SNP TSC0037477
taaaagtgtttta

SEQ ID NO: 148476 - DNA, 13 bp, Artificial Sequence
  Oligonucleotide for detection of SNP TSC0037477
taaaacactttta

SEQ ID NO: 148477 - DNA, 13 bp, Artificial Sequence
  Oligonucleotide for detection of SNP TSC0037477
taaaagcgtttta

SEQ ID NO: 148478 - DNA, 13 bp, Artificial Sequence
  Oligonucleotide for detection of SNP TSC0037477
taaaacgctttta

SEQ ID NO: 148479 - DNA, 13 bp, Artificial Sequence
  Oligonucleotide for detection of SNP TSC0037477
tggggtgtttttg

SEQ ID NO: 148480 - DNA, 13 bp, Artificial Sequence
  Oligonucleotide for detection of SNP TSC0037477
caaaaacacccca

SEQ ID NO: 148481 - DNA, 13 bp, Artificial Sequence
  Oligonucleotide for detection of SNP TSC0037477
tggggtatttttg

SEQ ID NO: 148482 - DNA, 13 bp, Artificial Sequence
  Oligonucleotide for detection of SNP TSC0037477
caaaaatacccca

SEQ ID NO: 148483 - DNA, 13 bp, Artificial Sequence
  Oligonucleotide for detection of SNP TSC0037477
tggggcgtttttg

SEQ ID NO: 148484 - DNA, 13 bp, Artificial Sequence
  Oligonucleotide for detection of SNP TSC0037477
caaaaacgcccca

SEQ ID NO: 148485 - DNA, 13 bp, Artificial Sequence
  Oligonucleotide for detection of SNP TSC0037478
aaaagtagaaaga

SEQ ID NO: 148486 - DNA, 13 bp, Artificial Sequence
  Oligonucleotide for detection of SNP TSC0037478
tctttctactttt

SEQ ID NO: 148487 - DNA, 13 bp, Artificial Sequence
  Oligonucleotide for detection of SNP TSC0037478
aaaagttgaaaga

SEQ ID NO: 148488 - DNA, 13 bp, Artificial Sequence
  Oligonucleotide for detection of SNP TSC0037478
tctttcaactttt

SEQ ID NO: 148489 - DNA, 13 bp, Artificial Sequence
  Oligonucleotide for detection of SNP TSC0037479
ttagtgatatttt

SEQ ID NO: 148490 - DNA, 13 bp, Artificial Sequence
  Oligonucleotide for detection of SNP TSC0037479
aaaatatcactaa

SEQ ID NO: 148491 - DNA, 13 bp, Artificial Sequence
  Oligonucleotide for detection of SNP TSC0037479
ttagtgttatttt

SEQ ID NO: 148492 - DNA, 13 bp, Artificial Sequence
  Oligonucleotide for detection of SNP TSC0037479
aaaataacactaa

SEQ ID NO: 148493 - DNA, 13 bp, Artificial Sequence
  Oligonucleotide for detection of SNP TSC0037479
aaagtattattga

SEQ ID NO: 148494 - DNA, 13 bp, Artificial Sequence
  Oligonucleotide for detection of SNP TSC0037479
tcaataatacttt

SEQ ID NO: 148495 - DNA, 13 bp, Artificial Sequence
  Oligonucleotide for detection of SNP TSC0037479
aaagtagtattga

SEQ ID NO: 148496 - DNA, 13 bp, Artificial Sequence
  Oligonucleotide for detection of SNP TSC0037479
tcaatactacttt

SEQ ID NO: 148497 - DNA, 13 bp, Artificial Sequence
  Oligonucleotide for detection of SNP TSC0037480
tatggagaaagta

SEQ ID NO: 148498 - DNA, 13 bp, Artificial Sequence
  Oligonucleotide for detection of SNP TSC0037480
tactttctccata

SEQ ID NO: 148499 - DNA, 13 bp, Artificial Sequence
  Oligonucleotide for detection of SNP TSC0037480
tatggaaaaagta

SEQ ID NO: 148500 - DNA, 13 bp, Artificial Sequence
  Oligonucleotide for detection of SNP TSC0037480
tactttttccata

SEQ ID NO: 148501 - DNA, 13 bp, Artificial Sequence
  Oligonucleotide for detection of SNP TSC0037482
ggagagaataaay

SEQ ID NO: 148502 - DNA, 13 bp, Artificial Sequence
  Oligonucleotide for detection of SNP TSC0037482
rtttattctctcc

SEQ ID NO: 148503 - DNA, 13 bp, Artificial Sequence
  Oligonucleotide for detection of SNP TSC0037482
ggagaggataaay

SEQ ID NO: 148504 - DNA, 13 bp, Artificial Sequence
  Oligonucleotide for detection of SNP TSC0037482
rtttatcctctcc

SEQ ID NO: 148505 - DNA, 13 bp, Artificial Sequence
  Oligonucleotide for detection of SNP TSC0037484
aattagagtttty

SEQ ID NO: 148506 - DNA, 13 bp, Artificial Sequence
  Oligonucleotide for detection of SNP TSC0037484
raaaactctaatt

SEQ ID NO: 148507 - DNA, 13 bp, Artificial Sequence
  Oligonucleotide for detection of SNP TSC0037484
gagagttttggtt

SEQ ID NO: 148508 - DNA, 13 bp, Artificial Sequence
  Oligonucleotide for detection of SNP TSC0037484
aaccaaaactctc

SEQ ID NO: 148509 - DNA, 13 bp, Artificial Sequence
  Oligonucleotide for detection of SNP TSC0037484
gagagtattggtt

SEQ ID NO: 148510 - DNA, 13 bp, Artificial Sequence
  Oligonucleotide for detection of SNP TSC0037484
aaccaatactctc

SEQ ID NO: 148511 - DNA, 13 bp, Artificial Sequence
  Oligonucleotide for detection of SNP TSC0037485
tgttgttggttgt

SEQ ID NO: 148512 - DNA, 13 bp, Artificial Sequence
  Oligonucleotide for detection of SNP TSC0037485
acaaccaacaaca

SEQ ID NO: 148513 - DNA, 13 bp, Artificial Sequence
  Oligonucleotide for detection of SNP TSC0037485
tgttgtcggttgt

SEQ ID NO: 148514 - DNA, 13 bp, Artificial Sequence
  Oligonucleotide for detection of SNP TSC0037485
acaaccgacaaca

SEQ ID NO: 148515 - DNA, 13 bp, Artificial Sequence
  Oligonucleotide for detection of SNP TSC0037485
tgttgttggtcgt

SEQ ID NO: 148516 - DNA, 13 bp, Artificial Sequence
  Oligonucleotide for detection of SNP TSC0037485
acgaccaacaaca

SEQ ID NO: 148517 - DNA, 13 bp, Artificial Sequence
  Oligonucleotide for detection of SNP TSC0037485
tgttgtcggtcgt

SEQ ID NO: 148518 - DNA, 13 bp, Artificial Sequence
  Oligonucleotide for detection of SNP TSC0037485
acgaccgacaaca

SEQ ID NO: 148519 - DNA, 13 bp, Artificial Sequence
  Oligonucleotide for detection of SNP TSC0037485
atggttggtagta

SEQ ID NO: 148520 - DNA, 13 bp, Artificial Sequence
  Oligonucleotide for detection of SNP TSC0037485
tactaccaaccat

SEQ ID NO: 148521 - DNA, 13 bp, Artificial Sequence
  Oligonucleotide for detection of SNP TSC0037485
atggttagtagta

SEQ ID NO: 148522 - DNA, 13 bp, Artificial Sequence
  Oligonucleotide for detection of SNP TSC0037485
tactactaaccat

SEQ ID NO: 148523 - DNA, 13 bp, Artificial Sequence
  Oligonucleotide for detection of SNP TSC0037485
acggttggtagta

SEQ ID NO: 148524 - DNA, 13 bp, Artificial Sequence
  Oligonucleotide for detection of SNP TSC0037485
tactaccaaccgt

SEQ ID NO: 148525 - DNA, 13 bp, Artificial Sequence
  Oligonucleotide for detection of SNP TSC0037485
acggttagtagta

SEQ ID NO: 148526 - DNA, 13 bp, Artificial Sequence
  Oligonucleotide for detection of SNP TSC0037485
tactactaaccgt

SEQ ID NO: 148527 - DNA, 13 bp, Artificial Sequence
  Oligonucleotide for detection of SNP TSC0037485
atggtcggtagta

SEQ ID NO: 148528 - DNA, 13 bp, Artificial Sequence
  Oligonucleotide for detection of SNP TSC0037485
tactaccgaccat

SEQ ID NO: 148529 - DNA, 13 bp, Artificial Sequence
  Oligonucleotide for detection of SNP TSC0037485
acggtcggtagta

SEQ ID NO: 148530 - DNA, 13 bp, Artificial Sequence
  Oligonucleotide for detection of SNP TSC0037485
tactaccgaccgt

SEQ ID NO: 148531 - DNA, 13 bp, Artificial Sequence
  Oligonucleotide for detection of SNP TSC0037486
tgaaagaagttat

SEQ ID NO: 148532 - DNA, 13 bp, Artificial Sequence
  Oligonucleotide for detection of SNP TSC0037486
ataacttctttca

SEQ ID NO: 148533 - DNA, 13 bp, Artificial Sequence
  Oligonucleotide for detection of SNP TSC0037486
tgaaagtagttat

SEQ ID NO: 148534 - DNA, 13 bp, Artificial Sequence
  Oligonucleotide for detection of SNP TSC0037486
ataactactttca

SEQ ID NO: 148535 - DNA, 13 bp, Artificial Sequence
  Oligonucleotide for detection of SNP TSC0037486
atagtttttttta

SEQ ID NO: 148536 - DNA, 13 bp, Artificial Sequence
  Oligonucleotide for detection of SNP TSC0037486
taaaaaaaactat

SEQ ID NO: 148537 - DNA, 13 bp, Artificial Sequence
  Oligonucleotide for detection of SNP TSC0037486
atagttgttttta

SEQ ID NO: 148538 - DNA, 13 bp, Artificial Sequence
  Oligonucleotide for detection of SNP TSC0037486
taaaaacaactat

SEQ ID NO: 148539 - DNA, 13 bp, Artificial Sequence
  Oligonucleotide for detection of SNP TSC0037487
taaggtgggggag

SEQ ID NO: 148540 - DNA, 13 bp, Artificial Sequence
  Oligonucleotide for detection of SNP TSC0037487
ctcccccacctta

SEQ ID NO: 148541 - DNA, 13 bp, Artificial Sequence
  Oligonucleotide for detection of SNP TSC0037487
taaggttggggag

SEQ ID NO: 148542 - DNA, 13 bp, Artificial Sequence
  Oligonucleotide for detection of SNP TSC0037487
ctccccaacctta

SEQ ID NO: 148543 - DNA, 13 bp, Artificial Sequence
  Oligonucleotide for detection of SNP TSC0037489
tgggaaggaagaa

SEQ ID NO: 148544 - DNA, 13 bp, Artificial Sequence
  Oligonucleotide for detection of SNP TSC0037489
ttcttccttccca

SEQ ID NO: 148545 - DNA, 13 bp, Artificial Sequence
  Oligonucleotide for detection of SNP TSC0037489
tgggaatgaagaa

SEQ ID NO: 148546 - DNA, 13 bp, Artificial Sequence
  Oligonucleotide for detection of SNP TSC0037489
ttcttcattccca

SEQ ID NO: 148547 - DNA, 13 bp, Artificial Sequence
  Oligonucleotide for detection of SNP TSC0037492
ttttgtgttttga

SEQ ID NO: 148548 - DNA, 13 bp, Artificial Sequence
  Oligonucleotide for detection of SNP TSC0037492
tcaaaacacaaaa

SEQ ID NO: 148549 - DNA, 13 bp, Artificial Sequence
  Oligonucleotide for detection of SNP TSC0037492
ttttgttttttga

SEQ ID NO: 148550 - DNA, 13 bp, Artificial Sequence
  Oligonucleotide for detection of SNP TSC0037492
tcaaaaaacaaaa

SEQ ID NO: 148551 - DNA, 13 bp, Artificial Sequence
  Oligonucleotide for detection of SNP TSC0037492
ttttgcgttttga

SEQ ID NO: 148552 - DNA, 13 bp, Artificial Sequence
  Oligonucleotide for detection of SNP TSC0037492
tcaaaacgcaaaa

SEQ ID NO: 148553 - DNA, 13 bp, Artificial Sequence
  Oligonucleotide for detection of SNP TSC0037492
ttaaagtgtagaa

SEQ ID NO: 148554 - DNA, 13 bp, Artificial Sequence
  Oligonucleotide for detection of SNP TSC0037492
ttctacactttaa

SEQ ID NO: 148555 - DNA, 13 bp, Artificial Sequence
  Oligonucleotide for detection of SNP TSC0037492
ttaaagagtagaa

SEQ ID NO: 148556 - DNA, 13 bp, Artificial Sequence
  Oligonucleotide for detection of SNP TSC0037492
ttctactctttaa

SEQ ID NO: 148557 - DNA, 13 bp, Artificial Sequence
  Oligonucleotide for detection of SNP TSC0037492
ttaaagcgtagaa

SEQ ID NO: 148558 - DNA, 13 bp, Artificial Sequence
  Oligonucleotide for detection of SNP TSC0037492
ttctacgctttaa

SEQ ID NO: 148559 - DNA, 13 bp, Artificial Sequence
  Oligonucleotide for detection of SNP TSC0037493
ttatttaagttay

SEQ ID NO: 148560 - DNA, 13 bp, Artificial Sequence
  Oligonucleotide for detection of SNP TSC0037493
rtaacttaaataa

SEQ ID NO: 148561 - DNA, 13 bp, Artificial Sequence
  Oligonucleotide for detection of SNP TSC0037493
ttatttgagttay

SEQ ID NO: 148562 - DNA, 13 bp, Artificial Sequence
  Oligonucleotide for detection of SNP TSC0037493
rtaactcaaataa

SEQ ID NO: 148563 - DNA, 13 bp, Artificial Sequence
  Oligonucleotide for detection of SNP TSC0037497
gaggtggggtggg

SEQ ID NO: 148564 - DNA, 13 bp, Artificial Sequence
  Oligonucleotide for detection of SNP TSC0037497
cccaccccacctc

SEQ ID NO: 148565 - DNA, 13 bp, Artificial Sequence
  Oligonucleotide for detection of SNP TSC0037497
gaggtgaggtggg

SEQ ID NO: 148566 - DNA, 13 bp, Artificial Sequence
  Oligonucleotide for detection of SNP TSC0037497
cccacctcacctc

SEQ ID NO: 148567 - DNA, 13 bp, Artificial Sequence
  Oligonucleotide for detection of SNP TSC0037501
ataataatataty

SEQ ID NO: 148568 - DNA, 13 bp, Artificial Sequence
  Oligonucleotide for detection of SNP TSC0037501
ratatattattat

SEQ ID NO: 148569 - DNA, 13 bp, Artificial Sequence
  Oligonucleotide for detection of SNP TSC0037501
ataatagtataty

SEQ ID NO: 148570 - DNA, 13 bp, Artificial Sequence
  Oligonucleotide for detection of SNP TSC0037501
ratatactattat

SEQ ID NO: 148571 - DNA, 13 bp, Artificial Sequence
  Oligonucleotide for detection of SNP TSC0037502
tgggaggggggty

SEQ ID NO: 148572 - DNA, 13 bp, Artificial Sequence
  Oligonucleotide for detection of SNP TSC0037502
racccccctccca

SEQ ID NO: 148573 - DNA, 13 bp, Artificial Sequence
  Oligonucleotide for detection of SNP TSC0037502
tgggagaggggty

SEQ ID NO: 148574 - DNA, 13 bp, Artificial Sequence
  Oligonucleotide for detection of SNP TSC0037502
racccctctccca

SEQ ID NO: 148575 - DNA, 13 bp, Artificial Sequence
  Oligonucleotide for detection of SNP TSC0037505
gtttaaaaaatay

SEQ ID NO: 148576 - DNA, 13 bp, Artificial Sequence
  Oligonucleotide for detection of SNP TSC0037505
rtattttttaaac

SEQ ID NO: 148577 - DNA, 13 bp, Artificial Sequence
  Oligonucleotide for detection of SNP TSC0037505
gtttaagaaatay

SEQ ID NO: 148578 - DNA, 13 bp, Artificial Sequence
  Oligonucleotide for detection of SNP TSC0037505
rtatttcttaaac

SEQ ID NO: 148579 - DNA, 13 bp, Artificial Sequence
  Oligonucleotide for detection of SNP TSC0037507
tttgaaataggga

SEQ ID NO: 148580 - DNA, 13 bp, Artificial Sequence
  Oligonucleotide for detection of SNP TSC0037507
tccctatttcaaa

SEQ ID NO: 148581 - DNA, 13 bp, Artificial Sequence
  Oligonucleotide for detection of SNP TSC0037507
tttgaattaggga

SEQ ID NO: 148582 - DNA, 13 bp, Artificial Sequence
  Oligonucleotide for detection of SNP TSC0037507
tccctaattcaaa

SEQ ID NO: 148583 - DNA, 13 bp, Artificial Sequence
  Oligonucleotide for detection of SNP TSC0037508
gaggttgtaggat

SEQ ID NO: 148584 - DNA, 13 bp, Artificial Sequence
  Oligonucleotide for detection of SNP TSC0037508
atcctacaacctc

SEQ ID NO: 148585 - DNA, 13 bp, Artificial Sequence
  Oligonucleotide for detection of SNP TSC0037508
gaggttataggat

SEQ ID NO: 148586 - DNA, 13 bp, Artificial Sequence
  Oligonucleotide for detection of SNP TSC0037508
atcctataacctc

SEQ ID NO: 148587 - DNA, 13 bp, Artificial Sequence
  Oligonucleotide for detection of SNP TSC0037509
gtgtgtaaaaaty

SEQ ID NO: 148588 - DNA, 13 bp, Artificial Sequence
  Oligonucleotide for detection of SNP TSC0037509
ratttttacacac

SEQ ID NO: 148589 - DNA, 13 bp, Artificial Sequence
  Oligonucleotide for detection of SNP TSC0037509
gtgtgtgaaaaty

SEQ ID NO: 148590 - DNA, 13 bp, Artificial Sequence
  Oligonucleotide for detection of SNP TSC0037509
rattttcacacac

SEQ ID NO: 148591 - DNA, 13 bp, Artificial Sequence
  Oligonucleotide for detection of SNP TSC0037509
gcgtgtaaaaaty

SEQ ID NO: 148592 - DNA, 13 bp, Artificial Sequence
  Oligonucleotide for detection of SNP TSC0037509
ratttttacacgc

SEQ ID NO: 148593 - DNA, 13 bp, Artificial Sequence
  Oligonucleotide for detection of SNP TSC0037509
gcgtgtgaaaaty

SEQ ID NO: 148594 - DNA, 13 bp, Artificial Sequence
  Oligonucleotide for detection of SNP TSC0037509
rattttcacacgc

SEQ ID NO: 148595 - DNA, 13 bp, Artificial Sequence
  Oligonucleotide for detection of SNP TSC0037510
aaagaagggtaga

SEQ ID NO: 148596 - DNA, 13 bp, Artificial Sequence
  Oligonucleotide for detection of SNP TSC0037510
tctacccttcttt

SEQ ID NO: 148597 - DNA, 13 bp, Artificial Sequence
  Oligonucleotide for detection of SNP TSC0037510
aaagaaaggtaga

SEQ ID NO: 148598 - DNA, 13 bp, Artificial Sequence
  Oligonucleotide for detection of SNP TSC0037510
tctacctttcttt

SEQ ID NO: 148599 - DNA, 13 bp, Artificial Sequence
  Oligonucleotide for detection of SNP TSC0037512
gttagtagggtta

SEQ ID NO: 148600 - DNA, 13 bp, Artificial Sequence
  Oligonucleotide for detection of SNP TSC0037512
taaccctactaac

SEQ ID NO: 148601 - DNA, 13 bp, Artificial Sequence
  Oligonucleotide for detection of SNP TSC0037512
gttagtggggtta

SEQ ID NO: 148602 - DNA, 13 bp, Artificial Sequence
  Oligonucleotide for detection of SNP TSC0037512
taaccccactaac

SEQ ID NO: 148603 - DNA, 13 bp, Artificial Sequence
  Oligonucleotide for detection of SNP TSC0037512
gttagcggggtta

SEQ ID NO: 148604 - DNA, 13 bp, Artificial Sequence
  Oligonucleotide for detection of SNP TSC0037512
taaccccgctaac

SEQ ID NO: 148605 - DNA, 13 bp, Artificial Sequence
  Oligonucleotide for detection of SNP TSC0037512
tggttttgttgay

SEQ ID NO: 148606 - DNA, 13 bp, Artificial Sequence
  Oligonucleotide for detection of SNP TSC0037512
rtcaacaaaacca

SEQ ID NO: 148607 - DNA, 13 bp, Artificial Sequence
  Oligonucleotide for detection of SNP TSC0037512
tggtttcgttgay

SEQ ID NO: 148608 - DNA, 13 bp, Artificial Sequence
  Oligonucleotide for detection of SNP TSC0037512
rtcaacgaaacca

SEQ ID NO: 148609 - DNA, 13 bp, Artificial Sequence
  Oligonucleotide for detection of SNP TSC0037513
ttaggtatagtgg

SEQ ID NO: 148610 - DNA, 13 bp, Artificial Sequence
  Oligonucleotide for detection of SNP TSC0037513
ccactatacctaa

SEQ ID NO: 148611 - DNA, 13 bp, Artificial Sequence
  Oligonucleotide for detection of SNP TSC0037513
ttaggtgtagtgg

SEQ ID NO: 148612 - DNA, 13 bp, Artificial Sequence
  Oligonucleotide for detection of SNP TSC0037513
ccactacacctaa

SEQ ID NO: 148613 - DNA, 13 bp, Artificial Sequence
  Oligonucleotide for detection of SNP TSC0037513
ttaggcgtagtgg

SEQ ID NO: 148614 - DNA, 13 bp, Artificial Sequence
  Oligonucleotide for detection of SNP TSC0037513
ccactacgcctaa

SEQ ID NO: 148615 - DNA, 13 bp, Artificial Sequence
  Oligonucleotide for detection of SNP TSC0037514
tgatggtggggta

SEQ ID NO: 148616 - DNA, 13 bp, Artificial Sequence
  Oligonucleotide for detection of SNP TSC0037514
taccccaccatca

SEQ ID NO: 148617 - DNA, 13 bp, Artificial Sequence
  Oligonucleotide for detection of SNP TSC0037514
tgatgggggggta

SEQ ID NO: 148618 - DNA, 13 bp, Artificial Sequence
  Oligonucleotide for detection of SNP TSC0037514
tacccccccatca

SEQ ID NO: 148619 - DNA, 13 bp, Artificial Sequence
  Oligonucleotide for detection of SNP TSC0037514
tgatggcggggta

SEQ ID NO: 148620 - DNA, 13 bp, Artificial Sequence
  Oligonucleotide for detection of SNP TSC0037514
taccccgccatca

SEQ ID NO: 148621 - DNA, 13 bp, Artificial Sequence
  Oligonucleotide for detection of SNP TSC0037515
gtttgtattaggy

SEQ ID NO: 148622 - DNA, 13 bp, Artificial Sequence
  Oligonucleotide for detection of SNP TSC0037515
rcctaatacaaac

SEQ ID NO: 148623 - DNA, 13 bp, Artificial Sequence
  Oligonucleotide for detection of SNP TSC0037515
gtttgtgttaggy

SEQ ID NO: 148624 - DNA, 13 bp, Artificial Sequence
  Oligonucleotide for detection of SNP TSC0037515
rcctaacacaaac

SEQ ID NO: 148625 - DNA, 13 bp, Artificial Sequence
  Oligonucleotide for detection of SNP TSC0037515
gtttgcgttaggy

SEQ ID NO: 148626 - DNA, 13 bp, Artificial Sequence
  Oligonucleotide for detection of SNP TSC0037515
rcctaacgcaaac

SEQ ID NO: 148627 - DNA, 13 bp, Artificial Sequence
  Oligonucleotide for detection of SNP TSC0037515
gtttggtgtagay

SEQ ID NO: 148628 - DNA, 13 bp, Artificial Sequence
  Oligonucleotide for detection of SNP TSC0037515
rtctacaccaaac

SEQ ID NO: 148629 - DNA, 13 bp, Artificial Sequence
  Oligonucleotide for detection of SNP TSC0037515
gtttggcgtagay

SEQ ID NO: 148630 - DNA, 13 bp, Artificial Sequence
  Oligonucleotide for detection of SNP TSC0037515
rtctacgccaaac

SEQ ID NO: 148631 - DNA, 13 bp, Artificial Sequence
  Oligonucleotide for detection of SNP TSC0037520
ttatgggatgtgg

SEQ ID NO: 148632 - DNA, 13 bp, Artificial Sequence
  Oligonucleotide for detection of SNP TSC0037520
ccacatcccataa

SEQ ID NO: 148633 - DNA, 13 bp, Artificial Sequence
  Oligonucleotide for detection of SNP TSC0037520
ttatggaatgtgg

SEQ ID NO: 148634 - DNA, 13 bp, Artificial Sequence
  Oligonucleotide for detection of SNP TSC0037520
ccacattccataa

SEQ ID NO: 148635 - DNA, 13 bp, Artificial Sequence
  Oligonucleotide for detection of SNP TSC0037521
gttatttgggaga

SEQ ID NO: 148636 - DNA, 13 bp, Artificial Sequence
  Oligonucleotide for detection of SNP TSC0037521
tctcccaaataac

SEQ ID NO: 148637 - DNA, 13 bp, Artificial Sequence
  Oligonucleotide for detection of SNP TSC0037521
gttattcgggaga

SEQ ID NO: 148638 - DNA, 13 bp, Artificial Sequence
  Oligonucleotide for detection of SNP TSC0037521
tctcccgaataac

SEQ ID NO: 148639 - DNA, 13 bp, Artificial Sequence
  Oligonucleotide for detection of SNP TSC0037522
ttgtaggtataat

SEQ ID NO: 148640 - DNA, 13 bp, Artificial Sequence
  Oligonucleotide for detection of SNP TSC0037522
attatacctacaa

SEQ ID NO: 148641 - DNA, 13 bp, Artificial Sequence
  Oligonucleotide for detection of SNP TSC0037522
ttgtagatataat

SEQ ID NO: 148642 - DNA, 13 bp, Artificial Sequence
  Oligonucleotide for detection of SNP TSC0037522
attatatctacaa

SEQ ID NO: 148643 - DNA, 13 bp, Artificial Sequence
  Oligonucleotide for detection of SNP TSC0037525
ttggggttttata

SEQ ID NO: 148644 - DNA, 13 bp, Artificial Sequence
  Oligonucleotide for detection of SNP TSC0037525
tataaaaccccaa

SEQ ID NO: 148645 - DNA, 13 bp, Artificial Sequence
  Oligonucleotide for detection of SNP TSC0037525
ttgggggtttata

SEQ ID NO: 148646 - DNA, 13 bp, Artificial Sequence
  Oligonucleotide for detection of SNP TSC0037525
tataaacccccaa

SEQ ID NO: 148647 - DNA, 13 bp, Artificial Sequence
  Oligonucleotide for detection of SNP TSC0037525
tgtgaggttttag

SEQ ID NO: 148648 - DNA, 13 bp, Artificial Sequence
  Oligonucleotide for detection of SNP TSC0037525
ctaaaacctcaca

SEQ ID NO: 148649 - DNA, 13 bp, Artificial Sequence
  Oligonucleotide for detection of SNP TSC0037525
tgtgagtttttag

SEQ ID NO: 148650 - DNA, 13 bp, Artificial Sequence
  Oligonucleotide for detection of SNP TSC0037525
ctaaaaactcaca

SEQ ID NO: 148651 - DNA, 13 bp, Artificial Sequence
  Oligonucleotide for detection of SNP TSC0037534
aaatatgttgtaa

SEQ ID NO: 148652 - DNA, 13 bp, Artificial Sequence
  Oligonucleotide for detection of SNP TSC0037534
ttacaacatattt

SEQ ID NO: 148653 - DNA, 13 bp, Artificial Sequence
  Oligonucleotide for detection of SNP TSC0037534
aaatatattgtaa

SEQ ID NO: 148654 - DNA, 13 bp, Artificial Sequence
  Oligonucleotide for detection of SNP TSC0037534
ttacaatatattt

SEQ ID NO: 148655 - DNA, 13 bp, Artificial Sequence
  Oligonucleotide for detection of SNP TSC0037534
aaatatgtcgtaa

SEQ ID NO: 148656 - DNA, 13 bp, Artificial Sequence
  Oligonucleotide for detection of SNP TSC0037534
ttacgacatattt

SEQ ID NO: 148657 - DNA, 13 bp, Artificial Sequence
  Oligonucleotide for detection of SNP TSC0037534
aaatatatcgtaa

SEQ ID NO: 148658 - DNA, 13 bp, Artificial Sequence
  Oligonucleotide for detection of SNP TSC0037534
ttacgatatattt

SEQ ID NO: 148659 - DNA, 13 bp, Artificial Sequence
  Oligonucleotide for detection of SNP TSC0037535
tttttttatatgg

SEQ ID NO: 148660 - DNA, 13 bp, Artificial Sequence
  Oligonucleotide for detection of SNP TSC0037535
ccatataaaaaaa

SEQ ID NO: 148661 - DNA, 13 bp, Artificial Sequence
  Oligonucleotide for detection of SNP TSC0037536
atgttatgttttt

SEQ ID NO: 148662 - DNA, 13 bp, Artificial Sequence
  Oligonucleotide for detection of SNP TSC0037536
aaaaacataacat

SEQ ID NO: 148663 - DNA, 13 bp, Artificial Sequence
  Oligonucleotide for detection of SNP TSC0037536
atgttacgttttt

SEQ ID NO: 148664 - DNA, 13 bp, Artificial Sequence
  Oligonucleotide for detection of SNP TSC0037536
aaaaacgtaacat

SEQ ID NO: 148665 - DNA, 13 bp, Artificial Sequence
  Oligonucleotide for detection of SNP TSC0037536
aaagatgtaatat

SEQ ID NO: 148666 - DNA, 13 bp, Artificial Sequence
  Oligonucleotide for detection of SNP TSC0037536
atattacatcttt

SEQ ID NO: 148667 - DNA, 13 bp, Artificial Sequence
  Oligonucleotide for detection of SNP TSC0037536
aaagatataatat

SEQ ID NO: 148668 - DNA, 13 bp, Artificial Sequence
  Oligonucleotide for detection of SNP TSC0037536
atattatatcttt

SEQ ID NO: 148669 - DNA, 13 bp, Artificial Sequence
  Oligonucleotide for detection of SNP TSC0037536
aaagacgtaatat

SEQ ID NO: 148670 - DNA, 13 bp, Artificial Sequence
  Oligonucleotide for detection of SNP TSC0037536
atattacgtcttt

SEQ ID NO: 148671 - DNA, 13 bp, Artificial Sequence
  Oligonucleotide for detection of SNP TSC0037537
tagtatgttagaa

SEQ ID NO: 148672 - DNA, 13 bp, Artificial Sequence
  Oligonucleotide for detection of SNP TSC0037537
ttctaacatacta

SEQ ID NO: 148673 - DNA, 13 bp, Artificial Sequence
  Oligonucleotide for detection of SNP TSC0037537
tagtattttagaa

SEQ ID NO: 148674 - DNA, 13 bp, Artificial Sequence
  Oligonucleotide for detection of SNP TSC0037537
ttctaaaatacta

SEQ ID NO: 148675 - DNA, 13 bp, Artificial Sequence
  Oligonucleotide for detection of SNP TSC0037537
ttttaatatgtta

SEQ ID NO: 148676 - DNA, 13 bp, Artificial Sequence
  Oligonucleotide for detection of SNP TSC0037537
taacatattaaaa

SEQ ID NO: 148677 - DNA, 13 bp, Artificial Sequence
  Oligonucleotide for detection of SNP TSC0037537
ttttaaaatgtta

SEQ ID NO: 148678 - DNA, 13 bp, Artificial Sequence
  Oligonucleotide for detection of SNP TSC0037537
taacattttaaaa

SEQ ID NO: 148679 - DNA, 13 bp, Artificial Sequence
  Oligonucleotide for detection of SNP TSC0037538
tagaggtgaggtt

SEQ ID NO: 148680 - DNA, 13 bp, Artificial Sequence
  Oligonucleotide for detection of SNP TSC0037538
aacctcacctcta

SEQ ID NO: 148681 - DNA, 13 bp, Artificial Sequence
  Oligonucleotide for detection of SNP TSC0037538
tagaggcgaggtt

SEQ ID NO: 148682 - DNA, 13 bp, Artificial Sequence
  Oligonucleotide for detection of SNP TSC0037538
aacctcgcctcta

SEQ ID NO: 148683 - DNA, 13 bp, Artificial Sequence
  Oligonucleotide for detection of SNP TSC0037539
aataggggggtgt

SEQ ID NO: 148684 - DNA, 13 bp, Artificial Sequence
  Oligonucleotide for detection of SNP TSC0037539
acacccccctatt

SEQ ID NO: 148685 - DNA, 13 bp, Artificial Sequence
  Oligonucleotide for detection of SNP TSC0037539
aataggagggtgt

SEQ ID NO: 148686 - DNA, 13 bp, Artificial Sequence
  Oligonucleotide for detection of SNP TSC0037539
acaccctcctatt

SEQ ID NO: 148687 - DNA, 13 bp, Artificial Sequence
  Oligonucleotide for detection of SNP TSC0037539
aataggggggcgt

SEQ ID NO: 148688 - DNA, 13 bp, Artificial Sequence
  Oligonucleotide for detection of SNP TSC0037539
acgcccccctatt

SEQ ID NO: 148689 - DNA, 13 bp, Artificial Sequence
  Oligonucleotide for detection of SNP TSC0037539
aataggagggcgt

SEQ ID NO: 148690 - DNA, 13 bp, Artificial Sequence
  Oligonucleotide for detection of SNP TSC0037539
acgccctcctatt

SEQ ID NO: 148691 - DNA, 13 bp, Artificial Sequence
  Oligonucleotide for detection of SNP TSC0037540
tttatatggatty

SEQ ID NO: 148692 - DNA, 13 bp, Artificial Sequence
  Oligonucleotide for detection of SNP TSC0037540
raatccatataaa

SEQ ID NO: 148693 - DNA, 13 bp, Artificial Sequence
  Oligonucleotide for detection of SNP TSC0037540
tttatacggatty

SEQ ID NO: 148694 - DNA, 13 bp, Artificial Sequence
  Oligonucleotide for detection of SNP TSC0037540
raatccgtataaa

SEQ ID NO: 148695 - DNA, 13 bp, Artificial Sequence
  Oligonucleotide for detection of SNP TSC0037540
gaatttgtgtgag

SEQ ID NO: 148696 - DNA, 13 bp, Artificial Sequence
  Oligonucleotide for detection of SNP TSC0037540
ctcacacaaattc

SEQ ID NO: 148697 - DNA, 13 bp, Artificial Sequence
  Oligonucleotide for detection of SNP TSC0037540
gaatttatgtgag

SEQ ID NO: 148698 - DNA, 13 bp, Artificial Sequence
  Oligonucleotide for detection of SNP TSC0037540
ctcacataaattc

SEQ ID NO: 148699 - DNA, 13 bp, Artificial Sequence
  Oligonucleotide for detection of SNP TSC0037540
gaattcgtgtgag

SEQ ID NO: 148700 - DNA, 13 bp, Artificial Sequence
  Oligonucleotide for detection of SNP TSC0037540
ctcacacgaattc

SEQ ID NO: 148701 - DNA, 13 bp, Artificial Sequence
  Oligonucleotide for detection of SNP TSC0037541
tataggatgttta

SEQ ID NO: 148702 - DNA, 13 bp, Artificial Sequence
  Oligonucleotide for detection of SNP TSC0037541
taaacatcctata

SEQ ID NO: 148703 - DNA, 13 bp, Artificial Sequence
  Oligonucleotide for detection of SNP TSC0037541
tatagggtgttta

SEQ ID NO: 148704 - DNA, 13 bp, Artificial Sequence
  Oligonucleotide for detection of SNP TSC0037541
taaacaccctata

SEQ ID NO: 148705 - DNA, 13 bp, Artificial Sequence
  Oligonucleotide for detection of SNP TSC0037542
tagatgagttggg

SEQ ID NO: 148706 - DNA, 13 bp, Artificial Sequence
  Oligonucleotide for detection of SNP TSC0037542
cccaactcatcta

SEQ ID NO: 148707 - DNA, 13 bp, Artificial Sequence
  Oligonucleotide for detection of SNP TSC0037542
tagatgggttggg

SEQ ID NO: 148708 - DNA, 13 bp, Artificial Sequence
  Oligonucleotide for detection of SNP TSC0037542
cccaacccatcta

SEQ ID NO: 148709 - DNA, 13 bp, Artificial Sequence
  Oligonucleotide for detection of SNP TSC0037543
gatgtgtgttgty

SEQ ID NO: 148710 - DNA, 13 bp, Artificial Sequence
  Oligonucleotide for detection of SNP TSC0037543
racaacacacatc

SEQ ID NO: 148711 - DNA, 13 bp, Artificial Sequence
  Oligonucleotide for detection of SNP TSC0037543
gatgtgcgttgty

SEQ ID NO: 148712 - DNA, 13 bp, Artificial Sequence
  Oligonucleotide for detection of SNP TSC0037543
racaacgcacatc

SEQ ID NO: 148713 - DNA, 13 bp, Artificial Sequence
  Oligonucleotide for detection of SNP TSC0037543
ggtaatgtataty

SEQ ID NO: 148714 - DNA, 13 bp, Artificial Sequence
  Oligonucleotide for detection of SNP TSC0037543
ratatacattacc

SEQ ID NO: 148715 - DNA, 13 bp, Artificial Sequence
  Oligonucleotide for detection of SNP TSC0037543
ggtaatatataty

SEQ ID NO: 148716 - DNA, 13 bp, Artificial Sequence
  Oligonucleotide for detection of SNP TSC0037543
ratatatattacc

SEQ ID NO: 148717 - DNA, 13 bp, Artificial Sequence
  Oligonucleotide for detection of SNP TSC0037543
ggtaacgtataty

SEQ ID NO: 148718 - DNA, 13 bp, Artificial Sequence
  Oligonucleotide for detection of SNP TSC0037543
ratatacgttacc

SEQ ID NO: 148719 - DNA, 13 bp, Artificial Sequence
  Oligonucleotide for detection of SNP TSC0037544
attgaaatgttgg

SEQ ID NO: 148720 - DNA, 13 bp, Artificial Sequence
  Oligonucleotide for detection of SNP TSC0037544
ccaacatttcaat

SEQ ID NO: 148721 - DNA, 13 bp, Artificial Sequence
  Oligonucleotide for detection of SNP TSC0037544
attgaagtgttgg

SEQ ID NO: 148722 - DNA, 13 bp, Artificial Sequence
  Oligonucleotide for detection of SNP TSC0037544
ccaacacttcaat

SEQ ID NO: 148723 - DNA, 13 bp, Artificial Sequence
  Oligonucleotide for detection of SNP TSC0037544
atcgaaatgttgg

SEQ ID NO: 148724 - DNA, 13 bp, Artificial Sequence
  Oligonucleotide for detection of SNP TSC0037544
ccaacatttcgat

SEQ ID NO: 148725 - DNA, 13 bp, Artificial Sequence
  Oligonucleotide for detection of SNP TSC0037544
atcgaagtgttgg

SEQ ID NO: 148726 - DNA, 13 bp, Artificial Sequence
  Oligonucleotide for detection of SNP TSC0037544
ccaacacttcgat

SEQ ID NO: 148727 - DNA, 13 bp, Artificial Sequence
  Oligonucleotide for detection of SNP TSC0037544
attgaaacgttgg

SEQ ID NO: 148728 - DNA, 13 bp, Artificial Sequence
  Oligonucleotide for detection of SNP TSC0037544
ccaacgtttcaat

SEQ ID NO: 148729 - DNA, 13 bp, Artificial Sequence
  Oligonucleotide for detection of SNP TSC0037544
attgaagcgttgg

SEQ ID NO: 148730 - DNA, 13 bp, Artificial Sequence
  Oligonucleotide for detection of SNP TSC0037544
ccaacgcttcaat

SEQ ID NO: 148731 - DNA, 13 bp, Artificial Sequence
  Oligonucleotide for detection of SNP TSC0037544
atcgaaacgttgg

SEQ ID NO: 148732 - DNA, 13 bp, Artificial Sequence
  Oligonucleotide for detection of SNP TSC0037544
ccaacgtttcgat

SEQ ID NO: 148733 - DNA, 13 bp, Artificial Sequence
  Oligonucleotide for detection of SNP TSC0037544
atcgaagcgttgg

SEQ ID NO: 148734 - DNA, 13 bp, Artificial Sequence
  Oligonucleotide for detection of SNP TSC0037544
ccaacgcttcgat

SEQ ID NO: 148735 - DNA, 13 bp, Artificial Sequence
  Oligonucleotide for detection of SNP TSC0037545
tttagttgtgatg

SEQ ID NO: 148736 - DNA, 13 bp, Artificial Sequence
  Oligonucleotide for detection of SNP TSC0037545
catcacaactaaa

SEQ ID NO: 148737 - DNA, 13 bp, Artificial Sequence
  Oligonucleotide for detection of SNP TSC0037545
tttagtcgtgatg

SEQ ID NO: 148738 - DNA, 13 bp, Artificial Sequence
  Oligonucleotide for detection of SNP TSC0037545
catcacgactaaa

SEQ ID NO: 148739 - DNA, 13 bp, Artificial Sequence
  Oligonucleotide for detection of SNP TSC0037546
aagattgtatttt

SEQ ID NO: 148740 - DNA, 13 bp, Artificial Sequence
  Oligonucleotide for detection of SNP TSC0037546
aaaatacaatctt

SEQ ID NO: 148741 - DNA, 13 bp, Artificial Sequence
  Oligonucleotide for detection of SNP TSC0037546
aagattatatttt

SEQ ID NO: 148742 - DNA, 13 bp, Artificial Sequence
  Oligonucleotide for detection of SNP TSC0037546
aaaatataatctt

SEQ ID NO: 148743 - DNA, 13 bp, Artificial Sequence
  Oligonucleotide for detection of SNP TSC0037547
ataatagttaaat

SEQ ID NO: 148744 - DNA, 13 bp, Artificial Sequence
  Oligonucleotide for detection of SNP TSC0037547
atttaactattat

SEQ ID NO: 148745 - DNA, 13 bp, Artificial Sequence
  Oligonucleotide for detection of SNP TSC0037547
ataataattaaat

SEQ ID NO: 148746 - DNA, 13 bp, Artificial Sequence
  Oligonucleotide for detection of SNP TSC0037547
atttaattattat

SEQ ID NO: 148747 - DNA, 13 bp, Artificial Sequence
  Oligonucleotide for detection of SNP TSC0037548
aattatgtgtttt

SEQ ID NO: 148748 - DNA, 13 bp, Artificial Sequence
  Oligonucleotide for detection of SNP TSC0037548
aaaacacataatt

SEQ ID NO: 148749 - DNA, 13 bp, Artificial Sequence
  Oligonucleotide for detection of SNP TSC0037548
aattatttgtttt

SEQ ID NO: 148750 - DNA, 13 bp, Artificial Sequence
  Oligonucleotide for detection of SNP TSC0037548
aaaacaaataatt

SEQ ID NO: 148751 - DNA, 13 bp, Artificial Sequence
  Oligonucleotide for detection of SNP TSC0037548
aaggtatatgatt

SEQ ID NO: 148752 - DNA, 13 bp, Artificial Sequence
  Oligonucleotide for detection of SNP TSC0037548
aatcatatacctt

SEQ ID NO: 148753 - DNA, 13 bp, Artificial Sequence
  Oligonucleotide for detection of SNP TSC0037548
aaggtaaatgatt

SEQ ID NO: 148754 - DNA, 13 bp, Artificial Sequence
  Oligonucleotide for detection of SNP TSC0037548
aatcatttacctt

SEQ ID NO: 148755 - DNA, 13 bp, Artificial Sequence
  Oligonucleotide for detection of SNP TSC0037549
tataagattgtgg

SEQ ID NO: 148756 - DNA, 13 bp, Artificial Sequence
  Oligonucleotide for detection of SNP TSC0037549
ccacaatcttata

SEQ ID NO: 148757 - DNA, 13 bp, Artificial Sequence
  Oligonucleotide for detection of SNP TSC0037549
tataaggttgtgg

SEQ ID NO: 148758 - DNA, 13 bp, Artificial Sequence
  Oligonucleotide for detection of SNP TSC0037549
ccacaaccttata

SEQ ID NO: 148759 - DNA, 13 bp, Artificial Sequence
  Oligonucleotide for detection of SNP TSC0037550
ggtgagaaagggg

SEQ ID NO: 148760 - DNA, 13 bp, Artificial Sequence
  Oligonucleotide for detection of SNP TSC0037550
cccctttctcacc

SEQ ID NO: 148761 - DNA, 13 bp, Artificial Sequence
  Oligonucleotide for detection of SNP TSC0037550
ggtgagtaagggg

SEQ ID NO: 148762 - DNA, 13 bp, Artificial Sequence
  Oligonucleotide for detection of SNP TSC0037550
ccccttactcacc

SEQ ID NO: 148763 - DNA, 13 bp, Artificial Sequence
  Oligonucleotide for detection of SNP TSC0037551
taaattgaaaaaa

SEQ ID NO: 148764 - DNA, 13 bp, Artificial Sequence
  Oligonucleotide for detection of SNP TSC0037551
ttttttcaattta

SEQ ID NO: 148765 - DNA, 13 bp, Artificial Sequence
  Oligonucleotide for detection of SNP TSC0037552
ttaataggtattt

SEQ ID NO: 148766 - DNA, 13 bp, Artificial Sequence
  Oligonucleotide for detection of SNP TSC0037552
aaatacctattaa

SEQ ID NO: 148767 - DNA, 13 bp, Artificial Sequence
  Oligonucleotide for detection of SNP TSC0037552
ttaataagtattt

SEQ ID NO: 148768 - DNA, 13 bp, Artificial Sequence
  Oligonucleotide for detection of SNP TSC0037552
aaatacttattaa

SEQ ID NO: 148769 - DNA, 13 bp, Artificial Sequence
  Oligonucleotide for detection of SNP TSC0037553
tttgagattgtag

SEQ ID NO: 148770 - DNA, 13 bp, Artificial Sequence
  Oligonucleotide for detection of SNP TSC0037553
ctacaatctcaaa

SEQ ID NO: 148771 - DNA, 13 bp, Artificial Sequence
  Oligonucleotide for detection of SNP TSC0037553
tttgaggttgtag

SEQ ID NO: 148772 - DNA, 13 bp, Artificial Sequence
  Oligonucleotide for detection of SNP TSC0037553
ctacaacctcaaa

SEQ ID NO: 148773 - DNA, 13 bp, Artificial Sequence
  Oligonucleotide for detection of SNP TSC0037554
aagaaatgtgata

SEQ ID NO: 148774 - DNA, 13 bp, Artificial Sequence
  Oligonucleotide for detection of SNP TSC0037554
tatcacatttctt

SEQ ID NO: 148775 - DNA, 13 bp, Artificial Sequence
  Oligonucleotide for detection of SNP TSC0037554
aagaaacgtgata

SEQ ID NO: 148776 - DNA, 13 bp, Artificial Sequence
  Oligonucleotide for detection of SNP TSC0037554
tatcacgtttctt

SEQ ID NO: 148777 - DNA, 13 bp, Artificial Sequence
  Oligonucleotide for detection of SNP TSC0037556
tgaaagaagtata

SEQ ID NO: 148778 - DNA, 13 bp, Artificial Sequence
  Oligonucleotide for detection of SNP TSC0037556
tatacttctttca

SEQ ID NO: 148779 - DNA, 13 bp, Artificial Sequence
  Oligonucleotide for detection of SNP TSC0037556
tgaaagtagtata

SEQ ID NO: 148780 - DNA, 13 bp, Artificial Sequence
  Oligonucleotide for detection of SNP TSC0037556
tatactactttca

SEQ ID NO: 148781 - DNA, 13 bp, Artificial Sequence
  Oligonucleotide for detection of SNP TSC0037556
tatgtttttttta

SEQ ID NO: 148782 - DNA, 13 bp, Artificial Sequence
  Oligonucleotide for detection of SNP TSC0037556
taaaaaaaacata

SEQ ID NO: 148783 - DNA, 13 bp, Artificial Sequence
  Oligonucleotide for detection of SNP TSC0037556
tatgttattttta

SEQ ID NO: 148784 - DNA, 13 bp, Artificial Sequence
  Oligonucleotide for detection of SNP TSC0037556
taaaaataacata

SEQ ID NO: 148785 - DNA, 13 bp, Artificial Sequence
  Oligonucleotide for detection of SNP TSC0037558
tttagtagtttga

SEQ ID NO: 148786 - DNA, 13 bp, Artificial Sequence
  Oligonucleotide for detection of SNP TSC0037558
tcaaactactaaa

SEQ ID NO: 148787 - DNA, 13 bp, Artificial Sequence
  Oligonucleotide for detection of SNP TSC0037558
tttagttgtttga

SEQ ID NO: 148788 - DNA, 13 bp, Artificial Sequence
  Oligonucleotide for detection of SNP TSC0037558
tcaaacaactaaa

SEQ ID NO: 148789 - DNA, 13 bp, Artificial Sequence
  Oligonucleotide for detection of SNP TSC0037558
tttagtcgtttga

SEQ ID NO: 148790 - DNA, 13 bp, Artificial Sequence
  Oligonucleotide for detection of SNP TSC0037558
tcaaacgactaaa

SEQ ID NO: 148791 - DNA, 13 bp, Artificial Sequence
  Oligonucleotide for detection of SNP TSC0037558
ttaagttgttaaa

SEQ ID NO: 148792 - DNA, 13 bp, Artificial Sequence
  Oligonucleotide for detection of SNP TSC0037558
tttaacaacttaa

SEQ ID NO: 148793 - DNA, 13 bp, Artificial Sequence
  Oligonucleotide for detection of SNP TSC0037558
ttaagtggttaaa

SEQ ID NO: 148794 - DNA, 13 bp, Artificial Sequence
  Oligonucleotide for detection of SNP TSC0037558
tttaaccacttaa

SEQ ID NO: 148795 - DNA, 13 bp, Artificial Sequence
  Oligonucleotide for detection of SNP TSC0037558
ttaagcggttaaa

SEQ ID NO: 148796 - DNA, 13 bp, Artificial Sequence
  Oligonucleotide for detection of SNP TSC0037558
tttaaccgcttaa

SEQ ID NO: 148797 - DNA, 13 bp, Artificial Sequence
  Oligonucleotide for detection of SNP TSC0037559
gtttttataggtg

SEQ ID NO: 148798 - DNA, 13 bp, Artificial Sequence
  Oligonucleotide for detection of SNP TSC0037559
cacctataaaaac

SEQ ID NO: 148799 - DNA, 13 bp, Artificial Sequence
  Oligonucleotide for detection of SNP TSC0037559
gtttttgtaggtg

SEQ ID NO: 148800 - DNA, 13 bp, Artificial Sequence
  Oligonucleotide for detection of SNP TSC0037559
cacctacaaaaac

SEQ ID NO: 148801 - DNA, 13 bp, Artificial Sequence
  Oligonucleotide for detection of SNP TSC0037559
gttttcgtaggtg

SEQ ID NO: 148802 - DNA, 13 bp, Artificial Sequence
  Oligonucleotide for detection of SNP TSC0037559
cacctacgaaaac

SEQ ID NO: 148803 - DNA, 13 bp, Artificial Sequence
  Oligonucleotide for detection of SNP TSC0037559
tatttgtgagagy

SEQ ID NO: 148804 - DNA, 13 bp, Artificial Sequence
  Oligonucleotide for detection of SNP TSC0037559
rctctcacaaata

SEQ ID NO: 148805 - DNA, 13 bp, Artificial Sequence
  Oligonucleotide for detection of SNP TSC0037559
tatttgcgagagy

SEQ ID NO: 148806 - DNA, 13 bp, Artificial Sequence
  Oligonucleotide for detection of SNP TSC0037559
rctctcgcaaata

SEQ ID NO: 148807 - DNA, 13 bp, Artificial Sequence
  Oligonucleotide for detection of SNP TSC0037562
tatttatgtttay

SEQ ID NO: 148808 - DNA, 13 bp, Artificial Sequence
  Oligonucleotide for detection of SNP TSC0037562
rtaaacataaata

SEQ ID NO: 148809 - DNA, 13 bp, Artificial Sequence
  Oligonucleotide for detection of SNP TSC0037562
tatttacgtttay

SEQ ID NO: 148810 - DNA, 13 bp, Artificial Sequence
  Oligonucleotide for detection of SNP TSC0037562
rtaaacgtaaata

SEQ ID NO: 148811 - DNA, 13 bp, Artificial Sequence
  Oligonucleotide for detection of SNP TSC0037562
gtgagtgtgagtg

SEQ ID NO: 148812 - DNA, 13 bp, Artificial Sequence
  Oligonucleotide for detection of SNP TSC0037562
cactcacactcac

SEQ ID NO: 148813 - DNA, 13 bp, Artificial Sequence
  Oligonucleotide for detection of SNP TSC0037562
gtgagtatgagtg

SEQ ID NO: 148814 - DNA, 13 bp, Artificial Sequence
  Oligonucleotide for detection of SNP TSC0037562
cactcatactcac

SEQ ID NO: 148815 - DNA, 13 bp, Artificial Sequence
  Oligonucleotide for detection of SNP TSC0037562
gtgagcgtgagtg

SEQ ID NO: 148816 - DNA, 13 bp, Artificial Sequence
  Oligonucleotide for detection of SNP TSC0037562
cactcacgctcac

SEQ ID NO: 148817 - DNA, 13 bp, Artificial Sequence
  Oligonucleotide for detection of SNP TSC0037564
ttggtgattataa

SEQ ID NO: 148818 - DNA, 13 bp, Artificial Sequence
  Oligonucleotide for detection of SNP TSC0037564
ttataatcaccaa

SEQ ID NO: 148819 - DNA, 13 bp, Artificial Sequence
  Oligonucleotide for detection of SNP TSC0037564
ttggtgtttataa

SEQ ID NO: 148820 - DNA, 13 bp, Artificial Sequence
  Oligonucleotide for detection of SNP TSC0037564
ttataaacaccaa

SEQ ID NO: 148821 - DNA, 13 bp, Artificial Sequence
  Oligonucleotide for detection of SNP TSC0037564
ttatagttattaa

SEQ ID NO: 148822 - DNA, 13 bp, Artificial Sequence
  Oligonucleotide for detection of SNP TSC0037564
ttaataactataa

SEQ ID NO: 148823 - DNA, 13 bp, Artificial Sequence
  Oligonucleotide for detection of SNP TSC0037565
tggggggggttag

SEQ ID NO: 148824 - DNA, 13 bp, Artificial Sequence
  Oligonucleotide for detection of SNP TSC0037565
ctaacccccccca

SEQ ID NO: 148825 - DNA, 13 bp, Artificial Sequence
  Oligonucleotide for detection of SNP TSC0037565
tgggggaggttag

SEQ ID NO: 148826 - DNA, 13 bp, Artificial Sequence
  Oligonucleotide for detection of SNP TSC0037565
ctaacctccccca

SEQ ID NO: 148827 - DNA, 13 bp, Artificial Sequence
  Oligonucleotide for detection of SNP TSC0037566
taggagtgagggy

SEQ ID NO: 148828 - DNA, 13 bp, Artificial Sequence
  Oligonucleotide for detection of SNP TSC0037566
rccctcactccta

SEQ ID NO: 148829 - DNA, 13 bp, Artificial Sequence
  Oligonucleotide for detection of SNP TSC0037566
taggagcgagggy

SEQ ID NO: 148830 - DNA, 13 bp, Artificial Sequence
  Oligonucleotide for detection of SNP TSC0037566
rccctcgctccta

SEQ ID NO: 148831 - DNA, 13 bp, Artificial Sequence
  Oligonucleotide for detection of SNP TSC0037567
agagagtgtagtg

SEQ ID NO: 148832 - DNA, 13 bp, Artificial Sequence
  Oligonucleotide for detection of SNP TSC0037567
cactacactctct

SEQ ID NO: 148833 - DNA, 13 bp, Artificial Sequence
  Oligonucleotide for detection of SNP TSC0037567
agagagcgtagtg

SEQ ID NO: 148834 - DNA, 13 bp, Artificial Sequence
  Oligonucleotide for detection of SNP TSC0037567
cactacgctctct

SEQ ID NO: 148835 - DNA, 13 bp, Artificial Sequence
  Oligonucleotide for detection of SNP TSC0037567
agagagtgtagcg

SEQ ID NO: 148836 - DNA, 13 bp, Artificial Sequence
  Oligonucleotide for detection of SNP TSC0037567
cgctacactctct

SEQ ID NO: 148837 - DNA, 13 bp, Artificial Sequence
  Oligonucleotide for detection of SNP TSC0037567
agagagcgtagcg

SEQ ID NO: 148838 - DNA, 13 bp, Artificial Sequence
  Oligonucleotide for detection of SNP TSC0037567
cgctacgctctct

SEQ ID NO: 148839 - DNA, 13 bp, Artificial Sequence
  Oligonucleotide for detection of SNP TSC0037567
cgttgtgtttttt

SEQ ID NO: 148840 - DNA, 13 bp, Artificial Sequence
  Oligonucleotide for detection of SNP TSC0037567
aaaaaacacaacg

SEQ ID NO: 148841 - DNA, 13 bp, Artificial Sequence
  Oligonucleotide for detection of SNP TSC0037567
cgttgtatttttt

SEQ ID NO: 148842 - DNA, 13 bp, Artificial Sequence
  Oligonucleotide for detection of SNP TSC0037567
aaaaaatacaacg

SEQ ID NO: 148843 - DNA, 13 bp, Artificial Sequence
  Oligonucleotide for detection of SNP TSC0037567
tgttgcgtttttt

SEQ ID NO: 148844 - DNA, 13 bp, Artificial Sequence
  Oligonucleotide for detection of SNP TSC0037567
aaaaaacgcaaca

SEQ ID NO: 148845 - DNA, 13 bp, Artificial Sequence
  Oligonucleotide for detection of SNP TSC0037567
cgttgcgtttttt

SEQ ID NO: 148846 - DNA, 13 bp, Artificial Sequence
  Oligonucleotide for detection of SNP TSC0037567
aaaaaacgcaacg

SEQ ID NO: 148847 - DNA, 13 bp, Artificial Sequence
  Oligonucleotide for detection of SNP TSC0037568
ttttaaggttgta

SEQ ID NO: 148848 - DNA, 13 bp, Artificial Sequence
  Oligonucleotide for detection of SNP TSC0037568
tacaaccttaaaa

SEQ ID NO: 148849 - DNA, 13 bp, Artificial Sequence
  Oligonucleotide for detection of SNP TSC0037568
ttttaaagttgta

SEQ ID NO: 148850 - DNA, 13 bp, Artificial Sequence
  Oligonucleotide for detection of SNP TSC0037568
tacaactttaaaa

SEQ ID NO: 148851 - DNA, 13 bp, Artificial Sequence
  Oligonucleotide for detection of SNP TSC0037569
ggttttagtgata

SEQ ID NO: 148852 - DNA, 13 bp, Artificial Sequence
  Oligonucleotide for detection of SNP TSC0037569
tatcactaaaacc

SEQ ID NO: 148853 - DNA, 13 bp, Artificial Sequence
  Oligonucleotide for detection of SNP TSC0037569
ggttttggtgata

SEQ ID NO: 148854 - DNA, 13 bp, Artificial Sequence
  Oligonucleotide for detection of SNP TSC0037569
tatcaccaaaacc

SEQ ID NO: 148855 - DNA, 13 bp, Artificial Sequence
  Oligonucleotide for detection of SNP TSC0037569
ggtttcggtgata

SEQ ID NO: 148856 - DNA, 13 bp, Artificial Sequence
  Oligonucleotide for detection of SNP TSC0037569
tatcaccgaaacc

SEQ ID NO: 148857 - DNA, 13 bp, Artificial Sequence
  Oligonucleotide for detection of SNP TSC0037569
tattattggggty

SEQ ID NO: 148858 - DNA, 13 bp, Artificial Sequence
  Oligonucleotide for detection of SNP TSC0037569
raccccaataata

SEQ ID NO: 148859 - DNA, 13 bp, Artificial Sequence
  Oligonucleotide for detection of SNP TSC0037569
tattatcggggty

SEQ ID NO: 148860 - DNA, 13 bp, Artificial Sequence
  Oligonucleotide for detection of SNP TSC0037569
raccccgataata

SEQ ID NO: 148861 - DNA, 13 bp, Artificial Sequence
  Oligonucleotide for detection of SNP TSC0037570
gatttatggggta

SEQ ID NO: 148862 - DNA, 13 bp, Artificial Sequence
  Oligonucleotide for detection of SNP TSC0037570
taccccataaatc

SEQ ID NO: 148863 - DNA, 13 bp, Artificial Sequence
  Oligonucleotide for detection of SNP TSC0037570
gatttacggggta

SEQ ID NO: 148864 - DNA, 13 bp, Artificial Sequence
  Oligonucleotide for detection of SNP TSC0037570
taccccgtaaatc

SEQ ID NO: 148865 - DNA, 13 bp, Artificial Sequence
  Oligonucleotide for detection of SNP TSC0037570
tgttttgtgggty

SEQ ID NO: 148866 - DNA, 13 bp, Artificial Sequence
  Oligonucleotide for detection of SNP TSC0037570
racccacaaaaca

SEQ ID NO: 148867 - DNA, 13 bp, Artificial Sequence
  Oligonucleotide for detection of SNP TSC0037570
tgttttatgggty

SEQ ID NO: 148868 - DNA, 13 bp, Artificial Sequence
  Oligonucleotide for detection of SNP TSC0037570
racccataaaaca

SEQ ID NO: 148869 - DNA, 13 bp, Artificial Sequence
  Oligonucleotide for detection of SNP TSC0037570
tgtttcgtgggty

SEQ ID NO: 148870 - DNA, 13 bp, Artificial Sequence
  Oligonucleotide for detection of SNP TSC0037570
racccacgaaaca

SEQ ID NO: 148871 - DNA, 13 bp, Artificial Sequence
  Oligonucleotide for detection of SNP TSC0037573
aaattaatataaa

SEQ ID NO: 148872 - DNA, 13 bp, Artificial Sequence
  Oligonucleotide for detection of SNP TSC0037573
tttatattaattt

SEQ ID NO: 148873 - DNA, 13 bp, Artificial Sequence
  Oligonucleotide for detection of SNP TSC0037573
aaattagtataaa

SEQ ID NO: 148874 - DNA, 13 bp, Artificial Sequence
  Oligonucleotide for detection of SNP TSC0037573
tttatactaattt

SEQ ID NO: 148875 - DNA, 13 bp, Artificial Sequence
  Oligonucleotide for detection of SNP TSC0037574
aaatagtttttty

SEQ ID NO: 148876 - DNA, 13 bp, Artificial Sequence
  Oligonucleotide for detection of SNP TSC0037574
raaaaaactattt

SEQ ID NO: 148877 - DNA, 13 bp, Artificial Sequence
  Oligonucleotide for detection of SNP TSC0037574
aaataggttttty

SEQ ID NO: 148878 - DNA, 13 bp, Artificial Sequence
  Oligonucleotide for detection of SNP TSC0037574
raaaaacctattt

SEQ ID NO: 148879 - DNA, 13 bp, Artificial Sequence
  Oligonucleotide for detection of SNP TSC0037574
ggggaagttattt

SEQ ID NO: 148880 - DNA, 13 bp, Artificial Sequence
  Oligonucleotide for detection of SNP TSC0037574
aaataacttcccc

SEQ ID NO: 148881 - DNA, 13 bp, Artificial Sequence
  Oligonucleotide for detection of SNP TSC0037574
ggggaatttattt

SEQ ID NO: 148882 - DNA, 13 bp, Artificial Sequence
  Oligonucleotide for detection of SNP TSC0037574
aaataaattcccc

SEQ ID NO: 148883 - DNA, 13 bp, Artificial Sequence
  Oligonucleotide for detection of SNP TSC0037575
ttgattatgtgat

SEQ ID NO: 148884 - DNA, 13 bp, Artificial Sequence
  Oligonucleotide for detection of SNP TSC0037575
atcacataatcaa

SEQ ID NO: 148885 - DNA, 13 bp, Artificial Sequence
  Oligonucleotide for detection of SNP TSC0037575
ttgattgtgtgat

SEQ ID NO: 148886 - DNA, 13 bp, Artificial Sequence
  Oligonucleotide for detection of SNP TSC0037575
atcacacaatcaa

SEQ ID NO: 148887 - DNA, 13 bp, Artificial Sequence
  Oligonucleotide for detection of SNP TSC0037576
ttttatatattty

SEQ ID NO: 148888 - DNA, 13 bp, Artificial Sequence
  Oligonucleotide for detection of SNP TSC0037576
raaatatataaaa

SEQ ID NO: 148889 - DNA, 13 bp, Artificial Sequence
  Oligonucleotide for detection of SNP TSC0037576
ttttatgtattty

SEQ ID NO: 148890 - DNA, 13 bp, Artificial Sequence
  Oligonucleotide for detection of SNP TSC0037576
raaatacataaaa

SEQ ID NO: 148891 - DNA, 13 bp, Artificial Sequence
  Oligonucleotide for detection of SNP TSC0037577
gtagatgaagggy

SEQ ID NO: 148892 - DNA, 13 bp, Artificial Sequence
  Oligonucleotide for detection of SNP TSC0037577
rcccttcatctac

SEQ ID NO: 148893 - DNA, 13 bp, Artificial Sequence
  Oligonucleotide for detection of SNP TSC0037577
gtagataaagggy

SEQ ID NO: 148894 - DNA, 13 bp, Artificial Sequence
  Oligonucleotide for detection of SNP TSC0037577
rccctttatctac

SEQ ID NO: 148895 - DNA, 13 bp, Artificial Sequence
  Oligonucleotide for detection of SNP TSC0037578
ttgtttataaaat

SEQ ID NO: 148896 - DNA, 13 bp, Artificial Sequence
  Oligonucleotide for detection of SNP TSC0037578
attttataaacaa

SEQ ID NO: 148897 - DNA, 13 bp, Artificial Sequence
  Oligonucleotide for detection of SNP TSC0037578
ttgtttgtaaaat

SEQ ID NO: 148898 - DNA, 13 bp, Artificial Sequence
  Oligonucleotide for detection of SNP TSC0037578
attttacaaacaa

SEQ ID NO: 148899 - DNA, 13 bp, Artificial Sequence
  Oligonucleotide for detection of SNP TSC0037579
gattgagtttaat

SEQ ID NO: 148900 - DNA, 13 bp, Artificial Sequence
  Oligonucleotide for detection of SNP TSC0037579
attaaactcaatc

SEQ ID NO: 148901 - DNA, 13 bp, Artificial Sequence
  Oligonucleotide for detection of SNP TSC0037579
gattgaatttaat

SEQ ID NO: 148902 - DNA, 13 bp, Artificial Sequence
  Oligonucleotide for detection of SNP TSC0037579
attaaattcaatc

SEQ ID NO: 148903 - DNA, 13 bp, Artificial Sequence
  Oligonucleotide for detection of SNP TSC0037580
tggattgtttttt

SEQ ID NO: 148904 - DNA, 13 bp, Artificial Sequence
  Oligonucleotide for detection of SNP TSC0037580
aaaaaacaatcca

SEQ ID NO: 148905 - DNA, 13 bp, Artificial Sequence
  Oligonucleotide for detection of SNP TSC0037581
tttgaggttgtgy

SEQ ID NO: 148906 - DNA, 13 bp, Artificial Sequence
  Oligonucleotide for detection of SNP TSC0037581
rcacaacctcaaa

SEQ ID NO: 148907 - DNA, 13 bp, Artificial Sequence
  Oligonucleotide for detection of SNP TSC0037581
tttgagtttgtgy

SEQ ID NO: 148908 - DNA, 13 bp, Artificial Sequence
  Oligonucleotide for detection of SNP TSC0037581
rcacaaactcaaa

SEQ ID NO: 148909 - DNA, 13 bp, Artificial Sequence
  Oligonucleotide for detection of SNP TSC0037581
gtataattttagg

SEQ ID NO: 148910 - DNA, 13 bp, Artificial Sequence
  Oligonucleotide for detection of SNP TSC0037581
cctaaaattatac

SEQ ID NO: 148911 - DNA, 13 bp, Artificial Sequence
  Oligonucleotide for detection of SNP TSC0037581
gtataaatttagg

SEQ ID NO: 148912 - DNA, 13 bp, Artificial Sequence
  Oligonucleotide for detection of SNP TSC0037581
cctaaatttatac

SEQ ID NO: 148913 - DNA, 13 bp, Artificial Sequence
  Oligonucleotide for detection of SNP TSC0037582
tgagaagttatag

SEQ ID NO: 148914 - DNA, 13 bp, Artificial Sequence
  Oligonucleotide for detection of SNP TSC0037582
ctataacttctca

SEQ ID NO: 148915 - DNA, 13 bp, Artificial Sequence
  Oligonucleotide for detection of SNP TSC0037582
tgagaaattatag

SEQ ID NO: 148916 - DNA, 13 bp, Artificial Sequence
  Oligonucleotide for detection of SNP TSC0037582
ctataatttctca

SEQ ID NO: 148917 - DNA, 13 bp, Artificial Sequence
  Oligonucleotide for detection of SNP TSC0037583
tgtaatataattt

SEQ ID NO: 148918 - DNA, 13 bp, Artificial Sequence
  Oligonucleotide for detection of SNP TSC0037583
aaattatattaca

SEQ ID NO: 148919 - DNA, 13 bp, Artificial Sequence
  Oligonucleotide for detection of SNP TSC0037583
tgtaatttaattt

SEQ ID NO: 148920 - DNA, 13 bp, Artificial Sequence
  Oligonucleotide for detection of SNP TSC0037583
aaattaaattaca

SEQ ID NO: 148921 - DNA, 13 bp, Artificial Sequence
  Oligonucleotide for detection of SNP TSC0037583
cgtaatataattt

SEQ ID NO: 148922 - DNA, 13 bp, Artificial Sequence
  Oligonucleotide for detection of SNP TSC0037583
aaattatattacg

SEQ ID NO: 148923 - DNA, 13 bp, Artificial Sequence
  Oligonucleotide for detection of SNP TSC0037583
cgtaatttaattt

SEQ ID NO: 148924 - DNA, 13 bp, Artificial Sequence
  Oligonucleotide for detection of SNP TSC0037583
aaattaaattacg

SEQ ID NO: 148925 - DNA, 13 bp, Artificial Sequence
  Oligonucleotide for detection of SNP TSC0037583
aagttatattatg

SEQ ID NO: 148926 - DNA, 13 bp, Artificial Sequence
  Oligonucleotide for detection of SNP TSC0037583
cataatataactt

SEQ ID NO: 148927 - DNA, 13 bp, Artificial Sequence
  Oligonucleotide for detection of SNP TSC0037583
aagttaaattatg

SEQ ID NO: 148928 - DNA, 13 bp, Artificial Sequence
  Oligonucleotide for detection of SNP TSC0037583
cataatttaactt

SEQ ID NO: 148929 - DNA, 13 bp, Artificial Sequence
  Oligonucleotide for detection of SNP TSC0037583
aagttatattacg

SEQ ID NO: 148930 - DNA, 13 bp, Artificial Sequence
  Oligonucleotide for detection of SNP TSC0037583
cgtaatataactt

SEQ ID NO: 148931 - DNA, 13 bp, Artificial Sequence
  Oligonucleotide for detection of SNP TSC0037583
aagttaaattacg

SEQ ID NO: 148932 - DNA, 13 bp, Artificial Sequence
  Oligonucleotide for detection of SNP TSC0037583
cgtaatttaactt

SEQ ID NO: 148933 - DNA, 13 bp, Artificial Sequence
  Oligonucleotide for detection of SNP TSC0037584
tgataaatggaag

SEQ ID NO: 148934 - DNA, 13 bp, Artificial Sequence
  Oligonucleotide for detection of SNP TSC0037584
cttccatttatca

SEQ ID NO: 148935 - DNA, 13 bp, Artificial Sequence
  Oligonucleotide for detection of SNP TSC0037584
tgataagtggaag

SEQ ID NO: 148936 - DNA, 13 bp, Artificial Sequence
  Oligonucleotide for detection of SNP TSC0037584
cttccacttatca

SEQ ID NO: 148937 - DNA, 13 bp, Artificial Sequence
  Oligonucleotide for detection of SNP TSC0037585
tatgttaatttgy

SEQ ID NO: 148938 - DNA, 13 bp, Artificial Sequence
  Oligonucleotide for detection of SNP TSC0037585
rcaaattaacata

SEQ ID NO: 148939 - DNA, 13 bp, Artificial Sequence
  Oligonucleotide for detection of SNP TSC0037585
tatgttgatttgy

SEQ ID NO: 148940 - DNA, 13 bp, Artificial Sequence
  Oligonucleotide for detection of SNP TSC0037585
rcaaatcaacata

SEQ ID NO: 148941 - DNA, 13 bp, Artificial Sequence
  Oligonucleotide for detection of SNP TSC0037585
tatgtcgatttgy

SEQ ID NO: 148942 - DNA, 13 bp, Artificial Sequence
  Oligonucleotide for detection of SNP TSC0037585
rcaaatcgacata

SEQ ID NO: 148943 - DNA, 13 bp, Artificial Sequence
  Oligonucleotide for detection of SNP TSC0037585
gtaggttggtatg

SEQ ID NO: 148944 - DNA, 13 bp, Artificial Sequence
  Oligonucleotide for detection of SNP TSC0037585
cataccaacctac

SEQ ID NO: 148945 - DNA, 13 bp, Artificial Sequence
  Oligonucleotide for detection of SNP TSC0037585
gtaggtcggtatg

SEQ ID NO: 148946 - DNA, 13 bp, Artificial Sequence
  Oligonucleotide for detection of SNP TSC0037585
cataccgacctac

SEQ ID NO: 148947 - DNA, 13 bp, Artificial Sequence
  Oligonucleotide for detection of SNP TSC0037589
tgtatgtaattaa

SEQ ID NO: 148948 - DNA, 13 bp, Artificial Sequence
  Oligonucleotide for detection of SNP TSC0037589
ttaattacataca

SEQ ID NO: 148949 - DNA, 13 bp, Artificial Sequence
  Oligonucleotide for detection of SNP TSC0037589
tgtatggaattaa

SEQ ID NO: 148950 - DNA, 13 bp, Artificial Sequence
  Oligonucleotide for detection of SNP TSC0037589
ttaattccataca

SEQ ID NO: 148951 - DNA, 13 bp, Artificial Sequence
  Oligonucleotide for detection of SNP TSC0037589
ttggttgtatata

SEQ ID NO: 148952 - DNA, 13 bp, Artificial Sequence
  Oligonucleotide for detection of SNP TSC0037589
tatatacaaccaa

SEQ ID NO: 148953 - DNA, 13 bp, Artificial Sequence
  Oligonucleotide for detection of SNP TSC0037589
ttggttttatata

SEQ ID NO: 148954 - DNA, 13 bp, Artificial Sequence
  Oligonucleotide for detection of SNP TSC0037589
tatataaaaccaa

SEQ ID NO: 148955 - DNA, 13 bp, Artificial Sequence
  Oligonucleotide for detection of SNP TSC0037590
ataatagatggag

SEQ ID NO: 148956 - DNA, 13 bp, Artificial Sequence
  Oligonucleotide for detection of SNP TSC0037590
ctccatctattat

SEQ ID NO: 148957 - DNA, 13 bp, Artificial Sequence
  Oligonucleotide for detection of SNP TSC0037590
ataatatatggag

SEQ ID NO: 148958 - DNA, 13 bp, Artificial Sequence
  Oligonucleotide for detection of SNP TSC0037590
ctccatatattat

SEQ ID NO: 148959 - DNA, 13 bp, Artificial Sequence
  Oligonucleotide for detection of SNP TSC0037590
ttttatttattgt

SEQ ID NO: 148960 - DNA, 13 bp, Artificial Sequence
  Oligonucleotide for detection of SNP TSC0037590
acaataaataaaa

SEQ ID NO: 148961 - DNA, 13 bp, Artificial Sequence
  Oligonucleotide for detection of SNP TSC0037590
ttttatatattgt

SEQ ID NO: 148962 - DNA, 13 bp, Artificial Sequence
  Oligonucleotide for detection of SNP TSC0037590
acaatatataaaa

SEQ ID NO: 148963 - DNA, 13 bp, Artificial Sequence
  Oligonucleotide for detection of SNP TSC0037595
gttgtaatattta

SEQ ID NO: 148964 - DNA, 13 bp, Artificial Sequence
  Oligonucleotide for detection of SNP TSC0037595
taaatattacaac

SEQ ID NO: 148965 - DNA, 13 bp, Artificial Sequence
  Oligonucleotide for detection of SNP TSC0037595
gttgtattattta

SEQ ID NO: 148966 - DNA, 13 bp, Artificial Sequence
  Oligonucleotide for detection of SNP TSC0037595
taaataatacaac

SEQ ID NO: 148967 - DNA, 13 bp, Artificial Sequence
  Oligonucleotide for detection of SNP TSC0037595
tggatattgtagy

SEQ ID NO: 148968 - DNA, 13 bp, Artificial Sequence
  Oligonucleotide for detection of SNP TSC0037595
rctacaatatcca

SEQ ID NO: 148969 - DNA, 13 bp, Artificial Sequence
  Oligonucleotide for detection of SNP TSC0037595
tggatagtgtagy

SEQ ID NO: 148970 - DNA, 13 bp, Artificial Sequence
  Oligonucleotide for detection of SNP TSC0037595
rctacactatcca

SEQ ID NO: 148971 - DNA, 13 bp, Artificial Sequence
  Oligonucleotide for detection of SNP TSC0037596
tggaatgtgggag

SEQ ID NO: 148972 - DNA, 13 bp, Artificial Sequence
  Oligonucleotide for detection of SNP TSC0037596
ctcccacattcca

SEQ ID NO: 148973 - DNA, 13 bp, Artificial Sequence
  Oligonucleotide for detection of SNP TSC0037596
tggaatttgggag

SEQ ID NO: 148974 - DNA, 13 bp, Artificial Sequence
  Oligonucleotide for detection of SNP TSC0037596
ctcccaaattcca

SEQ ID NO: 148975 - DNA, 13 bp, Artificial Sequence
  Oligonucleotide for detection of SNP TSC0037598
tttttgataagaa

SEQ ID NO: 148976 - DNA, 13 bp, Artificial Sequence
  Oligonucleotide for detection of SNP TSC0037598
ttcttatcaaaaa

SEQ ID NO: 148977 - DNA, 13 bp, Artificial Sequence
  Oligonucleotide for detection of SNP TSC0037599
taaagatggaata

SEQ ID NO: 148978 - DNA, 13 bp, Artificial Sequence
  Oligonucleotide for detection of SNP TSC0037599
tattccatcttta

SEQ ID NO: 148979 - DNA, 13 bp, Artificial Sequence
  Oligonucleotide for detection of SNP TSC0037599
taaagacggaata

SEQ ID NO: 148980 - DNA, 13 bp, Artificial Sequence
  Oligonucleotide for detection of SNP TSC0037599
tattccgtcttta

SEQ ID NO: 148981 - DNA, 13 bp, Artificial Sequence
  Oligonucleotide for detection of SNP TSC0037600
tttgatgttatay

SEQ ID NO: 148982 - DNA, 13 bp, Artificial Sequence
  Oligonucleotide for detection of SNP TSC0037600
rtataacatcaaa

SEQ ID NO: 148983 - DNA, 13 bp, Artificial Sequence
  Oligonucleotide for detection of SNP TSC0037600
tttgattttatay

SEQ ID NO: 148984 - DNA, 13 bp, Artificial Sequence
  Oligonucleotide for detection of SNP TSC0037600
rtataaaatcaaa

SEQ ID NO: 148985 - DNA, 13 bp, Artificial Sequence
  Oligonucleotide for detection of SNP TSC0037600
tttgacgttatay

SEQ ID NO: 148986 - DNA, 13 bp, Artificial Sequence
  Oligonucleotide for detection of SNP TSC0037600
rtataacgtcaaa

SEQ ID NO: 148987 - DNA, 13 bp, Artificial Sequence
  Oligonucleotide for detection of SNP TSC0037600
gtgtgatgttaga

SEQ ID NO: 148988 - DNA, 13 bp, Artificial Sequence
  Oligonucleotide for detection of SNP TSC0037600
tctaacatcacac

SEQ ID NO: 148989 - DNA, 13 bp, Artificial Sequence
  Oligonucleotide for detection of SNP TSC0037600
gtgtgaagttaga

SEQ ID NO: 148990 - DNA, 13 bp, Artificial Sequence
  Oligonucleotide for detection of SNP TSC0037600
tctaacttcacac

SEQ ID NO: 148991 - DNA, 13 bp, Artificial Sequence
  Oligonucleotide for detection of SNP TSC0037600
gtgtgacgttaga

SEQ ID NO: 148992 - DNA, 13 bp, Artificial Sequence
  Oligonucleotide for detection of SNP TSC0037600
tctaacgtcacac

SEQ ID NO: 148993 - DNA, 13 bp, Artificial Sequence
  Oligonucleotide for detection of SNP TSC0037601
tatgatatgtatg

SEQ ID NO: 148994 - DNA, 13 bp, Artificial Sequence
  Oligonucleotide for detection of SNP TSC0037601
catacatatcata

SEQ ID NO: 148995 - DNA, 13 bp, Artificial Sequence
  Oligonucleotide for detection of SNP TSC0037601
tatgatgtgtatg

SEQ ID NO: 148996 - DNA, 13 bp, Artificial Sequence
  Oligonucleotide for detection of SNP TSC0037601
catacacatcata

SEQ ID NO: 148997 - DNA, 13 bp, Artificial Sequence
  Oligonucleotide for detection of SNP TSC0037601
tacgatatgtatg

SEQ ID NO: 148998 - DNA, 13 bp, Artificial Sequence
  Oligonucleotide for detection of SNP TSC0037601
catacatatcgta

SEQ ID NO: 148999 - DNA, 13 bp, Artificial Sequence
  Oligonucleotide for detection of SNP TSC0037601
tacgatgtgtatg

SEQ ID NO: 149000 - DNA, 13 bp, Artificial Sequence
  Oligonucleotide for detection of SNP TSC0037601
catacacatcgta

SEQ ID NO: 149001 - DNA, 13 bp, Artificial Sequence
  Oligonucleotide for detection of SNP TSC0037601
tatgacgtgtatg

SEQ ID NO: 149002 - DNA, 13 bp, Artificial Sequence
  Oligonucleotide for detection of SNP TSC0037601
catacacgtcata

SEQ ID NO: 149003 - DNA, 13 bp, Artificial Sequence
  Oligonucleotide for detection of SNP TSC0037601
tacgacgtgtatg

SEQ ID NO: 149004 - DNA, 13 bp, Artificial Sequence
  Oligonucleotide for detection of SNP TSC0037601
catacacgtcgta

SEQ ID NO: 149005 - DNA, 13 bp, Artificial Sequence
  Oligonucleotide for detection of SNP TSC0037601
tatgtatgtcgtg

SEQ ID NO: 149006 - DNA, 13 bp, Artificial Sequence
  Oligonucleotide for detection of SNP TSC0037601
cacgacatacata

SEQ ID NO: 149007 - DNA, 13 bp, Artificial Sequence
  Oligonucleotide for detection of SNP TSC0037601
tatgtacgttgtg

SEQ ID NO: 149008 - DNA, 13 bp, Artificial Sequence
  Oligonucleotide for detection of SNP TSC0037601
cacaacgtacata

SEQ ID NO: 149009 - DNA, 13 bp, Artificial Sequence
  Oligonucleotide for detection of SNP TSC0037601
tatgtacgtcgtg

SEQ ID NO: 149010 - DNA, 13 bp, Artificial Sequence
  Oligonucleotide for detection of SNP TSC0037601
cacgacgtacata

SEQ ID NO: 149011 - DNA, 13 bp, Artificial Sequence
  Oligonucleotide for detection of SNP TSC0037602
tatttgatttagt

SEQ ID NO: 149012 - DNA, 13 bp, Artificial Sequence
  Oligonucleotide for detection of SNP TSC0037602
actaaatcaaata

SEQ ID NO: 149013 - DNA, 13 bp, Artificial Sequence
  Oligonucleotide for detection of SNP TSC0037602
tatttgttttagt

SEQ ID NO: 149014 - DNA, 13 bp, Artificial Sequence
  Oligonucleotide for detection of SNP TSC0037602
actaaaacaaata

SEQ ID NO: 149015 - DNA, 13 bp, Artificial Sequence
  Oligonucleotide for detection of SNP TSC0037602
tattcgatttagt

SEQ ID NO: 149016 - DNA, 13 bp, Artificial Sequence
  Oligonucleotide for detection of SNP TSC0037602
actaaatcgaata

SEQ ID NO: 149017 - DNA, 13 bp, Artificial Sequence
  Oligonucleotide for detection of SNP TSC0037602
tattcgttttagt

SEQ ID NO: 149018 - DNA, 13 bp, Artificial Sequence
  Oligonucleotide for detection of SNP TSC0037602
actaaaacgaata

SEQ ID NO: 149019 - DNA, 13 bp, Artificial Sequence
  Oligonucleotide for detection of SNP TSC0037602
attgggttgggtg

SEQ ID NO: 149020 - DNA, 13 bp, Artificial Sequence
  Oligonucleotide for detection of SNP TSC0037602
cacccaacccaat

SEQ ID NO: 149021 - DNA, 13 bp, Artificial Sequence
  Oligonucleotide for detection of SNP TSC0037602
attggggtgggtg

SEQ ID NO: 149022 - DNA, 13 bp, Artificial Sequence
  Oligonucleotide for detection of SNP TSC0037602
cacccaccccaat

SEQ ID NO: 149023 - DNA, 13 bp, Artificial Sequence
  Oligonucleotide for detection of SNP TSC0037602
attgggtcgggtg

SEQ ID NO: 149024 - DNA, 13 bp, Artificial Sequence
  Oligonucleotide for detection of SNP TSC0037602
cacccgacccaat

SEQ ID NO: 149025 - DNA, 13 bp, Artificial Sequence
  Oligonucleotide for detection of SNP TSC0037602
attggggcgggtg

SEQ ID NO: 149026 - DNA, 13 bp, Artificial Sequence
  Oligonucleotide for detection of SNP TSC0037602
cacccgccccaat

SEQ ID NO: 149027 - DNA, 13 bp, Artificial Sequence
  Oligonucleotide for detection of SNP TSC0037603
aattatgtatgty

SEQ ID NO: 149028 - DNA, 13 bp, Artificial Sequence
  Oligonucleotide for detection of SNP TSC0037603
racatacataatt

SEQ ID NO: 149029 - DNA, 13 bp, Artificial Sequence
  Oligonucleotide for detection of SNP TSC0037603
aattatatatgty

SEQ ID NO: 149030 - DNA, 13 bp, Artificial Sequence
  Oligonucleotide for detection of SNP TSC0037603
racatatataatt

SEQ ID NO: 149031 - DNA, 13 bp, Artificial Sequence
  Oligonucleotide for detection of SNP TSC0037603
aattatgtacgty

SEQ ID NO: 149032 - DNA, 13 bp, Artificial Sequence
  Oligonucleotide for detection of SNP TSC0037603
racgtacataatt

SEQ ID NO: 149033 - DNA, 13 bp, Artificial Sequence
  Oligonucleotide for detection of SNP TSC0037603
aattatatacgty

SEQ ID NO: 149034 - DNA, 13 bp, Artificial Sequence
  Oligonucleotide for detection of SNP TSC0037603
racgtatataatt

SEQ ID NO: 149035 - DNA, 13 bp, Artificial Sequence
  Oligonucleotide for detection of SNP TSC0037604
agataggtttgtt

SEQ ID NO: 149036 - DNA, 13 bp, Artificial Sequence
  Oligonucleotide for detection of SNP TSC0037604
aacaaacctatct

SEQ ID NO: 149037 - DNA, 13 bp, Artificial Sequence
  Oligonucleotide for detection of SNP TSC0037604
agatagatttgtt

SEQ ID NO: 149038 - DNA, 13 bp, Artificial Sequence
  Oligonucleotide for detection of SNP TSC0037604
aacaaatctatct

SEQ ID NO: 149039 - DNA, 13 bp, Artificial Sequence
  Oligonucleotide for detection of SNP TSC0037605
gttatatggtgag

SEQ ID NO: 149040 - DNA, 13 bp, Artificial Sequence
  Oligonucleotide for detection of SNP TSC0037605
ctcaccatataac

SEQ ID NO: 149041 - DNA, 13 bp, Artificial Sequence
  Oligonucleotide for detection of SNP TSC0037605
gttatacggtgag

SEQ ID NO: 149042 - DNA, 13 bp, Artificial Sequence
  Oligonucleotide for detection of SNP TSC0037605
ctcaccgtataac

SEQ ID NO: 149043 - DNA, 13 bp, Artificial Sequence
  Oligonucleotide for detection of SNP TSC0037606
attttttagataa

SEQ ID NO: 149044 - DNA, 13 bp, Artificial Sequence
  Oligonucleotide for detection of SNP TSC0037606
ttatctaaaaaat

SEQ ID NO: 149045 - DNA, 13 bp, Artificial Sequence
  Oligonucleotide for detection of SNP TSC0037606
atttttgagataa

SEQ ID NO: 149046 - DNA, 13 bp, Artificial Sequence
  Oligonucleotide for detection of SNP TSC0037606
ttatctcaaaaat

SEQ ID NO: 149047 - DNA, 13 bp, Artificial Sequence
  Oligonucleotide for detection of SNP TSC0037606
ttgtttgagagat

SEQ ID NO: 149048 - DNA, 13 bp, Artificial Sequence
  Oligonucleotide for detection of SNP TSC0037606
atctctcaaacaa

SEQ ID NO: 149049 - DNA, 13 bp, Artificial Sequence
  Oligonucleotide for detection of SNP TSC0037606
ttgttttagagat

SEQ ID NO: 149050 - DNA, 13 bp, Artificial Sequence
  Oligonucleotide for detection of SNP TSC0037606
atctctaaaacaa

SEQ ID NO: 149051 - DNA, 13 bp, Artificial Sequence
  Oligonucleotide for detection of SNP TSC0037608
ttttggatattag

SEQ ID NO: 149052 - DNA, 13 bp, Artificial Sequence
  Oligonucleotide for detection of SNP TSC0037608
ctaatatccaaaa

SEQ ID NO: 149053 - DNA, 13 bp, Artificial Sequence
  Oligonucleotide for detection of SNP TSC0037608
ttttggttattag

SEQ ID NO: 149054 - DNA, 13 bp, Artificial Sequence
  Oligonucleotide for detection of SNP TSC0037608
ctaataaccaaaa

SEQ ID NO: 149055 - DNA, 13 bp, Artificial Sequence
  Oligonucleotide for detection of SNP TSC0037608
ttaatatttagaa

SEQ ID NO: 149056 - DNA, 13 bp, Artificial Sequence
  Oligonucleotide for detection of SNP TSC0037608
ttctaaatattaa

SEQ ID NO: 149057 - DNA, 13 bp, Artificial Sequence
  Oligonucleotide for detection of SNP TSC0037608
ttaatagttagaa

SEQ ID NO: 149058 - DNA, 13 bp, Artificial Sequence
  Oligonucleotide for detection of SNP TSC0037608
ttctaactattaa

SEQ ID NO: 149059 - DNA, 13 bp, Artificial Sequence
  Oligonucleotide for detection of SNP TSC0037609
ttttttaatgaag

SEQ ID NO: 149060 - DNA, 13 bp, Artificial Sequence
  Oligonucleotide for detection of SNP TSC0037609
cttcattaaaaaa

SEQ ID NO: 149061 - DNA, 13 bp, Artificial Sequence
  Oligonucleotide for detection of SNP TSC0037609
tttttttatgaag

SEQ ID NO: 149062 - DNA, 13 bp, Artificial Sequence
  Oligonucleotide for detection of SNP TSC0037609
cttcataaaaaaa

SEQ ID NO: 149063 - DNA, 13 bp, Artificial Sequence
  Oligonucleotide for detection of SNP TSC0037609
ttttattgggaag

SEQ ID NO: 149064 - DNA, 13 bp, Artificial Sequence
  Oligonucleotide for detection of SNP TSC0037609
cttcccaataaaa

SEQ ID NO: 149065 - DNA, 13 bp, Artificial Sequence
  Oligonucleotide for detection of SNP TSC0037609
ttttatagggaag

SEQ ID NO: 149066 - DNA, 13 bp, Artificial Sequence
  Oligonucleotide for detection of SNP TSC0037609
cttccctataaaa

SEQ ID NO: 149067 - DNA, 13 bp, Artificial Sequence
  Oligonucleotide for detection of SNP TSC0037611
tagggaggttgaa

SEQ ID NO: 149068 - DNA, 13 bp, Artificial Sequence
  Oligonucleotide for detection of SNP TSC0037611
ttcaacctcccta

SEQ ID NO: 149069 - DNA, 13 bp, Artificial Sequence
  Oligonucleotide for detection of SNP TSC0037611
tagggaagttgaa

SEQ ID NO: 149070 - DNA, 13 bp, Artificial Sequence
  Oligonucleotide for detection of SNP TSC0037611
ttcaacttcccta

SEQ ID NO: 149071 - DNA, 13 bp, Artificial Sequence
  Oligonucleotide for detection of SNP TSC0037612
tttaggatggttt

SEQ ID NO: 149072 - DNA, 13 bp, Artificial Sequence
  Oligonucleotide for detection of SNP TSC0037612
aaaccatcctaaa

SEQ ID NO: 149073 - DNA, 13 bp, Artificial Sequence
  Oligonucleotide for detection of SNP TSC0037612
tttaggttggttt

SEQ ID NO: 149074 - DNA, 13 bp, Artificial Sequence
  Oligonucleotide for detection of SNP TSC0037612
aaaccaacctaaa

SEQ ID NO: 149075 - DNA, 13 bp, Artificial Sequence
  Oligonucleotide for detection of SNP TSC0037612
agattattttggg

SEQ ID NO: 149076 - DNA, 13 bp, Artificial Sequence
  Oligonucleotide for detection of SNP TSC0037612
cccaaaataatct

SEQ ID NO: 149077 - DNA, 13 bp, Artificial Sequence
  Oligonucleotide for detection of SNP TSC0037612
agattaatttggg

SEQ ID NO: 149078 - DNA, 13 bp, Artificial Sequence
  Oligonucleotide for detection of SNP TSC0037612
cccaaattaatct

SEQ ID NO: 149079 - DNA, 13 bp, Artificial Sequence
  Oligonucleotide for detection of SNP TSC0037613
tttgagatagagy

SEQ ID NO: 149080 - DNA, 13 bp, Artificial Sequence
  Oligonucleotide for detection of SNP TSC0037613
rctctatctcaaa

SEQ ID NO: 149081 - DNA, 13 bp, Artificial Sequence
  Oligonucleotide for detection of SNP TSC0037613
tttgaggtagagy

SEQ ID NO: 149082 - DNA, 13 bp, Artificial Sequence
  Oligonucleotide for detection of SNP TSC0037613
rctctacctcaaa

SEQ ID NO: 149083 - DNA, 13 bp, Artificial Sequence
  Oligonucleotide for detection of SNP TSC0037614
ttagttatttgta

SEQ ID NO: 149084 - DNA, 13 bp, Artificial Sequence
  Oligonucleotide for detection of SNP TSC0037614
tacaaataactaa

SEQ ID NO: 149085 - DNA, 13 bp, Artificial Sequence
  Oligonucleotide for detection of SNP TSC0037614
ttagttgtttgta

SEQ ID NO: 149086 - DNA, 13 bp, Artificial Sequence
  Oligonucleotide for detection of SNP TSC0037614
tacaaacaactaa

SEQ ID NO: 149087 - DNA, 13 bp, Artificial Sequence
  Oligonucleotide for detection of SNP TSC0037614
ttagttattcgta

SEQ ID NO: 149088 - DNA, 13 bp, Artificial Sequence
  Oligonucleotide for detection of SNP TSC0037614
tacgaataactaa

SEQ ID NO: 149089 - DNA, 13 bp, Artificial Sequence
  Oligonucleotide for detection of SNP TSC0037614
ttagttgttcgta

SEQ ID NO: 149090 - DNA, 13 bp, Artificial Sequence
  Oligonucleotide for detection of SNP TSC0037614
tacgaacaactaa

SEQ ID NO: 149091 - DNA, 13 bp, Artificial Sequence
  Oligonucleotide for detection of SNP TSC0037616
tttaatagttagt

SEQ ID NO: 149092 - DNA, 13 bp, Artificial Sequence
  Oligonucleotide for detection of SNP TSC0037616
actaactattaaa

SEQ ID NO: 149093 - DNA, 13 bp, Artificial Sequence
  Oligonucleotide for detection of SNP TSC0037616
tttaatggttagt

SEQ ID NO: 149094 - DNA, 13 bp, Artificial Sequence
  Oligonucleotide for detection of SNP TSC0037616
actaaccattaaa

SEQ ID NO: 149095 - DNA, 13 bp, Artificial Sequence
  Oligonucleotide for detection of SNP TSC0037616
tttaacggttagt

SEQ ID NO: 149096 - DNA, 13 bp, Artificial Sequence
  Oligonucleotide for detection of SNP TSC0037616
actaaccgttaaa

SEQ ID NO: 149097 - DNA, 13 bp, Artificial Sequence
  Oligonucleotide for detection of SNP TSC0037616
attggttgttgag

SEQ ID NO: 149098 - DNA, 13 bp, Artificial Sequence
  Oligonucleotide for detection of SNP TSC0037616
ctcaacaaccaat

SEQ ID NO: 149099 - DNA, 13 bp, Artificial Sequence
  Oligonucleotide for detection of SNP TSC0037616
attggtcgttgag

SEQ ID NO: 149100 - DNA, 13 bp, Artificial Sequence
  Oligonucleotide for detection of SNP TSC0037616
ctcaacgaccaat

SEQ ID NO: 149101 - DNA, 13 bp, Artificial Sequence
  Oligonucleotide for detection of SNP TSC0037617
taaagagggttgy

SEQ ID NO: 149102 - DNA, 13 bp, Artificial Sequence
  Oligonucleotide for detection of SNP TSC0037617
rcaaccctcttta

SEQ ID NO: 149103 - DNA, 13 bp, Artificial Sequence
  Oligonucleotide for detection of SNP TSC0037617
taaagaaggttgy

SEQ ID NO: 149104 - DNA, 13 bp, Artificial Sequence
  Oligonucleotide for detection of SNP TSC0037617
rcaaccttcttta

SEQ ID NO: 149105 - DNA, 13 bp, Artificial Sequence
  Oligonucleotide for detection of SNP TSC0037618
agatttattgtat

SEQ ID NO: 149106 - DNA, 13 bp, Artificial Sequence
  Oligonucleotide for detection of SNP TSC0037618
atacaataaatct

SEQ ID NO: 149107 - DNA, 13 bp, Artificial Sequence
  Oligonucleotide for detection of SNP TSC0037618
agatttgttgtat

SEQ ID NO: 149108 - DNA, 13 bp, Artificial Sequence
  Oligonucleotide for detection of SNP TSC0037618
atacaacaaatct

SEQ ID NO: 149109 - DNA, 13 bp, Artificial Sequence
  Oligonucleotide for detection of SNP TSC0037618
agattcgttgtat

SEQ ID NO: 149110 - DNA, 13 bp, Artificial Sequence
  Oligonucleotide for detection of SNP TSC0037618
atacaacgaatct

SEQ ID NO: 149111 - DNA, 13 bp, Artificial Sequence
  Oligonucleotide for detection of SNP TSC0037618
atgtagtgagttt

SEQ ID NO: 149112 - DNA, 13 bp, Artificial Sequence
  Oligonucleotide for detection of SNP TSC0037618
aaactcactacat

SEQ ID NO: 149113 - DNA, 13 bp, Artificial Sequence
  Oligonucleotide for detection of SNP TSC0037618
atgtagcgagttt

SEQ ID NO: 149114 - DNA, 13 bp, Artificial Sequence
  Oligonucleotide for detection of SNP TSC0037618
aaactcgctacat

SEQ ID NO: 149115 - DNA, 13 bp, Artificial Sequence
  Oligonucleotide for detection of SNP TSC0037623
agtgttataagty

SEQ ID NO: 149116 - DNA, 13 bp, Artificial Sequence
  Oligonucleotide for detection of SNP TSC0037623
racttataacact

SEQ ID NO: 149117 - DNA, 13 bp, Artificial Sequence
  Oligonucleotide for detection of SNP TSC0037623
agtgttgtaagty

SEQ ID NO: 149118 - DNA, 13 bp, Artificial Sequence
  Oligonucleotide for detection of SNP TSC0037623
racttacaacact

SEQ ID NO: 149119 - DNA, 13 bp, Artificial Sequence
  Oligonucleotide for detection of SNP TSC0037623
agcgttataagty

SEQ ID NO: 149120 - DNA, 13 bp, Artificial Sequence
  Oligonucleotide for detection of SNP TSC0037623
racttataacgct

SEQ ID NO: 149121 - DNA, 13 bp, Artificial Sequence
  Oligonucleotide for detection of SNP TSC0037623
agcgttgtaagty

SEQ ID NO: 149122 - DNA, 13 bp, Artificial Sequence
  Oligonucleotide for detection of SNP TSC0037623
racttacaacgct

SEQ ID NO: 149123 - DNA, 13 bp, Artificial Sequence
  Oligonucleotide for detection of SNP TSC0037624
gttgttattattt

SEQ ID NO: 149124 - DNA, 13 bp, Artificial Sequence
  Oligonucleotide for detection of SNP TSC0037624
aaataataacaac

SEQ ID NO: 149125 - DNA, 13 bp, Artificial Sequence
  Oligonucleotide for detection of SNP TSC0037624
gttgttgttattt

SEQ ID NO: 149126 - DNA, 13 bp, Artificial Sequence
  Oligonucleotide for detection of SNP TSC0037624
aaataacaacaac

SEQ ID NO: 149127 - DNA, 13 bp, Artificial Sequence
  Oligonucleotide for detection of SNP TSC0037624
gttgtcgttattt

SEQ ID NO: 149128 - DNA, 13 bp, Artificial Sequence
  Oligonucleotide for detection of SNP TSC0037624
aaataacgacaac

SEQ ID NO: 149129 - DNA, 13 bp, Artificial Sequence
  Oligonucleotide for detection of SNP TSC0037624
aagtgatgataay

SEQ ID NO: 149130 - DNA, 13 bp, Artificial Sequence
  Oligonucleotide for detection of SNP TSC0037624
rttatcatcactt

SEQ ID NO: 149131 - DNA, 13 bp, Artificial Sequence
  Oligonucleotide for detection of SNP TSC0037624
aagtgacgataay

SEQ ID NO: 149132 - DNA, 13 bp, Artificial Sequence
  Oligonucleotide for detection of SNP TSC0037624
rttatcgtcactt

SEQ ID NO: 149133 - DNA, 13 bp, Artificial Sequence
  Oligonucleotide for detection of SNP TSC0037625
tggaggataatag

SEQ ID NO: 149134 - DNA, 13 bp, Artificial Sequence
  Oligonucleotide for detection of SNP TSC0037625
ctattatcctcca

SEQ ID NO: 149135 - DNA, 13 bp, Artificial Sequence
  Oligonucleotide for detection of SNP TSC0037625
tggagggtaatag

SEQ ID NO: 149136 - DNA, 13 bp, Artificial Sequence
  Oligonucleotide for detection of SNP TSC0037625
ctattaccctcca

SEQ ID NO: 149137 - DNA, 13 bp, Artificial Sequence
  Oligonucleotide for detection of SNP TSC0037626
tgtgtagtggttg

SEQ ID NO: 149138 - DNA, 13 bp, Artificial Sequence
  Oligonucleotide for detection of SNP TSC0037626
caaccactacaca

SEQ ID NO: 149139 - DNA, 13 bp, Artificial Sequence
  Oligonucleotide for detection of SNP TSC0037626
tgtgtattggttg

SEQ ID NO: 149140 - DNA, 13 bp, Artificial Sequence
  Oligonucleotide for detection of SNP TSC0037626
caaccaatacaca

SEQ ID NO: 149141 - DNA, 13 bp, Artificial Sequence
  Oligonucleotide for detection of SNP TSC0037626
cgtgtagtggttg

SEQ ID NO: 149142 - DNA, 13 bp, Artificial Sequence
  Oligonucleotide for detection of SNP TSC0037626
caaccactacacg

SEQ ID NO: 149143 - DNA, 13 bp, Artificial Sequence
  Oligonucleotide for detection of SNP TSC0037626
cgtgtattggttg

SEQ ID NO: 149144 - DNA, 13 bp, Artificial Sequence
  Oligonucleotide for detection of SNP TSC0037626
caaccaatacacg

SEQ ID NO: 149145 - DNA, 13 bp, Artificial Sequence
  Oligonucleotide for detection of SNP TSC0037626
tgtgtagtggtcg

SEQ ID NO: 149146 - DNA, 13 bp, Artificial Sequence
  Oligonucleotide for detection of SNP TSC0037626
cgaccactacaca

SEQ ID NO: 149147 - DNA, 13 bp, Artificial Sequence
  Oligonucleotide for detection of SNP TSC0037626
tgtgtattggtcg

SEQ ID NO: 149148 - DNA, 13 bp, Artificial Sequence
  Oligonucleotide for detection of SNP TSC0037626
cgaccaatacaca

SEQ ID NO: 149149 - DNA, 13 bp, Artificial Sequence
  Oligonucleotide for detection of SNP TSC0037626
cgtgtagtggtcg

SEQ ID NO: 149150 - DNA, 13 bp, Artificial Sequence
  Oligonucleotide for detection of SNP TSC0037626
cgaccactacacg

SEQ ID NO: 149151 - DNA, 13 bp, Artificial Sequence
  Oligonucleotide for detection of SNP TSC0037626
cgtgtattggtcg

SEQ ID NO: 149152 - DNA, 13 bp, Artificial Sequence
  Oligonucleotide for detection of SNP TSC0037626
cgaccaatacacg

SEQ ID NO: 149153 - DNA, 13 bp, Artificial Sequence
  Oligonucleotide for detection of SNP TSC0037626
tggttattgtatg

SEQ ID NO: 149154 - DNA, 13 bp, Artificial Sequence
  Oligonucleotide for detection of SNP TSC0037626
catacaataacca

SEQ ID NO: 149155 - DNA, 13 bp, Artificial Sequence
  Oligonucleotide for detection of SNP TSC0037626
tggttaatgtatg

SEQ ID NO: 149156 - DNA, 13 bp, Artificial Sequence
  Oligonucleotide for detection of SNP TSC0037626
catacattaacca

SEQ ID NO: 149157 - DNA, 13 bp, Artificial Sequence
  Oligonucleotide for detection of SNP TSC0037626
cggttattgtatg

SEQ ID NO: 149158 - DNA, 13 bp, Artificial Sequence
  Oligonucleotide for detection of SNP TSC0037626
catacaataaccg

SEQ ID NO: 149159 - DNA, 13 bp, Artificial Sequence
  Oligonucleotide for detection of SNP TSC0037626
cggttaatgtatg

SEQ ID NO: 149160 - DNA, 13 bp, Artificial Sequence
  Oligonucleotide for detection of SNP TSC0037626
catacattaaccg

SEQ ID NO: 149161 - DNA, 13 bp, Artificial Sequence
  Oligonucleotide for detection of SNP TSC0037626
tggttattgtacg

SEQ ID NO: 149162 - DNA, 13 bp, Artificial Sequence
  Oligonucleotide for detection of SNP TSC0037626
cgtacaataacca

SEQ ID NO: 149163 - DNA, 13 bp, Artificial Sequence
  Oligonucleotide for detection of SNP TSC0037626
tggttaatgtacg

SEQ ID NO: 149164 - DNA, 13 bp, Artificial Sequence
  Oligonucleotide for detection of SNP TSC0037626
cgtacattaacca

SEQ ID NO: 149165 - DNA, 13 bp, Artificial Sequence
  Oligonucleotide for detection of SNP TSC0037626
cggttattgtacg

SEQ ID NO: 149166 - DNA, 13 bp, Artificial Sequence
  Oligonucleotide for detection of SNP TSC0037626
cgtacaataaccg

SEQ ID NO: 149167 - DNA, 13 bp, Artificial Sequence
  Oligonucleotide for detection of SNP TSC0037626
cggttaatgtacg

SEQ ID NO: 149168 - DNA, 13 bp, Artificial Sequence
  Oligonucleotide for detection of SNP TSC0037626
cgtacattaaccg

SEQ ID NO: 149169 - DNA, 13 bp, Artificial Sequence
  Oligonucleotide for detection of SNP TSC0037627
atatgtatatttt

SEQ ID NO: 149170 - DNA, 13 bp, Artificial Sequence
  Oligonucleotide for detection of SNP TSC0037627
aaaatatacatat

SEQ ID NO: 149171 - DNA, 13 bp, Artificial Sequence
  Oligonucleotide for detection of SNP TSC0037634
ttgatataaaaga

SEQ ID NO: 149172 - DNA, 13 bp, Artificial Sequence
  Oligonucleotide for detection of SNP TSC0037634
tcttttatatcaa

SEQ ID NO: 149173 - DNA, 13 bp, Artificial Sequence
  Oligonucleotide for detection of SNP TSC0037634
ttgataaaaaaga

SEQ ID NO: 149174 - DNA, 13 bp, Artificial Sequence
  Oligonucleotide for detection of SNP TSC0037634
tcttttttatcaa

SEQ ID NO: 149175 - DNA, 13 bp, Artificial Sequence
  Oligonucleotide for detection of SNP TSC0037637
tataggggtgtgy

SEQ ID NO: 149176 - DNA, 13 bp, Artificial Sequence
  Oligonucleotide for detection of SNP TSC0037637
rcacacccctata

SEQ ID NO: 149177 - DNA, 13 bp, Artificial Sequence
  Oligonucleotide for detection of SNP TSC0037637
gtatatttttata

SEQ ID NO: 149178 - DNA, 13 bp, Artificial Sequence
  Oligonucleotide for detection of SNP TSC0037637
tataaaaatatac

SEQ ID NO: 149179 - DNA, 13 bp, Artificial Sequence
  Oligonucleotide for detection of SNP TSC0037637
gtatatatttata

SEQ ID NO: 149180 - DNA, 13 bp, Artificial Sequence
  Oligonucleotide for detection of SNP TSC0037637
tataaatatatac

SEQ ID NO: 149181 - DNA, 13 bp, Artificial Sequence
  Oligonucleotide for detection of SNP TSC0037639
taggatgtgtagy

SEQ ID NO: 149182 - DNA, 13 bp, Artificial Sequence
  Oligonucleotide for detection of SNP TSC0037639
rctacacatccta

SEQ ID NO: 149183 - DNA, 13 bp, Artificial Sequence
  Oligonucleotide for detection of SNP TSC0037639
taggatatgtagy

SEQ ID NO: 149184 - DNA, 13 bp, Artificial Sequence
  Oligonucleotide for detection of SNP TSC0037639
rctacatatccta

SEQ ID NO: 149185 - DNA, 13 bp, Artificial Sequence
  Oligonucleotide for detection of SNP TSC0037646
atatgaatgttaa

SEQ ID NO: 149186 - DNA, 13 bp, Artificial Sequence
  Oligonucleotide for detection of SNP TSC0037646
ttaacattcatat

SEQ ID NO: 149187 - DNA, 13 bp, Artificial Sequence
  Oligonucleotide for detection of SNP TSC0037646
atatgattgttaa

SEQ ID NO: 149188 - DNA, 13 bp, Artificial Sequence
  Oligonucleotide for detection of SNP TSC0037646
ttaacaatcatat

SEQ ID NO: 149189 - DNA, 13 bp, Artificial Sequence
  Oligonucleotide for detection of SNP TSC0037646
ttgatatttatgt

SEQ ID NO: 149190 - DNA, 13 bp, Artificial Sequence
  Oligonucleotide for detection of SNP TSC0037646
acataaatatcaa

SEQ ID NO: 149191 - DNA, 13 bp, Artificial Sequence
  Oligonucleotide for detection of SNP TSC0037646
ttgatagttatgt

SEQ ID NO: 149192 - DNA, 13 bp, Artificial Sequence
  Oligonucleotide for detection of SNP TSC0037646
acataactatcaa

SEQ ID NO: 149193 - DNA, 13 bp, Artificial Sequence
  Oligonucleotide for detection of SNP TSC0037647
taaatgtggtttt

SEQ ID NO: 149194 - DNA, 13 bp, Artificial Sequence
  Oligonucleotide for detection of SNP TSC0037647
aaaaccacattta

SEQ ID NO: 149195 - DNA, 13 bp, Artificial Sequence
  Oligonucleotide for detection of SNP TSC0037647
taaatgcggtttt

SEQ ID NO: 149196 - DNA, 13 bp, Artificial Sequence
  Oligonucleotide for detection of SNP TSC0037647
aaaaccgcattta

SEQ ID NO: 149197 - DNA, 13 bp, Artificial Sequence
  Oligonucleotide for detection of SNP TSC0037647
aaagttgtattta

SEQ ID NO: 149198 - DNA, 13 bp, Artificial Sequence
  Oligonucleotide for detection of SNP TSC0037647
taaatacaacttt

SEQ ID NO: 149199 - DNA, 13 bp, Artificial Sequence
  Oligonucleotide for detection of SNP TSC0037647
aaagttatattta

SEQ ID NO: 149200 - DNA, 13 bp, Artificial Sequence
  Oligonucleotide for detection of SNP TSC0037647
taaatataacttt

SEQ ID NO: 149201 - DNA, 13 bp, Artificial Sequence
  Oligonucleotide for detection of SNP TSC0037647
aaagtcgtattta

SEQ ID NO: 149202 - DNA, 13 bp, Artificial Sequence
  Oligonucleotide for detection of SNP TSC0037647
taaatacgacttt

SEQ ID NO: 149203 - DNA, 13 bp, Artificial Sequence
  Oligonucleotide for detection of SNP TSC0037648
ttggaagagtaaa

SEQ ID NO: 149204 - DNA, 13 bp, Artificial Sequence
  Oligonucleotide for detection of SNP TSC0037648
tttactcttccaa

SEQ ID NO: 149205 - DNA, 13 bp, Artificial Sequence
  Oligonucleotide for detection of SNP TSC0037648
ttggaatagtaaa

SEQ ID NO: 149206 - DNA, 13 bp, Artificial Sequence
  Oligonucleotide for detection of SNP TSC0037648
tttactattccaa

SEQ ID NO: 149207 - DNA, 13 bp, Artificial Sequence
  Oligonucleotide for detection of SNP TSC0037653
gattaaaatggag

SEQ ID NO: 149208 - DNA, 13 bp, Artificial Sequence
  Oligonucleotide for detection of SNP TSC0037653
ctccattttaatc

SEQ ID NO: 149209 - DNA, 13 bp, Artificial Sequence
  Oligonucleotide for detection of SNP TSC0037653
gattaatatggag

SEQ ID NO: 149210 - DNA, 13 bp, Artificial Sequence
  Oligonucleotide for detection of SNP TSC0037653
ctccatattaatc

SEQ ID NO: 149211 - DNA, 13 bp, Artificial Sequence
  Oligonucleotide for detection of SNP TSC0037653
ttttattttggty

SEQ ID NO: 149212 - DNA, 13 bp, Artificial Sequence
  Oligonucleotide for detection of SNP TSC0037653
raccaaaataaaa

SEQ ID NO: 149213 - DNA, 13 bp, Artificial Sequence
  Oligonucleotide for detection of SNP TSC0037655
tataggaaatttg

SEQ ID NO: 149214 - DNA, 13 bp, Artificial Sequence
  Oligonucleotide for detection of SNP TSC0037655
caaatttcctata

SEQ ID NO: 149215 - DNA, 13 bp, Artificial Sequence
  Oligonucleotide for detection of SNP TSC0037655
tataggtaatttg

SEQ ID NO: 149216 - DNA, 13 bp, Artificial Sequence
  Oligonucleotide for detection of SNP TSC0037655
caaattacctata

SEQ ID NO: 149217 - DNA, 13 bp, Artificial Sequence
  Oligonucleotide for detection of SNP TSC0037656
tttataagaatta

SEQ ID NO: 149218 - DNA, 13 bp, Artificial Sequence
  Oligonucleotide for detection of SNP TSC0037656
taattcttataaa

SEQ ID NO: 149219 - DNA, 13 bp, Artificial Sequence
  Oligonucleotide for detection of SNP TSC0037656
tttataggaatta

SEQ ID NO: 149220 - DNA, 13 bp, Artificial Sequence
  Oligonucleotide for detection of SNP TSC0037656
taattcctataaa

SEQ ID NO: 149221 - DNA, 13 bp, Artificial Sequence
  Oligonucleotide for detection of SNP TSC0037659
ttggataggagty

SEQ ID NO: 149222 - DNA, 13 bp, Artificial Sequence
  Oligonucleotide for detection of SNP TSC0037659
ractcctatccaa

SEQ ID NO: 149223 - DNA, 13 bp, Artificial Sequence
  Oligonucleotide for detection of SNP TSC0037659
ttggatgggagty

SEQ ID NO: 149224 - DNA, 13 bp, Artificial Sequence
  Oligonucleotide for detection of SNP TSC0037659
ractcccatccaa

SEQ ID NO: 149225 - DNA, 13 bp, Artificial Sequence
  Oligonucleotide for detection of SNP TSC0037659
ttggacgggagty

SEQ ID NO: 149226 - DNA, 13 bp, Artificial Sequence
  Oligonucleotide for detection of SNP TSC0037659
ractcccgtccaa

SEQ ID NO: 149227 - DNA, 13 bp, Artificial Sequence
  Oligonucleotide for detection of SNP TSC0037659
ggtttttgtttaa

SEQ ID NO: 149228 - DNA, 13 bp, Artificial Sequence
  Oligonucleotide for detection of SNP TSC0037659
ttaaacaaaaacc

SEQ ID NO: 149229 - DNA, 13 bp, Artificial Sequence
  Oligonucleotide for detection of SNP TSC0037659
ggttttcgtttaa

SEQ ID NO: 149230 - DNA, 13 bp, Artificial Sequence
  Oligonucleotide for detection of SNP TSC0037659
ttaaacgaaaacc

SEQ ID NO: 149231 - DNA, 13 bp, Artificial Sequence
  Oligonucleotide for detection of SNP TSC0037660
tttagaatttata

SEQ ID NO: 149232 - DNA, 13 bp, Artificial Sequence
  Oligonucleotide for detection of SNP TSC0037660
tataaattctaaa

SEQ ID NO: 149233 - DNA, 13 bp, Artificial Sequence
  Oligonucleotide for detection of SNP TSC0037660
tttagagtttata

SEQ ID NO: 149234 - DNA, 13 bp, Artificial Sequence
  Oligonucleotide for detection of SNP TSC0037660
tataaactctaaa

SEQ ID NO: 149235 - DNA, 13 bp, Artificial Sequence
  Oligonucleotide for detection of SNP TSC0037661
ttaaatagtgaag

SEQ ID NO: 149236 - DNA, 13 bp, Artificial Sequence
  Oligonucleotide for detection of SNP TSC0037661
cttcactatttaa

SEQ ID NO: 149237 - DNA, 13 bp, Artificial Sequence
  Oligonucleotide for detection of SNP TSC0037661
ttaaattgtgaag

SEQ ID NO: 149238 - DNA, 13 bp, Artificial Sequence
  Oligonucleotide for detection of SNP TSC0037661
cttcacaatttaa

SEQ ID NO: 149239 - DNA, 13 bp, Artificial Sequence
  Oligonucleotide for detection of SNP TSC0037661
ttttattgtttaa

SEQ ID NO: 149240 - DNA, 13 bp, Artificial Sequence
  Oligonucleotide for detection of SNP TSC0037661
ttaaacaataaaa

SEQ ID NO: 149241 - DNA, 13 bp, Artificial Sequence
  Oligonucleotide for detection of SNP TSC0037662
atatatatgttty

SEQ ID NO: 149242 - DNA, 13 bp, Artificial Sequence
  Oligonucleotide for detection of SNP TSC0037662
raaacatatatat

SEQ ID NO: 149243 - DNA, 13 bp, Artificial Sequence
  Oligonucleotide for detection of SNP TSC0037662
atatatgtgttty

SEQ ID NO: 149244 - DNA, 13 bp, Artificial Sequence
  Oligonucleotide for detection of SNP TSC0037662
raaacacatatat

SEQ ID NO: 149245 - DNA, 13 bp, Artificial Sequence
  Oligonucleotide for detection of SNP TSC0037665
aaataattttggt

SEQ ID NO: 149246 - DNA, 13 bp, Artificial Sequence
  Oligonucleotide for detection of SNP TSC0037665
accaaaattattt

SEQ ID NO: 149247 - DNA, 13 bp, Artificial Sequence
  Oligonucleotide for detection of SNP TSC0037665
aaataagtttggt

SEQ ID NO: 149248 - DNA, 13 bp, Artificial Sequence
  Oligonucleotide for detection of SNP TSC0037665
accaaacttattt

SEQ ID NO: 149249 - DNA, 13 bp, Artificial Sequence
  Oligonucleotide for detection of SNP TSC0037665
attagagttattt

SEQ ID NO: 149250 - DNA, 13 bp, Artificial Sequence
  Oligonucleotide for detection of SNP TSC0037665
aaataactctaat

SEQ ID NO: 149251 - DNA, 13 bp, Artificial Sequence
  Oligonucleotide for detection of SNP TSC0037665
attagatttattt

SEQ ID NO: 149252 - DNA, 13 bp, Artificial Sequence
  Oligonucleotide for detection of SNP TSC0037665
aaataaatctaat

SEQ ID NO: 149253 - DNA, 13 bp, Artificial Sequence
  Oligonucleotide for detection of SNP TSC0037666
tttattaatttta

SEQ ID NO: 149254 - DNA, 13 bp, Artificial Sequence
  Oligonucleotide for detection of SNP TSC0037666
taaaattaataaa

SEQ ID NO: 149255 - DNA, 13 bp, Artificial Sequence
  Oligonucleotide for detection of SNP TSC0037666
tttattgatttta

SEQ ID NO: 149256 - DNA, 13 bp, Artificial Sequence
  Oligonucleotide for detection of SNP TSC0037666
taaaatcaataaa

SEQ ID NO: 149257 - DNA, 13 bp, Artificial Sequence
  Oligonucleotide for detection of SNP TSC0037667
tttaagtgtaaga

SEQ ID NO: 149258 - DNA, 13 bp, Artificial Sequence
  Oligonucleotide for detection of SNP TSC0037667
tcttacacttaaa

SEQ ID NO: 149259 - DNA, 13 bp, Artificial Sequence
  Oligonucleotide for detection of SNP TSC0037667
tttaagcgtaaga

SEQ ID NO: 149260 - DNA, 13 bp, Artificial Sequence
  Oligonucleotide for detection of SNP TSC0037667
tcttacgcttaaa

SEQ ID NO: 149261 - DNA, 13 bp, Artificial Sequence
  Oligonucleotide for detection of SNP TSC0037674
tttttagtttggt

SEQ ID NO: 149262 - DNA, 13 bp, Artificial Sequence
  Oligonucleotide for detection of SNP TSC0037674
accaaactaaaaa

SEQ ID NO: 149263 - DNA, 13 bp, Artificial Sequence
  Oligonucleotide for detection of SNP TSC0037675
ttaaaagtgggtt

SEQ ID NO: 149264 - DNA, 13 bp, Artificial Sequence
  Oligonucleotide for detection of SNP TSC0037675
aacccacttttaa

SEQ ID NO: 149265 - DNA, 13 bp, Artificial Sequence
  Oligonucleotide for detection of SNP TSC0037675
ttaaaaatgggtt

SEQ ID NO: 149266 - DNA, 13 bp, Artificial Sequence
  Oligonucleotide for detection of SNP TSC0037675
aacccatttttaa

SEQ ID NO: 149267 - DNA, 13 bp, Artificial Sequence
  Oligonucleotide for detection of SNP TSC0037679
gaaagttgaaatt

SEQ ID NO: 149268 - DNA, 13 bp, Artificial Sequence
  Oligonucleotide for detection of SNP TSC0037679
aatttcaactttc

SEQ ID NO: 149269 - DNA, 13 bp, Artificial Sequence
  Oligonucleotide for detection of SNP TSC0037679
gaaagtcgaaatt

SEQ ID NO: 149270 - DNA, 13 bp, Artificial Sequence
  Oligonucleotide for detection of SNP TSC0037679
aatttcgactttc

SEQ ID NO: 149271 - DNA, 13 bp, Artificial Sequence
  Oligonucleotide for detection of SNP TSC0037683
gagtaaggaagay

SEQ ID NO: 149272 - DNA, 13 bp, Artificial Sequence
  Oligonucleotide for detection of SNP TSC0037683
rtcttccttactc

SEQ ID NO: 149273 - DNA, 13 bp, Artificial Sequence
  Oligonucleotide for detection of SNP TSC0037683
gagtaaagaagay

SEQ ID NO: 149274 - DNA, 13 bp, Artificial Sequence
  Oligonucleotide for detection of SNP TSC0037683
rtcttctttactc

SEQ ID NO: 149275 - DNA, 13 bp, Artificial Sequence
  Oligonucleotide for detection of SNP TSC0037684
ttgtaaaattatt

SEQ ID NO: 149276 - DNA, 13 bp, Artificial Sequence
  Oligonucleotide for detection of SNP TSC0037684
aataattttacaa

SEQ ID NO: 149277 - DNA, 13 bp, Artificial Sequence
  Oligonucleotide for detection of SNP TSC0037684
ttgtaatattatt

SEQ ID NO: 149278 - DNA, 13 bp, Artificial Sequence
  Oligonucleotide for detection of SNP TSC0037684
aataatattacaa

SEQ ID NO: 149279 - DNA, 13 bp, Artificial Sequence
  Oligonucleotide for detection of SNP TSC0037684
aatagttttataa

SEQ ID NO: 149280 - DNA, 13 bp, Artificial Sequence
  Oligonucleotide for detection of SNP TSC0037684
ttataaaactatt

SEQ ID NO: 149281 - DNA, 13 bp, Artificial Sequence
  Oligonucleotide for detection of SNP TSC0037684
aatagtgttataa

SEQ ID NO: 149282 - DNA, 13 bp, Artificial Sequence
  Oligonucleotide for detection of SNP TSC0037684
ttataacactatt

SEQ ID NO: 149283 - DNA, 13 bp, Artificial Sequence
  Oligonucleotide for detection of SNP TSC0037685
tttttaggtttgt

SEQ ID NO: 149284 - DNA, 13 bp, Artificial Sequence
  Oligonucleotide for detection of SNP TSC0037685
acaaacctaaaaa

SEQ ID NO: 149285 - DNA, 13 bp, Artificial Sequence
  Oligonucleotide for detection of SNP TSC0037685
tttttatgtttgt

SEQ ID NO: 149286 - DNA, 13 bp, Artificial Sequence
  Oligonucleotide for detection of SNP TSC0037685
acaaacataaaaa

SEQ ID NO: 149287 - DNA, 13 bp, Artificial Sequence
  Oligonucleotide for detection of SNP TSC0037685
ataaatttgaaaa

SEQ ID NO: 149288 - DNA, 13 bp, Artificial Sequence
  Oligonucleotide for detection of SNP TSC0037685
ttttcaaatttat

SEQ ID NO: 149289 - DNA, 13 bp, Artificial Sequence
  Oligonucleotide for detection of SNP TSC0037685
ataaatatgaaaa

SEQ ID NO: 149290 - DNA, 13 bp, Artificial Sequence
  Oligonucleotide for detection of SNP TSC0037685
ttttcatatttat

SEQ ID NO: 149291 - DNA, 13 bp, Artificial Sequence
  Oligonucleotide for detection of SNP TSC0037688
gacgggtggatta

SEQ ID NO: 149292 - DNA, 13 bp, Artificial Sequence
  Oligonucleotide for detection of SNP TSC0037688
taatccacccgtc

SEQ ID NO: 149293 - DNA, 13 bp, Artificial Sequence
  Oligonucleotide for detection of SNP TSC0037688
gacgggcggatta

SEQ ID NO: 149294 - DNA, 13 bp, Artificial Sequence
  Oligonucleotide for detection of SNP TSC0037688
taatccgcccgtc

SEQ ID NO: 149295 - DNA, 13 bp, Artificial Sequence
  Oligonucleotide for detection of SNP TSC0037689
ttattttagttay

SEQ ID NO: 149296 - DNA, 13 bp, Artificial Sequence
  Oligonucleotide for detection of SNP TSC0037689
rtaactaaaataa

SEQ ID NO: 149297 - DNA, 13 bp, Artificial Sequence
  Oligonucleotide for detection of SNP TSC0037689
gtaattgaaatgg

SEQ ID NO: 149298 - DNA, 13 bp, Artificial Sequence
  Oligonucleotide for detection of SNP TSC0037689
ccatttcaattac

SEQ ID NO: 149299 - DNA, 13 bp, Artificial Sequence
  Oligonucleotide for detection of SNP TSC0037689
gtaatttaaatgg

SEQ ID NO: 149300 - DNA, 13 bp, Artificial Sequence
  Oligonucleotide for detection of SNP TSC0037689
ccatttaaattac

SEQ ID NO: 149301 - DNA, 13 bp, Artificial Sequence
  Oligonucleotide for detection of SNP TSC0037690
atttgatttgata

SEQ ID NO: 149302 - DNA, 13 bp, Artificial Sequence
  Oligonucleotide for detection of SNP TSC0037690
tatcaaatcaaat

SEQ ID NO: 149303 - DNA, 13 bp, Artificial Sequence
  Oligonucleotide for detection of SNP TSC0037690
atttgagttgata

SEQ ID NO: 149304 - DNA, 13 bp, Artificial Sequence
  Oligonucleotide for detection of SNP TSC0037690
tatcaactcaaat

SEQ ID NO: 149305 - DNA, 13 bp, Artificial Sequence
  Oligonucleotide for detection of SNP TSC0037690
tgttaggttagat

SEQ ID NO: 149306 - DNA, 13 bp, Artificial Sequence
  Oligonucleotide for detection of SNP TSC0037690
atctaacctaaca

SEQ ID NO: 149307 - DNA, 13 bp, Artificial Sequence
  Oligonucleotide for detection of SNP TSC0037690
tgttagtttagat

SEQ ID NO: 149308 - DNA, 13 bp, Artificial Sequence
  Oligonucleotide for detection of SNP TSC0037690
atctaaactaaca

SEQ ID NO: 149309 - DNA, 13 bp, Artificial Sequence
  Oligonucleotide for detection of SNP TSC0037691
tttttatggtggg

SEQ ID NO: 149310 - DNA, 13 bp, Artificial Sequence
  Oligonucleotide for detection of SNP TSC0037691
cccaccataaaaa

SEQ ID NO: 149311 - DNA, 13 bp, Artificial Sequence
  Oligonucleotide for detection of SNP TSC0037691
tttttacggtggg

SEQ ID NO: 149312 - DNA, 13 bp, Artificial Sequence
  Oligonucleotide for detection of SNP TSC0037691
cccaccgtaaaaa

SEQ ID NO: 149313 - DNA, 13 bp, Artificial Sequence
  Oligonucleotide for detection of SNP TSC0037691
tttttatggcggg

SEQ ID NO: 149314 - DNA, 13 bp, Artificial Sequence
  Oligonucleotide for detection of SNP TSC0037691
cccgccataaaaa

SEQ ID NO: 149315 - DNA, 13 bp, Artificial Sequence
  Oligonucleotide for detection of SNP TSC0037691
tttttacggcggg

SEQ ID NO: 149316 - DNA, 13 bp, Artificial Sequence
  Oligonucleotide for detection of SNP TSC0037691
cccgccgtaaaaa

SEQ ID NO: 149317 - DNA, 13 bp, Artificial Sequence
  Oligonucleotide for detection of SNP TSC0037691
tttgttgtggaga

SEQ ID NO: 149318 - DNA, 13 bp, Artificial Sequence
  Oligonucleotide for detection of SNP TSC0037691
tctccacaacaaa

SEQ ID NO: 149319 - DNA, 13 bp, Artificial Sequence
  Oligonucleotide for detection of SNP TSC0037691
tttgttatggaga

SEQ ID NO: 149320 - DNA, 13 bp, Artificial Sequence
  Oligonucleotide for detection of SNP TSC0037691
tctccataacaaa

SEQ ID NO: 149321 - DNA, 13 bp, Artificial Sequence
  Oligonucleotide for detection of SNP TSC0037691
ttcgttgtggaga

SEQ ID NO: 149322 - DNA, 13 bp, Artificial Sequence
  Oligonucleotide for detection of SNP TSC0037691
tctccacaacgaa

SEQ ID NO: 149323 - DNA, 13 bp, Artificial Sequence
  Oligonucleotide for detection of SNP TSC0037691
ttcgttatggaga

SEQ ID NO: 149324 - DNA, 13 bp, Artificial Sequence
  Oligonucleotide for detection of SNP TSC0037691
tctccataacgaa

SEQ ID NO: 149325 - DNA, 13 bp, Artificial Sequence
  Oligonucleotide for detection of SNP TSC0037691
tttgtcgtggaga

SEQ ID NO: 149326 - DNA, 13 bp, Artificial Sequence
  Oligonucleotide for detection of SNP TSC0037691
tctccacgacaaa

SEQ ID NO: 149327 - DNA, 13 bp, Artificial Sequence
  Oligonucleotide for detection of SNP TSC0037691
ttcgtcgtggaga

SEQ ID NO: 149328 - DNA, 13 bp, Artificial Sequence
  Oligonucleotide for detection of SNP TSC0037691
tctccacgacgaa

SEQ ID NO: 149329 - DNA, 13 bp, Artificial Sequence
  Oligonucleotide for detection of SNP TSC0037692
aggaaaagggaat

SEQ ID NO: 149330 - DNA, 13 bp, Artificial Sequence
  Oligonucleotide for detection of SNP TSC0037692
attcccttttcct

SEQ ID NO: 149331 - DNA, 13 bp, Artificial Sequence
  Oligonucleotide for detection of SNP TSC0037692
aggaaaggggaat

SEQ ID NO: 149332 - DNA, 13 bp, Artificial Sequence
  Oligonucleotide for detection of SNP TSC0037692
attcccctttcct

SEQ ID NO: 149333 - DNA, 13 bp, Artificial Sequence
  Oligonucleotide for detection of SNP TSC0037695
atatatgtgttgt

SEQ ID NO: 149334 - DNA, 13 bp, Artificial Sequence
  Oligonucleotide for detection of SNP TSC0037695
acaacacatatat

SEQ ID NO: 149335 - DNA, 13 bp, Artificial Sequence
  Oligonucleotide for detection of SNP TSC0037695
atatatttgttgt

SEQ ID NO: 149336 - DNA, 13 bp, Artificial Sequence
  Oligonucleotide for detection of SNP TSC0037695
acaacaaatatat

SEQ ID NO: 149337 - DNA, 13 bp, Artificial Sequence
  Oligonucleotide for detection of SNP TSC0037695
atatacgtgttgt

SEQ ID NO: 149338 - DNA, 13 bp, Artificial Sequence
  Oligonucleotide for detection of SNP TSC0037695
acaacacgtatat

SEQ ID NO: 149339 - DNA, 13 bp, Artificial Sequence
  Oligonucleotide for detection of SNP TSC0037695
ataatatgtgtat

SEQ ID NO: 149340 - DNA, 13 bp, Artificial Sequence
  Oligonucleotide for detection of SNP TSC0037695
atacacatattat

SEQ ID NO: 149341 - DNA, 13 bp, Artificial Sequence
  Oligonucleotide for detection of SNP TSC0037695
ataataagtgtat

SEQ ID NO: 149342 - DNA, 13 bp, Artificial Sequence
  Oligonucleotide for detection of SNP TSC0037695
atacacttattat

SEQ ID NO: 149343 - DNA, 13 bp, Artificial Sequence
  Oligonucleotide for detection of SNP TSC0037695
ataatacgtgtat

SEQ ID NO: 149344 - DNA, 13 bp, Artificial Sequence
  Oligonucleotide for detection of SNP TSC0037695
atacacgtattat

SEQ ID NO: 149345 - DNA, 13 bp, Artificial Sequence
  Oligonucleotide for detection of SNP TSC0037701
taatatattttty

SEQ ID NO: 149346 - DNA, 13 bp, Artificial Sequence
  Oligonucleotide for detection of SNP TSC0037701
raaaaatatatta

SEQ ID NO: 149347 - DNA, 13 bp, Artificial Sequence
  Oligonucleotide for detection of SNP TSC0037701
taatatgttttty

SEQ ID NO: 149348 - DNA, 13 bp, Artificial Sequence
  Oligonucleotide for detection of SNP TSC0037701
raaaaacatatta

SEQ ID NO: 149349 - DNA, 13 bp, Artificial Sequence
  Oligonucleotide for detection of SNP TSC0037701
taatacgttttty

SEQ ID NO: 149350 - DNA, 13 bp, Artificial Sequence
  Oligonucleotide for detection of SNP TSC0037701
raaaaacgtatta

SEQ ID NO: 149351 - DNA, 13 bp, Artificial Sequence
  Oligonucleotide for detection of SNP TSC0037701
ggggggtgtgtta

SEQ ID NO: 149352 - DNA, 13 bp, Artificial Sequence
  Oligonucleotide for detection of SNP TSC0037701
taacacacccccc

SEQ ID NO: 149353 - DNA, 13 bp, Artificial Sequence
  Oligonucleotide for detection of SNP TSC0037701
ggggggcgtgtta

SEQ ID NO: 149354 - DNA, 13 bp, Artificial Sequence
  Oligonucleotide for detection of SNP TSC0037701
taacacgcccccc

SEQ ID NO: 149355 - DNA, 13 bp, Artificial Sequence
  Oligonucleotide for detection of SNP TSC0037703
tggaggtgaattt

SEQ ID NO: 149356 - DNA, 13 bp, Artificial Sequence
  Oligonucleotide for detection of SNP TSC0037703
aaattcacctcca

SEQ ID NO: 149357 - DNA, 13 bp, Artificial Sequence
  Oligonucleotide for detection of SNP TSC0037703
tggaggcgaattt

SEQ ID NO: 149358 - DNA, 13 bp, Artificial Sequence
  Oligonucleotide for detection of SNP TSC0037703
aaattcgcctcca

SEQ ID NO: 149359 - DNA, 13 bp, Artificial Sequence
  Oligonucleotide for detection of SNP TSC0037707
tttatgtgaataa

SEQ ID NO: 149360 - DNA, 13 bp, Artificial Sequence
  Oligonucleotide for detection of SNP TSC0037707
ttattcacataaa

SEQ ID NO: 149361 - DNA, 13 bp, Artificial Sequence
  Oligonucleotide for detection of SNP TSC0037707
tttacgtgaataa

SEQ ID NO: 149362 - DNA, 13 bp, Artificial Sequence
  Oligonucleotide for detection of SNP TSC0037707
ttattcacgtaaa

SEQ ID NO: 149363 - DNA, 13 bp, Artificial Sequence
  Oligonucleotide for detection of SNP TSC0037707
tttatgcgaataa

SEQ ID NO: 149364 - DNA, 13 bp, Artificial Sequence
  Oligonucleotide for detection of SNP TSC0037707
ttattcgcataaa

SEQ ID NO: 149365 - DNA, 13 bp, Artificial Sequence
  Oligonucleotide for detection of SNP TSC0037707
tttacgcgaataa

SEQ ID NO: 149366 - DNA, 13 bp, Artificial Sequence
  Oligonucleotide for detection of SNP TSC0037707
ttattcgcgtaaa

SEQ ID NO: 149367 - DNA, 13 bp, Artificial Sequence
  Oligonucleotide for detection of SNP TSC0037707
ttgtttgtgtaag

SEQ ID NO: 149368 - DNA, 13 bp, Artificial Sequence
  Oligonucleotide for detection of SNP TSC0037707
cttacacaaacaa

SEQ ID NO: 149369 - DNA, 13 bp, Artificial Sequence
  Oligonucleotide for detection of SNP TSC0037707
ttgtttatgtaag

SEQ ID NO: 149370 - DNA, 13 bp, Artificial Sequence
  Oligonucleotide for detection of SNP TSC0037707
cttacataaacaa

SEQ ID NO: 149371 - DNA, 13 bp, Artificial Sequence
  Oligonucleotide for detection of SNP TSC0037707
ttgttcgtgtaag

SEQ ID NO: 149372 - DNA, 13 bp, Artificial Sequence
  Oligonucleotide for detection of SNP TSC0037707
cttacacgaacaa

SEQ ID NO: 149373 - DNA, 13 bp, Artificial Sequence
  Oligonucleotide for detection of SNP TSC0037707
ttgtttacgtaag

SEQ ID NO: 149374 - DNA, 13 bp, Artificial Sequence
  Oligonucleotide for detection of SNP TSC0037707
cttacgtaaacaa

SEQ ID NO: 149375 - DNA, 13 bp, Artificial Sequence
  Oligonucleotide for detection of SNP TSC0037707
ttgtttgcgtaag

SEQ ID NO: 149376 - DNA, 13 bp, Artificial Sequence
  Oligonucleotide for detection of SNP TSC0037707
cttacgcaaacaa

SEQ ID NO: 149377 - DNA, 13 bp, Artificial Sequence
  Oligonucleotide for detection of SNP TSC0037707
ttgttcgcgtaag

SEQ ID NO: 149378 - DNA, 13 bp, Artificial Sequence
  Oligonucleotide for detection of SNP TSC0037707
cttacgcgaacaa

SEQ ID NO: 149379 - DNA, 13 bp, Artificial Sequence
  Oligonucleotide for detection of SNP TSC0037708
tttagatgaggta

SEQ ID NO: 149380 - DNA, 13 bp, Artificial Sequence
  Oligonucleotide for detection of SNP TSC0037708
tacctcatctaaa

SEQ ID NO: 149381 - DNA, 13 bp, Artificial Sequence
  Oligonucleotide for detection of SNP TSC0037708
tttagacgaggta

SEQ ID NO: 149382 - DNA, 13 bp, Artificial Sequence
  Oligonucleotide for detection of SNP TSC0037708
tacctcgtctaaa

SEQ ID NO: 149383 - DNA, 13 bp, Artificial Sequence
  Oligonucleotide for detection of SNP TSC0037710
gttggaaagtggy

SEQ ID NO: 149384 - DNA, 13 bp, Artificial Sequence
  Oligonucleotide for detection of SNP TSC0037710
rccactttccaac

SEQ ID NO: 149385 - DNA, 13 bp, Artificial Sequence
  Oligonucleotide for detection of SNP TSC0037710
gttggagagtggy

SEQ ID NO: 149386 - DNA, 13 bp, Artificial Sequence
  Oligonucleotide for detection of SNP TSC0037710
rccactctccaac

SEQ ID NO: 149387 - DNA, 13 bp, Artificial Sequence
  Oligonucleotide for detection of SNP TSC0037710
gttggaaagcggy

SEQ ID NO: 149388 - DNA, 13 bp, Artificial Sequence
  Oligonucleotide for detection of SNP TSC0037710
rccgctttccaac

SEQ ID NO: 149389 - DNA, 13 bp, Artificial Sequence
  Oligonucleotide for detection of SNP TSC0037710
gttggagagcggy

SEQ ID NO: 149390 - DNA, 13 bp, Artificial Sequence
  Oligonucleotide for detection of SNP TSC0037710
rccgctctccaac

SEQ ID NO: 149391 - DNA, 13 bp, Artificial Sequence
  Oligonucleotide for detection of SNP TSC0037711
atattagttttay

SEQ ID NO: 149392 - DNA, 13 bp, Artificial Sequence
  Oligonucleotide for detection of SNP TSC0037711
rtaaaactaatat

SEQ ID NO: 149393 - DNA, 13 bp, Artificial Sequence
  Oligonucleotide for detection of SNP TSC0037711
atattaattttay

SEQ ID NO: 149394 - DNA, 13 bp, Artificial Sequence
  Oligonucleotide for detection of SNP TSC0037711
rtaaaattaatat

SEQ ID NO: 149395 - DNA, 13 bp, Artificial Sequence
  Oligonucleotide for detection of SNP TSC0037712
taaaataaatttt

SEQ ID NO: 149396 - DNA, 13 bp, Artificial Sequence
  Oligonucleotide for detection of SNP TSC0037712
aaaatttatttta

SEQ ID NO: 149397 - DNA, 13 bp, Artificial Sequence
  Oligonucleotide for detection of SNP TSC0037712
taaaatgaatttt

SEQ ID NO: 149398 - DNA, 13 bp, Artificial Sequence
  Oligonucleotide for detection of SNP TSC0037712
aaaattcatttta

SEQ ID NO: 149399 - DNA, 13 bp, Artificial Sequence
  Oligonucleotide for detection of SNP TSC0037713
tgatagagaatgg

SEQ ID NO: 149400 - DNA, 13 bp, Artificial Sequence
  Oligonucleotide for detection of SNP TSC0037713
ccattctctatca

SEQ ID NO: 149401 - DNA, 13 bp, Artificial Sequence
  Oligonucleotide for detection of SNP TSC0037713
tgatagggaatgg

SEQ ID NO: 149402 - DNA, 13 bp, Artificial Sequence
  Oligonucleotide for detection of SNP TSC0037713
ccattccctatca

SEQ ID NO: 149403 - DNA, 13 bp, Artificial Sequence
  Oligonucleotide for detection of SNP TSC0037713
tgatagagaacgg

SEQ ID NO: 149404 - DNA, 13 bp, Artificial Sequence
  Oligonucleotide for detection of SNP TSC0037713
ccgttctctatca

SEQ ID NO: 149405 - DNA, 13 bp, Artificial Sequence
  Oligonucleotide for detection of SNP TSC0037713
tgatagggaacgg

SEQ ID NO: 149406 - DNA, 13 bp, Artificial Sequence
  Oligonucleotide for detection of SNP TSC0037713
ccgttccctatca

SEQ ID NO: 149407 - DNA, 13 bp, Artificial Sequence
  Oligonucleotide for detection of SNP TSC0037714
tatataatatagy

SEQ ID NO: 149408 - DNA, 13 bp, Artificial Sequence
  Oligonucleotide for detection of SNP TSC0037714
rctatattatata

SEQ ID NO: 149409 - DNA, 13 bp, Artificial Sequence
  Oligonucleotide for detection of SNP TSC0037714
tatatagtatagy

SEQ ID NO: 149410 - DNA, 13 bp, Artificial Sequence
  Oligonucleotide for detection of SNP TSC0037714
rctatactatata

SEQ ID NO: 149411 - DNA, 13 bp, Artificial Sequence
  Oligonucleotide for detection of SNP TSC0037715
gaatatgtaaagt

SEQ ID NO: 149412 - DNA, 13 bp, Artificial Sequence
  Oligonucleotide for detection of SNP TSC0037715
actttacatattc

SEQ ID NO: 149413 - DNA, 13 bp, Artificial Sequence
  Oligonucleotide for detection of SNP TSC0037715
gaatatataaagt

SEQ ID NO: 149414 - DNA, 13 bp, Artificial Sequence
  Oligonucleotide for detection of SNP TSC0037715
actttatatattc

SEQ ID NO: 149415 - DNA, 13 bp, Artificial Sequence
  Oligonucleotide for detection of SNP TSC0037716
atgtataaatttt

SEQ ID NO: 149416 - DNA, 13 bp, Artificial Sequence
  Oligonucleotide for detection of SNP TSC0037716
aaaatttatacat

SEQ ID NO: 149417 - DNA, 13 bp, Artificial Sequence
  Oligonucleotide for detection of SNP TSC0037716
atgtatgaatttt

SEQ ID NO: 149418 - DNA, 13 bp, Artificial Sequence
  Oligonucleotide for detection of SNP TSC0037716
aaaattcatacat

SEQ ID NO: 149419 - DNA, 13 bp, Artificial Sequence
  Oligonucleotide for detection of SNP TSC0037717
attaaagtattat

SEQ ID NO: 149420 - DNA, 13 bp, Artificial Sequence
  Oligonucleotide for detection of SNP TSC0037717
ataatactttaat

SEQ ID NO: 149421 - DNA, 13 bp, Artificial Sequence
  Oligonucleotide for detection of SNP TSC0037717
attaaaatattat

SEQ ID NO: 149422 - DNA, 13 bp, Artificial Sequence
  Oligonucleotide for detection of SNP TSC0037717
ataatattttaat

SEQ ID NO: 149423 - DNA, 13 bp, Artificial Sequence
  Oligonucleotide for detection of SNP TSC0037718
atgagtaattggy

SEQ ID NO: 149424 - DNA, 13 bp, Artificial Sequence
  Oligonucleotide for detection of SNP TSC0037718
rccaattactcat

SEQ ID NO: 149425 - DNA, 13 bp, Artificial Sequence
  Oligonucleotide for detection of SNP TSC0037718
atgagttattggy

SEQ ID NO: 149426 - DNA, 13 bp, Artificial Sequence
  Oligonucleotide for detection of SNP TSC0037718
rccaataactcat

SEQ ID NO: 149427 - DNA, 13 bp, Artificial Sequence
  Oligonucleotide for detection of SNP TSC0037718
gttaattgtttat

SEQ ID NO: 149428 - DNA, 13 bp, Artificial Sequence
  Oligonucleotide for detection of SNP TSC0037718
ataaacaattaac

SEQ ID NO: 149429 - DNA, 13 bp, Artificial Sequence
  Oligonucleotide for detection of SNP TSC0037718
gttaatggtttat

SEQ ID NO: 149430 - DNA, 13 bp, Artificial Sequence
  Oligonucleotide for detection of SNP TSC0037718
ataaaccattaac

SEQ ID NO: 149431 - DNA, 13 bp, Artificial Sequence
  Oligonucleotide for detection of SNP TSC0037720
aataatattttta

SEQ ID NO: 149432 - DNA, 13 bp, Artificial Sequence
  Oligonucleotide for detection of SNP TSC0037720
taaaaatattatt

SEQ ID NO: 149433 - DNA, 13 bp, Artificial Sequence
  Oligonucleotide for detection of SNP TSC0037720
aataatgttttta

SEQ ID NO: 149434 - DNA, 13 bp, Artificial Sequence
  Oligonucleotide for detection of SNP TSC0037720
taaaaacattatt

SEQ ID NO: 149435 - DNA, 13 bp, Artificial Sequence
  Oligonucleotide for detection of SNP TSC0037721
aggttatatatga

SEQ ID NO: 149436 - DNA, 13 bp, Artificial Sequence
  Oligonucleotide for detection of SNP TSC0037721
tcatatataacct

SEQ ID NO: 149437 - DNA, 13 bp, Artificial Sequence
  Oligonucleotide for detection of SNP TSC0037721
aggttagatatga

SEQ ID NO: 149438 - DNA, 13 bp, Artificial Sequence
  Oligonucleotide for detection of SNP TSC0037721
tcatatctaacct

SEQ ID NO: 149439 - DNA, 13 bp, Artificial Sequence
  Oligonucleotide for detection of SNP TSC0037721
ttatgtatgattt

SEQ ID NO: 149440 - DNA, 13 bp, Artificial Sequence
  Oligonucleotide for detection of SNP TSC0037721
aaatcatacataa

SEQ ID NO: 149441 - DNA, 13 bp, Artificial Sequence
  Oligonucleotide for detection of SNP TSC0037721
ttatgtttgattt

SEQ ID NO: 149442 - DNA, 13 bp, Artificial Sequence
  Oligonucleotide for detection of SNP TSC0037721
aaatcaaacataa

SEQ ID NO: 149443 - DNA, 13 bp, Artificial Sequence
  Oligonucleotide for detection of SNP TSC0037724
agaaatgttttgg

SEQ ID NO: 149444 - DNA, 13 bp, Artificial Sequence
  Oligonucleotide for detection of SNP TSC0037724
ccaaaacatttct

SEQ ID NO: 149445 - DNA, 13 bp, Artificial Sequence
  Oligonucleotide for detection of SNP TSC0037724
agaaacgttttgg

SEQ ID NO: 149446 - DNA, 13 bp, Artificial Sequence
  Oligonucleotide for detection of SNP TSC0037724
ccaaaacgtttct

SEQ ID NO: 149447 - DNA, 13 bp, Artificial Sequence
  Oligonucleotide for detection of SNP TSC0037724
ttagaacgttttt

SEQ ID NO: 149448 - DNA, 13 bp, Artificial Sequence
  Oligonucleotide for detection of SNP TSC0037724
aaaaacgttctaa

SEQ ID NO: 149449 - DNA, 13 bp, Artificial Sequence
  Oligonucleotide for detection of SNP TSC0037725
aggattgtgattg

SEQ ID NO: 149450 - DNA, 13 bp, Artificial Sequence
  Oligonucleotide for detection of SNP TSC0037725
caatcacaatcct

SEQ ID NO: 149451 - DNA, 13 bp, Artificial Sequence
  Oligonucleotide for detection of SNP TSC0037725
aggattatgattg

SEQ ID NO: 149452 - DNA, 13 bp, Artificial Sequence
  Oligonucleotide for detection of SNP TSC0037725
caatcataatcct

SEQ ID NO: 149453 - DNA, 13 bp, Artificial Sequence
  Oligonucleotide for detection of SNP TSC0037726
atggttatattty

SEQ ID NO: 149454 - DNA, 13 bp, Artificial Sequence
  Oligonucleotide for detection of SNP TSC0037726
raaatataaccat

SEQ ID NO: 149455 - DNA, 13 bp, Artificial Sequence
  Oligonucleotide for detection of SNP TSC0037726
atggttgtattty

SEQ ID NO: 149456 - DNA, 13 bp, Artificial Sequence
  Oligonucleotide for detection of SNP TSC0037726
raaatacaaccat

SEQ ID NO: 149457 - DNA, 13 bp, Artificial Sequence
  Oligonucleotide for detection of SNP TSC0037728
ttgtatatgatga

SEQ ID NO: 149458 - DNA, 13 bp, Artificial Sequence
  Oligonucleotide for detection of SNP TSC0037728
tcatcatatacaa

SEQ ID NO: 149459 - DNA, 13 bp, Artificial Sequence
  Oligonucleotide for detection of SNP TSC0037728
ttgtatttgatga

SEQ ID NO: 149460 - DNA, 13 bp, Artificial Sequence
  Oligonucleotide for detection of SNP TSC0037728
tcatcaaatacaa

SEQ ID NO: 149461 - DNA, 13 bp, Artificial Sequence
  Oligonucleotide for detection of SNP TSC0037728
ttattatgtgtag

SEQ ID NO: 149462 - DNA, 13 bp, Artificial Sequence
  Oligonucleotide for detection of SNP TSC0037728
ctacacataataa

SEQ ID NO: 149463 - DNA, 13 bp, Artificial Sequence
  Oligonucleotide for detection of SNP TSC0037728
ttattaggtgtag

SEQ ID NO: 149464 - DNA, 13 bp, Artificial Sequence
  Oligonucleotide for detection of SNP TSC0037728
ctacacctaataa

SEQ ID NO: 149465 - DNA, 13 bp, Artificial Sequence
  Oligonucleotide for detection of SNP TSC0037729
gtatgttggtgag

SEQ ID NO: 149466 - DNA, 13 bp, Artificial Sequence
  Oligonucleotide for detection of SNP TSC0037729
ctcaccaacatac

SEQ ID NO: 149467 - DNA, 13 bp, Artificial Sequence
  Oligonucleotide for detection of SNP TSC0037729
gtatgtcggtgag

SEQ ID NO: 149468 - DNA, 13 bp, Artificial Sequence
  Oligonucleotide for detection of SNP TSC0037729
ctcaccgacatac

SEQ ID NO: 149469 - DNA, 13 bp, Artificial Sequence
  Oligonucleotide for detection of SNP TSC0037729
tttattggtatgy

SEQ ID NO: 149470 - DNA, 13 bp, Artificial Sequence
  Oligonucleotide for detection of SNP TSC0037729
rcataccaataaa

SEQ ID NO: 149471 - DNA, 13 bp, Artificial Sequence
  Oligonucleotide for detection of SNP TSC0037729
tttattagtatgy

SEQ ID NO: 149472 - DNA, 13 bp, Artificial Sequence
  Oligonucleotide for detection of SNP TSC0037729
rcatactaataaa

SEQ ID NO: 149473 - DNA, 13 bp, Artificial Sequence
  Oligonucleotide for detection of SNP TSC0037729
tttatcggtatgy

SEQ ID NO: 149474 - DNA, 13 bp, Artificial Sequence
  Oligonucleotide for detection of SNP TSC0037729
rcataccgataaa

SEQ ID NO: 149475 - DNA, 13 bp, Artificial Sequence
  Oligonucleotide for detection of SNP TSC0037731
atagaaaagggty

SEQ ID NO: 149476 - DNA, 13 bp, Artificial Sequence
  Oligonucleotide for detection of SNP TSC0037731
racccttttctat

SEQ ID NO: 149477 - DNA, 13 bp, Artificial Sequence
  Oligonucleotide for detection of SNP TSC0037731
atagaagagggty

SEQ ID NO: 149478 - DNA, 13 bp, Artificial Sequence
  Oligonucleotide for detection of SNP TSC0037731
raccctcttctat

SEQ ID NO: 149479 - DNA, 13 bp, Artificial Sequence
  Oligonucleotide for detection of SNP TSC0037732
tttagggaaaagg

SEQ ID NO: 149480 - DNA, 13 bp, Artificial Sequence
  Oligonucleotide for detection of SNP TSC0037732
ccttttccctaaa

SEQ ID NO: 149481 - DNA, 13 bp, Artificial Sequence
  Oligonucleotide for detection of SNP TSC0037732
tttaggaaaaagg

SEQ ID NO: 149482 - DNA, 13 bp, Artificial Sequence
  Oligonucleotide for detection of SNP TSC0037732
cctttttcctaaa

SEQ ID NO: 149483 - DNA, 13 bp, Artificial Sequence
  Oligonucleotide for detection of SNP TSC0037733
ttttttggattag

SEQ ID NO: 149484 - DNA, 13 bp, Artificial Sequence
  Oligonucleotide for detection of SNP TSC0037733
ctaatccaaaaaa

SEQ ID NO: 149485 - DNA, 13 bp, Artificial Sequence
  Oligonucleotide for detection of SNP TSC0037733
ttttttagattag

SEQ ID NO: 149486 - DNA, 13 bp, Artificial Sequence
  Oligonucleotide for detection of SNP TSC0037733
ctaatctaaaaaa

SEQ ID NO: 149487 - DNA, 13 bp, Artificial Sequence
  Oligonucleotide for detection of SNP TSC0037734
ttttttgatagty

SEQ ID NO: 149488 - DNA, 13 bp, Artificial Sequence
  Oligonucleotide for detection of SNP TSC0037734
ractatcaaaaaa

SEQ ID NO: 149489 - DNA, 13 bp, Artificial Sequence
  Oligonucleotide for detection of SNP TSC0037734
ttttttaatagty

SEQ ID NO: 149490 - DNA, 13 bp, Artificial Sequence
  Oligonucleotide for detection of SNP TSC0037734
ractattaaaaaa

SEQ ID NO: 149491 - DNA, 13 bp, Artificial Sequence
  Oligonucleotide for detection of SNP TSC0037738
ttagtttgggtty

SEQ ID NO: 149492 - DNA, 13 bp, Artificial Sequence
  Oligonucleotide for detection of SNP TSC0037738
raacccaaactaa

SEQ ID NO: 149493 - DNA, 13 bp, Artificial Sequence
  Oligonucleotide for detection of SNP TSC0037738
ttagttcgggtty

SEQ ID NO: 149494 - DNA, 13 bp, Artificial Sequence
  Oligonucleotide for detection of SNP TSC0037738
raacccgaactaa

SEQ ID NO: 149495 - DNA, 13 bp, Artificial Sequence
  Oligonucleotide for detection of SNP TSC0037738
gggtttggattga

SEQ ID NO: 149496 - DNA, 13 bp, Artificial Sequence
  Oligonucleotide for detection of SNP TSC0037738
tcaatccaaaccc

SEQ ID NO: 149497 - DNA, 13 bp, Artificial Sequence
  Oligonucleotide for detection of SNP TSC0037738
gggtttagattga

SEQ ID NO: 149498 - DNA, 13 bp, Artificial Sequence
  Oligonucleotide for detection of SNP TSC0037738
tcaatctaaaccc

SEQ ID NO: 149499 - DNA, 13 bp, Artificial Sequence
  Oligonucleotide for detection of SNP TSC0037738
gggttcggattga

SEQ ID NO: 149500 - DNA, 13 bp, Artificial Sequence
  Oligonucleotide for detection of SNP TSC0037738
tcaatccgaaccc

SEQ ID NO: 149501 - DNA, 13 bp, Artificial Sequence
  Oligonucleotide for detection of SNP TSC0037739
ggaggtggggcgy

SEQ ID NO: 149502 - DNA, 13 bp, Artificial Sequence
  Oligonucleotide for detection of SNP TSC0037739
rcgccccacctcc

SEQ ID NO: 149503 - DNA, 13 bp, Artificial Sequence
  Oligonucleotide for detection of SNP TSC0037739
ggaggtagggcgy

SEQ ID NO: 149504 - DNA, 13 bp, Artificial Sequence
  Oligonucleotide for detection of SNP TSC0037739
rcgccctacctcc

SEQ ID NO: 149505 - DNA, 13 bp, Artificial Sequence
  Oligonucleotide for detection of SNP TSC0037740
agttgggtgtgta

SEQ ID NO: 149506 - DNA, 13 bp, Artificial Sequence
  Oligonucleotide for detection of SNP TSC0037740
tacacacccaact

SEQ ID NO: 149507 - DNA, 13 bp, Artificial Sequence
  Oligonucleotide for detection of SNP TSC0037740
agttggatgtgta

SEQ ID NO: 149508 - DNA, 13 bp, Artificial Sequence
  Oligonucleotide for detection of SNP TSC0037740
tacacatccaact

SEQ ID NO: 149509 - DNA, 13 bp, Artificial Sequence
  Oligonucleotide for detection of SNP TSC0037742
gagttaagtagag

SEQ ID NO: 149510 - DNA, 13 bp, Artificial Sequence
  Oligonucleotide for detection of SNP TSC0037742
ctctacttaactc

SEQ ID NO: 149511 - DNA, 13 bp, Artificial Sequence
  Oligonucleotide for detection of SNP TSC0037742
gagttatgtagag

SEQ ID NO: 149512 - DNA, 13 bp, Artificial Sequence
  Oligonucleotide for detection of SNP TSC0037742
ctctacataactc

SEQ ID NO: 149513 - DNA, 13 bp, Artificial Sequence
  Oligonucleotide for detection of SNP TSC0037742
gagttacgtagag

SEQ ID NO: 149514 - DNA, 13 bp, Artificial Sequence
  Oligonucleotide for detection of SNP TSC0037742
ctctacgtaactc

SEQ ID NO: 149515 - DNA, 13 bp, Artificial Sequence
  Oligonucleotide for detection of SNP TSC0037742
ttttgtttggtty

SEQ ID NO: 149516 - DNA, 13 bp, Artificial Sequence
  Oligonucleotide for detection of SNP TSC0037742
raaccaaacaaaa

SEQ ID NO: 149517 - DNA, 13 bp, Artificial Sequence
  Oligonucleotide for detection of SNP TSC0037743
atatgtattgtay

SEQ ID NO: 149518 - DNA, 13 bp, Artificial Sequence
  Oligonucleotide for detection of SNP TSC0037743
rtacaatacatat

SEQ ID NO: 149519 - DNA, 13 bp, Artificial Sequence
  Oligonucleotide for detection of SNP TSC0037743
atatgtgttgtay

SEQ ID NO: 149520 - DNA, 13 bp, Artificial Sequence
  Oligonucleotide for detection of SNP TSC0037743
rtacaacacatat

SEQ ID NO: 149521 - DNA, 13 bp, Artificial Sequence
  Oligonucleotide for detection of SNP TSC0037743
atatgcgttgtay

SEQ ID NO: 149522 - DNA, 13 bp, Artificial Sequence
  Oligonucleotide for detection of SNP TSC0037743
rtacaacgcatat

SEQ ID NO: 149523 - DNA, 13 bp, Artificial Sequence
  Oligonucleotide for detection of SNP TSC0037743
gtgtagtgtatgt

SEQ ID NO: 149524 - DNA, 13 bp, Artificial Sequence
  Oligonucleotide for detection of SNP TSC0037743
acatacactacac

SEQ ID NO: 149525 - DNA, 13 bp, Artificial Sequence
  Oligonucleotide for detection of SNP TSC0037743
gtgtagcgtatgt

SEQ ID NO: 149526 - DNA, 13 bp, Artificial Sequence
  Oligonucleotide for detection of SNP TSC0037743
acatacgctacac

SEQ ID NO: 149527 - DNA, 13 bp, Artificial Sequence
  Oligonucleotide for detection of SNP TSC0037744
tattatatggttt

SEQ ID NO: 149528 - DNA, 13 bp, Artificial Sequence
  Oligonucleotide for detection of SNP TSC0037744
aaaccatataata

SEQ ID NO: 149529 - DNA, 13 bp, Artificial Sequence
  Oligonucleotide for detection of SNP TSC0037744
tattatgtggttt

SEQ ID NO: 149530 - DNA, 13 bp, Artificial Sequence
  Oligonucleotide for detection of SNP TSC0037744
aaaccacataata

SEQ ID NO: 149531 - DNA, 13 bp, Artificial Sequence
  Oligonucleotide for detection of SNP TSC0037744
tattacgtggttt

SEQ ID NO: 149532 - DNA, 13 bp, Artificial Sequence
  Oligonucleotide for detection of SNP TSC0037744
aaaccacgtaata

SEQ ID NO: 149533 - DNA, 13 bp, Artificial Sequence
  Oligonucleotide for detection of SNP TSC0037744
aggttatgtgata

SEQ ID NO: 149534 - DNA, 13 bp, Artificial Sequence
  Oligonucleotide for detection of SNP TSC0037744
tatcacataacct

SEQ ID NO: 149535 - DNA, 13 bp, Artificial Sequence
  Oligonucleotide for detection of SNP TSC0037744
aggttacgtgata

SEQ ID NO: 149536 - DNA, 13 bp, Artificial Sequence
  Oligonucleotide for detection of SNP TSC0037744
tatcacgtaacct

SEQ ID NO: 149537 - DNA, 13 bp, Artificial Sequence
  Oligonucleotide for detection of SNP TSC0037745
gtgttatataaag

SEQ ID NO: 149538 - DNA, 13 bp, Artificial Sequence
  Oligonucleotide for detection of SNP TSC0037745
ctttatataacac

SEQ ID NO: 149539 - DNA, 13 bp, Artificial Sequence
  Oligonucleotide for detection of SNP TSC0037745
gtgttagataaag

SEQ ID NO: 149540 - DNA, 13 bp, Artificial Sequence
  Oligonucleotide for detection of SNP TSC0037745
ctttatctaacac

SEQ ID NO: 149541 - DNA, 13 bp, Artificial Sequence
  Oligonucleotide for detection of SNP TSC0037745
ttttatgtaatay

SEQ ID NO: 149542 - DNA, 13 bp, Artificial Sequence
  Oligonucleotide for detection of SNP TSC0037745
rtattacataaaa

SEQ ID NO: 149543 - DNA, 13 bp, Artificial Sequence
  Oligonucleotide for detection of SNP TSC0037745
ttttatttaatay

SEQ ID NO: 149544 - DNA, 13 bp, Artificial Sequence
  Oligonucleotide for detection of SNP TSC0037745
rtattaaataaaa

SEQ ID NO: 149545 - DNA, 13 bp, Artificial Sequence
  Oligonucleotide for detection of SNP TSC0037747
aggtaggaaagty

SEQ ID NO: 149546 - DNA, 13 bp, Artificial Sequence
  Oligonucleotide for detection of SNP TSC0037747
ractttcctacct

SEQ ID NO: 149547 - DNA, 13 bp, Artificial Sequence
  Oligonucleotide for detection of SNP TSC0037747
aggtagaaaagty

SEQ ID NO: 149548 - DNA, 13 bp, Artificial Sequence
  Oligonucleotide for detection of SNP TSC0037747
racttttctacct

SEQ ID NO: 149549 - DNA, 13 bp, Artificial Sequence
  Oligonucleotide for detection of SNP TSC0037748
tatgttatagtta

SEQ ID NO: 149550 - DNA, 13 bp, Artificial Sequence
  Oligonucleotide for detection of SNP TSC0037748
taactataacata

SEQ ID NO: 149551 - DNA, 13 bp, Artificial Sequence
  Oligonucleotide for detection of SNP TSC0037748
tatgttgtagtta

SEQ ID NO: 149552 - DNA, 13 bp, Artificial Sequence
  Oligonucleotide for detection of SNP TSC0037748
taactacaacata

SEQ ID NO: 149553 - DNA, 13 bp, Artificial Sequence
  Oligonucleotide for detection of SNP TSC0037749
gattgaatgatty

SEQ ID NO: 149554 - DNA, 13 bp, Artificial Sequence
  Oligonucleotide for detection of SNP TSC0037749
raatcattcaatc

SEQ ID NO: 149555 - DNA, 13 bp, Artificial Sequence
  Oligonucleotide for detection of SNP TSC0037749
gattgagtgatty

SEQ ID NO: 149556 - DNA, 13 bp, Artificial Sequence
  Oligonucleotide for detection of SNP TSC0037749
raatcactcaatc

SEQ ID NO: 149557 - DNA, 13 bp, Artificial Sequence
  Oligonucleotide for detection of SNP TSC0037750
ttgataatattgt

SEQ ID NO: 149558 - DNA, 13 bp, Artificial Sequence
  Oligonucleotide for detection of SNP TSC0037750
acaatattatcaa

SEQ ID NO: 149559 - DNA, 13 bp, Artificial Sequence
  Oligonucleotide for detection of SNP TSC0037750
ttgatattattgt

SEQ ID NO: 149560 - DNA, 13 bp, Artificial Sequence
  Oligonucleotide for detection of SNP TSC0037750
acaataatatcaa

SEQ ID NO: 149561 - DNA, 13 bp, Artificial Sequence
  Oligonucleotide for detection of SNP TSC0037750
tcgataatattgt

SEQ ID NO: 149562 - DNA, 13 bp, Artificial Sequence
  Oligonucleotide for detection of SNP TSC0037750
acaatattatcga

SEQ ID NO: 149563 - DNA, 13 bp, Artificial Sequence
  Oligonucleotide for detection of SNP TSC0037750
tcgatattattgt

SEQ ID NO: 149564 - DNA, 13 bp, Artificial Sequence
  Oligonucleotide for detection of SNP TSC0037750
acaataatatcga

SEQ ID NO: 149565 - DNA, 13 bp, Artificial Sequence
  Oligonucleotide for detection of SNP TSC0037750
ataatattgttga

SEQ ID NO: 149566 - DNA, 13 bp, Artificial Sequence
  Oligonucleotide for detection of SNP TSC0037750
tcaacaatattat

SEQ ID NO: 149567 - DNA, 13 bp, Artificial Sequence
  Oligonucleotide for detection of SNP TSC0037750
ataatagtgttga

SEQ ID NO: 149568 - DNA, 13 bp, Artificial Sequence
  Oligonucleotide for detection of SNP TSC0037750
tcaacactattat

SEQ ID NO: 149569 - DNA, 13 bp, Artificial Sequence
  Oligonucleotide for detection of SNP TSC0037750
ataatattgtcga

SEQ ID NO: 149570 - DNA, 13 bp, Artificial Sequence
  Oligonucleotide for detection of SNP TSC0037750
tcgacaatattat

SEQ ID NO: 149571 - DNA, 13 bp, Artificial Sequence
  Oligonucleotide for detection of SNP TSC0037750
ataatagtgtcga

SEQ ID NO: 149572 - DNA, 13 bp, Artificial Sequence
  Oligonucleotide for detection of SNP TSC0037750
tcgacactattat

SEQ ID NO: 149573 - DNA, 13 bp, Artificial Sequence
  Oligonucleotide for detection of SNP TSC0037752
tttttaattgggy

SEQ ID NO: 149574 - DNA, 13 bp, Artificial Sequence
  Oligonucleotide for detection of SNP TSC0037752
rcccaattaaaaa

SEQ ID NO: 149575 - DNA, 13 bp, Artificial Sequence
  Oligonucleotide for detection of SNP TSC0037752
tttttagttgggy

SEQ ID NO: 149576 - DNA, 13 bp, Artificial Sequence
  Oligonucleotide for detection of SNP TSC0037752
rcccaactaaaaa

SEQ ID NO: 149577 - DNA, 13 bp, Artificial Sequence
  Oligonucleotide for detection of SNP TSC0037755
gggtttaggttta

SEQ ID NO: 149578 - DNA, 13 bp, Artificial Sequence
  Oligonucleotide for detection of SNP TSC0037755
taaacctaaaccc

SEQ ID NO: 149579 - DNA, 13 bp, Artificial Sequence
  Oligonucleotide for detection of SNP TSC0037755
gggtttgggttta

SEQ ID NO: 149580 - DNA, 13 bp, Artificial Sequence
  Oligonucleotide for detection of SNP TSC0037755
taaacccaaaccc

SEQ ID NO: 149581 - DNA, 13 bp, Artificial Sequence
  Oligonucleotide for detection of SNP TSC0037758
attataatgttay

SEQ ID NO: 149582 - DNA, 13 bp, Artificial Sequence
  Oligonucleotide for detection of SNP TSC0037758
rtaacattataat

SEQ ID NO: 149583 - DNA, 13 bp, Artificial Sequence
  Oligonucleotide for detection of SNP TSC0037758
attatagtgttay

SEQ ID NO: 149584 - DNA, 13 bp, Artificial Sequence
  Oligonucleotide for detection of SNP TSC0037758
rtaacactataat

SEQ ID NO: 149585 - DNA, 13 bp, Artificial Sequence
  Oligonucleotide for detection of SNP TSC0037759
aaataaggaaaga

SEQ ID NO: 149586 - DNA, 13 bp, Artificial Sequence
  Oligonucleotide for detection of SNP TSC0037759
tctttccttattt

SEQ ID NO: 149587 - DNA, 13 bp, Artificial Sequence
  Oligonucleotide for detection of SNP TSC0037759
aaataaagaaaga

SEQ ID NO: 149588 - DNA, 13 bp, Artificial Sequence
  Oligonucleotide for detection of SNP TSC0037759
tctttctttattt

SEQ ID NO: 149589 - DNA, 13 bp, Artificial Sequence
  Oligonucleotide for detection of SNP TSC0037760
tatatatgttggg

SEQ ID NO: 149590 - DNA, 13 bp, Artificial Sequence
  Oligonucleotide for detection of SNP TSC0037760
cccaacatatata

SEQ ID NO: 149591 - DNA, 13 bp, Artificial Sequence
  Oligonucleotide for detection of SNP TSC0037760
tatataggttggg

SEQ ID NO: 149592 - DNA, 13 bp, Artificial Sequence
  Oligonucleotide for detection of SNP TSC0037760
cccaacctatata

SEQ ID NO: 149593 - DNA, 13 bp, Artificial Sequence
  Oligonucleotide for detection of SNP TSC0037760
tatatacgttggg

SEQ ID NO: 149594 - DNA, 13 bp, Artificial Sequence
  Oligonucleotide for detection of SNP TSC0037760
cccaacgtatata

SEQ ID NO: 149595 - DNA, 13 bp, Artificial Sequence
  Oligonucleotide for detection of SNP TSC0037760
tttagtgtatgta

SEQ ID NO: 149596 - DNA, 13 bp, Artificial Sequence
  Oligonucleotide for detection of SNP TSC0037760
tacatacactaaa

SEQ ID NO: 149597 - DNA, 13 bp, Artificial Sequence
  Oligonucleotide for detection of SNP TSC0037760
tttagtttatgta

SEQ ID NO: 149598 - DNA, 13 bp, Artificial Sequence
  Oligonucleotide for detection of SNP TSC0037760
tacataaactaaa

SEQ ID NO: 149599 - DNA, 13 bp, Artificial Sequence
  Oligonucleotide for detection of SNP TSC0037760
tttagcgtatgta

SEQ ID NO: 149600 - DNA, 13 bp, Artificial Sequence
  Oligonucleotide for detection of SNP TSC0037760
tacatacgctaaa

SEQ ID NO: 149601 - DNA, 13 bp, Artificial Sequence
  Oligonucleotide for detection of SNP TSC0037762
gagaggtgaggtg

SEQ ID NO: 149602 - DNA, 13 bp, Artificial Sequence
  Oligonucleotide for detection of SNP TSC0037762
cacctcacctctc

SEQ ID NO: 149603 - DNA, 13 bp, Artificial Sequence
  Oligonucleotide for detection of SNP TSC0037762
gagaggcgaggtg

SEQ ID NO: 149604 - DNA, 13 bp, Artificial Sequence
  Oligonucleotide for detection of SNP TSC0037762
cacctcgcctctc

SEQ ID NO: 149605 - DNA, 13 bp, Artificial Sequence
  Oligonucleotide for detection of SNP TSC0037765
agttaggaagtgg

SEQ ID NO: 149606 - DNA, 13 bp, Artificial Sequence
  Oligonucleotide for detection of SNP TSC0037765
ccacttcctaact

SEQ ID NO: 149607 - DNA, 13 bp, Artificial Sequence
  Oligonucleotide for detection of SNP TSC0037765
agttagaaagtgg

SEQ ID NO: 149608 - DNA, 13 bp, Artificial Sequence
  Oligonucleotide for detection of SNP TSC0037765
ccactttctaact

SEQ ID NO: 149609 - DNA, 13 bp, Artificial Sequence
  Oligonucleotide for detection of SNP TSC0037766
tgagtgtgggtgg

SEQ ID NO: 149610 - DNA, 13 bp, Artificial Sequence
  Oligonucleotide for detection of SNP TSC0037766
ccacccacactca

SEQ ID NO: 149611 - DNA, 13 bp, Artificial Sequence
  Oligonucleotide for detection of SNP TSC0037766
tgagtgggggtgg

SEQ ID NO: 149612 - DNA, 13 bp, Artificial Sequence
  Oligonucleotide for detection of SNP TSC0037766
ccacccccactca

SEQ ID NO: 149613 - DNA, 13 bp, Artificial Sequence
  Oligonucleotide for detection of SNP TSC0037766
cgagtgtgggtgg

SEQ ID NO: 149614 - DNA, 13 bp, Artificial Sequence
  Oligonucleotide for detection of SNP TSC0037766
ccacccacactcg

SEQ ID NO: 149615 - DNA, 13 bp, Artificial Sequence
  Oligonucleotide for detection of SNP TSC0037766
cgagtgggggtgg

SEQ ID NO: 149616 - DNA, 13 bp, Artificial Sequence
  Oligonucleotide for detection of SNP TSC0037766
ccacccccactcg

SEQ ID NO: 149617 - DNA, 13 bp, Artificial Sequence
  Oligonucleotide for detection of SNP TSC0037766
tgagcgtgggtgg

SEQ ID NO: 149618 - DNA, 13 bp, Artificial Sequence
  Oligonucleotide for detection of SNP TSC0037766
ccacccacgctca

SEQ ID NO: 149619 - DNA, 13 bp, Artificial Sequence
  Oligonucleotide for detection of SNP TSC0037766
tgagcgggggtgg

SEQ ID NO: 149620 - DNA, 13 bp, Artificial Sequence
  Oligonucleotide for detection of SNP TSC0037766
ccacccccgctca

SEQ ID NO: 149621 - DNA, 13 bp, Artificial Sequence
  Oligonucleotide for detection of SNP TSC0037766
tgagtgcgggtgg

SEQ ID NO: 149622 - DNA, 13 bp, Artificial Sequence
  Oligonucleotide for detection of SNP TSC0037766
ccacccgcactca

SEQ ID NO: 149623 - DNA, 13 bp, Artificial Sequence
  Oligonucleotide for detection of SNP TSC0037766
cgagcgggggtgg

SEQ ID NO: 149624 - DNA, 13 bp, Artificial Sequence
  Oligonucleotide for detection of SNP TSC0037766
ccacccccgctcg

SEQ ID NO: 149625 - DNA, 13 bp, Artificial Sequence
  Oligonucleotide for detection of SNP TSC0037766
cgagcgtgggtgg

SEQ ID NO: 149626 - DNA, 13 bp, Artificial Sequence
  Oligonucleotide for detection of SNP TSC0037766
ccacccacgctcg

SEQ ID NO: 149627 - DNA, 13 bp, Artificial Sequence
  Oligonucleotide for detection of SNP TSC0037766
cgagtgcgggtgg

SEQ ID NO: 149628 - DNA, 13 bp, Artificial Sequence
  Oligonucleotide for detection of SNP TSC0037766
ccacccgcactcg

SEQ ID NO: 149629 - DNA, 13 bp, Artificial Sequence
  Oligonucleotide for detection of SNP TSC0037766
tgagcgcgggtgg

SEQ ID NO: 149630 - DNA, 13 bp, Artificial Sequence
  Oligonucleotide for detection of SNP TSC0037766
ccacccgcgctca

SEQ ID NO: 149631 - DNA, 13 bp, Artificial Sequence
  Oligonucleotide for detection of SNP TSC0037766
cgagcgcgggtgg

SEQ ID NO: 149632 - DNA, 13 bp, Artificial Sequence
  Oligonucleotide for detection of SNP TSC0037766
ccacccgcgctcg

SEQ ID NO: 149633 - DNA, 13 bp, Artificial Sequence
  Oligonucleotide for detection of SNP TSC0037766
ttatttgtgtttg

SEQ ID NO: 149634 - DNA, 13 bp, Artificial Sequence
  Oligonucleotide for detection of SNP TSC0037766
caaacacaaataa

SEQ ID NO: 149635 - DNA, 13 bp, Artificial Sequence
  Oligonucleotide for detection of SNP TSC0037766
ttatttttgtttg

SEQ ID NO: 149636 - DNA, 13 bp, Artificial Sequence
  Oligonucleotide for detection of SNP TSC0037766
caaacaaaaataa

SEQ ID NO: 149637 - DNA, 13 bp, Artificial Sequence
  Oligonucleotide for detection of SNP TSC0037766
ttattcgtgtttg

SEQ ID NO: 149638 - DNA, 13 bp, Artificial Sequence
  Oligonucleotide for detection of SNP TSC0037766
caaacacgaataa

SEQ ID NO: 149639 - DNA, 13 bp, Artificial Sequence
  Oligonucleotide for detection of SNP TSC0037766
ttattttcgtttg

SEQ ID NO: 149640 - DNA, 13 bp, Artificial Sequence
  Oligonucleotide for detection of SNP TSC0037766
caaacgaaaataa

SEQ ID NO: 149641 - DNA, 13 bp, Artificial Sequence
  Oligonucleotide for detection of SNP TSC0037766
ttatttgcgtttg

SEQ ID NO: 149642 - DNA, 13 bp, Artificial Sequence
  Oligonucleotide for detection of SNP TSC0037766
caaacgcaaataa

SEQ ID NO: 149643 - DNA, 13 bp, Artificial Sequence
  Oligonucleotide for detection of SNP TSC0037766
ttatttttgttcg

SEQ ID NO: 149644 - DNA, 13 bp, Artificial Sequence
  Oligonucleotide for detection of SNP TSC0037766
cgaacaaaaataa

SEQ ID NO: 149645 - DNA, 13 bp, Artificial Sequence
  Oligonucleotide for detection of SNP TSC0037766
ttatttgtgttcg

SEQ ID NO: 149646 - DNA, 13 bp, Artificial Sequence
  Oligonucleotide for detection of SNP TSC0037766
cgaacacaaataa

SEQ ID NO: 149647 - DNA, 13 bp, Artificial Sequence
  Oligonucleotide for detection of SNP TSC0037766
ttattttcgttcg

SEQ ID NO: 149648 - DNA, 13 bp, Artificial Sequence
  Oligonucleotide for detection of SNP TSC0037766
cgaacgaaaataa

SEQ ID NO: 149649 - DNA, 13 bp, Artificial Sequence
  Oligonucleotide for detection of SNP TSC0037766
ttattcgcgtttg

SEQ ID NO: 149650 - DNA, 13 bp, Artificial Sequence
  Oligonucleotide for detection of SNP TSC0037766
caaacgcgaataa

SEQ ID NO: 149651 - DNA, 13 bp, Artificial Sequence
  Oligonucleotide for detection of SNP TSC0037766
ttattcgtgttcg

SEQ ID NO: 149652 - DNA, 13 bp, Artificial Sequence
  Oligonucleotide for detection of SNP TSC0037766
cgaacacgaataa

SEQ ID NO: 149653 - DNA, 13 bp, Artificial Sequence
  Oligonucleotide for detection of SNP TSC0037766
ttatttgcgttcg

SEQ ID NO: 149654 - DNA, 13 bp, Artificial Sequence
  Oligonucleotide for detection of SNP TSC0037766
cgaacgcaaataa

SEQ ID NO: 149655 - DNA, 13 bp, Artificial Sequence
  Oligonucleotide for detection of SNP TSC0037766
ttattcgcgttcg

SEQ ID NO: 149656 - DNA, 13 bp, Artificial Sequence
  Oligonucleotide for detection of SNP TSC0037766
cgaacgcgaataa

SEQ ID NO: 149657 - DNA, 13 bp, Artificial Sequence
  Oligonucleotide for detection of SNP TSC0037767
ttaaatggattty

SEQ ID NO: 149658 - DNA, 13 bp, Artificial Sequence
  Oligonucleotide for detection of SNP TSC0037767
raaatccatttaa

SEQ ID NO: 149659 - DNA, 13 bp, Artificial Sequence
  Oligonucleotide for detection of SNP TSC0037767
ttaaatagattty

SEQ ID NO: 149660 - DNA, 13 bp, Artificial Sequence
  Oligonucleotide for detection of SNP TSC0037767
raaatctatttaa

SEQ ID NO: 149661 - DNA, 13 bp, Artificial Sequence
  Oligonucleotide for detection of SNP TSC0037768
tatattaatttta

SEQ ID NO: 149662 - DNA, 13 bp, Artificial Sequence
  Oligonucleotide for detection of SNP TSC0037768
taaaattaatata

SEQ ID NO: 149663 - DNA, 13 bp, Artificial Sequence
  Oligonucleotide for detection of SNP TSC0037768
tatatttatttta

SEQ ID NO: 149664 - DNA, 13 bp, Artificial Sequence
  Oligonucleotide for detection of SNP TSC0037768
taaaataaatata

SEQ ID NO: 149665 - DNA, 13 bp, Artificial Sequence
  Oligonucleotide for detection of SNP TSC0037768
taaggttaatata

SEQ ID NO: 149666 - DNA, 13 bp, Artificial Sequence
  Oligonucleotide for detection of SNP TSC0037768
tatattaacctta

SEQ ID NO: 149667 - DNA, 13 bp, Artificial Sequence
  Oligonucleotide for detection of SNP TSC0037768
taaggtgaatata

SEQ ID NO: 149668 - DNA, 13 bp, Artificial Sequence
  Oligonucleotide for detection of SNP TSC0037768
tatattcacctta

SEQ ID NO: 149669 - DNA, 13 bp, Artificial Sequence
  Oligonucleotide for detection of SNP TSC0037769
gaatgtggagtga

SEQ ID NO: 149670 - DNA, 13 bp, Artificial Sequence
  Oligonucleotide for detection of SNP TSC0037769
tcactccacattc

SEQ ID NO: 149671 - DNA, 13 bp, Artificial Sequence
  Oligonucleotide for detection of SNP TSC0037769
gaatgtagagtga

SEQ ID NO: 149672 - DNA, 13 bp, Artificial Sequence
  Oligonucleotide for detection of SNP TSC0037769
tcactctacattc

SEQ ID NO: 149673 - DNA, 13 bp, Artificial Sequence
  Oligonucleotide for detection of SNP TSC0037770
ttatgggtttata

SEQ ID NO: 149674 - DNA, 13 bp, Artificial Sequence
  Oligonucleotide for detection of SNP TSC0037770
tataaacccataa

SEQ ID NO: 149675 - DNA, 13 bp, Artificial Sequence
  Oligonucleotide for detection of SNP TSC0037770
ttatggttttata

SEQ ID NO: 149676 - DNA, 13 bp, Artificial Sequence
  Oligonucleotide for detection of SNP TSC0037770
tataaaaccataa

SEQ ID NO: 149677 - DNA, 13 bp, Artificial Sequence
  Oligonucleotide for detection of SNP TSC0037770
ttacgggtttata

SEQ ID NO: 149678 - DNA, 13 bp, Artificial Sequence
  Oligonucleotide for detection of SNP TSC0037770
tataaacccgtaa

SEQ ID NO: 149679 - DNA, 13 bp, Artificial Sequence
  Oligonucleotide for detection of SNP TSC0037770
ttacggttttata

SEQ ID NO: 149680 - DNA, 13 bp, Artificial Sequence
  Oligonucleotide for detection of SNP TSC0037770
tataaaaccgtaa

SEQ ID NO: 149681 - DNA, 13 bp, Artificial Sequence
  Oligonucleotide for detection of SNP TSC0037770
tgtggatttgtag

SEQ ID NO: 149682 - DNA, 13 bp, Artificial Sequence
  Oligonucleotide for detection of SNP TSC0037770
ctacaaatccaca

SEQ ID NO: 149683 - DNA, 13 bp, Artificial Sequence
  Oligonucleotide for detection of SNP TSC0037770
tgtggaattgtag

SEQ ID NO: 149684 - DNA, 13 bp, Artificial Sequence
  Oligonucleotide for detection of SNP TSC0037770
ctacaattccaca

SEQ ID NO: 149685 - DNA, 13 bp, Artificial Sequence
  Oligonucleotide for detection of SNP TSC0037770
tgtggattcgtag

SEQ ID NO: 149686 - DNA, 13 bp, Artificial Sequence
  Oligonucleotide for detection of SNP TSC0037770
ctacgaatccaca

SEQ ID NO: 149687 - DNA, 13 bp, Artificial Sequence
  Oligonucleotide for detection of SNP TSC0037770
tgtggaatcgtag

SEQ ID NO: 149688 - DNA, 13 bp, Artificial Sequence
  Oligonucleotide for detection of SNP TSC0037770
ctacgattccaca

SEQ ID NO: 149689 - DNA, 13 bp, Artificial Sequence
  Oligonucleotide for detection of SNP TSC0037771
taggagttatgta

SEQ ID NO: 149690 - DNA, 13 bp, Artificial Sequence
  Oligonucleotide for detection of SNP TSC0037771
tacataactccta

SEQ ID NO: 149691 - DNA, 13 bp, Artificial Sequence
  Oligonucleotide for detection of SNP TSC0037771
taggaggtatgta

SEQ ID NO: 149692 - DNA, 13 bp, Artificial Sequence
  Oligonucleotide for detection of SNP TSC0037771
tacatacctccta

SEQ ID NO: 149693 - DNA, 13 bp, Artificial Sequence
  Oligonucleotide for detection of SNP TSC0037772
ggagaggttatta

SEQ ID NO: 149694 - DNA, 13 bp, Artificial Sequence
  Oligonucleotide for detection of SNP TSC0037772
taataacctctcc

SEQ ID NO: 149695 - DNA, 13 bp, Artificial Sequence
  Oligonucleotide for detection of SNP TSC0037772
ggagagtttatta

SEQ ID NO: 149696 - DNA, 13 bp, Artificial Sequence
  Oligonucleotide for detection of SNP TSC0037772
taataaactctcc

SEQ ID NO: 149697 - DNA, 13 bp, Artificial Sequence
  Oligonucleotide for detection of SNP TSC0037772
tagtagtttttty

SEQ ID NO: 149698 - DNA, 13 bp, Artificial Sequence
  Oligonucleotide for detection of SNP TSC0037772
raaaaaactacta

SEQ ID NO: 149699 - DNA, 13 bp, Artificial Sequence
  Oligonucleotide for detection of SNP TSC0037772
tagtagattttty

SEQ ID NO: 149700 - DNA, 13 bp, Artificial Sequence
  Oligonucleotide for detection of SNP TSC0037772
raaaaatctacta

SEQ ID NO: 149701 - DNA, 13 bp, Artificial Sequence
  Oligonucleotide for detection of SNP TSC0037773
gtataggtattgy

SEQ ID NO: 149702 - DNA, 13 bp, Artificial Sequence
  Oligonucleotide for detection of SNP TSC0037773
rcaatacctatac

SEQ ID NO: 149703 - DNA, 13 bp, Artificial Sequence
  Oligonucleotide for detection of SNP TSC0037773
gtatagatattgy

SEQ ID NO: 149704 - DNA, 13 bp, Artificial Sequence
  Oligonucleotide for detection of SNP TSC0037773
rcaatatctatac

SEQ ID NO: 149705 - DNA, 13 bp, Artificial Sequence
  Oligonucleotide for detection of SNP TSC0037774
gtttattgagtgt

SEQ ID NO: 149706 - DNA, 13 bp, Artificial Sequence
  Oligonucleotide for detection of SNP TSC0037774
acactcaataaac

SEQ ID NO: 149707 - DNA, 13 bp, Artificial Sequence
  Oligonucleotide for detection of SNP TSC0037774
gtttatcgagtgt

SEQ ID NO: 149708 - DNA, 13 bp, Artificial Sequence
  Oligonucleotide for detection of SNP TSC0037774
acactcgataaac

SEQ ID NO: 149709 - DNA, 13 bp, Artificial Sequence
  Oligonucleotide for detection of SNP TSC0037774
atatttggtgggy

SEQ ID NO: 149710 - DNA, 13 bp, Artificial Sequence
  Oligonucleotide for detection of SNP TSC0037774
rcccaccaaatat

SEQ ID NO: 149711 - DNA, 13 bp, Artificial Sequence
  Oligonucleotide for detection of SNP TSC0037774
atatttagtgggy

SEQ ID NO: 149712 - DNA, 13 bp, Artificial Sequence
  Oligonucleotide for detection of SNP TSC0037774
rcccactaaatat

SEQ ID NO: 149713 - DNA, 13 bp, Artificial Sequence
  Oligonucleotide for detection of SNP TSC0037774
atattcggtgggy

SEQ ID NO: 149714 - DNA, 13 bp, Artificial Sequence
  Oligonucleotide for detection of SNP TSC0037774
rcccaccgaatat

SEQ ID NO: 149715 - DNA, 13 bp, Artificial Sequence
  Oligonucleotide for detection of SNP TSC0037777
taatttaggttgt

SEQ ID NO: 149716 - DNA, 13 bp, Artificial Sequence
  Oligonucleotide for detection of SNP TSC0037777
acaacctaaatta

SEQ ID NO: 149717 - DNA, 13 bp, Artificial Sequence
  Oligonucleotide for detection of SNP TSC0037777
taatttgggttgt

SEQ ID NO: 149718 - DNA, 13 bp, Artificial Sequence
  Oligonucleotide for detection of SNP TSC0037777
acaacccaaatta

SEQ ID NO: 149719 - DNA, 13 bp, Artificial Sequence
  Oligonucleotide for detection of SNP TSC0037777
taatttaggtcgt

SEQ ID NO: 149720 - DNA, 13 bp, Artificial Sequence
  Oligonucleotide for detection of SNP TSC0037777
acgacctaaatta

SEQ ID NO: 149721 - DNA, 13 bp, Artificial Sequence
  Oligonucleotide for detection of SNP TSC0037777
taattcgggttgt

SEQ ID NO: 149722 - DNA, 13 bp, Artificial Sequence
  Oligonucleotide for detection of SNP TSC0037777
acaacccgaatta

SEQ ID NO: 149723 - DNA, 13 bp, Artificial Sequence
  Oligonucleotide for detection of SNP TSC0037777
taatttgggtcgt

SEQ ID NO: 149724 - DNA, 13 bp, Artificial Sequence
  Oligonucleotide for detection of SNP TSC0037777
acgacccaaatta

SEQ ID NO: 149725 - DNA, 13 bp, Artificial Sequence
  Oligonucleotide for detection of SNP TSC0037777
taattcgggtcgt

SEQ ID NO: 149726 - DNA, 13 bp, Artificial Sequence
  Oligonucleotide for detection of SNP TSC0037777
acgacccgaatta

SEQ ID NO: 149727 - DNA, 13 bp, Artificial Sequence
  Oligonucleotide for detection of SNP TSC0037777
atgatttgggttg

SEQ ID NO: 149728 - DNA, 13 bp, Artificial Sequence
  Oligonucleotide for detection of SNP TSC0037777
caacccaaatcat

SEQ ID NO: 149729 - DNA, 13 bp, Artificial Sequence
  Oligonucleotide for detection of SNP TSC0037777
acgatttgggttg

SEQ ID NO: 149730 - DNA, 13 bp, Artificial Sequence
  Oligonucleotide for detection of SNP TSC0037777
caacccaaatcgt

SEQ ID NO: 149731 - DNA, 13 bp, Artificial Sequence
  Oligonucleotide for detection of SNP TSC0037777
atgattcgggttg

SEQ ID NO: 149732 - DNA, 13 bp, Artificial Sequence
  Oligonucleotide for detection of SNP TSC0037777
caacccgaatcat

SEQ ID NO: 149733 - DNA, 13 bp, Artificial Sequence
  Oligonucleotide for detection of SNP TSC0037777
acgattcgggttg

SEQ ID NO: 149734 - DNA, 13 bp, Artificial Sequence
  Oligonucleotide for detection of SNP TSC0037777
caacccgaatcgt

SEQ ID NO: 149735 - DNA, 13 bp, Artificial Sequence
  Oligonucleotide for detection of SNP TSC0037778
agtttagtaagtg

SEQ ID NO: 149736 - DNA, 13 bp, Artificial Sequence
  Oligonucleotide for detection of SNP TSC0037778
cacttactaaact

SEQ ID NO: 149737 - DNA, 13 bp, Artificial Sequence
  Oligonucleotide for detection of SNP TSC0037778
agtttaataagtg

SEQ ID NO: 149738 - DNA, 13 bp, Artificial Sequence
  Oligonucleotide for detection of SNP TSC0037778
cacttattaaact

SEQ ID NO: 149739 - DNA, 13 bp, Artificial Sequence
  Oligonucleotide for detection of SNP TSC0037779
taattatttaaty

SEQ ID NO: 149740 - DNA, 13 bp, Artificial Sequence
  Oligonucleotide for detection of SNP TSC0037779
rattaaataatta

SEQ ID NO: 149741 - DNA, 13 bp, Artificial Sequence
  Oligonucleotide for detection of SNP TSC0037779
gattgattgattg

SEQ ID NO: 149742 - DNA, 13 bp, Artificial Sequence
  Oligonucleotide for detection of SNP TSC0037779
caatcaatcaatc

SEQ ID NO: 149743 - DNA, 13 bp, Artificial Sequence
  Oligonucleotide for detection of SNP TSC0037779
gattgagtgattg

SEQ ID NO: 149744 - DNA, 13 bp, Artificial Sequence
  Oligonucleotide for detection of SNP TSC0037779
caatcactcaatc

SEQ ID NO: 149745 - DNA, 13 bp, Artificial Sequence
  Oligonucleotide for detection of SNP TSC0037781
gataaaatagtgt

SEQ ID NO: 149746 - DNA, 13 bp, Artificial Sequence
  Oligonucleotide for detection of SNP TSC0037781
acactattttatc

SEQ ID NO: 149747 - DNA, 13 bp, Artificial Sequence
  Oligonucleotide for detection of SNP TSC0037781
gataaagtagtgt

SEQ ID NO: 149748 - DNA, 13 bp, Artificial Sequence
  Oligonucleotide for detection of SNP TSC0037781
acactactttatc

SEQ ID NO: 149749 - DNA, 13 bp, Artificial Sequence
  Oligonucleotide for detection of SNP TSC0037782
taattttggtttt

SEQ ID NO: 149750 - DNA, 13 bp, Artificial Sequence
  Oligonucleotide for detection of SNP TSC0037782
aaaaccaaaatta

SEQ ID NO: 149751 - DNA, 13 bp, Artificial Sequence
  Oligonucleotide for detection of SNP TSC0037782
taatttgggtttt

SEQ ID NO: 149752 - DNA, 13 bp, Artificial Sequence
  Oligonucleotide for detection of SNP TSC0037782
aaaacccaaatta

SEQ ID NO: 149753 - DNA, 13 bp, Artificial Sequence
  Oligonucleotide for detection of SNP TSC0037782
taatttcggtttt

SEQ ID NO: 149754 - DNA, 13 bp, Artificial Sequence
  Oligonucleotide for detection of SNP TSC0037782
aaaaccgaaatta

SEQ ID NO: 149755 - DNA, 13 bp, Artificial Sequence
  Oligonucleotide for detection of SNP TSC0037782
agaattgaggttg

SEQ ID NO: 149756 - DNA, 13 bp, Artificial Sequence
  Oligonucleotide for detection of SNP TSC0037782
caacctcaattct

SEQ ID NO: 149757 - DNA, 13 bp, Artificial Sequence
  Oligonucleotide for detection of SNP TSC0037782
agaatttaggttg

SEQ ID NO: 149758 - DNA, 13 bp, Artificial Sequence
  Oligonucleotide for detection of SNP TSC0037782
caacctaaattct

SEQ ID NO: 149759 - DNA, 13 bp, Artificial Sequence
  Oligonucleotide for detection of SNP TSC0037782
agaatcgaggttg

SEQ ID NO: 149760 - DNA, 13 bp, Artificial Sequence
  Oligonucleotide for detection of SNP TSC0037782
caacctcgattct

SEQ ID NO: 149761 - DNA, 13 bp, Artificial Sequence
  Oligonucleotide for detection of SNP TSC0037783
agtaaaaaaattg

SEQ ID NO: 149762 - DNA, 13 bp, Artificial Sequence
  Oligonucleotide for detection of SNP TSC0037783
caatttttttact

SEQ ID NO: 149763 - DNA, 13 bp, Artificial Sequence
  Oligonucleotide for detection of SNP TSC0037783
agtaaagaaattg

SEQ ID NO: 149764 - DNA, 13 bp, Artificial Sequence
  Oligonucleotide for detection of SNP TSC0037783
caatttctttact

SEQ ID NO: 149765 - DNA, 13 bp, Artificial Sequence
  Oligonucleotide for detection of SNP TSC0037791
ttatgatgaaaag

SEQ ID NO: 149766 - DNA, 13 bp, Artificial Sequence
  Oligonucleotide for detection of SNP TSC0037791
cttttcatcataa

SEQ ID NO: 149767 - DNA, 13 bp, Artificial Sequence
  Oligonucleotide for detection of SNP TSC0037791
ttatgacgaaaag

SEQ ID NO: 149768 - DNA, 13 bp, Artificial Sequence
  Oligonucleotide for detection of SNP TSC0037791
cttttcgtcataa

SEQ ID NO: 149769 - DNA, 13 bp, Artificial Sequence
  Oligonucleotide for detection of SNP TSC0037792
atatttataagtt

SEQ ID NO: 149770 - DNA, 13 bp, Artificial Sequence
  Oligonucleotide for detection of SNP TSC0037792
aacttataaatat

SEQ ID NO: 149771 - DNA, 13 bp, Artificial Sequence
  Oligonucleotide for detection of SNP TSC0037792
atatttgtaagtt

SEQ ID NO: 149772 - DNA, 13 bp, Artificial Sequence
  Oligonucleotide for detection of SNP TSC0037792
aacttacaaatat

SEQ ID NO: 149773 - DNA, 13 bp, Artificial Sequence
  Oligonucleotide for detection of SNP TSC0037792
atattcgtaagtt

SEQ ID NO: 149774 - DNA, 13 bp, Artificial Sequence
  Oligonucleotide for detection of SNP TSC0037792
aacttacgaatat

SEQ ID NO: 149775 - DNA, 13 bp, Artificial Sequence
  Oligonucleotide for detection of SNP TSC0037792
agtttgtggatgt

SEQ ID NO: 149776 - DNA, 13 bp, Artificial Sequence
  Oligonucleotide for detection of SNP TSC0037792
acatccacaaact

SEQ ID NO: 149777 - DNA, 13 bp, Artificial Sequence
  Oligonucleotide for detection of SNP TSC0037792
agtttgcggatgt

SEQ ID NO: 149778 - DNA, 13 bp, Artificial Sequence
  Oligonucleotide for detection of SNP TSC0037792
acatccgcaaact

SEQ ID NO: 149779 - DNA, 13 bp, Artificial Sequence
  Oligonucleotide for detection of SNP TSC0037795
ggatttagtgatg

SEQ ID NO: 149780 - DNA, 13 bp, Artificial Sequence
  Oligonucleotide for detection of SNP TSC0037795
catcactaaatcc

SEQ ID NO: 149781 - DNA, 13 bp, Artificial Sequence
  Oligonucleotide for detection of SNP TSC0037795
ggatttggtgatg

SEQ ID NO: 149782 - DNA, 13 bp, Artificial Sequence
  Oligonucleotide for detection of SNP TSC0037795
catcaccaaatcc

SEQ ID NO: 149783 - DNA, 13 bp, Artificial Sequence
  Oligonucleotide for detection of SNP TSC0037795
ggattcggtgatg

SEQ ID NO: 149784 - DNA, 13 bp, Artificial Sequence
  Oligonucleotide for detection of SNP TSC0037795
catcaccgaatcc

SEQ ID NO: 149785 - DNA, 13 bp, Artificial Sequence
  Oligonucleotide for detection of SNP TSC0037795
tattattgaatty

SEQ ID NO: 149786 - DNA, 13 bp, Artificial Sequence
  Oligonucleotide for detection of SNP TSC0037795
raattcaataata

SEQ ID NO: 149787 - DNA, 13 bp, Artificial Sequence
  Oligonucleotide for detection of SNP TSC0037795
tattatcgaatty

SEQ ID NO: 149788 - DNA, 13 bp, Artificial Sequence
  Oligonucleotide for detection of SNP TSC0037795
raattcgataata

SEQ ID NO: 149789 - DNA, 13 bp, Artificial Sequence
  Oligonucleotide for detection of SNP TSC0037796
tttttttgaggat

SEQ ID NO: 149790 - DNA, 13 bp, Artificial Sequence
  Oligonucleotide for detection of SNP TSC0037796
atcctcaaaaaaa

SEQ ID NO: 149791 - DNA, 13 bp, Artificial Sequence
  Oligonucleotide for detection of SNP TSC0037796
ttttttcgaggat

SEQ ID NO: 149792 - DNA, 13 bp, Artificial Sequence
  Oligonucleotide for detection of SNP TSC0037796
atcctcgaaaaaa

SEQ ID NO: 149793 - DNA, 13 bp, Artificial Sequence
  Oligonucleotide for detection of SNP TSC0037797
tattttattttgg

SEQ ID NO: 149794 - DNA, 13 bp, Artificial Sequence
  Oligonucleotide for detection of SNP TSC0037797
ccaaaataaaata

SEQ ID NO: 149795 - DNA, 13 bp, Artificial Sequence
  Oligonucleotide for detection of SNP TSC0037797
ttaggatggaata

SEQ ID NO: 149796 - DNA, 13 bp, Artificial Sequence
  Oligonucleotide for detection of SNP TSC0037797
tattccatcctaa

SEQ ID NO: 149797 - DNA, 13 bp, Artificial Sequence
  Oligonucleotide for detection of SNP TSC0037797
ttaggacggaata

SEQ ID NO: 149798 - DNA, 13 bp, Artificial Sequence
  Oligonucleotide for detection of SNP TSC0037797
tattccgtcctaa

SEQ ID NO: 149799 - DNA, 13 bp, Artificial Sequence
  Oligonucleotide for detection of SNP TSC0037798
tttttgatgtttg

SEQ ID NO: 149800 - DNA, 13 bp, Artificial Sequence
  Oligonucleotide for detection of SNP TSC0037798
caaacatcaaaaa

SEQ ID NO: 149801 - DNA, 13 bp, Artificial Sequence
  Oligonucleotide for detection of SNP TSC0037798
tttttggtgtttg

SEQ ID NO: 149802 - DNA, 13 bp, Artificial Sequence
  Oligonucleotide for detection of SNP TSC0037798
caaacaccaaaaa

SEQ ID NO: 149803 - DNA, 13 bp, Artificial Sequence
  Oligonucleotide for detection of SNP TSC0037798
ttttcgatgtttg

SEQ ID NO: 149804 - DNA, 13 bp, Artificial Sequence
  Oligonucleotide for detection of SNP TSC0037798
caaacatcgaaaa

SEQ ID NO: 149805 - DNA, 13 bp, Artificial Sequence
  Oligonucleotide for detection of SNP TSC0037798
ttttcggtgtttg

SEQ ID NO: 149806 - DNA, 13 bp, Artificial Sequence
  Oligonucleotide for detection of SNP TSC0037798
caaacaccgaaaa

SEQ ID NO: 149807 - DNA, 13 bp, Artificial Sequence
  Oligonucleotide for detection of SNP TSC0037799
atttaaaaggtaa

SEQ ID NO: 149808 - DNA, 13 bp, Artificial Sequence
  Oligonucleotide for detection of SNP TSC0037799
ttaccttttaaat

SEQ ID NO: 149809 - DNA, 13 bp, Artificial Sequence
  Oligonucleotide for detection of SNP TSC0037799
atttaagaggtaa

SEQ ID NO: 149810 - DNA, 13 bp, Artificial Sequence
  Oligonucleotide for detection of SNP TSC0037799
ttacctcttaaat

SEQ ID NO: 149811 - DNA, 13 bp, Artificial Sequence
  Oligonucleotide for detection of SNP TSC0037800
ggtaggatttgaa

SEQ ID NO: 149812 - DNA, 13 bp, Artificial Sequence
  Oligonucleotide for detection of SNP TSC0037800
ttcaaatcctacc

SEQ ID NO: 149813 - DNA, 13 bp, Artificial Sequence
  Oligonucleotide for detection of SNP TSC0037800
ggtaggttttgaa

SEQ ID NO: 149814 - DNA, 13 bp, Artificial Sequence
  Oligonucleotide for detection of SNP TSC0037800
ttcaaaacctacc

SEQ ID NO: 149815 - DNA, 13 bp, Artificial Sequence
  Oligonucleotide for detection of SNP TSC0037800
tttaagttttaty

SEQ ID NO: 149816 - DNA, 13 bp, Artificial Sequence
  Oligonucleotide for detection of SNP TSC0037800
rataaaacttaaa

SEQ ID NO: 149817 - DNA, 13 bp, Artificial Sequence
  Oligonucleotide for detection of SNP TSC0037800
tttaaggtttaty

SEQ ID NO: 149818 - DNA, 13 bp, Artificial Sequence
  Oligonucleotide for detection of SNP TSC0037800
rataaaccttaaa

SEQ ID NO: 149819 - DNA, 13 bp, Artificial Sequence
  Oligonucleotide for detection of SNP TSC0037801
gattggggaaaag

SEQ ID NO: 149820 - DNA, 13 bp, Artificial Sequence
  Oligonucleotide for detection of SNP TSC0037801
cttttccccaatc

SEQ ID NO: 149821 - DNA, 13 bp, Artificial Sequence
  Oligonucleotide for detection of SNP TSC0037801
gattggagaaaag

SEQ ID NO: 149822 - DNA, 13 bp, Artificial Sequence
  Oligonucleotide for detection of SNP TSC0037801
cttttctccaatc

SEQ ID NO: 149823 - DNA, 13 bp, Artificial Sequence
  Oligonucleotide for detection of SNP TSC0037804
aaagttattaatt

SEQ ID NO: 149824 - DNA, 13 bp, Artificial Sequence
  Oligonucleotide for detection of SNP TSC0037804
aattaataacttt

SEQ ID NO: 149825 - DNA, 13 bp, Artificial Sequence
  Oligonucleotide for detection of SNP TSC0037804
aaagttgttaatt

SEQ ID NO: 149826 - DNA, 13 bp, Artificial Sequence
  Oligonucleotide for detection of SNP TSC0037804
aattaacaacttt

SEQ ID NO: 149827 - DNA, 13 bp, Artificial Sequence
  Oligonucleotide for detection of SNP TSC0037804
aaagtcgttaatt

SEQ ID NO: 149828 - DNA, 13 bp, Artificial Sequence
  Oligonucleotide for detection of SNP TSC0037804
aattaacgacttt

SEQ ID NO: 149829 - DNA, 13 bp, Artificial Sequence
  Oligonucleotide for detection of SNP TSC0037804
aattaatggtttt

SEQ ID NO: 149830 - DNA, 13 bp, Artificial Sequence
  Oligonucleotide for detection of SNP TSC0037804
aaaaccattaatt

SEQ ID NO: 149831 - DNA, 13 bp, Artificial Sequence
  Oligonucleotide for detection of SNP TSC0037804
aattaacggtttt

SEQ ID NO: 149832 - DNA, 13 bp, Artificial Sequence
  Oligonucleotide for detection of SNP TSC0037804
aaaaccgttaatt

SEQ ID NO: 149833 - DNA, 13 bp, Artificial Sequence
  Oligonucleotide for detection of SNP TSC0037805
agtttatgtaagy

SEQ ID NO: 149834 - DNA, 13 bp, Artificial Sequence
  Oligonucleotide for detection of SNP TSC0037805
rcttacataaact

SEQ ID NO: 149835 - DNA, 13 bp, Artificial Sequence
  Oligonucleotide for detection of SNP TSC0037805
agtttacgtaagy

SEQ ID NO: 149836 - DNA, 13 bp, Artificial Sequence
  Oligonucleotide for detection of SNP TSC0037805
rcttacgtaaact

SEQ ID NO: 149837 - DNA, 13 bp, Artificial Sequence
  Oligonucleotide for detection of SNP TSC0037805
gtttgtgtgagtt

SEQ ID NO: 149838 - DNA, 13 bp, Artificial Sequence
  Oligonucleotide for detection of SNP TSC0037805
aactcacacaaac

SEQ ID NO: 149839 - DNA, 13 bp, Artificial Sequence
  Oligonucleotide for detection of SNP TSC0037805
gtttgtatgagtt

SEQ ID NO: 149840 - DNA, 13 bp, Artificial Sequence
  Oligonucleotide for detection of SNP TSC0037805
aactcatacaaac

SEQ ID NO: 149841 - DNA, 13 bp, Artificial Sequence
  Oligonucleotide for detection of SNP TSC0037805
gtttgcgtgagtt

SEQ ID NO: 149842 - DNA, 13 bp, Artificial Sequence
  Oligonucleotide for detection of SNP TSC0037805
aactcacgcaaac

SEQ ID NO: 149843 - DNA, 13 bp, Artificial Sequence
  Oligonucleotide for detection of SNP TSC0037810
ttaatgttattty

SEQ ID NO: 149844 - DNA, 13 bp, Artificial Sequence
  Oligonucleotide for detection of SNP TSC0037810
raaataacattaa

SEQ ID NO: 149845 - DNA, 13 bp, Artificial Sequence
  Oligonucleotide for detection of SNP TSC0037810
ttaatggtattty

SEQ ID NO: 149846 - DNA, 13 bp, Artificial Sequence
  Oligonucleotide for detection of SNP TSC0037810
raaataccattaa

SEQ ID NO: 149847 - DNA, 13 bp, Artificial Sequence
  Oligonucleotide for detection of SNP TSC0037810
gggatagtattag

SEQ ID NO: 149848 - DNA, 13 bp, Artificial Sequence
  Oligonucleotide for detection of SNP TSC0037810
ctaatactatccc

SEQ ID NO: 149849 - DNA, 13 bp, Artificial Sequence
  Oligonucleotide for detection of SNP TSC0037810
gggatattattag

SEQ ID NO: 149850 - DNA, 13 bp, Artificial Sequence
  Oligonucleotide for detection of SNP TSC0037810
ctaataatatccc

SEQ ID NO: 149851 - DNA, 13 bp, Artificial Sequence
  Oligonucleotide for detection of SNP TSC0037812
tgttaggtaattg

SEQ ID NO: 149852 - DNA, 13 bp, Artificial Sequence
  Oligonucleotide for detection of SNP TSC0037812
caattacctaaca

SEQ ID NO: 149853 - DNA, 13 bp, Artificial Sequence
  Oligonucleotide for detection of SNP TSC0037812
tgttagataattg

SEQ ID NO: 149854 - DNA, 13 bp, Artificial Sequence
  Oligonucleotide for detection of SNP TSC0037812
caattatctaaca

SEQ ID NO: 149855 - DNA, 13 bp, Artificial Sequence
  Oligonucleotide for detection of SNP TSC0037813
taatggaggaaag

SEQ ID NO: 149856 - DNA, 13 bp, Artificial Sequence
  Oligonucleotide for detection of SNP TSC0037813
ctttcctccatta

SEQ ID NO: 149857 - DNA, 13 bp, Artificial Sequence
  Oligonucleotide for detection of SNP TSC0037813
taatgggggaaag

SEQ ID NO: 149858 - DNA, 13 bp, Artificial Sequence
  Oligonucleotide for detection of SNP TSC0037813
ctttcccccatta

SEQ ID NO: 149859 - DNA, 13 bp, Artificial Sequence
  Oligonucleotide for detection of SNP TSC0037814
aggagaagtttat

SEQ ID NO: 149860 - DNA, 13 bp, Artificial Sequence
  Oligonucleotide for detection of SNP TSC0037814
ataaacttctcct

SEQ ID NO: 149861 - DNA, 13 bp, Artificial Sequence
  Oligonucleotide for detection of SNP TSC0037814
aggagaggtttat

SEQ ID NO: 149862 - DNA, 13 bp, Artificial Sequence
  Oligonucleotide for detection of SNP TSC0037814
ataaacctctcct

SEQ ID NO: 149863 - DNA, 13 bp, Artificial Sequence
  Oligonucleotide for detection of SNP TSC0037817
agtattaggtata

SEQ ID NO: 149864 - DNA, 13 bp, Artificial Sequence
  Oligonucleotide for detection of SNP TSC0037817
tatacctaatact

SEQ ID NO: 149865 - DNA, 13 bp, Artificial Sequence
  Oligonucleotide for detection of SNP TSC0037817
agtattgggtata

SEQ ID NO: 149866 - DNA, 13 bp, Artificial Sequence
  Oligonucleotide for detection of SNP TSC0037817
tatacccaatact

SEQ ID NO: 149867 - DNA, 13 bp, Artificial Sequence
  Oligonucleotide for detection of SNP TSC0037817
agtatcgggtata

SEQ ID NO: 149868 - DNA, 13 bp, Artificial Sequence
  Oligonucleotide for detection of SNP TSC0037817
tatacccgatact

SEQ ID NO: 149869 - DNA, 13 bp, Artificial Sequence
  Oligonucleotide for detection of SNP TSC0037817
tgtgtttggtgtt

SEQ ID NO: 149870 - DNA, 13 bp, Artificial Sequence
  Oligonucleotide for detection of SNP TSC0037817
aacaccaaacaca

SEQ ID NO: 149871 - DNA, 13 bp, Artificial Sequence
  Oligonucleotide for detection of SNP TSC0037817
tgtgttcggtgtt

SEQ ID NO: 149872 - DNA, 13 bp, Artificial Sequence
  Oligonucleotide for detection of SNP TSC0037817
aacaccgaacaca

SEQ ID NO: 149873 - DNA, 13 bp, Artificial Sequence
  Oligonucleotide for detection of SNP TSC0037820
gtgggtagagtat

SEQ ID NO: 149874 - DNA, 13 bp, Artificial Sequence
  Oligonucleotide for detection of SNP TSC0037820
atactctacccac

SEQ ID NO: 149875 - DNA, 13 bp, Artificial Sequence
  Oligonucleotide for detection of SNP TSC0037820
gtgggtggagtat

SEQ ID NO: 149876 - DNA, 13 bp, Artificial Sequence
  Oligonucleotide for detection of SNP TSC0037820
atactccacccac

SEQ ID NO: 149877 - DNA, 13 bp, Artificial Sequence
  Oligonucleotide for detection of SNP TSC0037822
gaattttgtttty

SEQ ID NO: 149878 - DNA, 13 bp, Artificial Sequence
  Oligonucleotide for detection of SNP TSC0037822
raaaacaaaattc

SEQ ID NO: 149879 - DNA, 13 bp, Artificial Sequence
  Oligonucleotide for detection of SNP TSC0037822
gaatttcgtttty

SEQ ID NO: 149880 - DNA, 13 bp, Artificial Sequence
  Oligonucleotide for detection of SNP TSC0037822
raaaacgaaattc

SEQ ID NO: 149881 - DNA, 13 bp, Artificial Sequence
  Oligonucleotide for detection of SNP TSC0037822
ggaggtggaatty

SEQ ID NO: 149882 - DNA, 13 bp, Artificial Sequence
  Oligonucleotide for detection of SNP TSC0037822
raattccacctcc

SEQ ID NO: 149883 - DNA, 13 bp, Artificial Sequence
  Oligonucleotide for detection of SNP TSC0037822
ggaggtagaatty

SEQ ID NO: 149884 - DNA, 13 bp, Artificial Sequence
  Oligonucleotide for detection of SNP TSC0037822
raattctacctcc

SEQ ID NO: 149885 - DNA, 13 bp, Artificial Sequence
  Oligonucleotide for detection of SNP TSC0037822
ggaggcggaatty

SEQ ID NO: 149886 - DNA, 13 bp, Artificial Sequence
  Oligonucleotide for detection of SNP TSC0037822
raattccgcctcc

SEQ ID NO: 149887 - DNA, 13 bp, Artificial Sequence
  Oligonucleotide for detection of SNP TSC0037823
tgaaagtgaataa

SEQ ID NO: 149888 - DNA, 13 bp, Artificial Sequence
  Oligonucleotide for detection of SNP TSC0037823
ttattcactttca

SEQ ID NO: 149889 - DNA, 13 bp, Artificial Sequence
  Oligonucleotide for detection of SNP TSC0037823
tgaaagcgaataa

SEQ ID NO: 149890 - DNA, 13 bp, Artificial Sequence
  Oligonucleotide for detection of SNP TSC0037823
ttattcgctttca

SEQ ID NO: 149891 - DNA, 13 bp, Artificial Sequence
  Oligonucleotide for detection of SNP TSC0037824
taggtttggggtg

SEQ ID NO: 149892 - DNA, 13 bp, Artificial Sequence
  Oligonucleotide for detection of SNP TSC0037824
caccccaaaccta

SEQ ID NO: 149893 - DNA, 13 bp, Artificial Sequence
  Oligonucleotide for detection of SNP TSC0037824
taggttcggggtg

SEQ ID NO: 149894 - DNA, 13 bp, Artificial Sequence
  Oligonucleotide for detection of SNP TSC0037824
caccccgaaccta

SEQ ID NO: 149895 - DNA, 13 bp, Artificial Sequence
  Oligonucleotide for detection of SNP TSC0037824
tattttggatttg

SEQ ID NO: 149896 - DNA, 13 bp, Artificial Sequence
  Oligonucleotide for detection of SNP TSC0037824
caaatccaaaata

SEQ ID NO: 149897 - DNA, 13 bp, Artificial Sequence
  Oligonucleotide for detection of SNP TSC0037824
tattttagatttg

SEQ ID NO: 149898 - DNA, 13 bp, Artificial Sequence
  Oligonucleotide for detection of SNP TSC0037824
caaatctaaaata

SEQ ID NO: 149899 - DNA, 13 bp, Artificial Sequence
  Oligonucleotide for detection of SNP TSC0037824
tatttcggatttg

SEQ ID NO: 149900 - DNA, 13 bp, Artificial Sequence
  Oligonucleotide for detection of SNP TSC0037824
caaatccgaaata

SEQ ID NO: 149901 - DNA, 13 bp, Artificial Sequence
  Oligonucleotide for detection of SNP TSC0037825
gtggtgggtatga

SEQ ID NO: 149902 - DNA, 13 bp, Artificial Sequence
  Oligonucleotide for detection of SNP TSC0037825
tcatacccaccac

SEQ ID NO: 149903 - DNA, 13 bp, Artificial Sequence
  Oligonucleotide for detection of SNP TSC0037825
gtggtgagtatga

SEQ ID NO: 149904 - DNA, 13 bp, Artificial Sequence
  Oligonucleotide for detection of SNP TSC0037825
tcatactcaccac

SEQ ID NO: 149905 - DNA, 13 bp, Artificial Sequence
  Oligonucleotide for detection of SNP TSC0037825
gtggcgggtatga

SEQ ID NO: 149906 - DNA, 13 bp, Artificial Sequence
  Oligonucleotide for detection of SNP TSC0037825
tcatacccgccac

SEQ ID NO: 149907 - DNA, 13 bp, Artificial Sequence
  Oligonucleotide for detection of SNP TSC0037825
gtggcgagtatga

SEQ ID NO: 149908 - DNA, 13 bp, Artificial Sequence
  Oligonucleotide for detection of SNP TSC0037825
tcatactcgccac

SEQ ID NO: 149909 - DNA, 13 bp, Artificial Sequence
  Oligonucleotide for detection of SNP TSC0037826
tatttaattagtt

SEQ ID NO: 149910 - DNA, 13 bp, Artificial Sequence
  Oligonucleotide for detection of SNP TSC0037826
aactaattaaata

SEQ ID NO: 149911 - DNA, 13 bp, Artificial Sequence
  Oligonucleotide for detection of SNP TSC0037826
agttggttgaata

SEQ ID NO: 149912 - DNA, 13 bp, Artificial Sequence
  Oligonucleotide for detection of SNP TSC0037826
tattcaaccaact

SEQ ID NO: 149913 - DNA, 13 bp, Artificial Sequence
  Oligonucleotide for detection of SNP TSC0037826
agttgggtgaata

SEQ ID NO: 149914 - DNA, 13 bp, Artificial Sequence
  Oligonucleotide for detection of SNP TSC0037826
tattcacccaact

SEQ ID NO: 149915 - DNA, 13 bp, Artificial Sequence
  Oligonucleotide for detection of SNP TSC0037827
aggtagagtatta

SEQ ID NO: 149916 - DNA, 13 bp, Artificial Sequence
  Oligonucleotide for detection of SNP TSC0037827
taatactctacct

SEQ ID NO: 149917 - DNA, 13 bp, Artificial Sequence
  Oligonucleotide for detection of SNP TSC0037827
aggtagtgtatta

SEQ ID NO: 149918 - DNA, 13 bp, Artificial Sequence
  Oligonucleotide for detection of SNP TSC0037827
taatacactacct

SEQ ID NO: 149919 - DNA, 13 bp, Artificial Sequence
  Oligonucleotide for detection of SNP TSC0037827
aggtagcgtatta

SEQ ID NO: 149920 - DNA, 13 bp, Artificial Sequence
  Oligonucleotide for detection of SNP TSC0037827
taatacgctacct

SEQ ID NO: 149921 - DNA, 13 bp, Artificial Sequence
  Oligonucleotide for detection of SNP TSC0037827
tgatgttttgttt

SEQ ID NO: 149922 - DNA, 13 bp, Artificial Sequence
  Oligonucleotide for detection of SNP TSC0037827
aaacaaaacatca

SEQ ID NO: 149923 - DNA, 13 bp, Artificial Sequence
  Oligonucleotide for detection of SNP TSC0037827
tgatgtgttgttt

SEQ ID NO: 149924 - DNA, 13 bp, Artificial Sequence
  Oligonucleotide for detection of SNP TSC0037827
aaacaacacatca

SEQ ID NO: 149925 - DNA, 13 bp, Artificial Sequence
  Oligonucleotide for detection of SNP TSC0037827
tgatgcgttgttt

SEQ ID NO: 149926 - DNA, 13 bp, Artificial Sequence
  Oligonucleotide for detection of SNP TSC0037827
aaacaacgcatca

SEQ ID NO: 149927 - DNA, 13 bp, Artificial Sequence
  Oligonucleotide for detection of SNP TSC0037828
attatagtttttg

SEQ ID NO: 149928 - DNA, 13 bp, Artificial Sequence
  Oligonucleotide for detection of SNP TSC0037828
caaaaactataat

SEQ ID NO: 149929 - DNA, 13 bp, Artificial Sequence
  Oligonucleotide for detection of SNP TSC0037828
tagaaggtataat

SEQ ID NO: 149930 - DNA, 13 bp, Artificial Sequence
  Oligonucleotide for detection of SNP TSC0037828
attataccttcta

SEQ ID NO: 149931 - DNA, 13 bp, Artificial Sequence
  Oligonucleotide for detection of SNP TSC0037828
tagaagttataat

SEQ ID NO: 149932 - DNA, 13 bp, Artificial Sequence
  Oligonucleotide for detection of SNP TSC0037828
attataacttcta

SEQ ID NO: 149933 - DNA, 13 bp, Artificial Sequence
  Oligonucleotide for detection of SNP TSC0037833
tggattgtgggtt

SEQ ID NO: 149934 - DNA, 13 bp, Artificial Sequence
  Oligonucleotide for detection of SNP TSC0037833
aacccacaatcca

SEQ ID NO: 149935 - DNA, 13 bp, Artificial Sequence
  Oligonucleotide for detection of SNP TSC0037833
tggattttgggtt

SEQ ID NO: 149936 - DNA, 13 bp, Artificial Sequence
  Oligonucleotide for detection of SNP TSC0037833
aacccaaaatcca

SEQ ID NO: 149937 - DNA, 13 bp, Artificial Sequence
  Oligonucleotide for detection of SNP TSC0037833
tggatcgtgggtt

SEQ ID NO: 149938 - DNA, 13 bp, Artificial Sequence
  Oligonucleotide for detection of SNP TSC0037833
aacccacgatcca

SEQ ID NO: 149939 - DNA, 13 bp, Artificial Sequence
  Oligonucleotide for detection of SNP TSC0037833
agtttatggttta

SEQ ID NO: 149940 - DNA, 13 bp, Artificial Sequence
  Oligonucleotide for detection of SNP TSC0037833
taaaccataaact

SEQ ID NO: 149941 - DNA, 13 bp, Artificial Sequence
  Oligonucleotide for detection of SNP TSC0037833
agtttaaggttta

SEQ ID NO: 149942 - DNA, 13 bp, Artificial Sequence
  Oligonucleotide for detection of SNP TSC0037833
taaaccttaaact

SEQ ID NO: 149943 - DNA, 13 bp, Artificial Sequence
  Oligonucleotide for detection of SNP TSC0037833
agtttacggttta

SEQ ID NO: 149944 - DNA, 13 bp, Artificial Sequence
  Oligonucleotide for detection of SNP TSC0037833
taaaccgtaaact

SEQ ID NO: 149945 - DNA, 13 bp, Artificial Sequence
  Oligonucleotide for detection of SNP TSC0037834
tttttcgtgagat

SEQ ID NO: 149946 - DNA, 13 bp, Artificial Sequence
  Oligonucleotide for detection of SNP TSC0037834
atctcacgaaaaa

SEQ ID NO: 149947 - DNA, 13 bp, Artificial Sequence
  Oligonucleotide for detection of SNP TSC0037834
attttaggagaga

SEQ ID NO: 149948 - DNA, 13 bp, Artificial Sequence
  Oligonucleotide for detection of SNP TSC0037834
tctctcctaaaat

SEQ ID NO: 149949 - DNA, 13 bp, Artificial Sequence
  Oligonucleotide for detection of SNP TSC0037834
attttatgagaga

SEQ ID NO: 149950 - DNA, 13 bp, Artificial Sequence
  Oligonucleotide for detection of SNP TSC0037834
tctctcataaaat

SEQ ID NO: 149951 - DNA, 13 bp, Artificial Sequence
  Oligonucleotide for detection of SNP TSC0037834
attttacgagaga

SEQ ID NO: 149952 - DNA, 13 bp, Artificial Sequence
  Oligonucleotide for detection of SNP TSC0037834
tctctcgtaaaat

SEQ ID NO: 149953 - DNA, 13 bp, Artificial Sequence
  Oligonucleotide for detection of SNP TSC0037836
agtggtgaatatt

SEQ ID NO: 149954 - DNA, 13 bp, Artificial Sequence
  Oligonucleotide for detection of SNP TSC0037836
aatattcaccact

SEQ ID NO: 149955 - DNA, 13 bp, Artificial Sequence
  Oligonucleotide for detection of SNP TSC0037836
agtggtaaatatt

SEQ ID NO: 149956 - DNA, 13 bp, Artificial Sequence
  Oligonucleotide for detection of SNP TSC0037836
aatatttaccact

SEQ ID NO: 149957 - DNA, 13 bp, Artificial Sequence
  Oligonucleotide for detection of SNP TSC0037837
gtgtgtatttttg

SEQ ID NO: 149958 - DNA, 13 bp, Artificial Sequence
  Oligonucleotide for detection of SNP TSC0037837
caaaaatacacac

SEQ ID NO: 149959 - DNA, 13 bp, Artificial Sequence
  Oligonucleotide for detection of SNP TSC0037837
gtgtgtgtttttg

SEQ ID NO: 149960 - DNA, 13 bp, Artificial Sequence
  Oligonucleotide for detection of SNP TSC0037837
caaaaacacacac

SEQ ID NO: 149961 - DNA, 13 bp, Artificial Sequence
  Oligonucleotide for detection of SNP TSC0037839
atgaatgaatgaa

SEQ ID NO: 149962 - DNA, 13 bp, Artificial Sequence
  Oligonucleotide for detection of SNP TSC0037839
ttcattcattcat

SEQ ID NO: 149963 - DNA, 13 bp, Artificial Sequence
  Oligonucleotide for detection of SNP TSC0037839
atgaataaatgaa

SEQ ID NO: 149964 - DNA, 13 bp, Artificial Sequence
  Oligonucleotide for detection of SNP TSC0037839
ttcatttattcat

SEQ ID NO: 149965 - DNA, 13 bp, Artificial Sequence
  Oligonucleotide for detection of SNP TSC0037844
tgtgtggtaatga

SEQ ID NO: 149966 - DNA, 13 bp, Artificial Sequence
  Oligonucleotide for detection of SNP TSC0037844
tcattaccacaca

SEQ ID NO: 149967 - DNA, 13 bp, Artificial Sequence
  Oligonucleotide for detection of SNP TSC0037844
tgtgtgataatga

SEQ ID NO: 149968 - DNA, 13 bp, Artificial Sequence
  Oligonucleotide for detection of SNP TSC0037844
tcattatcacaca

SEQ ID NO: 149969 - DNA, 13 bp, Artificial Sequence
  Oligonucleotide for detection of SNP TSC0037845
tagagatggagtt

SEQ ID NO: 149970 - DNA, 13 bp, Artificial Sequence
  Oligonucleotide for detection of SNP TSC0037845
aactccatctcta

SEQ ID NO: 149971 - DNA, 13 bp, Artificial Sequence
  Oligonucleotide for detection of SNP TSC0037845
tagagacggagtt

SEQ ID NO: 149972 - DNA, 13 bp, Artificial Sequence
  Oligonucleotide for detection of SNP TSC0037845
aactccgtctcta

SEQ ID NO: 149973 - DNA, 13 bp, Artificial Sequence
  Oligonucleotide for detection of SNP TSC0037848
gtatgggatttaa

SEQ ID NO: 149974 - DNA, 13 bp, Artificial Sequence
  Oligonucleotide for detection of SNP TSC0037848
ttaaatcccatac

SEQ ID NO: 149975 - DNA, 13 bp, Artificial Sequence
  Oligonucleotide for detection of SNP TSC0037848
gtatggaatttaa

SEQ ID NO: 149976 - DNA, 13 bp, Artificial Sequence
  Oligonucleotide for detection of SNP TSC0037848
ttaaattccatac

SEQ ID NO: 149977 - DNA, 13 bp, Artificial Sequence
  Oligonucleotide for detection of SNP TSC0037851
tttatagagagtg

SEQ ID NO: 149978 - DNA, 13 bp, Artificial Sequence
  Oligonucleotide for detection of SNP TSC0037851
cactctctataaa

SEQ ID NO: 149979 - DNA, 13 bp, Artificial Sequence
  Oligonucleotide for detection of SNP TSC0037851
tttataaagagtg

SEQ ID NO: 149980 - DNA, 13 bp, Artificial Sequence
  Oligonucleotide for detection of SNP TSC0037851
cactctttataaa

SEQ ID NO: 149981 - DNA, 13 bp, Artificial Sequence
  Oligonucleotide for detection of SNP TSC0037852
tgtttgagagtty

SEQ ID NO: 149982 - DNA, 13 bp, Artificial Sequence
  Oligonucleotide for detection of SNP TSC0037852
raactctcaaaca

SEQ ID NO: 149983 - DNA, 13 bp, Artificial Sequence
  Oligonucleotide for detection of SNP TSC0037852
tgtttgggagtty

SEQ ID NO: 149984 - DNA, 13 bp, Artificial Sequence
  Oligonucleotide for detection of SNP TSC0037852
raactcccaaaca

SEQ ID NO: 149985 - DNA, 13 bp, Artificial Sequence
  Oligonucleotide for detection of SNP TSC0037854
ttggtcgtttttt

SEQ ID NO: 149986 - DNA, 13 bp, Artificial Sequence
  Oligonucleotide for detection of SNP TSC0037854
aaaaaacgaccaa

SEQ ID NO: 149987 - DNA, 13 bp, Artificial Sequence
  Oligonucleotide for detection of SNP TSC0037854
aaggaatggttag

SEQ ID NO: 149988 - DNA, 13 bp, Artificial Sequence
  Oligonucleotide for detection of SNP TSC0037854
ctaaccattcctt

SEQ ID NO: 149989 - DNA, 13 bp, Artificial Sequence
  Oligonucleotide for detection of SNP TSC0037854
aaggaaaggttag

SEQ ID NO: 149990 - DNA, 13 bp, Artificial Sequence
  Oligonucleotide for detection of SNP TSC0037854
ctaacctttcctt

SEQ ID NO: 149991 - DNA, 13 bp, Artificial Sequence
  Oligonucleotide for detection of SNP TSC0037854
aaggaacggttag

SEQ ID NO: 149992 - DNA, 13 bp, Artificial Sequence
  Oligonucleotide for detection of SNP TSC0037854
ctaaccgttcctt

SEQ ID NO: 149993 - DNA, 13 bp, Artificial Sequence
  Oligonucleotide for detection of SNP TSC0037855
agttggagtaatt

SEQ ID NO: 149994 - DNA, 13 bp, Artificial Sequence
  Oligonucleotide for detection of SNP TSC0037855
aattactccaact

SEQ ID NO: 149995 - DNA, 13 bp, Artificial Sequence
  Oligonucleotide for detection of SNP TSC0037855
agttggtgtaatt

SEQ ID NO: 149996 - DNA, 13 bp, Artificial Sequence
  Oligonucleotide for detection of SNP TSC0037855
aattacaccaact

SEQ ID NO: 149997 - DNA, 13 bp, Artificial Sequence
  Oligonucleotide for detection of SNP TSC0037855
agttattttaatt

SEQ ID NO: 149998 - DNA, 13 bp, Artificial Sequence
  Oligonucleotide for detection of SNP TSC0037855
aattaaaataact

SEQ ID NO: 149999 - DNA, 13 bp, Artificial Sequence
  Oligonucleotide for detection of SNP TSC0037855
agttatattaatt

SEQ ID NO: 150000 - DNA, 13 bp, Artificial Sequence
  Oligonucleotide for detection of SNP TSC0037855
aattaatataact

SEQ ID NO: 150001 - DNA, 13 bp, Artificial Sequence
  Oligonucleotide for detection of SNP TSC0037856
ttgttttggtaty

SEQ ID NO: 150002 - DNA, 13 bp, Artificial Sequence
  Oligonucleotide for detection of SNP TSC0037856
rataccaaaacaa

SEQ ID NO: 150003 - DNA, 13 bp, Artificial Sequence
  Oligonucleotide for detection of SNP TSC0037856
tcgttttggtaty

SEQ ID NO: 150004 - DNA, 13 bp, Artificial Sequence
  Oligonucleotide for detection of SNP TSC0037856
rataccaaaacga

SEQ ID NO: 150005 - DNA, 13 bp, Artificial Sequence
  Oligonucleotide for detection of SNP TSC0037856
ttgtttcggtaty

SEQ ID NO: 150006 - DNA, 13 bp, Artificial Sequence
  Oligonucleotide for detection of SNP TSC0037856
rataccgaaacaa

SEQ ID NO: 150007 - DNA, 13 bp, Artificial Sequence
  Oligonucleotide for detection of SNP TSC0037856
tcgtttcggtaty

SEQ ID NO: 150008 - DNA, 13 bp, Artificial Sequence
  Oligonucleotide for detection of SNP TSC0037856
rataccgaaacga

SEQ ID NO: 150009 - DNA, 13 bp, Artificial Sequence
  Oligonucleotide for detection of SNP TSC0037856
ggtgttgaagtgg

SEQ ID NO: 150010 - DNA, 13 bp, Artificial Sequence
  Oligonucleotide for detection of SNP TSC0037856
ccacttcaacacc

SEQ ID NO: 150011 - DNA, 13 bp, Artificial Sequence
  Oligonucleotide for detection of SNP TSC0037856
ggtgttaaagtgg

SEQ ID NO: 150012 - DNA, 13 bp, Artificial Sequence
  Oligonucleotide for detection of SNP TSC0037856
ccactttaacacc

SEQ ID NO: 150013 - DNA, 13 bp, Artificial Sequence
  Oligonucleotide for detection of SNP TSC0037856
ggtgtcgaagtgg

SEQ ID NO: 150014 - DNA, 13 bp, Artificial Sequence
  Oligonucleotide for detection of SNP TSC0037856
ccacttcgacacc

SEQ ID NO: 150015 - DNA, 13 bp, Artificial Sequence
  Oligonucleotide for detection of SNP TSC0037856
ggtgttaaagcgg

SEQ ID NO: 150016 - DNA, 13 bp, Artificial Sequence
  Oligonucleotide for detection of SNP TSC0037856
ccgctttaacacc

SEQ ID NO: 150017 - DNA, 13 bp, Artificial Sequence
  Oligonucleotide for detection of SNP TSC0037856
ggtgttgaagcgg

SEQ ID NO: 150018 - DNA, 13 bp, Artificial Sequence
  Oligonucleotide for detection of SNP TSC0037856
ccgcttcaacacc

SEQ ID NO: 150019 - DNA, 13 bp, Artificial Sequence
  Oligonucleotide for detection of SNP TSC0037856
ggtgtcgaagcgg

SEQ ID NO: 150020 - DNA, 13 bp, Artificial Sequence
  Oligonucleotide for detection of SNP TSC0037856
ccgcttcgacacc

SEQ ID NO: 150021 - DNA, 13 bp, Artificial Sequence
  Oligonucleotide for detection of SNP TSC0037858
taatagaggaaga

SEQ ID NO: 150022 - DNA, 13 bp, Artificial Sequence
  Oligonucleotide for detection of SNP TSC0037858
tcttcctctatta

SEQ ID NO: 150023 - DNA, 13 bp, Artificial Sequence
  Oligonucleotide for detection of SNP TSC0037858
taatagtggaaga

SEQ ID NO: 150024 - DNA, 13 bp, Artificial Sequence
  Oligonucleotide for detection of SNP TSC0037858
tcttccactatta

SEQ ID NO: 150025 - DNA, 13 bp, Artificial Sequence
  Oligonucleotide for detection of SNP TSC0037860
taatttggtgtta

SEQ ID NO: 150026 - DNA, 13 bp, Artificial Sequence
  Oligonucleotide for detection of SNP TSC0037860
taacaccaaatta

SEQ ID NO: 150027 - DNA, 13 bp, Artificial Sequence
  Oligonucleotide for detection of SNP TSC0037860
taattttgtgtta

SEQ ID NO: 150028 - DNA, 13 bp, Artificial Sequence
  Oligonucleotide for detection of SNP TSC0037860
taacacaaaatta

SEQ ID NO: 150029 - DNA, 13 bp, Artificial Sequence
  Oligonucleotide for detection of SNP TSC0037860
tgatattaaattg

SEQ ID NO: 150030 - DNA, 13 bp, Artificial Sequence
  Oligonucleotide for detection of SNP TSC0037860
caatttaatatca

SEQ ID NO: 150031 - DNA, 13 bp, Artificial Sequence
  Oligonucleotide for detection of SNP TSC0037860
tgatataaaattg

SEQ ID NO: 150032 - DNA, 13 bp, Artificial Sequence
  Oligonucleotide for detection of SNP TSC0037860
caattttatatca

SEQ ID NO: 150033 - DNA, 13 bp, Artificial Sequence
  Oligonucleotide for detection of SNP TSC0037861
gttgaaggttagg

SEQ ID NO: 150034 - DNA, 13 bp, Artificial Sequence
  Oligonucleotide for detection of SNP TSC0037861
cctaaccttcaac

SEQ ID NO: 150035 - DNA, 13 bp, Artificial Sequence
  Oligonucleotide for detection of SNP TSC0037861
gttgaaagttagg

SEQ ID NO: 150036 - DNA, 13 bp, Artificial Sequence
  Oligonucleotide for detection of SNP TSC0037861
cctaactttcaac

SEQ ID NO: 150037 - DNA, 13 bp, Artificial Sequence
  Oligonucleotide for detection of SNP TSC0037862
ttgtttagaatay

SEQ ID NO: 150038 - DNA, 13 bp, Artificial Sequence
  Oligonucleotide for detection of SNP TSC0037862
rtattctaaacaa

SEQ ID NO: 150039 - DNA, 13 bp, Artificial Sequence
  Oligonucleotide for detection of SNP TSC0037862
ttgtttggaatay

SEQ ID NO: 150040 - DNA, 13 bp, Artificial Sequence
  Oligonucleotide for detection of SNP TSC0037862
rtattccaaacaa

SEQ ID NO: 150041 - DNA, 13 bp, Artificial Sequence
  Oligonucleotide for detection of SNP TSC0037871
tatgggtgtggay

SEQ ID NO: 150042 - DNA, 13 bp, Artificial Sequence
  Oligonucleotide for detection of SNP TSC0037871
rtccacacccata

SEQ ID NO: 150043 - DNA, 13 bp, Artificial Sequence
  Oligonucleotide for detection of SNP TSC0037871
tatgggcgtggay

SEQ ID NO: 150044 - DNA, 13 bp, Artificial Sequence
  Oligonucleotide for detection of SNP TSC0037871
rtccacgcccata

SEQ ID NO: 150045 - DNA, 13 bp, Artificial Sequence
  Oligonucleotide for detection of SNP TSC0037871
gtttatgtttatg

SEQ ID NO: 150046 - DNA, 13 bp, Artificial Sequence
  Oligonucleotide for detection of SNP TSC0037871
cataaacataaac

SEQ ID NO: 150047 - DNA, 13 bp, Artificial Sequence
  Oligonucleotide for detection of SNP TSC0037871
gtttatatttatg

SEQ ID NO: 150048 - DNA, 13 bp, Artificial Sequence
  Oligonucleotide for detection of SNP TSC0037871
cataaatataaac

SEQ ID NO: 150049 - DNA, 13 bp, Artificial Sequence
  Oligonucleotide for detection of SNP TSC0037871
gtttacgtttatg

SEQ ID NO: 150050 - DNA, 13 bp, Artificial Sequence
  Oligonucleotide for detection of SNP TSC0037871
cataaacgtaaac

SEQ ID NO: 150051 - DNA, 13 bp, Artificial Sequence
  Oligonucleotide for detection of SNP TSC0037872
tttagtggtatay

SEQ ID NO: 150052 - DNA, 13 bp, Artificial Sequence
  Oligonucleotide for detection of SNP TSC0037872
rtataccactaaa

SEQ ID NO: 150053 - DNA, 13 bp, Artificial Sequence
  Oligonucleotide for detection of SNP TSC0037872
tttagttgtatay

SEQ ID NO: 150054 - DNA, 13 bp, Artificial Sequence
  Oligonucleotide for detection of SNP TSC0037872
rtatacaactaaa

SEQ ID NO: 150055 - DNA, 13 bp, Artificial Sequence
  Oligonucleotide for detection of SNP TSC0037872
gtgtattattgag

SEQ ID NO: 150056 - DNA, 13 bp, Artificial Sequence
  Oligonucleotide for detection of SNP TSC0037872
ctcaataatacac

SEQ ID NO: 150057 - DNA, 13 bp, Artificial Sequence
  Oligonucleotide for detection of SNP TSC0037872
gtgtataattgag

SEQ ID NO: 150058 - DNA, 13 bp, Artificial Sequence
  Oligonucleotide for detection of SNP TSC0037872
ctcaattatacac

SEQ ID NO: 150059 - DNA, 13 bp, Artificial Sequence
  Oligonucleotide for detection of SNP TSC0037873
gtaaaagttttat

SEQ ID NO: 150060 - DNA, 13 bp, Artificial Sequence
  Oligonucleotide for detection of SNP TSC0037873
ataaaacttttac

SEQ ID NO: 150061 - DNA, 13 bp, Artificial Sequence
  Oligonucleotide for detection of SNP TSC0037873
gtaaaatttttat

SEQ ID NO: 150062 - DNA, 13 bp, Artificial Sequence
  Oligonucleotide for detection of SNP TSC0037873
ataaaaattttac

SEQ ID NO: 150063 - DNA, 13 bp, Artificial Sequence
  Oligonucleotide for detection of SNP TSC0037873
atagaatttttay

SEQ ID NO: 150064 - DNA, 13 bp, Artificial Sequence
  Oligonucleotide for detection of SNP TSC0037873
rtaaaaattctat

SEQ ID NO: 150065 - DNA, 13 bp, Artificial Sequence
  Oligonucleotide for detection of SNP TSC0037873
atagaaattttay

SEQ ID NO: 150066 - DNA, 13 bp, Artificial Sequence
  Oligonucleotide for detection of SNP TSC0037873
rtaaaatttctat

SEQ ID NO: 150067 - DNA, 13 bp, Artificial Sequence
  Oligonucleotide for detection of SNP TSC0037874
gttagtagtttty

SEQ ID NO: 150068 - DNA, 13 bp, Artificial Sequence
  Oligonucleotide for detection of SNP TSC0037874
raaaactactaac

SEQ ID NO: 150069 - DNA, 13 bp, Artificial Sequence
  Oligonucleotide for detection of SNP TSC0037874
gttagttgtttty

SEQ ID NO: 150070 - DNA, 13 bp, Artificial Sequence
  Oligonucleotide for detection of SNP TSC0037874
raaaacaactaac

SEQ ID NO: 150071 - DNA, 13 bp, Artificial Sequence
  Oligonucleotide for detection of SNP TSC0037874
gaaagttgttggy

SEQ ID NO: 150072 - DNA, 13 bp, Artificial Sequence
  Oligonucleotide for detection of SNP TSC0037874
rccaacaactttc

SEQ ID NO: 150073 - DNA, 13 bp, Artificial Sequence
  Oligonucleotide for detection of SNP TSC0037874
gaaagtagttggy

SEQ ID NO: 150074 - DNA, 13 bp, Artificial Sequence
  Oligonucleotide for detection of SNP TSC0037874
rccaactactttc

SEQ ID NO: 150075 - DNA, 13 bp, Artificial Sequence
  Oligonucleotide for detection of SNP TSC0037877
tattttggttttt

SEQ ID NO: 150076 - DNA, 13 bp, Artificial Sequence
  Oligonucleotide for detection of SNP TSC0037877
aaaaaccaaaata

SEQ ID NO: 150077 - DNA, 13 bp, Artificial Sequence
  Oligonucleotide for detection of SNP TSC0037877
tatttcggttttt

SEQ ID NO: 150078 - DNA, 13 bp, Artificial Sequence
  Oligonucleotide for detection of SNP TSC0037877
aaaaaccgaaata

SEQ ID NO: 150079 - DNA, 13 bp, Artificial Sequence
  Oligonucleotide for detection of SNP TSC0037877
agaagtggggatg

SEQ ID NO: 150080 - DNA, 13 bp, Artificial Sequence
  Oligonucleotide for detection of SNP TSC0037877
catccccacttct

SEQ ID NO: 150081 - DNA, 13 bp, Artificial Sequence
  Oligonucleotide for detection of SNP TSC0037877
agaagttgggatg

SEQ ID NO: 150082 - DNA, 13 bp, Artificial Sequence
  Oligonucleotide for detection of SNP TSC0037877
catcccaacttct

SEQ ID NO: 150083 - DNA, 13 bp, Artificial Sequence
  Oligonucleotide for detection of SNP TSC0037877
agaagcggggatg

SEQ ID NO: 150084 - DNA, 13 bp, Artificial Sequence
  Oligonucleotide for detection of SNP TSC0037877
catccccgcttct

SEQ ID NO: 150085 - DNA, 13 bp, Artificial Sequence
  Oligonucleotide for detection of SNP TSC0037877
agaagtcgggatg

SEQ ID NO: 150086 - DNA, 13 bp, Artificial Sequence
  Oligonucleotide for detection of SNP TSC0037877
catcccgacttct

SEQ ID NO: 150087 - DNA, 13 bp, Artificial Sequence
  Oligonucleotide for detection of SNP TSC0037883
gtgtttgttattg

SEQ ID NO: 150088 - DNA, 13 bp, Artificial Sequence
  Oligonucleotide for detection of SNP TSC0037883
caataacaaacac

SEQ ID NO: 150089 - DNA, 13 bp, Artificial Sequence
  Oligonucleotide for detection of SNP TSC0037883
gtgtttattattg

SEQ ID NO: 150090 - DNA, 13 bp, Artificial Sequence
  Oligonucleotide for detection of SNP TSC0037883
caataataaacac

SEQ ID NO: 150091 - DNA, 13 bp, Artificial Sequence
  Oligonucleotide for detection of SNP TSC0037884
atgtgtgtgtttg

SEQ ID NO: 150092 - DNA, 13 bp, Artificial Sequence
  Oligonucleotide for detection of SNP TSC0037884
caaacacacacat

SEQ ID NO: 150093 - DNA, 13 bp, Artificial Sequence
  Oligonucleotide for detection of SNP TSC0037884
atgtgtatgtttg

SEQ ID NO: 150094 - DNA, 13 bp, Artificial Sequence
  Oligonucleotide for detection of SNP TSC0037884
caaacatacacat

SEQ ID NO: 150095 - DNA, 13 bp, Artificial Sequence
  Oligonucleotide for detection of SNP TSC0037885
taaaaattatgag

SEQ ID NO: 150096 - DNA, 13 bp, Artificial Sequence
  Oligonucleotide for detection of SNP TSC0037885
ctcataattttta

SEQ ID NO: 150097 - DNA, 13 bp, Artificial Sequence
  Oligonucleotide for detection of SNP TSC0037885
taaaaagtatgag

SEQ ID NO: 150098 - DNA, 13 bp, Artificial Sequence
  Oligonucleotide for detection of SNP TSC0037885
ctcatacttttta

SEQ ID NO: 150099 - DNA, 13 bp, Artificial Sequence
  Oligonucleotide for detection of SNP TSC0037889
ttttaggatttty

SEQ ID NO: 150100 - DNA, 13 bp, Artificial Sequence
  Oligonucleotide for detection of SNP TSC0037889
raaaatcctaaaa

SEQ ID NO: 150101 - DNA, 13 bp, Artificial Sequence
  Oligonucleotide for detection of SNP TSC0037892
tgttaggttaaaa

SEQ ID NO: 150102 - DNA, 13 bp, Artificial Sequence
  Oligonucleotide for detection of SNP TSC0037892
ttttaacctaaca

SEQ ID NO: 150103 - DNA, 13 bp, Artificial Sequence
  Oligonucleotide for detection of SNP TSC0037892
tgttagattaaaa

SEQ ID NO: 150104 - DNA, 13 bp, Artificial Sequence
  Oligonucleotide for detection of SNP TSC0037892
ttttaatctaaca

SEQ ID NO: 150105 - DNA, 13 bp, Artificial Sequence
  Oligonucleotide for detection of SNP TSC0037893
agttttagtttgg

SEQ ID NO: 150106 - DNA, 13 bp, Artificial Sequence
  Oligonucleotide for detection of SNP TSC0037893
ccaaactaaaact

SEQ ID NO: 150107 - DNA, 13 bp, Artificial Sequence
  Oligonucleotide for detection of SNP TSC0037893
agttttggtttgg

SEQ ID NO: 150108 - DNA, 13 bp, Artificial Sequence
  Oligonucleotide for detection of SNP TSC0037893
ccaaaccaaaact

SEQ ID NO: 150109 - DNA, 13 bp, Artificial Sequence
  Oligonucleotide for detection of SNP TSC0037893
agtttcggtttgg

SEQ ID NO: 150110 - DNA, 13 bp, Artificial Sequence
  Oligonucleotide for detection of SNP TSC0037893
ccaaaccgaaact

SEQ ID NO: 150111 - DNA, 13 bp, Artificial Sequence
  Oligonucleotide for detection of SNP TSC0037893
ttaagttgaagtt

SEQ ID NO: 150112 - DNA, 13 bp, Artificial Sequence
  Oligonucleotide for detection of SNP TSC0037893
aacttcaacttaa

SEQ ID NO: 150113 - DNA, 13 bp, Artificial Sequence
  Oligonucleotide for detection of SNP TSC0037893
ttaagtcgaagtt

SEQ ID NO: 150114 - DNA, 13 bp, Artificial Sequence
  Oligonucleotide for detection of SNP TSC0037893
aacttcgacttaa

SEQ ID NO: 150115 - DNA, 13 bp, Artificial Sequence
  Oligonucleotide for detection of SNP TSC0037894
atataggtattgg

SEQ ID NO: 150116 - DNA, 13 bp, Artificial Sequence
  Oligonucleotide for detection of SNP TSC0037894
ccaatacctatat

SEQ ID NO: 150117 - DNA, 13 bp, Artificial Sequence
  Oligonucleotide for detection of SNP TSC0037894
atatagatattgg

SEQ ID NO: 150118 - DNA, 13 bp, Artificial Sequence
  Oligonucleotide for detection of SNP TSC0037894
ccaatatctatat

SEQ ID NO: 150119 - DNA, 13 bp, Artificial Sequence
  Oligonucleotide for detection of SNP TSC0037895
tggtaggtttggg

SEQ ID NO: 150120 - DNA, 13 bp, Artificial Sequence
  Oligonucleotide for detection of SNP TSC0037895
cccaaacctacca

SEQ ID NO: 150121 - DNA, 13 bp, Artificial Sequence
  Oligonucleotide for detection of SNP TSC0037895
tggtagatttggg

SEQ ID NO: 150122 - DNA, 13 bp, Artificial Sequence
  Oligonucleotide for detection of SNP TSC0037895
cccaaatctacca

SEQ ID NO: 150123 - DNA, 13 bp, Artificial Sequence
  Oligonucleotide for detection of SNP TSC0037895
tggtaggttcggg

SEQ ID NO: 150124 - DNA, 13 bp, Artificial Sequence
  Oligonucleotide for detection of SNP TSC0037895
cccgaacctacca

SEQ ID NO: 150125 - DNA, 13 bp, Artificial Sequence
  Oligonucleotide for detection of SNP TSC0037895
tggtagattcggg

SEQ ID NO: 150126 - DNA, 13 bp, Artificial Sequence
  Oligonucleotide for detection of SNP TSC0037895
cccgaatctacca

SEQ ID NO: 150127 - DNA, 13 bp, Artificial Sequence
  Oligonucleotide for detection of SNP TSC0037896
atttgaatttttt

SEQ ID NO: 150128 - DNA, 13 bp, Artificial Sequence
  Oligonucleotide for detection of SNP TSC0037896
aaaaaattcaaat

SEQ ID NO: 150129 - DNA, 13 bp, Artificial Sequence
  Oligonucleotide for detection of SNP TSC0037896
atttgattttttt

SEQ ID NO: 150130 - DNA, 13 bp, Artificial Sequence
  Oligonucleotide for detection of SNP TSC0037896
aaaaaaatcaaat

SEQ ID NO: 150131 - DNA, 13 bp, Artificial Sequence
  Oligonucleotide for detection of SNP TSC0037896
aaggaatttagat

SEQ ID NO: 150132 - DNA, 13 bp, Artificial Sequence
  Oligonucleotide for detection of SNP TSC0037896
atctaaattcctt

SEQ ID NO: 150133 - DNA, 13 bp, Artificial Sequence
  Oligonucleotide for detection of SNP TSC0037896
aaggaagttagat

SEQ ID NO: 150134 - DNA, 13 bp, Artificial Sequence
  Oligonucleotide for detection of SNP TSC0037896
atctaacttcctt

SEQ ID NO: 150135 - DNA, 13 bp, Artificial Sequence
  Oligonucleotide for detection of SNP TSC0037897
tatagtgtttgat

SEQ ID NO: 150136 - DNA, 13 bp, Artificial Sequence
  Oligonucleotide for detection of SNP TSC0037897
atcaaacactata

SEQ ID NO: 150137 - DNA, 13 bp, Artificial Sequence
  Oligonucleotide for detection of SNP TSC0037897
tatagtatttgat

SEQ ID NO: 150138 - DNA, 13 bp, Artificial Sequence
  Oligonucleotide for detection of SNP TSC0037897
atcaaatactata

SEQ ID NO: 150139 - DNA, 13 bp, Artificial Sequence
  Oligonucleotide for detection of SNP TSC0037898
gaatatatttttt

SEQ ID NO: 150140 - DNA, 13 bp, Artificial Sequence
  Oligonucleotide for detection of SNP TSC0037898
aaaaaatatattc

SEQ ID NO: 150141 - DNA, 13 bp, Artificial Sequence
  Oligonucleotide for detection of SNP TSC0037898
gaatatttttttt

SEQ ID NO: 150142 - DNA, 13 bp, Artificial Sequence
  Oligonucleotide for detection of SNP TSC0037898
aaaaaaaatattc

SEQ ID NO: 150143 - DNA, 13 bp, Artificial Sequence
  Oligonucleotide for detection of SNP TSC0037898
aaaaaatatatty

SEQ ID NO: 150144 - DNA, 13 bp, Artificial Sequence
  Oligonucleotide for detection of SNP TSC0037898
raatatatttttt

SEQ ID NO: 150145 - DNA, 13 bp, Artificial Sequence
  Oligonucleotide for detection of SNP TSC0037898
aaaaaaaatatty

SEQ ID NO: 150146 - DNA, 13 bp, Artificial Sequence
  Oligonucleotide for detection of SNP TSC0037898
raatatttttttt

SEQ ID NO: 150147 - DNA, 13 bp, Artificial Sequence
  Oligonucleotide for detection of SNP TSC0037899
tagattattggta

SEQ ID NO: 150148 - DNA, 13 bp, Artificial Sequence
  Oligonucleotide for detection of SNP TSC0037899
taccaataatcta

SEQ ID NO: 150149 - DNA, 13 bp, Artificial Sequence
  Oligonucleotide for detection of SNP TSC0037899
tagattgttggta

SEQ ID NO: 150150 - DNA, 13 bp, Artificial Sequence
  Oligonucleotide for detection of SNP TSC0037899
taccaacaatcta

SEQ ID NO: 150151 - DNA, 13 bp, Artificial Sequence
  Oligonucleotide for detection of SNP TSC0037903
gaatgaaagaatg

SEQ ID NO: 150152 - DNA, 13 bp, Artificial Sequence
  Oligonucleotide for detection of SNP TSC0037903
cattctttcattc

SEQ ID NO: 150153 - DNA, 13 bp, Artificial Sequence
  Oligonucleotide for detection of SNP TSC0037903
gaatgagagaatg

SEQ ID NO: 150154 - DNA, 13 bp, Artificial Sequence
  Oligonucleotide for detection of SNP TSC0037903
cattctctcattc

SEQ ID NO: 150155 - DNA, 13 bp, Artificial Sequence
  Oligonucleotide for detection of SNP TSC0037906
attttatttaaaa

SEQ ID NO: 150156 - DNA, 13 bp, Artificial Sequence
  Oligonucleotide for detection of SNP TSC0037906
ttttaaataaaat

SEQ ID NO: 150157 - DNA, 13 bp, Artificial Sequence
  Oligonucleotide for detection of SNP TSC0037906
attttagttaaaa

SEQ ID NO: 150158 - DNA, 13 bp, Artificial Sequence
  Oligonucleotide for detection of SNP TSC0037906
ttttaactaaaat

SEQ ID NO: 150159 - DNA, 13 bp, Artificial Sequence
  Oligonucleotide for detection of SNP TSC0037906
ttttaggtaagat

SEQ ID NO: 150160 - DNA, 13 bp, Artificial Sequence
  Oligonucleotide for detection of SNP TSC0037906
atcttacctaaaa

SEQ ID NO: 150161 - DNA, 13 bp, Artificial Sequence
  Oligonucleotide for detection of SNP TSC0037906
ttttagttaagat

SEQ ID NO: 150162 - DNA, 13 bp, Artificial Sequence
  Oligonucleotide for detection of SNP TSC0037906
atcttaactaaaa

SEQ ID NO: 150163 - DNA, 13 bp, Artificial Sequence
  Oligonucleotide for detection of SNP TSC0037907
agagtaaatatat

SEQ ID NO: 150164 - DNA, 13 bp, Artificial Sequence
  Oligonucleotide for detection of SNP TSC0037907
atatatttactct

SEQ ID NO: 150165 - DNA, 13 bp, Artificial Sequence
  Oligonucleotide for detection of SNP TSC0037907
agagtagatatat

SEQ ID NO: 150166 - DNA, 13 bp, Artificial Sequence
  Oligonucleotide for detection of SNP TSC0037907
atatatctactct

SEQ ID NO: 150167 - DNA, 13 bp, Artificial Sequence
  Oligonucleotide for detection of SNP TSC0037908
ggtatagagagtg

SEQ ID NO: 150168 - DNA, 13 bp, Artificial Sequence
  Oligonucleotide for detection of SNP TSC0037908
cactctctatacc

SEQ ID NO: 150169 - DNA, 13 bp, Artificial Sequence
  Oligonucleotide for detection of SNP TSC0037908
ggtatatagagtg

SEQ ID NO: 150170 - DNA, 13 bp, Artificial Sequence
  Oligonucleotide for detection of SNP TSC0037908
cactctatatacc

SEQ ID NO: 150171 - DNA, 13 bp, Artificial Sequence
  Oligonucleotide for detection of SNP TSC0037908
tattttttgtgty

SEQ ID NO: 150172 - DNA, 13 bp, Artificial Sequence
  Oligonucleotide for detection of SNP TSC0037908
racacaaaaaata

SEQ ID NO: 150173 - DNA, 13 bp, Artificial Sequence
  Oligonucleotide for detection of SNP TSC0037908
tattttatgtgty

SEQ ID NO: 150174 - DNA, 13 bp, Artificial Sequence
  Oligonucleotide for detection of SNP TSC0037908
racacataaaata

SEQ ID NO: 150175 - DNA, 13 bp, Artificial Sequence
  Oligonucleotide for detection of SNP TSC0037909
tgtgtttgttgtg

SEQ ID NO: 150176 - DNA, 13 bp, Artificial Sequence
  Oligonucleotide for detection of SNP TSC0037909
cacaacaaacaca

SEQ ID NO: 150177 - DNA, 13 bp, Artificial Sequence
  Oligonucleotide for detection of SNP TSC0037909
tgtgttcgttgtg

SEQ ID NO: 150178 - DNA, 13 bp, Artificial Sequence
  Oligonucleotide for detection of SNP TSC0037909
cacaacgaacaca

SEQ ID NO: 150179 - DNA, 13 bp, Artificial Sequence
  Oligonucleotide for detection of SNP TSC0037909
tgtgtttgtcgtg

SEQ ID NO: 150180 - DNA, 13 bp, Artificial Sequence
  Oligonucleotide for detection of SNP TSC0037909
cacgacaaacaca

SEQ ID NO: 150181 - DNA, 13 bp, Artificial Sequence
  Oligonucleotide for detection of SNP TSC0037909
tgtgttcgtcgtg

SEQ ID NO: 150182 - DNA, 13 bp, Artificial Sequence
  Oligonucleotide for detection of SNP TSC0037909
cacgacgaacaca

SEQ ID NO: 150183 - DNA, 13 bp, Artificial Sequence
  Oligonucleotide for detection of SNP TSC0037909
tatgatgagtata

SEQ ID NO: 150184 - DNA, 13 bp, Artificial Sequence
  Oligonucleotide for detection of SNP TSC0037909
tatactcatcata

SEQ ID NO: 150185 - DNA, 13 bp, Artificial Sequence
  Oligonucleotide for detection of SNP TSC0037909
tatgataagtata

SEQ ID NO: 150186 - DNA, 13 bp, Artificial Sequence
  Oligonucleotide for detection of SNP TSC0037909
tatacttatcata

SEQ ID NO: 150187 - DNA, 13 bp, Artificial Sequence
  Oligonucleotide for detection of SNP TSC0037909
tacgatgagtata

SEQ ID NO: 150188 - DNA, 13 bp, Artificial Sequence
  Oligonucleotide for detection of SNP TSC0037909
tatactcatcgta

SEQ ID NO: 150189 - DNA, 13 bp, Artificial Sequence
  Oligonucleotide for detection of SNP TSC0037909
tacgataagtata

SEQ ID NO: 150190 - DNA, 13 bp, Artificial Sequence
  Oligonucleotide for detection of SNP TSC0037909
tatacttatcgta

SEQ ID NO: 150191 - DNA, 13 bp, Artificial Sequence
  Oligonucleotide for detection of SNP TSC0037909
tatgacgagtata

SEQ ID NO: 150192 - DNA, 13 bp, Artificial Sequence
  Oligonucleotide for detection of SNP TSC0037909
tatactcgtcata

SEQ ID NO: 150193 - DNA, 13 bp, Artificial Sequence
  Oligonucleotide for detection of SNP TSC0037909
tacgacgagtata

SEQ ID NO: 150194 - DNA, 13 bp, Artificial Sequence
  Oligonucleotide for detection of SNP TSC0037909
tatactcgtcgta

SEQ ID NO: 150195 - DNA, 13 bp, Artificial Sequence
  Oligonucleotide for detection of SNP TSC0037910
gggattatatagt

SEQ ID NO: 150196 - DNA, 13 bp, Artificial Sequence
  Oligonucleotide for detection of SNP TSC0037910
actatataatccc

SEQ ID NO: 150197 - DNA, 13 bp, Artificial Sequence
  Oligonucleotide for detection of SNP TSC0037910
gggattgtatagt

SEQ ID NO: 150198 - DNA, 13 bp, Artificial Sequence
  Oligonucleotide for detection of SNP TSC0037910
actatacaatccc

SEQ ID NO: 150199 - DNA, 13 bp, Artificial Sequence
  Oligonucleotide for detection of SNP TSC0037911
agaaatgttataa

SEQ ID NO: 150200 - DNA, 13 bp, Artificial Sequence
  Oligonucleotide for detection of SNP TSC0037911
ttataacatttct

SEQ ID NO: 150201 - DNA, 13 bp, Artificial Sequence
  Oligonucleotide for detection of SNP TSC0037911
agaaattttataa

SEQ ID NO: 150202 - DNA, 13 bp, Artificial Sequence
  Oligonucleotide for detection of SNP TSC0037911
ttataaaatttct

SEQ ID NO: 150203 - DNA, 13 bp, Artificial Sequence
  Oligonucleotide for detection of SNP TSC0037911
ttgtaatattttt

SEQ ID NO: 150204 - DNA, 13 bp, Artificial Sequence
  Oligonucleotide for detection of SNP TSC0037911
aaaaatattacaa

SEQ ID NO: 150205 - DNA, 13 bp, Artificial Sequence
  Oligonucleotide for detection of SNP TSC0037911
ttgtaaaattttt

SEQ ID NO: 150206 - DNA, 13 bp, Artificial Sequence
  Oligonucleotide for detection of SNP TSC0037911
aaaaattttacaa

SEQ ID NO: 150207 - DNA, 13 bp, Artificial Sequence
  Oligonucleotide for detection of SNP TSC0037912
ggtggttgtgtat

SEQ ID NO: 150208 - DNA, 13 bp, Artificial Sequence
  Oligonucleotide for detection of SNP TSC0037912
atacacaaccacc

SEQ ID NO: 150209 - DNA, 13 bp, Artificial Sequence
  Oligonucleotide for detection of SNP TSC0037912
ggtggtcgtgtat

SEQ ID NO: 150210 - DNA, 13 bp, Artificial Sequence
  Oligonucleotide for detection of SNP TSC0037912
atacacgaccacc

SEQ ID NO: 150211 - DNA, 13 bp, Artificial Sequence
  Oligonucleotide for detection of SNP TSC0037912
atatatggttaty

SEQ ID NO: 150212 - DNA, 13 bp, Artificial Sequence
  Oligonucleotide for detection of SNP TSC0037912
rataaccatatat

SEQ ID NO: 150213 - DNA, 13 bp, Artificial Sequence
  Oligonucleotide for detection of SNP TSC0037912
atatatagttaty

SEQ ID NO: 150214 - DNA, 13 bp, Artificial Sequence
  Oligonucleotide for detection of SNP TSC0037912
rataactatatat

SEQ ID NO: 150215 - DNA, 13 bp, Artificial Sequence
  Oligonucleotide for detection of SNP TSC0037912
atatacggttaty

SEQ ID NO: 150216 - DNA, 13 bp, Artificial Sequence
  Oligonucleotide for detection of SNP TSC0037912
rataaccgtatat

SEQ ID NO: 150217 - DNA, 13 bp, Artificial Sequence
  Oligonucleotide for detection of SNP TSC0037913
aatgatatatatg

SEQ ID NO: 150218 - DNA, 13 bp, Artificial Sequence
  Oligonucleotide for detection of SNP TSC0037913
catatatatcatt

SEQ ID NO: 150219 - DNA, 13 bp, Artificial Sequence
  Oligonucleotide for detection of SNP TSC0037913
aatgatgtatatg

SEQ ID NO: 150220 - DNA, 13 bp, Artificial Sequence
  Oligonucleotide for detection of SNP TSC0037913
catatacatcatt

SEQ ID NO: 150221 - DNA, 13 bp, Artificial Sequence
  Oligonucleotide for detection of SNP TSC0037913
aatgacgtatatg

SEQ ID NO: 150222 - DNA, 13 bp, Artificial Sequence
  Oligonucleotide for detection of SNP TSC0037913
catatacgtcatt

SEQ ID NO: 150223 - DNA, 13 bp, Artificial Sequence
  Oligonucleotide for detection of SNP TSC0037913
tatgtatgttatt

SEQ ID NO: 150224 - DNA, 13 bp, Artificial Sequence
  Oligonucleotide for detection of SNP TSC0037913
aataacatacata

SEQ ID NO: 150225 - DNA, 13 bp, Artificial Sequence
  Oligonucleotide for detection of SNP TSC0037913
tatgtacgttatt

SEQ ID NO: 150226 - DNA, 13 bp, Artificial Sequence
  Oligonucleotide for detection of SNP TSC0037913
aataacgtacata

SEQ ID NO: 150227 - DNA, 13 bp, Artificial Sequence
  Oligonucleotide for detection of SNP TSC0037914
ttggaatggttat

SEQ ID NO: 150228 - DNA, 13 bp, Artificial Sequence
  Oligonucleotide for detection of SNP TSC0037914
ataaccattccaa

SEQ ID NO: 150229 - DNA, 13 bp, Artificial Sequence
  Oligonucleotide for detection of SNP TSC0037914
ttggaacggttat

SEQ ID NO: 150230 - DNA, 13 bp, Artificial Sequence
  Oligonucleotide for detection of SNP TSC0037914
ataaccgttccaa

SEQ ID NO: 150231 - DNA, 13 bp, Artificial Sequence
  Oligonucleotide for detection of SNP TSC0037914
atgattgttttag

SEQ ID NO: 150232 - DNA, 13 bp, Artificial Sequence
  Oligonucleotide for detection of SNP TSC0037914
ctaaaacaatcat

SEQ ID NO: 150233 - DNA, 13 bp, Artificial Sequence
  Oligonucleotide for detection of SNP TSC0037914
atgattattttag

SEQ ID NO: 150234 - DNA, 13 bp, Artificial Sequence
  Oligonucleotide for detection of SNP TSC0037914
ctaaaataatcat

SEQ ID NO: 150235 - DNA, 13 bp, Artificial Sequence
  Oligonucleotide for detection of SNP TSC0037914
atgatcgttttag

SEQ ID NO: 150236 - DNA, 13 bp, Artificial Sequence
  Oligonucleotide for detection of SNP TSC0037914
ctaaaacgatcat

SEQ ID NO: 150237 - DNA, 13 bp, Artificial Sequence
  Oligonucleotide for detection of SNP TSC0037916
ttttaagttgagg

SEQ ID NO: 150238 - DNA, 13 bp, Artificial Sequence
  Oligonucleotide for detection of SNP TSC0037916
cctcaacttaaaa

SEQ ID NO: 150239 - DNA, 13 bp, Artificial Sequence
  Oligonucleotide for detection of SNP TSC0037916
ttttaaattgagg

SEQ ID NO: 150240 - DNA, 13 bp, Artificial Sequence
  Oligonucleotide for detection of SNP TSC0037916
cctcaatttaaaa

SEQ ID NO: 150241 - DNA, 13 bp, Artificial Sequence
  Oligonucleotide for detection of SNP TSC0037917
aattatgtgattg

SEQ ID NO: 150242 - DNA, 13 bp, Artificial Sequence
  Oligonucleotide for detection of SNP TSC0037917
caatcacataatt

SEQ ID NO: 150243 - DNA, 13 bp, Artificial Sequence
  Oligonucleotide for detection of SNP TSC0037917
aattatatgattg

SEQ ID NO: 150244 - DNA, 13 bp, Artificial Sequence
  Oligonucleotide for detection of SNP TSC0037917
caatcatataatt

SEQ ID NO: 150245 - DNA, 13 bp, Artificial Sequence
  Oligonucleotide for detection of SNP TSC0037918
attttggtttagt

SEQ ID NO: 150246 - DNA, 13 bp, Artificial Sequence
  Oligonucleotide for detection of SNP TSC0037918
actaaaccaaaat

SEQ ID NO: 150247 - DNA, 13 bp, Artificial Sequence
  Oligonucleotide for detection of SNP TSC0037918
attttgatttagt

SEQ ID NO: 150248 - DNA, 13 bp, Artificial Sequence
  Oligonucleotide for detection of SNP TSC0037918
actaaatcaaaat

SEQ ID NO: 150249 - DNA, 13 bp, Artificial Sequence
  Oligonucleotide for detection of SNP TSC0037919
gtggttgttttgt

SEQ ID NO: 150250 - DNA, 13 bp, Artificial Sequence
  Oligonucleotide for detection of SNP TSC0037919
acaaaacaaccac

SEQ ID NO: 150251 - DNA, 13 bp, Artificial Sequence
  Oligonucleotide for detection of SNP TSC0037919
gtggtttttttgt

SEQ ID NO: 150252 - DNA, 13 bp, Artificial Sequence
  Oligonucleotide for detection of SNP TSC0037919
acaaaaaaaccac

SEQ ID NO: 150253 - DNA, 13 bp, Artificial Sequence
  Oligonucleotide for detection of SNP TSC0037919
atagaataattay

SEQ ID NO: 150254 - DNA, 13 bp, Artificial Sequence
  Oligonucleotide for detection of SNP TSC0037919
rtaattattctat

SEQ ID NO: 150255 - DNA, 13 bp, Artificial Sequence
  Oligonucleotide for detection of SNP TSC0037919
atagaaaaattay

SEQ ID NO: 150256 - DNA, 13 bp, Artificial Sequence
  Oligonucleotide for detection of SNP TSC0037919
rtaatttttctat

SEQ ID NO: 150257 - DNA, 13 bp, Artificial Sequence
  Oligonucleotide for detection of SNP TSC0037923
ttaattatggtaa

SEQ ID NO: 150258 - DNA, 13 bp, Artificial Sequence
  Oligonucleotide for detection of SNP TSC0037923
ttaccataattaa

SEQ ID NO: 150259 - DNA, 13 bp, Artificial Sequence
  Oligonucleotide for detection of SNP TSC0037923
ttaattgtggtaa

SEQ ID NO: 150260 - DNA, 13 bp, Artificial Sequence
  Oligonucleotide for detection of SNP TSC0037923
ttaccacaattaa

SEQ ID NO: 150261 - DNA, 13 bp, Artificial Sequence
  Oligonucleotide for detection of SNP TSC0037923
ttaatcgtggtaa

SEQ ID NO: 150262 - DNA, 13 bp, Artificial Sequence
  Oligonucleotide for detection of SNP TSC0037923
ttaccacgattaa

SEQ ID NO: 150263 - DNA, 13 bp, Artificial Sequence
  Oligonucleotide for detection of SNP TSC0037924
tgggagataatag

SEQ ID NO: 150264 - DNA, 13 bp, Artificial Sequence
  Oligonucleotide for detection of SNP TSC0037924
ctattatctccca

SEQ ID NO: 150265 - DNA, 13 bp, Artificial Sequence
  Oligonucleotide for detection of SNP TSC0037924
tgggaggtaatag

SEQ ID NO: 150266 - DNA, 13 bp, Artificial Sequence
  Oligonucleotide for detection of SNP TSC0037924
ctattacctccca

SEQ ID NO: 150267 - DNA, 13 bp, Artificial Sequence
  Oligonucleotide for detection of SNP TSC0037926
aatatttgttata

SEQ ID NO: 150268 - DNA, 13 bp, Artificial Sequence
  Oligonucleotide for detection of SNP TSC0037926
tataacaaatatt

SEQ ID NO: 150269 - DNA, 13 bp, Artificial Sequence
  Oligonucleotide for detection of SNP TSC0037926
aatattcgttata

SEQ ID NO: 150270 - DNA, 13 bp, Artificial Sequence
  Oligonucleotide for detection of SNP TSC0037926
tataacgaatatt

SEQ ID NO: 150271 - DNA, 13 bp, Artificial Sequence
  Oligonucleotide for detection of SNP TSC0037926
tgtaatgaatgtt

SEQ ID NO: 150272 - DNA, 13 bp, Artificial Sequence
  Oligonucleotide for detection of SNP TSC0037926
aacattcattaca

SEQ ID NO: 150273 - DNA, 13 bp, Artificial Sequence
  Oligonucleotide for detection of SNP TSC0037926
tgtaataaatgtt

SEQ ID NO: 150274 - DNA, 13 bp, Artificial Sequence
  Oligonucleotide for detection of SNP TSC0037926
aacatttattaca

SEQ ID NO: 150275 - DNA, 13 bp, Artificial Sequence
  Oligonucleotide for detection of SNP TSC0037926
tgtaacgaatgtt

SEQ ID NO: 150276 - DNA, 13 bp, Artificial Sequence
  Oligonucleotide for detection of SNP TSC0037926
aacattcgttaca

SEQ ID NO: 150277 - DNA, 13 bp, Artificial Sequence
  Oligonucleotide for detection of SNP TSC0037927
ataggtgtgagta

SEQ ID NO: 150278 - DNA, 13 bp, Artificial Sequence
  Oligonucleotide for detection of SNP TSC0037927
tactcacacctat

SEQ ID NO: 150279 - DNA, 13 bp, Artificial Sequence
  Oligonucleotide for detection of SNP TSC0037927
ataggtatgagta

SEQ ID NO: 150280 - DNA, 13 bp, Artificial Sequence
  Oligonucleotide for detection of SNP TSC0037927
tactcatacctat

SEQ ID NO: 150281 - DNA, 13 bp, Artificial Sequence
  Oligonucleotide for detection of SNP TSC0037928
ttttgtatttaty

SEQ ID NO: 150282 - DNA, 13 bp, Artificial Sequence
  Oligonucleotide for detection of SNP TSC0037928
rataaatacaaaa

SEQ ID NO: 150283 - DNA, 13 bp, Artificial Sequence
  Oligonucleotide for detection of SNP TSC0037929
agttaggagttta

SEQ ID NO: 150284 - DNA, 13 bp, Artificial Sequence
  Oligonucleotide for detection of SNP TSC0037929
taaactcctaact

SEQ ID NO: 150285 - DNA, 13 bp, Artificial Sequence
  Oligonucleotide for detection of SNP TSC0037929
agttagaagttta

SEQ ID NO: 150286 - DNA, 13 bp, Artificial Sequence
  Oligonucleotide for detection of SNP TSC0037929
taaacttctaact

SEQ ID NO: 150287 - DNA, 13 bp, Artificial Sequence
  Oligonucleotide for detection of SNP TSC0037930
taaaatatgagaa

SEQ ID NO: 150288 - DNA, 13 bp, Artificial Sequence
  Oligonucleotide for detection of SNP TSC0037930
ttctcatatttta

SEQ ID NO: 150289 - DNA, 13 bp, Artificial Sequence
  Oligonucleotide for detection of SNP TSC0037930
taaaatgtgagaa

SEQ ID NO: 150290 - DNA, 13 bp, Artificial Sequence
  Oligonucleotide for detection of SNP TSC0037930
ttctcacatttta

SEQ ID NO: 150291 - DNA, 13 bp, Artificial Sequence
  Oligonucleotide for detection of SNP TSC0037930
taaaacgtgagaa

SEQ ID NO: 150292 - DNA, 13 bp, Artificial Sequence
  Oligonucleotide for detection of SNP TSC0037930
ttctcacgtttta

SEQ ID NO: 150293 - DNA, 13 bp, Artificial Sequence
  Oligonucleotide for detection of SNP TSC0037931
ttaagaggagatt

SEQ ID NO: 150294 - DNA, 13 bp, Artificial Sequence
  Oligonucleotide for detection of SNP TSC0037931
aatctcctcttaa

SEQ ID NO: 150295 - DNA, 13 bp, Artificial Sequence
  Oligonucleotide for detection of SNP TSC0037931
ttaagatgagatt

SEQ ID NO: 150296 - DNA, 13 bp, Artificial Sequence
  Oligonucleotide for detection of SNP TSC0037931
aatctcatcttaa

SEQ ID NO: 150297 - DNA, 13 bp, Artificial Sequence
  Oligonucleotide for detection of SNP TSC0037931
aattttattttga

SEQ ID NO: 150298 - DNA, 13 bp, Artificial Sequence
  Oligonucleotide for detection of SNP TSC0037931
tcaaaataaaatt

SEQ ID NO: 150299 - DNA, 13 bp, Artificial Sequence
  Oligonucleotide for detection of SNP TSC0037932
tgtttaggtgtaa

SEQ ID NO: 150300 - DNA, 13 bp, Artificial Sequence
  Oligonucleotide for detection of SNP TSC0037932
ttacacctaaaca

SEQ ID NO: 150301 - DNA, 13 bp, Artificial Sequence
  Oligonucleotide for detection of SNP TSC0037932
tgtttaagtgtaa

SEQ ID NO: 150302 - DNA, 13 bp, Artificial Sequence
  Oligonucleotide for detection of SNP TSC0037932
ttacacttaaaca

SEQ ID NO: 150303 - DNA, 13 bp, Artificial Sequence
  Oligonucleotide for detection of SNP TSC0037933
agatataatgagy

SEQ ID NO: 150304 - DNA, 13 bp, Artificial Sequence
  Oligonucleotide for detection of SNP TSC0037933
rctcattatatct

SEQ ID NO: 150305 - DNA, 13 bp, Artificial Sequence
  Oligonucleotide for detection of SNP TSC0037933
agatattatgagy

SEQ ID NO: 150306 - DNA, 13 bp, Artificial Sequence
  Oligonucleotide for detection of SNP TSC0037933
rctcataatatct

SEQ ID NO: 150307 - DNA, 13 bp, Artificial Sequence
  Oligonucleotide for detection of SNP TSC0037933
gtttattgtgttt

SEQ ID NO: 150308 - DNA, 13 bp, Artificial Sequence
  Oligonucleotide for detection of SNP TSC0037933
aaacacaataaac

SEQ ID NO: 150309 - DNA, 13 bp, Artificial Sequence
  Oligonucleotide for detection of SNP TSC0037933
gtttatggtgttt

SEQ ID NO: 150310 - DNA, 13 bp, Artificial Sequence
  Oligonucleotide for detection of SNP TSC0037933
aaacaccataaac

SEQ ID NO: 150311 - DNA, 13 bp, Artificial Sequence
  Oligonucleotide for detection of SNP TSC0037934
agttgaattgtgy

SEQ ID NO: 150312 - DNA, 13 bp, Artificial Sequence
  Oligonucleotide for detection of SNP TSC0037934
rcacaattcaact

SEQ ID NO: 150313 - DNA, 13 bp, Artificial Sequence
  Oligonucleotide for detection of SNP TSC0037934
agttgatttgtgy

SEQ ID NO: 150314 - DNA, 13 bp, Artificial Sequence
  Oligonucleotide for detection of SNP TSC0037934
rcacaaatcaact

SEQ ID NO: 150315 - DNA, 13 bp, Artificial Sequence
  Oligonucleotide for detection of SNP TSC0037934
agtcgaattgtgy

SEQ ID NO: 150316 - DNA, 13 bp, Artificial Sequence
  Oligonucleotide for detection of SNP TSC0037934
rcacaattcgact

SEQ ID NO: 150317 - DNA, 13 bp, Artificial Sequence
  Oligonucleotide for detection of SNP TSC0037934
agtcgatttgtgy

SEQ ID NO: 150318 - DNA, 13 bp, Artificial Sequence
  Oligonucleotide for detection of SNP TSC0037934
rcacaaatcgact

SEQ ID NO: 150319 - DNA, 13 bp, Artificial Sequence
  Oligonucleotide for detection of SNP TSC0037934
gtatagtttgatt

SEQ ID NO: 150320 - DNA, 13 bp, Artificial Sequence
  Oligonucleotide for detection of SNP TSC0037934
aatcaaactatac

SEQ ID NO: 150321 - DNA, 13 bp, Artificial Sequence
  Oligonucleotide for detection of SNP TSC0037934
gtatagattgatt

SEQ ID NO: 150322 - DNA, 13 bp, Artificial Sequence
  Oligonucleotide for detection of SNP TSC0037934
aatcaatctatac

SEQ ID NO: 150323 - DNA, 13 bp, Artificial Sequence
  Oligonucleotide for detection of SNP TSC0037934
gtatagttcgatt

SEQ ID NO: 150324 - DNA, 13 bp, Artificial Sequence
  Oligonucleotide for detection of SNP TSC0037934
aatcgaactatac

SEQ ID NO: 150325 - DNA, 13 bp, Artificial Sequence
  Oligonucleotide for detection of SNP TSC0037934
gtatagatcgatt

SEQ ID NO: 150326 - DNA, 13 bp, Artificial Sequence
  Oligonucleotide for detection of SNP TSC0037934
aatcgatctatac

SEQ ID NO: 150327 - DNA, 13 bp, Artificial Sequence
  Oligonucleotide for detection of SNP TSC0037936
gagaataggagag

SEQ ID NO: 150328 - DNA, 13 bp, Artificial Sequence
  Oligonucleotide for detection of SNP TSC0037936
ctctcctattctc

SEQ ID NO: 150329 - DNA, 13 bp, Artificial Sequence
  Oligonucleotide for detection of SNP TSC0037936
gagaatgggagag

SEQ ID NO: 150330 - DNA, 13 bp, Artificial Sequence
  Oligonucleotide for detection of SNP TSC0037936
ctctcccattctc

SEQ ID NO: 150331 - DNA, 13 bp, Artificial Sequence
  Oligonucleotide for detection of SNP TSC0037936
gagaacgggagag

SEQ ID NO: 150332 - DNA, 13 bp, Artificial Sequence
  Oligonucleotide for detection of SNP TSC0037936
ctctcccgttctc

SEQ ID NO: 150333 - DNA, 13 bp, Artificial Sequence
  Oligonucleotide for detection of SNP TSC0037937
tttgatgagatta

SEQ ID NO: 150334 - DNA, 13 bp, Artificial Sequence
  Oligonucleotide for detection of SNP TSC0037937
taatctcatcaaa

SEQ ID NO: 150335 - DNA, 13 bp, Artificial Sequence
  Oligonucleotide for detection of SNP TSC0037937
tttgataagatta

SEQ ID NO: 150336 - DNA, 13 bp, Artificial Sequence
  Oligonucleotide for detection of SNP TSC0037937
taatcttatcaaa

SEQ ID NO: 150337 - DNA, 13 bp, Artificial Sequence
  Oligonucleotide for detection of SNP TSC0037939
tgtttgtgtttga

SEQ ID NO: 150338 - DNA, 13 bp, Artificial Sequence
  Oligonucleotide for detection of SNP TSC0037939
tcaaacacaaaca

SEQ ID NO: 150339 - DNA, 13 bp, Artificial Sequence
  Oligonucleotide for detection of SNP TSC0037939
tgtttgcgtttga

SEQ ID NO: 150340 - DNA, 13 bp, Artificial Sequence
  Oligonucleotide for detection of SNP TSC0037939
tcaaacgcaaaca

SEQ ID NO: 150341 - DNA, 13 bp, Artificial Sequence
  Oligonucleotide for detection of SNP TSC0037939
tgtttgtgttcga

SEQ ID NO: 150342 - DNA, 13 bp, Artificial Sequence
  Oligonucleotide for detection of SNP TSC0037939
tcgaacacaaaca

SEQ ID NO: 150343 - DNA, 13 bp, Artificial Sequence
  Oligonucleotide for detection of SNP TSC0037939
tgtttgcgttcga

SEQ ID NO: 150344 - DNA, 13 bp, Artificial Sequence
  Oligonucleotide for detection of SNP TSC0037939
tcgaacgcaaaca

SEQ ID NO: 150345 - DNA, 13 bp, Artificial Sequence
  Oligonucleotide for detection of SNP TSC0037939
ttgaatgtagata

SEQ ID NO: 150346 - DNA, 13 bp, Artificial Sequence
  Oligonucleotide for detection of SNP TSC0037939
tatctacattcaa

SEQ ID NO: 150347 - DNA, 13 bp, Artificial Sequence
  Oligonucleotide for detection of SNP TSC0037939
ttgaatatagata

SEQ ID NO: 150348 - DNA, 13 bp, Artificial Sequence
  Oligonucleotide for detection of SNP TSC0037939
tatctatattcaa

SEQ ID NO: 150349 - DNA, 13 bp, Artificial Sequence
  Oligonucleotide for detection of SNP TSC0037939
tcgaatgtagata

SEQ ID NO: 150350 - DNA, 13 bp, Artificial Sequence
  Oligonucleotide for detection of SNP TSC0037939
tatctacattcga

SEQ ID NO: 150351 - DNA, 13 bp, Artificial Sequence
  Oligonucleotide for detection of SNP TSC0037939
tcgaatatagata

SEQ ID NO: 150352 - DNA, 13 bp, Artificial Sequence
  Oligonucleotide for detection of SNP TSC0037939
tatctatattcga

SEQ ID NO: 150353 - DNA, 13 bp, Artificial Sequence
  Oligonucleotide for detection of SNP TSC0037939
ttgaacgtagata

SEQ ID NO: 150354 - DNA, 13 bp, Artificial Sequence
  Oligonucleotide for detection of SNP TSC0037939
tatctacgttcaa

SEQ ID NO: 150355 - DNA, 13 bp, Artificial Sequence
  Oligonucleotide for detection of SNP TSC0037939
tcgaacgtagata

SEQ ID NO: 150356 - DNA, 13 bp, Artificial Sequence
  Oligonucleotide for detection of SNP TSC0037939
tatctacgttcga

SEQ ID NO: 150357 - DNA, 13 bp, Artificial Sequence
  Oligonucleotide for detection of SNP TSC0037941
agttattgttttt

SEQ ID NO: 150358 - DNA, 13 bp, Artificial Sequence
  Oligonucleotide for detection of SNP TSC0037941
aaaaacaataact

SEQ ID NO: 150359 - DNA, 13 bp, Artificial Sequence
  Oligonucleotide for detection of SNP TSC0037941
agttatcgttttt

SEQ ID NO: 150360 - DNA, 13 bp, Artificial Sequence
  Oligonucleotide for detection of SNP TSC0037941
aaaaacgataact

SEQ ID NO: 150361 - DNA, 13 bp, Artificial Sequence
  Oligonucleotide for detection of SNP TSC0037941
agggatggtggtt

SEQ ID NO: 150362 - DNA, 13 bp, Artificial Sequence
  Oligonucleotide for detection of SNP TSC0037941
aaccaccatccct

SEQ ID NO: 150363 - DNA, 13 bp, Artificial Sequence
  Oligonucleotide for detection of SNP TSC0037941
agggatagtggtt

SEQ ID NO: 150364 - DNA, 13 bp, Artificial Sequence
  Oligonucleotide for detection of SNP TSC0037941
aaccactatccct

SEQ ID NO: 150365 - DNA, 13 bp, Artificial Sequence
  Oligonucleotide for detection of SNP TSC0037941
agggacggtggtt

SEQ ID NO: 150366 - DNA, 13 bp, Artificial Sequence
  Oligonucleotide for detection of SNP TSC0037941
aaccaccgtccct

SEQ ID NO: 150367 - DNA, 13 bp, Artificial Sequence
  Oligonucleotide for detection of SNP TSC0037942
atgttaatatgty

SEQ ID NO: 150368 - DNA, 13 bp, Artificial Sequence
  Oligonucleotide for detection of SNP TSC0037942
racatattaacat

SEQ ID NO: 150369 - DNA, 13 bp, Artificial Sequence
  Oligonucleotide for detection of SNP TSC0037942
atgttagtatgty

SEQ ID NO: 150370 - DNA, 13 bp, Artificial Sequence
  Oligonucleotide for detection of SNP TSC0037942
racatactaacat

SEQ ID NO: 150371 - DNA, 13 bp, Artificial Sequence
  Oligonucleotide for detection of SNP TSC0037943
tttgatggttaaa

SEQ ID NO: 150372 - DNA, 13 bp, Artificial Sequence
  Oligonucleotide for detection of SNP TSC0037943
tttaaccatcaaa

SEQ ID NO: 150373 - DNA, 13 bp, Artificial Sequence
  Oligonucleotide for detection of SNP TSC0037943
tttgatagttaaa

SEQ ID NO: 150374 - DNA, 13 bp, Artificial Sequence
  Oligonucleotide for detection of SNP TSC0037943
tttaactatcaaa

SEQ ID NO: 150375 - DNA, 13 bp, Artificial Sequence
  Oligonucleotide for detection of SNP TSC0037944
atagatttaaggg

SEQ ID NO: 150376 - DNA, 13 bp, Artificial Sequence
  Oligonucleotide for detection of SNP TSC0037944
cccttaaatctat

SEQ ID NO: 150377 - DNA, 13 bp, Artificial Sequence
  Oligonucleotide for detection of SNP TSC0037944
atagatgtaaggg

SEQ ID NO: 150378 - DNA, 13 bp, Artificial Sequence
  Oligonucleotide for detection of SNP TSC0037944
cccttacatctat

SEQ ID NO: 150379 - DNA, 13 bp, Artificial Sequence
  Oligonucleotide for detection of SNP TSC0037944
atagacgtaaggg

SEQ ID NO: 150380 - DNA, 13 bp, Artificial Sequence
  Oligonucleotide for detection of SNP TSC0037944
cccttacgtctat

SEQ ID NO: 150381 - DNA, 13 bp, Artificial Sequence
  Oligonucleotide for detection of SNP TSC0037944
tttttacgtttgt

SEQ ID NO: 150382 - DNA, 13 bp, Artificial Sequence
  Oligonucleotide for detection of SNP TSC0037944
acaaacgtaaaaa

SEQ ID NO: 150383 - DNA, 13 bp, Artificial Sequence
  Oligonucleotide for detection of SNP TSC0037948
ttaaggatattta

SEQ ID NO: 150384 - DNA, 13 bp, Artificial Sequence
  Oligonucleotide for detection of SNP TSC0037948
taaatatccttaa

SEQ ID NO: 150385 - DNA, 13 bp, Artificial Sequence
  Oligonucleotide for detection of SNP TSC0037948
ttaagggtattta

SEQ ID NO: 150386 - DNA, 13 bp, Artificial Sequence
  Oligonucleotide for detection of SNP TSC0037948
taaatacccttaa

SEQ ID NO: 150387 - DNA, 13 bp, Artificial Sequence
  Oligonucleotide for detection of SNP TSC0037951
atgtagattttga

SEQ ID NO: 150388 - DNA, 13 bp, Artificial Sequence
  Oligonucleotide for detection of SNP TSC0037951
tcaaaatctacat

SEQ ID NO: 150389 - DNA, 13 bp, Artificial Sequence
  Oligonucleotide for detection of SNP TSC0037951
atgtaggttttga

SEQ ID NO: 150390 - DNA, 13 bp, Artificial Sequence
  Oligonucleotide for detection of SNP TSC0037951
tcaaaacctacat

SEQ ID NO: 150391 - DNA, 13 bp, Artificial Sequence
  Oligonucleotide for detection of SNP TSC0037952
tttaagaattgtt

SEQ ID NO: 150392 - DNA, 13 bp, Artificial Sequence
  Oligonucleotide for detection of SNP TSC0037952
aacaattcttaaa

SEQ ID NO: 150393 - DNA, 13 bp, Artificial Sequence
  Oligonucleotide for detection of SNP TSC0037952
tttaagtattgtt

SEQ ID NO: 150394 - DNA, 13 bp, Artificial Sequence
  Oligonucleotide for detection of SNP TSC0037952
aacaatacttaaa

SEQ ID NO: 150395 - DNA, 13 bp, Artificial Sequence
  Oligonucleotide for detection of SNP TSC0037952
aatagtttttgga

SEQ ID NO: 150396 - DNA, 13 bp, Artificial Sequence
  Oligonucleotide for detection of SNP TSC0037952
tccaaaaactatt

SEQ ID NO: 150397 - DNA, 13 bp, Artificial Sequence
  Oligonucleotide for detection of SNP TSC0037952
aatagtatttgga

SEQ ID NO: 150398 - DNA, 13 bp, Artificial Sequence
  Oligonucleotide for detection of SNP TSC0037952
tccaaatactatt

SEQ ID NO: 150399 - DNA, 13 bp, Artificial Sequence
  Oligonucleotide for detection of SNP TSC0037954
taaaaagttagty

SEQ ID NO: 150400 - DNA, 13 bp, Artificial Sequence
  Oligonucleotide for detection of SNP TSC0037954
ractaacttttta

SEQ ID NO: 150401 - DNA, 13 bp, Artificial Sequence
  Oligonucleotide for detection of SNP TSC0037956
atataaatttttt

SEQ ID NO: 150402 - DNA, 13 bp, Artificial Sequence
  Oligonucleotide for detection of SNP TSC0037956
aaaaaatttatat

SEQ ID NO: 150403 - DNA, 13 bp, Artificial Sequence
  Oligonucleotide for detection of SNP TSC0037956
atataattttttt

SEQ ID NO: 150404 - DNA, 13 bp, Artificial Sequence
  Oligonucleotide for detection of SNP TSC0037956
aaaaaaattatat

SEQ ID NO: 150405 - DNA, 13 bp, Artificial Sequence
  Oligonucleotide for detection of SNP TSC0037956
agaggatttgtgt

SEQ ID NO: 150406 - DNA, 13 bp, Artificial Sequence
  Oligonucleotide for detection of SNP TSC0037956
acacaaatcctct

SEQ ID NO: 150407 - DNA, 13 bp, Artificial Sequence
  Oligonucleotide for detection of SNP TSC0037956
agaggaattgtgt

SEQ ID NO: 150408 - DNA, 13 bp, Artificial Sequence
  Oligonucleotide for detection of SNP TSC0037956
acacaattcctct

SEQ ID NO: 150409 - DNA, 13 bp, Artificial Sequence
  Oligonucleotide for detection of SNP TSC0037958
tatattggtttga

SEQ ID NO: 150410 - DNA, 13 bp, Artificial Sequence
  Oligonucleotide for detection of SNP TSC0037958
tcaaaccaatata

SEQ ID NO: 150411 - DNA, 13 bp, Artificial Sequence
  Oligonucleotide for detection of SNP TSC0037958
tatatttgtttga

SEQ ID NO: 150412 - DNA, 13 bp, Artificial Sequence
  Oligonucleotide for detection of SNP TSC0037958
tcaaacaaatata

SEQ ID NO: 150413 - DNA, 13 bp, Artificial Sequence
  Oligonucleotide for detection of SNP TSC0037958
ttagattagtgta

SEQ ID NO: 150414 - DNA, 13 bp, Artificial Sequence
  Oligonucleotide for detection of SNP TSC0037958
tacactaatctaa

SEQ ID NO: 150415 - DNA, 13 bp, Artificial Sequence
  Oligonucleotide for detection of SNP TSC0037958
ttagataagtgta

SEQ ID NO: 150416 - DNA, 13 bp, Artificial Sequence
  Oligonucleotide for detection of SNP TSC0037958
tacacttatctaa

SEQ ID NO: 150417 - DNA, 13 bp, Artificial Sequence
  Oligonucleotide for detection of SNP TSC0037959
aaagttatgaggt

SEQ ID NO: 150418 - DNA, 13 bp, Artificial Sequence
  Oligonucleotide for detection of SNP TSC0037959
acctcataacttt

SEQ ID NO: 150419 - DNA, 13 bp, Artificial Sequence
  Oligonucleotide for detection of SNP TSC0037959
aaagttgtgaggt

SEQ ID NO: 150420 - DNA, 13 bp, Artificial Sequence
  Oligonucleotide for detection of SNP TSC0037959
acctcacaacttt

SEQ ID NO: 150421 - DNA, 13 bp, Artificial Sequence
  Oligonucleotide for detection of SNP TSC0037960
tatatataaaata

SEQ ID NO: 150422 - DNA, 13 bp, Artificial Sequence
  Oligonucleotide for detection of SNP TSC0037960
tattttatatata

SEQ ID NO: 150423 - DNA, 13 bp, Artificial Sequence
  Oligonucleotide for detection of SNP TSC0037960
tatataaaaaata

SEQ ID NO: 150424 - DNA, 13 bp, Artificial Sequence
  Oligonucleotide for detection of SNP TSC0037960
tattttttatata

SEQ ID NO: 150425 - DNA, 13 bp, Artificial Sequence
  Oligonucleotide for detection of SNP TSC0037962
gaatatagataaa

SEQ ID NO: 150426 - DNA, 13 bp, Artificial Sequence
  Oligonucleotide for detection of SNP TSC0037962
tttatctatattc

SEQ ID NO: 150427 - DNA, 13 bp, Artificial Sequence
  Oligonucleotide for detection of SNP TSC0037962
gaatatggataaa

SEQ ID NO: 150428 - DNA, 13 bp, Artificial Sequence
  Oligonucleotide for detection of SNP TSC0037962
tttatccatattc

SEQ ID NO: 150429 - DNA, 13 bp, Artificial Sequence
  Oligonucleotide for detection of SNP TSC0037962
gaatacggataaa

SEQ ID NO: 150430 - DNA, 13 bp, Artificial Sequence
  Oligonucleotide for detection of SNP TSC0037962
tttatccgtattc

SEQ ID NO: 150431 - DNA, 13 bp, Artificial Sequence
  Oligonucleotide for detection of SNP TSC0037962
tttatttgtgtty

SEQ ID NO: 150432 - DNA, 13 bp, Artificial Sequence
  Oligonucleotide for detection of SNP TSC0037962
raacacaaataaa

SEQ ID NO: 150433 - DNA, 13 bp, Artificial Sequence
  Oligonucleotide for detection of SNP TSC0037962
tttattcgtgtty

SEQ ID NO: 150434 - DNA, 13 bp, Artificial Sequence
  Oligonucleotide for detection of SNP TSC0037962
raacacgaataaa

SEQ ID NO: 150435 - DNA, 13 bp, Artificial Sequence
  Oligonucleotide for detection of SNP TSC0037965
taatttgttatgt

SEQ ID NO: 150436 - DNA, 13 bp, Artificial Sequence
  Oligonucleotide for detection of SNP TSC0037965
acataacaaatta

SEQ ID NO: 150437 - DNA, 13 bp, Artificial Sequence
  Oligonucleotide for detection of SNP TSC0037965
taatttattacgt

SEQ ID NO: 150438 - DNA, 13 bp, Artificial Sequence
  Oligonucleotide for detection of SNP TSC0037965
acgtaataaatta

SEQ ID NO: 150439 - DNA, 13 bp, Artificial Sequence
  Oligonucleotide for detection of SNP TSC0037965
taattcgttatgt

SEQ ID NO: 150440 - DNA, 13 bp, Artificial Sequence
  Oligonucleotide for detection of SNP TSC0037965
acataacgaatta

SEQ ID NO: 150441 - DNA, 13 bp, Artificial Sequence
  Oligonucleotide for detection of SNP TSC0037965
taatttgttacgt

SEQ ID NO: 150442 - DNA, 13 bp, Artificial Sequence
  Oligonucleotide for detection of SNP TSC0037965
acgtaacaaatta

SEQ ID NO: 150443 - DNA, 13 bp, Artificial Sequence
  Oligonucleotide for detection of SNP TSC0037965
taattcgttacgt

SEQ ID NO: 150444 - DNA, 13 bp, Artificial Sequence
  Oligonucleotide for detection of SNP TSC0037965
acgtaacgaatta

SEQ ID NO: 150445 - DNA, 13 bp, Artificial Sequence
  Oligonucleotide for detection of SNP TSC0037965
atgtagtgaatta

SEQ ID NO: 150446 - DNA, 13 bp, Artificial Sequence
  Oligonucleotide for detection of SNP TSC0037965
taattcactacat

SEQ ID NO: 150447 - DNA, 13 bp, Artificial Sequence
  Oligonucleotide for detection of SNP TSC0037965
acgtagtgaatta

SEQ ID NO: 150448 - DNA, 13 bp, Artificial Sequence
  Oligonucleotide for detection of SNP TSC0037965
taattcactacgt

SEQ ID NO: 150449 - DNA, 13 bp, Artificial Sequence
  Oligonucleotide for detection of SNP TSC0037965
atgtagcgaatta

SEQ ID NO: 150450 - DNA, 13 bp, Artificial Sequence
  Oligonucleotide for detection of SNP TSC0037965
taattcgctacat

SEQ ID NO: 150451 - DNA, 13 bp, Artificial Sequence
  Oligonucleotide for detection of SNP TSC0037965
acgtagcgaatta

SEQ ID NO: 150452 - DNA, 13 bp, Artificial Sequence
  Oligonucleotide for detection of SNP TSC0037965
taattcgctacgt

SEQ ID NO: 150453 - DNA, 13 bp, Artificial Sequence
  Oligonucleotide for detection of SNP TSC0037966
tgtgtagtggaay

SEQ ID NO: 150454 - DNA, 13 bp, Artificial Sequence
  Oligonucleotide for detection of SNP TSC0037966
rttccactacaca

SEQ ID NO: 150455 - DNA, 13 bp, Artificial Sequence
  Oligonucleotide for detection of SNP TSC0037966
tgtgtattggaay

SEQ ID NO: 150456 - DNA, 13 bp, Artificial Sequence
  Oligonucleotide for detection of SNP TSC0037966
rttccaatacaca

SEQ ID NO: 150457 - DNA, 13 bp, Artificial Sequence
  Oligonucleotide for detection of SNP TSC0037966
gttttattgtata

SEQ ID NO: 150458 - DNA, 13 bp, Artificial Sequence
  Oligonucleotide for detection of SNP TSC0037966
tatacaataaaac

SEQ ID NO: 150459 - DNA, 13 bp, Artificial Sequence
  Oligonucleotide for detection of SNP TSC0037967
tggtagaggtatg

SEQ ID NO: 150460 - DNA, 13 bp, Artificial Sequence
  Oligonucleotide for detection of SNP TSC0037967
catacctctacca

SEQ ID NO: 150461 - DNA, 13 bp, Artificial Sequence
  Oligonucleotide for detection of SNP TSC0037967
tggtagtggtatg

SEQ ID NO: 150462 - DNA, 13 bp, Artificial Sequence
  Oligonucleotide for detection of SNP TSC0037967
cataccactacca

SEQ ID NO: 150463 - DNA, 13 bp, Artificial Sequence
  Oligonucleotide for detection of SNP TSC0037970
gtattagagatty

SEQ ID NO: 150464 - DNA, 13 bp, Artificial Sequence
  Oligonucleotide for detection of SNP TSC0037970
raatctctaatac

SEQ ID NO: 150465 - DNA, 13 bp, Artificial Sequence
  Oligonucleotide for detection of SNP TSC0037970
gtattaaagatty

SEQ ID NO: 150466 - DNA, 13 bp, Artificial Sequence
  Oligonucleotide for detection of SNP TSC0037970
raatctttaatac

SEQ ID NO: 150467 - DNA, 13 bp, Artificial Sequence
  Oligonucleotide for detection of SNP TSC0037971
attgaggttatgy

SEQ ID NO: 150468 - DNA, 13 bp, Artificial Sequence
  Oligonucleotide for detection of SNP TSC0037971
rcataacctcaat

SEQ ID NO: 150469 - DNA, 13 bp, Artificial Sequence
  Oligonucleotide for detection of SNP TSC0037971
attgagattatgy

SEQ ID NO: 150470 - DNA, 13 bp, Artificial Sequence
  Oligonucleotide for detection of SNP TSC0037971
rcataatctcaat

SEQ ID NO: 150471 - DNA, 13 bp, Artificial Sequence
  Oligonucleotide for detection of SNP TSC0037971
atcgaggttatgy

SEQ ID NO: 150472 - DNA, 13 bp, Artificial Sequence
  Oligonucleotide for detection of SNP TSC0037971
rcataacctcgat

SEQ ID NO: 150473 - DNA, 13 bp, Artificial Sequence
  Oligonucleotide for detection of SNP TSC0037971
atcgagattatgy

SEQ ID NO: 150474 - DNA, 13 bp, Artificial Sequence
  Oligonucleotide for detection of SNP TSC0037971
rcataatctcgat

SEQ ID NO: 150475 - DNA, 13 bp, Artificial Sequence
  Oligonucleotide for detection of SNP TSC0037971
attgaggttacgy

SEQ ID NO: 150476 - DNA, 13 bp, Artificial Sequence
  Oligonucleotide for detection of SNP TSC0037971
rcgtaacctcaat

SEQ ID NO: 150477 - DNA, 13 bp, Artificial Sequence
  Oligonucleotide for detection of SNP TSC0037971
attgagattacgy

SEQ ID NO: 150478 - DNA, 13 bp, Artificial Sequence
  Oligonucleotide for detection of SNP TSC0037971
rcgtaatctcaat

SEQ ID NO: 150479 - DNA, 13 bp, Artificial Sequence
  Oligonucleotide for detection of SNP TSC0037971
atcgaggttacgy

SEQ ID NO: 150480 - DNA, 13 bp, Artificial Sequence
  Oligonucleotide for detection of SNP TSC0037971
rcgtaacctcgat

SEQ ID NO: 150481 - DNA, 13 bp, Artificial Sequence
  Oligonucleotide for detection of SNP TSC0037971
atcgagattacgy

SEQ ID NO: 150482 - DNA, 13 bp, Artificial Sequence
  Oligonucleotide for detection of SNP TSC0037971
rcgtaatctcgat

SEQ ID NO: 150483 - DNA, 13 bp, Artificial Sequence
  Oligonucleotide for detection of SNP TSC0037972
tttttgatataaa

SEQ ID NO: 150484 - DNA, 13 bp, Artificial Sequence
  Oligonucleotide for detection of SNP TSC0037972
tttatatcaaaaa

SEQ ID NO: 150485 - DNA, 13 bp, Artificial Sequence
  Oligonucleotide for detection of SNP TSC0037972
tttttggtataaa

SEQ ID NO: 150486 - DNA, 13 bp, Artificial Sequence
  Oligonucleotide for detection of SNP TSC0037972
tttataccaaaaa

SEQ ID NO: 150487 - DNA, 13 bp, Artificial Sequence
  Oligonucleotide for detection of SNP TSC0037973
gttagagatgtay

SEQ ID NO: 150488 - DNA, 13 bp, Artificial Sequence
  Oligonucleotide for detection of SNP TSC0037973
rtacatctctaac

SEQ ID NO: 150489 - DNA, 13 bp, Artificial Sequence
  Oligonucleotide for detection of SNP TSC0037973
gttagaaatgtay

SEQ ID NO: 150490 - DNA, 13 bp, Artificial Sequence
  Oligonucleotide for detection of SNP TSC0037973
rtacatttctaac

SEQ ID NO: 150491 - DNA, 13 bp, Artificial Sequence
  Oligonucleotide for detection of SNP TSC0037975
agttagagtagtt

SEQ ID NO: 150492 - DNA, 13 bp, Artificial Sequence
  Oligonucleotide for detection of SNP TSC0037975
aactactctaact

SEQ ID NO: 150493 - DNA, 13 bp, Artificial Sequence
  Oligonucleotide for detection of SNP TSC0037975
agttagtgtagtt

SEQ ID NO: 150494 - DNA, 13 bp, Artificial Sequence
  Oligonucleotide for detection of SNP TSC0037975
aactacactaact

SEQ ID NO: 150495 - DNA, 13 bp, Artificial Sequence
  Oligonucleotide for detection of SNP TSC0037975
aattgttttagtt

SEQ ID NO: 150496 - DNA, 13 bp, Artificial Sequence
  Oligonucleotide for detection of SNP TSC0037975
aactaaaacaatt

SEQ ID NO: 150497 - DNA, 13 bp, Artificial Sequence
  Oligonucleotide for detection of SNP TSC0037975
aattgtattagtt

SEQ ID NO: 150498 - DNA, 13 bp, Artificial Sequence
  Oligonucleotide for detection of SNP TSC0037975
aactaatacaatt

SEQ ID NO: 150499 - DNA, 13 bp, Artificial Sequence
  Oligonucleotide for detection of SNP TSC0037979
tgtatagaagttg

SEQ ID NO: 150500 - DNA, 13 bp, Artificial Sequence
  Oligonucleotide for detection of SNP TSC0037979
caacttctataca

SEQ ID NO: 150501 - DNA, 13 bp, Artificial Sequence
  Oligonucleotide for detection of SNP TSC0037979
tgtataaaagttg

SEQ ID NO: 150502 - DNA, 13 bp, Artificial Sequence
  Oligonucleotide for detection of SNP TSC0037979
caacttttataca

SEQ ID NO: 150503 - DNA, 13 bp, Artificial Sequence
  Oligonucleotide for detection of SNP TSC0037980
tgttttagcgtty

SEQ ID NO: 150504 - DNA, 13 bp, Artificial Sequence
  Oligonucleotide for detection of SNP TSC0037980
raacgctaaaaca

SEQ ID NO: 150505 - DNA, 13 bp, Artificial Sequence
  Oligonucleotide for detection of SNP TSC0037980
tgttttggcgtty

SEQ ID NO: 150506 - DNA, 13 bp, Artificial Sequence
  Oligonucleotide for detection of SNP TSC0037980
raacgccaaaaca

SEQ ID NO: 150507 - DNA, 13 bp, Artificial Sequence
  Oligonucleotide for detection of SNP TSC0037980
tgtttcggcgtty

SEQ ID NO: 150508 - DNA, 13 bp, Artificial Sequence
  Oligonucleotide for detection of SNP TSC0037980
raacgccgaaaca

SEQ ID NO: 150509 - DNA, 13 bp, Artificial Sequence
  Oligonucleotide for detection of SNP TSC0037980
gagtgttggaata

SEQ ID NO: 150510 - DNA, 13 bp, Artificial Sequence
  Oligonucleotide for detection of SNP TSC0037980
tattccaacactc

SEQ ID NO: 150511 - DNA, 13 bp, Artificial Sequence
  Oligonucleotide for detection of SNP TSC0037980
gagcgttggaata

SEQ ID NO: 150512 - DNA, 13 bp, Artificial Sequence
  Oligonucleotide for detection of SNP TSC0037980
tattccaacgctc

SEQ ID NO: 150513 - DNA, 13 bp, Artificial Sequence
  Oligonucleotide for detection of SNP TSC0037980
gagtgtcggaata

SEQ ID NO: 150514 - DNA, 13 bp, Artificial Sequence
  Oligonucleotide for detection of SNP TSC0037980
tattccgacactc

SEQ ID NO: 150515 - DNA, 13 bp, Artificial Sequence
  Oligonucleotide for detection of SNP TSC0037980
gagcgtcggaata

SEQ ID NO: 150516 - DNA, 13 bp, Artificial Sequence
  Oligonucleotide for detection of SNP TSC0037980
tattccgacgctc

SEQ ID NO: 150517 - DNA, 13 bp, Artificial Sequence
  Oligonucleotide for detection of SNP TSC0037981
attttttgtagaa

SEQ ID NO: 150518 - DNA, 13 bp, Artificial Sequence
  Oligonucleotide for detection of SNP TSC0037981
ttctacaaaaaat

SEQ ID NO: 150519 - DNA, 13 bp, Artificial Sequence
  Oligonucleotide for detection of SNP TSC0037981
atttttcgtagaa

SEQ ID NO: 150520 - DNA, 13 bp, Artificial Sequence
  Oligonucleotide for detection of SNP TSC0037981
ttctacgaaaaat

SEQ ID NO: 150521 - DNA, 13 bp, Artificial Sequence
  Oligonucleotide for detection of SNP TSC0037981
ttttgtggaaagt

SEQ ID NO: 150522 - DNA, 13 bp, Artificial Sequence
  Oligonucleotide for detection of SNP TSC0037981
actttccacaaaa

SEQ ID NO: 150523 - DNA, 13 bp, Artificial Sequence
  Oligonucleotide for detection of SNP TSC0037981
ttttgtagaaagt

SEQ ID NO: 150524 - DNA, 13 bp, Artificial Sequence
  Oligonucleotide for detection of SNP TSC0037981
actttctacaaaa

SEQ ID NO: 150525 - DNA, 13 bp, Artificial Sequence
  Oligonucleotide for detection of SNP TSC0037981
ttttgcggaaagt

SEQ ID NO: 150526 - DNA, 13 bp, Artificial Sequence
  Oligonucleotide for detection of SNP TSC0037981
actttccgcaaaa

SEQ ID NO: 150527 - DNA, 13 bp, Artificial Sequence
  Oligonucleotide for detection of SNP TSC0037982
gttttaattttag

SEQ ID NO: 150528 - DNA, 13 bp, Artificial Sequence
  Oligonucleotide for detection of SNP TSC0037982
ctaaaattaaaac

SEQ ID NO: 150529 - DNA, 13 bp, Artificial Sequence
  Oligonucleotide for detection of SNP TSC0037982
gttttatttttag

SEQ ID NO: 150530 - DNA, 13 bp, Artificial Sequence
  Oligonucleotide for detection of SNP TSC0037982
ctaaaaataaaac

SEQ ID NO: 150531 - DNA, 13 bp, Artificial Sequence
  Oligonucleotide for detection of SNP TSC0037982
ttggaattaaagy

SEQ ID NO: 150532 - DNA, 13 bp, Artificial Sequence
  Oligonucleotide for detection of SNP TSC0037982
rctttaattccaa

SEQ ID NO: 150533 - DNA, 13 bp, Artificial Sequence
  Oligonucleotide for detection of SNP TSC0037982
ttggaaataaagy

SEQ ID NO: 150534 - DNA, 13 bp, Artificial Sequence
  Oligonucleotide for detection of SNP TSC0037982
rctttatttccaa

SEQ ID NO: 150535 - DNA, 13 bp, Artificial Sequence
  Oligonucleotide for detection of SNP TSC0037983
tttgattaggatt

SEQ ID NO: 150536 - DNA, 13 bp, Artificial Sequence
  Oligonucleotide for detection of SNP TSC0037983
aatcctaatcaaa

SEQ ID NO: 150537 - DNA, 13 bp, Artificial Sequence
  Oligonucleotide for detection of SNP TSC0037983
tttgatgaggatt

SEQ ID NO: 150538 - DNA, 13 bp, Artificial Sequence
  Oligonucleotide for detection of SNP TSC0037983
aatcctcatcaaa

SEQ ID NO: 150539 - DNA, 13 bp, Artificial Sequence
  Oligonucleotide for detection of SNP TSC0037983
aattttgattagg

SEQ ID NO: 150540 - DNA, 13 bp, Artificial Sequence
  Oligonucleotide for detection of SNP TSC0037983
cctaatcaaaatt

SEQ ID NO: 150541 - DNA, 13 bp, Artificial Sequence
  Oligonucleotide for detection of SNP TSC0037983
aatttttattagg

SEQ ID NO: 150542 - DNA, 13 bp, Artificial Sequence
  Oligonucleotide for detection of SNP TSC0037983
cctaataaaaatt

SEQ ID NO: 150543 - DNA, 13 bp, Artificial Sequence
  Oligonucleotide for detection of SNP TSC0037984
tattaaattttgt

SEQ ID NO: 150544 - DNA, 13 bp, Artificial Sequence
  Oligonucleotide for detection of SNP TSC0037984
acaaaatttaata

SEQ ID NO: 150545 - DNA, 13 bp, Artificial Sequence
  Oligonucleotide for detection of SNP TSC0037984
tattaagttttgt

SEQ ID NO: 150546 - DNA, 13 bp, Artificial Sequence
  Oligonucleotide for detection of SNP TSC0037984
acaaaacttaata

SEQ ID NO: 150547 - DNA, 13 bp, Artificial Sequence
  Oligonucleotide for detection of SNP TSC0037989
gttttttttgtgy

SEQ ID NO: 150548 - DNA, 13 bp, Artificial Sequence
  Oligonucleotide for detection of SNP TSC0037989
rcacaaaaaaaac

SEQ ID NO: 150549 - DNA, 13 bp, Artificial Sequence
  Oligonucleotide for detection of SNP TSC0037989
gtttttgttgtgy

SEQ ID NO: 150550 - DNA, 13 bp, Artificial Sequence
  Oligonucleotide for detection of SNP TSC0037989
rcacaacaaaaac

SEQ ID NO: 150551 - DNA, 13 bp, Artificial Sequence
  Oligonucleotide for detection of SNP TSC0037989
gtataggaaaagy

SEQ ID NO: 150552 - DNA, 13 bp, Artificial Sequence
  Oligonucleotide for detection of SNP TSC0037989
rcttttcctatac

SEQ ID NO: 150553 - DNA, 13 bp, Artificial Sequence
  Oligonucleotide for detection of SNP TSC0037989
gtatagtaaaagy

SEQ ID NO: 150554 - DNA, 13 bp, Artificial Sequence
  Oligonucleotide for detection of SNP TSC0037989
rcttttactatac

SEQ ID NO: 150555 - DNA, 13 bp, Artificial Sequence
  Oligonucleotide for detection of SNP TSC0037990
tttttggaataga

SEQ ID NO: 150556 - DNA, 13 bp, Artificial Sequence
  Oligonucleotide for detection of SNP TSC0037990
tctattccaaaaa

SEQ ID NO: 150557 - DNA, 13 bp, Artificial Sequence
  Oligonucleotide for detection of SNP TSC0037991
aaaagggtaatat

SEQ ID NO: 150558 - DNA, 13 bp, Artificial Sequence
  Oligonucleotide for detection of SNP TSC0037991
atattaccctttt

SEQ ID NO: 150559 - DNA, 13 bp, Artificial Sequence
  Oligonucleotide for detection of SNP TSC0037991
aaaaggataatat

SEQ ID NO: 150560 - DNA, 13 bp, Artificial Sequence
  Oligonucleotide for detection of SNP TSC0037991
atattatcctttt

SEQ ID NO: 150561 - DNA, 13 bp, Artificial Sequence
  Oligonucleotide for detection of SNP TSC0037993
gattgtaattaty

SEQ ID NO: 150562 - DNA, 13 bp, Artificial Sequence
  Oligonucleotide for detection of SNP TSC0037993
rataattacaatc

SEQ ID NO: 150563 - DNA, 13 bp, Artificial Sequence
  Oligonucleotide for detection of SNP TSC0037993
gattgttattaty

SEQ ID NO: 150564 - DNA, 13 bp, Artificial Sequence
  Oligonucleotide for detection of SNP TSC0037993
rataataacaatc

SEQ ID NO: 150565 - DNA, 13 bp, Artificial Sequence
  Oligonucleotide for detection of SNP TSC0037993
ggtgattatagty

SEQ ID NO: 150566 - DNA, 13 bp, Artificial Sequence
  Oligonucleotide for detection of SNP TSC0037993
ractataatcacc

SEQ ID NO: 150567 - DNA, 13 bp, Artificial Sequence
  Oligonucleotide for detection of SNP TSC0037993
ggtgatgatagty

SEQ ID NO: 150568 - DNA, 13 bp, Artificial Sequence
  Oligonucleotide for detection of SNP TSC0037993
ractatcatcacc

SEQ ID NO: 150569 - DNA, 13 bp, Artificial Sequence
  Oligonucleotide for detection of SNP TSC0037994
aaaagataaaaat

SEQ ID NO: 150570 - DNA, 13 bp, Artificial Sequence
  Oligonucleotide for detection of SNP TSC0037994
atttttatctttt

SEQ ID NO: 150571 - DNA, 13 bp, Artificial Sequence
  Oligonucleotide for detection of SNP TSC0037994
aaaagaaaaaaat

SEQ ID NO: 150572 - DNA, 13 bp, Artificial Sequence
  Oligonucleotide for detection of SNP TSC0037994
atttttttctttt

SEQ ID NO: 150573 - DNA, 13 bp, Artificial Sequence
  Oligonucleotide for detection of SNP TSC0037995
attggggttttty

SEQ ID NO: 150574 - DNA, 13 bp, Artificial Sequence
  Oligonucleotide for detection of SNP TSC0037995
raaaaaccccaat

SEQ ID NO: 150575 - DNA, 13 bp, Artificial Sequence
  Oligonucleotide for detection of SNP TSC0037995
attgggattttty

SEQ ID NO: 150576 - DNA, 13 bp, Artificial Sequence
  Oligonucleotide for detection of SNP TSC0037995
raaaaatcccaat

SEQ ID NO: 150577 - DNA, 13 bp, Artificial Sequence
  Oligonucleotide for detection of SNP TSC0037996
tttttcggggaag

SEQ ID NO: 150578 - DNA, 13 bp, Artificial Sequence
  Oligonucleotide for detection of SNP TSC0037996
cttccccgaaaaa

SEQ ID NO: 150579 - DNA, 13 bp, Artificial Sequence
  Oligonucleotide for detection of SNP TSC0037996
tttttttgaaaag

SEQ ID NO: 150580 - DNA, 13 bp, Artificial Sequence
  Oligonucleotide for detection of SNP TSC0037996
cttttcaaaaaaa

SEQ ID NO: 150581 - DNA, 13 bp, Artificial Sequence
  Oligonucleotide for detection of SNP TSC0037996
ttttttcgaaaag

SEQ ID NO: 150582 - DNA, 13 bp, Artificial Sequence
  Oligonucleotide for detection of SNP TSC0037996
cttttcgaaaaaa

SEQ ID NO: 150583 - DNA, 13 bp, Artificial Sequence
  Oligonucleotide for detection of SNP TSC0038000
gatattagggtta

SEQ ID NO: 150584 - DNA, 13 bp, Artificial Sequence
  Oligonucleotide for detection of SNP TSC0038000
taaccctaatatc

SEQ ID NO: 150585 - DNA, 13 bp, Artificial Sequence
  Oligonucleotide for detection of SNP TSC0038000
gatatttgggtta

SEQ ID NO: 150586 - DNA, 13 bp, Artificial Sequence
  Oligonucleotide for detection of SNP TSC0038000
taacccaaatatc

SEQ ID NO: 150587 - DNA, 13 bp, Artificial Sequence
  Oligonucleotide for detection of SNP TSC0038001
gttagtgagtatg

SEQ ID NO: 150588 - DNA, 13 bp, Artificial Sequence
  Oligonucleotide for detection of SNP TSC0038001
catactcactaac

SEQ ID NO: 150589 - DNA, 13 bp, Artificial Sequence
  Oligonucleotide for detection of SNP TSC0038001
gttagtaagtatg

SEQ ID NO: 150590 - DNA, 13 bp, Artificial Sequence
  Oligonucleotide for detection of SNP TSC0038001
catacttactaac

SEQ ID NO: 150591 - DNA, 13 bp, Artificial Sequence
  Oligonucleotide for detection of SNP TSC0038002
tggttagtgagta

SEQ ID NO: 150592 - DNA, 13 bp, Artificial Sequence
  Oligonucleotide for detection of SNP TSC0038002
tactcactaacca

SEQ ID NO: 150593 - DNA, 13 bp, Artificial Sequence
  Oligonucleotide for detection of SNP TSC0038002
tggttaatgagta

SEQ ID NO: 150594 - DNA, 13 bp, Artificial Sequence
  Oligonucleotide for detection of SNP TSC0038002
tactcattaacca

SEQ ID NO: 150595 - DNA, 13 bp, Artificial Sequence
  Oligonucleotide for detection of SNP TSC0038003
gtgtgaaaatatt

SEQ ID NO: 150596 - DNA, 13 bp, Artificial Sequence
  Oligonucleotide for detection of SNP TSC0038003
aatattttcacac

SEQ ID NO: 150597 - DNA, 13 bp, Artificial Sequence
  Oligonucleotide for detection of SNP TSC0038003
gtgtgataatatt

SEQ ID NO: 150598 - DNA, 13 bp, Artificial Sequence
  Oligonucleotide for detection of SNP TSC0038003
aatattatcacac

SEQ ID NO: 150599 - DNA, 13 bp, Artificial Sequence
  Oligonucleotide for detection of SNP TSC0038003
agtatttttatay

SEQ ID NO: 150600 - DNA, 13 bp, Artificial Sequence
  Oligonucleotide for detection of SNP TSC0038003
rtataaaaatact

SEQ ID NO: 150601 - DNA, 13 bp, Artificial Sequence
  Oligonucleotide for detection of SNP TSC0038003
agtattattatay

SEQ ID NO: 150602 - DNA, 13 bp, Artificial Sequence
  Oligonucleotide for detection of SNP TSC0038003
rtataataatact

SEQ ID NO: 150603 - DNA, 13 bp, Artificial Sequence
  Oligonucleotide for detection of SNP TSC0038004
tatattattggag

SEQ ID NO: 150604 - DNA, 13 bp, Artificial Sequence
  Oligonucleotide for detection of SNP TSC0038004
ctccaataatata

SEQ ID NO: 150605 - DNA, 13 bp, Artificial Sequence
  Oligonucleotide for detection of SNP TSC0038004
tatattgttggag

SEQ ID NO: 150606 - DNA, 13 bp, Artificial Sequence
  Oligonucleotide for detection of SNP TSC0038004
ctccaacaatata

SEQ ID NO: 150607 - DNA, 13 bp, Artificial Sequence
  Oligonucleotide for detection of SNP TSC0038004
tatatcgttggag

SEQ ID NO: 150608 - DNA, 13 bp, Artificial Sequence
  Oligonucleotide for detection of SNP TSC0038004
ctccaacgatata

SEQ ID NO: 150609 - DNA, 13 bp, Artificial Sequence
  Oligonucleotide for detection of SNP TSC0038004
ttttagtggtata

SEQ ID NO: 150610 - DNA, 13 bp, Artificial Sequence
  Oligonucleotide for detection of SNP TSC0038004
tataccactaaaa

SEQ ID NO: 150611 - DNA, 13 bp, Artificial Sequence
  Oligonucleotide for detection of SNP TSC0038004
ttttagcggtata

SEQ ID NO: 150612 - DNA, 13 bp, Artificial Sequence
  Oligonucleotide for detection of SNP TSC0038004
tataccgctaaaa

SEQ ID NO: 150613 - DNA, 13 bp, Artificial Sequence
  Oligonucleotide for detection of SNP TSC0038010
taagatattttta

SEQ ID NO: 150614 - DNA, 13 bp, Artificial Sequence
  Oligonucleotide for detection of SNP TSC0038010
taaaaatatctta

SEQ ID NO: 150615 - DNA, 13 bp, Artificial Sequence
  Oligonucleotide for detection of SNP TSC0038010
taagatgttttta

SEQ ID NO: 150616 - DNA, 13 bp, Artificial Sequence
  Oligonucleotide for detection of SNP TSC0038010
taaaaacatctta

SEQ ID NO: 150617 - DNA, 13 bp, Artificial Sequence
  Oligonucleotide for detection of SNP TSC0038010
taagacgttttta

SEQ ID NO: 150618 - DNA, 13 bp, Artificial Sequence
  Oligonucleotide for detection of SNP TSC0038010
taaaaacgtctta

SEQ ID NO: 150619 - DNA, 13 bp, Artificial Sequence
  Oligonucleotide for detection of SNP TSC0038010
tgaaaatgttttg

SEQ ID NO: 150620 - DNA, 13 bp, Artificial Sequence
  Oligonucleotide for detection of SNP TSC0038010
caaaacattttca

SEQ ID NO: 150621 - DNA, 13 bp, Artificial Sequence
  Oligonucleotide for detection of SNP TSC0038010
tgaaaacgttttg

SEQ ID NO: 150622 - DNA, 13 bp, Artificial Sequence
  Oligonucleotide for detection of SNP TSC0038010
caaaacgttttca

SEQ ID NO: 150623 - DNA, 13 bp, Artificial Sequence
  Oligonucleotide for detection of SNP TSC0038013
aaattgaaatgta

SEQ ID NO: 150624 - DNA, 13 bp, Artificial Sequence
  Oligonucleotide for detection of SNP TSC0038013
tacatttcaattt

SEQ ID NO: 150625 - DNA, 13 bp, Artificial Sequence
  Oligonucleotide for detection of SNP TSC0038013
aaattggaatgta

SEQ ID NO: 150626 - DNA, 13 bp, Artificial Sequence
  Oligonucleotide for detection of SNP TSC0038013
tacattccaattt

SEQ ID NO: 150627 - DNA, 13 bp, Artificial Sequence
  Oligonucleotide for detection of SNP TSC0038014
ttttatattaggt

SEQ ID NO: 150628 - DNA, 13 bp, Artificial Sequence
  Oligonucleotide for detection of SNP TSC0038014
acctaatataaaa

SEQ ID NO: 150629 - DNA, 13 bp, Artificial Sequence
  Oligonucleotide for detection of SNP TSC0038014
ttttatgttaggt

SEQ ID NO: 150630 - DNA, 13 bp, Artificial Sequence
  Oligonucleotide for detection of SNP TSC0038014
acctaacataaaa

SEQ ID NO: 150631 - DNA, 13 bp, Artificial Sequence
  Oligonucleotide for detection of SNP TSC0038014
ttttacgttaggt

SEQ ID NO: 150632 - DNA, 13 bp, Artificial Sequence
  Oligonucleotide for detection of SNP TSC0038014
acctaacgtaaaa

SEQ ID NO: 150633 - DNA, 13 bp, Artificial Sequence
  Oligonucleotide for detection of SNP TSC0038014
atttaatgtagaa

SEQ ID NO: 150634 - DNA, 13 bp, Artificial Sequence
  Oligonucleotide for detection of SNP TSC0038014
ttctacattaaat

SEQ ID NO: 150635 - DNA, 13 bp, Artificial Sequence
  Oligonucleotide for detection of SNP TSC0038014
atttaacgtagaa

SEQ ID NO: 150636 - DNA, 13 bp, Artificial Sequence
  Oligonucleotide for detection of SNP TSC0038014
ttctacgttaaat

SEQ ID NO: 150637 - DNA, 13 bp, Artificial Sequence
  Oligonucleotide for detection of SNP TSC0038015
gaattttttggta

SEQ ID NO: 150638 - DNA, 13 bp, Artificial Sequence
  Oligonucleotide for detection of SNP TSC0038015
taccaaaaaattc

SEQ ID NO: 150639 - DNA, 13 bp, Artificial Sequence
  Oligonucleotide for detection of SNP TSC0038015
gaatttgttggta

SEQ ID NO: 150640 - DNA, 13 bp, Artificial Sequence
  Oligonucleotide for detection of SNP TSC0038015
taccaacaaattc

SEQ ID NO: 150641 - DNA, 13 bp, Artificial Sequence
  Oligonucleotide for detection of SNP TSC0038015
tgttaggagatty

SEQ ID NO: 150642 - DNA, 13 bp, Artificial Sequence
  Oligonucleotide for detection of SNP TSC0038015
raatctcctaaca

SEQ ID NO: 150643 - DNA, 13 bp, Artificial Sequence
  Oligonucleotide for detection of SNP TSC0038015
tgttagtagatty

SEQ ID NO: 150644 - DNA, 13 bp, Artificial Sequence
  Oligonucleotide for detection of SNP TSC0038015
raatctactaaca

SEQ ID NO: 150645 - DNA, 13 bp, Artificial Sequence
  Oligonucleotide for detection of SNP TSC0038016
ttatttgtgtaat

SEQ ID NO: 150646 - DNA, 13 bp, Artificial Sequence
  Oligonucleotide for detection of SNP TSC0038016
attacacaaataa

SEQ ID NO: 150647 - DNA, 13 bp, Artificial Sequence
  Oligonucleotide for detection of SNP TSC0038016
ttatttttgtaat

SEQ ID NO: 150648 - DNA, 13 bp, Artificial Sequence
  Oligonucleotide for detection of SNP TSC0038016
attacaaaaataa

SEQ ID NO: 150649 - DNA, 13 bp, Artificial Sequence
  Oligonucleotide for detection of SNP TSC0038016
attatatagatga

SEQ ID NO: 150650 - DNA, 13 bp, Artificial Sequence
  Oligonucleotide for detection of SNP TSC0038016
tcatctatataat

SEQ ID NO: 150651 - DNA, 13 bp, Artificial Sequence
  Oligonucleotide for detection of SNP TSC0038016
attataaagatga

SEQ ID NO: 150652 - DNA, 13 bp, Artificial Sequence
  Oligonucleotide for detection of SNP TSC0038016
tcatctttataat

SEQ ID NO: 150653 - DNA, 13 bp, Artificial Sequence
  Oligonucleotide for detection of SNP TSC0038017
attagagtttaty

SEQ ID NO: 150654 - DNA, 13 bp, Artificial Sequence
  Oligonucleotide for detection of SNP TSC0038017
rataaactctaat

SEQ ID NO: 150655 - DNA, 13 bp, Artificial Sequence
  Oligonucleotide for detection of SNP TSC0038017
attagattttaty

SEQ ID NO: 150656 - DNA, 13 bp, Artificial Sequence
  Oligonucleotide for detection of SNP TSC0038017
rataaaatctaat

SEQ ID NO: 150657 - DNA, 13 bp, Artificial Sequence
  Oligonucleotide for detection of SNP TSC0038017
ggtgggttttaat

SEQ ID NO: 150658 - DNA, 13 bp, Artificial Sequence
  Oligonucleotide for detection of SNP TSC0038017
attaaaacccacc

SEQ ID NO: 150659 - DNA, 13 bp, Artificial Sequence
  Oligonucleotide for detection of SNP TSC0038017
ggtgggatttaat

SEQ ID NO: 150660 - DNA, 13 bp, Artificial Sequence
  Oligonucleotide for detection of SNP TSC0038017
attaaatcccacc

SEQ ID NO: 150661 - DNA, 13 bp, Artificial Sequence
  Oligonucleotide for detection of SNP TSC0038019
agtatttggtttt

SEQ ID NO: 150662 - DNA, 13 bp, Artificial Sequence
  Oligonucleotide for detection of SNP TSC0038019
aaaaccaaatact

SEQ ID NO: 150663 - DNA, 13 bp, Artificial Sequence
  Oligonucleotide for detection of SNP TSC0038019
agtattcggtttt

SEQ ID NO: 150664 - DNA, 13 bp, Artificial Sequence
  Oligonucleotide for detection of SNP TSC0038019
aaaaccgaatact

SEQ ID NO: 150665 - DNA, 13 bp, Artificial Sequence
  Oligonucleotide for detection of SNP TSC0038019
aggattgggtgtt

SEQ ID NO: 150666 - DNA, 13 bp, Artificial Sequence
  Oligonucleotide for detection of SNP TSC0038019
aacacccaatcct

SEQ ID NO: 150667 - DNA, 13 bp, Artificial Sequence
  Oligonucleotide for detection of SNP TSC0038019
aggattaggtgtt

SEQ ID NO: 150668 - DNA, 13 bp, Artificial Sequence
  Oligonucleotide for detection of SNP TSC0038019
aacacctaatcct

SEQ ID NO: 150669 - DNA, 13 bp, Artificial Sequence
  Oligonucleotide for detection of SNP TSC0038019
aggatcgggtgtt

SEQ ID NO: 150670 - DNA, 13 bp, Artificial Sequence
  Oligonucleotide for detection of SNP TSC0038019
aacacccgatcct

SEQ ID NO: 150671 - DNA, 13 bp, Artificial Sequence
  Oligonucleotide for detection of SNP TSC0038020
agtaaaggtgggy

SEQ ID NO: 150672 - DNA, 13 bp, Artificial Sequence
  Oligonucleotide for detection of SNP TSC0038020
rcccacctttact

SEQ ID NO: 150673 - DNA, 13 bp, Artificial Sequence
  Oligonucleotide for detection of SNP TSC0038020
agtaaatgtgggy

SEQ ID NO: 150674 - DNA, 13 bp, Artificial Sequence
  Oligonucleotide for detection of SNP TSC0038020
rcccacatttact

SEQ ID NO: 150675 - DNA, 13 bp, Artificial Sequence
  Oligonucleotide for detection of SNP TSC0038020
gtttatttttgtt

SEQ ID NO: 150676 - DNA, 13 bp, Artificial Sequence
  Oligonucleotide for detection of SNP TSC0038020
aacaaaaataaac

SEQ ID NO: 150677 - DNA, 13 bp, Artificial Sequence
  Oligonucleotide for detection of SNP TSC0038021
gtttataatttcg

SEQ ID NO: 150678 - DNA, 13 bp, Artificial Sequence
  Oligonucleotide for detection of SNP TSC0038021
cgaaattataaac

SEQ ID NO: 150679 - DNA, 13 bp, Artificial Sequence
  Oligonucleotide for detection of SNP TSC0038021
gtttatgatttcg

SEQ ID NO: 150680 - DNA, 13 bp, Artificial Sequence
  Oligonucleotide for detection of SNP TSC0038021
cgaaatcataaac

SEQ ID NO: 150681 - DNA, 13 bp, Artificial Sequence
  Oligonucleotide for detection of SNP TSC0038022
gttgatatttata

SEQ ID NO: 150682 - DNA, 13 bp, Artificial Sequence
  Oligonucleotide for detection of SNP TSC0038022
tataaatatcaac

SEQ ID NO: 150683 - DNA, 13 bp, Artificial Sequence
  Oligonucleotide for detection of SNP TSC0038022
gttgatttttata

SEQ ID NO: 150684 - DNA, 13 bp, Artificial Sequence
  Oligonucleotide for detection of SNP TSC0038022
tataaaaatcaac

SEQ ID NO: 150685 - DNA, 13 bp, Artificial Sequence
  Oligonucleotide for detection of SNP TSC0038022
tataaatgttaay

SEQ ID NO: 150686 - DNA, 13 bp, Artificial Sequence
  Oligonucleotide for detection of SNP TSC0038022
rttaacatttata

SEQ ID NO: 150687 - DNA, 13 bp, Artificial Sequence
  Oligonucleotide for detection of SNP TSC0038022
tataaaggttaay

SEQ ID NO: 150688 - DNA, 13 bp, Artificial Sequence
  Oligonucleotide for detection of SNP TSC0038022
rttaacctttata

SEQ ID NO: 150689 - DNA, 13 bp, Artificial Sequence
  Oligonucleotide for detection of SNP TSC0038023
attattaggagga

SEQ ID NO: 150690 - DNA, 13 bp, Artificial Sequence
  Oligonucleotide for detection of SNP TSC0038023
tcctcctaataat

SEQ ID NO: 150691 - DNA, 13 bp, Artificial Sequence
  Oligonucleotide for detection of SNP TSC0038023
attattgggagga

SEQ ID NO: 150692 - DNA, 13 bp, Artificial Sequence
  Oligonucleotide for detection of SNP TSC0038023
tcctcccaataat

SEQ ID NO: 150693 - DNA, 13 bp, Artificial Sequence
  Oligonucleotide for detection of SNP TSC0038026
gtgtatatgtgtg

SEQ ID NO: 150694 - DNA, 13 bp, Artificial Sequence
  Oligonucleotide for detection of SNP TSC0038026
cacacatatacac

SEQ ID NO: 150695 - DNA, 13 bp, Artificial Sequence
  Oligonucleotide for detection of SNP TSC0038026
gtgtatgtgtgtg

SEQ ID NO: 150696 - DNA, 13 bp, Artificial Sequence
  Oligonucleotide for detection of SNP TSC0038026
cacacacatacac

SEQ ID NO: 150697 - DNA, 13 bp, Artificial Sequence
  Oligonucleotide for detection of SNP TSC0038027
agtttttgaggga

SEQ ID NO: 150698 - DNA, 13 bp, Artificial Sequence
  Oligonucleotide for detection of SNP TSC0038027
tccctcaaaaact

SEQ ID NO: 150699 - DNA, 13 bp, Artificial Sequence
  Oligonucleotide for detection of SNP TSC0038027
agttttcgaggga

SEQ ID NO: 150700 - DNA, 13 bp, Artificial Sequence
  Oligonucleotide for detection of SNP TSC0038027
tccctcgaaaact

SEQ ID NO: 150701 - DNA, 13 bp, Artificial Sequence
  Oligonucleotide for detection of SNP TSC0038027
tttttcggaagtt

SEQ ID NO: 150702 - DNA, 13 bp, Artificial Sequence
  Oligonucleotide for detection of SNP TSC0038027
aacttccgaaaaa

SEQ ID NO: 150703 - DNA, 13 bp, Artificial Sequence
  Oligonucleotide for detection of SNP TSC0038028
gataaagtttaty

SEQ ID NO: 150704 - DNA, 13 bp, Artificial Sequence
  Oligonucleotide for detection of SNP TSC0038028
rataaactttatc

SEQ ID NO: 150705 - DNA, 13 bp, Artificial Sequence
  Oligonucleotide for detection of SNP TSC0038028
gataaaatttaty

SEQ ID NO: 150706 - DNA, 13 bp, Artificial Sequence
  Oligonucleotide for detection of SNP TSC0038028
rataaattttatc

SEQ ID NO: 150707 - DNA, 13 bp, Artificial Sequence
  Oligonucleotide for detection of SNP TSC0038029
agagtatatgtat

SEQ ID NO: 150708 - DNA, 13 bp, Artificial Sequence
  Oligonucleotide for detection of SNP TSC0038029
atacatatactct

SEQ ID NO: 150709 - DNA, 13 bp, Artificial Sequence
  Oligonucleotide for detection of SNP TSC0038029
agagtagatgtat

SEQ ID NO: 150710 - DNA, 13 bp, Artificial Sequence
  Oligonucleotide for detection of SNP TSC0038029
atacatctactct

SEQ ID NO: 150711 - DNA, 13 bp, Artificial Sequence
  Oligonucleotide for detection of SNP TSC0038029
atgtatttatttt

SEQ ID NO: 150712 - DNA, 13 bp, Artificial Sequence
  Oligonucleotide for detection of SNP TSC0038029
aaaataaatacat

SEQ ID NO: 150713 - DNA, 13 bp, Artificial Sequence
  Oligonucleotide for detection of SNP TSC0038030
taatttattttag

SEQ ID NO: 150714 - DNA, 13 bp, Artificial Sequence
  Oligonucleotide for detection of SNP TSC0038030
ctaaaataaatta

SEQ ID NO: 150715 - DNA, 13 bp, Artificial Sequence
  Oligonucleotide for detection of SNP TSC0038030
taattttttttag

SEQ ID NO: 150716 - DNA, 13 bp, Artificial Sequence
  Oligonucleotide for detection of SNP TSC0038030
ctaaaaaaaatta

SEQ ID NO: 150717 - DNA, 13 bp, Artificial Sequence
  Oligonucleotide for detection of SNP TSC0038030
ttggaatagatta

SEQ ID NO: 150718 - DNA, 13 bp, Artificial Sequence
  Oligonucleotide for detection of SNP TSC0038030
taatctattccaa

SEQ ID NO: 150719 - DNA, 13 bp, Artificial Sequence
  Oligonucleotide for detection of SNP TSC0038030
ttggaagagatta

SEQ ID NO: 150720 - DNA, 13 bp, Artificial Sequence
  Oligonucleotide for detection of SNP TSC0038030
taatctcttccaa

SEQ ID NO: 150721 - DNA, 13 bp, Artificial Sequence
  Oligonucleotide for detection of SNP TSC0038031
taatggaatgtty

SEQ ID NO: 150722 - DNA, 13 bp, Artificial Sequence
  Oligonucleotide for detection of SNP TSC0038031
raacattccatta

SEQ ID NO: 150723 - DNA, 13 bp, Artificial Sequence
  Oligonucleotide for detection of SNP TSC0038031
taatgggatgtty

SEQ ID NO: 150724 - DNA, 13 bp, Artificial Sequence
  Oligonucleotide for detection of SNP TSC0038031
raacatcccatta

SEQ ID NO: 150725 - DNA, 13 bp, Artificial Sequence
  Oligonucleotide for detection of SNP TSC0038031
taatggaacgtty

SEQ ID NO: 150726 - DNA, 13 bp, Artificial Sequence
  Oligonucleotide for detection of SNP TSC0038031
raacgttccatta

SEQ ID NO: 150727 - DNA, 13 bp, Artificial Sequence
  Oligonucleotide for detection of SNP TSC0038031
taatgggacgtty

SEQ ID NO: 150728 - DNA, 13 bp, Artificial Sequence
  Oligonucleotide for detection of SNP TSC0038031
raacgtcccatta

SEQ ID NO: 150729 - DNA, 13 bp, Artificial Sequence
  Oligonucleotide for detection of SNP TSC0038032
gttaatatattta

SEQ ID NO: 150730 - DNA, 13 bp, Artificial Sequence
  Oligonucleotide for detection of SNP TSC0038032
taaatatattaac

SEQ ID NO: 150731 - DNA, 13 bp, Artificial Sequence
  Oligonucleotide for detection of SNP TSC0038032
gttaatgtattta

SEQ ID NO: 150732 - DNA, 13 bp, Artificial Sequence
  Oligonucleotide for detection of SNP TSC0038032
taaatacattaac

SEQ ID NO: 150733 - DNA, 13 bp, Artificial Sequence
  Oligonucleotide for detection of SNP TSC0038033
attaaaagtatat

SEQ ID NO: 150734 - DNA, 13 bp, Artificial Sequence
  Oligonucleotide for detection of SNP TSC0038033
atatacttttaat

SEQ ID NO: 150735 - DNA, 13 bp, Artificial Sequence
  Oligonucleotide for detection of SNP TSC0038033
attaaatgtatat

SEQ ID NO: 150736 - DNA, 13 bp, Artificial Sequence
  Oligonucleotide for detection of SNP TSC0038033
atatacatttaat

SEQ ID NO: 150737 - DNA, 13 bp, Artificial Sequence
  Oligonucleotide for detection of SNP TSC0038033
atgtatttttaat

SEQ ID NO: 150738 - DNA, 13 bp, Artificial Sequence
  Oligonucleotide for detection of SNP TSC0038033
attaaaaatacat

SEQ ID NO: 150739 - DNA, 13 bp, Artificial Sequence
  Oligonucleotide for detection of SNP TSC0038033
atgtatatttaat

SEQ ID NO: 150740 - DNA, 13 bp, Artificial Sequence
  Oligonucleotide for detection of SNP TSC0038033
attaaatatacat

SEQ ID NO: 150741 - DNA, 13 bp, Artificial Sequence
  Oligonucleotide for detection of SNP TSC0038040
atatattgtaatt

SEQ ID NO: 150742 - DNA, 13 bp, Artificial Sequence
  Oligonucleotide for detection of SNP TSC0038040
aattacaatatat

SEQ ID NO: 150743 - DNA, 13 bp, Artificial Sequence
  Oligonucleotide for detection of SNP TSC0038040
atatatcgtaatt

SEQ ID NO: 150744 - DNA, 13 bp, Artificial Sequence
  Oligonucleotide for detection of SNP TSC0038040
aattacgatatat

SEQ ID NO: 150745 - DNA, 13 bp, Artificial Sequence
  Oligonucleotide for detection of SNP TSC0038040
agttatgatgtat

SEQ ID NO: 150746 - DNA, 13 bp, Artificial Sequence
  Oligonucleotide for detection of SNP TSC0038040
atacatcataact

SEQ ID NO: 150747 - DNA, 13 bp, Artificial Sequence
  Oligonucleotide for detection of SNP TSC0038040
agttataatgtat

SEQ ID NO: 150748 - DNA, 13 bp, Artificial Sequence
  Oligonucleotide for detection of SNP TSC0038040
atacattataact

SEQ ID NO: 150749 - DNA, 13 bp, Artificial Sequence
  Oligonucleotide for detection of SNP TSC0038040
agttacgatgtat

SEQ ID NO: 150750 - DNA, 13 bp, Artificial Sequence
  Oligonucleotide for detection of SNP TSC0038040
atacatcgtaact

SEQ ID NO: 150751 - DNA, 13 bp, Artificial Sequence
  Oligonucleotide for detection of SNP TSC0038041
gttaaggaagtga

SEQ ID NO: 150752 - DNA, 13 bp, Artificial Sequence
  Oligonucleotide for detection of SNP TSC0038041
tcacttccttaac

SEQ ID NO: 150753 - DNA, 13 bp, Artificial Sequence
  Oligonucleotide for detection of SNP TSC0038041
gttaagaaagtga

SEQ ID NO: 150754 - DNA, 13 bp, Artificial Sequence
  Oligonucleotide for detection of SNP TSC0038041
tcactttcttaac

SEQ ID NO: 150755 - DNA, 13 bp, Artificial Sequence
  Oligonucleotide for detection of SNP TSC0038042
ggtgggtttttta

SEQ ID NO: 150756 - DNA, 13 bp, Artificial Sequence
  Oligonucleotide for detection of SNP TSC0038042
taaaaaacccacc

SEQ ID NO: 150757 - DNA, 13 bp, Artificial Sequence
  Oligonucleotide for detection of SNP TSC0038042
ggtggggttttta

SEQ ID NO: 150758 - DNA, 13 bp, Artificial Sequence
  Oligonucleotide for detection of SNP TSC0038042
taaaaaccccacc

SEQ ID NO: 150759 - DNA, 13 bp, Artificial Sequence
  Oligonucleotide for detection of SNP TSC0038042
taaaaggtttaty

SEQ ID NO: 150760 - DNA, 13 bp, Artificial Sequence
  Oligonucleotide for detection of SNP TSC0038042
rataaacctttta

SEQ ID NO: 150761 - DNA, 13 bp, Artificial Sequence
  Oligonucleotide for detection of SNP TSC0038042
taaaagttttaty

SEQ ID NO: 150762 - DNA, 13 bp, Artificial Sequence
  Oligonucleotide for detection of SNP TSC0038042
rataaaactttta

SEQ ID NO: 150763 - DNA, 13 bp, Artificial Sequence
  Oligonucleotide for detection of SNP TSC0038044
gaaaaattaaaat

SEQ ID NO: 150764 - DNA, 13 bp, Artificial Sequence
  Oligonucleotide for detection of SNP TSC0038044
attttaatttttc

SEQ ID NO: 150765 - DNA, 13 bp, Artificial Sequence
  Oligonucleotide for detection of SNP TSC0038044
gaaaaaataaaat

SEQ ID NO: 150766 - DNA, 13 bp, Artificial Sequence
  Oligonucleotide for detection of SNP TSC0038044
attttattttttc

SEQ ID NO: 150767 - DNA, 13 bp, Artificial Sequence
  Oligonucleotide for detection of SNP TSC0038048
tatgatgtgtgga

SEQ ID NO: 150768 - DNA, 13 bp, Artificial Sequence
  Oligonucleotide for detection of SNP TSC0038048
tccacacatcata

SEQ ID NO: 150769 - DNA, 13 bp, Artificial Sequence
  Oligonucleotide for detection of SNP TSC0038048
tatgatatgtgga

SEQ ID NO: 150770 - DNA, 13 bp, Artificial Sequence
  Oligonucleotide for detection of SNP TSC0038048
tccacatatcata

SEQ ID NO: 150771 - DNA, 13 bp, Artificial Sequence
  Oligonucleotide for detection of SNP TSC0038048
tatgacgtgtgga

SEQ ID NO: 150772 - DNA, 13 bp, Artificial Sequence
  Oligonucleotide for detection of SNP TSC0038048
tccacacgtcata

SEQ ID NO: 150773 - DNA, 13 bp, Artificial Sequence
  Oligonucleotide for detection of SNP TSC0038049
ttatagggtttag

SEQ ID NO: 150774 - DNA, 13 bp, Artificial Sequence
  Oligonucleotide for detection of SNP TSC0038049
ctaaaccctataa

SEQ ID NO: 150775 - DNA, 13 bp, Artificial Sequence
  Oligonucleotide for detection of SNP TSC0038049
ttatagagtttag

SEQ ID NO: 150776 - DNA, 13 bp, Artificial Sequence
  Oligonucleotide for detection of SNP TSC0038049
ctaaactctataa

SEQ ID NO: 150777 - DNA, 13 bp, Artificial Sequence
  Oligonucleotide for detection of SNP TSC0038050
ggtttaagtgaty

SEQ ID NO: 150778 - DNA, 13 bp, Artificial Sequence
  Oligonucleotide for detection of SNP TSC0038050
ratcacttaaacc

SEQ ID NO: 150779 - DNA, 13 bp, Artificial Sequence
  Oligonucleotide for detection of SNP TSC0038050
ggtttaggtgaty

SEQ ID NO: 150780 - DNA, 13 bp, Artificial Sequence
  Oligonucleotide for detection of SNP TSC0038050
ratcacctaaacc

SEQ ID NO: 150781 - DNA, 13 bp, Artificial Sequence
  Oligonucleotide for detection of SNP TSC0038053
gtgtgtgtgtatg

SEQ ID NO: 150782 - DNA, 13 bp, Artificial Sequence
  Oligonucleotide for detection of SNP TSC0038053
catacacacacac

SEQ ID NO: 150783 - DNA, 13 bp, Artificial Sequence
  Oligonucleotide for detection of SNP TSC0038053
gtgtgtatgtatg

SEQ ID NO: 150784 - DNA, 13 bp, Artificial Sequence
  Oligonucleotide for detection of SNP TSC0038053
catacatacacac

SEQ ID NO: 150785 - DNA, 13 bp, Artificial Sequence
  Oligonucleotide for detection of SNP TSC0038054
ttttatattggta

SEQ ID NO: 150786 - DNA, 13 bp, Artificial Sequence
  Oligonucleotide for detection of SNP TSC0038054
taccaatataaaa

SEQ ID NO: 150787 - DNA, 13 bp, Artificial Sequence
  Oligonucleotide for detection of SNP TSC0038054
ttttatgttggta

SEQ ID NO: 150788 - DNA, 13 bp, Artificial Sequence
  Oligonucleotide for detection of SNP TSC0038054
taccaacataaaa

SEQ ID NO: 150789 - DNA, 13 bp, Artificial Sequence
  Oligonucleotide for detection of SNP TSC0038054
ttttacgttggta

SEQ ID NO: 150790 - DNA, 13 bp, Artificial Sequence
  Oligonucleotide for detection of SNP TSC0038054
taccaacgtaaaa

SEQ ID NO: 150791 - DNA, 13 bp, Artificial Sequence
  Oligonucleotide for detection of SNP TSC0038054
tgttagtgtagag

SEQ ID NO: 150792 - DNA, 13 bp, Artificial Sequence
  Oligonucleotide for detection of SNP TSC0038054
ctctacactaaca

SEQ ID NO: 150793 - DNA, 13 bp, Artificial Sequence
  Oligonucleotide for detection of SNP TSC0038054
tgttagcgtagag

SEQ ID NO: 150794 - DNA, 13 bp, Artificial Sequence
  Oligonucleotide for detection of SNP TSC0038054
ctctacgctaaca

SEQ ID NO: 150795 - DNA, 13 bp, Artificial Sequence
  Oligonucleotide for detection of SNP TSC0038055
agggtggtttgtt

SEQ ID NO: 150796 - DNA, 13 bp, Artificial Sequence
  Oligonucleotide for detection of SNP TSC0038055
aacaaaccaccct

SEQ ID NO: 150797 - DNA, 13 bp, Artificial Sequence
  Oligonucleotide for detection of SNP TSC0038055
agggtgttttgtt

SEQ ID NO: 150798 - DNA, 13 bp, Artificial Sequence
  Oligonucleotide for detection of SNP TSC0038055
aacaaaacaccct

SEQ ID NO: 150799 - DNA, 13 bp, Artificial Sequence
  Oligonucleotide for detection of SNP TSC0038055
aataagttatttt

SEQ ID NO: 150800 - DNA, 13 bp, Artificial Sequence
  Oligonucleotide for detection of SNP TSC0038055
aaaataacttatt

SEQ ID NO: 150801 - DNA, 13 bp, Artificial Sequence
  Oligonucleotide for detection of SNP TSC0038055
aataagatatttt

SEQ ID NO: 150802 - DNA, 13 bp, Artificial Sequence
  Oligonucleotide for detection of SNP TSC0038055
aaaatatcttatt

SEQ ID NO: 150803 - DNA, 13 bp, Artificial Sequence
  Oligonucleotide for detection of SNP TSC0038060
gggtggtggtggt

SEQ ID NO: 150804 - DNA, 13 bp, Artificial Sequence
  Oligonucleotide for detection of SNP TSC0038060
accaccaccaccc

SEQ ID NO: 150805 - DNA, 13 bp, Artificial Sequence
  Oligonucleotide for detection of SNP TSC0038060
gggtgggggtggt

SEQ ID NO: 150806 - DNA, 13 bp, Artificial Sequence
  Oligonucleotide for detection of SNP TSC0038060
accacccccaccc

SEQ ID NO: 150807 - DNA, 13 bp, Artificial Sequence
  Oligonucleotide for detection of SNP TSC0038060
gggtggcggtggt

SEQ ID NO: 150808 - DNA, 13 bp, Artificial Sequence
  Oligonucleotide for detection of SNP TSC0038060
accaccgccaccc

SEQ ID NO: 150809 - DNA, 13 bp, Artificial Sequence
  Oligonucleotide for detection of SNP TSC0038060
attattgttatty

SEQ ID NO: 150810 - DNA, 13 bp, Artificial Sequence
  Oligonucleotide for detection of SNP TSC0038060
raataacaataat

SEQ ID NO: 150811 - DNA, 13 bp, Artificial Sequence
  Oligonucleotide for detection of SNP TSC0038060
attatttttatty

SEQ ID NO: 150812 - DNA, 13 bp, Artificial Sequence
  Oligonucleotide for detection of SNP TSC0038060
raataaaaataat

SEQ ID NO: 150813 - DNA, 13 bp, Artificial Sequence
  Oligonucleotide for detection of SNP TSC0038060
attatcgttatty

SEQ ID NO: 150814 - DNA, 13 bp, Artificial Sequence
  Oligonucleotide for detection of SNP TSC0038060
raataacgataat

SEQ ID NO: 150815 - DNA, 13 bp, Artificial Sequence
  Oligonucleotide for detection of SNP TSC0038061
tggggaggggaag

SEQ ID NO: 150816 - DNA, 13 bp, Artificial Sequence
  Oligonucleotide for detection of SNP TSC0038061
cttcccctcccca

SEQ ID NO: 150817 - DNA, 13 bp, Artificial Sequence
  Oligonucleotide for detection of SNP TSC0038061
tggggaagggaag

SEQ ID NO: 150818 - DNA, 13 bp, Artificial Sequence
  Oligonucleotide for detection of SNP TSC0038061
cttcccttcccca

SEQ ID NO: 150819 - DNA, 13 bp, Artificial Sequence
  Oligonucleotide for detection of SNP TSC0038062
tagtttagtatgg

SEQ ID NO: 150820 - DNA, 13 bp, Artificial Sequence
  Oligonucleotide for detection of SNP TSC0038062
ccatactaaacta

SEQ ID NO: 150821 - DNA, 13 bp, Artificial Sequence
  Oligonucleotide for detection of SNP TSC0038062
tagttttgtatgg

SEQ ID NO: 150822 - DNA, 13 bp, Artificial Sequence
  Oligonucleotide for detection of SNP TSC0038062
ccatacaaaacta

SEQ ID NO: 150823 - DNA, 13 bp, Artificial Sequence
  Oligonucleotide for detection of SNP TSC0038062
tagtttcgtatgg

SEQ ID NO: 150824 - DNA, 13 bp, Artificial Sequence
  Oligonucleotide for detection of SNP TSC0038062
ccatacgaaacta

SEQ ID NO: 150825 - DNA, 13 bp, Artificial Sequence
  Oligonucleotide for detection of SNP TSC0038062
ttatgttgagtta

SEQ ID NO: 150826 - DNA, 13 bp, Artificial Sequence
  Oligonucleotide for detection of SNP TSC0038062
taactcaacataa

SEQ ID NO: 150827 - DNA, 13 bp, Artificial Sequence
  Oligonucleotide for detection of SNP TSC0038062
ttatgtggagtta

SEQ ID NO: 150828 - DNA, 13 bp, Artificial Sequence
  Oligonucleotide for detection of SNP TSC0038062
taactccacataa

SEQ ID NO: 150829 - DNA, 13 bp, Artificial Sequence
  Oligonucleotide for detection of SNP TSC0038062
ttatgcggagtta

SEQ ID NO: 150830 - DNA, 13 bp, Artificial Sequence
  Oligonucleotide for detection of SNP TSC0038062
taactccgcataa

SEQ ID NO: 150831 - DNA, 13 bp, Artificial Sequence
  Oligonucleotide for detection of SNP TSC0038063
tataggggttagg

SEQ ID NO: 150832 - DNA, 13 bp, Artificial Sequence
  Oligonucleotide for detection of SNP TSC0038063
cctaacccctata

SEQ ID NO: 150833 - DNA, 13 bp, Artificial Sequence
  Oligonucleotide for detection of SNP TSC0038063
tataggagttagg

SEQ ID NO: 150834 - DNA, 13 bp, Artificial Sequence
  Oligonucleotide for detection of SNP TSC0038063
cctaactcctata

SEQ ID NO: 150835 - DNA, 13 bp, Artificial Sequence
  Oligonucleotide for detection of SNP TSC0038064
gagaaagaaaagt

SEQ ID NO: 150836 - DNA, 13 bp, Artificial Sequence
  Oligonucleotide for detection of SNP TSC0038064
acttttctttctc

SEQ ID NO: 150837 - DNA, 13 bp, Artificial Sequence
  Oligonucleotide for detection of SNP TSC0038064
gagaaaaaaaagt

SEQ ID NO: 150838 - DNA, 13 bp, Artificial Sequence
  Oligonucleotide for detection of SNP TSC0038064
acttttttttctc

SEQ ID NO: 150839 - DNA, 13 bp, Artificial Sequence
  Oligonucleotide for detection of SNP TSC0038067
gagtagattttgt

SEQ ID NO: 150840 - DNA, 13 bp, Artificial Sequence
  Oligonucleotide for detection of SNP TSC0038067
acaaaatctactc

SEQ ID NO: 150841 - DNA, 13 bp, Artificial Sequence
  Oligonucleotide for detection of SNP TSC0038067
gagtagtttttgt

SEQ ID NO: 150842 - DNA, 13 bp, Artificial Sequence
  Oligonucleotide for detection of SNP TSC0038067
acaaaaactactc

SEQ ID NO: 150843 - DNA, 13 bp, Artificial Sequence
  Oligonucleotide for detection of SNP TSC0038067
ataggatttatty

SEQ ID NO: 150844 - DNA, 13 bp, Artificial Sequence
  Oligonucleotide for detection of SNP TSC0038067
raataaatcctat

SEQ ID NO: 150845 - DNA, 13 bp, Artificial Sequence
  Oligonucleotide for detection of SNP TSC0038067
ataggaattatty

SEQ ID NO: 150846 - DNA, 13 bp, Artificial Sequence
  Oligonucleotide for detection of SNP TSC0038067
raataattcctat

SEQ ID NO: 150847 - DNA, 13 bp, Artificial Sequence
  Oligonucleotide for detection of SNP TSC0038071
ttggaagtaattt

SEQ ID NO: 150848 - DNA, 13 bp, Artificial Sequence
  Oligonucleotide for detection of SNP TSC0038071
aaattacttccaa

SEQ ID NO: 150849 - DNA, 13 bp, Artificial Sequence
  Oligonucleotide for detection of SNP TSC0038071
ttggaaataattt

SEQ ID NO: 150850 - DNA, 13 bp, Artificial Sequence
  Oligonucleotide for detection of SNP TSC0038071
aaattatttccaa

SEQ ID NO: 150851 - DNA, 13 bp, Artificial Sequence
  Oligonucleotide for detection of SNP TSC0038072
taggaatgaggtt

SEQ ID NO: 150852 - DNA, 13 bp, Artificial Sequence
  Oligonucleotide for detection of SNP TSC0038072
aacctcattccta

SEQ ID NO: 150853 - DNA, 13 bp, Artificial Sequence
  Oligonucleotide for detection of SNP TSC0038072
taggaacgaggtt

SEQ ID NO: 150854 - DNA, 13 bp, Artificial Sequence
  Oligonucleotide for detection of SNP TSC0038072
aacctcgttccta

SEQ ID NO: 150855 - DNA, 13 bp, Artificial Sequence
  Oligonucleotide for detection of SNP TSC0038073
ggaggatggataa

SEQ ID NO: 150856 - DNA, 13 bp, Artificial Sequence
  Oligonucleotide for detection of SNP TSC0038073
ttatccatcctcc

SEQ ID NO: 150857 - DNA, 13 bp, Artificial Sequence
  Oligonucleotide for detection of SNP TSC0038073
ggaggaaggataa

SEQ ID NO: 150858 - DNA, 13 bp, Artificial Sequence
  Oligonucleotide for detection of SNP TSC0038073
ttatccttcctcc

SEQ ID NO: 150859 - DNA, 13 bp, Artificial Sequence
  Oligonucleotide for detection of SNP TSC0038073
ggaggacggataa

SEQ ID NO: 150860 - DNA, 13 bp, Artificial Sequence
  Oligonucleotide for detection of SNP TSC0038073
ttatccgtcctcc

SEQ ID NO: 150861 - DNA, 13 bp, Artificial Sequence
  Oligonucleotide for detection of SNP TSC0038075
atttattttaagg

SEQ ID NO: 150862 - DNA, 13 bp, Artificial Sequence
  Oligonucleotide for detection of SNP TSC0038075
ccttaaaataaat

SEQ ID NO: 150863 - DNA, 13 bp, Artificial Sequence
  Oligonucleotide for detection of SNP TSC0038076
ttagagtttttgg

SEQ ID NO: 150864 - DNA, 13 bp, Artificial Sequence
  Oligonucleotide for detection of SNP TSC0038076
ccaaaaactctaa

SEQ ID NO: 150865 - DNA, 13 bp, Artificial Sequence
  Oligonucleotide for detection of SNP TSC0038076
ttagagattttgg

SEQ ID NO: 150866 - DNA, 13 bp, Artificial Sequence
  Oligonucleotide for detection of SNP TSC0038076
ccaaaatctctaa

SEQ ID NO: 150867 - DNA, 13 bp, Artificial Sequence
  Oligonucleotide for detection of SNP TSC0038078
ttaaatgtttatg

SEQ ID NO: 150868 - DNA, 13 bp, Artificial Sequence
  Oligonucleotide for detection of SNP TSC0038078
cataaacatttaa

SEQ ID NO: 150869 - DNA, 13 bp, Artificial Sequence
  Oligonucleotide for detection of SNP TSC0038078
ttaaatatttatg

SEQ ID NO: 150870 - DNA, 13 bp, Artificial Sequence
  Oligonucleotide for detection of SNP TSC0038078
cataaatatttaa

SEQ ID NO: 150871 - DNA, 13 bp, Artificial Sequence
  Oligonucleotide for detection of SNP TSC0038083
tattttagaggtt

SEQ ID NO: 150872 - DNA, 13 bp, Artificial Sequence
  Oligonucleotide for detection of SNP TSC0038083
aacctctaaaata

SEQ ID NO: 150873 - DNA, 13 bp, Artificial Sequence
  Oligonucleotide for detection of SNP TSC0038083
tattttggaggtt

SEQ ID NO: 150874 - DNA, 13 bp, Artificial Sequence
  Oligonucleotide for detection of SNP TSC0038083
aacctccaaaata

SEQ ID NO: 150875 - DNA, 13 bp, Artificial Sequence
  Oligonucleotide for detection of SNP TSC0038083
tatttcggaggtt

SEQ ID NO: 150876 - DNA, 13 bp, Artificial Sequence
  Oligonucleotide for detection of SNP TSC0038083
aacctccgaaata

SEQ ID NO: 150877 - DNA, 13 bp, Artificial Sequence
  Oligonucleotide for detection of SNP TSC0038083
agtttttgaagta

SEQ ID NO: 150878 - DNA, 13 bp, Artificial Sequence
  Oligonucleotide for detection of SNP TSC0038083
tacttcaaaaact

SEQ ID NO: 150879 - DNA, 13 bp, Artificial Sequence
  Oligonucleotide for detection of SNP TSC0038083
agttttcgaagta

SEQ ID NO: 150880 - DNA, 13 bp, Artificial Sequence
  Oligonucleotide for detection of SNP TSC0038083
tacttcgaaaact

SEQ ID NO: 150881 - DNA, 13 bp, Artificial Sequence
  Oligonucleotide for detection of SNP TSC0038087
gggagggtaaagg

SEQ ID NO: 150882 - DNA, 13 bp, Artificial Sequence
  Oligonucleotide for detection of SNP TSC0038087
cctttaccctccc

SEQ ID NO: 150883 - DNA, 13 bp, Artificial Sequence
  Oligonucleotide for detection of SNP TSC0038087
gggaggataaagg

SEQ ID NO: 150884 - DNA, 13 bp, Artificial Sequence
  Oligonucleotide for detection of SNP TSC0038087
cctttatcctccc

SEQ ID NO: 150885 - DNA, 13 bp, Artificial Sequence
  Oligonucleotide for detection of SNP TSC0038088
attattagtttgt

SEQ ID NO: 150886 - DNA, 13 bp, Artificial Sequence
  Oligonucleotide for detection of SNP TSC0038088
acaaactaataat

SEQ ID NO: 150887 - DNA, 13 bp, Artificial Sequence
  Oligonucleotide for detection of SNP TSC0038088
attattggtttgt

SEQ ID NO: 150888 - DNA, 13 bp, Artificial Sequence
  Oligonucleotide for detection of SNP TSC0038088
acaaaccaataat

SEQ ID NO: 150889 - DNA, 13 bp, Artificial Sequence
  Oligonucleotide for detection of SNP TSC0038091
gttgttggtagaa

SEQ ID NO: 150890 - DNA, 13 bp, Artificial Sequence
  Oligonucleotide for detection of SNP TSC0038091
ttctaccaacaac

SEQ ID NO: 150891 - DNA, 13 bp, Artificial Sequence
  Oligonucleotide for detection of SNP TSC0038091
gttgtttgtagaa

SEQ ID NO: 150892 - DNA, 13 bp, Artificial Sequence
  Oligonucleotide for detection of SNP TSC0038091
ttctacaaacaac

SEQ ID NO: 150893 - DNA, 13 bp, Artificial Sequence
  Oligonucleotide for detection of SNP TSC0038091
gtcgttggtagaa

SEQ ID NO: 150894 - DNA, 13 bp, Artificial Sequence
  Oligonucleotide for detection of SNP TSC0038091
ttctaccaacgac

SEQ ID NO: 150895 - DNA, 13 bp, Artificial Sequence
  Oligonucleotide for detection of SNP TSC0038091
gtcgtttgtagaa

SEQ ID NO: 150896 - DNA, 13 bp, Artificial Sequence
  Oligonucleotide for detection of SNP TSC0038091
ttctacaaacgac

SEQ ID NO: 150897 - DNA, 13 bp, Artificial Sequence
  Oligonucleotide for detection of SNP TSC0038091
gttgtcggtagaa

SEQ ID NO: 150898 - DNA, 13 bp, Artificial Sequence
  Oligonucleotide for detection of SNP TSC0038091
ttctaccgacaac

SEQ ID NO: 150899 - DNA, 13 bp, Artificial Sequence
  Oligonucleotide for detection of SNP TSC0038091
gtcgtcggtagaa

SEQ ID NO: 150900 - DNA, 13 bp, Artificial Sequence
  Oligonucleotide for detection of SNP TSC0038091
ttctaccgacgac

SEQ ID NO: 150901 - DNA, 13 bp, Artificial Sequence
  Oligonucleotide for detection of SNP TSC0038091
ttttattggtggy

SEQ ID NO: 150902 - DNA, 13 bp, Artificial Sequence
  Oligonucleotide for detection of SNP TSC0038091
rccaccaataaaa

SEQ ID NO: 150903 - DNA, 13 bp, Artificial Sequence
  Oligonucleotide for detection of SNP TSC0038091
ttttataggtggy

SEQ ID NO: 150904 - DNA, 13 bp, Artificial Sequence
  Oligonucleotide for detection of SNP TSC0038091
rccacctataaaa

SEQ ID NO: 150905 - DNA, 13 bp, Artificial Sequence
  Oligonucleotide for detection of SNP TSC0038091
ttttatcggtggy

SEQ ID NO: 150906 - DNA, 13 bp, Artificial Sequence
  Oligonucleotide for detection of SNP TSC0038091
rccaccgataaaa

SEQ ID NO: 150907 - DNA, 13 bp, Artificial Sequence
  Oligonucleotide for detection of SNP TSC0038091
ttttataggcggy

SEQ ID NO: 150908 - DNA, 13 bp, Artificial Sequence
  Oligonucleotide for detection of SNP TSC0038091
rccgcctataaaa

SEQ ID NO: 150909 - DNA, 13 bp, Artificial Sequence
  Oligonucleotide for detection of SNP TSC0038091
ttttattggcggy

SEQ ID NO: 150910 - DNA, 13 bp, Artificial Sequence
  Oligonucleotide for detection of SNP TSC0038091
rccgccaataaaa

SEQ ID NO: 150911 - DNA, 13 bp, Artificial Sequence
  Oligonucleotide for detection of SNP TSC0038091
ttttatcggcggy

SEQ ID NO: 150912 - DNA, 13 bp, Artificial Sequence
  Oligonucleotide for detection of SNP TSC0038091
rccgccgataaaa

SEQ ID NO: 150913 - DNA, 13 bp, Artificial Sequence
  Oligonucleotide for detection of SNP TSC0038098
taaaagaaatgaa

SEQ ID NO: 150914 - DNA, 13 bp, Artificial Sequence
  Oligonucleotide for detection of SNP TSC0038098
ttcatttctttta

SEQ ID NO: 150915 - DNA, 13 bp, Artificial Sequence
  Oligonucleotide for detection of SNP TSC0038098
taaaagtaatgaa

SEQ ID NO: 150916 - DNA, 13 bp, Artificial Sequence
  Oligonucleotide for detection of SNP TSC0038098
ttcattactttta

SEQ ID NO: 150917 - DNA, 13 bp, Artificial Sequence
  Oligonucleotide for detection of SNP TSC0038098
taaaagaaacgaa

SEQ ID NO: 150918 - DNA, 13 bp, Artificial Sequence
  Oligonucleotide for detection of SNP TSC0038098
ttcgtttctttta

SEQ ID NO: 150919 - DNA, 13 bp, Artificial Sequence
  Oligonucleotide for detection of SNP TSC0038098
taaaagtaacgaa

SEQ ID NO: 150920 - DNA, 13 bp, Artificial Sequence
  Oligonucleotide for detection of SNP TSC0038098
ttcgttactttta

SEQ ID NO: 150921 - DNA, 13 bp, Artificial Sequence
  Oligonucleotide for detection of SNP TSC0038098
ttcgtttttttta

SEQ ID NO: 150922 - DNA, 13 bp, Artificial Sequence
  Oligonucleotide for detection of SNP TSC0038098
taaaaaaaacgaa

SEQ ID NO: 150923 - DNA, 13 bp, Artificial Sequence
  Oligonucleotide for detection of SNP TSC0038098
ttcgttgttttta

SEQ ID NO: 150924 - DNA, 13 bp, Artificial Sequence
  Oligonucleotide for detection of SNP TSC0038098
taaaaacaacgaa

SEQ ID NO: 150925 - DNA, 13 bp, Artificial Sequence
  Oligonucleotide for detection of SNP TSC0038099
tgggttttttttt

SEQ ID NO: 150926 - DNA, 13 bp, Artificial Sequence
  Oligonucleotide for detection of SNP TSC0038099
aaaaaaaaaccca

SEQ ID NO: 150927 - DNA, 13 bp, Artificial Sequence
  Oligonucleotide for detection of SNP TSC0038100
aggtgggtaatga

SEQ ID NO: 150928 - DNA, 13 bp, Artificial Sequence
  Oligonucleotide for detection of SNP TSC0038100
tcattacccacct

SEQ ID NO: 150929 - DNA, 13 bp, Artificial Sequence
  Oligonucleotide for detection of SNP TSC0038100
aggtggataatga

SEQ ID NO: 150930 - DNA, 13 bp, Artificial Sequence
  Oligonucleotide for detection of SNP TSC0038100
tcattatccacct

SEQ ID NO: 150931 - DNA, 13 bp, Artificial Sequence
  Oligonucleotide for detection of SNP TSC0038101
atatgaattagta

SEQ ID NO: 150932 - DNA, 13 bp, Artificial Sequence
  Oligonucleotide for detection of SNP TSC0038101
tactaattcatat

SEQ ID NO: 150933 - DNA, 13 bp, Artificial Sequence
  Oligonucleotide for detection of SNP TSC0038101
atatgatttagta

SEQ ID NO: 150934 - DNA, 13 bp, Artificial Sequence
  Oligonucleotide for detection of SNP TSC0038101
tactaaatcatat

SEQ ID NO: 150935 - DNA, 13 bp, Artificial Sequence
  Oligonucleotide for detection of SNP TSC0038101
tattggtttatat

SEQ ID NO: 150936 - DNA, 13 bp, Artificial Sequence
  Oligonucleotide for detection of SNP TSC0038101
atataaaccaata

SEQ ID NO: 150937 - DNA, 13 bp, Artificial Sequence
  Oligonucleotide for detection of SNP TSC0038101
tattgggttatat

SEQ ID NO: 150938 - DNA, 13 bp, Artificial Sequence
  Oligonucleotide for detection of SNP TSC0038101
atataacccaata

SEQ ID NO: 150939 - DNA, 13 bp, Artificial Sequence
  Oligonucleotide for detection of SNP TSC0038102
tagttgggaaagt

SEQ ID NO: 150940 - DNA, 13 bp, Artificial Sequence
  Oligonucleotide for detection of SNP TSC0038102
actttcccaacta

SEQ ID NO: 150941 - DNA, 13 bp, Artificial Sequence
  Oligonucleotide for detection of SNP TSC0038102
tagttgagaaagt

SEQ ID NO: 150942 - DNA, 13 bp, Artificial Sequence
  Oligonucleotide for detection of SNP TSC0038102
actttctcaacta

SEQ ID NO: 150943 - DNA, 13 bp, Artificial Sequence
  Oligonucleotide for detection of SNP TSC0038103
tttttcgtattay

SEQ ID NO: 150944 - DNA, 13 bp, Artificial Sequence
  Oligonucleotide for detection of SNP TSC0038103
rtaatacgaaaaa

SEQ ID NO: 150945 - DNA, 13 bp, Artificial Sequence
  Oligonucleotide for detection of SNP TSC0038103
gtgatatgagagg

SEQ ID NO: 150946 - DNA, 13 bp, Artificial Sequence
  Oligonucleotide for detection of SNP TSC0038103
cctctcatatcac

SEQ ID NO: 150947 - DNA, 13 bp, Artificial Sequence
  Oligonucleotide for detection of SNP TSC0038103
gtgatacgagagg

SEQ ID NO: 150948 - DNA, 13 bp, Artificial Sequence
  Oligonucleotide for detection of SNP TSC0038103
cctctcgtatcac

SEQ ID NO: 150949 - DNA, 13 bp, Artificial Sequence
  Oligonucleotide for detection of SNP TSC0038104
taattgagaagty

SEQ ID NO: 150950 - DNA, 13 bp, Artificial Sequence
  Oligonucleotide for detection of SNP TSC0038104
racttctcaatta

SEQ ID NO: 150951 - DNA, 13 bp, Artificial Sequence
  Oligonucleotide for detection of SNP TSC0038104
taattgggaagty

SEQ ID NO: 150952 - DNA, 13 bp, Artificial Sequence
  Oligonucleotide for detection of SNP TSC0038104
racttcccaatta

SEQ ID NO: 150953 - DNA, 13 bp, Artificial Sequence
  Oligonucleotide for detection of SNP TSC0038107
attttcgatgtgg

SEQ ID NO: 150954 - DNA, 13 bp, Artificial Sequence
  Oligonucleotide for detection of SNP TSC0038107
ccacatcgaaaat

SEQ ID NO: 150955 - DNA, 13 bp, Artificial Sequence
  Oligonucleotide for detection of SNP TSC0038107
ttatattggggat

SEQ ID NO: 150956 - DNA, 13 bp, Artificial Sequence
  Oligonucleotide for detection of SNP TSC0038107
atccccaatataa

SEQ ID NO: 150957 - DNA, 13 bp, Artificial Sequence
  Oligonucleotide for detection of SNP TSC0038107
ttatatcggggat

SEQ ID NO: 150958 - DNA, 13 bp, Artificial Sequence
  Oligonucleotide for detection of SNP TSC0038107
atccccgatataa

SEQ ID NO: 150959 - DNA, 13 bp, Artificial Sequence
  Oligonucleotide for detection of SNP TSC0038109
taataaaaaggta

SEQ ID NO: 150960 - DNA, 13 bp, Artificial Sequence
  Oligonucleotide for detection of SNP TSC0038109
tacctttttatta

SEQ ID NO: 150961 - DNA, 13 bp, Artificial Sequence
  Oligonucleotide for detection of SNP TSC0038109
taataataaggta

SEQ ID NO: 150962 - DNA, 13 bp, Artificial Sequence
  Oligonucleotide for detection of SNP TSC0038109
taccttattatta

SEQ ID NO: 150963 - DNA, 13 bp, Artificial Sequence
  Oligonucleotide for detection of SNP TSC0038110
agaaatgagttgt

SEQ ID NO: 150964 - DNA, 13 bp, Artificial Sequence
  Oligonucleotide for detection of SNP TSC0038110
acaactcatttct

SEQ ID NO: 150965 - DNA, 13 bp, Artificial Sequence
  Oligonucleotide for detection of SNP TSC0038110
agaaataagttgt

SEQ ID NO: 150966 - DNA, 13 bp, Artificial Sequence
  Oligonucleotide for detection of SNP TSC0038110
acaacttatttct

SEQ ID NO: 150967 - DNA, 13 bp, Artificial Sequence
  Oligonucleotide for detection of SNP TSC0038112
tttttttggggaa

SEQ ID NO: 150968 - DNA, 13 bp, Artificial Sequence
  Oligonucleotide for detection of SNP TSC0038112
ttccccaaaaaaa

SEQ ID NO: 150969 - DNA, 13 bp, Artificial Sequence
  Oligonucleotide for detection of SNP TSC0038112
ttttttcggggaa

SEQ ID NO: 150970 - DNA, 13 bp, Artificial Sequence
  Oligonucleotide for detection of SNP TSC0038112
ttccccgaaaaaa

SEQ ID NO: 150971 - DNA, 13 bp, Artificial Sequence
  Oligonucleotide for detection of SNP TSC0038112
ttttttggaaaaa

SEQ ID NO: 150972 - DNA, 13 bp, Artificial Sequence
  Oligonucleotide for detection of SNP TSC0038112
tttttccaaaaaa

SEQ ID NO: 150973 - DNA, 13 bp, Artificial Sequence
  Oligonucleotide for detection of SNP TSC0038112
ttttttagaaaaa

SEQ ID NO: 150974 - DNA, 13 bp, Artificial Sequence
  Oligonucleotide for detection of SNP TSC0038112
tttttctaaaaaa

SEQ ID NO: 150975 - DNA, 13 bp, Artificial Sequence
  Oligonucleotide for detection of SNP TSC0038112
tttttcggaaaaa

SEQ ID NO: 150976 - DNA, 13 bp, Artificial Sequence
  Oligonucleotide for detection of SNP TSC0038112
tttttccgaaaaa

SEQ ID NO: 150977 - DNA, 13 bp, Artificial Sequence
  Oligonucleotide for detection of SNP TSC0038113
ggatatagttaat

SEQ ID NO: 150978 - DNA, 13 bp, Artificial Sequence
  Oligonucleotide for detection of SNP TSC0038113
attaactatatcc

SEQ ID NO: 150979 - DNA, 13 bp, Artificial Sequence
  Oligonucleotide for detection of SNP TSC0038113
ggatattgttaat

SEQ ID NO: 150980 - DNA, 13 bp, Artificial Sequence
  Oligonucleotide for detection of SNP TSC0038113
attaacaatatcc

SEQ ID NO: 150981 - DNA, 13 bp, Artificial Sequence
  Oligonucleotide for detection of SNP TSC0038113
attaattatatty

SEQ ID NO: 150982 - DNA, 13 bp, Artificial Sequence
  Oligonucleotide for detection of SNP TSC0038113
raatataattaat

SEQ ID NO: 150983 - DNA, 13 bp, Artificial Sequence
  Oligonucleotide for detection of SNP TSC0038113
attaataatatty

SEQ ID NO: 150984 - DNA, 13 bp, Artificial Sequence
  Oligonucleotide for detection of SNP TSC0038113
raatattattaat

SEQ ID NO: 150985 - DNA, 13 bp, Artificial Sequence
  Oligonucleotide for detection of SNP TSC0038114
agttatatatggy

SEQ ID NO: 150986 - DNA, 13 bp, Artificial Sequence
  Oligonucleotide for detection of SNP TSC0038114
rccatatataact

SEQ ID NO: 150987 - DNA, 13 bp, Artificial Sequence
  Oligonucleotide for detection of SNP TSC0038114
agttatgtatggy

SEQ ID NO: 150988 - DNA, 13 bp, Artificial Sequence
  Oligonucleotide for detection of SNP TSC0038114
rccatacataact

SEQ ID NO: 150989 - DNA, 13 bp, Artificial Sequence
  Oligonucleotide for detection of SNP TSC0038114
agttacgtatggy

SEQ ID NO: 150990 - DNA, 13 bp, Artificial Sequence
  Oligonucleotide for detection of SNP TSC0038114
rccatacgtaact

SEQ ID NO: 150991 - DNA, 13 bp, Artificial Sequence
  Oligonucleotide for detection of SNP TSC0038114
gttatgtgtgatt

SEQ ID NO: 150992 - DNA, 13 bp, Artificial Sequence
  Oligonucleotide for detection of SNP TSC0038114
aatcacacataac

SEQ ID NO: 150993 - DNA, 13 bp, Artificial Sequence
  Oligonucleotide for detection of SNP TSC0038114
gttatgcgtgatt

SEQ ID NO: 150994 - DNA, 13 bp, Artificial Sequence
  Oligonucleotide for detection of SNP TSC0038114
aatcacgcataac

SEQ ID NO: 150995 - DNA, 13 bp, Artificial Sequence
  Oligonucleotide for detection of SNP TSC0038115
tgtgatgtatgty

SEQ ID NO: 150996 - DNA, 13 bp, Artificial Sequence
  Oligonucleotide for detection of SNP TSC0038115
racatacatcaca

SEQ ID NO: 150997 - DNA, 13 bp, Artificial Sequence
  Oligonucleotide for detection of SNP TSC0038115
tgtgatatatgty

SEQ ID NO: 150998 - DNA, 13 bp, Artificial Sequence
  Oligonucleotide for detection of SNP TSC0038115
racatatatcaca

SEQ ID NO: 150999 - DNA, 13 bp, Artificial Sequence
  Oligonucleotide for detection of SNP TSC0038115
tgcgatgtatgty

SEQ ID NO: 151000 - DNA, 13 bp, Artificial Sequence
  Oligonucleotide for detection of SNP TSC0038115
racatacatcgca

SEQ ID NO: 151001 - DNA, 13 bp, Artificial Sequence
  Oligonucleotide for detection of SNP TSC0038115
tgcgatatatgty

SEQ ID NO: 151002 - DNA, 13 bp, Artificial Sequence
  Oligonucleotide for detection of SNP TSC0038115
racatatatcgca

SEQ ID NO: 151003 - DNA, 13 bp, Artificial Sequence
  Oligonucleotide for detection of SNP TSC0038120
ttaggtgtgatgg

SEQ ID NO: 151004 - DNA, 13 bp, Artificial Sequence
  Oligonucleotide for detection of SNP TSC0038120
ccatcacacctaa

SEQ ID NO: 151005 - DNA, 13 bp, Artificial Sequence
  Oligonucleotide for detection of SNP TSC0038120
ttaggtatgatgg

SEQ ID NO: 151006 - DNA, 13 bp, Artificial Sequence
  Oligonucleotide for detection of SNP TSC0038120
ccatcatacctaa

SEQ ID NO: 151007 - DNA, 13 bp, Artificial Sequence
  Oligonucleotide for detection of SNP TSC0038120
ttaggcgtgatgg

SEQ ID NO: 151008 - DNA, 13 bp, Artificial Sequence
  Oligonucleotide for detection of SNP TSC0038120
ccatcacgcctaa

SEQ ID NO: 151009 - DNA, 13 bp, Artificial Sequence
  Oligonucleotide for detection of SNP TSC0038121
taagatgttttga

SEQ ID NO: 151010 - DNA, 13 bp, Artificial Sequence
  Oligonucleotide for detection of SNP TSC0038121
tcaaaacatctta

SEQ ID NO: 151011 - DNA, 13 bp, Artificial Sequence
  Oligonucleotide for detection of SNP TSC0038121
taagattttttga

SEQ ID NO: 151012 - DNA, 13 bp, Artificial Sequence
  Oligonucleotide for detection of SNP TSC0038121
tcaaaaaatctta

SEQ ID NO: 151013 - DNA, 13 bp, Artificial Sequence
  Oligonucleotide for detection of SNP TSC0038121
ttagaatatttta

SEQ ID NO: 151014 - DNA, 13 bp, Artificial Sequence
  Oligonucleotide for detection of SNP TSC0038121
taaaatattctaa

SEQ ID NO: 151015 - DNA, 13 bp, Artificial Sequence
  Oligonucleotide for detection of SNP TSC0038121
ttagaaaatttta

SEQ ID NO: 151016 - DNA, 13 bp, Artificial Sequence
  Oligonucleotide for detection of SNP TSC0038121
taaaattttctaa

SEQ ID NO: 151017 - DNA, 13 bp, Artificial Sequence
  Oligonucleotide for detection of SNP TSC0038122
ataatatgaagga

SEQ ID NO: 151018 - DNA, 13 bp, Artificial Sequence
  Oligonucleotide for detection of SNP TSC0038122
tccttcatattat

SEQ ID NO: 151019 - DNA, 13 bp, Artificial Sequence
  Oligonucleotide for detection of SNP TSC0038122
ataatacgaagga

SEQ ID NO: 151020 - DNA, 13 bp, Artificial Sequence
  Oligonucleotide for detection of SNP TSC0038122
tccttcgtattat

SEQ ID NO: 151021 - DNA, 13 bp, Artificial Sequence
  Oligonucleotide for detection of SNP TSC0038123
gattttattaagy

SEQ ID NO: 151022 - DNA, 13 bp, Artificial Sequence
  Oligonucleotide for detection of SNP TSC0038123
rcttaataaaatc

SEQ ID NO: 151023 - DNA, 13 bp, Artificial Sequence
  Oligonucleotide for detection of SNP TSC0038123
gattttgttaagy

SEQ ID NO: 151024 - DNA, 13 bp, Artificial Sequence
  Oligonucleotide for detection of SNP TSC0038123
rcttaacaaaatc

SEQ ID NO: 151025 - DNA, 13 bp, Artificial Sequence
  Oligonucleotide for detection of SNP TSC0038131
atgtatagtaagt

SEQ ID NO: 151026 - DNA, 13 bp, Artificial Sequence
  Oligonucleotide for detection of SNP TSC0038131
acttactatacat

SEQ ID NO: 151027 - DNA, 13 bp, Artificial Sequence
  Oligonucleotide for detection of SNP TSC0038131
atgtatggtaagt

SEQ ID NO: 151028 - DNA, 13 bp, Artificial Sequence
  Oligonucleotide for detection of SNP TSC0038131
acttaccatacat

SEQ ID NO: 151029 - DNA, 13 bp, Artificial Sequence
  Oligonucleotide for detection of SNP TSC0038131
atgtacggtaagt

SEQ ID NO: 151030 - DNA, 13 bp, Artificial Sequence
  Oligonucleotide for detection of SNP TSC0038131
acttaccgtacat

SEQ ID NO: 151031 - DNA, 13 bp, Artificial Sequence
  Oligonucleotide for detection of SNP TSC0038131
atttattgtgtat

SEQ ID NO: 151032 - DNA, 13 bp, Artificial Sequence
  Oligonucleotide for detection of SNP TSC0038131
atacacaataaat

SEQ ID NO: 151033 - DNA, 13 bp, Artificial Sequence
  Oligonucleotide for detection of SNP TSC0038131
atttatcgtgtat

SEQ ID NO: 151034 - DNA, 13 bp, Artificial Sequence
  Oligonucleotide for detection of SNP TSC0038131
atacacgataaat

SEQ ID NO: 151035 - DNA, 13 bp, Artificial Sequence
  Oligonucleotide for detection of SNP TSC0038132
atttgtaaattty

SEQ ID NO: 151036 - DNA, 13 bp, Artificial Sequence
  Oligonucleotide for detection of SNP TSC0038132
raaatttacaaat

SEQ ID NO: 151037 - DNA, 13 bp, Artificial Sequence
  Oligonucleotide for detection of SNP TSC0038132
atttgtgaattty

SEQ ID NO: 151038 - DNA, 13 bp, Artificial Sequence
  Oligonucleotide for detection of SNP TSC0038132
raaattcacaaat

SEQ ID NO: 151039 - DNA, 13 bp, Artificial Sequence
  Oligonucleotide for detection of SNP TSC0038132
atttgcgaattty

SEQ ID NO: 151040 - DNA, 13 bp, Artificial Sequence
  Oligonucleotide for detection of SNP TSC0038132
raaattcgcaaat

SEQ ID NO: 151041 - DNA, 13 bp, Artificial Sequence
  Oligonucleotide for detection of SNP TSC0038132
gagatttgtagat

SEQ ID NO: 151042 - DNA, 13 bp, Artificial Sequence
  Oligonucleotide for detection of SNP TSC0038132
atctacaaatctc

SEQ ID NO: 151043 - DNA, 13 bp, Artificial Sequence
  Oligonucleotide for detection of SNP TSC0038132
gagattcgtagat

SEQ ID NO: 151044 - DNA, 13 bp, Artificial Sequence
  Oligonucleotide for detection of SNP TSC0038132
atctacgaatctc

SEQ ID NO: 151045 - DNA, 13 bp, Artificial Sequence
  Oligonucleotide for detection of SNP TSC0038136
atttagatagaat

SEQ ID NO: 151046 - DNA, 13 bp, Artificial Sequence
  Oligonucleotide for detection of SNP TSC0038136
attctatctaaat

SEQ ID NO: 151047 - DNA, 13 bp, Artificial Sequence
  Oligonucleotide for detection of SNP TSC0038136
atttaggtagaat

SEQ ID NO: 151048 - DNA, 13 bp, Artificial Sequence
  Oligonucleotide for detection of SNP TSC0038136
attctacctaaat

SEQ ID NO: 151049 - DNA, 13 bp, Artificial Sequence
  Oligonucleotide for detection of SNP TSC0038137
tatttttgggaga

SEQ ID NO: 151050 - DNA, 13 bp, Artificial Sequence
  Oligonucleotide for detection of SNP TSC0038137
tctcccaaaaata

SEQ ID NO: 151051 - DNA, 13 bp, Artificial Sequence
  Oligonucleotide for detection of SNP TSC0038137
tattttggggaga

SEQ ID NO: 151052 - DNA, 13 bp, Artificial Sequence
  Oligonucleotide for detection of SNP TSC0038137
tctccccaaaata

SEQ ID NO: 151053 - DNA, 13 bp, Artificial Sequence
  Oligonucleotide for detection of SNP TSC0038137
tatttcggggaga

SEQ ID NO: 151054 - DNA, 13 bp, Artificial Sequence
  Oligonucleotide for detection of SNP TSC0038137
tctccccgaaata

SEQ ID NO: 151055 - DNA, 13 bp, Artificial Sequence
  Oligonucleotide for detection of SNP TSC0038138
aatgtagaagagy

SEQ ID NO: 151056 - DNA, 13 bp, Artificial Sequence
  Oligonucleotide for detection of SNP TSC0038138
rctcttctacatt

SEQ ID NO: 151057 - DNA, 13 bp, Artificial Sequence
  Oligonucleotide for detection of SNP TSC0038138
aatgtaaaagagy

SEQ ID NO: 151058 - DNA, 13 bp, Artificial Sequence
  Oligonucleotide for detection of SNP TSC0038138
rctcttttacatt

SEQ ID NO: 151059 - DNA, 13 bp, Artificial Sequence
  Oligonucleotide for detection of SNP TSC0038139
tagttgatggtgg

SEQ ID NO: 151060 - DNA, 13 bp, Artificial Sequence
  Oligonucleotide for detection of SNP TSC0038139
ccaccatcaacta

SEQ ID NO: 151061 - DNA, 13 bp, Artificial Sequence
  Oligonucleotide for detection of SNP TSC0038139
tagttggtggtgg

SEQ ID NO: 151062 - DNA, 13 bp, Artificial Sequence
  Oligonucleotide for detection of SNP TSC0038139
ccaccaccaacta

SEQ ID NO: 151063 - DNA, 13 bp, Artificial Sequence
  Oligonucleotide for detection of SNP TSC0038139
tagttgacggtgg

SEQ ID NO: 151064 - DNA, 13 bp, Artificial Sequence
  Oligonucleotide for detection of SNP TSC0038139
ccaccgtcaacta

SEQ ID NO: 151065 - DNA, 13 bp, Artificial Sequence
  Oligonucleotide for detection of SNP TSC0038139
tagttggcggtgg

SEQ ID NO: 151066 - DNA, 13 bp, Artificial Sequence
  Oligonucleotide for detection of SNP TSC0038139
ccaccgccaacta

SEQ ID NO: 151067 - DNA, 13 bp, Artificial Sequence
  Oligonucleotide for detection of SNP TSC0038141
gttaatgtttaaa

SEQ ID NO: 151068 - DNA, 13 bp, Artificial Sequence
  Oligonucleotide for detection of SNP TSC0038141
tttaaacattaac

SEQ ID NO: 151069 - DNA, 13 bp, Artificial Sequence
  Oligonucleotide for detection of SNP TSC0038141
gttaatatttaaa

SEQ ID NO: 151070 - DNA, 13 bp, Artificial Sequence
  Oligonucleotide for detection of SNP TSC0038141
tttaaatattaac

SEQ ID NO: 151071 - DNA, 13 bp, Artificial Sequence
  Oligonucleotide for detection of SNP TSC0038142
gttttgagaatga

SEQ ID NO: 151072 - DNA, 13 bp, Artificial Sequence
  Oligonucleotide for detection of SNP TSC0038142
tcattctcaaaac

SEQ ID NO: 151073 - DNA, 13 bp, Artificial Sequence
  Oligonucleotide for detection of SNP TSC0038142
gttttgtgaatga

SEQ ID NO: 151074 - DNA, 13 bp, Artificial Sequence
  Oligonucleotide for detection of SNP TSC0038142
tcattcacaaaac

SEQ ID NO: 151075 - DNA, 13 bp, Artificial Sequence
  Oligonucleotide for detection of SNP TSC0038146
tatttgtggttgt

SEQ ID NO: 151076 - DNA, 13 bp, Artificial Sequence
  Oligonucleotide for detection of SNP TSC0038146
acaaccacaaata

SEQ ID NO: 151077 - DNA, 13 bp, Artificial Sequence
  Oligonucleotide for detection of SNP TSC0038146
tatttgcggttgt

SEQ ID NO: 151078 - DNA, 13 bp, Artificial Sequence
  Oligonucleotide for detection of SNP TSC0038146
acaaccgcaaata

SEQ ID NO: 151079 - DNA, 13 bp, Artificial Sequence
  Oligonucleotide for detection of SNP TSC0038146
ataattgtagatg

SEQ ID NO: 151080 - DNA, 13 bp, Artificial Sequence
  Oligonucleotide for detection of SNP TSC0038146
catctacaattat

SEQ ID NO: 151081 - DNA, 13 bp, Artificial Sequence
  Oligonucleotide for detection of SNP TSC0038146
ataattatagatg

SEQ ID NO: 151082 - DNA, 13 bp, Artificial Sequence
  Oligonucleotide for detection of SNP TSC0038146
catctataattat

SEQ ID NO: 151083 - DNA, 13 bp, Artificial Sequence
  Oligonucleotide for detection of SNP TSC0038146
ataatcgtagatg

SEQ ID NO: 151084 - DNA, 13 bp, Artificial Sequence
  Oligonucleotide for detection of SNP TSC0038146
catctacgattat

SEQ ID NO: 151085 - DNA, 13 bp, Artificial Sequence
  Oligonucleotide for detection of SNP TSC0038147
gtggggtgaggtt

SEQ ID NO: 151086 - DNA, 13 bp, Artificial Sequence
  Oligonucleotide for detection of SNP TSC0038147
aacctcaccccac

SEQ ID NO: 151087 - DNA, 13 bp, Artificial Sequence
  Oligonucleotide for detection of SNP TSC0038147
gtggggcgaggtt

SEQ ID NO: 151088 - DNA, 13 bp, Artificial Sequence
  Oligonucleotide for detection of SNP TSC0038147
aacctcgccccac

SEQ ID NO: 151089 - DNA, 13 bp, Artificial Sequence
  Oligonucleotide for detection of SNP TSC0038147
agttttgttttay

SEQ ID NO: 151090 - DNA, 13 bp, Artificial Sequence
  Oligonucleotide for detection of SNP TSC0038147
rtaaaacaaaact

SEQ ID NO: 151091 - DNA, 13 bp, Artificial Sequence
  Oligonucleotide for detection of SNP TSC0038147
agtttcgttttay

SEQ ID NO: 151092 - DNA, 13 bp, Artificial Sequence
  Oligonucleotide for detection of SNP TSC0038147
rtaaaacgaaact

SEQ ID NO: 151093 - DNA, 13 bp, Artificial Sequence
  Oligonucleotide for detection of SNP TSC0038149
gggatgggaagtg

SEQ ID NO: 151094 - DNA, 13 bp, Artificial Sequence
  Oligonucleotide for detection of SNP TSC0038149
cacttcccatccc

SEQ ID NO: 151095 - DNA, 13 bp, Artificial Sequence
  Oligonucleotide for detection of SNP TSC0038149
gggatgagaagtg

SEQ ID NO: 151096 - DNA, 13 bp, Artificial Sequence
  Oligonucleotide for detection of SNP TSC0038149
cacttctcatccc

SEQ ID NO: 151097 - DNA, 13 bp, Artificial Sequence
  Oligonucleotide for detection of SNP TSC0038150
tggttgattatta

SEQ ID NO: 151098 - DNA, 13 bp, Artificial Sequence
  Oligonucleotide for detection of SNP TSC0038150
taataatcaacca

SEQ ID NO: 151099 - DNA, 13 bp, Artificial Sequence
  Oligonucleotide for detection of SNP TSC0038150
tggttggttatta

SEQ ID NO: 151100 - DNA, 13 bp, Artificial Sequence
  Oligonucleotide for detection of SNP TSC0038150
taataaccaacca

SEQ ID NO: 151101 - DNA, 13 bp, Artificial Sequence
  Oligonucleotide for detection of SNP TSC0038152
attattattgata

SEQ ID NO: 151102 - DNA, 13 bp, Artificial Sequence
  Oligonucleotide for detection of SNP TSC0038152
tatcaataataat

SEQ ID NO: 151103 - DNA, 13 bp, Artificial Sequence
  Oligonucleotide for detection of SNP TSC0038152
attattgttgata

SEQ ID NO: 151104 - DNA, 13 bp, Artificial Sequence
  Oligonucleotide for detection of SNP TSC0038152
tatcaacaataat

SEQ ID NO: 151105 - DNA, 13 bp, Artificial Sequence
  Oligonucleotide for detection of SNP TSC0038153
agaggtaggaagt

SEQ ID NO: 151106 - DNA, 13 bp, Artificial Sequence
  Oligonucleotide for detection of SNP TSC0038153
acttcctacctct

SEQ ID NO: 151107 - DNA, 13 bp, Artificial Sequence
  Oligonucleotide for detection of SNP TSC0038153
agaggtgggaagt

SEQ ID NO: 151108 - DNA, 13 bp, Artificial Sequence
  Oligonucleotide for detection of SNP TSC0038153
acttcccacctct

SEQ ID NO: 151109 - DNA, 13 bp, Artificial Sequence
  Oligonucleotide for detection of SNP TSC0038153
agaggcgggaagt

SEQ ID NO: 151110 - DNA, 13 bp, Artificial Sequence
  Oligonucleotide for detection of SNP TSC0038153
acttcccgcctct

SEQ ID NO: 151111 - DNA, 13 bp, Artificial Sequence
  Oligonucleotide for detection of SNP TSC0038154
tttaagtgtgttt

SEQ ID NO: 151112 - DNA, 13 bp, Artificial Sequence
  Oligonucleotide for detection of SNP TSC0038154
aaacacacttaaa

SEQ ID NO: 151113 - DNA, 13 bp, Artificial Sequence
  Oligonucleotide for detection of SNP TSC0038154
tttaagcgtgttt

SEQ ID NO: 151114 - DNA, 13 bp, Artificial Sequence
  Oligonucleotide for detection of SNP TSC0038154
aaacacgcttaaa

SEQ ID NO: 151115 - DNA, 13 bp, Artificial Sequence
  Oligonucleotide for detection of SNP TSC0038154
aggtatgtttaga

SEQ ID NO: 151116 - DNA, 13 bp, Artificial Sequence
  Oligonucleotide for detection of SNP TSC0038154
tctaaacatacct

SEQ ID NO: 151117 - DNA, 13 bp, Artificial Sequence
  Oligonucleotide for detection of SNP TSC0038154
aggtatatttaga

SEQ ID NO: 151118 - DNA, 13 bp, Artificial Sequence
  Oligonucleotide for detection of SNP TSC0038154
tctaaatatacct

SEQ ID NO: 151119 - DNA, 13 bp, Artificial Sequence
  Oligonucleotide for detection of SNP TSC0038154
aggtacgtttaga

SEQ ID NO: 151120 - DNA, 13 bp, Artificial Sequence
  Oligonucleotide for detection of SNP TSC0038154
tctaaacgtacct

SEQ ID NO: 151121 - DNA, 13 bp, Artificial Sequence
  Oligonucleotide for detection of SNP TSC0038155
attggagtaataa

SEQ ID NO: 151122 - DNA, 13 bp, Artificial Sequence
  Oligonucleotide for detection of SNP TSC0038155
ttattactccaat

SEQ ID NO: 151123 - DNA, 13 bp, Artificial Sequence
  Oligonucleotide for detection of SNP TSC0038155
attggaataataa

SEQ ID NO: 151124 - DNA, 13 bp, Artificial Sequence
  Oligonucleotide for detection of SNP TSC0038155
ttattattccaat

SEQ ID NO: 151125 - DNA, 13 bp, Artificial Sequence
  Oligonucleotide for detection of SNP TSC0038156
ggttttgaaagtt

SEQ ID NO: 151126 - DNA, 13 bp, Artificial Sequence
  Oligonucleotide for detection of SNP TSC0038156
aactttcaaaacc

SEQ ID NO: 151127 - DNA, 13 bp, Artificial Sequence
  Oligonucleotide for detection of SNP TSC0038156
ggtttcgaaagtt

SEQ ID NO: 151128 - DNA, 13 bp, Artificial Sequence
  Oligonucleotide for detection of SNP TSC0038156
aactttcgaaacc

SEQ ID NO: 151129 - DNA, 13 bp, Artificial Sequence
  Oligonucleotide for detection of SNP TSC0038156
agtttttgaagty

SEQ ID NO: 151130 - DNA, 13 bp, Artificial Sequence
  Oligonucleotide for detection of SNP TSC0038156
racttcaaaaact

SEQ ID NO: 151131 - DNA, 13 bp, Artificial Sequence
  Oligonucleotide for detection of SNP TSC0038156
agttttcgaagty

SEQ ID NO: 151132 - DNA, 13 bp, Artificial Sequence
  Oligonucleotide for detection of SNP TSC0038156
racttcgaaaact

SEQ ID NO: 151133 - DNA, 13 bp, Artificial Sequence
  Oligonucleotide for detection of SNP TSC0038159
ttattcgtattaa

SEQ ID NO: 151134 - DNA, 13 bp, Artificial Sequence
  Oligonucleotide for detection of SNP TSC0038159
ttaatacgaataa

SEQ ID NO: 151135 - DNA, 13 bp, Artificial Sequence
  Oligonucleotide for detection of SNP TSC0038159
ttgatgtgggtga

SEQ ID NO: 151136 - DNA, 13 bp, Artificial Sequence
  Oligonucleotide for detection of SNP TSC0038159
tcacccacatcaa

SEQ ID NO: 151137 - DNA, 13 bp, Artificial Sequence
  Oligonucleotide for detection of SNP TSC0038159
ttgatgcgggtga

SEQ ID NO: 151138 - DNA, 13 bp, Artificial Sequence
  Oligonucleotide for detection of SNP TSC0038159
tcacccgcatcaa

SEQ ID NO: 151139 - DNA, 13 bp, Artificial Sequence
  Oligonucleotide for detection of SNP TSC0038162
tatttggagttty

SEQ ID NO: 151140 - DNA, 13 bp, Artificial Sequence
  Oligonucleotide for detection of SNP TSC0038162
raaactccaaata

SEQ ID NO: 151141 - DNA, 13 bp, Artificial Sequence
  Oligonucleotide for detection of SNP TSC0038162
tatttgaagttty

SEQ ID NO: 151142 - DNA, 13 bp, Artificial Sequence
  Oligonucleotide for detection of SNP TSC0038162
raaacttcaaata

SEQ ID NO: 151143 - DNA, 13 bp, Artificial Sequence
  Oligonucleotide for detection of SNP TSC0038162
tattcggagttty

SEQ ID NO: 151144 - DNA, 13 bp, Artificial Sequence
  Oligonucleotide for detection of SNP TSC0038162
raaactccgaata

SEQ ID NO: 151145 - DNA, 13 bp, Artificial Sequence
  Oligonucleotide for detection of SNP TSC0038162
tattcgaagttty

SEQ ID NO: 151146 - DNA, 13 bp, Artificial Sequence
  Oligonucleotide for detection of SNP TSC0038162
raaacttcgaata

SEQ ID NO: 151147 - DNA, 13 bp, Artificial Sequence
  Oligonucleotide for detection of SNP TSC0038163
agtgttatgtaag

SEQ ID NO: 151148 - DNA, 13 bp, Artificial Sequence
  Oligonucleotide for detection of SNP TSC0038163
cttacataacact

SEQ ID NO: 151149 - DNA, 13 bp, Artificial Sequence
  Oligonucleotide for detection of SNP TSC0038163
agtgttgtgtaag

SEQ ID NO: 151150 - DNA, 13 bp, Artificial Sequence
  Oligonucleotide for detection of SNP TSC0038163
cttacacaacact

SEQ ID NO: 151151 - DNA, 13 bp, Artificial Sequence
  Oligonucleotide for detection of SNP TSC0038163
agcgttatgtaag

SEQ ID NO: 151152 - DNA, 13 bp, Artificial Sequence
  Oligonucleotide for detection of SNP TSC0038163
cttacataacgct

SEQ ID NO: 151153 - DNA, 13 bp, Artificial Sequence
  Oligonucleotide for detection of SNP TSC0038163
agcgttgtgtaag

SEQ ID NO: 151154 - DNA, 13 bp, Artificial Sequence
  Oligonucleotide for detection of SNP TSC0038163
cttacacaacgct

SEQ ID NO: 151155 - DNA, 13 bp, Artificial Sequence
  Oligonucleotide for detection of SNP TSC0038163
agtgtcgtgtaag

SEQ ID NO: 151156 - DNA, 13 bp, Artificial Sequence
  Oligonucleotide for detection of SNP TSC0038163
cttacacgacact

SEQ ID NO: 151157 - DNA, 13 bp, Artificial Sequence
  Oligonucleotide for detection of SNP TSC0038163
agcgtcgtgtaag

SEQ ID NO: 151158 - DNA, 13 bp, Artificial Sequence
  Oligonucleotide for detection of SNP TSC0038163
cttacacgacgct

SEQ ID NO: 151159 - DNA, 13 bp, Artificial Sequence
  Oligonucleotide for detection of SNP TSC0038163
tttgtatggtgtt

SEQ ID NO: 151160 - DNA, 13 bp, Artificial Sequence
  Oligonucleotide for detection of SNP TSC0038163
aacaccatacaaa

SEQ ID NO: 151161 - DNA, 13 bp, Artificial Sequence
  Oligonucleotide for detection of SNP TSC0038163
tttgtatggcgtt

SEQ ID NO: 151162 - DNA, 13 bp, Artificial Sequence
  Oligonucleotide for detection of SNP TSC0038163
aacgccatacaaa

SEQ ID NO: 151163 - DNA, 13 bp, Artificial Sequence
  Oligonucleotide for detection of SNP TSC0038163
tttgtacggtgtt

SEQ ID NO: 151164 - DNA, 13 bp, Artificial Sequence
  Oligonucleotide for detection of SNP TSC0038163
aacaccgtacaaa

SEQ ID NO: 151165 - DNA, 13 bp, Artificial Sequence
  Oligonucleotide for detection of SNP TSC0038163
tttgtacggcgtt

SEQ ID NO: 151166 - DNA, 13 bp, Artificial Sequence
  Oligonucleotide for detection of SNP TSC0038163
aacgccgtacaaa

SEQ ID NO: 151167 - DNA, 13 bp, Artificial Sequence
  Oligonucleotide for detection of SNP TSC0038165
aaaaagtaggttg

SEQ ID NO: 151168 - DNA, 13 bp, Artificial Sequence
  Oligonucleotide for detection of SNP TSC0038165
caacctacttttt

SEQ ID NO: 151169 - DNA, 13 bp, Artificial Sequence
  Oligonucleotide for detection of SNP TSC0038165
aaaaagaaggttg

SEQ ID NO: 151170 - DNA, 13 bp, Artificial Sequence
  Oligonucleotide for detection of SNP TSC0038165
caaccttcttttt

SEQ ID NO: 151171 - DNA, 13 bp, Artificial Sequence
  Oligonucleotide for detection of SNP TSC0038166
ttttggattatty

SEQ ID NO: 151172 - DNA, 13 bp, Artificial Sequence
  Oligonucleotide for detection of SNP TSC0038166
raataatccaaaa

SEQ ID NO: 151173 - DNA, 13 bp, Artificial Sequence
  Oligonucleotide for detection of SNP TSC0038166
ttttgggttatty

SEQ ID NO: 151174 - DNA, 13 bp, Artificial Sequence
  Oligonucleotide for detection of SNP TSC0038166
raataacccaaaa

SEQ ID NO: 151175 - DNA, 13 bp, Artificial Sequence
  Oligonucleotide for detection of SNP TSC0038169
ttttgttgggagg

SEQ ID NO: 151176 - DNA, 13 bp, Artificial Sequence
  Oligonucleotide for detection of SNP TSC0038169
cctcccaacaaaa

SEQ ID NO: 151177 - DNA, 13 bp, Artificial Sequence
  Oligonucleotide for detection of SNP TSC0038169
ttttgtggggagg

SEQ ID NO: 151178 - DNA, 13 bp, Artificial Sequence
  Oligonucleotide for detection of SNP TSC0038169
cctccccacaaaa

SEQ ID NO: 151179 - DNA, 13 bp, Artificial Sequence
  Oligonucleotide for detection of SNP TSC0038169
tttcgttgggagg

SEQ ID NO: 151180 - DNA, 13 bp, Artificial Sequence
  Oligonucleotide for detection of SNP TSC0038169
cctcccaacgaaa

SEQ ID NO: 151181 - DNA, 13 bp, Artificial Sequence
  Oligonucleotide for detection of SNP TSC0038169
tttcgtggggagg

SEQ ID NO: 151182 - DNA, 13 bp, Artificial Sequence
  Oligonucleotide for detection of SNP TSC0038169
cctccccacgaaa

SEQ ID NO: 151183 - DNA, 13 bp, Artificial Sequence
  Oligonucleotide for detection of SNP TSC0038169
ttttgtcgggagg

SEQ ID NO: 151184 - DNA, 13 bp, Artificial Sequence
  Oligonucleotide for detection of SNP TSC0038169
cctcccgacaaaa

SEQ ID NO: 151185 - DNA, 13 bp, Artificial Sequence
  Oligonucleotide for detection of SNP TSC0038169
ttttgcggggagg

SEQ ID NO: 151186 - DNA, 13 bp, Artificial Sequence
  Oligonucleotide for detection of SNP TSC0038169
cctccccgcaaaa

SEQ ID NO: 151187 - DNA, 13 bp, Artificial Sequence
  Oligonucleotide for detection of SNP TSC0038169
tttcgtcgggagg

SEQ ID NO: 151188 - DNA, 13 bp, Artificial Sequence
  Oligonucleotide for detection of SNP TSC0038169
cctcccgacgaaa

SEQ ID NO: 151189 - DNA, 13 bp, Artificial Sequence
  Oligonucleotide for detection of SNP TSC0038169
tttcgcggggagg

SEQ ID NO: 151190 - DNA, 13 bp, Artificial Sequence
  Oligonucleotide for detection of SNP TSC0038169
cctccccgcgaaa

SEQ ID NO: 151191 - DNA, 13 bp, Artificial Sequence
  Oligonucleotide for detection of SNP TSC0038169
ttttttggtgagg

SEQ ID NO: 151192 - DNA, 13 bp, Artificial Sequence
  Oligonucleotide for detection of SNP TSC0038169
cctcaccaaaaaa

SEQ ID NO: 151193 - DNA, 13 bp, Artificial Sequence
  Oligonucleotide for detection of SNP TSC0038169
tttttttgtgagg

SEQ ID NO: 151194 - DNA, 13 bp, Artificial Sequence
  Oligonucleotide for detection of SNP TSC0038169
cctcacaaaaaaa

SEQ ID NO: 151195 - DNA, 13 bp, Artificial Sequence
  Oligonucleotide for detection of SNP TSC0038169
tttttcggtgagg

SEQ ID NO: 151196 - DNA, 13 bp, Artificial Sequence
  Oligonucleotide for detection of SNP TSC0038169
cctcaccgaaaaa

SEQ ID NO: 151197 - DNA, 13 bp, Artificial Sequence
  Oligonucleotide for detection of SNP TSC0038169
ttttttcgtgagg

SEQ ID NO: 151198 - DNA, 13 bp, Artificial Sequence
  Oligonucleotide for detection of SNP TSC0038169
cctcacgaaaaaa

SEQ ID NO: 151199 - DNA, 13 bp, Artificial Sequence
  Oligonucleotide for detection of SNP TSC0038169
ttttttggcgagg

SEQ ID NO: 151200 - DNA, 13 bp, Artificial Sequence
  Oligonucleotide for detection of SNP TSC0038169
cctcgccaaaaaa

SEQ ID NO: 151201 - DNA, 13 bp, Artificial Sequence
  Oligonucleotide for detection of SNP TSC0038169
tttttttgcgagg

SEQ ID NO: 151202 - DNA, 13 bp, Artificial Sequence
  Oligonucleotide for detection of SNP TSC0038169
cctcgcaaaaaaa

SEQ ID NO: 151203 - DNA, 13 bp, Artificial Sequence
  Oligonucleotide for detection of SNP TSC0038169
tttttcggcgagg

SEQ ID NO: 151204 - DNA, 13 bp, Artificial Sequence
  Oligonucleotide for detection of SNP TSC0038169
cctcgccgaaaaa

SEQ ID NO: 151205 - DNA, 13 bp, Artificial Sequence
  Oligonucleotide for detection of SNP TSC0038169
ttttttcgcgagg

SEQ ID NO: 151206 - DNA, 13 bp, Artificial Sequence
  Oligonucleotide for detection of SNP TSC0038169
cctcgcgaaaaaa

SEQ ID NO: 151207 - DNA, 13 bp, Artificial Sequence
  Oligonucleotide for detection of SNP TSC0038171
aaagaaatgatag

SEQ ID NO: 151208 - DNA, 13 bp, Artificial Sequence
  Oligonucleotide for detection of SNP TSC0038171
ctatcatttcttt

SEQ ID NO: 151209 - DNA, 13 bp, Artificial Sequence
  Oligonucleotide for detection of SNP TSC0038171
aaagaattgatag

SEQ ID NO: 151210 - DNA, 13 bp, Artificial Sequence
  Oligonucleotide for detection of SNP TSC0038171
ctatcaattcttt

SEQ ID NO: 151211 - DNA, 13 bp, Artificial Sequence
  Oligonucleotide for detection of SNP TSC0038171
ttgttattttttt

SEQ ID NO: 151212 - DNA, 13 bp, Artificial Sequence
  Oligonucleotide for detection of SNP TSC0038171
aaaaaaataacaa

SEQ ID NO: 151213 - DNA, 13 bp, Artificial Sequence
  Oligonucleotide for detection of SNP TSC0038172
gtttagaaggtgg

SEQ ID NO: 151214 - DNA, 13 bp, Artificial Sequence
  Oligonucleotide for detection of SNP TSC0038172
ccaccttctaaac

SEQ ID NO: 151215 - DNA, 13 bp, Artificial Sequence
  Oligonucleotide for detection of SNP TSC0038172
gtttaggaggtgg

SEQ ID NO: 151216 - DNA, 13 bp, Artificial Sequence
  Oligonucleotide for detection of SNP TSC0038172
ccacctcctaaac

SEQ ID NO: 151217 - DNA, 13 bp, Artificial Sequence
  Oligonucleotide for detection of SNP TSC0038172
gtttagaaggcgg

SEQ ID NO: 151218 - DNA, 13 bp, Artificial Sequence
  Oligonucleotide for detection of SNP TSC0038172
ccgccttctaaac

SEQ ID NO: 151219 - DNA, 13 bp, Artificial Sequence
  Oligonucleotide for detection of SNP TSC0038172
gtttaggaggcgg

SEQ ID NO: 151220 - DNA, 13 bp, Artificial Sequence
  Oligonucleotide for detection of SNP TSC0038172
ccgcctcctaaac

SEQ ID NO: 151221 - DNA, 13 bp, Artificial Sequence
  Oligonucleotide for detection of SNP TSC0038173
atagagagagatt

SEQ ID NO: 151222 - DNA, 13 bp, Artificial Sequence
  Oligonucleotide for detection of SNP TSC0038173
aatctctctctat

SEQ ID NO: 151223 - DNA, 13 bp, Artificial Sequence
  Oligonucleotide for detection of SNP TSC0038174
atatatggtttta

SEQ ID NO: 151224 - DNA, 13 bp, Artificial Sequence
  Oligonucleotide for detection of SNP TSC0038174
taaaaccatatat

SEQ ID NO: 151225 - DNA, 13 bp, Artificial Sequence
  Oligonucleotide for detection of SNP TSC0038174
atatattgtttta

SEQ ID NO: 151226 - DNA, 13 bp, Artificial Sequence
  Oligonucleotide for detection of SNP TSC0038174
taaaacaatatat

SEQ ID NO: 151227 - DNA, 13 bp, Artificial Sequence
  Oligonucleotide for detection of SNP TSC0038174
atatacggtttta

SEQ ID NO: 151228 - DNA, 13 bp, Artificial Sequence
  Oligonucleotide for detection of SNP TSC0038174
taaaaccgtatat

SEQ ID NO: 151229 - DNA, 13 bp, Artificial Sequence
  Oligonucleotide for detection of SNP TSC0038174
taggattgtgtgt

SEQ ID NO: 151230 - DNA, 13 bp, Artificial Sequence
  Oligonucleotide for detection of SNP TSC0038174
acacacaatccta

SEQ ID NO: 151231 - DNA, 13 bp, Artificial Sequence
  Oligonucleotide for detection of SNP TSC0038174
taggatagtgtgt

SEQ ID NO: 151232 - DNA, 13 bp, Artificial Sequence
  Oligonucleotide for detection of SNP TSC0038174
acacactatccta

SEQ ID NO: 151233 - DNA, 13 bp, Artificial Sequence
  Oligonucleotide for detection of SNP TSC0038174
taggatcgtgtgt

SEQ ID NO: 151234 - DNA, 13 bp, Artificial Sequence
  Oligonucleotide for detection of SNP TSC0038174
acacacgatccta

SEQ ID NO: 151235 - DNA, 13 bp, Artificial Sequence
  Oligonucleotide for detection of SNP TSC0038181
tggtttgggattt

SEQ ID NO: 151236 - DNA, 13 bp, Artificial Sequence
  Oligonucleotide for detection of SNP TSC0038181
aaatcccaaacca

SEQ ID NO: 151237 - DNA, 13 bp, Artificial Sequence
  Oligonucleotide for detection of SNP TSC0038181
tggtttaggattt

SEQ ID NO: 151238 - DNA, 13 bp, Artificial Sequence
  Oligonucleotide for detection of SNP TSC0038181
aaatcctaaacca

SEQ ID NO: 151239 - DNA, 13 bp, Artificial Sequence
  Oligonucleotide for detection of SNP TSC0038182
aagtgttgattta

SEQ ID NO: 151240 - DNA, 13 bp, Artificial Sequence
  Oligonucleotide for detection of SNP TSC0038182
taaatcaacactt

SEQ ID NO: 151241 - DNA, 13 bp, Artificial Sequence
  Oligonucleotide for detection of SNP TSC0038182
aagtgtcgattta

SEQ ID NO: 151242 - DNA, 13 bp, Artificial Sequence
  Oligonucleotide for detection of SNP TSC0038182
taaatcgacactt

SEQ ID NO: 151243 - DNA, 13 bp, Artificial Sequence
  Oligonucleotide for detection of SNP TSC0038182
tggattggtattt

SEQ ID NO: 151244 - DNA, 13 bp, Artificial Sequence
  Oligonucleotide for detection of SNP TSC0038182
aaataccaatcca

SEQ ID NO: 151245 - DNA, 13 bp, Artificial Sequence
  Oligonucleotide for detection of SNP TSC0038182
tggattagtattt

SEQ ID NO: 151246 - DNA, 13 bp, Artificial Sequence
  Oligonucleotide for detection of SNP TSC0038182
aaatactaatcca

SEQ ID NO: 151247 - DNA, 13 bp, Artificial Sequence
  Oligonucleotide for detection of SNP TSC0038182
tggatcggtattt

SEQ ID NO: 151248 - DNA, 13 bp, Artificial Sequence
  Oligonucleotide for detection of SNP TSC0038182
aaataccgatcca

SEQ ID NO: 151249 - DNA, 13 bp, Artificial Sequence
  Oligonucleotide for detection of SNP TSC0038185
atggttgtgattt

SEQ ID NO: 151250 - DNA, 13 bp, Artificial Sequence
  Oligonucleotide for detection of SNP TSC0038185
aaatcacaaccat

SEQ ID NO: 151251 - DNA, 13 bp, Artificial Sequence
  Oligonucleotide for detection of SNP TSC0038185
atggttatgattt

SEQ ID NO: 151252 - DNA, 13 bp, Artificial Sequence
  Oligonucleotide for detection of SNP TSC0038185
aaatcataaccat

SEQ ID NO: 151253 - DNA, 13 bp, Artificial Sequence
  Oligonucleotide for detection of SNP TSC0038191
ttttagtttgtgg

SEQ ID NO: 151254 - DNA, 13 bp, Artificial Sequence
  Oligonucleotide for detection of SNP TSC0038191
ccacaaactaaaa

SEQ ID NO: 151255 - DNA, 13 bp, Artificial Sequence
  Oligonucleotide for detection of SNP TSC0038191
ttataatttaggg

SEQ ID NO: 151256 - DNA, 13 bp, Artificial Sequence
  Oligonucleotide for detection of SNP TSC0038191
ccctaaattataa

SEQ ID NO: 151257 - DNA, 13 bp, Artificial Sequence
  Oligonucleotide for detection of SNP TSC0038191
ttataaattaggg

SEQ ID NO: 151258 - DNA, 13 bp, Artificial Sequence
  Oligonucleotide for detection of SNP TSC0038191
ccctaatttataa

SEQ ID NO: 151259 - DNA, 13 bp, Artificial Sequence
  Oligonucleotide for detection of SNP TSC0038192
tgaataatataat

SEQ ID NO: 151260 - DNA, 13 bp, Artificial Sequence
  Oligonucleotide for detection of SNP TSC0038192
attatattattca

SEQ ID NO: 151261 - DNA, 13 bp, Artificial Sequence
  Oligonucleotide for detection of SNP TSC0038192
tgaatagtataat

SEQ ID NO: 151262 - DNA, 13 bp, Artificial Sequence
  Oligonucleotide for detection of SNP TSC0038192
attatactattca

SEQ ID NO: 151263 - DNA, 13 bp, Artificial Sequence
  Oligonucleotide for detection of SNP TSC0038193
agtttattgtttt

SEQ ID NO: 151264 - DNA, 13 bp, Artificial Sequence
  Oligonucleotide for detection of SNP TSC0038193
aaaacaataaact

SEQ ID NO: 151265 - DNA, 13 bp, Artificial Sequence
  Oligonucleotide for detection of SNP TSC0038193
aaagtagtaggtt

SEQ ID NO: 151266 - DNA, 13 bp, Artificial Sequence
  Oligonucleotide for detection of SNP TSC0038193
aacctactacttt

SEQ ID NO: 151267 - DNA, 13 bp, Artificial Sequence
  Oligonucleotide for detection of SNP TSC0038193
aaagtattaggtt

SEQ ID NO: 151268 - DNA, 13 bp, Artificial Sequence
  Oligonucleotide for detection of SNP TSC0038193
aacctaatacttt

SEQ ID NO: 151269 - DNA, 13 bp, Artificial Sequence
  Oligonucleotide for detection of SNP TSC0038195
tattgtgtttatt

SEQ ID NO: 151270 - DNA, 13 bp, Artificial Sequence
  Oligonucleotide for detection of SNP TSC0038195
aataaacacaata

SEQ ID NO: 151271 - DNA, 13 bp, Artificial Sequence
  Oligonucleotide for detection of SNP TSC0038195
tattgtttttatt

SEQ ID NO: 151272 - DNA, 13 bp, Artificial Sequence
  Oligonucleotide for detection of SNP TSC0038195
aataaaaacaata

SEQ ID NO: 151273 - DNA, 13 bp, Artificial Sequence
  Oligonucleotide for detection of SNP TSC0038195
agtgggtataatg

SEQ ID NO: 151274 - DNA, 13 bp, Artificial Sequence
  Oligonucleotide for detection of SNP TSC0038195
cattatacccact

SEQ ID NO: 151275 - DNA, 13 bp, Artificial Sequence
  Oligonucleotide for detection of SNP TSC0038195
agtgggaataatg

SEQ ID NO: 151276 - DNA, 13 bp, Artificial Sequence
  Oligonucleotide for detection of SNP TSC0038195
cattattcccact

SEQ ID NO: 151277 - DNA, 13 bp, Artificial Sequence
  Oligonucleotide for detection of SNP TSC0038196
agtaagatggtty

SEQ ID NO: 151278 - DNA, 13 bp, Artificial Sequence
  Oligonucleotide for detection of SNP TSC0038196
raaccatcttact

SEQ ID NO: 151279 - DNA, 13 bp, Artificial Sequence
  Oligonucleotide for detection of SNP TSC0038196
agtaaggtggtty

SEQ ID NO: 151280 - DNA, 13 bp, Artificial Sequence
  Oligonucleotide for detection of SNP TSC0038196
raaccaccttact

SEQ ID NO: 151281 - DNA, 13 bp, Artificial Sequence
  Oligonucleotide for detection of SNP TSC0038200
tataggagtaaga

SEQ ID NO: 151282 - DNA, 13 bp, Artificial Sequence
  Oligonucleotide for detection of SNP TSC0038200
tcttactcctata

SEQ ID NO: 151283 - DNA, 13 bp, Artificial Sequence
  Oligonucleotide for detection of SNP TSC0038200
tataggtgtaaga

SEQ ID NO: 151284 - DNA, 13 bp, Artificial Sequence
  Oligonucleotide for detection of SNP TSC0038200
tcttacacctata

SEQ ID NO: 151285 - DNA, 13 bp, Artificial Sequence
  Oligonucleotide for detection of SNP TSC0038200
ttttgtttttgta

SEQ ID NO: 151286 - DNA, 13 bp, Artificial Sequence
  Oligonucleotide for detection of SNP TSC0038200
tacaaaaacaaaa

SEQ ID NO: 151287 - DNA, 13 bp, Artificial Sequence
  Oligonucleotide for detection of SNP TSC0038201
atatttgtgatay

SEQ ID NO: 151288 - DNA, 13 bp, Artificial Sequence
  Oligonucleotide for detection of SNP TSC0038201
rtatcacaaatat

SEQ ID NO: 151289 - DNA, 13 bp, Artificial Sequence
  Oligonucleotide for detection of SNP TSC0038201
atatttatgatay

SEQ ID NO: 151290 - DNA, 13 bp, Artificial Sequence
  Oligonucleotide for detection of SNP TSC0038201
rtatcataaatat

SEQ ID NO: 151291 - DNA, 13 bp, Artificial Sequence
  Oligonucleotide for detection of SNP TSC0038203
tagtaagagttty

SEQ ID NO: 151292 - DNA, 13 bp, Artificial Sequence
  Oligonucleotide for detection of SNP TSC0038203
raaactcttacta

SEQ ID NO: 151293 - DNA, 13 bp, Artificial Sequence
  Oligonucleotide for detection of SNP TSC0038203
tagtaaaagttty

SEQ ID NO: 151294 - DNA, 13 bp, Artificial Sequence
  Oligonucleotide for detection of SNP TSC0038203
raaacttttacta

SEQ ID NO: 151295 - DNA, 13 bp, Artificial Sequence
  Oligonucleotide for detection of SNP TSC0038204
tgtgaagaagttt

SEQ ID NO: 151296 - DNA, 13 bp, Artificial Sequence
  Oligonucleotide for detection of SNP TSC0038204
aaacttcttcaca

SEQ ID NO: 151297 - DNA, 13 bp, Artificial Sequence
  Oligonucleotide for detection of SNP TSC0038204
tgtgaataagttt

SEQ ID NO: 151298 - DNA, 13 bp, Artificial Sequence
  Oligonucleotide for detection of SNP TSC0038204
aaacttattcaca

SEQ ID NO: 151299 - DNA, 13 bp, Artificial Sequence
  Oligonucleotide for detection of SNP TSC0038204
aggtttttttata

SEQ ID NO: 151300 - DNA, 13 bp, Artificial Sequence
  Oligonucleotide for detection of SNP TSC0038204
tataaaaaaacct

SEQ ID NO: 151301 - DNA, 13 bp, Artificial Sequence
  Oligonucleotide for detection of SNP TSC0038204
aggtttatttata

SEQ ID NO: 151302 - DNA, 13 bp, Artificial Sequence
  Oligonucleotide for detection of SNP TSC0038204
tataaataaacct

SEQ ID NO: 151303 - DNA, 13 bp, Artificial Sequence
  Oligonucleotide for detection of SNP TSC0038206
aggttgatttaaa

SEQ ID NO: 151304 - DNA, 13 bp, Artificial Sequence
  Oligonucleotide for detection of SNP TSC0038206
tttaaatcaacct

SEQ ID NO: 151305 - DNA, 13 bp, Artificial Sequence
  Oligonucleotide for detection of SNP TSC0038206
aggttgttttaaa

SEQ ID NO: 151306 - DNA, 13 bp, Artificial Sequence
  Oligonucleotide for detection of SNP TSC0038206
tttaaaacaacct

SEQ ID NO: 151307 - DNA, 13 bp, Artificial Sequence
  Oligonucleotide for detection of SNP TSC0038206
tttggattaattt

SEQ ID NO: 151308 - DNA, 13 bp, Artificial Sequence
  Oligonucleotide for detection of SNP TSC0038206
aaattaatccaaa

SEQ ID NO: 151309 - DNA, 13 bp, Artificial Sequence
  Oligonucleotide for detection of SNP TSC0038206
tttggaataattt

SEQ ID NO: 151310 - DNA, 13 bp, Artificial Sequence
  Oligonucleotide for detection of SNP TSC0038206
aaattattccaaa

SEQ ID NO: 151311 - DNA, 13 bp, Artificial Sequence
  Oligonucleotide for detection of SNP TSC0038209
gtatgtagaatgt

SEQ ID NO: 151312 - DNA, 13 bp, Artificial Sequence
  Oligonucleotide for detection of SNP TSC0038209
acattctacatac

SEQ ID NO: 151313 - DNA, 13 bp, Artificial Sequence
  Oligonucleotide for detection of SNP TSC0038209
gtatgtggaatgt

SEQ ID NO: 151314 - DNA, 13 bp, Artificial Sequence
  Oligonucleotide for detection of SNP TSC0038209
acattccacatac

SEQ ID NO: 151315 - DNA, 13 bp, Artificial Sequence
  Oligonucleotide for detection of SNP TSC0038210
tatattatttgtt

SEQ ID NO: 151316 - DNA, 13 bp, Artificial Sequence
  Oligonucleotide for detection of SNP TSC0038210
aacaaataatata

SEQ ID NO: 151317 - DNA, 13 bp, Artificial Sequence
  Oligonucleotide for detection of SNP TSC0038210
tatattgtttgtt

SEQ ID NO: 151318 - DNA, 13 bp, Artificial Sequence
  Oligonucleotide for detection of SNP TSC0038210
aacaaacaatata

SEQ ID NO: 151319 - DNA, 13 bp, Artificial Sequence
  Oligonucleotide for detection of SNP TSC0038210
tatatcgtttgtt

SEQ ID NO: 151320 - DNA, 13 bp, Artificial Sequence
  Oligonucleotide for detection of SNP TSC0038210
aacaaacgatata

SEQ ID NO: 151321 - DNA, 13 bp, Artificial Sequence
  Oligonucleotide for detection of SNP TSC0038210
agtagatgatatg

SEQ ID NO: 151322 - DNA, 13 bp, Artificial Sequence
  Oligonucleotide for detection of SNP TSC0038210
catatcatctact

SEQ ID NO: 151323 - DNA, 13 bp, Artificial Sequence
  Oligonucleotide for detection of SNP TSC0038210
agtagacgatatg

SEQ ID NO: 151324 - DNA, 13 bp, Artificial Sequence
  Oligonucleotide for detection of SNP TSC0038210
catatcgtctact

SEQ ID NO: 151325 - DNA, 13 bp, Artificial Sequence
  Oligonucleotide for detection of SNP TSC0038215
ataaatattagtt

SEQ ID NO: 151326 - DNA, 13 bp, Artificial Sequence
  Oligonucleotide for detection of SNP TSC0038215
aactaatatttat

SEQ ID NO: 151327 - DNA, 13 bp, Artificial Sequence
  Oligonucleotide for detection of SNP TSC0038215
ataaattttagtt

SEQ ID NO: 151328 - DNA, 13 bp, Artificial Sequence
  Oligonucleotide for detection of SNP TSC0038215
aactaaaatttat

SEQ ID NO: 151329 - DNA, 13 bp, Artificial Sequence
  Oligonucleotide for detection of SNP TSC0038215
aattgatatttat

SEQ ID NO: 151330 - DNA, 13 bp, Artificial Sequence
  Oligonucleotide for detection of SNP TSC0038215
ataaatatcaatt

SEQ ID NO: 151331 - DNA, 13 bp, Artificial Sequence
  Oligonucleotide for detection of SNP TSC0038215
aattgagatttat

SEQ ID NO: 151332 - DNA, 13 bp, Artificial Sequence
  Oligonucleotide for detection of SNP TSC0038215
ataaatctcaatt

SEQ ID NO: 151333 - DNA, 13 bp, Artificial Sequence
  Oligonucleotide for detection of SNP TSC0038216
atgaagtttttga

SEQ ID NO: 151334 - DNA, 13 bp, Artificial Sequence
  Oligonucleotide for detection of SNP TSC0038216
tcaaaaacttcat

SEQ ID NO: 151335 - DNA, 13 bp, Artificial Sequence
  Oligonucleotide for detection of SNP TSC0038216
atgaaggttttga

SEQ ID NO: 151336 - DNA, 13 bp, Artificial Sequence
  Oligonucleotide for detection of SNP TSC0038216
tcaaaaccttcat

SEQ ID NO: 151337 - DNA, 13 bp, Artificial Sequence
  Oligonucleotide for detection of SNP TSC0038216
ttagaggttttat

SEQ ID NO: 151338 - DNA, 13 bp, Artificial Sequence
  Oligonucleotide for detection of SNP TSC0038216
ataaaacctctaa

SEQ ID NO: 151339 - DNA, 13 bp, Artificial Sequence
  Oligonucleotide for detection of SNP TSC0038217
attataaaagtaa

SEQ ID NO: 151340 - DNA, 13 bp, Artificial Sequence
  Oligonucleotide for detection of SNP TSC0038217
ttacttttataat

SEQ ID NO: 151341 - DNA, 13 bp, Artificial Sequence
  Oligonucleotide for detection of SNP TSC0038217
attatagaagtaa

SEQ ID NO: 151342 - DNA, 13 bp, Artificial Sequence
  Oligonucleotide for detection of SNP TSC0038217
ttacttctataat

SEQ ID NO: 151343 - DNA, 13 bp, Artificial Sequence
  Oligonucleotide for detection of SNP TSC0038219
ttttaggagattt

SEQ ID NO: 151344 - DNA, 13 bp, Artificial Sequence
  Oligonucleotide for detection of SNP TSC0038219
aaatctcctaaaa

SEQ ID NO: 151345 - DNA, 13 bp, Artificial Sequence
  Oligonucleotide for detection of SNP TSC0038219
ttttagaagattt

SEQ ID NO: 151346 - DNA, 13 bp, Artificial Sequence
  Oligonucleotide for detection of SNP TSC0038219
aaatcttctaaaa

SEQ ID NO: 151347 - DNA, 13 bp, Artificial Sequence
  Oligonucleotide for detection of SNP TSC0038220
aatgagaaagtta

SEQ ID NO: 151348 - DNA, 13 bp, Artificial Sequence
  Oligonucleotide for detection of SNP TSC0038220
taactttctcatt

SEQ ID NO: 151349 - DNA, 13 bp, Artificial Sequence
  Oligonucleotide for detection of SNP TSC0038220
aatgaggaagtta

SEQ ID NO: 151350 - DNA, 13 bp, Artificial Sequence
  Oligonucleotide for detection of SNP TSC0038220
taacttcctcatt

SEQ ID NO: 151351 - DNA, 13 bp, Artificial Sequence
  Oligonucleotide for detection of SNP TSC0038224
atgttttttttty

SEQ ID NO: 151352 - DNA, 13 bp, Artificial Sequence
  Oligonucleotide for detection of SNP TSC0038224
raaaaaaaaacat

SEQ ID NO: 151353 - DNA, 13 bp, Artificial Sequence
  Oligonucleotide for detection of SNP TSC0038224
ggggggtagatat

SEQ ID NO: 151354 - DNA, 13 bp, Artificial Sequence
  Oligonucleotide for detection of SNP TSC0038224
atatctacccccc

SEQ ID NO: 151355 - DNA, 13 bp, Artificial Sequence
  Oligonucleotide for detection of SNP TSC0038224
ggggggaagatat

SEQ ID NO: 151356 - DNA, 13 bp, Artificial Sequence
  Oligonucleotide for detection of SNP TSC0038224
atatcttcccccc

SEQ ID NO: 151357 - DNA, 13 bp, Artificial Sequence
  Oligonucleotide for detection of SNP TSC0038228
atgtagattaata

SEQ ID NO: 151358 - DNA, 13 bp, Artificial Sequence
  Oligonucleotide for detection of SNP TSC0038228
tattaatctacat

SEQ ID NO: 151359 - DNA, 13 bp, Artificial Sequence
  Oligonucleotide for detection of SNP TSC0038228
atgtaggttaata

SEQ ID NO: 151360 - DNA, 13 bp, Artificial Sequence
  Oligonucleotide for detection of SNP TSC0038228
tattaacctacat

SEQ ID NO: 151361 - DNA, 13 bp, Artificial Sequence
  Oligonucleotide for detection of SNP TSC0038228
acgtagattaata

SEQ ID NO: 151362 - DNA, 13 bp, Artificial Sequence
  Oligonucleotide for detection of SNP TSC0038228
tattaatctacgt

SEQ ID NO: 151363 - DNA, 13 bp, Artificial Sequence
  Oligonucleotide for detection of SNP TSC0038228
acgtaggttaata

SEQ ID NO: 151364 - DNA, 13 bp, Artificial Sequence
  Oligonucleotide for detection of SNP TSC0038228
tattaacctacgt

SEQ ID NO: 151365 - DNA, 13 bp, Artificial Sequence
  Oligonucleotide for detection of SNP TSC0038229
gtttaggagtttg

SEQ ID NO: 151366 - DNA, 13 bp, Artificial Sequence
  Oligonucleotide for detection of SNP TSC0038229
caaactcctaaac

SEQ ID NO: 151367 - DNA, 13 bp, Artificial Sequence
  Oligonucleotide for detection of SNP TSC0038229
gtttaggagttcg

SEQ ID NO: 151368 - DNA, 13 bp, Artificial Sequence
  Oligonucleotide for detection of SNP TSC0038229
cgaactcctaaac

SEQ ID NO: 151369 - DNA, 13 bp, Artificial Sequence
  Oligonucleotide for detection of SNP TSC0038229
gtttagtagttcg

SEQ ID NO: 151370 - DNA, 13 bp, Artificial Sequence
  Oligonucleotide for detection of SNP TSC0038229
cgaactactaaac

SEQ ID NO: 151371 - DNA, 13 bp, Artificial Sequence
  Oligonucleotide for detection of SNP TSC0038229
tgaatttttgagy

SEQ ID NO: 151372 - DNA, 13 bp, Artificial Sequence
  Oligonucleotide for detection of SNP TSC0038229
rctcaaaaattca

SEQ ID NO: 151373 - DNA, 13 bp, Artificial Sequence
  Oligonucleotide for detection of SNP TSC0038229
tgaattattgagy

SEQ ID NO: 151374 - DNA, 13 bp, Artificial Sequence
  Oligonucleotide for detection of SNP TSC0038229
rctcaataattca

SEQ ID NO: 151375 - DNA, 13 bp, Artificial Sequence
  Oligonucleotide for detection of SNP TSC0038229
cgaatttttgagy

SEQ ID NO: 151376 - DNA, 13 bp, Artificial Sequence
  Oligonucleotide for detection of SNP TSC0038229
rctcaaaaattcg

SEQ ID NO: 151377 - DNA, 13 bp, Artificial Sequence
  Oligonucleotide for detection of SNP TSC0038229
cgaattattgagy

SEQ ID NO: 151378 - DNA, 13 bp, Artificial Sequence
  Oligonucleotide for detection of SNP TSC0038229
rctcaataattcg

SEQ ID NO: 151379 - DNA, 13 bp, Artificial Sequence
  Oligonucleotide for detection of SNP TSC0038230
gttaaatggagga

SEQ ID NO: 151380 - DNA, 13 bp, Artificial Sequence
  Oligonucleotide for detection of SNP TSC0038230
tcctccatttaac

SEQ ID NO: 151381 - DNA, 13 bp, Artificial Sequence
  Oligonucleotide for detection of SNP TSC0038230
gttaaaaggagga

SEQ ID NO: 151382 - DNA, 13 bp, Artificial Sequence
  Oligonucleotide for detection of SNP TSC0038230
tcctccttttaac

SEQ ID NO: 151383 - DNA, 13 bp, Artificial Sequence
  Oligonucleotide for detection of SNP TSC0038232
taattgaggaagy

SEQ ID NO: 151384 - DNA, 13 bp, Artificial Sequence
  Oligonucleotide for detection of SNP TSC0038232
rcttcctcaatta

SEQ ID NO: 151385 - DNA, 13 bp, Artificial Sequence
  Oligonucleotide for detection of SNP TSC0038232
taattgtggaagy

SEQ ID NO: 151386 - DNA, 13 bp, Artificial Sequence
  Oligonucleotide for detection of SNP TSC0038232
rcttccacaatta

SEQ ID NO: 151387 - DNA, 13 bp, Artificial Sequence
  Oligonucleotide for detection of SNP TSC0038232
taattgcggaagy

SEQ ID NO: 151388 - DNA, 13 bp, Artificial Sequence
  Oligonucleotide for detection of SNP TSC0038232
rcttccgcaatta

SEQ ID NO: 151389 - DNA, 13 bp, Artificial Sequence
  Oligonucleotide for detection of SNP TSC0038232
gtttttttagtta

SEQ ID NO: 151390 - DNA, 13 bp, Artificial Sequence
  Oligonucleotide for detection of SNP TSC0038232
taactaaaaaaac

SEQ ID NO: 151391 - DNA, 13 bp, Artificial Sequence
  Oligonucleotide for detection of SNP TSC0038232
gtttttgtagtta

SEQ ID NO: 151392 - DNA, 13 bp, Artificial Sequence
  Oligonucleotide for detection of SNP TSC0038232
taactacaaaaac

SEQ ID NO: 151393 - DNA, 13 bp, Artificial Sequence
  Oligonucleotide for detection of SNP TSC0038232
gttttcgtagtta

SEQ ID NO: 151394 - DNA, 13 bp, Artificial Sequence
  Oligonucleotide for detection of SNP TSC0038232
taactacgaaaac

SEQ ID NO: 151395 - DNA, 13 bp, Artificial Sequence
  Oligonucleotide for detection of SNP TSC0038233
tatatagatatat

SEQ ID NO: 151396 - DNA, 13 bp, Artificial Sequence
  Oligonucleotide for detection of SNP TSC0038233
atatatctatata

SEQ ID NO: 151397 - DNA, 13 bp, Artificial Sequence
  Oligonucleotide for detection of SNP TSC0038234
ttagatatggtgg

SEQ ID NO: 151398 - DNA, 13 bp, Artificial Sequence
  Oligonucleotide for detection of SNP TSC0038234
ccaccatatctaa

SEQ ID NO: 151399 - DNA, 13 bp, Artificial Sequence
  Oligonucleotide for detection of SNP TSC0038234
ttagatgtggtgg

SEQ ID NO: 151400 - DNA, 13 bp, Artificial Sequence
  Oligonucleotide for detection of SNP TSC0038234
ccaccacatctaa

SEQ ID NO: 151401 - DNA, 13 bp, Artificial Sequence
  Oligonucleotide for detection of SNP TSC0038235
ggtaagtggtatg

SEQ ID NO: 151402 - DNA, 13 bp, Artificial Sequence
  Oligonucleotide for detection of SNP TSC0038235
cataccacttacc

SEQ ID NO: 151403 - DNA, 13 bp, Artificial Sequence
  Oligonucleotide for detection of SNP TSC0038235
ggtaagcggtatg

SEQ ID NO: 151404 - DNA, 13 bp, Artificial Sequence
  Oligonucleotide for detection of SNP TSC0038235
cataccgcttacc

SEQ ID NO: 151405 - DNA, 13 bp, Artificial Sequence
  Oligonucleotide for detection of SNP TSC0038235
tatgttgtttgty

SEQ ID NO: 151406 - DNA, 13 bp, Artificial Sequence
  Oligonucleotide for detection of SNP TSC0038235
racaaacaacata

SEQ ID NO: 151407 - DNA, 13 bp, Artificial Sequence
  Oligonucleotide for detection of SNP TSC0038235
tatgttatttgty

SEQ ID NO: 151408 - DNA, 13 bp, Artificial Sequence
  Oligonucleotide for detection of SNP TSC0038235
racaaataacata

SEQ ID NO: 151409 - DNA, 13 bp, Artificial Sequence
  Oligonucleotide for detection of SNP TSC0038235
tatgtcgtttgty

SEQ ID NO: 151410 - DNA, 13 bp, Artificial Sequence
  Oligonucleotide for detection of SNP TSC0038235
racaaacgacata

SEQ ID NO: 151411 - DNA, 13 bp, Artificial Sequence
  Oligonucleotide for detection of SNP TSC0038237
aattttagatttg

SEQ ID NO: 151412 - DNA, 13 bp, Artificial Sequence
  Oligonucleotide for detection of SNP TSC0038237
caaatctaaaatt

SEQ ID NO: 151413 - DNA, 13 bp, Artificial Sequence
  Oligonucleotide for detection of SNP TSC0038237
aattttggatttg

SEQ ID NO: 151414 - DNA, 13 bp, Artificial Sequence
  Oligonucleotide for detection of SNP TSC0038237
caaatccaaaatt

SEQ ID NO: 151415 - DNA, 13 bp, Artificial Sequence
  Oligonucleotide for detection of SNP TSC0038241
tttgtaagttagy

SEQ ID NO: 151416 - DNA, 13 bp, Artificial Sequence
  Oligonucleotide for detection of SNP TSC0038241
rctaacttacaaa

SEQ ID NO: 151417 - DNA, 13 bp, Artificial Sequence
  Oligonucleotide for detection of SNP TSC0038241
tttgtaggttagy

SEQ ID NO: 151418 - DNA, 13 bp, Artificial Sequence
  Oligonucleotide for detection of SNP TSC0038241
rctaacctacaaa

SEQ ID NO: 151419 - DNA, 13 bp, Artificial Sequence
  Oligonucleotide for detection of SNP TSC0038241
ttcgtaagttagy

SEQ ID NO: 151420 - DNA, 13 bp, Artificial Sequence
  Oligonucleotide for detection of SNP TSC0038241
rctaacttacgaa

SEQ ID NO: 151421 - DNA, 13 bp, Artificial Sequence
  Oligonucleotide for detection of SNP TSC0038241
ttcgtaggttagy

SEQ ID NO: 151422 - DNA, 13 bp, Artificial Sequence
  Oligonucleotide for detection of SNP TSC0038241
rctaacctacgaa

SEQ ID NO: 151423 - DNA, 13 bp, Artificial Sequence
  Oligonucleotide for detection of SNP TSC0038244
tataatgagaagt

SEQ ID NO: 151424 - DNA, 13 bp, Artificial Sequence
  Oligonucleotide for detection of SNP TSC0038244
acttctcattata

SEQ ID NO: 151425 - DNA, 13 bp, Artificial Sequence
  Oligonucleotide for detection of SNP TSC0038244
tataattagaagt

SEQ ID NO: 151426 - DNA, 13 bp, Artificial Sequence
  Oligonucleotide for detection of SNP TSC0038244
acttctaattata

SEQ ID NO: 151427 - DNA, 13 bp, Artificial Sequence
  Oligonucleotide for detection of SNP TSC0038244
attttttattatg

SEQ ID NO: 151428 - DNA, 13 bp, Artificial Sequence
  Oligonucleotide for detection of SNP TSC0038244
cataataaaaaat

SEQ ID NO: 151429 - DNA, 13 bp, Artificial Sequence
  Oligonucleotide for detection of SNP TSC0038245
ttaaagatttttt

SEQ ID NO: 151430 - DNA, 13 bp, Artificial Sequence
  Oligonucleotide for detection of SNP TSC0038245
aaaaaatctttaa

SEQ ID NO: 151431 - DNA, 13 bp, Artificial Sequence
  Oligonucleotide for detection of SNP TSC0038245
ttaaagttttttt

SEQ ID NO: 151432 - DNA, 13 bp, Artificial Sequence
  Oligonucleotide for detection of SNP TSC0038245
aaaaaaactttaa

SEQ ID NO: 151433 - DNA, 13 bp, Artificial Sequence
  Oligonucleotide for detection of SNP TSC0038245
aggagatttttga

SEQ ID NO: 151434 - DNA, 13 bp, Artificial Sequence
  Oligonucleotide for detection of SNP TSC0038245
tcaaaaatctcct

SEQ ID NO: 151435 - DNA, 13 bp, Artificial Sequence
  Oligonucleotide for detection of SNP TSC0038245
aggagaattttga

SEQ ID NO: 151436 - DNA, 13 bp, Artificial Sequence
  Oligonucleotide for detection of SNP TSC0038245
tcaaaattctcct

SEQ ID NO: 151437 - DNA, 13 bp, Artificial Sequence
  Oligonucleotide for detection of SNP TSC0038247
ttttaagaatata

SEQ ID NO: 151438 - DNA, 13 bp, Artificial Sequence
  Oligonucleotide for detection of SNP TSC0038247
tatattcttaaaa

SEQ ID NO: 151439 - DNA, 13 bp, Artificial Sequence
  Oligonucleotide for detection of SNP TSC0038247
ttttaaaaatata

SEQ ID NO: 151440 - DNA, 13 bp, Artificial Sequence
  Oligonucleotide for detection of SNP TSC0038247
tatatttttaaaa

SEQ ID NO: 151441 - DNA, 13 bp, Artificial Sequence
  Oligonucleotide for detection of SNP TSC0038248
gataatattttty

SEQ ID NO: 151442 - DNA, 13 bp, Artificial Sequence
  Oligonucleotide for detection of SNP TSC0038248
raaaaatattatc

SEQ ID NO: 151443 - DNA, 13 bp, Artificial Sequence
  Oligonucleotide for detection of SNP TSC0038252
ataagaaatatta

SEQ ID NO: 151444 - DNA, 13 bp, Artificial Sequence
  Oligonucleotide for detection of SNP TSC0038252
taatatttcttat

SEQ ID NO: 151445 - DNA, 13 bp, Artificial Sequence
  Oligonucleotide for detection of SNP TSC0038252
ataagatatatta

SEQ ID NO: 151446 - DNA, 13 bp, Artificial Sequence
  Oligonucleotide for detection of SNP TSC0038252
taatatatcttat

SEQ ID NO: 151447 - DNA, 13 bp, Artificial Sequence
  Oligonucleotide for detection of SNP TSC0038252
taatattttttat

SEQ ID NO: 151448 - DNA, 13 bp, Artificial Sequence
  Oligonucleotide for detection of SNP TSC0038252
ataaaaaatatta

SEQ ID NO: 151449 - DNA, 13 bp, Artificial Sequence
  Oligonucleotide for detection of SNP TSC0038252
taatatgttttat

SEQ ID NO: 151450 - DNA, 13 bp, Artificial Sequence
  Oligonucleotide for detection of SNP TSC0038252
ataaaacatatta

SEQ ID NO: 151451 - DNA, 13 bp, Artificial Sequence
  Oligonucleotide for detection of SNP TSC0038255
gtttgattttttt

SEQ ID NO: 151452 - DNA, 13 bp, Artificial Sequence
  Oligonucleotide for detection of SNP TSC0038255
aaaaaaatcaaac

SEQ ID NO: 151453 - DNA, 13 bp, Artificial Sequence
  Oligonucleotide for detection of SNP TSC0038255
gtttgagtttttt

SEQ ID NO: 151454 - DNA, 13 bp, Artificial Sequence
  Oligonucleotide for detection of SNP TSC0038255
aaaaaactcaaac

SEQ ID NO: 151455 - DNA, 13 bp, Artificial Sequence
  Oligonucleotide for detection of SNP TSC0038255
aagaaagttaagy

SEQ ID NO: 151456 - DNA, 13 bp, Artificial Sequence
  Oligonucleotide for detection of SNP TSC0038255
rcttaactttctt

SEQ ID NO: 151457 - DNA, 13 bp, Artificial Sequence
  Oligonucleotide for detection of SNP TSC0038255
aagaaatttaagy

SEQ ID NO: 151458 - DNA, 13 bp, Artificial Sequence
  Oligonucleotide for detection of SNP TSC0038255
rcttaaatttctt

SEQ ID NO: 151459 - DNA, 13 bp, Artificial Sequence
  Oligonucleotide for detection of SNP TSC0038258
tttgtgaatgtga

SEQ ID NO: 151460 - DNA, 13 bp, Artificial Sequence
  Oligonucleotide for detection of SNP TSC0038258
tcacattcacaaa

SEQ ID NO: 151461 - DNA, 13 bp, Artificial Sequence
  Oligonucleotide for detection of SNP TSC0038258
tttgtggatgtga

SEQ ID NO: 151462 - DNA, 13 bp, Artificial Sequence
  Oligonucleotide for detection of SNP TSC0038258
tcacatccacaaa

SEQ ID NO: 151463 - DNA, 13 bp, Artificial Sequence
  Oligonucleotide for detection of SNP TSC0038258
tttgcgaatgtga

SEQ ID NO: 151464 - DNA, 13 bp, Artificial Sequence
  Oligonucleotide for detection of SNP TSC0038258
tcacattcgcaaa

SEQ ID NO: 151465 - DNA, 13 bp, Artificial Sequence
  Oligonucleotide for detection of SNP TSC0038258
tttgcggatgtga

SEQ ID NO: 151466 - DNA, 13 bp, Artificial Sequence
  Oligonucleotide for detection of SNP TSC0038258
tcacatccgcaaa

SEQ ID NO: 151467 - DNA, 13 bp, Artificial Sequence
  Oligonucleotide for detection of SNP TSC0038259
atttatgtaagtt

SEQ ID NO: 151468 - DNA, 13 bp, Artificial Sequence
  Oligonucleotide for detection of SNP TSC0038259
aacttacataaat

SEQ ID NO: 151469 - DNA, 13 bp, Artificial Sequence
  Oligonucleotide for detection of SNP TSC0038259
atttatataagtt

SEQ ID NO: 151470 - DNA, 13 bp, Artificial Sequence
  Oligonucleotide for detection of SNP TSC0038259
aacttatataaat

SEQ ID NO: 151471 - DNA, 13 bp, Artificial Sequence
  Oligonucleotide for detection of SNP TSC0038263
tagtgaaaatttg

SEQ ID NO: 151472 - DNA, 13 bp, Artificial Sequence
  Oligonucleotide for detection of SNP TSC0038263
caaattttcacta

SEQ ID NO: 151473 - DNA, 13 bp, Artificial Sequence
  Oligonucleotide for detection of SNP TSC0038263
tagtgagaatttg

SEQ ID NO: 151474 - DNA, 13 bp, Artificial Sequence
  Oligonucleotide for detection of SNP TSC0038263
caaattctcacta

SEQ ID NO: 151475 - DNA, 13 bp, Artificial Sequence
  Oligonucleotide for detection of SNP TSC0038267
gttgtgggtattt

SEQ ID NO: 151476 - DNA, 13 bp, Artificial Sequence
  Oligonucleotide for detection of SNP TSC0038267
aaatacccacaac

SEQ ID NO: 151477 - DNA, 13 bp, Artificial Sequence
  Oligonucleotide for detection of SNP TSC0038267
gttgtgtgtattt

SEQ ID NO: 151478 - DNA, 13 bp, Artificial Sequence
  Oligonucleotide for detection of SNP TSC0038267
aaatacacacaac

SEQ ID NO: 151479 - DNA, 13 bp, Artificial Sequence
  Oligonucleotide for detection of SNP TSC0038267
aggtgtttataay

SEQ ID NO: 151480 - DNA, 13 bp, Artificial Sequence
  Oligonucleotide for detection of SNP TSC0038267
rttataaacacct

SEQ ID NO: 151481 - DNA, 13 bp, Artificial Sequence
  Oligonucleotide for detection of SNP TSC0038267
aggtgtatataay

SEQ ID NO: 151482 - DNA, 13 bp, Artificial Sequence
  Oligonucleotide for detection of SNP TSC0038267
rttatatacacct

SEQ ID NO: 151483 - DNA, 13 bp, Artificial Sequence
  Oligonucleotide for detection of SNP TSC0038268
ttgattttgttta

SEQ ID NO: 151484 - DNA, 13 bp, Artificial Sequence
  Oligonucleotide for detection of SNP TSC0038268
taaacaaaatcaa

SEQ ID NO: 151485 - DNA, 13 bp, Artificial Sequence
  Oligonucleotide for detection of SNP TSC0038268
tgaatatgattaa

SEQ ID NO: 151486 - DNA, 13 bp, Artificial Sequence
  Oligonucleotide for detection of SNP TSC0038268
ttaatcatattca

SEQ ID NO: 151487 - DNA, 13 bp, Artificial Sequence
  Oligonucleotide for detection of SNP TSC0038268
tgaataagattaa

SEQ ID NO: 151488 - DNA, 13 bp, Artificial Sequence
  Oligonucleotide for detection of SNP TSC0038268
ttaatcttattca

SEQ ID NO: 151489 - DNA, 13 bp, Artificial Sequence
  Oligonucleotide for detection of SNP TSC0038269
tggaatatgttgy

SEQ ID NO: 151490 - DNA, 13 bp, Artificial Sequence
  Oligonucleotide for detection of SNP TSC0038269
rcaacatattcca

SEQ ID NO: 151491 - DNA, 13 bp, Artificial Sequence
  Oligonucleotide for detection of SNP TSC0038269
tggaatgtgttgy

SEQ ID NO: 151492 - DNA, 13 bp, Artificial Sequence
  Oligonucleotide for detection of SNP TSC0038269
rcaacacattcca

SEQ ID NO: 151493 - DNA, 13 bp, Artificial Sequence
  Oligonucleotide for detection of SNP TSC0038269
tggaacgtgttgy

SEQ ID NO: 151494 - DNA, 13 bp, Artificial Sequence
  Oligonucleotide for detection of SNP TSC0038269
rcaacacgttcca

SEQ ID NO: 151495 - DNA, 13 bp, Artificial Sequence
  Oligonucleotide for detection of SNP TSC0038269
gtaatatgtttta

SEQ ID NO: 151496 - DNA, 13 bp, Artificial Sequence
  Oligonucleotide for detection of SNP TSC0038269
taaaacatattac

SEQ ID NO: 151497 - DNA, 13 bp, Artificial Sequence
  Oligonucleotide for detection of SNP TSC0038269
gtaatacgtttta

SEQ ID NO: 151498 - DNA, 13 bp, Artificial Sequence
  Oligonucleotide for detection of SNP TSC0038269
taaaacgtattac

SEQ ID NO: 151499 - DNA, 13 bp, Artificial Sequence
  Oligonucleotide for detection of SNP TSC0038270
tgagtatattgta

SEQ ID NO: 151500 - DNA, 13 bp, Artificial Sequence
  Oligonucleotide for detection of SNP TSC0038270
tacaatatactca

SEQ ID NO: 151501 - DNA, 13 bp, Artificial Sequence
  Oligonucleotide for detection of SNP TSC0038270
tgagtagattgta

SEQ ID NO: 151502 - DNA, 13 bp, Artificial Sequence
  Oligonucleotide for detection of SNP TSC0038270
tacaatctactca

SEQ ID NO: 151503 - DNA, 13 bp, Artificial Sequence
  Oligonucleotide for detection of SNP TSC0038270
tataatgtgttta

SEQ ID NO: 151504 - DNA, 13 bp, Artificial Sequence
  Oligonucleotide for detection of SNP TSC0038270
taaacacattata

SEQ ID NO: 151505 - DNA, 13 bp, Artificial Sequence
  Oligonucleotide for detection of SNP TSC0038270
tataatttgttta

SEQ ID NO: 151506 - DNA, 13 bp, Artificial Sequence
  Oligonucleotide for detection of SNP TSC0038270
taaacaaattata

SEQ ID NO: 151507 - DNA, 13 bp, Artificial Sequence
  Oligonucleotide for detection of SNP TSC0038271
tgatgtgtttgty

SEQ ID NO: 151508 - DNA, 13 bp, Artificial Sequence
  Oligonucleotide for detection of SNP TSC0038271
racaaacacatca

SEQ ID NO: 151509 - DNA, 13 bp, Artificial Sequence
  Oligonucleotide for detection of SNP TSC0038271
tgatgtatttgty

SEQ ID NO: 151510 - DNA, 13 bp, Artificial Sequence
  Oligonucleotide for detection of SNP TSC0038271
racaaatacatca

SEQ ID NO: 151511 - DNA, 13 bp, Artificial Sequence
  Oligonucleotide for detection of SNP TSC0038272
atttttgatgtgt

SEQ ID NO: 151512 - DNA, 13 bp, Artificial Sequence
  Oligonucleotide for detection of SNP TSC0038272
acacatcaaaaat

SEQ ID NO: 151513 - DNA, 13 bp, Artificial Sequence
  Oligonucleotide for detection of SNP TSC0038272
atttttaatgtgt

SEQ ID NO: 151514 - DNA, 13 bp, Artificial Sequence
  Oligonucleotide for detection of SNP TSC0038272
acacattaaaaat

SEQ ID NO: 151515 - DNA, 13 bp, Artificial Sequence
  Oligonucleotide for detection of SNP TSC0038274
ttgtgaattaatt

SEQ ID NO: 151516 - DNA, 13 bp, Artificial Sequence
  Oligonucleotide for detection of SNP TSC0038274
aattaattcacaa

SEQ ID NO: 151517 - DNA, 13 bp, Artificial Sequence
  Oligonucleotide for detection of SNP TSC0038274
ttgtgagttaatt

SEQ ID NO: 151518 - DNA, 13 bp, Artificial Sequence
  Oligonucleotide for detection of SNP TSC0038274
aattaactcacaa

SEQ ID NO: 151519 - DNA, 13 bp, Artificial Sequence
  Oligonucleotide for detection of SNP TSC0038275
tttatagagttat

SEQ ID NO: 151520 - DNA, 13 bp, Artificial Sequence
  Oligonucleotide for detection of SNP TSC0038275
ataactctataaa

SEQ ID NO: 151521 - DNA, 13 bp, Artificial Sequence
  Oligonucleotide for detection of SNP TSC0038275
tttataaagttat

SEQ ID NO: 151522 - DNA, 13 bp, Artificial Sequence
  Oligonucleotide for detection of SNP TSC0038275
ataactttataaa

SEQ ID NO: 151523 - DNA, 13 bp, Artificial Sequence
  Oligonucleotide for detection of SNP TSC0038276
aatagatttggag

SEQ ID NO: 151524 - DNA, 13 bp, Artificial Sequence
  Oligonucleotide for detection of SNP TSC0038276
ctccaaatctatt

SEQ ID NO: 151525 - DNA, 13 bp, Artificial Sequence
  Oligonucleotide for detection of SNP TSC0038276
aatagaattggag

SEQ ID NO: 151526 - DNA, 13 bp, Artificial Sequence
  Oligonucleotide for detection of SNP TSC0038276
ctccaattctatt

SEQ ID NO: 151527 - DNA, 13 bp, Artificial Sequence
  Oligonucleotide for detection of SNP TSC0038282
attatcgttagag

SEQ ID NO: 151528 - DNA, 13 bp, Artificial Sequence
  Oligonucleotide for detection of SNP TSC0038282
ctctaacgataat

SEQ ID NO: 151529 - DNA, 13 bp, Artificial Sequence
  Oligonucleotide for detection of SNP TSC0038282
ttttaatggtgat

SEQ ID NO: 151530 - DNA, 13 bp, Artificial Sequence
  Oligonucleotide for detection of SNP TSC0038282
atcaccattaaaa

SEQ ID NO: 151531 - DNA, 13 bp, Artificial Sequence
  Oligonucleotide for detection of SNP TSC0038282
ttttaacggtgat

SEQ ID NO: 151532 - DNA, 13 bp, Artificial Sequence
  Oligonucleotide for detection of SNP TSC0038282
atcaccgttaaaa

SEQ ID NO: 151533 - DNA, 13 bp, Artificial Sequence
  Oligonucleotide for detection of SNP TSC0038283
tgtttagttgtgt

SEQ ID NO: 151534 - DNA, 13 bp, Artificial Sequence
  Oligonucleotide for detection of SNP TSC0038283
acacaactaaaca

SEQ ID NO: 151535 - DNA, 13 bp, Artificial Sequence
  Oligonucleotide for detection of SNP TSC0038283
tgtttaattgtgt

SEQ ID NO: 151536 - DNA, 13 bp, Artificial Sequence
  Oligonucleotide for detection of SNP TSC0038283
acacaattaaaca

SEQ ID NO: 151537 - DNA, 13 bp, Artificial Sequence
  Oligonucleotide for detection of SNP TSC0038283
cgtttagttgtgt

SEQ ID NO: 151538 - DNA, 13 bp, Artificial Sequence
  Oligonucleotide for detection of SNP TSC0038283
acacaactaaacg

SEQ ID NO: 151539 - DNA, 13 bp, Artificial Sequence
  Oligonucleotide for detection of SNP TSC0038283
cgtttaattgtgt

SEQ ID NO: 151540 - DNA, 13 bp, Artificial Sequence
  Oligonucleotide for detection of SNP TSC0038283
acacaattaaacg

SEQ ID NO: 151541 - DNA, 13 bp, Artificial Sequence
  Oligonucleotide for detection of SNP TSC0038284
tttttagtgaggt

SEQ ID NO: 151542 - DNA, 13 bp, Artificial Sequence
  Oligonucleotide for detection of SNP TSC0038284
acctcactaaaaa

SEQ ID NO: 151543 - DNA, 13 bp, Artificial Sequence
  Oligonucleotide for detection of SNP TSC0038284
tttttaatgaggt

SEQ ID NO: 151544 - DNA, 13 bp, Artificial Sequence
  Oligonucleotide for detection of SNP TSC0038284
acctcattaaaaa

SEQ ID NO: 151545 - DNA, 13 bp, Artificial Sequence
  Oligonucleotide for detection of SNP TSC0038285
agatttgtgtttt

SEQ ID NO: 151546 - DNA, 13 bp, Artificial Sequence
  Oligonucleotide for detection of SNP TSC0038285
aaaacacaaatct

SEQ ID NO: 151547 - DNA, 13 bp, Artificial Sequence
  Oligonucleotide for detection of SNP TSC0038285
agatttatgtttt

SEQ ID NO: 151548 - DNA, 13 bp, Artificial Sequence
  Oligonucleotide for detection of SNP TSC0038285
aaaacataaatct

SEQ ID NO: 151549 - DNA, 13 bp, Artificial Sequence
  Oligonucleotide for detection of SNP TSC0038292
tttagaatatgty

SEQ ID NO: 151550 - DNA, 13 bp, Artificial Sequence
  Oligonucleotide for detection of SNP TSC0038292
racatattctaaa

SEQ ID NO: 151551 - DNA, 13 bp, Artificial Sequence
  Oligonucleotide for detection of SNP TSC0038292
tttagagtatgty

SEQ ID NO: 151552 - DNA, 13 bp, Artificial Sequence
  Oligonucleotide for detection of SNP TSC0038292
racatactctaaa

SEQ ID NO: 151553 - DNA, 13 bp, Artificial Sequence
  Oligonucleotide for detection of SNP TSC0038293
atataaattgagy

SEQ ID NO: 151554 - DNA, 13 bp, Artificial Sequence
  Oligonucleotide for detection of SNP TSC0038293
rctcaatttatat

SEQ ID NO: 151555 - DNA, 13 bp, Artificial Sequence
  Oligonucleotide for detection of SNP TSC0038293
atataagttgagy

SEQ ID NO: 151556 - DNA, 13 bp, Artificial Sequence
  Oligonucleotide for detection of SNP TSC0038293
rctcaacttatat

SEQ ID NO: 151557 - DNA, 13 bp, Artificial Sequence
  Oligonucleotide for detection of SNP TSC0038294
gttgattgaagty

SEQ ID NO: 151558 - DNA, 13 bp, Artificial Sequence
  Oligonucleotide for detection of SNP TSC0038294
racttcaatcaac

SEQ ID NO: 151559 - DNA, 13 bp, Artificial Sequence
  Oligonucleotide for detection of SNP TSC0038294
gttgatcgaagty

SEQ ID NO: 151560 - DNA, 13 bp, Artificial Sequence
  Oligonucleotide for detection of SNP TSC0038294
racttcgatcaac

SEQ ID NO: 151561 - DNA, 13 bp, Artificial Sequence
  Oligonucleotide for detection of SNP TSC0038294
gattttggttaay

SEQ ID NO: 151562 - DNA, 13 bp, Artificial Sequence
  Oligonucleotide for detection of SNP TSC0038294
rttaaccaaaatc

SEQ ID NO: 151563 - DNA, 13 bp, Artificial Sequence
  Oligonucleotide for detection of SNP TSC0038294
gattttagttaay

SEQ ID NO: 151564 - DNA, 13 bp, Artificial Sequence
  Oligonucleotide for detection of SNP TSC0038294
rttaactaaaatc

SEQ ID NO: 151565 - DNA, 13 bp, Artificial Sequence
  Oligonucleotide for detection of SNP TSC0038294
gatttcggttaay

SEQ ID NO: 151566 - DNA, 13 bp, Artificial Sequence
  Oligonucleotide for detection of SNP TSC0038294
rttaaccgaaatc

SEQ ID NO: 151567 - DNA, 13 bp, Artificial Sequence
  Oligonucleotide for detection of SNP TSC0038295
tttatatgttatt

SEQ ID NO: 151568 - DNA, 13 bp, Artificial Sequence
  Oligonucleotide for detection of SNP TSC0038295
aataacatataaa

SEQ ID NO: 151569 - DNA, 13 bp, Artificial Sequence
  Oligonucleotide for detection of SNP TSC0038295
tttatacgttatt

SEQ ID NO: 151570 - DNA, 13 bp, Artificial Sequence
  Oligonucleotide for detection of SNP TSC0038295
aataacgtataaa

SEQ ID NO: 151571 - DNA, 13 bp, Artificial Sequence
  Oligonucleotide for detection of SNP TSC0038295
agtggtgtgtgaa

SEQ ID NO: 151572 - DNA, 13 bp, Artificial Sequence
  Oligonucleotide for detection of SNP TSC0038295
ttcacacaccact

SEQ ID NO: 151573 - DNA, 13 bp, Artificial Sequence
  Oligonucleotide for detection of SNP TSC0038295
agtggtatgtgaa

SEQ ID NO: 151574 - DNA, 13 bp, Artificial Sequence
  Oligonucleotide for detection of SNP TSC0038295
ttcacataccact

SEQ ID NO: 151575 - DNA, 13 bp, Artificial Sequence
  Oligonucleotide for detection of SNP TSC0038295
agtggcgtgtgaa

SEQ ID NO: 151576 - DNA, 13 bp, Artificial Sequence
  Oligonucleotide for detection of SNP TSC0038295
ttcacacgccact

SEQ ID NO: 151577 - DNA, 13 bp, Artificial Sequence
  Oligonucleotide for detection of SNP TSC0038298
agatatggttatt

SEQ ID NO: 151578 - DNA, 13 bp, Artificial Sequence
  Oligonucleotide for detection of SNP TSC0038298
aataaccatatct

SEQ ID NO: 151579 - DNA, 13 bp, Artificial Sequence
  Oligonucleotide for detection of SNP TSC0038298
agatatagttatt

SEQ ID NO: 151580 - DNA, 13 bp, Artificial Sequence
  Oligonucleotide for detection of SNP TSC0038298
aataactatatct

SEQ ID NO: 151581 - DNA, 13 bp, Artificial Sequence
  Oligonucleotide for detection of SNP TSC0038300
agtaaggttttgt

SEQ ID NO: 151582 - DNA, 13 bp, Artificial Sequence
  Oligonucleotide for detection of SNP TSC0038300
acaaaaccttact

SEQ ID NO: 151583 - DNA, 13 bp, Artificial Sequence
  Oligonucleotide for detection of SNP TSC0038300
agtaagattttgt

SEQ ID NO: 151584 - DNA, 13 bp, Artificial Sequence
  Oligonucleotide for detection of SNP TSC0038300
acaaaatcttact

SEQ ID NO: 151585 - DNA, 13 bp, Artificial Sequence
  Oligonucleotide for detection of SNP TSC0038301
tgttttgtaaagt

SEQ ID NO: 151586 - DNA, 13 bp, Artificial Sequence
  Oligonucleotide for detection of SNP TSC0038301
actttacaaaaca

SEQ ID NO: 151587 - DNA, 13 bp, Artificial Sequence
  Oligonucleotide for detection of SNP TSC0038301
tgttttataaagt

SEQ ID NO: 151588 - DNA, 13 bp, Artificial Sequence
  Oligonucleotide for detection of SNP TSC0038301
actttataaaaca

SEQ ID NO: 151589 - DNA, 13 bp, Artificial Sequence
  Oligonucleotide for detection of SNP TSC0038303
tttatagatgaaa

SEQ ID NO: 151590 - DNA, 13 bp, Artificial Sequence
  Oligonucleotide for detection of SNP TSC0038303
tttcatctataaa

SEQ ID NO: 151591 - DNA, 13 bp, Artificial Sequence
  Oligonucleotide for detection of SNP TSC0038303
ttttatgtatgga

SEQ ID NO: 151592 - DNA, 13 bp, Artificial Sequence
  Oligonucleotide for detection of SNP TSC0038303
tccatacataaaa

SEQ ID NO: 151593 - DNA, 13 bp, Artificial Sequence
  Oligonucleotide for detection of SNP TSC0038303
ttttatttatgga

SEQ ID NO: 151594 - DNA, 13 bp, Artificial Sequence
  Oligonucleotide for detection of SNP TSC0038303
tccataaataaaa

SEQ ID NO: 151595 - DNA, 13 bp, Artificial Sequence
  Oligonucleotide for detection of SNP TSC0038306
taaattgtatgtt

SEQ ID NO: 151596 - DNA, 13 bp, Artificial Sequence
  Oligonucleotide for detection of SNP TSC0038306
aacatacaattta

SEQ ID NO: 151597 - DNA, 13 bp, Artificial Sequence
  Oligonucleotide for detection of SNP TSC0038306
taaattatatgtt

SEQ ID NO: 151598 - DNA, 13 bp, Artificial Sequence
  Oligonucleotide for detection of SNP TSC0038306
aacatataattta

SEQ ID NO: 151599 - DNA, 13 bp, Artificial Sequence
  Oligonucleotide for detection of SNP TSC0038310
gaataagtaagta

SEQ ID NO: 151600 - DNA, 13 bp, Artificial Sequence
  Oligonucleotide for detection of SNP TSC0038310
tacttacttattc

SEQ ID NO: 151601 - DNA, 13 bp, Artificial Sequence
  Oligonucleotide for detection of SNP TSC0038310
gaataaataagta

SEQ ID NO: 151602 - DNA, 13 bp, Artificial Sequence
  Oligonucleotide for detection of SNP TSC0038310
tacttatttattc

SEQ ID NO: 151603 - DNA, 13 bp, Artificial Sequence
  Oligonucleotide for detection of SNP TSC0038311
gtttttaagattt

SEQ ID NO: 151604 - DNA, 13 bp, Artificial Sequence
  Oligonucleotide for detection of SNP TSC0038311
aaatcttaaaaac

SEQ ID NO: 151605 - DNA, 13 bp, Artificial Sequence
  Oligonucleotide for detection of SNP TSC0038311
gtttttgagattt

SEQ ID NO: 151606 - DNA, 13 bp, Artificial Sequence
  Oligonucleotide for detection of SNP TSC0038311
aaatctcaaaaac

SEQ ID NO: 151607 - DNA, 13 bp, Artificial Sequence
  Oligonucleotide for detection of SNP TSC0038311
gttttcgagattt

SEQ ID NO: 151608 - DNA, 13 bp, Artificial Sequence
  Oligonucleotide for detection of SNP TSC0038311
aaatctcgaaaac

SEQ ID NO: 151609 - DNA, 13 bp, Artificial Sequence
  Oligonucleotide for detection of SNP TSC0038311
aaattttggaaay

SEQ ID NO: 151610 - DNA, 13 bp, Artificial Sequence
  Oligonucleotide for detection of SNP TSC0038311
rtttccaaaattt

SEQ ID NO: 151611 - DNA, 13 bp, Artificial Sequence
  Oligonucleotide for detection of SNP TSC0038311
aaatttcggaaay

SEQ ID NO: 151612 - DNA, 13 bp, Artificial Sequence
  Oligonucleotide for detection of SNP TSC0038311
rtttccgaaattt

SEQ ID NO: 151613 - DNA, 13 bp, Artificial Sequence
  Oligonucleotide for detection of SNP TSC0038312
aggttttttttaa

SEQ ID NO: 151614 - DNA, 13 bp, Artificial Sequence
  Oligonucleotide for detection of SNP TSC0038312
ttaaaaaaaacct

SEQ ID NO: 151615 - DNA, 13 bp, Artificial Sequence
  Oligonucleotide for detection of SNP TSC0038312
ttagggtggattt

SEQ ID NO: 151616 - DNA, 13 bp, Artificial Sequence
  Oligonucleotide for detection of SNP TSC0038312
aaatccaccctaa

SEQ ID NO: 151617 - DNA, 13 bp, Artificial Sequence
  Oligonucleotide for detection of SNP TSC0038312
ttagggaggattt

SEQ ID NO: 151618 - DNA, 13 bp, Artificial Sequence
  Oligonucleotide for detection of SNP TSC0038312
aaatcctccctaa

SEQ ID NO: 151619 - DNA, 13 bp, Artificial Sequence
  Oligonucleotide for detection of SNP TSC0038312
ttagggcggattt

SEQ ID NO: 151620 - DNA, 13 bp, Artificial Sequence
  Oligonucleotide for detection of SNP TSC0038312
aaatccgccctaa

SEQ ID NO: 151621 - DNA, 13 bp, Artificial Sequence
  Oligonucleotide for detection of SNP TSC0038313
gagagtattatta

SEQ ID NO: 151622 - DNA, 13 bp, Artificial Sequence
  Oligonucleotide for detection of SNP TSC0038313
taataatactctc

SEQ ID NO: 151623 - DNA, 13 bp, Artificial Sequence
  Oligonucleotide for detection of SNP TSC0038313
gagagttttatta

SEQ ID NO: 151624 - DNA, 13 bp, Artificial Sequence
  Oligonucleotide for detection of SNP TSC0038313
taataaaactctc

SEQ ID NO: 151625 - DNA, 13 bp, Artificial Sequence
  Oligonucleotide for detection of SNP TSC0038313
tgataatgtttty

SEQ ID NO: 151626 - DNA, 13 bp, Artificial Sequence
  Oligonucleotide for detection of SNP TSC0038313
raaaacattatca

SEQ ID NO: 151627 - DNA, 13 bp, Artificial Sequence
  Oligonucleotide for detection of SNP TSC0038313
tgataaagtttty

SEQ ID NO: 151628 - DNA, 13 bp, Artificial Sequence
  Oligonucleotide for detection of SNP TSC0038313
raaaactttatca

SEQ ID NO: 151629 - DNA, 13 bp, Artificial Sequence
  Oligonucleotide for detection of SNP TSC0038314
aaattagttgttt

SEQ ID NO: 151630 - DNA, 13 bp, Artificial Sequence
  Oligonucleotide for detection of SNP TSC0038314
aaacaactaattt

SEQ ID NO: 151631 - DNA, 13 bp, Artificial Sequence
  Oligonucleotide for detection of SNP TSC0038314
aaattaattgttt

SEQ ID NO: 151632 - DNA, 13 bp, Artificial Sequence
  Oligonucleotide for detection of SNP TSC0038314
aaacaattaattt

SEQ ID NO: 151633 - DNA, 13 bp, Artificial Sequence
  Oligonucleotide for detection of SNP TSC0038315
attatttggagta

SEQ ID NO: 151634 - DNA, 13 bp, Artificial Sequence
  Oligonucleotide for detection of SNP TSC0038315
tactccaaataat

SEQ ID NO: 151635 - DNA, 13 bp, Artificial Sequence
  Oligonucleotide for detection of SNP TSC0038315
attattcggagta

SEQ ID NO: 151636 - DNA, 13 bp, Artificial Sequence
  Oligonucleotide for detection of SNP TSC0038315
tactccgaataat

SEQ ID NO: 151637 - DNA, 13 bp, Artificial Sequence
  Oligonucleotide for detection of SNP TSC0038315
tattttggataat

SEQ ID NO: 151638 - DNA, 13 bp, Artificial Sequence
  Oligonucleotide for detection of SNP TSC0038315
attatccaaaata

SEQ ID NO: 151639 - DNA, 13 bp, Artificial Sequence
  Oligonucleotide for detection of SNP TSC0038315
tattttagataat

SEQ ID NO: 151640 - DNA, 13 bp, Artificial Sequence
  Oligonucleotide for detection of SNP TSC0038315
attatctaaaata

SEQ ID NO: 151641 - DNA, 13 bp, Artificial Sequence
  Oligonucleotide for detection of SNP TSC0038315
tatttcggataat

SEQ ID NO: 151642 - DNA, 13 bp, Artificial Sequence
  Oligonucleotide for detection of SNP TSC0038315
attatccgaaata

SEQ ID NO: 151643 - DNA, 13 bp, Artificial Sequence
  Oligonucleotide for detection of SNP TSC0038316
tataaagtttttt

SEQ ID NO: 151644 - DNA, 13 bp, Artificial Sequence
  Oligonucleotide for detection of SNP TSC0038316
aaaaaactttata

SEQ ID NO: 151645 - DNA, 13 bp, Artificial Sequence
  Oligonucleotide for detection of SNP TSC0038317
tgagtgtgtgtta

SEQ ID NO: 151646 - DNA, 13 bp, Artificial Sequence
  Oligonucleotide for detection of SNP TSC0038317
taacacacactca

SEQ ID NO: 151647 - DNA, 13 bp, Artificial Sequence
  Oligonucleotide for detection of SNP TSC0038317
tgagtgcgtgtta

SEQ ID NO: 151648 - DNA, 13 bp, Artificial Sequence
  Oligonucleotide for detection of SNP TSC0038317
taacacgcactca

SEQ ID NO: 151649 - DNA, 13 bp, Artificial Sequence
  Oligonucleotide for detection of SNP TSC0038317
tggtatgtattta

SEQ ID NO: 151650 - DNA, 13 bp, Artificial Sequence
  Oligonucleotide for detection of SNP TSC0038317
taaatacatacca

SEQ ID NO: 151651 - DNA, 13 bp, Artificial Sequence
  Oligonucleotide for detection of SNP TSC0038317
tggtatatattta

SEQ ID NO: 151652 - DNA, 13 bp, Artificial Sequence
  Oligonucleotide for detection of SNP TSC0038317
taaatatatacca

SEQ ID NO: 151653 - DNA, 13 bp, Artificial Sequence
  Oligonucleotide for detection of SNP TSC0038317
tggtacgtattta

SEQ ID NO: 151654 - DNA, 13 bp, Artificial Sequence
  Oligonucleotide for detection of SNP TSC0038317
taaatacgtacca

SEQ ID NO: 151655 - DNA, 13 bp, Artificial Sequence
  Oligonucleotide for detection of SNP TSC0038318
tgtatttggtttg

SEQ ID NO: 151656 - DNA, 13 bp, Artificial Sequence
  Oligonucleotide for detection of SNP TSC0038318
caaaccaaataca

SEQ ID NO: 151657 - DNA, 13 bp, Artificial Sequence
  Oligonucleotide for detection of SNP TSC0038318
tgtattcggtttg

SEQ ID NO: 151658 - DNA, 13 bp, Artificial Sequence
  Oligonucleotide for detection of SNP TSC0038318
caaaccgaataca

SEQ ID NO: 151659 - DNA, 13 bp, Artificial Sequence
  Oligonucleotide for detection of SNP TSC0038318
taggttgggtgta

SEQ ID NO: 151660 - DNA, 13 bp, Artificial Sequence
  Oligonucleotide for detection of SNP TSC0038318
tacacccaaccta

SEQ ID NO: 151661 - DNA, 13 bp, Artificial Sequence
  Oligonucleotide for detection of SNP TSC0038318
taggttaggtgta

SEQ ID NO: 151662 - DNA, 13 bp, Artificial Sequence
  Oligonucleotide for detection of SNP TSC0038318
tacacctaaccta

SEQ ID NO: 151663 - DNA, 13 bp, Artificial Sequence
  Oligonucleotide for detection of SNP TSC0038318
taggtcgggtgta

SEQ ID NO: 151664 - DNA, 13 bp, Artificial Sequence
  Oligonucleotide for detection of SNP TSC0038318
tacacccgaccta

SEQ ID NO: 151665 - DNA, 13 bp, Artificial Sequence
  Oligonucleotide for detection of SNP TSC0038319
attgttattgtty

SEQ ID NO: 151666 - DNA, 13 bp, Artificial Sequence
  Oligonucleotide for detection of SNP TSC0038319
raacaataacaat

SEQ ID NO: 151667 - DNA, 13 bp, Artificial Sequence
  Oligonucleotide for detection of SNP TSC0038319
attgttgttgtty

SEQ ID NO: 151668 - DNA, 13 bp, Artificial Sequence
  Oligonucleotide for detection of SNP TSC0038319
raacaacaacaat

SEQ ID NO: 151669 - DNA, 13 bp, Artificial Sequence
  Oligonucleotide for detection of SNP TSC0038319
atcgttattgtty

SEQ ID NO: 151670 - DNA, 13 bp, Artificial Sequence
  Oligonucleotide for detection of SNP TSC0038319
raacaataacgat

SEQ ID NO: 151671 - DNA, 13 bp, Artificial Sequence
  Oligonucleotide for detection of SNP TSC0038319
atcgttgttgtty

SEQ ID NO: 151672 - DNA, 13 bp, Artificial Sequence
  Oligonucleotide for detection of SNP TSC0038319
raacaacaacgat

SEQ ID NO: 151673 - DNA, 13 bp, Artificial Sequence
  Oligonucleotide for detection of SNP TSC0038319
attgtcgttgtty

SEQ ID NO: 151674 - DNA, 13 bp, Artificial Sequence
  Oligonucleotide for detection of SNP TSC0038319
raacaacgacaat

SEQ ID NO: 151675 - DNA, 13 bp, Artificial Sequence
  Oligonucleotide for detection of SNP TSC0038319
atcgtcgttgtty

SEQ ID NO: 151676 - DNA, 13 bp, Artificial Sequence
  Oligonucleotide for detection of SNP TSC0038319
raacaacgacgat

SEQ ID NO: 151677 - DNA, 13 bp, Artificial Sequence
  Oligonucleotide for detection of SNP TSC0038319
gggtagtggtgat

SEQ ID NO: 151678 - DNA, 13 bp, Artificial Sequence
  Oligonucleotide for detection of SNP TSC0038319
atcaccactaccc

SEQ ID NO: 151679 - DNA, 13 bp, Artificial Sequence
  Oligonucleotide for detection of SNP TSC0038319
gggtagtggcgat

SEQ ID NO: 151680 - DNA, 13 bp, Artificial Sequence
  Oligonucleotide for detection of SNP TSC0038319
atcgccactaccc

SEQ ID NO: 151681 - DNA, 13 bp, Artificial Sequence
  Oligonucleotide for detection of SNP TSC0038319
gggtagcggtgat

SEQ ID NO: 151682 - DNA, 13 bp, Artificial Sequence
  Oligonucleotide for detection of SNP TSC0038319
atcaccgctaccc

SEQ ID NO: 151683 - DNA, 13 bp, Artificial Sequence
  Oligonucleotide for detection of SNP TSC0038319
gggtagcggcgat

SEQ ID NO: 151684 - DNA, 13 bp, Artificial Sequence
  Oligonucleotide for detection of SNP TSC0038319
atcgccgctaccc

SEQ ID NO: 151685 - DNA, 13 bp, Artificial Sequence
  Oligonucleotide for detection of SNP TSC0038322
ttaagaaaattat

SEQ ID NO: 151686 - DNA, 13 bp, Artificial Sequence
  Oligonucleotide for detection of SNP TSC0038322
ataattttcttaa

SEQ ID NO: 151687 - DNA, 13 bp, Artificial Sequence
  Oligonucleotide for detection of SNP TSC0038322
ttaagagaattat

SEQ ID NO: 151688 - DNA, 13 bp, Artificial Sequence
  Oligonucleotide for detection of SNP TSC0038322
ataattctcttaa

SEQ ID NO: 151689 - DNA, 13 bp, Artificial Sequence
  Oligonucleotide for detection of SNP TSC0038324
ttttgagtttttt

SEQ ID NO: 151690 - DNA, 13 bp, Artificial Sequence
  Oligonucleotide for detection of SNP TSC0038324
aaaaaactcaaaa

SEQ ID NO: 151691 - DNA, 13 bp, Artificial Sequence
  Oligonucleotide for detection of SNP TSC0038324
ttttgaatttttt

SEQ ID NO: 151692 - DNA, 13 bp, Artificial Sequence
  Oligonucleotide for detection of SNP TSC0038324
aaaaaattcaaaa

SEQ ID NO: 151693 - DNA, 13 bp, Artificial Sequence
  Oligonucleotide for detection of SNP TSC0038325
taataaatatttg

SEQ ID NO: 151694 - DNA, 13 bp, Artificial Sequence
  Oligonucleotide for detection of SNP TSC0038325
caaatatttatta

SEQ ID NO: 151695 - DNA, 13 bp, Artificial Sequence
  Oligonucleotide for detection of SNP TSC0038327
atttaatatttta

SEQ ID NO: 151696 - DNA, 13 bp, Artificial Sequence
  Oligonucleotide for detection of SNP TSC0038327
taaaatattaaat

SEQ ID NO: 151697 - DNA, 13 bp, Artificial Sequence
  Oligonucleotide for detection of SNP TSC0038328
ataaaaaaaaaga

SEQ ID NO: 151698 - DNA, 13 bp, Artificial Sequence
  Oligonucleotide for detection of SNP TSC0038328
tctttttttttat

SEQ ID NO: 151699 - DNA, 13 bp, Artificial Sequence
  Oligonucleotide for detection of SNP TSC0038328
ataaaagaaaaga

SEQ ID NO: 151700 - DNA, 13 bp, Artificial Sequence
  Oligonucleotide for detection of SNP TSC0038328
tcttttcttttat

SEQ ID NO: 151701 - DNA, 13 bp, Artificial Sequence
  Oligonucleotide for detection of SNP TSC0038332
gttaaaattgtta

SEQ ID NO: 151702 - DNA, 13 bp, Artificial Sequence
  Oligonucleotide for detection of SNP TSC0038332
taacaattttaac

SEQ ID NO: 151703 - DNA, 13 bp, Artificial Sequence
  Oligonucleotide for detection of SNP TSC0038332
gttaaagttgtta

SEQ ID NO: 151704 - DNA, 13 bp, Artificial Sequence
  Oligonucleotide for detection of SNP TSC0038332
taacaactttaac

SEQ ID NO: 151705 - DNA, 13 bp, Artificial Sequence
  Oligonucleotide for detection of SNP TSC0038333
ttgttttgggttt

SEQ ID NO: 151706 - DNA, 13 bp, Artificial Sequence
  Oligonucleotide for detection of SNP TSC0038333
aaacccaaaacaa

SEQ ID NO: 151707 - DNA, 13 bp, Artificial Sequence
  Oligonucleotide for detection of SNP TSC0038333
tcgttttgggttt

SEQ ID NO: 151708 - DNA, 13 bp, Artificial Sequence
  Oligonucleotide for detection of SNP TSC0038333
aaacccaaaacga

SEQ ID NO: 151709 - DNA, 13 bp, Artificial Sequence
  Oligonucleotide for detection of SNP TSC0038333
ttgtttcgggttt

SEQ ID NO: 151710 - DNA, 13 bp, Artificial Sequence
  Oligonucleotide for detection of SNP TSC0038333
aaacccgaaacaa

SEQ ID NO: 151711 - DNA, 13 bp, Artificial Sequence
  Oligonucleotide for detection of SNP TSC0038333
tcgtttcgggttt

SEQ ID NO: 151712 - DNA, 13 bp, Artificial Sequence
  Oligonucleotide for detection of SNP TSC0038333
aaacccgaaacga

SEQ ID NO: 151713 - DNA, 13 bp, Artificial Sequence
  Oligonucleotide for detection of SNP TSC0038333
aaatttgggatga

SEQ ID NO: 151714 - DNA, 13 bp, Artificial Sequence
  Oligonucleotide for detection of SNP TSC0038333
tcatcccaaattt

SEQ ID NO: 151715 - DNA, 13 bp, Artificial Sequence
  Oligonucleotide for detection of SNP TSC0038333
aaatttaggatga

SEQ ID NO: 151716 - DNA, 13 bp, Artificial Sequence
  Oligonucleotide for detection of SNP TSC0038333
tcatcctaaattt

SEQ ID NO: 151717 - DNA, 13 bp, Artificial Sequence
  Oligonucleotide for detection of SNP TSC0038333
aaattcgggatga

SEQ ID NO: 151718 - DNA, 13 bp, Artificial Sequence
  Oligonucleotide for detection of SNP TSC0038333
tcatcccgaattt

SEQ ID NO: 151719 - DNA, 13 bp, Artificial Sequence
  Oligonucleotide for detection of SNP TSC0038333
aaatttaggacga

SEQ ID NO: 151720 - DNA, 13 bp, Artificial Sequence
  Oligonucleotide for detection of SNP TSC0038333
tcgtcctaaattt

SEQ ID NO: 151721 - DNA, 13 bp, Artificial Sequence
  Oligonucleotide for detection of SNP TSC0038333
aaatttgggacga

SEQ ID NO: 151722 - DNA, 13 bp, Artificial Sequence
  Oligonucleotide for detection of SNP TSC0038333
tcgtcccaaattt

SEQ ID NO: 151723 - DNA, 13 bp, Artificial Sequence
  Oligonucleotide for detection of SNP TSC0038333
aaattcgggacga

SEQ ID NO: 151724 - DNA, 13 bp, Artificial Sequence
  Oligonucleotide for detection of SNP TSC0038333
tcgtcccgaattt

SEQ ID NO: 151725 - DNA, 13 bp, Artificial Sequence
  Oligonucleotide for detection of SNP TSC0038334
aaataagaatgtt

SEQ ID NO: 151726 - DNA, 13 bp, Artificial Sequence
  Oligonucleotide for detection of SNP TSC0038334
aacattcttattt

SEQ ID NO: 151727 - DNA, 13 bp, Artificial Sequence
  Oligonucleotide for detection of SNP TSC0038334
aaataaaaatgtt

SEQ ID NO: 151728 - DNA, 13 bp, Artificial Sequence
  Oligonucleotide for detection of SNP TSC0038334
aacatttttattt

SEQ ID NO: 151729 - DNA, 13 bp, Artificial Sequence
  Oligonucleotide for detection of SNP TSC0038335
tagttttgttgty

SEQ ID NO: 151730 - DNA, 13 bp, Artificial Sequence
  Oligonucleotide for detection of SNP TSC0038335
racaacaaaacta

SEQ ID NO: 151731 - DNA, 13 bp, Artificial Sequence
  Oligonucleotide for detection of SNP TSC0038335
tagtttcgttgty

SEQ ID NO: 151732 - DNA, 13 bp, Artificial Sequence
  Oligonucleotide for detection of SNP TSC0038335
racaacgaaacta

SEQ ID NO: 151733 - DNA, 13 bp, Artificial Sequence
  Oligonucleotide for detection of SNP TSC0038335
ggtagtgggattg

SEQ ID NO: 151734 - DNA, 13 bp, Artificial Sequence
  Oligonucleotide for detection of SNP TSC0038335
caatcccactacc

SEQ ID NO: 151735 - DNA, 13 bp, Artificial Sequence
  Oligonucleotide for detection of SNP TSC0038335
ggtagtaggattg

SEQ ID NO: 151736 - DNA, 13 bp, Artificial Sequence
  Oligonucleotide for detection of SNP TSC0038335
caatcctactacc

SEQ ID NO: 151737 - DNA, 13 bp, Artificial Sequence
  Oligonucleotide for detection of SNP TSC0038335
ggtagcgggattg

SEQ ID NO: 151738 - DNA, 13 bp, Artificial Sequence
  Oligonucleotide for detection of SNP TSC0038335
caatcccgctacc

SEQ ID NO: 151739 - DNA, 13 bp, Artificial Sequence
  Oligonucleotide for detection of SNP TSC0038336
aggtatcgtggtt

SEQ ID NO: 151740 - DNA, 13 bp, Artificial Sequence
  Oligonucleotide for detection of SNP TSC0038336
aaccacgatacct

SEQ ID NO: 151741 - DNA, 13 bp, Artificial Sequence
  Oligonucleotide for detection of SNP TSC0038337
gatgagtaatttg

SEQ ID NO: 151742 - DNA, 13 bp, Artificial Sequence
  Oligonucleotide for detection of SNP TSC0038337
caaattactcatc

SEQ ID NO: 151743 - DNA, 13 bp, Artificial Sequence
  Oligonucleotide for detection of SNP TSC0038337
gatgaggaatttg

SEQ ID NO: 151744 - DNA, 13 bp, Artificial Sequence
  Oligonucleotide for detection of SNP TSC0038337
caaattcctcatc

SEQ ID NO: 151745 - DNA, 13 bp, Artificial Sequence
  Oligonucleotide for detection of SNP TSC0038337
taggttgtttaty

SEQ ID NO: 151746 - DNA, 13 bp, Artificial Sequence
  Oligonucleotide for detection of SNP TSC0038337
rataaacaaccta

SEQ ID NO: 151747 - DNA, 13 bp, Artificial Sequence
  Oligonucleotide for detection of SNP TSC0038337
taggttttttaty

SEQ ID NO: 151748 - DNA, 13 bp, Artificial Sequence
  Oligonucleotide for detection of SNP TSC0038337
rataaaaaaccta

SEQ ID NO: 151749 - DNA, 13 bp, Artificial Sequence
  Oligonucleotide for detection of SNP TSC0038339
tttagtatattat

SEQ ID NO: 151750 - DNA, 13 bp, Artificial Sequence
  Oligonucleotide for detection of SNP TSC0038339
ataatatactaaa

SEQ ID NO: 151751 - DNA, 13 bp, Artificial Sequence
  Oligonucleotide for detection of SNP TSC0038339
tttagtttattat

SEQ ID NO: 151752 - DNA, 13 bp, Artificial Sequence
  Oligonucleotide for detection of SNP TSC0038339
ataataaactaaa

SEQ ID NO: 151753 - DNA, 13 bp, Artificial Sequence
  Oligonucleotide for detection of SNP TSC0038339
ataatatattgaa

SEQ ID NO: 151754 - DNA, 13 bp, Artificial Sequence
  Oligonucleotide for detection of SNP TSC0038339
ttcaatatattat

SEQ ID NO: 151755 - DNA, 13 bp, Artificial Sequence
  Oligonucleotide for detection of SNP TSC0038339
ataatagattgaa

SEQ ID NO: 151756 - DNA, 13 bp, Artificial Sequence
  Oligonucleotide for detection of SNP TSC0038339
ttcaatctattat

SEQ ID NO: 151757 - DNA, 13 bp, Artificial Sequence
  Oligonucleotide for detection of SNP TSC0038340
ggaagtggagaag

SEQ ID NO: 151758 - DNA, 13 bp, Artificial Sequence
  Oligonucleotide for detection of SNP TSC0038340
cttctccacttcc

SEQ ID NO: 151759 - DNA, 13 bp, Artificial Sequence
  Oligonucleotide for detection of SNP TSC0038340
ggaagttgagaag

SEQ ID NO: 151760 - DNA, 13 bp, Artificial Sequence
  Oligonucleotide for detection of SNP TSC0038340
cttctcaacttcc

SEQ ID NO: 151761 - DNA, 13 bp, Artificial Sequence
  Oligonucleotide for detection of SNP TSC0038341
tttatagaagtat

SEQ ID NO: 151762 - DNA, 13 bp, Artificial Sequence
  Oligonucleotide for detection of SNP TSC0038341
atacttctataaa

SEQ ID NO: 151763 - DNA, 13 bp, Artificial Sequence
  Oligonucleotide for detection of SNP TSC0038341
tttataaaagtat

SEQ ID NO: 151764 - DNA, 13 bp, Artificial Sequence
  Oligonucleotide for detection of SNP TSC0038341
atacttttataaa

SEQ ID NO: 151765 - DNA, 13 bp, Artificial Sequence
  Oligonucleotide for detection of SNP TSC0038345
gttaatatgaaag

SEQ ID NO: 151766 - DNA, 13 bp, Artificial Sequence
  Oligonucleotide for detection of SNP TSC0038345
ctttcatattaac

SEQ ID NO: 151767 - DNA, 13 bp, Artificial Sequence
  Oligonucleotide for detection of SNP TSC0038345
gttaatttgaaag

SEQ ID NO: 151768 - DNA, 13 bp, Artificial Sequence
  Oligonucleotide for detection of SNP TSC0038345
ctttcaaattaac

SEQ ID NO: 151769 - DNA, 13 bp, Artificial Sequence
  Oligonucleotide for detection of SNP TSC0038345
tttttatattagy

SEQ ID NO: 151770 - DNA, 13 bp, Artificial Sequence
  Oligonucleotide for detection of SNP TSC0038345
rctaatataaaaa

SEQ ID NO: 151771 - DNA, 13 bp, Artificial Sequence
  Oligonucleotide for detection of SNP TSC0038345
tttttaaattagy

SEQ ID NO: 151772 - DNA, 13 bp, Artificial Sequence
  Oligonucleotide for detection of SNP TSC0038345
rctaatttaaaaa

SEQ ID NO: 151773 - DNA, 13 bp, Artificial Sequence
  Oligonucleotide for detection of SNP TSC0038346
aagattataattg

SEQ ID NO: 151774 - DNA, 13 bp, Artificial Sequence
  Oligonucleotide for detection of SNP TSC0038346
caattataatctt

SEQ ID NO: 151775 - DNA, 13 bp, Artificial Sequence
  Oligonucleotide for detection of SNP TSC0038346
aagattgtaattg

SEQ ID NO: 151776 - DNA, 13 bp, Artificial Sequence
  Oligonucleotide for detection of SNP TSC0038346
caattacaatctt

SEQ ID NO: 151777 - DNA, 13 bp, Artificial Sequence
  Oligonucleotide for detection of SNP TSC0038347
tatagatgtggtt

SEQ ID NO: 151778 - DNA, 13 bp, Artificial Sequence
  Oligonucleotide for detection of SNP TSC0038347
aaccacatctata

SEQ ID NO: 151779 - DNA, 13 bp, Artificial Sequence
  Oligonucleotide for detection of SNP TSC0038347
tatagaggtggtt

SEQ ID NO: 151780 - DNA, 13 bp, Artificial Sequence
  Oligonucleotide for detection of SNP TSC0038347
aaccacctctata

SEQ ID NO: 151781 - DNA, 13 bp, Artificial Sequence
  Oligonucleotide for detection of SNP TSC0038347
tatagacgtggtt

SEQ ID NO: 151782 - DNA, 13 bp, Artificial Sequence
  Oligonucleotide for detection of SNP TSC0038347
aaccacgtctata

SEQ ID NO: 151783 - DNA, 13 bp, Artificial Sequence
  Oligonucleotide for detection of SNP TSC0038347
aattatgtttatg

SEQ ID NO: 151784 - DNA, 13 bp, Artificial Sequence
  Oligonucleotide for detection of SNP TSC0038347
cataaacataatt

SEQ ID NO: 151785 - DNA, 13 bp, Artificial Sequence
  Oligonucleotide for detection of SNP TSC0038347
aattatttttatg

SEQ ID NO: 151786 - DNA, 13 bp, Artificial Sequence
  Oligonucleotide for detection of SNP TSC0038347
cataaaaataatt

SEQ ID NO: 151787 - DNA, 13 bp, Artificial Sequence
  Oligonucleotide for detection of SNP TSC0038347
aattacgtttatg

SEQ ID NO: 151788 - DNA, 13 bp, Artificial Sequence
  Oligonucleotide for detection of SNP TSC0038347
cataaacgtaatt

SEQ ID NO: 151789 - DNA, 13 bp, Artificial Sequence
  Oligonucleotide for detection of SNP TSC0038348
agtttaagattag

SEQ ID NO: 151790 - DNA, 13 bp, Artificial Sequence
  Oligonucleotide for detection of SNP TSC0038348
ctaatcttaaact

SEQ ID NO: 151791 - DNA, 13 bp, Artificial Sequence
  Oligonucleotide for detection of SNP TSC0038348
agtttatgattag

SEQ ID NO: 151792 - DNA, 13 bp, Artificial Sequence
  Oligonucleotide for detection of SNP TSC0038348
ctaatcataaact

SEQ ID NO: 151793 - DNA, 13 bp, Artificial Sequence
  Oligonucleotide for detection of SNP TSC0038348
agtttacgattag

SEQ ID NO: 151794 - DNA, 13 bp, Artificial Sequence
  Oligonucleotide for detection of SNP TSC0038348
ctaatcgtaaact

SEQ ID NO: 151795 - DNA, 13 bp, Artificial Sequence
  Oligonucleotide for detection of SNP TSC0038348
ttggttttgaatt

SEQ ID NO: 151796 - DNA, 13 bp, Artificial Sequence
  Oligonucleotide for detection of SNP TSC0038348
aattcaaaaccaa

SEQ ID NO: 151797 - DNA, 13 bp, Artificial Sequence
  Oligonucleotide for detection of SNP TSC0038348
ttggttgtgaatt

SEQ ID NO: 151798 - DNA, 13 bp, Artificial Sequence
  Oligonucleotide for detection of SNP TSC0038348
aattcacaaccaa

SEQ ID NO: 151799 - DNA, 13 bp, Artificial Sequence
  Oligonucleotide for detection of SNP TSC0038348
ttggtcgtgaatt

SEQ ID NO: 151800 - DNA, 13 bp, Artificial Sequence
  Oligonucleotide for detection of SNP TSC0038348
aattcacgaccaa

SEQ ID NO: 151801 - DNA, 13 bp, Artificial Sequence
  Oligonucleotide for detection of SNP TSC0038350
ttagttgtattty

SEQ ID NO: 151802 - DNA, 13 bp, Artificial Sequence
  Oligonucleotide for detection of SNP TSC0038350
raaatacaactaa

SEQ ID NO: 151803 - DNA, 13 bp, Artificial Sequence
  Oligonucleotide for detection of SNP TSC0038350
gaaatgtaattga

SEQ ID NO: 151804 - DNA, 13 bp, Artificial Sequence
  Oligonucleotide for detection of SNP TSC0038350
tcaattacatttc

SEQ ID NO: 151805 - DNA, 13 bp, Artificial Sequence
  Oligonucleotide for detection of SNP TSC0038350
gaaatgaaattga

SEQ ID NO: 151806 - DNA, 13 bp, Artificial Sequence
  Oligonucleotide for detection of SNP TSC0038350
tcaatttcatttc

SEQ ID NO: 151807 - DNA, 13 bp, Artificial Sequence
  Oligonucleotide for detection of SNP TSC0038351
agagtaattgaaa

SEQ ID NO: 151808 - DNA, 13 bp, Artificial Sequence
  Oligonucleotide for detection of SNP TSC0038351
tttcaattactct

SEQ ID NO: 151809 - DNA, 13 bp, Artificial Sequence
  Oligonucleotide for detection of SNP TSC0038351
agagtagttgaaa

SEQ ID NO: 151810 - DNA, 13 bp, Artificial Sequence
  Oligonucleotide for detection of SNP TSC0038351
tttcaactactct

SEQ ID NO: 151811 - DNA, 13 bp, Artificial Sequence
  Oligonucleotide for detection of SNP TSC0038352
tttattggattaa

SEQ ID NO: 151812 - DNA, 13 bp, Artificial Sequence
  Oligonucleotide for detection of SNP TSC0038352
ttaatccaataaa

SEQ ID NO: 151813 - DNA, 13 bp, Artificial Sequence
  Oligonucleotide for detection of SNP TSC0038352
tttattagattaa

SEQ ID NO: 151814 - DNA, 13 bp, Artificial Sequence
  Oligonucleotide for detection of SNP TSC0038352
ttaatctaataaa

SEQ ID NO: 151815 - DNA, 13 bp, Artificial Sequence
  Oligonucleotide for detection of SNP TSC0038354
gaataatgaagta

SEQ ID NO: 151816 - DNA, 13 bp, Artificial Sequence
  Oligonucleotide for detection of SNP TSC0038354
tacttcattattc

SEQ ID NO: 151817 - DNA, 13 bp, Artificial Sequence
  Oligonucleotide for detection of SNP TSC0038354
gaataacgaagta

SEQ ID NO: 151818 - DNA, 13 bp, Artificial Sequence
  Oligonucleotide for detection of SNP TSC0038354
tacttcgttattc

SEQ ID NO: 151819 - DNA, 13 bp, Artificial Sequence
  Oligonucleotide for detection of SNP TSC0038356
attttgtagaaaa

SEQ ID NO: 151820 - DNA, 13 bp, Artificial Sequence
  Oligonucleotide for detection of SNP TSC0038356
ttttctacaaaat

SEQ ID NO: 151821 - DNA, 13 bp, Artificial Sequence
  Oligonucleotide for detection of SNP TSC0038356
attttggagaaaa

SEQ ID NO: 151822 - DNA, 13 bp, Artificial Sequence
  Oligonucleotide for detection of SNP TSC0038356
ttttctccaaaat

SEQ ID NO: 151823 - DNA, 13 bp, Artificial Sequence
  Oligonucleotide for detection of SNP TSC0038358
ttttttgatattg

SEQ ID NO: 151824 - DNA, 13 bp, Artificial Sequence
  Oligonucleotide for detection of SNP TSC0038358
caatatcaaaaaa

SEQ ID NO: 151825 - DNA, 13 bp, Artificial Sequence
  Oligonucleotide for detection of SNP TSC0038358
ttttttaatattg

SEQ ID NO: 151826 - DNA, 13 bp, Artificial Sequence
  Oligonucleotide for detection of SNP TSC0038358
caatattaaaaaa

SEQ ID NO: 151827 - DNA, 13 bp, Artificial Sequence
  Oligonucleotide for detection of SNP TSC0038359
attgatattatat

SEQ ID NO: 151828 - DNA, 13 bp, Artificial Sequence
  Oligonucleotide for detection of SNP TSC0038359
atataatatcaat

SEQ ID NO: 151829 - DNA, 13 bp, Artificial Sequence
  Oligonucleotide for detection of SNP TSC0038359
attgatgttatat

SEQ ID NO: 151830 - DNA, 13 bp, Artificial Sequence
  Oligonucleotide for detection of SNP TSC0038359
atataacatcaat

SEQ ID NO: 151831 - DNA, 13 bp, Artificial Sequence
  Oligonucleotide for detection of SNP TSC0038359
atcgatattatat

SEQ ID NO: 151832 - DNA, 13 bp, Artificial Sequence
  Oligonucleotide for detection of SNP TSC0038359
atataatatcgat

SEQ ID NO: 151833 - DNA, 13 bp, Artificial Sequence
  Oligonucleotide for detection of SNP TSC0038359
atcgatgttatat

SEQ ID NO: 151834 - DNA, 13 bp, Artificial Sequence
  Oligonucleotide for detection of SNP TSC0038359
atataacatcgat

SEQ ID NO: 151835 - DNA, 13 bp, Artificial Sequence
  Oligonucleotide for detection of SNP TSC0038359
attgacgttatat

SEQ ID NO: 151836 - DNA, 13 bp, Artificial Sequence
  Oligonucleotide for detection of SNP TSC0038359
atataacgtcaat

SEQ ID NO: 151837 - DNA, 13 bp, Artificial Sequence
  Oligonucleotide for detection of SNP TSC0038359
atcgacgttatat

SEQ ID NO: 151838 - DNA, 13 bp, Artificial Sequence
  Oligonucleotide for detection of SNP TSC0038359
atataacgtcgat

SEQ ID NO: 151839 - DNA, 13 bp, Artificial Sequence
  Oligonucleotide for detection of SNP TSC0038359
atgtgatgttgat

SEQ ID NO: 151840 - DNA, 13 bp, Artificial Sequence
  Oligonucleotide for detection of SNP TSC0038359
atcaacatcacat

SEQ ID NO: 151841 - DNA, 13 bp, Artificial Sequence
  Oligonucleotide for detection of SNP TSC0038359
atgtgatgtcgat

SEQ ID NO: 151842 - DNA, 13 bp, Artificial Sequence
  Oligonucleotide for detection of SNP TSC0038359
atcgacatcacat

SEQ ID NO: 151843 - DNA, 13 bp, Artificial Sequence
  Oligonucleotide for detection of SNP TSC0038359
atgtgacgttgat

SEQ ID NO: 151844 - DNA, 13 bp, Artificial Sequence
  Oligonucleotide for detection of SNP TSC0038359
atcaacgtcacat

SEQ ID NO: 151845 - DNA, 13 bp, Artificial Sequence
  Oligonucleotide for detection of SNP TSC0038359
atgtgacgtcgat

SEQ ID NO: 151846 - DNA, 13 bp, Artificial Sequence
  Oligonucleotide for detection of SNP TSC0038359
atcgacgtcacat

SEQ ID NO: 151847 - DNA, 13 bp, Artificial Sequence
  Oligonucleotide for detection of SNP TSC0038360
tgttgtggttttt

SEQ ID NO: 151848 - DNA, 13 bp, Artificial Sequence
  Oligonucleotide for detection of SNP TSC0038360
aaaaaccacaaca

SEQ ID NO: 151849 - DNA, 13 bp, Artificial Sequence
  Oligonucleotide for detection of SNP TSC0038360
tgttgtagttttt

SEQ ID NO: 151850 - DNA, 13 bp, Artificial Sequence
  Oligonucleotide for detection of SNP TSC0038360
aaaaactacaaca

SEQ ID NO: 151851 - DNA, 13 bp, Artificial Sequence
  Oligonucleotide for detection of SNP TSC0038369
ataattgttttty

SEQ ID NO: 151852 - DNA, 13 bp, Artificial Sequence
  Oligonucleotide for detection of SNP TSC0038369
raaaaacaattat

SEQ ID NO: 151853 - DNA, 13 bp, Artificial Sequence
  Oligonucleotide for detection of SNP TSC0038369
ataatttttttty

SEQ ID NO: 151854 - DNA, 13 bp, Artificial Sequence
  Oligonucleotide for detection of SNP TSC0038369
raaaaaaaattat

SEQ ID NO: 151855 - DNA, 13 bp, Artificial Sequence
  Oligonucleotide for detection of SNP TSC0038369
gaaaaataattat

SEQ ID NO: 151856 - DNA, 13 bp, Artificial Sequence
  Oligonucleotide for detection of SNP TSC0038369
ataattatttttc

SEQ ID NO: 151857 - DNA, 13 bp, Artificial Sequence
  Oligonucleotide for detection of SNP TSC0038369
gaaaaaaaattat

SEQ ID NO: 151858 - DNA, 13 bp, Artificial Sequence
  Oligonucleotide for detection of SNP TSC0038369
ataattttttttc

SEQ ID NO: 151859 - DNA, 13 bp, Artificial Sequence
  Oligonucleotide for detection of SNP TSC0038370
aagaaatgtttgg

SEQ ID NO: 151860 - DNA, 13 bp, Artificial Sequence
  Oligonucleotide for detection of SNP TSC0038370
ccaaacatttctt

SEQ ID NO: 151861 - DNA, 13 bp, Artificial Sequence
  Oligonucleotide for detection of SNP TSC0038370
aagaaacgtttgg

SEQ ID NO: 151862 - DNA, 13 bp, Artificial Sequence
  Oligonucleotide for detection of SNP TSC0038370
ccaaacgtttctt

SEQ ID NO: 151863 - DNA, 13 bp, Artificial Sequence
  Oligonucleotide for detection of SNP TSC0038371
ttattaaggaatt

SEQ ID NO: 151864 - DNA, 13 bp, Artificial Sequence
  Oligonucleotide for detection of SNP TSC0038371
aattccttaataa

SEQ ID NO: 151865 - DNA, 13 bp, Artificial Sequence
  Oligonucleotide for detection of SNP TSC0038371
aattttttggtgg

SEQ ID NO: 151866 - DNA, 13 bp, Artificial Sequence
  Oligonucleotide for detection of SNP TSC0038371
ccaccaaaaaatt

SEQ ID NO: 151867 - DNA, 13 bp, Artificial Sequence
  Oligonucleotide for detection of SNP TSC0038371
aattttgtggtgg

SEQ ID NO: 151868 - DNA, 13 bp, Artificial Sequence
  Oligonucleotide for detection of SNP TSC0038371
ccaccacaaaatt

SEQ ID NO: 151869 - DNA, 13 bp, Artificial Sequence
  Oligonucleotide for detection of SNP TSC0038371
aatttcgtggtgg

SEQ ID NO: 151870 - DNA, 13 bp, Artificial Sequence
  Oligonucleotide for detection of SNP TSC0038371
ccaccacgaaatt

SEQ ID NO: 151871 - DNA, 13 bp, Artificial Sequence
  Oligonucleotide for detection of SNP TSC0038372
ttaaaaatagtag

SEQ ID NO: 151872 - DNA, 13 bp, Artificial Sequence
  Oligonucleotide for detection of SNP TSC0038372
ctactatttttaa

SEQ ID NO: 151873 - DNA, 13 bp, Artificial Sequence
  Oligonucleotide for detection of SNP TSC0038372
ttaaaagtagtag

SEQ ID NO: 151874 - DNA, 13 bp, Artificial Sequence
  Oligonucleotide for detection of SNP TSC0038372
ctactacttttaa

SEQ ID NO: 151875 - DNA, 13 bp, Artificial Sequence
  Oligonucleotide for detection of SNP TSC0038375
tgttgaatggaag

SEQ ID NO: 151876 - DNA, 13 bp, Artificial Sequence
  Oligonucleotide for detection of SNP TSC0038375
cttccattcaaca

SEQ ID NO: 151877 - DNA, 13 bp, Artificial Sequence
  Oligonucleotide for detection of SNP TSC0038375
tgttgagtggaag

SEQ ID NO: 151878 - DNA, 13 bp, Artificial Sequence
  Oligonucleotide for detection of SNP TSC0038375
cttccactcaaca

SEQ ID NO: 151879 - DNA, 13 bp, Artificial Sequence
  Oligonucleotide for detection of SNP TSC0038376
taaattattaatt

SEQ ID NO: 151880 - DNA, 13 bp, Artificial Sequence
  Oligonucleotide for detection of SNP TSC0038376
aattaataattta

SEQ ID NO: 151881 - DNA, 13 bp, Artificial Sequence
  Oligonucleotide for detection of SNP TSC0038376
taaattgttaatt

SEQ ID NO: 151882 - DNA, 13 bp, Artificial Sequence
  Oligonucleotide for detection of SNP TSC0038376
aattaacaattta

SEQ ID NO: 151883 - DNA, 13 bp, Artificial Sequence
  Oligonucleotide for detection of SNP TSC0038380
taagttatattta

SEQ ID NO: 151884 - DNA, 13 bp, Artificial Sequence
  Oligonucleotide for detection of SNP TSC0038380
taaatataactta

SEQ ID NO: 151885 - DNA, 13 bp, Artificial Sequence
  Oligonucleotide for detection of SNP TSC0038380
taagttttattta

SEQ ID NO: 151886 - DNA, 13 bp, Artificial Sequence
  Oligonucleotide for detection of SNP TSC0038380
taaataaaactta

SEQ ID NO: 151887 - DNA, 13 bp, Artificial Sequence
  Oligonucleotide for detection of SNP TSC0038380
tgaatataattta

SEQ ID NO: 151888 - DNA, 13 bp, Artificial Sequence
  Oligonucleotide for detection of SNP TSC0038380
taaattatattca

SEQ ID NO: 151889 - DNA, 13 bp, Artificial Sequence
  Oligonucleotide for detection of SNP TSC0038380
tgaatagaattta

SEQ ID NO: 151890 - DNA, 13 bp, Artificial Sequence
  Oligonucleotide for detection of SNP TSC0038380
taaattctattca

SEQ ID NO: 151891 - DNA, 13 bp, Artificial Sequence
  Oligonucleotide for detection of SNP TSC0038381
tggagtagttgay

SEQ ID NO: 151892 - DNA, 13 bp, Artificial Sequence
  Oligonucleotide for detection of SNP TSC0038381
rtcaactactcca

SEQ ID NO: 151893 - DNA, 13 bp, Artificial Sequence
  Oligonucleotide for detection of SNP TSC0038381
tggagtggttgay

SEQ ID NO: 151894 - DNA, 13 bp, Artificial Sequence
  Oligonucleotide for detection of SNP TSC0038381
rtcaaccactcca

SEQ ID NO: 151895 - DNA, 13 bp, Artificial Sequence
  Oligonucleotide for detection of SNP TSC0038381
tggagcggttgay

SEQ ID NO: 151896 - DNA, 13 bp, Artificial Sequence
  Oligonucleotide for detection of SNP TSC0038381
rtcaaccgctcca

SEQ ID NO: 151897 - DNA, 13 bp, Artificial Sequence
  Oligonucleotide for detection of SNP TSC0038381
gttagttgtttta

SEQ ID NO: 151898 - DNA, 13 bp, Artificial Sequence
  Oligonucleotide for detection of SNP TSC0038381
taaaacaactaac

SEQ ID NO: 151899 - DNA, 13 bp, Artificial Sequence
  Oligonucleotide for detection of SNP TSC0038381
gttagtcgtttta

SEQ ID NO: 151900 - DNA, 13 bp, Artificial Sequence
  Oligonucleotide for detection of SNP TSC0038381
taaaacgactaac

SEQ ID NO: 151901 - DNA, 13 bp, Artificial Sequence
  Oligonucleotide for detection of SNP TSC0038382
aaagttgatatga

SEQ ID NO: 151902 - DNA, 13 bp, Artificial Sequence
  Oligonucleotide for detection of SNP TSC0038382
tcatatcaacttt

SEQ ID NO: 151903 - DNA, 13 bp, Artificial Sequence
  Oligonucleotide for detection of SNP TSC0038382
aaagtttatatga

SEQ ID NO: 151904 - DNA, 13 bp, Artificial Sequence
  Oligonucleotide for detection of SNP TSC0038382
tcatataaacttt

SEQ ID NO: 151905 - DNA, 13 bp, Artificial Sequence
  Oligonucleotide for detection of SNP TSC0038382
ttatattagtttt

SEQ ID NO: 151906 - DNA, 13 bp, Artificial Sequence
  Oligonucleotide for detection of SNP TSC0038382
aaaactaatataa

SEQ ID NO: 151907 - DNA, 13 bp, Artificial Sequence
  Oligonucleotide for detection of SNP TSC0038382
ttatataagtttt

SEQ ID NO: 151908 - DNA, 13 bp, Artificial Sequence
  Oligonucleotide for detection of SNP TSC0038382
aaaacttatataa

SEQ ID NO: 151909 - DNA, 13 bp, Artificial Sequence
  Oligonucleotide for detection of SNP TSC0038383
ttttacgtgtgta

SEQ ID NO: 151910 - DNA, 13 bp, Artificial Sequence
  Oligonucleotide for detection of SNP TSC0038383
tacacacgtaaaa

SEQ ID NO: 151911 - DNA, 13 bp, Artificial Sequence
  Oligonucleotide for detection of SNP TSC0038383
tatatatgtggag

SEQ ID NO: 151912 - DNA, 13 bp, Artificial Sequence
  Oligonucleotide for detection of SNP TSC0038383
ctccacatatata

SEQ ID NO: 151913 - DNA, 13 bp, Artificial Sequence
  Oligonucleotide for detection of SNP TSC0038383
tatatacgtggag

SEQ ID NO: 151914 - DNA, 13 bp, Artificial Sequence
  Oligonucleotide for detection of SNP TSC0038383
ctccacgtatata

SEQ ID NO: 151915 - DNA, 13 bp, Artificial Sequence
  Oligonucleotide for detection of SNP TSC0038384
attttaggtgaty

SEQ ID NO: 151916 - DNA, 13 bp, Artificial Sequence
  Oligonucleotide for detection of SNP TSC0038384
ratcacctaaaat

SEQ ID NO: 151917 - DNA, 13 bp, Artificial Sequence
  Oligonucleotide for detection of SNP TSC0038384
attttaagtgaty

SEQ ID NO: 151918 - DNA, 13 bp, Artificial Sequence
  Oligonucleotide for detection of SNP TSC0038384
ratcacttaaaat

SEQ ID NO: 151919 - DNA, 13 bp, Artificial Sequence
  Oligonucleotide for detection of SNP TSC0038387
atattagtgtatg

SEQ ID NO: 151920 - DNA, 13 bp, Artificial Sequence
  Oligonucleotide for detection of SNP TSC0038387
catacactaatat

SEQ ID NO: 151921 - DNA, 13 bp, Artificial Sequence
  Oligonucleotide for detection of SNP TSC0038387
atattattgtatg

SEQ ID NO: 151922 - DNA, 13 bp, Artificial Sequence
  Oligonucleotide for detection of SNP TSC0038387
catacaataatat

SEQ ID NO: 151923 - DNA, 13 bp, Artificial Sequence
  Oligonucleotide for detection of SNP TSC0038387
tatataataatgt

SEQ ID NO: 151924 - DNA, 13 bp, Artificial Sequence
  Oligonucleotide for detection of SNP TSC0038387
acattattatata

SEQ ID NO: 151925 - DNA, 13 bp, Artificial Sequence
  Oligonucleotide for detection of SNP TSC0038388
tgaataattttgt

SEQ ID NO: 151926 - DNA, 13 bp, Artificial Sequence
  Oligonucleotide for detection of SNP TSC0038388
acaaaattattca

SEQ ID NO: 151927 - DNA, 13 bp, Artificial Sequence
  Oligonucleotide for detection of SNP TSC0038388
tgaatatttttgt

SEQ ID NO: 151928 - DNA, 13 bp, Artificial Sequence
  Oligonucleotide for detection of SNP TSC0038388
acaaaaatattca

SEQ ID NO: 151929 - DNA, 13 bp, Artificial Sequence
  Oligonucleotide for detection of SNP TSC0038388
ataaagttattta

SEQ ID NO: 151930 - DNA, 13 bp, Artificial Sequence
  Oligonucleotide for detection of SNP TSC0038388
taaataactttat

SEQ ID NO: 151931 - DNA, 13 bp, Artificial Sequence
  Oligonucleotide for detection of SNP TSC0038389
ttatttaaagtty

SEQ ID NO: 151932 - DNA, 13 bp, Artificial Sequence
  Oligonucleotide for detection of SNP TSC0038389
raactttaaataa

SEQ ID NO: 151933 - DNA, 13 bp, Artificial Sequence
  Oligonucleotide for detection of SNP TSC0038389
ttatttgaagtty

SEQ ID NO: 151934 - DNA, 13 bp, Artificial Sequence
  Oligonucleotide for detection of SNP TSC0038389
raacttcaaataa

SEQ ID NO: 151935 - DNA, 13 bp, Artificial Sequence
  Oligonucleotide for detection of SNP TSC0038389
ttattcgaagtty

SEQ ID NO: 151936 - DNA, 13 bp, Artificial Sequence
  Oligonucleotide for detection of SNP TSC0038389
raacttcgaataa

SEQ ID NO: 151937 - DNA, 13 bp, Artificial Sequence
  Oligonucleotide for detection of SNP TSC0038389
ggattttgagtga

SEQ ID NO: 151938 - DNA, 13 bp, Artificial Sequence
  Oligonucleotide for detection of SNP TSC0038389
tcactcaaaatcc

SEQ ID NO: 151939 - DNA, 13 bp, Artificial Sequence
  Oligonucleotide for detection of SNP TSC0038389
ggatttcgagtga

SEQ ID NO: 151940 - DNA, 13 bp, Artificial Sequence
  Oligonucleotide for detection of SNP TSC0038389
tcactcgaaatcc

SEQ ID NO: 151941 - DNA, 13 bp, Artificial Sequence
  Oligonucleotide for detection of SNP TSC0038391
taatatatttata

SEQ ID NO: 151942 - DNA, 13 bp, Artificial Sequence
  Oligonucleotide for detection of SNP TSC0038391
tataaatatatta

SEQ ID NO: 151943 - DNA, 13 bp, Artificial Sequence
  Oligonucleotide for detection of SNP TSC0038391
taatatgtttata

SEQ ID NO: 151944 - DNA, 13 bp, Artificial Sequence
  Oligonucleotide for detection of SNP TSC0038391
tataaacatatta

SEQ ID NO: 151945 - DNA, 13 bp, Artificial Sequence
  Oligonucleotide for detection of SNP TSC0038391
taatacgtttata

SEQ ID NO: 151946 - DNA, 13 bp, Artificial Sequence
  Oligonucleotide for detection of SNP TSC0038391
tataaacgtatta

SEQ ID NO: 151947 - DNA, 13 bp, Artificial Sequence
  Oligonucleotide for detection of SNP TSC0038391
tataaatgtatta

SEQ ID NO: 151948 - DNA, 13 bp, Artificial Sequence
  Oligonucleotide for detection of SNP TSC0038391
taatacatttata

SEQ ID NO: 151949 - DNA, 13 bp, Artificial Sequence
  Oligonucleotide for detection of SNP TSC0038394
tgttagattttat

SEQ ID NO: 151950 - DNA, 13 bp, Artificial Sequence
  Oligonucleotide for detection of SNP TSC0038394
ataaaatctaaca

SEQ ID NO: 151951 - DNA, 13 bp, Artificial Sequence
  Oligonucleotide for detection of SNP TSC0038396
tgggttattatta

SEQ ID NO: 151952 - DNA, 13 bp, Artificial Sequence
  Oligonucleotide for detection of SNP TSC0038396
taataataaccca

SEQ ID NO: 151953 - DNA, 13 bp, Artificial Sequence
  Oligonucleotide for detection of SNP TSC0038396
tgggttgttatta

SEQ ID NO: 151954 - DNA, 13 bp, Artificial Sequence
  Oligonucleotide for detection of SNP TSC0038396
taataacaaccca

SEQ ID NO: 151955 - DNA, 13 bp, Artificial Sequence
  Oligonucleotide for detection of SNP TSC0038397
agaaaagaagaaa

SEQ ID NO: 151956 - DNA, 13 bp, Artificial Sequence
  Oligonucleotide for detection of SNP TSC0038397
tttcttcttttct

SEQ ID NO: 151957 - DNA, 13 bp, Artificial Sequence
  Oligonucleotide for detection of SNP TSC0038397
agaaaaaaagaaa

SEQ ID NO: 151958 - DNA, 13 bp, Artificial Sequence
  Oligonucleotide for detection of SNP TSC0038397
tttctttttttct

SEQ ID NO: 151959 - DNA, 13 bp, Artificial Sequence
  Oligonucleotide for detection of SNP TSC0038398
taattttgaggga

SEQ ID NO: 151960 - DNA, 13 bp, Artificial Sequence
  Oligonucleotide for detection of SNP TSC0038398
tccctcaaaatta

SEQ ID NO: 151961 - DNA, 13 bp, Artificial Sequence
  Oligonucleotide for detection of SNP TSC0038398
taatttggaggga

SEQ ID NO: 151962 - DNA, 13 bp, Artificial Sequence
  Oligonucleotide for detection of SNP TSC0038398
tccctccaaatta

SEQ ID NO: 151963 - DNA, 13 bp, Artificial Sequence
  Oligonucleotide for detection of SNP TSC0038398
taatttcgaggga

SEQ ID NO: 151964 - DNA, 13 bp, Artificial Sequence
  Oligonucleotide for detection of SNP TSC0038398
tccctcgaaatta

SEQ ID NO: 151965 - DNA, 13 bp, Artificial Sequence
  Oligonucleotide for detection of SNP TSC0038398
ttttttgaagttg

SEQ ID NO: 151966 - DNA, 13 bp, Artificial Sequence
  Oligonucleotide for detection of SNP TSC0038398
caacttcaaaaaa

SEQ ID NO: 151967 - DNA, 13 bp, Artificial Sequence
  Oligonucleotide for detection of SNP TSC0038398
tttttcgaagttg

SEQ ID NO: 151968 - DNA, 13 bp, Artificial Sequence
  Oligonucleotide for detection of SNP TSC0038398
caacttcgaaaaa

SEQ ID NO: 151969 - DNA, 13 bp, Artificial Sequence
  Oligonucleotide for detection of SNP TSC0038399
taagttgagattg

SEQ ID NO: 151970 - DNA, 13 bp, Artificial Sequence
  Oligonucleotide for detection of SNP TSC0038399
caatctcaactta

SEQ ID NO: 151971 - DNA, 13 bp, Artificial Sequence
  Oligonucleotide for detection of SNP TSC0038399
taagttaagattg

SEQ ID NO: 151972 - DNA, 13 bp, Artificial Sequence
  Oligonucleotide for detection of SNP TSC0038399
caatcttaactta

SEQ ID NO: 151973 - DNA, 13 bp, Artificial Sequence
  Oligonucleotide for detection of SNP TSC0038399
taagtcgagattg

SEQ ID NO: 151974 - DNA, 13 bp, Artificial Sequence
  Oligonucleotide for detection of SNP TSC0038399
caatctcgactta

SEQ ID NO: 151975 - DNA, 13 bp, Artificial Sequence
  Oligonucleotide for detection of SNP TSC0038399
taagttaagatcg

SEQ ID NO: 151976 - DNA, 13 bp, Artificial Sequence
  Oligonucleotide for detection of SNP TSC0038399
cgatcttaactta

SEQ ID NO: 151977 - DNA, 13 bp, Artificial Sequence
  Oligonucleotide for detection of SNP TSC0038399
taagttgagatcg

SEQ ID NO: 151978 - DNA, 13 bp, Artificial Sequence
  Oligonucleotide for detection of SNP TSC0038399
cgatctcaactta

SEQ ID NO: 151979 - DNA, 13 bp, Artificial Sequence
  Oligonucleotide for detection of SNP TSC0038399
taagtcgagatcg

SEQ ID NO: 151980 - DNA, 13 bp, Artificial Sequence
  Oligonucleotide for detection of SNP TSC0038399
cgatctcgactta

SEQ ID NO: 151981 - DNA, 13 bp, Artificial Sequence
  Oligonucleotide for detection of SNP TSC0038401
tgattagttgttt

SEQ ID NO: 151982 - DNA, 13 bp, Artificial Sequence
  Oligonucleotide for detection of SNP TSC0038401
aaacaactaatca

SEQ ID NO: 151983 - DNA, 13 bp, Artificial Sequence
  Oligonucleotide for detection of SNP TSC0038401
tgattaattgttt

SEQ ID NO: 151984 - DNA, 13 bp, Artificial Sequence
  Oligonucleotide for detection of SNP TSC0038401
aaacaattaatca

SEQ ID NO: 151985 - DNA, 13 bp, Artificial Sequence
  Oligonucleotide for detection of SNP TSC0038402
tttgaaaagaaag

SEQ ID NO: 151986 - DNA, 13 bp, Artificial Sequence
  Oligonucleotide for detection of SNP TSC0038402
ctttcttttcaaa

SEQ ID NO: 151987 - DNA, 13 bp, Artificial Sequence
  Oligonucleotide for detection of SNP TSC0038402
tttgaagagaaag

SEQ ID NO: 151988 - DNA, 13 bp, Artificial Sequence
  Oligonucleotide for detection of SNP TSC0038402
ctttctcttcaaa

SEQ ID NO: 151989 - DNA, 13 bp, Artificial Sequence
  Oligonucleotide for detection of SNP TSC0038403
gagagagggggag

SEQ ID NO: 151990 - DNA, 13 bp, Artificial Sequence
  Oligonucleotide for detection of SNP TSC0038403
ctccccctctctc

SEQ ID NO: 151991 - DNA, 13 bp, Artificial Sequence
  Oligonucleotide for detection of SNP TSC0038403
gagagatggggag

SEQ ID NO: 151992 - DNA, 13 bp, Artificial Sequence
  Oligonucleotide for detection of SNP TSC0038403
ctccccatctctc

SEQ ID NO: 151993 - DNA, 13 bp, Artificial Sequence
  Oligonucleotide for detection of SNP TSC0038403
gagagacggggag

SEQ ID NO: 151994 - DNA, 13 bp, Artificial Sequence
  Oligonucleotide for detection of SNP TSC0038403
ctccccgtctctc

SEQ ID NO: 151995 - DNA, 13 bp, Artificial Sequence
  Oligonucleotide for detection of SNP TSC0038404
tgttattgagata

SEQ ID NO: 151996 - DNA, 13 bp, Artificial Sequence
  Oligonucleotide for detection of SNP TSC0038404
tatctcaataaca

SEQ ID NO: 151997 - DNA, 13 bp, Artificial Sequence
  Oligonucleotide for detection of SNP TSC0038404
tgttatcgagata

SEQ ID NO: 151998 - DNA, 13 bp, Artificial Sequence
  Oligonucleotide for detection of SNP TSC0038404
tatctcgataaca

SEQ ID NO: 151999 - DNA, 13 bp, Artificial Sequence
  Oligonucleotide for detection of SNP TSC0038404
tgttttggtgata

SEQ ID NO: 152000 - DNA, 13 bp, Artificial Sequence
  Oligonucleotide for detection of SNP TSC0038404
tatcaccaaaaca

SEQ ID NO: 152001 - DNA, 13 bp, Artificial Sequence
  Oligonucleotide for detection of SNP TSC0038404
tgttttagtgata

SEQ ID NO: 152002 - DNA, 13 bp, Artificial Sequence
  Oligonucleotide for detection of SNP TSC0038404
tatcactaaaaca

SEQ ID NO: 152003 - DNA, 13 bp, Artificial Sequence
  Oligonucleotide for detection of SNP TSC0038404
tgtttcggtgata

SEQ ID NO: 152004 - DNA, 13 bp, Artificial Sequence
  Oligonucleotide for detection of SNP TSC0038404
tatcaccgaaaca

SEQ ID NO: 152005 - DNA, 13 bp, Artificial Sequence
  Oligonucleotide for detection of SNP TSC0038407
gtttttaaaaata

SEQ ID NO: 152006 - DNA, 13 bp, Artificial Sequence
  Oligonucleotide for detection of SNP TSC0038407
tatttttaaaaac

SEQ ID NO: 152007 - DNA, 13 bp, Artificial Sequence
  Oligonucleotide for detection of SNP TSC0038407
gttttttaaaata

SEQ ID NO: 152008 - DNA, 13 bp, Artificial Sequence
  Oligonucleotide for detection of SNP TSC0038407
tattttaaaaaac

SEQ ID NO: 152009 - DNA, 13 bp, Artificial Sequence
  Oligonucleotide for detection of SNP TSC0038408
agttataataata

SEQ ID NO: 152010 - DNA, 13 bp, Artificial Sequence
  Oligonucleotide for detection of SNP TSC0038408
tattattataact

SEQ ID NO: 152011 - DNA, 13 bp, Artificial Sequence
  Oligonucleotide for detection of SNP TSC0038408
agttattataata

SEQ ID NO: 152012 - DNA, 13 bp, Artificial Sequence
  Oligonucleotide for detection of SNP TSC0038408
tattataataact

SEQ ID NO: 152013 - DNA, 13 bp, Artificial Sequence
  Oligonucleotide for detection of SNP TSC0038408
tattattatgatt

SEQ ID NO: 152014 - DNA, 13 bp, Artificial Sequence
  Oligonucleotide for detection of SNP TSC0038408
aatcataataata

SEQ ID NO: 152015 - DNA, 13 bp, Artificial Sequence
  Oligonucleotide for detection of SNP TSC0038408
tattatgatgatt

SEQ ID NO: 152016 - DNA, 13 bp, Artificial Sequence
  Oligonucleotide for detection of SNP TSC0038408
aatcatcataata

SEQ ID NO: 152017 - DNA, 13 bp, Artificial Sequence
  Oligonucleotide for detection of SNP TSC0038412
agtgagattttta

SEQ ID NO: 152018 - DNA, 13 bp, Artificial Sequence
  Oligonucleotide for detection of SNP TSC0038412
taaaaatctcact

SEQ ID NO: 152019 - DNA, 13 bp, Artificial Sequence
  Oligonucleotide for detection of SNP TSC0038412
agtgaggttttta

SEQ ID NO: 152020 - DNA, 13 bp, Artificial Sequence
  Oligonucleotide for detection of SNP TSC0038412
taaaaacctcact

SEQ ID NO: 152021 - DNA, 13 bp, Artificial Sequence
  Oligonucleotide for detection of SNP TSC0038414
atgtttagggtgg

SEQ ID NO: 152022 - DNA, 13 bp, Artificial Sequence
  Oligonucleotide for detection of SNP TSC0038414
ccaccctaaacat

SEQ ID NO: 152023 - DNA, 13 bp, Artificial Sequence
  Oligonucleotide for detection of SNP TSC0038414
atgtttggggtgg

SEQ ID NO: 152024 - DNA, 13 bp, Artificial Sequence
  Oligonucleotide for detection of SNP TSC0038414
ccaccccaaacat

SEQ ID NO: 152025 - DNA, 13 bp, Artificial Sequence
  Oligonucleotide for detection of SNP TSC0038414
atgttcggggtgg

SEQ ID NO: 152026 - DNA, 13 bp, Artificial Sequence
  Oligonucleotide for detection of SNP TSC0038414
ccaccccgaacat

SEQ ID NO: 152027 - DNA, 13 bp, Artificial Sequence
  Oligonucleotide for detection of SNP TSC0038414
ttattttgggtat

SEQ ID NO: 152028 - DNA, 13 bp, Artificial Sequence
  Oligonucleotide for detection of SNP TSC0038414
atacccaaaataa

SEQ ID NO: 152029 - DNA, 13 bp, Artificial Sequence
  Oligonucleotide for detection of SNP TSC0038414
ttatttcgggtat

SEQ ID NO: 152030 - DNA, 13 bp, Artificial Sequence
  Oligonucleotide for detection of SNP TSC0038414
atacccgaaataa

SEQ ID NO: 152031 - DNA, 13 bp, Artificial Sequence
  Oligonucleotide for detection of SNP TSC0038415
gagtatagttttt

SEQ ID NO: 152032 - DNA, 13 bp, Artificial Sequence
  Oligonucleotide for detection of SNP TSC0038415
aaaaactatactc

SEQ ID NO: 152033 - DNA, 13 bp, Artificial Sequence
  Oligonucleotide for detection of SNP TSC0038415
gagtatggttttt

SEQ ID NO: 152034 - DNA, 13 bp, Artificial Sequence
  Oligonucleotide for detection of SNP TSC0038415
aaaaaccatactc

SEQ ID NO: 152035 - DNA, 13 bp, Artificial Sequence
  Oligonucleotide for detection of SNP TSC0038415
gagtacggttttt

SEQ ID NO: 152036 - DNA, 13 bp, Artificial Sequence
  Oligonucleotide for detection of SNP TSC0038415
aaaaaccgtactc

SEQ ID NO: 152037 - DNA, 13 bp, Artificial Sequence
  Oligonucleotide for detection of SNP TSC0038415
agaggttgtgtty

SEQ ID NO: 152038 - DNA, 13 bp, Artificial Sequence
  Oligonucleotide for detection of SNP TSC0038415
raacacaacctct

SEQ ID NO: 152039 - DNA, 13 bp, Artificial Sequence
  Oligonucleotide for detection of SNP TSC0038415
agaggtcgtgtty

SEQ ID NO: 152040 - DNA, 13 bp, Artificial Sequence
  Oligonucleotide for detection of SNP TSC0038415
raacacgacctct

SEQ ID NO: 152041 - DNA, 13 bp, Artificial Sequence
  Oligonucleotide for detection of SNP TSC0038416
tggtaggataaag

SEQ ID NO: 152042 - DNA, 13 bp, Artificial Sequence
  Oligonucleotide for detection of SNP TSC0038416
ctttatcctacca

SEQ ID NO: 152043 - DNA, 13 bp, Artificial Sequence
  Oligonucleotide for detection of SNP TSC0038416
tggtagaataaag

SEQ ID NO: 152044 - DNA, 13 bp, Artificial Sequence
  Oligonucleotide for detection of SNP TSC0038416
ctttattctacca

SEQ ID NO: 152045 - DNA, 13 bp, Artificial Sequence
  Oligonucleotide for detection of SNP TSC0038417
ttttaggaaattg

SEQ ID NO: 152046 - DNA, 13 bp, Artificial Sequence
  Oligonucleotide for detection of SNP TSC0038417
caatttcctaaaa

SEQ ID NO: 152047 - DNA, 13 bp, Artificial Sequence
  Oligonucleotide for detection of SNP TSC0038417
ttttagaaaattg

SEQ ID NO: 152048 - DNA, 13 bp, Artificial Sequence
  Oligonucleotide for detection of SNP TSC0038417
caattttctaaaa

SEQ ID NO: 152049 - DNA, 13 bp, Artificial Sequence
  Oligonucleotide for detection of SNP TSC0038420
ttatatataagtt

SEQ ID NO: 152050 - DNA, 13 bp, Artificial Sequence
  Oligonucleotide for detection of SNP TSC0038420
aacttatatataa

SEQ ID NO: 152051 - DNA, 13 bp, Artificial Sequence
  Oligonucleotide for detection of SNP TSC0038420
ttatatgtaagtt

SEQ ID NO: 152052 - DNA, 13 bp, Artificial Sequence
  Oligonucleotide for detection of SNP TSC0038420
aacttacatataa

SEQ ID NO: 152053 - DNA, 13 bp, Artificial Sequence
  Oligonucleotide for detection of SNP TSC0038422
tttggaggttttt

SEQ ID NO: 152054 - DNA, 13 bp, Artificial Sequence
  Oligonucleotide for detection of SNP TSC0038422
aaaaacctccaaa

SEQ ID NO: 152055 - DNA, 13 bp, Artificial Sequence
  Oligonucleotide for detection of SNP TSC0038422
tttggatgttttt

SEQ ID NO: 152056 - DNA, 13 bp, Artificial Sequence
  Oligonucleotide for detection of SNP TSC0038422
aaaaacatccaaa

SEQ ID NO: 152057 - DNA, 13 bp, Artificial Sequence
  Oligonucleotide for detection of SNP TSC0038422
aggagtttttaga

SEQ ID NO: 152058 - DNA, 13 bp, Artificial Sequence
  Oligonucleotide for detection of SNP TSC0038422
tctaaaaactcct

SEQ ID NO: 152059 - DNA, 13 bp, Artificial Sequence
  Oligonucleotide for detection of SNP TSC0038422
aggagtatttaga

SEQ ID NO: 152060 - DNA, 13 bp, Artificial Sequence
  Oligonucleotide for detection of SNP TSC0038422
tctaaatactcct

SEQ ID NO: 152061 - DNA, 13 bp, Artificial Sequence
  Oligonucleotide for detection of SNP TSC0038423
atttttatgagty

SEQ ID NO: 152062 - DNA, 13 bp, Artificial Sequence
  Oligonucleotide for detection of SNP TSC0038423
ractcataaaaat

SEQ ID NO: 152063 - DNA, 13 bp, Artificial Sequence
  Oligonucleotide for detection of SNP TSC0038423
atttttgtgagty

SEQ ID NO: 152064 - DNA, 13 bp, Artificial Sequence
  Oligonucleotide for detection of SNP TSC0038423
ractcacaaaaat

SEQ ID NO: 152065 - DNA, 13 bp, Artificial Sequence
  Oligonucleotide for detection of SNP TSC0038423
attttcgtgagty

SEQ ID NO: 152066 - DNA, 13 bp, Artificial Sequence
  Oligonucleotide for detection of SNP TSC0038423
ractcacgaaaat

SEQ ID NO: 152067 - DNA, 13 bp, Artificial Sequence
  Oligonucleotide for detection of SNP TSC0038423
gatttatggaggt

SEQ ID NO: 152068 - DNA, 13 bp, Artificial Sequence
  Oligonucleotide for detection of SNP TSC0038423
acctccataaatc

SEQ ID NO: 152069 - DNA, 13 bp, Artificial Sequence
  Oligonucleotide for detection of SNP TSC0038423
gatttacggaggt

SEQ ID NO: 152070 - DNA, 13 bp, Artificial Sequence
  Oligonucleotide for detection of SNP TSC0038423
acctccgtaaatc

SEQ ID NO: 152071 - DNA, 13 bp, Artificial Sequence
  Oligonucleotide for detection of SNP TSC0038425
tttagggatgttt

SEQ ID NO: 152072 - DNA, 13 bp, Artificial Sequence
  Oligonucleotide for detection of SNP TSC0038425
aaacatccctaaa

SEQ ID NO: 152073 - DNA, 13 bp, Artificial Sequence
  Oligonucleotide for detection of SNP TSC0038425
tttaggaatgttt

SEQ ID NO: 152074 - DNA, 13 bp, Artificial Sequence
  Oligonucleotide for detection of SNP TSC0038425
aaacattcctaaa

SEQ ID NO: 152075 - DNA, 13 bp, Artificial Sequence
  Oligonucleotide for detection of SNP TSC0038426
aataaagtaaaat

SEQ ID NO: 152076 - DNA, 13 bp, Artificial Sequence
  Oligonucleotide for detection of SNP TSC0038426
attttactttatt

SEQ ID NO: 152077 - DNA, 13 bp, Artificial Sequence
  Oligonucleotide for detection of SNP TSC0038426
aataaaataaaat

SEQ ID NO: 152078 - DNA, 13 bp, Artificial Sequence
  Oligonucleotide for detection of SNP TSC0038426
attttattttatt

SEQ ID NO: 152079 - DNA, 13 bp, Artificial Sequence
  Oligonucleotide for detection of SNP TSC0038427
tggaggtgggtgt

SEQ ID NO: 152080 - DNA, 13 bp, Artificial Sequence
  Oligonucleotide for detection of SNP TSC0038427
acacccacctcca

SEQ ID NO: 152081 - DNA, 13 bp, Artificial Sequence
  Oligonucleotide for detection of SNP TSC0038427
tggaggcgggtgt

SEQ ID NO: 152082 - DNA, 13 bp, Artificial Sequence
  Oligonucleotide for detection of SNP TSC0038427
acacccgcctcca

SEQ ID NO: 152083 - DNA, 13 bp, Artificial Sequence
  Oligonucleotide for detection of SNP TSC0038427
tggaggtgggcgt

SEQ ID NO: 152084 - DNA, 13 bp, Artificial Sequence
  Oligonucleotide for detection of SNP TSC0038427
acgcccacctcca

SEQ ID NO: 152085 - DNA, 13 bp, Artificial Sequence
  Oligonucleotide for detection of SNP TSC0038427
tggaggcgggcgt

SEQ ID NO: 152086 - DNA, 13 bp, Artificial Sequence
  Oligonucleotide for detection of SNP TSC0038427
acgcccgcctcca

SEQ ID NO: 152087 - DNA, 13 bp, Artificial Sequence
  Oligonucleotide for detection of SNP TSC0038427
acgtttgttttta

SEQ ID NO: 152088 - DNA, 13 bp, Artificial Sequence
  Oligonucleotide for detection of SNP TSC0038427
taaaaacaaacgt

SEQ ID NO: 152089 - DNA, 13 bp, Artificial Sequence
  Oligonucleotide for detection of SNP TSC0038427
acgtttattttta

SEQ ID NO: 152090 - DNA, 13 bp, Artificial Sequence
  Oligonucleotide for detection of SNP TSC0038427
taaaaataaacgt

SEQ ID NO: 152091 - DNA, 13 bp, Artificial Sequence
  Oligonucleotide for detection of SNP TSC0038427
atgttcgttttta

SEQ ID NO: 152092 - DNA, 13 bp, Artificial Sequence
  Oligonucleotide for detection of SNP TSC0038427
taaaaacgaacat

SEQ ID NO: 152093 - DNA, 13 bp, Artificial Sequence
  Oligonucleotide for detection of SNP TSC0038427
acgttcgttttta

SEQ ID NO: 152094 - DNA, 13 bp, Artificial Sequence
  Oligonucleotide for detection of SNP TSC0038427
taaaaacgaacgt

SEQ ID NO: 152095 - DNA, 13 bp, Artificial Sequence
  Oligonucleotide for detection of SNP TSC0038428
tttatatttattt

SEQ ID NO: 152096 - DNA, 13 bp, Artificial Sequence
  Oligonucleotide for detection of SNP TSC0038428
aaataaatataaa

SEQ ID NO: 152097 - DNA, 13 bp, Artificial Sequence
  Oligonucleotide for detection of SNP TSC0038428
aagtgattgtgag

SEQ ID NO: 152098 - DNA, 13 bp, Artificial Sequence
  Oligonucleotide for detection of SNP TSC0038428
ctcacaatcactt

SEQ ID NO: 152099 - DNA, 13 bp, Artificial Sequence
  Oligonucleotide for detection of SNP TSC0038428
aagtgaatgtgag

SEQ ID NO: 152100 - DNA, 13 bp, Artificial Sequence
  Oligonucleotide for detection of SNP TSC0038428
ctcacattcactt

SEQ ID NO: 152101 - DNA, 13 bp, Artificial Sequence
  Oligonucleotide for detection of SNP TSC0038429
gtattgaaaatty

SEQ ID NO: 152102 - DNA, 13 bp, Artificial Sequence
  Oligonucleotide for detection of SNP TSC0038429
raattttcaatac

SEQ ID NO: 152103 - DNA, 13 bp, Artificial Sequence
  Oligonucleotide for detection of SNP TSC0038429
gtattggaaatty

SEQ ID NO: 152104 - DNA, 13 bp, Artificial Sequence
  Oligonucleotide for detection of SNP TSC0038429
raatttccaatac

SEQ ID NO: 152105 - DNA, 13 bp, Artificial Sequence
  Oligonucleotide for detection of SNP TSC0038430
tttgaatgatttt

SEQ ID NO: 152106 - DNA, 13 bp, Artificial Sequence
  Oligonucleotide for detection of SNP TSC0038430
aaaatcattcaaa

SEQ ID NO: 152107 - DNA, 13 bp, Artificial Sequence
  Oligonucleotide for detection of SNP TSC0038430
tttgaacgatttt

SEQ ID NO: 152108 - DNA, 13 bp, Artificial Sequence
  Oligonucleotide for detection of SNP TSC0038430
aaaatcgttcaaa

SEQ ID NO: 152109 - DNA, 13 bp, Artificial Sequence
  Oligonucleotide for detection of SNP TSC0038430
agagttatttaag

SEQ ID NO: 152110 - DNA, 13 bp, Artificial Sequence
  Oligonucleotide for detection of SNP TSC0038430
cttaaataactct

SEQ ID NO: 152111 - DNA, 13 bp, Artificial Sequence
  Oligonucleotide for detection of SNP TSC0038430
agagtcgtttaag

SEQ ID NO: 152112 - DNA, 13 bp, Artificial Sequence
  Oligonucleotide for detection of SNP TSC0038430
cttaaacgactct

SEQ ID NO: 152113 - DNA, 13 bp, Artificial Sequence
  Oligonucleotide for detection of SNP TSC0038431
taagaggttgttt

SEQ ID NO: 152114 - DNA, 13 bp, Artificial Sequence
  Oligonucleotide for detection of SNP TSC0038431
aaacaacctctta

SEQ ID NO: 152115 - DNA, 13 bp, Artificial Sequence
  Oligonucleotide for detection of SNP TSC0038431
taagagtttgttt

SEQ ID NO: 152116 - DNA, 13 bp, Artificial Sequence
  Oligonucleotide for detection of SNP TSC0038431
aaacaaactctta

SEQ ID NO: 152117 - DNA, 13 bp, Artificial Sequence
  Oligonucleotide for detection of SNP TSC0038431
aggtagttttttg

SEQ ID NO: 152118 - DNA, 13 bp, Artificial Sequence
  Oligonucleotide for detection of SNP TSC0038431
caaaaaactacct

SEQ ID NO: 152119 - DNA, 13 bp, Artificial Sequence
  Oligonucleotide for detection of SNP TSC0038431
aggtagatttttg

SEQ ID NO: 152120 - DNA, 13 bp, Artificial Sequence
  Oligonucleotide for detection of SNP TSC0038431
caaaaatctacct

SEQ ID NO: 152121 - DNA, 13 bp, Artificial Sequence
  Oligonucleotide for detection of SNP TSC0038432
tgtaaagattaga

SEQ ID NO: 152122 - DNA, 13 bp, Artificial Sequence
  Oligonucleotide for detection of SNP TSC0038432
tctaatctttaca

SEQ ID NO: 152123 - DNA, 13 bp, Artificial Sequence
  Oligonucleotide for detection of SNP TSC0038432
tgtaaaaattaga

SEQ ID NO: 152124 - DNA, 13 bp, Artificial Sequence
  Oligonucleotide for detection of SNP TSC0038432
tctaatttttaca

SEQ ID NO: 152125 - DNA, 13 bp, Artificial Sequence
  Oligonucleotide for detection of SNP TSC0038433
aaagtatgtttga

SEQ ID NO: 152126 - DNA, 13 bp, Artificial Sequence
  Oligonucleotide for detection of SNP TSC0038433
tcaaacatacttt

SEQ ID NO: 152127 - DNA, 13 bp, Artificial Sequence
  Oligonucleotide for detection of SNP TSC0038433
aaagtaggtttga

SEQ ID NO: 152128 - DNA, 13 bp, Artificial Sequence
  Oligonucleotide for detection of SNP TSC0038433
tcaaacctacttt

SEQ ID NO: 152129 - DNA, 13 bp, Artificial Sequence
  Oligonucleotide for detection of SNP TSC0038433
aaagtacgtttga

SEQ ID NO: 152130 - DNA, 13 bp, Artificial Sequence
  Oligonucleotide for detection of SNP TSC0038433
tcaaacgtacttt

SEQ ID NO: 152131 - DNA, 13 bp, Artificial Sequence
  Oligonucleotide for detection of SNP TSC0038433
ttagatgtatttt

SEQ ID NO: 152132 - DNA, 13 bp, Artificial Sequence
  Oligonucleotide for detection of SNP TSC0038433
aaaatacatctaa

SEQ ID NO: 152133 - DNA, 13 bp, Artificial Sequence
  Oligonucleotide for detection of SNP TSC0038433
ttagatttatttt

SEQ ID NO: 152134 - DNA, 13 bp, Artificial Sequence
  Oligonucleotide for detection of SNP TSC0038433
aaaataaatctaa

SEQ ID NO: 152135 - DNA, 13 bp, Artificial Sequence
  Oligonucleotide for detection of SNP TSC0038433
ttagacgtatttt

SEQ ID NO: 152136 - DNA, 13 bp, Artificial Sequence
  Oligonucleotide for detection of SNP TSC0038433
aaaatacgtctaa

SEQ ID NO: 152137 - DNA, 13 bp, Artificial Sequence
  Oligonucleotide for detection of SNP TSC0038439
acgtttagttaat

SEQ ID NO: 152138 - DNA, 13 bp, Artificial Sequence
  Oligonucleotide for detection of SNP TSC0038439
attaactaaacgt

SEQ ID NO: 152139 - DNA, 13 bp, Artificial Sequence
  Oligonucleotide for detection of SNP TSC0038439
acgtttggttaat

SEQ ID NO: 152140 - DNA, 13 bp, Artificial Sequence
  Oligonucleotide for detection of SNP TSC0038439
attaaccaaacgt

SEQ ID NO: 152141 - DNA, 13 bp, Artificial Sequence
  Oligonucleotide for detection of SNP TSC0038439
acgttcggttaat

SEQ ID NO: 152142 - DNA, 13 bp, Artificial Sequence
  Oligonucleotide for detection of SNP TSC0038439
attaaccgaacgt

SEQ ID NO: 152143 - DNA, 13 bp, Artificial Sequence
  Oligonucleotide for detection of SNP TSC0038439
attagttgggcgt

SEQ ID NO: 152144 - DNA, 13 bp, Artificial Sequence
  Oligonucleotide for detection of SNP TSC0038439
acgcccaactaat

SEQ ID NO: 152145 - DNA, 13 bp, Artificial Sequence
  Oligonucleotide for detection of SNP TSC0038439
attagtcgggcgt

SEQ ID NO: 152146 - DNA, 13 bp, Artificial Sequence
  Oligonucleotide for detection of SNP TSC0038439
acgcccgactaat

SEQ ID NO: 152147 - DNA, 13 bp, Artificial Sequence
  Oligonucleotide for detection of SNP TSC0038440
ttttaggattatg

SEQ ID NO: 152148 - DNA, 13 bp, Artificial Sequence
  Oligonucleotide for detection of SNP TSC0038440
cataatcctaaaa

SEQ ID NO: 152149 - DNA, 13 bp, Artificial Sequence
  Oligonucleotide for detection of SNP TSC0038440
ttttagaattatg

SEQ ID NO: 152150 - DNA, 13 bp, Artificial Sequence
  Oligonucleotide for detection of SNP TSC0038440
cataattctaaaa

SEQ ID NO: 152151 - DNA, 13 bp, Artificial Sequence
  Oligonucleotide for detection of SNP TSC0038444
attttaaaatttt

SEQ ID NO: 152152 - DNA, 13 bp, Artificial Sequence
  Oligonucleotide for detection of SNP TSC0038444
aaaattttaaaat

SEQ ID NO: 152153 - DNA, 13 bp, Artificial Sequence
  Oligonucleotide for detection of SNP TSC0038444
attttagaatttt

SEQ ID NO: 152154 - DNA, 13 bp, Artificial Sequence
  Oligonucleotide for detection of SNP TSC0038444
aaaattctaaaat

SEQ ID NO: 152155 - DNA, 13 bp, Artificial Sequence
  Oligonucleotide for detection of SNP TSC0038449
gtattagtataty

SEQ ID NO: 152156 - DNA, 13 bp, Artificial Sequence
  Oligonucleotide for detection of SNP TSC0038449
ratatactaatac

SEQ ID NO: 152157 - DNA, 13 bp, Artificial Sequence
  Oligonucleotide for detection of SNP TSC0038449
gtattattataty

SEQ ID NO: 152158 - DNA, 13 bp, Artificial Sequence
  Oligonucleotide for detection of SNP TSC0038449
ratataataatac

SEQ ID NO: 152159 - DNA, 13 bp, Artificial Sequence
  Oligonucleotide for detection of SNP TSC0038449
ggtgtgttggtay

SEQ ID NO: 152160 - DNA, 13 bp, Artificial Sequence
  Oligonucleotide for detection of SNP TSC0038449
rtaccaacacacc

SEQ ID NO: 152161 - DNA, 13 bp, Artificial Sequence
  Oligonucleotide for detection of SNP TSC0038449
ggtgtgatggtay

SEQ ID NO: 152162 - DNA, 13 bp, Artificial Sequence
  Oligonucleotide for detection of SNP TSC0038449
rtaccatcacacc

SEQ ID NO: 152163 - DNA, 13 bp, Artificial Sequence
  Oligonucleotide for detection of SNP TSC0038451
aatttaaagggaa

SEQ ID NO: 152164 - DNA, 13 bp, Artificial Sequence
  Oligonucleotide for detection of SNP TSC0038451
ttccctttaaatt

SEQ ID NO: 152165 - DNA, 13 bp, Artificial Sequence
  Oligonucleotide for detection of SNP TSC0038451
aatttatagggaa

SEQ ID NO: 152166 - DNA, 13 bp, Artificial Sequence
  Oligonucleotide for detection of SNP TSC0038451
ttccctataaatt

SEQ ID NO: 152167 - DNA, 13 bp, Artificial Sequence
  Oligonucleotide for detection of SNP TSC0038451
ttttttttagatt

SEQ ID NO: 152168 - DNA, 13 bp, Artificial Sequence
  Oligonucleotide for detection of SNP TSC0038451
aatctaaaaaaaa

SEQ ID NO: 152169 - DNA, 13 bp, Artificial Sequence
  Oligonucleotide for detection of SNP TSC0038451
ttttttatagatt

SEQ ID NO: 152170 - DNA, 13 bp, Artificial Sequence
  Oligonucleotide for detection of SNP TSC0038451
aatctataaaaaa

SEQ ID NO: 152171 - DNA, 13 bp, Artificial Sequence
  Oligonucleotide for detection of SNP TSC0038452
attataaaggata

SEQ ID NO: 152172 - DNA, 13 bp, Artificial Sequence
  Oligonucleotide for detection of SNP TSC0038452
tatcctttataat

SEQ ID NO: 152173 - DNA, 13 bp, Artificial Sequence
  Oligonucleotide for detection of SNP TSC0038452
attatagaggata

SEQ ID NO: 152174 - DNA, 13 bp, Artificial Sequence
  Oligonucleotide for detection of SNP TSC0038452
tatcctctataat

SEQ ID NO: 152175 - DNA, 13 bp, Artificial Sequence
  Oligonucleotide for detection of SNP TSC0038453
ttttaaagattga

SEQ ID NO: 152176 - DNA, 13 bp, Artificial Sequence
  Oligonucleotide for detection of SNP TSC0038453
tcaatctttaaaa

SEQ ID NO: 152177 - DNA, 13 bp, Artificial Sequence
  Oligonucleotide for detection of SNP TSC0038453
ttttaaggattga

SEQ ID NO: 152178 - DNA, 13 bp, Artificial Sequence
  Oligonucleotide for detection of SNP TSC0038453
tcaatccttaaaa

SEQ ID NO: 152179 - DNA, 13 bp, Artificial Sequence
  Oligonucleotide for detection of SNP TSC0038454
tttggtgtatttt

SEQ ID NO: 152180 - DNA, 13 bp, Artificial Sequence
  Oligonucleotide for detection of SNP TSC0038454
aaaatacaccaaa

SEQ ID NO: 152181 - DNA, 13 bp, Artificial Sequence
  Oligonucleotide for detection of SNP TSC0038454
tttggtatatttt

SEQ ID NO: 152182 - DNA, 13 bp, Artificial Sequence
  Oligonucleotide for detection of SNP TSC0038454
aaaatataccaaa

SEQ ID NO: 152183 - DNA, 13 bp, Artificial Sequence
  Oligonucleotide for detection of SNP TSC0038455
aaggaaattttay

SEQ ID NO: 152184 - DNA, 13 bp, Artificial Sequence
  Oligonucleotide for detection of SNP TSC0038455
rtaaaatttcctt

SEQ ID NO: 152185 - DNA, 13 bp, Artificial Sequence
  Oligonucleotide for detection of SNP TSC0038455
aaggaatttttay

SEQ ID NO: 152186 - DNA, 13 bp, Artificial Sequence
  Oligonucleotide for detection of SNP TSC0038455
rtaaaaattcctt

SEQ ID NO: 152187 - DNA, 13 bp, Artificial Sequence
  Oligonucleotide for detection of SNP TSC0038455
gtaaagttttttt

SEQ ID NO: 152188 - DNA, 13 bp, Artificial Sequence
  Oligonucleotide for detection of SNP TSC0038455
aaaaaaactttac

SEQ ID NO: 152189 - DNA, 13 bp, Artificial Sequence
  Oligonucleotide for detection of SNP TSC0038455
gtaaagatttttt

SEQ ID NO: 152190 - DNA, 13 bp, Artificial Sequence
  Oligonucleotide for detection of SNP TSC0038455
aaaaaatctttac

SEQ ID NO: 152191 - DNA, 13 bp, Artificial Sequence
  Oligonucleotide for detection of SNP TSC0038456
taaaaaaaaaaga

SEQ ID NO: 152192 - DNA, 13 bp, Artificial Sequence
  Oligonucleotide for detection of SNP TSC0038456
tctttttttttta

SEQ ID NO: 152193 - DNA, 13 bp, Artificial Sequence
  Oligonucleotide for detection of SNP TSC0038456
taaaaagaaaaga

SEQ ID NO: 152194 - DNA, 13 bp, Artificial Sequence
  Oligonucleotide for detection of SNP TSC0038456
tcttttcttttta

SEQ ID NO: 152195 - DNA, 13 bp, Artificial Sequence
  Oligonucleotide for detection of SNP TSC0038457
ttgtaaagtgtat

SEQ ID NO: 152196 - DNA, 13 bp, Artificial Sequence
  Oligonucleotide for detection of SNP TSC0038457
atacactttacaa

SEQ ID NO: 152197 - DNA, 13 bp, Artificial Sequence
  Oligonucleotide for detection of SNP TSC0038457
ttgtaaggtgtat

SEQ ID NO: 152198 - DNA, 13 bp, Artificial Sequence
  Oligonucleotide for detection of SNP TSC0038457
atacaccttacaa

SEQ ID NO: 152199 - DNA, 13 bp, Artificial Sequence
  Oligonucleotide for detection of SNP TSC0038459
attgggattatat

SEQ ID NO: 152200 - DNA, 13 bp, Artificial Sequence
  Oligonucleotide for detection of SNP TSC0038459
atataatcccaat

SEQ ID NO: 152201 - DNA, 13 bp, Artificial Sequence
  Oligonucleotide for detection of SNP TSC0038459
attggggttatat

SEQ ID NO: 152202 - DNA, 13 bp, Artificial Sequence
  Oligonucleotide for detection of SNP TSC0038459
atataaccccaat

SEQ ID NO: 152203 - DNA, 13 bp, Artificial Sequence
  Oligonucleotide for detection of SNP TSC0038460
atattgtgtttay

SEQ ID NO: 152204 - DNA, 13 bp, Artificial Sequence
  Oligonucleotide for detection of SNP TSC0038460
rtaaacacaatat

SEQ ID NO: 152205 - DNA, 13 bp, Artificial Sequence
  Oligonucleotide for detection of SNP TSC0038460
atattgcgtttay

SEQ ID NO: 152206 - DNA, 13 bp, Artificial Sequence
  Oligonucleotide for detection of SNP TSC0038460
rtaaacgcaatat

SEQ ID NO: 152207 - DNA, 13 bp, Artificial Sequence
  Oligonucleotide for detection of SNP TSC0038460
gtgggtgtagtgt

SEQ ID NO: 152208 - DNA, 13 bp, Artificial Sequence
  Oligonucleotide for detection of SNP TSC0038460
acactacacccac

SEQ ID NO: 152209 - DNA, 13 bp, Artificial Sequence
  Oligonucleotide for detection of SNP TSC0038460
gtgggtatagtgt

SEQ ID NO: 152210 - DNA, 13 bp, Artificial Sequence
  Oligonucleotide for detection of SNP TSC0038460
acactatacccac

SEQ ID NO: 152211 - DNA, 13 bp, Artificial Sequence
  Oligonucleotide for detection of SNP TSC0038460
gtgggcgtagtgt

SEQ ID NO: 152212 - DNA, 13 bp, Artificial Sequence
  Oligonucleotide for detection of SNP TSC0038460
acactacgcccac

SEQ ID NO: 152213 - DNA, 13 bp, Artificial Sequence
  Oligonucleotide for detection of SNP TSC0038462
ttgtatataaaty

SEQ ID NO: 152214 - DNA, 13 bp, Artificial Sequence
  Oligonucleotide for detection of SNP TSC0038462
ratttatatacaa

SEQ ID NO: 152215 - DNA, 13 bp, Artificial Sequence
  Oligonucleotide for detection of SNP TSC0038462
ttgtatgtaaaty

SEQ ID NO: 152216 - DNA, 13 bp, Artificial Sequence
  Oligonucleotide for detection of SNP TSC0038462
ratttacatacaa

SEQ ID NO: 152217 - DNA, 13 bp, Artificial Sequence
  Oligonucleotide for detection of SNP TSC0038463
ggggttgtttatt

SEQ ID NO: 152218 - DNA, 13 bp, Artificial Sequence
  Oligonucleotide for detection of SNP TSC0038463
aataaacaacccc

SEQ ID NO: 152219 - DNA, 13 bp, Artificial Sequence
  Oligonucleotide for detection of SNP TSC0038463
ggggttttttatt

SEQ ID NO: 152220 - DNA, 13 bp, Artificial Sequence
  Oligonucleotide for detection of SNP TSC0038463
aataaaaaacccc

SEQ ID NO: 152221 - DNA, 13 bp, Artificial Sequence
  Oligonucleotide for detection of SNP TSC0038463
ggggtcgtttatt

SEQ ID NO: 152222 - DNA, 13 bp, Artificial Sequence
  Oligonucleotide for detection of SNP TSC0038463
aataaacgacccc

SEQ ID NO: 152223 - DNA, 13 bp, Artificial Sequence
  Oligonucleotide for detection of SNP TSC0038463
agtaggtggttty

SEQ ID NO: 152224 - DNA, 13 bp, Artificial Sequence
  Oligonucleotide for detection of SNP TSC0038463
raaaccacctact

SEQ ID NO: 152225 - DNA, 13 bp, Artificial Sequence
  Oligonucleotide for detection of SNP TSC0038463
agtaggaggttty

SEQ ID NO: 152226 - DNA, 13 bp, Artificial Sequence
  Oligonucleotide for detection of SNP TSC0038463
raaacctcctact

SEQ ID NO: 152227 - DNA, 13 bp, Artificial Sequence
  Oligonucleotide for detection of SNP TSC0038463
agtaggcggttty

SEQ ID NO: 152228 - DNA, 13 bp, Artificial Sequence
  Oligonucleotide for detection of SNP TSC0038463
raaaccgcctact

SEQ ID NO: 152229 - DNA, 13 bp, Artificial Sequence
  Oligonucleotide for detection of SNP TSC0038464
attattggaaata

SEQ ID NO: 152230 - DNA, 13 bp, Artificial Sequence
  Oligonucleotide for detection of SNP TSC0038464
tatttccaataat

SEQ ID NO: 152231 - DNA, 13 bp, Artificial Sequence
  Oligonucleotide for detection of SNP TSC0038464
attatcggaaata

SEQ ID NO: 152232 - DNA, 13 bp, Artificial Sequence
  Oligonucleotide for detection of SNP TSC0038464
tatttccgataat

SEQ ID NO: 152233 - DNA, 13 bp, Artificial Sequence
  Oligonucleotide for detection of SNP TSC0038464
tatttttggtaat

SEQ ID NO: 152234 - DNA, 13 bp, Artificial Sequence
  Oligonucleotide for detection of SNP TSC0038464
attaccaaaaata

SEQ ID NO: 152235 - DNA, 13 bp, Artificial Sequence
  Oligonucleotide for detection of SNP TSC0038464
tattttaggtaat

SEQ ID NO: 152236 - DNA, 13 bp, Artificial Sequence
  Oligonucleotide for detection of SNP TSC0038464
attacctaaaata

SEQ ID NO: 152237 - DNA, 13 bp, Artificial Sequence
  Oligonucleotide for detection of SNP TSC0038464
tattttcggtaat

SEQ ID NO: 152238 - DNA, 13 bp, Artificial Sequence
  Oligonucleotide for detection of SNP TSC0038464
attaccgaaaata

SEQ ID NO: 152239 - DNA, 13 bp, Artificial Sequence
  Oligonucleotide for detection of SNP TSC0038465
agtattgttttta

SEQ ID NO: 152240 - DNA, 13 bp, Artificial Sequence
  Oligonucleotide for detection of SNP TSC0038465
taaaaacaatact

SEQ ID NO: 152241 - DNA, 13 bp, Artificial Sequence
  Oligonucleotide for detection of SNP TSC0038465
agtattattttta

SEQ ID NO: 152242 - DNA, 13 bp, Artificial Sequence
  Oligonucleotide for detection of SNP TSC0038465
taaaaataatact

SEQ ID NO: 152243 - DNA, 13 bp, Artificial Sequence
  Oligonucleotide for detection of SNP TSC0038467
tttagtattgata

SEQ ID NO: 152244 - DNA, 13 bp, Artificial Sequence
  Oligonucleotide for detection of SNP TSC0038467
tatcaatactaaa

SEQ ID NO: 152245 - DNA, 13 bp, Artificial Sequence
  Oligonucleotide for detection of SNP TSC0038467
tttagtgttgata

SEQ ID NO: 152246 - DNA, 13 bp, Artificial Sequence
  Oligonucleotide for detection of SNP TSC0038467
tatcaacactaaa

SEQ ID NO: 152247 - DNA, 13 bp, Artificial Sequence
  Oligonucleotide for detection of SNP TSC0038467
tttagcgttgata

SEQ ID NO: 152248 - DNA, 13 bp, Artificial Sequence
  Oligonucleotide for detection of SNP TSC0038467
tatcaacgctaaa

SEQ ID NO: 152249 - DNA, 13 bp, Artificial Sequence
  Oligonucleotide for detection of SNP TSC0038467
tgttaatgttgaa

SEQ ID NO: 152250 - DNA, 13 bp, Artificial Sequence
  Oligonucleotide for detection of SNP TSC0038467
ttcaacattaaca

SEQ ID NO: 152251 - DNA, 13 bp, Artificial Sequence
  Oligonucleotide for detection of SNP TSC0038467
tgttaacgttgaa

SEQ ID NO: 152252 - DNA, 13 bp, Artificial Sequence
  Oligonucleotide for detection of SNP TSC0038467
ttcaacgttaaca

SEQ ID NO: 152253 - DNA, 13 bp, Artificial Sequence
  Oligonucleotide for detection of SNP TSC0038468
ataagaagtttaa

SEQ ID NO: 152254 - DNA, 13 bp, Artificial Sequence
  Oligonucleotide for detection of SNP TSC0038468
ttaaacttcttat

SEQ ID NO: 152255 - DNA, 13 bp, Artificial Sequence
  Oligonucleotide for detection of SNP TSC0038468
ataagatgtttaa

SEQ ID NO: 152256 - DNA, 13 bp, Artificial Sequence
  Oligonucleotide for detection of SNP TSC0038468
ttaaacatcttat

SEQ ID NO: 152257 - DNA, 13 bp, Artificial Sequence
  Oligonucleotide for detection of SNP TSC0038468
ttaaattttttgt

SEQ ID NO: 152258 - DNA, 13 bp, Artificial Sequence
  Oligonucleotide for detection of SNP TSC0038468
acaaaaaatttaa

SEQ ID NO: 152259 - DNA, 13 bp, Artificial Sequence
  Oligonucleotide for detection of SNP TSC0038468
ttaaatattttgt

SEQ ID NO: 152260 - DNA, 13 bp, Artificial Sequence
  Oligonucleotide for detection of SNP TSC0038468
acaaaatatttaa

SEQ ID NO: 152261 - DNA, 13 bp, Artificial Sequence
  Oligonucleotide for detection of SNP TSC0038471
gataagaaatgta

SEQ ID NO: 152262 - DNA, 13 bp, Artificial Sequence
  Oligonucleotide for detection of SNP TSC0038471
tacatttcttatc

SEQ ID NO: 152263 - DNA, 13 bp, Artificial Sequence
  Oligonucleotide for detection of SNP TSC0038471
gataaggaatgta

SEQ ID NO: 152264 - DNA, 13 bp, Artificial Sequence
  Oligonucleotide for detection of SNP TSC0038471
tacattccttatc

SEQ ID NO: 152265 - DNA, 13 bp, Artificial Sequence
  Oligonucleotide for detection of SNP TSC0038475
ggaaaaaataaaa

SEQ ID NO: 152266 - DNA, 13 bp, Artificial Sequence
  Oligonucleotide for detection of SNP TSC0038475
ttttattttttcc

SEQ ID NO: 152267 - DNA, 13 bp, Artificial Sequence
  Oligonucleotide for detection of SNP TSC0038475
ggaaaagataaaa

SEQ ID NO: 152268 - DNA, 13 bp, Artificial Sequence
  Oligonucleotide for detection of SNP TSC0038475
ttttatcttttcc

SEQ ID NO: 152269 - DNA, 13 bp, Artificial Sequence
  Oligonucleotide for detection of SNP TSC0038476
taggagaagtaag

SEQ ID NO: 152270 - DNA, 13 bp, Artificial Sequence
  Oligonucleotide for detection of SNP TSC0038476
cttacttctccta

SEQ ID NO: 152271 - DNA, 13 bp, Artificial Sequence
  Oligonucleotide for detection of SNP TSC0038476
taggagtagtaag

SEQ ID NO: 152272 - DNA, 13 bp, Artificial Sequence
  Oligonucleotide for detection of SNP TSC0038476
cttactactccta

SEQ ID NO: 152273 - DNA, 13 bp, Artificial Sequence
  Oligonucleotide for detection of SNP TSC0038477
gaagtaagagata

SEQ ID NO: 152274 - DNA, 13 bp, Artificial Sequence
  Oligonucleotide for detection of SNP TSC0038477
tatctcttacttc

SEQ ID NO: 152275 - DNA, 13 bp, Artificial Sequence
  Oligonucleotide for detection of SNP TSC0038477
gaagtatgagata

SEQ ID NO: 152276 - DNA, 13 bp, Artificial Sequence
  Oligonucleotide for detection of SNP TSC0038477
tatctcatacttc

SEQ ID NO: 152277 - DNA, 13 bp, Artificial Sequence
  Oligonucleotide for detection of SNP TSC0038477
gaagtacgagata

SEQ ID NO: 152278 - DNA, 13 bp, Artificial Sequence
  Oligonucleotide for detection of SNP TSC0038477
tatctcgtacttc

SEQ ID NO: 152279 - DNA, 13 bp, Artificial Sequence
  Oligonucleotide for detection of SNP TSC0038477
tattttttgttty

SEQ ID NO: 152280 - DNA, 13 bp, Artificial Sequence
  Oligonucleotide for detection of SNP TSC0038477
raaacaaaaaata

SEQ ID NO: 152281 - DNA, 13 bp, Artificial Sequence
  Oligonucleotide for detection of SNP TSC0038478
aattggatgttag

SEQ ID NO: 152282 - DNA, 13 bp, Artificial Sequence
  Oligonucleotide for detection of SNP TSC0038478
ctaacatccaatt

SEQ ID NO: 152283 - DNA, 13 bp, Artificial Sequence
  Oligonucleotide for detection of SNP TSC0038478
aattgggtgttag

SEQ ID NO: 152284 - DNA, 13 bp, Artificial Sequence
  Oligonucleotide for detection of SNP TSC0038478
ctaacacccaatt

SEQ ID NO: 152285 - DNA, 13 bp, Artificial Sequence
  Oligonucleotide for detection of SNP TSC0038478
aatcggatgttag

SEQ ID NO: 152286 - DNA, 13 bp, Artificial Sequence
  Oligonucleotide for detection of SNP TSC0038478
ctaacatccgatt

SEQ ID NO: 152287 - DNA, 13 bp, Artificial Sequence
  Oligonucleotide for detection of SNP TSC0038478
aatcgggtgttag

SEQ ID NO: 152288 - DNA, 13 bp, Artificial Sequence
  Oligonucleotide for detection of SNP TSC0038478
ctaacacccgatt

SEQ ID NO: 152289 - DNA, 13 bp, Artificial Sequence
  Oligonucleotide for detection of SNP TSC0038479
tgagttgtttaga

SEQ ID NO: 152290 - DNA, 13 bp, Artificial Sequence
  Oligonucleotide for detection of SNP TSC0038479
tctaaacaactca

SEQ ID NO: 152291 - DNA, 13 bp, Artificial Sequence
  Oligonucleotide for detection of SNP TSC0038479
tgagttttttaga

SEQ ID NO: 152292 - DNA, 13 bp, Artificial Sequence
  Oligonucleotide for detection of SNP TSC0038479
tctaaaaaactca

SEQ ID NO: 152293 - DNA, 13 bp, Artificial Sequence
  Oligonucleotide for detection of SNP TSC0038479
tttgagtagttta

SEQ ID NO: 152294 - DNA, 13 bp, Artificial Sequence
  Oligonucleotide for detection of SNP TSC0038479
taaactactcaaa

SEQ ID NO: 152295 - DNA, 13 bp, Artificial Sequence
  Oligonucleotide for detection of SNP TSC0038479
tttgagaagttta

SEQ ID NO: 152296 - DNA, 13 bp, Artificial Sequence
  Oligonucleotide for detection of SNP TSC0038479
taaacttctcaaa

SEQ ID NO: 152297 - DNA, 13 bp, Artificial Sequence
  Oligonucleotide for detection of SNP TSC0038480
tataggtgtatgy

SEQ ID NO: 152298 - DNA, 13 bp, Artificial Sequence
  Oligonucleotide for detection of SNP TSC0038480
rcatacacctata

SEQ ID NO: 152299 - DNA, 13 bp, Artificial Sequence
  Oligonucleotide for detection of SNP TSC0038480
tataggcgtatgy

SEQ ID NO: 152300 - DNA, 13 bp, Artificial Sequence
  Oligonucleotide for detection of SNP TSC0038480
rcatacgcctata

SEQ ID NO: 152301 - DNA, 13 bp, Artificial Sequence
  Oligonucleotide for detection of SNP TSC0038480
gtatgtgtttgta

SEQ ID NO: 152302 - DNA, 13 bp, Artificial Sequence
  Oligonucleotide for detection of SNP TSC0038480
tacaaacacatac

SEQ ID NO: 152303 - DNA, 13 bp, Artificial Sequence
  Oligonucleotide for detection of SNP TSC0038480
gtatgtatttgta

SEQ ID NO: 152304 - DNA, 13 bp, Artificial Sequence
  Oligonucleotide for detection of SNP TSC0038480
tacaaatacatac

SEQ ID NO: 152305 - DNA, 13 bp, Artificial Sequence
  Oligonucleotide for detection of SNP TSC0038480
gtatgcgtttgta

SEQ ID NO: 152306 - DNA, 13 bp, Artificial Sequence
  Oligonucleotide for detection of SNP TSC0038480
tacaaacgcatac

SEQ ID NO: 152307 - DNA, 13 bp, Artificial Sequence
  Oligonucleotide for detection of SNP TSC0038481
tggttaagatgtt

SEQ ID NO: 152308 - DNA, 13 bp, Artificial Sequence
  Oligonucleotide for detection of SNP TSC0038481
aacatcttaacca

SEQ ID NO: 152309 - DNA, 13 bp, Artificial Sequence
  Oligonucleotide for detection of SNP TSC0038481
tggttaggatgtt

SEQ ID NO: 152310 - DNA, 13 bp, Artificial Sequence
  Oligonucleotide for detection of SNP TSC0038481
aacatcctaacca

SEQ ID NO: 152311 - DNA, 13 bp, Artificial Sequence
  Oligonucleotide for detection of SNP TSC0038482
atggaaagagaat

SEQ ID NO: 152312 - DNA, 13 bp, Artificial Sequence
  Oligonucleotide for detection of SNP TSC0038482
attctctttccat

SEQ ID NO: 152313 - DNA, 13 bp, Artificial Sequence
  Oligonucleotide for detection of SNP TSC0038482
atggaaggagaat

SEQ ID NO: 152314 - DNA, 13 bp, Artificial Sequence
  Oligonucleotide for detection of SNP TSC0038482
attctccttccat

SEQ ID NO: 152315 - DNA, 13 bp, Artificial Sequence
  Oligonucleotide for detection of SNP TSC0038485
ttttgtatagtgg

SEQ ID NO: 152316 - DNA, 13 bp, Artificial Sequence
  Oligonucleotide for detection of SNP TSC0038485
ccactatacaaaa

SEQ ID NO: 152317 - DNA, 13 bp, Artificial Sequence
  Oligonucleotide for detection of SNP TSC0038485
ttttgtgtagtgg

SEQ ID NO: 152318 - DNA, 13 bp, Artificial Sequence
  Oligonucleotide for detection of SNP TSC0038485
ccactacacaaaa

SEQ ID NO: 152319 - DNA, 13 bp, Artificial Sequence
  Oligonucleotide for detection of SNP TSC0038487
tattattgtgttg

SEQ ID NO: 152320 - DNA, 13 bp, Artificial Sequence
  Oligonucleotide for detection of SNP TSC0038487
caacacaataata

SEQ ID NO: 152321 - DNA, 13 bp, Artificial Sequence
  Oligonucleotide for detection of SNP TSC0038487
tattatggtgttg

SEQ ID NO: 152322 - DNA, 13 bp, Artificial Sequence
  Oligonucleotide for detection of SNP TSC0038487
caacaccataata

SEQ ID NO: 152323 - DNA, 13 bp, Artificial Sequence
  Oligonucleotide for detection of SNP TSC0038487
tattatcgtgttg

SEQ ID NO: 152324 - DNA, 13 bp, Artificial Sequence
  Oligonucleotide for detection of SNP TSC0038487
caacacgataata

SEQ ID NO: 152325 - DNA, 13 bp, Artificial Sequence
  Oligonucleotide for detection of SNP TSC0038487
taatatgatggtg

SEQ ID NO: 152326 - DNA, 13 bp, Artificial Sequence
  Oligonucleotide for detection of SNP TSC0038487
caccatcatatta

SEQ ID NO: 152327 - DNA, 13 bp, Artificial Sequence
  Oligonucleotide for detection of SNP TSC0038487
taatattatggtg

SEQ ID NO: 152328 - DNA, 13 bp, Artificial Sequence
  Oligonucleotide for detection of SNP TSC0038487
caccataatatta

SEQ ID NO: 152329 - DNA, 13 bp, Artificial Sequence
  Oligonucleotide for detection of SNP TSC0038487
taatacgatggtg

SEQ ID NO: 152330 - DNA, 13 bp, Artificial Sequence
  Oligonucleotide for detection of SNP TSC0038487
caccatcgtatta

SEQ ID NO: 152331 - DNA, 13 bp, Artificial Sequence
  Oligonucleotide for detection of SNP TSC0038488
atttgtttatggt

SEQ ID NO: 152332 - DNA, 13 bp, Artificial Sequence
  Oligonucleotide for detection of SNP TSC0038488
accataaacaaat

SEQ ID NO: 152333 - DNA, 13 bp, Artificial Sequence
  Oligonucleotide for detection of SNP TSC0038488
attatgtgtaaat

SEQ ID NO: 152334 - DNA, 13 bp, Artificial Sequence
  Oligonucleotide for detection of SNP TSC0038488
atttacacataat

SEQ ID NO: 152335 - DNA, 13 bp, Artificial Sequence
  Oligonucleotide for detection of SNP TSC0038488
attatgagtaaat

SEQ ID NO: 152336 - DNA, 13 bp, Artificial Sequence
  Oligonucleotide for detection of SNP TSC0038488
atttactcataat

SEQ ID NO: 152337 - DNA, 13 bp, Artificial Sequence
  Oligonucleotide for detection of SNP TSC0038489
tgaagatgtttay

SEQ ID NO: 152338 - DNA, 13 bp, Artificial Sequence
  Oligonucleotide for detection of SNP TSC0038489
rtaaacatcttca

SEQ ID NO: 152339 - DNA, 13 bp, Artificial Sequence
  Oligonucleotide for detection of SNP TSC0038489
tgaagacgtttay

SEQ ID NO: 152340 - DNA, 13 bp, Artificial Sequence
  Oligonucleotide for detection of SNP TSC0038489
rtaaacgtcttca

SEQ ID NO: 152341 - DNA, 13 bp, Artificial Sequence
  Oligonucleotide for detection of SNP TSC0038489
gtgagtgttttta

SEQ ID NO: 152342 - DNA, 13 bp, Artificial Sequence
  Oligonucleotide for detection of SNP TSC0038489
taaaaacactcac

SEQ ID NO: 152343 - DNA, 13 bp, Artificial Sequence
  Oligonucleotide for detection of SNP TSC0038489
gtgagtattttta

SEQ ID NO: 152344 - DNA, 13 bp, Artificial Sequence
  Oligonucleotide for detection of SNP TSC0038489
taaaaatactcac

SEQ ID NO: 152345 - DNA, 13 bp, Artificial Sequence
  Oligonucleotide for detection of SNP TSC0038489
gtgagcgttttta

SEQ ID NO: 152346 - DNA, 13 bp, Artificial Sequence
  Oligonucleotide for detection of SNP TSC0038489
taaaaacgctcac

SEQ ID NO: 152347 - DNA, 13 bp, Artificial Sequence
  Oligonucleotide for detection of SNP TSC0038490
ataagtaggatty

SEQ ID NO: 152348 - DNA, 13 bp, Artificial Sequence
  Oligonucleotide for detection of SNP TSC0038490
raatcctacttat

SEQ ID NO: 152349 - DNA, 13 bp, Artificial Sequence
  Oligonucleotide for detection of SNP TSC0038490
ataagtgggatty

SEQ ID NO: 152350 - DNA, 13 bp, Artificial Sequence
  Oligonucleotide for detection of SNP TSC0038490
raatcccacttat

SEQ ID NO: 152351 - DNA, 13 bp, Artificial Sequence
  Oligonucleotide for detection of SNP TSC0038490
ataagcgggatty

SEQ ID NO: 152352 - DNA, 13 bp, Artificial Sequence
  Oligonucleotide for detection of SNP TSC0038490
raatcccgcttat

SEQ ID NO: 152353 - DNA, 13 bp, Artificial Sequence
  Oligonucleotide for detection of SNP TSC0038490
gagttttgtttgt

SEQ ID NO: 152354 - DNA, 13 bp, Artificial Sequence
  Oligonucleotide for detection of SNP TSC0038490
acaaacaaaactc

SEQ ID NO: 152355 - DNA, 13 bp, Artificial Sequence
  Oligonucleotide for detection of SNP TSC0038490
gagtttcgtttgt

SEQ ID NO: 152356 - DNA, 13 bp, Artificial Sequence
  Oligonucleotide for detection of SNP TSC0038490
acaaacgaaactc

SEQ ID NO: 152357 - DNA, 13 bp, Artificial Sequence
  Oligonucleotide for detection of SNP TSC0038491
tgagtaggagtag

SEQ ID NO: 152358 - DNA, 13 bp, Artificial Sequence
  Oligonucleotide for detection of SNP TSC0038491
ctactcctactca

SEQ ID NO: 152359 - DNA, 13 bp, Artificial Sequence
  Oligonucleotide for detection of SNP TSC0038491
tgagtaagagtag

SEQ ID NO: 152360 - DNA, 13 bp, Artificial Sequence
  Oligonucleotide for detection of SNP TSC0038491
ctactcttactca

SEQ ID NO: 152361 - DNA, 13 bp, Artificial Sequence
  Oligonucleotide for detection of SNP TSC0038492
ataaaattttaat

SEQ ID NO: 152362 - DNA, 13 bp, Artificial Sequence
  Oligonucleotide for detection of SNP TSC0038492
attaaaattttat

SEQ ID NO: 152363 - DNA, 13 bp, Artificial Sequence
  Oligonucleotide for detection of SNP TSC0038492
ataaaagtttaat

SEQ ID NO: 152364 - DNA, 13 bp, Artificial Sequence
  Oligonucleotide for detection of SNP TSC0038492
attaaacttttat

SEQ ID NO: 152365 - DNA, 13 bp, Artificial Sequence
  Oligonucleotide for detection of SNP TSC0038492
attagagttttat

SEQ ID NO: 152366 - DNA, 13 bp, Artificial Sequence
  Oligonucleotide for detection of SNP TSC0038492
ataaaactctaat

SEQ ID NO: 152367 - DNA, 13 bp, Artificial Sequence
  Oligonucleotide for detection of SNP TSC0038492
attagatttttat

SEQ ID NO: 152368 - DNA, 13 bp, Artificial Sequence
  Oligonucleotide for detection of SNP TSC0038492
ataaaaatctaat

SEQ ID NO: 152369 - DNA, 13 bp, Artificial Sequence
  Oligonucleotide for detection of SNP TSC0038493
aaatgtgtagtta

SEQ ID NO: 152370 - DNA, 13 bp, Artificial Sequence
  Oligonucleotide for detection of SNP TSC0038493
taactacacattt

SEQ ID NO: 152371 - DNA, 13 bp, Artificial Sequence
  Oligonucleotide for detection of SNP TSC0038493
aaatgtatagtta

SEQ ID NO: 152372 - DNA, 13 bp, Artificial Sequence
  Oligonucleotide for detection of SNP TSC0038493
taactatacattt

SEQ ID NO: 152373 - DNA, 13 bp, Artificial Sequence
  Oligonucleotide for detection of SNP TSC0038496
tgtataagtttta

SEQ ID NO: 152374 - DNA, 13 bp, Artificial Sequence
  Oligonucleotide for detection of SNP TSC0038496
taaaacttataca

SEQ ID NO: 152375 - DNA, 13 bp, Artificial Sequence
  Oligonucleotide for detection of SNP TSC0038496
tgtataggtttta

SEQ ID NO: 152376 - DNA, 13 bp, Artificial Sequence
  Oligonucleotide for detection of SNP TSC0038496
taaaacctataca

SEQ ID NO: 152377 - DNA, 13 bp, Artificial Sequence
  Oligonucleotide for detection of SNP TSC0038499
agttaggtgtagy

SEQ ID NO: 152378 - DNA, 13 bp, Artificial Sequence
  Oligonucleotide for detection of SNP TSC0038499
rctacacctaact

SEQ ID NO: 152379 - DNA, 13 bp, Artificial Sequence
  Oligonucleotide for detection of SNP TSC0038499
agttagatgtagy

SEQ ID NO: 152380 - DNA, 13 bp, Artificial Sequence
  Oligonucleotide for detection of SNP TSC0038499
rctacatctaact

SEQ ID NO: 152381 - DNA, 13 bp, Artificial Sequence
  Oligonucleotide for detection of SNP TSC0038500
tgtataattttta

SEQ ID NO: 152382 - DNA, 13 bp, Artificial Sequence
  Oligonucleotide for detection of SNP TSC0038500
taaaaattataca

SEQ ID NO: 152383 - DNA, 13 bp, Artificial Sequence
  Oligonucleotide for detection of SNP TSC0038500
tgtatagttttta

SEQ ID NO: 152384 - DNA, 13 bp, Artificial Sequence
  Oligonucleotide for detection of SNP TSC0038500
taaaaactataca

SEQ ID NO: 152385 - DNA, 13 bp, Artificial Sequence
  Oligonucleotide for detection of SNP TSC0038503
aataatgattttt

SEQ ID NO: 152386 - DNA, 13 bp, Artificial Sequence
  Oligonucleotide for detection of SNP TSC0038503
aaaaatcattatt

SEQ ID NO: 152387 - DNA, 13 bp, Artificial Sequence
  Oligonucleotide for detection of SNP TSC0038503
aataataattttt

SEQ ID NO: 152388 - DNA, 13 bp, Artificial Sequence
  Oligonucleotide for detection of SNP TSC0038503
aaaaattattatt

SEQ ID NO: 152389 - DNA, 13 bp, Artificial Sequence
  Oligonucleotide for detection of SNP TSC0038504
taaagtgtagtat

SEQ ID NO: 152390 - DNA, 13 bp, Artificial Sequence
  Oligonucleotide for detection of SNP TSC0038504
atactacacttta

SEQ ID NO: 152391 - DNA, 13 bp, Artificial Sequence
  Oligonucleotide for detection of SNP TSC0038504
taaagtatagtat

SEQ ID NO: 152392 - DNA, 13 bp, Artificial Sequence
  Oligonucleotide for detection of SNP TSC0038504
atactatacttta

SEQ ID NO: 152393 - DNA, 13 bp, Artificial Sequence
  Oligonucleotide for detection of SNP TSC0038505
gtttggatattgg

SEQ ID NO: 152394 - DNA, 13 bp, Artificial Sequence
  Oligonucleotide for detection of SNP TSC0038505
ccaatatccaaac

SEQ ID NO: 152395 - DNA, 13 bp, Artificial Sequence
  Oligonucleotide for detection of SNP TSC0038505
gtttgggtattgg

SEQ ID NO: 152396 - DNA, 13 bp, Artificial Sequence
  Oligonucleotide for detection of SNP TSC0038505
ccaatacccaaac

SEQ ID NO: 152397 - DNA, 13 bp, Artificial Sequence
  Oligonucleotide for detection of SNP TSC0038509
tataaggttataa

SEQ ID NO: 152398 - DNA, 13 bp, Artificial Sequence
  Oligonucleotide for detection of SNP TSC0038509
ttataaccttata

SEQ ID NO: 152399 - DNA, 13 bp, Artificial Sequence
  Oligonucleotide for detection of SNP TSC0038509
tataagattataa

SEQ ID NO: 152400 - DNA, 13 bp, Artificial Sequence
  Oligonucleotide for detection of SNP TSC0038509
ttataatcttata

SEQ ID NO: 152401 - DNA, 13 bp, Artificial Sequence
  Oligonucleotide for detection of SNP TSC0038510
ttataatttattt

SEQ ID NO: 152402 - DNA, 13 bp, Artificial Sequence
  Oligonucleotide for detection of SNP TSC0038510
aaataaattataa

SEQ ID NO: 152403 - DNA, 13 bp, Artificial Sequence
  Oligonucleotide for detection of SNP TSC0038511
tgggaagggaagt

SEQ ID NO: 152404 - DNA, 13 bp, Artificial Sequence
  Oligonucleotide for detection of SNP TSC0038511
acttcccttccca

SEQ ID NO: 152405 - DNA, 13 bp, Artificial Sequence
  Oligonucleotide for detection of SNP TSC0038511
tgggaatggaagt

SEQ ID NO: 152406 - DNA, 13 bp, Artificial Sequence
  Oligonucleotide for detection of SNP TSC0038511
acttccattccca

SEQ ID NO: 152407 - DNA, 13 bp, Artificial Sequence
  Oligonucleotide for detection of SNP TSC0038512
gagtaataaggga

SEQ ID NO: 152408 - DNA, 13 bp, Artificial Sequence
  Oligonucleotide for detection of SNP TSC0038512
tcccttattactc

SEQ ID NO: 152409 - DNA, 13 bp, Artificial Sequence
  Oligonucleotide for detection of SNP TSC0038512
gagtaaaaaggga

SEQ ID NO: 152410 - DNA, 13 bp, Artificial Sequence
  Oligonucleotide for detection of SNP TSC0038512
tccctttttactc

SEQ ID NO: 152411 - DNA, 13 bp, Artificial Sequence
  Oligonucleotide for detection of SNP TSC0038513
aatttatagaaaa

SEQ ID NO: 152412 - DNA, 13 bp, Artificial Sequence
  Oligonucleotide for detection of SNP TSC0038513
ttttctataaatt

SEQ ID NO: 152413 - DNA, 13 bp, Artificial Sequence
  Oligonucleotide for detection of SNP TSC0038513
aatttagagaaaa

SEQ ID NO: 152414 - DNA, 13 bp, Artificial Sequence
  Oligonucleotide for detection of SNP TSC0038513
ttttctctaaatt

SEQ ID NO: 152415 - DNA, 13 bp, Artificial Sequence
  Oligonucleotide for detection of SNP TSC0038519
ataatatgtgtaa

SEQ ID NO: 152416 - DNA, 13 bp, Artificial Sequence
  Oligonucleotide for detection of SNP TSC0038519
ttacacatattat

SEQ ID NO: 152417 - DNA, 13 bp, Artificial Sequence
  Oligonucleotide for detection of SNP TSC0038519
ataatacgtgtaa

SEQ ID NO: 152418 - DNA, 13 bp, Artificial Sequence
  Oligonucleotide for detection of SNP TSC0038519
ttacacgtattat

SEQ ID NO: 152419 - DNA, 13 bp, Artificial Sequence
  Oligonucleotide for detection of SNP TSC0038519
ttgtatgtattgt

SEQ ID NO: 152420 - DNA, 13 bp, Artificial Sequence
  Oligonucleotide for detection of SNP TSC0038519
acaatacatacaa

SEQ ID NO: 152421 - DNA, 13 bp, Artificial Sequence
  Oligonucleotide for detection of SNP TSC0038519
ttgtatatattgt

SEQ ID NO: 152422 - DNA, 13 bp, Artificial Sequence
  Oligonucleotide for detection of SNP TSC0038519
acaatatatacaa

SEQ ID NO: 152423 - DNA, 13 bp, Artificial Sequence
  Oligonucleotide for detection of SNP TSC0038519
ttgtacgtattgt

SEQ ID NO: 152424 - DNA, 13 bp, Artificial Sequence
  Oligonucleotide for detection of SNP TSC0038519
acaatacgtacaa

SEQ ID NO: 152425 - DNA, 13 bp, Artificial Sequence
  Oligonucleotide for detection of SNP TSC0038520
gtgtttgtataty

SEQ ID NO: 152426 - DNA, 13 bp, Artificial Sequence
  Oligonucleotide for detection of SNP TSC0038520
ratatacaaacac

SEQ ID NO: 152427 - DNA, 13 bp, Artificial Sequence
  Oligonucleotide for detection of SNP TSC0038520
gtgtttatataty

SEQ ID NO: 152428 - DNA, 13 bp, Artificial Sequence
  Oligonucleotide for detection of SNP TSC0038520
ratatataaacac

SEQ ID NO: 152429 - DNA, 13 bp, Artificial Sequence
  Oligonucleotide for detection of SNP TSC0038522
gatttaggagaay

SEQ ID NO: 152430 - DNA, 13 bp, Artificial Sequence
  Oligonucleotide for detection of SNP TSC0038522
rttctcctaaatc

SEQ ID NO: 152431 - DNA, 13 bp, Artificial Sequence
  Oligonucleotide for detection of SNP TSC0038522
gatttaagagaay

SEQ ID NO: 152432 - DNA, 13 bp, Artificial Sequence
  Oligonucleotide for detection of SNP TSC0038522
rttctcttaaatc

SEQ ID NO: 152433 - DNA, 13 bp, Artificial Sequence
  Oligonucleotide for detection of SNP TSC0038523
gttaatgagtgta

SEQ ID NO: 152434 - DNA, 13 bp, Artificial Sequence
  Oligonucleotide for detection of SNP TSC0038523
tacactcattaac

SEQ ID NO: 152435 - DNA, 13 bp, Artificial Sequence
  Oligonucleotide for detection of SNP TSC0038523
gttaataagtgta

SEQ ID NO: 152436 - DNA, 13 bp, Artificial Sequence
  Oligonucleotide for detection of SNP TSC0038523
tacacttattaac

SEQ ID NO: 152437 - DNA, 13 bp, Artificial Sequence
  Oligonucleotide for detection of SNP TSC0038524
tgagaagatagag

SEQ ID NO: 152438 - DNA, 13 bp, Artificial Sequence
  Oligonucleotide for detection of SNP TSC0038524
ctctatcttctca

SEQ ID NO: 152439 - DNA, 13 bp, Artificial Sequence
  Oligonucleotide for detection of SNP TSC0038524
tgagaatatagag

SEQ ID NO: 152440 - DNA, 13 bp, Artificial Sequence
  Oligonucleotide for detection of SNP TSC0038524
ctctatattctca

SEQ ID NO: 152441 - DNA, 13 bp, Artificial Sequence
  Oligonucleotide for detection of SNP TSC0038526
aggaagaagaaga

SEQ ID NO: 152442 - DNA, 13 bp, Artificial Sequence
  Oligonucleotide for detection of SNP TSC0038526
tcttcttcttcct

SEQ ID NO: 152443 - DNA, 13 bp, Artificial Sequence
  Oligonucleotide for detection of SNP TSC0038526
aggaagtagaaga

SEQ ID NO: 152444 - DNA, 13 bp, Artificial Sequence
  Oligonucleotide for detection of SNP TSC0038526
tcttctacttcct

SEQ ID NO: 152445 - DNA, 13 bp, Artificial Sequence
  Oligonucleotide for detection of SNP TSC0038528
aattatatattga

SEQ ID NO: 152446 - DNA, 13 bp, Artificial Sequence
  Oligonucleotide for detection of SNP TSC0038528
tcaatatataatt

SEQ ID NO: 152447 - DNA, 13 bp, Artificial Sequence
  Oligonucleotide for detection of SNP TSC0038528
aattatgtattga

SEQ ID NO: 152448 - DNA, 13 bp, Artificial Sequence
  Oligonucleotide for detection of SNP TSC0038528
tcaatacataatt

SEQ ID NO: 152449 - DNA, 13 bp, Artificial Sequence
  Oligonucleotide for detection of SNP TSC0038529
atttttgatgaaa

SEQ ID NO: 152450 - DNA, 13 bp, Artificial Sequence
  Oligonucleotide for detection of SNP TSC0038529
tttcatcaaaaat

SEQ ID NO: 152451 - DNA, 13 bp, Artificial Sequence
  Oligonucleotide for detection of SNP TSC0038529
atttttaatgaaa

SEQ ID NO: 152452 - DNA, 13 bp, Artificial Sequence
  Oligonucleotide for detection of SNP TSC0038529
tttcattaaaaat

SEQ ID NO: 152453 - DNA, 13 bp, Artificial Sequence
  Oligonucleotide for detection of SNP TSC0038533
ttattatggtgta

SEQ ID NO: 152454 - DNA, 13 bp, Artificial Sequence
  Oligonucleotide for detection of SNP TSC0038533
tacaccataataa

SEQ ID NO: 152455 - DNA, 13 bp, Artificial Sequence
  Oligonucleotide for detection of SNP TSC0038533
ttattacggtgta

SEQ ID NO: 152456 - DNA, 13 bp, Artificial Sequence
  Oligonucleotide for detection of SNP TSC0038533
tacaccgtaataa

SEQ ID NO: 152457 - DNA, 13 bp, Artificial Sequence
  Oligonucleotide for detection of SNP TSC0038533
tgtattgtaataa

SEQ ID NO: 152458 - DNA, 13 bp, Artificial Sequence
  Oligonucleotide for detection of SNP TSC0038533
ttattacaataca

SEQ ID NO: 152459 - DNA, 13 bp, Artificial Sequence
  Oligonucleotide for detection of SNP TSC0038533
tgtattataataa

SEQ ID NO: 152460 - DNA, 13 bp, Artificial Sequence
  Oligonucleotide for detection of SNP TSC0038533
ttattataataca

SEQ ID NO: 152461 - DNA, 13 bp, Artificial Sequence
  Oligonucleotide for detection of SNP TSC0038533
tgtatcgtaataa

SEQ ID NO: 152462 - DNA, 13 bp, Artificial Sequence
  Oligonucleotide for detection of SNP TSC0038533
ttattacgataca

SEQ ID NO: 152463 - DNA, 13 bp, Artificial Sequence
  Oligonucleotide for detection of SNP TSC0038536
taagggtgaatgg

SEQ ID NO: 152464 - DNA, 13 bp, Artificial Sequence
  Oligonucleotide for detection of SNP TSC0038536
ccattcaccctta

SEQ ID NO: 152465 - DNA, 13 bp, Artificial Sequence
  Oligonucleotide for detection of SNP TSC0038536
taagggcgaatgg

SEQ ID NO: 152466 - DNA, 13 bp, Artificial Sequence
  Oligonucleotide for detection of SNP TSC0038536
ccattcgccctta

SEQ ID NO: 152467 - DNA, 13 bp, Artificial Sequence
  Oligonucleotide for detection of SNP TSC0038538
gtgttttagttty

SEQ ID NO: 152468 - DNA, 13 bp, Artificial Sequence
  Oligonucleotide for detection of SNP TSC0038538
raaactaaaacac

SEQ ID NO: 152469 - DNA, 13 bp, Artificial Sequence
  Oligonucleotide for detection of SNP TSC0038538
gtgtttgagttty

SEQ ID NO: 152470 - DNA, 13 bp, Artificial Sequence
  Oligonucleotide for detection of SNP TSC0038538
raaactcaaacac

SEQ ID NO: 152471 - DNA, 13 bp, Artificial Sequence
  Oligonucleotide for detection of SNP TSC0038538
gaggttgaagtay

SEQ ID NO: 152472 - DNA, 13 bp, Artificial Sequence
  Oligonucleotide for detection of SNP TSC0038538
rtacttcaacctc

SEQ ID NO: 152473 - DNA, 13 bp, Artificial Sequence
  Oligonucleotide for detection of SNP TSC0038538
gaggtttaagtay

SEQ ID NO: 152474 - DNA, 13 bp, Artificial Sequence
  Oligonucleotide for detection of SNP TSC0038538
rtacttaaacctc

SEQ ID NO: 152475 - DNA, 13 bp, Artificial Sequence
  Oligonucleotide for detection of SNP TSC0038539
aaaggatatatag

SEQ ID NO: 152476 - DNA, 13 bp, Artificial Sequence
  Oligonucleotide for detection of SNP TSC0038539
ctatatatccttt

SEQ ID NO: 152477 - DNA, 13 bp, Artificial Sequence
  Oligonucleotide for detection of SNP TSC0038539
aaaggaaatatag

SEQ ID NO: 152478 - DNA, 13 bp, Artificial Sequence
  Oligonucleotide for detection of SNP TSC0038539
ctatatttccttt

SEQ ID NO: 152479 - DNA, 13 bp, Artificial Sequence
  Oligonucleotide for detection of SNP TSC0038540
ttttttagtgtta

SEQ ID NO: 152480 - DNA, 13 bp, Artificial Sequence
  Oligonucleotide for detection of SNP TSC0038540
taacactaaaaaa

SEQ ID NO: 152481 - DNA, 13 bp, Artificial Sequence
  Oligonucleotide for detection of SNP TSC0038540
tgatattgaaaaa

SEQ ID NO: 152482 - DNA, 13 bp, Artificial Sequence
  Oligonucleotide for detection of SNP TSC0038540
tttttcaatatca

SEQ ID NO: 152483 - DNA, 13 bp, Artificial Sequence
  Oligonucleotide for detection of SNP TSC0038540
tgatatagaaaaa

SEQ ID NO: 152484 - DNA, 13 bp, Artificial Sequence
  Oligonucleotide for detection of SNP TSC0038540
tttttctatatca

SEQ ID NO: 152485 - DNA, 13 bp, Artificial Sequence
  Oligonucleotide for detection of SNP TSC0038544
tatgttattattg

SEQ ID NO: 152486 - DNA, 13 bp, Artificial Sequence
  Oligonucleotide for detection of SNP TSC0038544
caataataacata

SEQ ID NO: 152487 - DNA, 13 bp, Artificial Sequence
  Oligonucleotide for detection of SNP TSC0038544
tatgttgttattg

SEQ ID NO: 152488 - DNA, 13 bp, Artificial Sequence
  Oligonucleotide for detection of SNP TSC0038544
caataacaacata

SEQ ID NO: 152489 - DNA, 13 bp, Artificial Sequence
  Oligonucleotide for detection of SNP TSC0038547
gtgatttttttat

SEQ ID NO: 152490 - DNA, 13 bp, Artificial Sequence
  Oligonucleotide for detection of SNP TSC0038547
ataaaaaaatcac

SEQ ID NO: 152491 - DNA, 13 bp, Artificial Sequence
  Oligonucleotide for detection of SNP TSC0038547
gtgattgttttat

SEQ ID NO: 152492 - DNA, 13 bp, Artificial Sequence
  Oligonucleotide for detection of SNP TSC0038547
ataaaacaatcac

SEQ ID NO: 152493 - DNA, 13 bp, Artificial Sequence
  Oligonucleotide for detection of SNP TSC0038547
atggaggagttay

SEQ ID NO: 152494 - DNA, 13 bp, Artificial Sequence
  Oligonucleotide for detection of SNP TSC0038547
rtaactcctccat

SEQ ID NO: 152495 - DNA, 13 bp, Artificial Sequence
  Oligonucleotide for detection of SNP TSC0038547
atggagtagttay

SEQ ID NO: 152496 - DNA, 13 bp, Artificial Sequence
  Oligonucleotide for detection of SNP TSC0038547
rtaactactccat

SEQ ID NO: 152497 - DNA, 13 bp, Artificial Sequence
  Oligonucleotide for detection of SNP TSC0038548
gtgattgtaagaa

SEQ ID NO: 152498 - DNA, 13 bp, Artificial Sequence
  Oligonucleotide for detection of SNP TSC0038548
ttcttacaatcac

SEQ ID NO: 152499 - DNA, 13 bp, Artificial Sequence
  Oligonucleotide for detection of SNP TSC0038548
gtgattataagaa

SEQ ID NO: 152500 - DNA, 13 bp, Artificial Sequence
  Oligonucleotide for detection of SNP TSC0038548
ttcttataatcac

SEQ ID NO: 152501 - DNA, 13 bp, Artificial Sequence
  Oligonucleotide for detection of SNP TSC0038549
gttaaaaaggagg

SEQ ID NO: 152502 - DNA, 13 bp, Artificial Sequence
  Oligonucleotide for detection of SNP TSC0038549
cctcctttttaac

SEQ ID NO: 152503 - DNA, 13 bp, Artificial Sequence
  Oligonucleotide for detection of SNP TSC0038549
gttaaataggagg

SEQ ID NO: 152504 - DNA, 13 bp, Artificial Sequence
  Oligonucleotide for detection of SNP TSC0038549
cctcctatttaac

SEQ ID NO: 152505 - DNA, 13 bp, Artificial Sequence
  Oligonucleotide for detection of SNP TSC0038549
ttttttttttggy

SEQ ID NO: 152506 - DNA, 13 bp, Artificial Sequence
  Oligonucleotide for detection of SNP TSC0038549
rccaaaaaaaaaa

SEQ ID NO: 152507 - DNA, 13 bp, Artificial Sequence
  Oligonucleotide for detection of SNP TSC0038550
ggttatagtggty

SEQ ID NO: 152508 - DNA, 13 bp, Artificial Sequence
  Oligonucleotide for detection of SNP TSC0038550
raccactataacc

SEQ ID NO: 152509 - DNA, 13 bp, Artificial Sequence
  Oligonucleotide for detection of SNP TSC0038550
ggttattgtggty

SEQ ID NO: 152510 - DNA, 13 bp, Artificial Sequence
  Oligonucleotide for detection of SNP TSC0038550
raccacaataacc

SEQ ID NO: 152511 - DNA, 13 bp, Artificial Sequence
  Oligonucleotide for detection of SNP TSC0038550
ggttatcgtggty

SEQ ID NO: 152512 - DNA, 13 bp, Artificial Sequence
  Oligonucleotide for detection of SNP TSC0038550
raccacgataacc

SEQ ID NO: 152513 - DNA, 13 bp, Artificial Sequence
  Oligonucleotide for detection of SNP TSC0038550
ggttatggtggty

SEQ ID NO: 152514 - DNA, 13 bp, Artificial Sequence
  Oligonucleotide for detection of SNP TSC0038550
raccaccataacc

SEQ ID NO: 152515 - DNA, 13 bp, Artificial Sequence
  Oligonucleotide for detection of SNP TSC0038550
ggttacggtggty

SEQ ID NO: 152516 - DNA, 13 bp, Artificial Sequence
  Oligonucleotide for detection of SNP TSC0038550
raccaccgtaacc

SEQ ID NO: 152517 - DNA, 13 bp, Artificial Sequence
  Oligonucleotide for detection of SNP TSC0038551
atggagtttgtta

SEQ ID NO: 152518 - DNA, 13 bp, Artificial Sequence
  Oligonucleotide for detection of SNP TSC0038551
taacaaactccat

SEQ ID NO: 152519 - DNA, 13 bp, Artificial Sequence
  Oligonucleotide for detection of SNP TSC0038551
atggaggttgtta

SEQ ID NO: 152520 - DNA, 13 bp, Artificial Sequence
  Oligonucleotide for detection of SNP TSC0038551
taacaacctccat

SEQ ID NO: 152521 - DNA, 13 bp, Artificial Sequence
  Oligonucleotide for detection of SNP TSC0038551
acggagtttgtta

SEQ ID NO: 152522 - DNA, 13 bp, Artificial Sequence
  Oligonucleotide for detection of SNP TSC0038551
taacaaactccgt

SEQ ID NO: 152523 - DNA, 13 bp, Artificial Sequence
  Oligonucleotide for detection of SNP TSC0038551
acggaggttgtta

SEQ ID NO: 152524 - DNA, 13 bp, Artificial Sequence
  Oligonucleotide for detection of SNP TSC0038551
taacaacctccgt

SEQ ID NO: 152525 - DNA, 13 bp, Artificial Sequence
  Oligonucleotide for detection of SNP TSC0038551
taataagttttgt

SEQ ID NO: 152526 - DNA, 13 bp, Artificial Sequence
  Oligonucleotide for detection of SNP TSC0038551
acaaaacttatta

SEQ ID NO: 152527 - DNA, 13 bp, Artificial Sequence
  Oligonucleotide for detection of SNP TSC0038551
taataatttttgt

SEQ ID NO: 152528 - DNA, 13 bp, Artificial Sequence
  Oligonucleotide for detection of SNP TSC0038551
acaaaaattatta

SEQ ID NO: 152529 - DNA, 13 bp, Artificial Sequence
  Oligonucleotide for detection of SNP TSC0038551
taataagtttcgt

SEQ ID NO: 152530 - DNA, 13 bp, Artificial Sequence
  Oligonucleotide for detection of SNP TSC0038551
acgaaacttatta

SEQ ID NO: 152531 - DNA, 13 bp, Artificial Sequence
  Oligonucleotide for detection of SNP TSC0038551
taataattttcgt

SEQ ID NO: 152532 - DNA, 13 bp, Artificial Sequence
  Oligonucleotide for detection of SNP TSC0038551
acgaaaattatta

SEQ ID NO: 152533 - DNA, 13 bp, Artificial Sequence
  Oligonucleotide for detection of SNP TSC0038552
ttaggagaaaaaa

SEQ ID NO: 152534 - DNA, 13 bp, Artificial Sequence
  Oligonucleotide for detection of SNP TSC0038552
ttttttctcctaa

SEQ ID NO: 152535 - DNA, 13 bp, Artificial Sequence
  Oligonucleotide for detection of SNP TSC0038552
ttaggaaaaaaaa

SEQ ID NO: 152536 - DNA, 13 bp, Artificial Sequence
  Oligonucleotide for detection of SNP TSC0038552
ttttttttcctaa

SEQ ID NO: 152537 - DNA, 13 bp, Artificial Sequence
  Oligonucleotide for detection of SNP TSC0038553
gtattaaaatttt

SEQ ID NO: 152538 - DNA, 13 bp, Artificial Sequence
  Oligonucleotide for detection of SNP TSC0038553
aaaattttaatac

SEQ ID NO: 152539 - DNA, 13 bp, Artificial Sequence
  Oligonucleotide for detection of SNP TSC0038553
gtattagaatttt

SEQ ID NO: 152540 - DNA, 13 bp, Artificial Sequence
  Oligonucleotide for detection of SNP TSC0038553
aaaattctaatac

SEQ ID NO: 152541 - DNA, 13 bp, Artificial Sequence
  Oligonucleotide for detection of SNP TSC0038554
gtatttatgggtt

SEQ ID NO: 152542 - DNA, 13 bp, Artificial Sequence
  Oligonucleotide for detection of SNP TSC0038554
aacccataaatac

SEQ ID NO: 152543 - DNA, 13 bp, Artificial Sequence
  Oligonucleotide for detection of SNP TSC0038554
gtatttttgggtt

SEQ ID NO: 152544 - DNA, 13 bp, Artificial Sequence
  Oligonucleotide for detection of SNP TSC0038554
aacccaaaaatac

SEQ ID NO: 152545 - DNA, 13 bp, Artificial Sequence
  Oligonucleotide for detection of SNP TSC0038554
agtttataaatay

SEQ ID NO: 152546 - DNA, 13 bp, Artificial Sequence
  Oligonucleotide for detection of SNP TSC0038554
rtatttataaact

SEQ ID NO: 152547 - DNA, 13 bp, Artificial Sequence
  Oligonucleotide for detection of SNP TSC0038554
agtttaaaaatay

SEQ ID NO: 152548 - DNA, 13 bp, Artificial Sequence
  Oligonucleotide for detection of SNP TSC0038554
rtatttttaaact

SEQ ID NO: 152549 - DNA, 13 bp, Artificial Sequence
  Oligonucleotide for detection of SNP TSC0038555
ttgaaggggagtt

SEQ ID NO: 152550 - DNA, 13 bp, Artificial Sequence
  Oligonucleotide for detection of SNP TSC0038555
aactccccttcaa

SEQ ID NO: 152551 - DNA, 13 bp, Artificial Sequence
  Oligonucleotide for detection of SNP TSC0038555
ttgaagaggagtt

SEQ ID NO: 152552 - DNA, 13 bp, Artificial Sequence
  Oligonucleotide for detection of SNP TSC0038555
aactcctcttcaa

SEQ ID NO: 152553 - DNA, 13 bp, Artificial Sequence
  Oligonucleotide for detection of SNP TSC0038556
attattttaaaag

SEQ ID NO: 152554 - DNA, 13 bp, Artificial Sequence
  Oligonucleotide for detection of SNP TSC0038556
cttttaaaataat

SEQ ID NO: 152555 - DNA, 13 bp, Artificial Sequence
  Oligonucleotide for detection of SNP TSC0038556
attattgtaaaag

SEQ ID NO: 152556 - DNA, 13 bp, Artificial Sequence
  Oligonucleotide for detection of SNP TSC0038556
cttttacaataat

SEQ ID NO: 152557 - DNA, 13 bp, Artificial Sequence
  Oligonucleotide for detection of SNP TSC0038556
attatcgtaaaag

SEQ ID NO: 152558 - DNA, 13 bp, Artificial Sequence
  Oligonucleotide for detection of SNP TSC0038556
cttttacgataat

SEQ ID NO: 152559 - DNA, 13 bp, Artificial Sequence
  Oligonucleotide for detection of SNP TSC0038556
tttttggggtagt

SEQ ID NO: 152560 - DNA, 13 bp, Artificial Sequence
  Oligonucleotide for detection of SNP TSC0038556
actaccccaaaaa

SEQ ID NO: 152561 - DNA, 13 bp, Artificial Sequence
  Oligonucleotide for detection of SNP TSC0038556
tttttgtggtagt

SEQ ID NO: 152562 - DNA, 13 bp, Artificial Sequence
  Oligonucleotide for detection of SNP TSC0038556
actaccacaaaaa

SEQ ID NO: 152563 - DNA, 13 bp, Artificial Sequence
  Oligonucleotide for detection of SNP TSC0038556
tttttgcggtagt

SEQ ID NO: 152564 - DNA, 13 bp, Artificial Sequence
  Oligonucleotide for detection of SNP TSC0038556
actaccgcaaaaa

SEQ ID NO: 152565 - DNA, 13 bp, Artificial Sequence
  Oligonucleotide for detection of SNP TSC0038557
atttataataaaa

SEQ ID NO: 152566 - DNA, 13 bp, Artificial Sequence
  Oligonucleotide for detection of SNP TSC0038557
ttttattataaat

SEQ ID NO: 152567 - DNA, 13 bp, Artificial Sequence
  Oligonucleotide for detection of SNP TSC0038557
atttatgataaaa

SEQ ID NO: 152568 - DNA, 13 bp, Artificial Sequence
  Oligonucleotide for detection of SNP TSC0038557
ttttatcataaat

SEQ ID NO: 152569 - DNA, 13 bp, Artificial Sequence
  Oligonucleotide for detection of SNP TSC0038559
taagtatttaata

SEQ ID NO: 152570 - DNA, 13 bp, Artificial Sequence
  Oligonucleotide for detection of SNP TSC0038559
tattaaatactta

SEQ ID NO: 152571 - DNA, 13 bp, Artificial Sequence
  Oligonucleotide for detection of SNP TSC0038559
taagtaattaata

SEQ ID NO: 152572 - DNA, 13 bp, Artificial Sequence
  Oligonucleotide for detection of SNP TSC0038559
tattaattactta

SEQ ID NO: 152573 - DNA, 13 bp, Artificial Sequence
  Oligonucleotide for detection of SNP TSC0038560
tttttagtatgay

SEQ ID NO: 152574 - DNA, 13 bp, Artificial Sequence
  Oligonucleotide for detection of SNP TSC0038560
rtcatactaaaaa

SEQ ID NO: 152575 - DNA, 13 bp, Artificial Sequence
  Oligonucleotide for detection of SNP TSC0038560
tttttaatatgay

SEQ ID NO: 152576 - DNA, 13 bp, Artificial Sequence
  Oligonucleotide for detection of SNP TSC0038560
rtcatattaaaaa

SEQ ID NO: 152577 - DNA, 13 bp, Artificial Sequence
  Oligonucleotide for detection of SNP TSC0038561
tttttaagaattg

SEQ ID NO: 152578 - DNA, 13 bp, Artificial Sequence
  Oligonucleotide for detection of SNP TSC0038561
caattcttaaaaa

SEQ ID NO: 152579 - DNA, 13 bp, Artificial Sequence
  Oligonucleotide for detection of SNP TSC0038561
tttttaggaattg

SEQ ID NO: 152580 - DNA, 13 bp, Artificial Sequence
  Oligonucleotide for detection of SNP TSC0038561
caattcctaaaaa

SEQ ID NO: 152581 - DNA, 13 bp, Artificial Sequence
  Oligonucleotide for detection of SNP TSC0038566
ggtaattagtgty

SEQ ID NO: 152582 - DNA, 13 bp, Artificial Sequence
  Oligonucleotide for detection of SNP TSC0038566
racactaattacc

SEQ ID NO: 152583 - DNA, 13 bp, Artificial Sequence
  Oligonucleotide for detection of SNP TSC0038566
ggtaatgagtgty

SEQ ID NO: 152584 - DNA, 13 bp, Artificial Sequence
  Oligonucleotide for detection of SNP TSC0038566
racactcattacc

SEQ ID NO: 152585 - DNA, 13 bp, Artificial Sequence
  Oligonucleotide for detection of SNP TSC0038566
ggtaacgagtgty

SEQ ID NO: 152586 - DNA, 13 bp, Artificial Sequence
  Oligonucleotide for detection of SNP TSC0038566
racactcgttacc

SEQ ID NO: 152587 - DNA, 13 bp, Artificial Sequence
  Oligonucleotide for detection of SNP TSC0038566
gatattggttgty

SEQ ID NO: 152588 - DNA, 13 bp, Artificial Sequence
  Oligonucleotide for detection of SNP TSC0038566
racaaccaatatc

SEQ ID NO: 152589 - DNA, 13 bp, Artificial Sequence
  Oligonucleotide for detection of SNP TSC0038566
gatatttgttgty

SEQ ID NO: 152590 - DNA, 13 bp, Artificial Sequence
  Oligonucleotide for detection of SNP TSC0038566
racaacaaatatc

SEQ ID NO: 152591 - DNA, 13 bp, Artificial Sequence
  Oligonucleotide for detection of SNP TSC0038566
gatattcgttgty

SEQ ID NO: 152592 - DNA, 13 bp, Artificial Sequence
  Oligonucleotide for detection of SNP TSC0038566
racaacgaatatc

SEQ ID NO: 152593 - DNA, 13 bp, Artificial Sequence
  Oligonucleotide for detection of SNP TSC0038567
tttatgggagaag

SEQ ID NO: 152594 - DNA, 13 bp, Artificial Sequence
  Oligonucleotide for detection of SNP TSC0038567
cttctcccataaa

SEQ ID NO: 152595 - DNA, 13 bp, Artificial Sequence
  Oligonucleotide for detection of SNP TSC0038567
tttatgtgagaag

SEQ ID NO: 152596 - DNA, 13 bp, Artificial Sequence
  Oligonucleotide for detection of SNP TSC0038567
cttctcacataaa

SEQ ID NO: 152597 - DNA, 13 bp, Artificial Sequence
  Oligonucleotide for detection of SNP TSC0038568
tgtttagtataat

SEQ ID NO: 152598 - DNA, 13 bp, Artificial Sequence
  Oligonucleotide for detection of SNP TSC0038568
attatactaaaca

SEQ ID NO: 152599 - DNA, 13 bp, Artificial Sequence
  Oligonucleotide for detection of SNP TSC0038568
tgtttaatataat

SEQ ID NO: 152600 - DNA, 13 bp, Artificial Sequence
  Oligonucleotide for detection of SNP TSC0038568
attatattaaaca

SEQ ID NO: 152601 - DNA, 13 bp, Artificial Sequence
  Oligonucleotide for detection of SNP TSC0038572
tgtagagatgatg

SEQ ID NO: 152602 - DNA, 13 bp, Artificial Sequence
  Oligonucleotide for detection of SNP TSC0038572
catcatctctaca

SEQ ID NO: 152603 - DNA, 13 bp, Artificial Sequence
  Oligonucleotide for detection of SNP TSC0038572
tgtagaaatgatg

SEQ ID NO: 152604 - DNA, 13 bp, Artificial Sequence
  Oligonucleotide for detection of SNP TSC0038572
catcatttctaca

SEQ ID NO: 152605 - DNA, 13 bp, Artificial Sequence
  Oligonucleotide for detection of SNP TSC0038573
tgttgaagtagta

SEQ ID NO: 152606 - DNA, 13 bp, Artificial Sequence
  Oligonucleotide for detection of SNP TSC0038573
tactacttcaaca

SEQ ID NO: 152607 - DNA, 13 bp, Artificial Sequence
  Oligonucleotide for detection of SNP TSC0038573
tgttgaggtagta

SEQ ID NO: 152608 - DNA, 13 bp, Artificial Sequence
  Oligonucleotide for detection of SNP TSC0038573
tactacctcaaca

SEQ ID NO: 152609 - DNA, 13 bp, Artificial Sequence
  Oligonucleotide for detection of SNP TSC0038574
gtaatatgttata

SEQ ID NO: 152610 - DNA, 13 bp, Artificial Sequence
  Oligonucleotide for detection of SNP TSC0038574
tataacatattac

SEQ ID NO: 152611 - DNA, 13 bp, Artificial Sequence
  Oligonucleotide for detection of SNP TSC0038574
gtaatacgttata

SEQ ID NO: 152612 - DNA, 13 bp, Artificial Sequence
  Oligonucleotide for detection of SNP TSC0038574
tataacgtattac

SEQ ID NO: 152613 - DNA, 13 bp, Artificial Sequence
  Oligonucleotide for detection of SNP TSC0038574
tgtgatgtattay

SEQ ID NO: 152614 - DNA, 13 bp, Artificial Sequence
  Oligonucleotide for detection of SNP TSC0038574
rtaatacatcaca

SEQ ID NO: 152615 - DNA, 13 bp, Artificial Sequence
  Oligonucleotide for detection of SNP TSC0038574
tgtgatatattay

SEQ ID NO: 152616 - DNA, 13 bp, Artificial Sequence
  Oligonucleotide for detection of SNP TSC0038574
rtaatatatcaca

SEQ ID NO: 152617 - DNA, 13 bp, Artificial Sequence
  Oligonucleotide for detection of SNP TSC0038574
tgtgacgtattay

SEQ ID NO: 152618 - DNA, 13 bp, Artificial Sequence
  Oligonucleotide for detection of SNP TSC0038574
rtaatacgtcaca

SEQ ID NO: 152619 - DNA, 13 bp, Artificial Sequence
  Oligonucleotide for detection of SNP TSC0038577
tggttttaaattt

SEQ ID NO: 152620 - DNA, 13 bp, Artificial Sequence
  Oligonucleotide for detection of SNP TSC0038577
aaatttaaaacca

SEQ ID NO: 152621 - DNA, 13 bp, Artificial Sequence
  Oligonucleotide for detection of SNP TSC0038577
tggtttgaaattt

SEQ ID NO: 152622 - DNA, 13 bp, Artificial Sequence
  Oligonucleotide for detection of SNP TSC0038577
aaatttcaaacca

SEQ ID NO: 152623 - DNA, 13 bp, Artificial Sequence
  Oligonucleotide for detection of SNP TSC0038577
tggttcgaaattt

SEQ ID NO: 152624 - DNA, 13 bp, Artificial Sequence
  Oligonucleotide for detection of SNP TSC0038577
aaatttcgaacca

SEQ ID NO: 152625 - DNA, 13 bp, Artificial Sequence
  Oligonucleotide for detection of SNP TSC0038577
agatttggggtta

SEQ ID NO: 152626 - DNA, 13 bp, Artificial Sequence
  Oligonucleotide for detection of SNP TSC0038577
taaccccaaatct

SEQ ID NO: 152627 - DNA, 13 bp, Artificial Sequence
  Oligonucleotide for detection of SNP TSC0038577
agattttgggtta

SEQ ID NO: 152628 - DNA, 13 bp, Artificial Sequence
  Oligonucleotide for detection of SNP TSC0038577
taacccaaaatct

SEQ ID NO: 152629 - DNA, 13 bp, Artificial Sequence
  Oligonucleotide for detection of SNP TSC0038577
agatttcgggtta

SEQ ID NO: 152630 - DNA, 13 bp, Artificial Sequence
  Oligonucleotide for detection of SNP TSC0038577
taacccgaaatct

SEQ ID NO: 152631 - DNA, 13 bp, Artificial Sequence
  Oligonucleotide for detection of SNP TSC0038581
aaattttggttga

SEQ ID NO: 152632 - DNA, 13 bp, Artificial Sequence
  Oligonucleotide for detection of SNP TSC0038581
tcaaccaaaattt

SEQ ID NO: 152633 - DNA, 13 bp, Artificial Sequence
  Oligonucleotide for detection of SNP TSC0038581
ttaatttagattt

SEQ ID NO: 152634 - DNA, 13 bp, Artificial Sequence
  Oligonucleotide for detection of SNP TSC0038581
aaatctaaattaa

SEQ ID NO: 152635 - DNA, 13 bp, Artificial Sequence
  Oligonucleotide for detection of SNP TSC0038582
tttgtgattgagt

SEQ ID NO: 152636 - DNA, 13 bp, Artificial Sequence
  Oligonucleotide for detection of SNP TSC0038582
actcaatcacaaa

SEQ ID NO: 152637 - DNA, 13 bp, Artificial Sequence
  Oligonucleotide for detection of SNP TSC0038582
tttgtgtttgagt

SEQ ID NO: 152638 - DNA, 13 bp, Artificial Sequence
  Oligonucleotide for detection of SNP TSC0038582
actcaaacacaaa

SEQ ID NO: 152639 - DNA, 13 bp, Artificial Sequence
  Oligonucleotide for detection of SNP TSC0038582
atttagttataag

SEQ ID NO: 152640 - DNA, 13 bp, Artificial Sequence
  Oligonucleotide for detection of SNP TSC0038582
cttataactaaat

SEQ ID NO: 152641 - DNA, 13 bp, Artificial Sequence
  Oligonucleotide for detection of SNP TSC0038582
atttaggtataag

SEQ ID NO: 152642 - DNA, 13 bp, Artificial Sequence
  Oligonucleotide for detection of SNP TSC0038582
cttatacctaaat

SEQ ID NO: 152643 - DNA, 13 bp, Artificial Sequence
  Oligonucleotide for detection of SNP TSC0038583
tatattataaata

SEQ ID NO: 152644 - DNA, 13 bp, Artificial Sequence
  Oligonucleotide for detection of SNP TSC0038583
tatttataatata

SEQ ID NO: 152645 - DNA, 13 bp, Artificial Sequence
  Oligonucleotide for detection of SNP TSC0038583
tatattgtaaata

SEQ ID NO: 152646 - DNA, 13 bp, Artificial Sequence
  Oligonucleotide for detection of SNP TSC0038583
tatttacaatata

SEQ ID NO: 152647 - DNA, 13 bp, Artificial Sequence
  Oligonucleotide for detection of SNP TSC0038584
tagggtattagty

SEQ ID NO: 152648 - DNA, 13 bp, Artificial Sequence
  Oligonucleotide for detection of SNP TSC0038584
ractaatacccta

SEQ ID NO: 152649 - DNA, 13 bp, Artificial Sequence
  Oligonucleotide for detection of SNP TSC0038584
tagggtgttagty

SEQ ID NO: 152650 - DNA, 13 bp, Artificial Sequence
  Oligonucleotide for detection of SNP TSC0038584
ractaacacccta

SEQ ID NO: 152651 - DNA, 13 bp, Artificial Sequence
  Oligonucleotide for detection of SNP TSC0038585
ggaattggagggt

SEQ ID NO: 152652 - DNA, 13 bp, Artificial Sequence
  Oligonucleotide for detection of SNP TSC0038585
accctccaattcc

SEQ ID NO: 152653 - DNA, 13 bp, Artificial Sequence
  Oligonucleotide for detection of SNP TSC0038585
ggaatttgagggt

SEQ ID NO: 152654 - DNA, 13 bp, Artificial Sequence
  Oligonucleotide for detection of SNP TSC0038585
accctcaaattcc

SEQ ID NO: 152655 - DNA, 13 bp, Artificial Sequence
  Oligonucleotide for detection of SNP TSC0038585
attttttaattty

SEQ ID NO: 152656 - DNA, 13 bp, Artificial Sequence
  Oligonucleotide for detection of SNP TSC0038585
raaattaaaaaat

SEQ ID NO: 152657 - DNA, 13 bp, Artificial Sequence
  Oligonucleotide for detection of SNP TSC0038585
atttttaaattty

SEQ ID NO: 152658 - DNA, 13 bp, Artificial Sequence
  Oligonucleotide for detection of SNP TSC0038585
raaatttaaaaat

SEQ ID NO: 152659 - DNA, 13 bp, Artificial Sequence
  Oligonucleotide for detection of SNP TSC0038589
ttatttggagatt

SEQ ID NO: 152660 - DNA, 13 bp, Artificial Sequence
  Oligonucleotide for detection of SNP TSC0038589
aatctccaaataa

SEQ ID NO: 152661 - DNA, 13 bp, Artificial Sequence
  Oligonucleotide for detection of SNP TSC0038589
ttatttagagatt

SEQ ID NO: 152662 - DNA, 13 bp, Artificial Sequence
  Oligonucleotide for detection of SNP TSC0038589
aatctctaaataa

SEQ ID NO: 152663 - DNA, 13 bp, Artificial Sequence
  Oligonucleotide for detection of SNP TSC0038590
gatgaaagatttg

SEQ ID NO: 152664 - DNA, 13 bp, Artificial Sequence
  Oligonucleotide for detection of SNP TSC0038590
caaatctttcatc

SEQ ID NO: 152665 - DNA, 13 bp, Artificial Sequence
  Oligonucleotide for detection of SNP TSC0038590
gatgaatgatttg

SEQ ID NO: 152666 - DNA, 13 bp, Artificial Sequence
  Oligonucleotide for detection of SNP TSC0038590
caaatcattcatc

SEQ ID NO: 152667 - DNA, 13 bp, Artificial Sequence
  Oligonucleotide for detection of SNP TSC0038590
gacgaaagatttg

SEQ ID NO: 152668 - DNA, 13 bp, Artificial Sequence
  Oligonucleotide for detection of SNP TSC0038590
caaatctttcgtc

SEQ ID NO: 152669 - DNA, 13 bp, Artificial Sequence
  Oligonucleotide for detection of SNP TSC0038590
gacgaatgatttg

SEQ ID NO: 152670 - DNA, 13 bp, Artificial Sequence
  Oligonucleotide for detection of SNP TSC0038590
caaatcattcgtc

SEQ ID NO: 152671 - DNA, 13 bp, Artificial Sequence
  Oligonucleotide for detection of SNP TSC0038590
gatgaacgatttg

SEQ ID NO: 152672 - DNA, 13 bp, Artificial Sequence
  Oligonucleotide for detection of SNP TSC0038590
caaatcgttcatc

SEQ ID NO: 152673 - DNA, 13 bp, Artificial Sequence
  Oligonucleotide for detection of SNP TSC0038590
gacgaacgatttg

SEQ ID NO: 152674 - DNA, 13 bp, Artificial Sequence
  Oligonucleotide for detection of SNP TSC0038590
caaatcgttcgtc

SEQ ID NO: 152675 - DNA, 13 bp, Artificial Sequence
  Oligonucleotide for detection of SNP TSC0038590
taaattttttgty

SEQ ID NO: 152676 - DNA, 13 bp, Artificial Sequence
  Oligonucleotide for detection of SNP TSC0038590
racaaaaaattta

SEQ ID NO: 152677 - DNA, 13 bp, Artificial Sequence
  Oligonucleotide for detection of SNP TSC0038590
taaattgtttgty

SEQ ID NO: 152678 - DNA, 13 bp, Artificial Sequence
  Oligonucleotide for detection of SNP TSC0038590
racaaacaattta

SEQ ID NO: 152679 - DNA, 13 bp, Artificial Sequence
  Oligonucleotide for detection of SNP TSC0038590
taaatttttcgty

SEQ ID NO: 152680 - DNA, 13 bp, Artificial Sequence
  Oligonucleotide for detection of SNP TSC0038590
racgaaaaattta

SEQ ID NO: 152681 - DNA, 13 bp, Artificial Sequence
  Oligonucleotide for detection of SNP TSC0038590
taaatcgtttgty

SEQ ID NO: 152682 - DNA, 13 bp, Artificial Sequence
  Oligonucleotide for detection of SNP TSC0038590
racaaacgattta

SEQ ID NO: 152683 - DNA, 13 bp, Artificial Sequence
  Oligonucleotide for detection of SNP TSC0038590
taaattgttcgty

SEQ ID NO: 152684 - DNA, 13 bp, Artificial Sequence
  Oligonucleotide for detection of SNP TSC0038590
racgaacaattta

SEQ ID NO: 152685 - DNA, 13 bp, Artificial Sequence
  Oligonucleotide for detection of SNP TSC0038590
taaatcgttcgty

SEQ ID NO: 152686 - DNA, 13 bp, Artificial Sequence
  Oligonucleotide for detection of SNP TSC0038590
racgaacgattta

SEQ ID NO: 152687 - DNA, 13 bp, Artificial Sequence
  Oligonucleotide for detection of SNP TSC0038592
tggtttattaatt

SEQ ID NO: 152688 - DNA, 13 bp, Artificial Sequence
  Oligonucleotide for detection of SNP TSC0038592
aattaataaacca

SEQ ID NO: 152689 - DNA, 13 bp, Artificial Sequence
  Oligonucleotide for detection of SNP TSC0038592
tggttttttaatt

SEQ ID NO: 152690 - DNA, 13 bp, Artificial Sequence
  Oligonucleotide for detection of SNP TSC0038592
aattaaaaaacca

SEQ ID NO: 152691 - DNA, 13 bp, Artificial Sequence
  Oligonucleotide for detection of SNP TSC0038592
agttgataaatta

SEQ ID NO: 152692 - DNA, 13 bp, Artificial Sequence
  Oligonucleotide for detection of SNP TSC0038592
taatttatcaact

SEQ ID NO: 152693 - DNA, 13 bp, Artificial Sequence
  Oligonucleotide for detection of SNP TSC0038592
agttgaaaaatta

SEQ ID NO: 152694 - DNA, 13 bp, Artificial Sequence
  Oligonucleotide for detection of SNP TSC0038592
taatttttcaact

SEQ ID NO: 152695 - DNA, 13 bp, Artificial Sequence
  Oligonucleotide for detection of SNP TSC0038593
agatttaggagag

SEQ ID NO: 152696 - DNA, 13 bp, Artificial Sequence
  Oligonucleotide for detection of SNP TSC0038593
ctctcctaaatct

SEQ ID NO: 152697 - DNA, 13 bp, Artificial Sequence
  Oligonucleotide for detection of SNP TSC0038593
agatttgggagag

SEQ ID NO: 152698 - DNA, 13 bp, Artificial Sequence
  Oligonucleotide for detection of SNP TSC0038593
ctctcccaaatct

SEQ ID NO: 152699 - DNA, 13 bp, Artificial Sequence
  Oligonucleotide for detection of SNP TSC0038593
agattcgggagag

SEQ ID NO: 152700 - DNA, 13 bp, Artificial Sequence
  Oligonucleotide for detection of SNP TSC0038593
ctctcccgaatct

SEQ ID NO: 152701 - DNA, 13 bp, Artificial Sequence
  Oligonucleotide for detection of SNP TSC0038594
gtgttatggtgtt

SEQ ID NO: 152702 - DNA, 13 bp, Artificial Sequence
  Oligonucleotide for detection of SNP TSC0038594
aacaccataacac

SEQ ID NO: 152703 - DNA, 13 bp, Artificial Sequence
  Oligonucleotide for detection of SNP TSC0038594
gtgttacggtgtt

SEQ ID NO: 152704 - DNA, 13 bp, Artificial Sequence
  Oligonucleotide for detection of SNP TSC0038594
aacaccgtaacac

SEQ ID NO: 152705 - DNA, 13 bp, Artificial Sequence
  Oligonucleotide for detection of SNP TSC0038594
aatattgtgatay

SEQ ID NO: 152706 - DNA, 13 bp, Artificial Sequence
  Oligonucleotide for detection of SNP TSC0038594
rtatcacaatatt

SEQ ID NO: 152707 - DNA, 13 bp, Artificial Sequence
  Oligonucleotide for detection of SNP TSC0038594
aatattatgatay

SEQ ID NO: 152708 - DNA, 13 bp, Artificial Sequence
  Oligonucleotide for detection of SNP TSC0038594
rtatcataatatt

SEQ ID NO: 152709 - DNA, 13 bp, Artificial Sequence
  Oligonucleotide for detection of SNP TSC0038594
aatatcgtgatay

SEQ ID NO: 152710 - DNA, 13 bp, Artificial Sequence
  Oligonucleotide for detection of SNP TSC0038594
rtatcacgatatt

SEQ ID NO: 152711 - DNA, 13 bp, Artificial Sequence
  Oligonucleotide for detection of SNP TSC0038596
gatttagtttatg

SEQ ID NO: 152712 - DNA, 13 bp, Artificial Sequence
  Oligonucleotide for detection of SNP TSC0038596
cataaactaaatc

SEQ ID NO: 152713 - DNA, 13 bp, Artificial Sequence
  Oligonucleotide for detection of SNP TSC0038596
gatttattttatg

SEQ ID NO: 152714 - DNA, 13 bp, Artificial Sequence
  Oligonucleotide for detection of SNP TSC0038596
cataaaataaatc

SEQ ID NO: 152715 - DNA, 13 bp, Artificial Sequence
  Oligonucleotide for detection of SNP TSC0038596
tatgagttgagty

SEQ ID NO: 152716 - DNA, 13 bp, Artificial Sequence
  Oligonucleotide for detection of SNP TSC0038596
ractcaactcata

SEQ ID NO: 152717 - DNA, 13 bp, Artificial Sequence
  Oligonucleotide for detection of SNP TSC0038596
tatgagatgagty

SEQ ID NO: 152718 - DNA, 13 bp, Artificial Sequence
  Oligonucleotide for detection of SNP TSC0038596
ractcatctcata

SEQ ID NO: 152719 - DNA, 13 bp, Artificial Sequence
  Oligonucleotide for detection of SNP TSC0038598
tgaggggagttag

SEQ ID NO: 152720 - DNA, 13 bp, Artificial Sequence
  Oligonucleotide for detection of SNP TSC0038598
ctaactcccctca

SEQ ID NO: 152721 - DNA, 13 bp, Artificial Sequence
  Oligonucleotide for detection of SNP TSC0038598
tgagggaagttag

SEQ ID NO: 152722 - DNA, 13 bp, Artificial Sequence
  Oligonucleotide for detection of SNP TSC0038598
ctaacttccctca

SEQ ID NO: 152723 - DNA, 13 bp, Artificial Sequence
  Oligonucleotide for detection of SNP TSC0038599
tgtttttagaaat

SEQ ID NO: 152724 - DNA, 13 bp, Artificial Sequence
  Oligonucleotide for detection of SNP TSC0038599
atttctaaaaaca

SEQ ID NO: 152725 - DNA, 13 bp, Artificial Sequence
  Oligonucleotide for detection of SNP TSC0038599
tgtttcgagaaat

SEQ ID NO: 152726 - DNA, 13 bp, Artificial Sequence
  Oligonucleotide for detection of SNP TSC0038599
atttctcgaaaca

SEQ ID NO: 152727 - DNA, 13 bp, Artificial Sequence
  Oligonucleotide for detection of SNP TSC0038599
attttttgaagta

SEQ ID NO: 152728 - DNA, 13 bp, Artificial Sequence
  Oligonucleotide for detection of SNP TSC0038599
tacttcaaaaaat

SEQ ID NO: 152729 - DNA, 13 bp, Artificial Sequence
  Oligonucleotide for detection of SNP TSC0038599
atttttagaagta

SEQ ID NO: 152730 - DNA, 13 bp, Artificial Sequence
  Oligonucleotide for detection of SNP TSC0038599
tacttctaaaaat

SEQ ID NO: 152731 - DNA, 13 bp, Artificial Sequence
  Oligonucleotide for detection of SNP TSC0038599
atttttcgaagta

SEQ ID NO: 152732 - DNA, 13 bp, Artificial Sequence
  Oligonucleotide for detection of SNP TSC0038599
tacttcgaaaaat

SEQ ID NO: 152733 - DNA, 13 bp, Artificial Sequence
  Oligonucleotide for detection of SNP TSC0038600
taattaaggttta

SEQ ID NO: 152734 - DNA, 13 bp, Artificial Sequence
  Oligonucleotide for detection of SNP TSC0038600
taaaccttaatta

SEQ ID NO: 152735 - DNA, 13 bp, Artificial Sequence
  Oligonucleotide for detection of SNP TSC0038600
taattagggttta

SEQ ID NO: 152736 - DNA, 13 bp, Artificial Sequence
  Oligonucleotide for detection of SNP TSC0038600
taaaccctaatta

SEQ ID NO: 152737 - DNA, 13 bp, Artificial Sequence
  Oligonucleotide for detection of SNP TSC0038601
tgtgtaggttttt

SEQ ID NO: 152738 - DNA, 13 bp, Artificial Sequence
  Oligonucleotide for detection of SNP TSC0038601
aaaaacctacaca

SEQ ID NO: 152739 - DNA, 13 bp, Artificial Sequence
  Oligonucleotide for detection of SNP TSC0038601
agaaatttgtata

SEQ ID NO: 152740 - DNA, 13 bp, Artificial Sequence
  Oligonucleotide for detection of SNP TSC0038601
tatacaaatttct

SEQ ID NO: 152741 - DNA, 13 bp, Artificial Sequence
  Oligonucleotide for detection of SNP TSC0038601
agaaatatgtata

SEQ ID NO: 152742 - DNA, 13 bp, Artificial Sequence
  Oligonucleotide for detection of SNP TSC0038601
tatacatatttct

SEQ ID NO: 152743 - DNA, 13 bp, Artificial Sequence
  Oligonucleotide for detection of SNP TSC0038606
ataatttaaattt

SEQ ID NO: 152744 - DNA, 13 bp, Artificial Sequence
  Oligonucleotide for detection of SNP TSC0038606
aaatttaaattat

SEQ ID NO: 152745 - DNA, 13 bp, Artificial Sequence
  Oligonucleotide for detection of SNP TSC0038606
ataattgaaattt

SEQ ID NO: 152746 - DNA, 13 bp, Artificial Sequence
  Oligonucleotide for detection of SNP TSC0038606
aaatttcaattat

SEQ ID NO: 152747 - DNA, 13 bp, Artificial Sequence
  Oligonucleotide for detection of SNP TSC0038606
agatttgaattat

SEQ ID NO: 152748 - DNA, 13 bp, Artificial Sequence
  Oligonucleotide for detection of SNP TSC0038606
ataattcaaatct

SEQ ID NO: 152749 - DNA, 13 bp, Artificial Sequence
  Oligonucleotide for detection of SNP TSC0038606
agattttaattat

SEQ ID NO: 152750 - DNA, 13 bp, Artificial Sequence
  Oligonucleotide for detection of SNP TSC0038606
ataattaaaatct

SEQ ID NO: 152751 - DNA, 13 bp, Artificial Sequence
  Oligonucleotide for detection of SNP TSC0038608
agtatattaaata

SEQ ID NO: 152752 - DNA, 13 bp, Artificial Sequence
  Oligonucleotide for detection of SNP TSC0038608
tatttaatatact

SEQ ID NO: 152753 - DNA, 13 bp, Artificial Sequence
  Oligonucleotide for detection of SNP TSC0038608
agtatagtaaata

SEQ ID NO: 152754 - DNA, 13 bp, Artificial Sequence
  Oligonucleotide for detection of SNP TSC0038608
tatttactatact

SEQ ID NO: 152755 - DNA, 13 bp, Artificial Sequence
  Oligonucleotide for detection of SNP TSC0038608
tgtttagtgtgtt

SEQ ID NO: 152756 - DNA, 13 bp, Artificial Sequence
  Oligonucleotide for detection of SNP TSC0038608
aacacactaaaca

SEQ ID NO: 152757 - DNA, 13 bp, Artificial Sequence
  Oligonucleotide for detection of SNP TSC0038608
tgtttattgtgtt

SEQ ID NO: 152758 - DNA, 13 bp, Artificial Sequence
  Oligonucleotide for detection of SNP TSC0038608
aacacaataaaca

SEQ ID NO: 152759 - DNA, 13 bp, Artificial Sequence
  Oligonucleotide for detection of SNP TSC0038609
atggagggagaga

SEQ ID NO: 152760 - DNA, 13 bp, Artificial Sequence
  Oligonucleotide for detection of SNP TSC0038609
tctctccctccat

SEQ ID NO: 152761 - DNA, 13 bp, Artificial Sequence
  Oligonucleotide for detection of SNP TSC0038609
atggagagagaga

SEQ ID NO: 152762 - DNA, 13 bp, Artificial Sequence
  Oligonucleotide for detection of SNP TSC0038609
tctctctctccat

SEQ ID NO: 152763 - DNA, 13 bp, Artificial Sequence
  Oligonucleotide for detection of SNP TSC0038610
aaaagtattatag

SEQ ID NO: 152764 - DNA, 13 bp, Artificial Sequence
  Oligonucleotide for detection of SNP TSC0038610
ctataatactttt

SEQ ID NO: 152765 - DNA, 13 bp, Artificial Sequence
  Oligonucleotide for detection of SNP TSC0038610
aaaagttttatag

SEQ ID NO: 152766 - DNA, 13 bp, Artificial Sequence
  Oligonucleotide for detection of SNP TSC0038610
ctataaaactttt

SEQ ID NO: 152767 - DNA, 13 bp, Artificial Sequence
  Oligonucleotide for detection of SNP TSC0038610
ttatgatattttt

SEQ ID NO: 152768 - DNA, 13 bp, Artificial Sequence
  Oligonucleotide for detection of SNP TSC0038610
aaaaatatcataa

SEQ ID NO: 152769 - DNA, 13 bp, Artificial Sequence
  Oligonucleotide for detection of SNP TSC0038610
ttatgaaattttt

SEQ ID NO: 152770 - DNA, 13 bp, Artificial Sequence
  Oligonucleotide for detection of SNP TSC0038610
aaaaatttcataa

SEQ ID NO: 152771 - DNA, 13 bp, Artificial Sequence
  Oligonucleotide for detection of SNP TSC0038611
tattatatgtata

SEQ ID NO: 152772 - DNA, 13 bp, Artificial Sequence
  Oligonucleotide for detection of SNP TSC0038611
tatacatataata

SEQ ID NO: 152773 - DNA, 13 bp, Artificial Sequence
  Oligonucleotide for detection of SNP TSC0038611
tattatgtgtata

SEQ ID NO: 152774 - DNA, 13 bp, Artificial Sequence
  Oligonucleotide for detection of SNP TSC0038611
tatacacataata

SEQ ID NO: 152775 - DNA, 13 bp, Artificial Sequence
  Oligonucleotide for detection of SNP TSC0038611
tattacgtgtata

SEQ ID NO: 152776 - DNA, 13 bp, Artificial Sequence
  Oligonucleotide for detection of SNP TSC0038611
tatacacgtaata

SEQ ID NO: 152777 - DNA, 13 bp, Artificial Sequence
  Oligonucleotide for detection of SNP TSC0038611
tgtgtatgtagtg

SEQ ID NO: 152778 - DNA, 13 bp, Artificial Sequence
  Oligonucleotide for detection of SNP TSC0038611
cactacatacaca

SEQ ID NO: 152779 - DNA, 13 bp, Artificial Sequence
  Oligonucleotide for detection of SNP TSC0038611
tgtgtacgtagtg

SEQ ID NO: 152780 - DNA, 13 bp, Artificial Sequence
  Oligonucleotide for detection of SNP TSC0038611
cactacgtacaca

SEQ ID NO: 152781 - DNA, 13 bp, Artificial Sequence
  Oligonucleotide for detection of SNP TSC0038613
gagaggaaaataa

SEQ ID NO: 152782 - DNA, 13 bp, Artificial Sequence
  Oligonucleotide for detection of SNP TSC0038613
ttattttcctctc

SEQ ID NO: 152783 - DNA, 13 bp, Artificial Sequence
  Oligonucleotide for detection of SNP TSC0038613
gagagggaaataa

SEQ ID NO: 152784 - DNA, 13 bp, Artificial Sequence
  Oligonucleotide for detection of SNP TSC0038613
ttatttccctctc

SEQ ID NO: 152785 - DNA, 13 bp, Artificial Sequence
  Oligonucleotide for detection of SNP TSC0038614
agttgggtttagg

SEQ ID NO: 152786 - DNA, 13 bp, Artificial Sequence
  Oligonucleotide for detection of SNP TSC0038614
cctaaacccaact

SEQ ID NO: 152787 - DNA, 13 bp, Artificial Sequence
  Oligonucleotide for detection of SNP TSC0038614
agttggatttagg

SEQ ID NO: 152788 - DNA, 13 bp, Artificial Sequence
  Oligonucleotide for detection of SNP TSC0038614
cctaaatccaact

SEQ ID NO: 152789 - DNA, 13 bp, Artificial Sequence
  Oligonucleotide for detection of SNP TSC0038615
gaaagataaaata

SEQ ID NO: 152790 - DNA, 13 bp, Artificial Sequence
  Oligonucleotide for detection of SNP TSC0038615
tattttatctttc

SEQ ID NO: 152791 - DNA, 13 bp, Artificial Sequence
  Oligonucleotide for detection of SNP TSC0038615
gaaagaaaaaata

SEQ ID NO: 152792 - DNA, 13 bp, Artificial Sequence
  Oligonucleotide for detection of SNP TSC0038615
tattttttctttc

SEQ ID NO: 152793 - DNA, 13 bp, Artificial Sequence
  Oligonucleotide for detection of SNP TSC0038616
tgtttatgatttt

SEQ ID NO: 152794 - DNA, 13 bp, Artificial Sequence
  Oligonucleotide for detection of SNP TSC0038616
aaaatcataaaca

SEQ ID NO: 152795 - DNA, 13 bp, Artificial Sequence
  Oligonucleotide for detection of SNP TSC0038616
tgtttacgatttt

SEQ ID NO: 152796 - DNA, 13 bp, Artificial Sequence
  Oligonucleotide for detection of SNP TSC0038616
aaaatcgtaaaca

SEQ ID NO: 152797 - DNA, 13 bp, Artificial Sequence
  Oligonucleotide for detection of SNP TSC0038616
aaaattgtaaata

SEQ ID NO: 152798 - DNA, 13 bp, Artificial Sequence
  Oligonucleotide for detection of SNP TSC0038616
tatttacaatttt

SEQ ID NO: 152799 - DNA, 13 bp, Artificial Sequence
  Oligonucleotide for detection of SNP TSC0038616
aaaatcgtaaata

SEQ ID NO: 152800 - DNA, 13 bp, Artificial Sequence
  Oligonucleotide for detection of SNP TSC0038616
tatttacgatttt

SEQ ID NO: 152801 - DNA, 13 bp, Artificial Sequence
  Oligonucleotide for detection of SNP TSC0038618
gaagaggtatgay

SEQ ID NO: 152802 - DNA, 13 bp, Artificial Sequence
  Oligonucleotide for detection of SNP TSC0038618
rtcatacctcttc

SEQ ID NO: 152803 - DNA, 13 bp, Artificial Sequence
  Oligonucleotide for detection of SNP TSC0038618
gaagagttatgay

SEQ ID NO: 152804 - DNA, 13 bp, Artificial Sequence
  Oligonucleotide for detection of SNP TSC0038618
rtcataactcttc

SEQ ID NO: 152805 - DNA, 13 bp, Artificial Sequence
  Oligonucleotide for detection of SNP TSC0038618
gttatgtttttty

SEQ ID NO: 152806 - DNA, 13 bp, Artificial Sequence
  Oligonucleotide for detection of SNP TSC0038618
raaaaaacataac

SEQ ID NO: 152807 - DNA, 13 bp, Artificial Sequence
  Oligonucleotide for detection of SNP TSC0038618
gttatgattttty

SEQ ID NO: 152808 - DNA, 13 bp, Artificial Sequence
  Oligonucleotide for detection of SNP TSC0038618
raaaaatcataac

SEQ ID NO: 152809 - DNA, 13 bp, Artificial Sequence
  Oligonucleotide for detection of SNP TSC0038620
ttgaaagtggggy

SEQ ID NO: 152810 - DNA, 13 bp, Artificial Sequence
  Oligonucleotide for detection of SNP TSC0038620
rccccactttcaa

SEQ ID NO: 152811 - DNA, 13 bp, Artificial Sequence
  Oligonucleotide for detection of SNP TSC0038620
ttgaaaatggggy

SEQ ID NO: 152812 - DNA, 13 bp, Artificial Sequence
  Oligonucleotide for detection of SNP TSC0038620
rccccattttcaa

SEQ ID NO: 152813 - DNA, 13 bp, Artificial Sequence
  Oligonucleotide for detection of SNP TSC0038621
ataattaaagtgt

SEQ ID NO: 152814 - DNA, 13 bp, Artificial Sequence
  Oligonucleotide for detection of SNP TSC0038621
acactttaattat

SEQ ID NO: 152815 - DNA, 13 bp, Artificial Sequence
  Oligonucleotide for detection of SNP TSC0038621
ataattgaagtgt

SEQ ID NO: 152816 - DNA, 13 bp, Artificial Sequence
  Oligonucleotide for detection of SNP TSC0038621
acacttcaattat

SEQ ID NO: 152817 - DNA, 13 bp, Artificial Sequence
  Oligonucleotide for detection of SNP TSC0038622
tatttagtattgg

SEQ ID NO: 152818 - DNA, 13 bp, Artificial Sequence
  Oligonucleotide for detection of SNP TSC0038622
ccaatactaaata

SEQ ID NO: 152819 - DNA, 13 bp, Artificial Sequence
  Oligonucleotide for detection of SNP TSC0038622
tatttaatattgg

SEQ ID NO: 152820 - DNA, 13 bp, Artificial Sequence
  Oligonucleotide for detection of SNP TSC0038622
ccaatattaaata

SEQ ID NO: 152821 - DNA, 13 bp, Artificial Sequence
  Oligonucleotide for detection of SNP TSC0038623
gaagttaagaaat

SEQ ID NO: 152822 - DNA, 13 bp, Artificial Sequence
  Oligonucleotide for detection of SNP TSC0038623
atttcttaacttc

SEQ ID NO: 152823 - DNA, 13 bp, Artificial Sequence
  Oligonucleotide for detection of SNP TSC0038623
gaagttgagaaat

SEQ ID NO: 152824 - DNA, 13 bp, Artificial Sequence
  Oligonucleotide for detection of SNP TSC0038623
atttctcaacttc

SEQ ID NO: 152825 - DNA, 13 bp, Artificial Sequence
  Oligonucleotide for detection of SNP TSC0038623
gaagtcgagaaat

SEQ ID NO: 152826 - DNA, 13 bp, Artificial Sequence
  Oligonucleotide for detection of SNP TSC0038623
atttctcgacttc

SEQ ID NO: 152827 - DNA, 13 bp, Artificial Sequence
  Oligonucleotide for detection of SNP TSC0038624
agggaaaggagga

SEQ ID NO: 152828 - DNA, 13 bp, Artificial Sequence
  Oligonucleotide for detection of SNP TSC0038624
tcctcctttccct

SEQ ID NO: 152829 - DNA, 13 bp, Artificial Sequence
  Oligonucleotide for detection of SNP TSC0038624
agggaatggagga

SEQ ID NO: 152830 - DNA, 13 bp, Artificial Sequence
  Oligonucleotide for detection of SNP TSC0038624
tcctccattccct

SEQ ID NO: 152831 - DNA, 13 bp, Artificial Sequence
  Oligonucleotide for detection of SNP TSC0038626
ttgatggttttty

SEQ ID NO: 152832 - DNA, 13 bp, Artificial Sequence
  Oligonucleotide for detection of SNP TSC0038626
raaaaaccatcaa

SEQ ID NO: 152833 - DNA, 13 bp, Artificial Sequence
  Oligonucleotide for detection of SNP TSC0038626
ttgatgattttty

SEQ ID NO: 152834 - DNA, 13 bp, Artificial Sequence
  Oligonucleotide for detection of SNP TSC0038626
raaaaatcatcaa

SEQ ID NO: 152835 - DNA, 13 bp, Artificial Sequence
  Oligonucleotide for detection of SNP TSC0038627
aatgatgttttay

SEQ ID NO: 152836 - DNA, 13 bp, Artificial Sequence
  Oligonucleotide for detection of SNP TSC0038627
rtaaaacatcatt

SEQ ID NO: 152837 - DNA, 13 bp, Artificial Sequence
  Oligonucleotide for detection of SNP TSC0038627
aatgatattttay

SEQ ID NO: 152838 - DNA, 13 bp, Artificial Sequence
  Oligonucleotide for detection of SNP TSC0038627
rtaaaatatcatt

SEQ ID NO: 152839 - DNA, 13 bp, Artificial Sequence
  Oligonucleotide for detection of SNP TSC0038631
agttgaattttgt

SEQ ID NO: 152840 - DNA, 13 bp, Artificial Sequence
  Oligonucleotide for detection of SNP TSC0038631
acaaaattcaact

SEQ ID NO: 152841 - DNA, 13 bp, Artificial Sequence
  Oligonucleotide for detection of SNP TSC0038631
agttgatttttgt

SEQ ID NO: 152842 - DNA, 13 bp, Artificial Sequence
  Oligonucleotide for detection of SNP TSC0038631
acaaaaatcaact

SEQ ID NO: 152843 - DNA, 13 bp, Artificial Sequence
  Oligonucleotide for detection of SNP TSC0038631
ataaagtttagtt

SEQ ID NO: 152844 - DNA, 13 bp, Artificial Sequence
  Oligonucleotide for detection of SNP TSC0038631
aactaaactttat

SEQ ID NO: 152845 - DNA, 13 bp, Artificial Sequence
  Oligonucleotide for detection of SNP TSC0038631
ataaaggttagtt

SEQ ID NO: 152846 - DNA, 13 bp, Artificial Sequence
  Oligonucleotide for detection of SNP TSC0038631
aactaacctttat

SEQ ID NO: 152847 - DNA, 13 bp, Artificial Sequence
  Oligonucleotide for detection of SNP TSC0038634
gttgggtgtgggt

SEQ ID NO: 152848 - DNA, 13 bp, Artificial Sequence
  Oligonucleotide for detection of SNP TSC0038634
acccacacccaac

SEQ ID NO: 152849 - DNA, 13 bp, Artificial Sequence
  Oligonucleotide for detection of SNP TSC0038634
gtcgggtgtgggt

SEQ ID NO: 152850 - DNA, 13 bp, Artificial Sequence
  Oligonucleotide for detection of SNP TSC0038634
acccacacccgac

SEQ ID NO: 152851 - DNA, 13 bp, Artificial Sequence
  Oligonucleotide for detection of SNP TSC0038634
gttgggcgtgggt

SEQ ID NO: 152852 - DNA, 13 bp, Artificial Sequence
  Oligonucleotide for detection of SNP TSC0038634
acccacgcccaac

SEQ ID NO: 152853 - DNA, 13 bp, Artificial Sequence
  Oligonucleotide for detection of SNP TSC0038634
gtcgggcgtgggt

SEQ ID NO: 152854 - DNA, 13 bp, Artificial Sequence
  Oligonucleotide for detection of SNP TSC0038634
acccacgcccgac

SEQ ID NO: 152855 - DNA, 13 bp, Artificial Sequence
  Oligonucleotide for detection of SNP TSC0038634
atttatgtttggy

SEQ ID NO: 152856 - DNA, 13 bp, Artificial Sequence
  Oligonucleotide for detection of SNP TSC0038634
rccaaacataaat

SEQ ID NO: 152857 - DNA, 13 bp, Artificial Sequence
  Oligonucleotide for detection of SNP TSC0038634
atttatatttggy

SEQ ID NO: 152858 - DNA, 13 bp, Artificial Sequence
  Oligonucleotide for detection of SNP TSC0038634
rccaaatataaat

SEQ ID NO: 152859 - DNA, 13 bp, Artificial Sequence
  Oligonucleotide for detection of SNP TSC0038634
atttacgtttggy

SEQ ID NO: 152860 - DNA, 13 bp, Artificial Sequence
  Oligonucleotide for detection of SNP TSC0038634
rccaaacgtaaat

SEQ ID NO: 152861 - DNA, 13 bp, Artificial Sequence
  Oligonucleotide for detection of SNP TSC0038634
atttatattcggy

SEQ ID NO: 152862 - DNA, 13 bp, Artificial Sequence
  Oligonucleotide for detection of SNP TSC0038634
rccgaatataaat

SEQ ID NO: 152863 - DNA, 13 bp, Artificial Sequence
  Oligonucleotide for detection of SNP TSC0038634
atttatgttcggy

SEQ ID NO: 152864 - DNA, 13 bp, Artificial Sequence
  Oligonucleotide for detection of SNP TSC0038634
rccgaacataaat

SEQ ID NO: 152865 - DNA, 13 bp, Artificial Sequence
  Oligonucleotide for detection of SNP TSC0038634
atttacgttcggy

SEQ ID NO: 152866 - DNA, 13 bp, Artificial Sequence
  Oligonucleotide for detection of SNP TSC0038634
rccgaacgtaaat

SEQ ID NO: 152867 - DNA, 13 bp, Artificial Sequence
  Oligonucleotide for detection of SNP TSC0038635
tatagttgattta

SEQ ID NO: 152868 - DNA, 13 bp, Artificial Sequence
  Oligonucleotide for detection of SNP TSC0038635
taaatcaactata

SEQ ID NO: 152869 - DNA, 13 bp, Artificial Sequence
  Oligonucleotide for detection of SNP TSC0038635
tatagtggattta

SEQ ID NO: 152870 - DNA, 13 bp, Artificial Sequence
  Oligonucleotide for detection of SNP TSC0038635
taaatccactata

SEQ ID NO: 152871 - DNA, 13 bp, Artificial Sequence
  Oligonucleotide for detection of SNP TSC0038635
tatagtcgattta

SEQ ID NO: 152872 - DNA, 13 bp, Artificial Sequence
  Oligonucleotide for detection of SNP TSC0038635
taaatcgactata

SEQ ID NO: 152873 - DNA, 13 bp, Artificial Sequence
  Oligonucleotide for detection of SNP TSC0038635
tgaattgattgta

SEQ ID NO: 152874 - DNA, 13 bp, Artificial Sequence
  Oligonucleotide for detection of SNP TSC0038635
tacaatcaattca

SEQ ID NO: 152875 - DNA, 13 bp, Artificial Sequence
  Oligonucleotide for detection of SNP TSC0038635
tgaatttattgta

SEQ ID NO: 152876 - DNA, 13 bp, Artificial Sequence
  Oligonucleotide for detection of SNP TSC0038635
tacaataaattca

SEQ ID NO: 152877 - DNA, 13 bp, Artificial Sequence
  Oligonucleotide for detection of SNP TSC0038635
tgaatcgattgta

SEQ ID NO: 152878 - DNA, 13 bp, Artificial Sequence
  Oligonucleotide for detection of SNP TSC0038635
tacaatcgattca

SEQ ID NO: 152879 - DNA, 13 bp, Artificial Sequence
  Oligonucleotide for detection of SNP TSC0038636
tgtgtatgtttty

SEQ ID NO: 152880 - DNA, 13 bp, Artificial Sequence
  Oligonucleotide for detection of SNP TSC0038636
raaaacatacaca

SEQ ID NO: 152881 - DNA, 13 bp, Artificial Sequence
  Oligonucleotide for detection of SNP TSC0038636
tgtgtacgtttty

SEQ ID NO: 152882 - DNA, 13 bp, Artificial Sequence
  Oligonucleotide for detection of SNP TSC0038636
raaaacgtacaca

SEQ ID NO: 152883 - DNA, 13 bp, Artificial Sequence
  Oligonucleotide for detection of SNP TSC0038636
gaagatgtgtata

SEQ ID NO: 152884 - DNA, 13 bp, Artificial Sequence
  Oligonucleotide for detection of SNP TSC0038636
tatacacatcttc

SEQ ID NO: 152885 - DNA, 13 bp, Artificial Sequence
  Oligonucleotide for detection of SNP TSC0038636
gaagatatgtata

SEQ ID NO: 152886 - DNA, 13 bp, Artificial Sequence
  Oligonucleotide for detection of SNP TSC0038636
tatacatatcttc

SEQ ID NO: 152887 - DNA, 13 bp, Artificial Sequence
  Oligonucleotide for detection of SNP TSC0038636
gaagacgtgtata

SEQ ID NO: 152888 - DNA, 13 bp, Artificial Sequence
  Oligonucleotide for detection of SNP TSC0038636
tatacacgtcttc

SEQ ID NO: 152889 - DNA, 13 bp, Artificial Sequence
  Oligonucleotide for detection of SNP TSC0038637
gagaagtgttgta

SEQ ID NO: 152890 - DNA, 13 bp, Artificial Sequence
  Oligonucleotide for detection of SNP TSC0038637
tacaacacttctc

SEQ ID NO: 152891 - DNA, 13 bp, Artificial Sequence
  Oligonucleotide for detection of SNP TSC0038637
gagaagcgttgta

SEQ ID NO: 152892 - DNA, 13 bp, Artificial Sequence
  Oligonucleotide for detection of SNP TSC0038637
tacaacgcttctc

SEQ ID NO: 152893 - DNA, 13 bp, Artificial Sequence
  Oligonucleotide for detection of SNP TSC0038638
atatagggatgtg

SEQ ID NO: 152894 - DNA, 13 bp, Artificial Sequence
  Oligonucleotide for detection of SNP TSC0038638
cacatccctatat

SEQ ID NO: 152895 - DNA, 13 bp, Artificial Sequence
  Oligonucleotide for detection of SNP TSC0038638
atatagagatgtg

SEQ ID NO: 152896 - DNA, 13 bp, Artificial Sequence
  Oligonucleotide for detection of SNP TSC0038638
cacatctctatat

SEQ ID NO: 152897 - DNA, 13 bp, Artificial Sequence
  Oligonucleotide for detection of SNP TSC0038642
tagaatttaatty

SEQ ID NO: 152898 - DNA, 13 bp, Artificial Sequence
  Oligonucleotide for detection of SNP TSC0038642
raattaaattcta

SEQ ID NO: 152899 - DNA, 13 bp, Artificial Sequence
  Oligonucleotide for detection of SNP TSC0038642
tagaatgtaatty

SEQ ID NO: 152900 - DNA, 13 bp, Artificial Sequence
  Oligonucleotide for detection of SNP TSC0038642
raattacattcta

SEQ ID NO: 152901 - DNA, 13 bp, Artificial Sequence
  Oligonucleotide for detection of SNP TSC0038642
tagaacgtaatty

SEQ ID NO: 152902 - DNA, 13 bp, Artificial Sequence
  Oligonucleotide for detection of SNP TSC0038642
raattacgttcta

SEQ ID NO: 152903 - DNA, 13 bp, Artificial Sequence
  Oligonucleotide for detection of SNP TSC0038642
ggattaggttttg

SEQ ID NO: 152904 - DNA, 13 bp, Artificial Sequence
  Oligonucleotide for detection of SNP TSC0038642
caaaacctaatcc

SEQ ID NO: 152905 - DNA, 13 bp, Artificial Sequence
  Oligonucleotide for detection of SNP TSC0038642
ggattatgttttg

SEQ ID NO: 152906 - DNA, 13 bp, Artificial Sequence
  Oligonucleotide for detection of SNP TSC0038642
caaaacataatcc

SEQ ID NO: 152907 - DNA, 13 bp, Artificial Sequence
  Oligonucleotide for detection of SNP TSC0038642
ggattacgttttg

SEQ ID NO: 152908 - DNA, 13 bp, Artificial Sequence
  Oligonucleotide for detection of SNP TSC0038642
caaaacgtaatcc

SEQ ID NO: 152909 - DNA, 13 bp, Artificial Sequence
  Oligonucleotide for detection of SNP TSC0038646
ttgatggttattt

SEQ ID NO: 152910 - DNA, 13 bp, Artificial Sequence
  Oligonucleotide for detection of SNP TSC0038646
aaataaccatcaa

SEQ ID NO: 152911 - DNA, 13 bp, Artificial Sequence
  Oligonucleotide for detection of SNP TSC0038646
ttgatgattattt

SEQ ID NO: 152912 - DNA, 13 bp, Artificial Sequence
  Oligonucleotide for detection of SNP TSC0038646
aaataatcatcaa

SEQ ID NO: 152913 - DNA, 13 bp, Artificial Sequence
  Oligonucleotide for detection of SNP TSC0038650
ttgagggtggtat

SEQ ID NO: 152914 - DNA, 13 bp, Artificial Sequence
  Oligonucleotide for detection of SNP TSC0038650
ataccaccctcaa

SEQ ID NO: 152915 - DNA, 13 bp, Artificial Sequence
  Oligonucleotide for detection of SNP TSC0038650
ttgaggatggtat

SEQ ID NO: 152916 - DNA, 13 bp, Artificial Sequence
  Oligonucleotide for detection of SNP TSC0038650
ataccatcctcaa

SEQ ID NO: 152917 - DNA, 13 bp, Artificial Sequence
  Oligonucleotide for detection of SNP TSC0038651
tgatattatttga

SEQ ID NO: 152918 - DNA, 13 bp, Artificial Sequence
  Oligonucleotide for detection of SNP TSC0038651
tcaaataatatca

SEQ ID NO: 152919 - DNA, 13 bp, Artificial Sequence
  Oligonucleotide for detection of SNP TSC0038651
ttaaattatgtta

SEQ ID NO: 152920 - DNA, 13 bp, Artificial Sequence
  Oligonucleotide for detection of SNP TSC0038651
taacataatttaa

SEQ ID NO: 152921 - DNA, 13 bp, Artificial Sequence
  Oligonucleotide for detection of SNP TSC0038651
ttaaatgatgtta

SEQ ID NO: 152922 - DNA, 13 bp, Artificial Sequence
  Oligonucleotide for detection of SNP TSC0038651
taacatcatttaa

SEQ ID NO: 152923 - DNA, 13 bp, Artificial Sequence
  Oligonucleotide for detection of SNP TSC0038655
gtagagatgaata

SEQ ID NO: 152924 - DNA, 13 bp, Artificial Sequence
  Oligonucleotide for detection of SNP TSC0038655
tattcatctctac

SEQ ID NO: 152925 - DNA, 13 bp, Artificial Sequence
  Oligonucleotide for detection of SNP TSC0038655
gtagaggtgaata

SEQ ID NO: 152926 - DNA, 13 bp, Artificial Sequence
  Oligonucleotide for detection of SNP TSC0038655
tattcacctctac

SEQ ID NO: 152927 - DNA, 13 bp, Artificial Sequence
  Oligonucleotide for detection of SNP TSC0038656
gatgtggataagg

SEQ ID NO: 152928 - DNA, 13 bp, Artificial Sequence
  Oligonucleotide for detection of SNP TSC0038656
ccttatccacatc

SEQ ID NO: 152929 - DNA, 13 bp, Artificial Sequence
  Oligonucleotide for detection of SNP TSC0038656
gatgtgtataagg

SEQ ID NO: 152930 - DNA, 13 bp, Artificial Sequence
  Oligonucleotide for detection of SNP TSC0038656
ccttatacacatc

SEQ ID NO: 152931 - DNA, 13 bp, Artificial Sequence
  Oligonucleotide for detection of SNP TSC0038658
gtgtataaagtgt

SEQ ID NO: 152932 - DNA, 13 bp, Artificial Sequence
  Oligonucleotide for detection of SNP TSC0038658
acactttatacac

SEQ ID NO: 152933 - DNA, 13 bp, Artificial Sequence
  Oligonucleotide for detection of SNP TSC0038658
gtgtatgaagtgt

SEQ ID NO: 152934 - DNA, 13 bp, Artificial Sequence
  Oligonucleotide for detection of SNP TSC0038658
acacttcatacac

SEQ ID NO: 152935 - DNA, 13 bp, Artificial Sequence
  Oligonucleotide for detection of SNP TSC0038658
gtgtacgaagtgt

SEQ ID NO: 152936 - DNA, 13 bp, Artificial Sequence
  Oligonucleotide for detection of SNP TSC0038658
acacttcgtacac

SEQ ID NO: 152937 - DNA, 13 bp, Artificial Sequence
  Oligonucleotide for detection of SNP TSC0038658
atattttgtatay

SEQ ID NO: 152938 - DNA, 13 bp, Artificial Sequence
  Oligonucleotide for detection of SNP TSC0038658
rtatacaaaatat

SEQ ID NO: 152939 - DNA, 13 bp, Artificial Sequence
  Oligonucleotide for detection of SNP TSC0038658
atatttcgtatay

SEQ ID NO: 152940 - DNA, 13 bp, Artificial Sequence
  Oligonucleotide for detection of SNP TSC0038658
rtatacgaaatat

SEQ ID NO: 152941 - DNA, 13 bp, Artificial Sequence
  Oligonucleotide for detection of SNP TSC0038659
agggatagataaa

SEQ ID NO: 152942 - DNA, 13 bp, Artificial Sequence
  Oligonucleotide for detection of SNP TSC0038659
tttatctatccct

SEQ ID NO: 152943 - DNA, 13 bp, Artificial Sequence
  Oligonucleotide for detection of SNP TSC0038659
agggattgataaa

SEQ ID NO: 152944 - DNA, 13 bp, Artificial Sequence
  Oligonucleotide for detection of SNP TSC0038659
tttatcaatccct

SEQ ID NO: 152945 - DNA, 13 bp, Artificial Sequence
  Oligonucleotide for detection of SNP TSC0038659
agggatcgataaa

SEQ ID NO: 152946 - DNA, 13 bp, Artificial Sequence
  Oligonucleotide for detection of SNP TSC0038659
tttatcgatccct

SEQ ID NO: 152947 - DNA, 13 bp, Artificial Sequence
  Oligonucleotide for detection of SNP TSC0038659
tttgtttgttttt

SEQ ID NO: 152948 - DNA, 13 bp, Artificial Sequence
  Oligonucleotide for detection of SNP TSC0038659
aaaaacaaacaaa

SEQ ID NO: 152949 - DNA, 13 bp, Artificial Sequence
  Oligonucleotide for detection of SNP TSC0038659
tttgttggttttt

SEQ ID NO: 152950 - DNA, 13 bp, Artificial Sequence
  Oligonucleotide for detection of SNP TSC0038659
aaaaaccaacaaa

SEQ ID NO: 152951 - DNA, 13 bp, Artificial Sequence
  Oligonucleotide for detection of SNP TSC0038659
tttgtcggttttt

SEQ ID NO: 152952 - DNA, 13 bp, Artificial Sequence
  Oligonucleotide for detection of SNP TSC0038659
aaaaaccgacaaa

SEQ ID NO: 152953 - DNA, 13 bp, Artificial Sequence
  Oligonucleotide for detection of SNP TSC0038661
ttattatgttatg

SEQ ID NO: 152954 - DNA, 13 bp, Artificial Sequence
  Oligonucleotide for detection of SNP TSC0038661
cataacataataa

SEQ ID NO: 152955 - DNA, 13 bp, Artificial Sequence
  Oligonucleotide for detection of SNP TSC0038661
ttattacgttatg

SEQ ID NO: 152956 - DNA, 13 bp, Artificial Sequence
  Oligonucleotide for detection of SNP TSC0038661
cataacgtaataa

SEQ ID NO: 152957 - DNA, 13 bp, Artificial Sequence
  Oligonucleotide for detection of SNP TSC0038661
tatagtgtagtag

SEQ ID NO: 152958 - DNA, 13 bp, Artificial Sequence
  Oligonucleotide for detection of SNP TSC0038661
ctactacactata

SEQ ID NO: 152959 - DNA, 13 bp, Artificial Sequence
  Oligonucleotide for detection of SNP TSC0038661
tatagtatagtag

SEQ ID NO: 152960 - DNA, 13 bp, Artificial Sequence
  Oligonucleotide for detection of SNP TSC0038661
ctactatactata

SEQ ID NO: 152961 - DNA, 13 bp, Artificial Sequence
  Oligonucleotide for detection of SNP TSC0038661
tatagcgtagtag

SEQ ID NO: 152962 - DNA, 13 bp, Artificial Sequence
  Oligonucleotide for detection of SNP TSC0038661
ctactacgctata

SEQ ID NO: 152963 - DNA, 13 bp, Artificial Sequence
  Oligonucleotide for detection of SNP TSC0038664
tatgaatgggttt

SEQ ID NO: 152964 - DNA, 13 bp, Artificial Sequence
  Oligonucleotide for detection of SNP TSC0038664
aaacccattcata

SEQ ID NO: 152965 - DNA, 13 bp, Artificial Sequence
  Oligonucleotide for detection of SNP TSC0038664
tatgaacgggttt

SEQ ID NO: 152966 - DNA, 13 bp, Artificial Sequence
  Oligonucleotide for detection of SNP TSC0038664
aaacccgttcata

SEQ ID NO: 152967 - DNA, 13 bp, Artificial Sequence
  Oligonucleotide for detection of SNP TSC0038664
aagtttgtttata

SEQ ID NO: 152968 - DNA, 13 bp, Artificial Sequence
  Oligonucleotide for detection of SNP TSC0038664
tataaacaaactt

SEQ ID NO: 152969 - DNA, 13 bp, Artificial Sequence
  Oligonucleotide for detection of SNP TSC0038664
aagtttatttata

SEQ ID NO: 152970 - DNA, 13 bp, Artificial Sequence
  Oligonucleotide for detection of SNP TSC0038664
tataaataaactt

SEQ ID NO: 152971 - DNA, 13 bp, Artificial Sequence
  Oligonucleotide for detection of SNP TSC0038664
aagttcgtttata

SEQ ID NO: 152972 - DNA, 13 bp, Artificial Sequence
  Oligonucleotide for detection of SNP TSC0038664
tataaacgaactt

SEQ ID NO: 152973 - DNA, 13 bp, Artificial Sequence
  Oligonucleotide for detection of SNP TSC0038665
ttatgaggatggt

SEQ ID NO: 152974 - DNA, 13 bp, Artificial Sequence
  Oligonucleotide for detection of SNP TSC0038665
accatcctcataa

SEQ ID NO: 152975 - DNA, 13 bp, Artificial Sequence
  Oligonucleotide for detection of SNP TSC0038665
ttatgatgatggt

SEQ ID NO: 152976 - DNA, 13 bp, Artificial Sequence
  Oligonucleotide for detection of SNP TSC0038665
accatcatcataa

SEQ ID NO: 152977 - DNA, 13 bp, Artificial Sequence
  Oligonucleotide for detection of SNP TSC0038665
attatttttatga

SEQ ID NO: 152978 - DNA, 13 bp, Artificial Sequence
  Oligonucleotide for detection of SNP TSC0038665
tcataaaaataat

SEQ ID NO: 152979 - DNA, 13 bp, Artificial Sequence
  Oligonucleotide for detection of SNP TSC0038665
attattattatga

SEQ ID NO: 152980 - DNA, 13 bp, Artificial Sequence
  Oligonucleotide for detection of SNP TSC0038665
tcataataataat

SEQ ID NO: 152981 - DNA, 13 bp, Artificial Sequence
  Oligonucleotide for detection of SNP TSC0038667
aatgtaattttta

SEQ ID NO: 152982 - DNA, 13 bp, Artificial Sequence
  Oligonucleotide for detection of SNP TSC0038667
taaaaattacatt

SEQ ID NO: 152983 - DNA, 13 bp, Artificial Sequence
  Oligonucleotide for detection of SNP TSC0038667
aatgtagttttta

SEQ ID NO: 152984 - DNA, 13 bp, Artificial Sequence
  Oligonucleotide for detection of SNP TSC0038667
taaaaactacatt

SEQ ID NO: 152985 - DNA, 13 bp, Artificial Sequence
  Oligonucleotide for detection of SNP TSC0038668
aatattgataaaa

SEQ ID NO: 152986 - DNA, 13 bp, Artificial Sequence
  Oligonucleotide for detection of SNP TSC0038668
ttttatcaatatt

SEQ ID NO: 152987 - DNA, 13 bp, Artificial Sequence
  Oligonucleotide for detection of SNP TSC0038668
aatatttataaaa

SEQ ID NO: 152988 - DNA, 13 bp, Artificial Sequence
  Oligonucleotide for detection of SNP TSC0038668
ttttataaatatt

SEQ ID NO: 152989 - DNA, 13 bp, Artificial Sequence
  Oligonucleotide for detection of SNP TSC0038668
ttttattaatatt

SEQ ID NO: 152990 - DNA, 13 bp, Artificial Sequence
  Oligonucleotide for detection of SNP TSC0038668
aatattaataaaa

SEQ ID NO: 152991 - DNA, 13 bp, Artificial Sequence
  Oligonucleotide for detection of SNP TSC0038670
tttaaaagatgta

SEQ ID NO: 152992 - DNA, 13 bp, Artificial Sequence
  Oligonucleotide for detection of SNP TSC0038670
tacatcttttaaa

SEQ ID NO: 152993 - DNA, 13 bp, Artificial Sequence
  Oligonucleotide for detection of SNP TSC0038670
tttaaaggatgta

SEQ ID NO: 152994 - DNA, 13 bp, Artificial Sequence
  Oligonucleotide for detection of SNP TSC0038670
tacatcctttaaa

SEQ ID NO: 152995 - DNA, 13 bp, Artificial Sequence
  Oligonucleotide for detection of SNP TSC0038671
gttggggatataa

SEQ ID NO: 152996 - DNA, 13 bp, Artificial Sequence
  Oligonucleotide for detection of SNP TSC0038671
ttatatccccaac

SEQ ID NO: 152997 - DNA, 13 bp, Artificial Sequence
  Oligonucleotide for detection of SNP TSC0038671
gttgggtatataa

SEQ ID NO: 152998 - DNA, 13 bp, Artificial Sequence
  Oligonucleotide for detection of SNP TSC0038671
ttatatacccaac

SEQ ID NO: 152999 - DNA, 13 bp, Artificial Sequence
  Oligonucleotide for detection of SNP TSC0038671
ttatatttttaay

SEQ ID NO: 153000 - DNA, 13 bp, Artificial Sequence
  Oligonucleotide for detection of SNP TSC0038671
rttaaaaatataa

SEQ ID NO: 153001 - DNA, 13 bp, Artificial Sequence
  Oligonucleotide for detection of SNP TSC0038675
taagtagtgggga

SEQ ID NO: 153002 - DNA, 13 bp, Artificial Sequence
  Oligonucleotide for detection of SNP TSC0038675
tccccactactta

SEQ ID NO: 153003 - DNA, 13 bp, Artificial Sequence
  Oligonucleotide for detection of SNP TSC0038675
taagtaatgggga

SEQ ID NO: 153004 - DNA, 13 bp, Artificial Sequence
  Oligonucleotide for detection of SNP TSC0038675
tccccattactta

SEQ ID NO: 153005 - DNA, 13 bp, Artificial Sequence
  Oligonucleotide for detection of SNP TSC0038678
ttaaaatgaagtg

SEQ ID NO: 153006 - DNA, 13 bp, Artificial Sequence
  Oligonucleotide for detection of SNP TSC0038678
cacttcattttaa

SEQ ID NO: 153007 - DNA, 13 bp, Artificial Sequence
  Oligonucleotide for detection of SNP TSC0038678
ttaaaacgaagtg

SEQ ID NO: 153008 - DNA, 13 bp, Artificial Sequence
  Oligonucleotide for detection of SNP TSC0038678
cacttcgttttaa

SEQ ID NO: 153009 - DNA, 13 bp, Artificial Sequence
  Oligonucleotide for detection of SNP TSC0038678
tattttgttttag

SEQ ID NO: 153010 - DNA, 13 bp, Artificial Sequence
  Oligonucleotide for detection of SNP TSC0038678
ctaaaacaaaata

SEQ ID NO: 153011 - DNA, 13 bp, Artificial Sequence
  Oligonucleotide for detection of SNP TSC0038678
tattttattttag

SEQ ID NO: 153012 - DNA, 13 bp, Artificial Sequence
  Oligonucleotide for detection of SNP TSC0038678
ctaaaataaaata

SEQ ID NO: 153013 - DNA, 13 bp, Artificial Sequence
  Oligonucleotide for detection of SNP TSC0038678
tatttcgttttag

SEQ ID NO: 153014 - DNA, 13 bp, Artificial Sequence
  Oligonucleotide for detection of SNP TSC0038678
ctaaaacgaaata

SEQ ID NO: 153015 - DNA, 13 bp, Artificial Sequence
  Oligonucleotide for detection of SNP TSC0038679
aagggagagatgt

SEQ ID NO: 153016 - DNA, 13 bp, Artificial Sequence
  Oligonucleotide for detection of SNP TSC0038679
acatctctccctt

SEQ ID NO: 153017 - DNA, 13 bp, Artificial Sequence
  Oligonucleotide for detection of SNP TSC0038679
aagggaaagatgt

SEQ ID NO: 153018 - DNA, 13 bp, Artificial Sequence
  Oligonucleotide for detection of SNP TSC0038679
acatctttccctt

SEQ ID NO: 153019 - DNA, 13 bp, Artificial Sequence
  Oligonucleotide for detection of SNP TSC0038680
gttagaggtttag

SEQ ID NO: 153020 - DNA, 13 bp, Artificial Sequence
  Oligonucleotide for detection of SNP TSC0038680
ctaaacctctaac

SEQ ID NO: 153021 - DNA, 13 bp, Artificial Sequence
  Oligonucleotide for detection of SNP TSC0038680
gttagatgtttag

SEQ ID NO: 153022 - DNA, 13 bp, Artificial Sequence
  Oligonucleotide for detection of SNP TSC0038680
ctaaacatctaac

SEQ ID NO: 153023 - DNA, 13 bp, Artificial Sequence
  Oligonucleotide for detection of SNP TSC0038680
ttaggtttttggy

SEQ ID NO: 153024 - DNA, 13 bp, Artificial Sequence
  Oligonucleotide for detection of SNP TSC0038680
rccaaaaacctaa

SEQ ID NO: 153025 - DNA, 13 bp, Artificial Sequence
  Oligonucleotide for detection of SNP TSC0038680
ttaggtatttggy

SEQ ID NO: 153026 - DNA, 13 bp, Artificial Sequence
  Oligonucleotide for detection of SNP TSC0038680
rccaaatacctaa

SEQ ID NO: 153027 - DNA, 13 bp, Artificial Sequence
  Oligonucleotide for detection of SNP TSC0038681
tttatttgtatat

SEQ ID NO: 153028 - DNA, 13 bp, Artificial Sequence
  Oligonucleotide for detection of SNP TSC0038681
atatacaaataaa

SEQ ID NO: 153029 - DNA, 13 bp, Artificial Sequence
  Oligonucleotide for detection of SNP TSC0038681
tttattcgtatat

SEQ ID NO: 153030 - DNA, 13 bp, Artificial Sequence
  Oligonucleotide for detection of SNP TSC0038681
atatacgaataaa

SEQ ID NO: 153031 - DNA, 13 bp, Artificial Sequence
  Oligonucleotide for detection of SNP TSC0038681
atgtatggatggg

SEQ ID NO: 153032 - DNA, 13 bp, Artificial Sequence
  Oligonucleotide for detection of SNP TSC0038681
cccatccatacat

SEQ ID NO: 153033 - DNA, 13 bp, Artificial Sequence
  Oligonucleotide for detection of SNP TSC0038681
atgtatagatggg

SEQ ID NO: 153034 - DNA, 13 bp, Artificial Sequence
  Oligonucleotide for detection of SNP TSC0038681
cccatctatacat

SEQ ID NO: 153035 - DNA, 13 bp, Artificial Sequence
  Oligonucleotide for detection of SNP TSC0038681
atgtacggatggg

SEQ ID NO: 153036 - DNA, 13 bp, Artificial Sequence
  Oligonucleotide for detection of SNP TSC0038681
cccatccgtacat

SEQ ID NO: 153037 - DNA, 13 bp, Artificial Sequence
  Oligonucleotide for detection of SNP TSC0038682
aagtggattttta

SEQ ID NO: 153038 - DNA, 13 bp, Artificial Sequence
  Oligonucleotide for detection of SNP TSC0038682
taaaaatccactt

SEQ ID NO: 153039 - DNA, 13 bp, Artificial Sequence
  Oligonucleotide for detection of SNP TSC0038682
aagtggtttttta

SEQ ID NO: 153040 - DNA, 13 bp, Artificial Sequence
  Oligonucleotide for detection of SNP TSC0038682
taaaaaaccactt

SEQ ID NO: 153041 - DNA, 13 bp, Artificial Sequence
  Oligonucleotide for detection of SNP TSC0038682
tggaggtttattt

SEQ ID NO: 153042 - DNA, 13 bp, Artificial Sequence
  Oligonucleotide for detection of SNP TSC0038682
aaataaacctcca

SEQ ID NO: 153043 - DNA, 13 bp, Artificial Sequence
  Oligonucleotide for detection of SNP TSC0038682
tggaggattattt

SEQ ID NO: 153044 - DNA, 13 bp, Artificial Sequence
  Oligonucleotide for detection of SNP TSC0038682
aaataatcctcca

SEQ ID NO: 153045 - DNA, 13 bp, Artificial Sequence
  Oligonucleotide for detection of SNP TSC0038683
attttaacgtggg

SEQ ID NO: 153046 - DNA, 13 bp, Artificial Sequence
  Oligonucleotide for detection of SNP TSC0038683
cccacgttaaaat

SEQ ID NO: 153047 - DNA, 13 bp, Artificial Sequence
  Oligonucleotide for detection of SNP TSC0038683
attttagcgtggg

SEQ ID NO: 153048 - DNA, 13 bp, Artificial Sequence
  Oligonucleotide for detection of SNP TSC0038683
cccacgctaaaat

SEQ ID NO: 153049 - DNA, 13 bp, Artificial Sequence
  Oligonucleotide for detection of SNP TSC0038684
tatgttggagtgy

SEQ ID NO: 153050 - DNA, 13 bp, Artificial Sequence
  Oligonucleotide for detection of SNP TSC0038684
rcactccaacata

SEQ ID NO: 153051 - DNA, 13 bp, Artificial Sequence
  Oligonucleotide for detection of SNP TSC0038684
tatgttagagtgy

SEQ ID NO: 153052 - DNA, 13 bp, Artificial Sequence
  Oligonucleotide for detection of SNP TSC0038684
rcactctaacata

SEQ ID NO: 153053 - DNA, 13 bp, Artificial Sequence
  Oligonucleotide for detection of SNP TSC0038685
tattataatgtaa

SEQ ID NO: 153054 - DNA, 13 bp, Artificial Sequence
  Oligonucleotide for detection of SNP TSC0038685
ttacattataata

SEQ ID NO: 153055 - DNA, 13 bp, Artificial Sequence
  Oligonucleotide for detection of SNP TSC0038685
tattattatgtaa

SEQ ID NO: 153056 - DNA, 13 bp, Artificial Sequence
  Oligonucleotide for detection of SNP TSC0038685
ttacataataata

SEQ ID NO: 153057 - DNA, 13 bp, Artificial Sequence
  Oligonucleotide for detection of SNP TSC0038685
ttatattgtagta

SEQ ID NO: 153058 - DNA, 13 bp, Artificial Sequence
  Oligonucleotide for detection of SNP TSC0038685
tactacaatataa

SEQ ID NO: 153059 - DNA, 13 bp, Artificial Sequence
  Oligonucleotide for detection of SNP TSC0038685
ttatatggtagta

SEQ ID NO: 153060 - DNA, 13 bp, Artificial Sequence
  Oligonucleotide for detection of SNP TSC0038685
tactaccatataa

SEQ ID NO: 153061 - DNA, 13 bp, Artificial Sequence
  Oligonucleotide for detection of SNP TSC0038688
gaaagataaaaag

SEQ ID NO: 153062 - DNA, 13 bp, Artificial Sequence
  Oligonucleotide for detection of SNP TSC0038688
ctttttatctttc

SEQ ID NO: 153063 - DNA, 13 bp, Artificial Sequence
  Oligonucleotide for detection of SNP TSC0038688
gaaagagaaaaag

SEQ ID NO: 153064 - DNA, 13 bp, Artificial Sequence
  Oligonucleotide for detection of SNP TSC0038688
ctttttctctttc

SEQ ID NO: 153065 - DNA, 13 bp, Artificial Sequence
  Oligonucleotide for detection of SNP TSC0038689
ttttagtgaggtt

SEQ ID NO: 153066 - DNA, 13 bp, Artificial Sequence
  Oligonucleotide for detection of SNP TSC0038689
aacctcactaaaa

SEQ ID NO: 153067 - DNA, 13 bp, Artificial Sequence
  Oligonucleotide for detection of SNP TSC0038689
ttttagcgaggtt

SEQ ID NO: 153068 - DNA, 13 bp, Artificial Sequence
  Oligonucleotide for detection of SNP TSC0038689
aacctcgctaaaa

SEQ ID NO: 153069 - DNA, 13 bp, Artificial Sequence
  Oligonucleotide for detection of SNP TSC0038689
aattttgttgggg

SEQ ID NO: 153070 - DNA, 13 bp, Artificial Sequence
  Oligonucleotide for detection of SNP TSC0038689
ccccaacaaaatt

SEQ ID NO: 153071 - DNA, 13 bp, Artificial Sequence
  Oligonucleotide for detection of SNP TSC0038689
aattttattgggg

SEQ ID NO: 153072 - DNA, 13 bp, Artificial Sequence
  Oligonucleotide for detection of SNP TSC0038689
ccccaataaaatt

SEQ ID NO: 153073 - DNA, 13 bp, Artificial Sequence
  Oligonucleotide for detection of SNP TSC0038689
aatttcgttgggg

SEQ ID NO: 153074 - DNA, 13 bp, Artificial Sequence
  Oligonucleotide for detection of SNP TSC0038689
ccccaacgaaatt

SEQ ID NO: 153075 - DNA, 13 bp, Artificial Sequence
  Oligonucleotide for detection of SNP TSC0038690
tattgtatattty

SEQ ID NO: 153076 - DNA, 13 bp, Artificial Sequence
  Oligonucleotide for detection of SNP TSC0038690
raaatatacaata

SEQ ID NO: 153077 - DNA, 13 bp, Artificial Sequence
  Oligonucleotide for detection of SNP TSC0038690
tattgtttattty

SEQ ID NO: 153078 - DNA, 13 bp, Artificial Sequence
  Oligonucleotide for detection of SNP TSC0038690
raaataaacaata

SEQ ID NO: 153079 - DNA, 13 bp, Artificial Sequence
  Oligonucleotide for detection of SNP TSC0038690
gaaatatataata

SEQ ID NO: 153080 - DNA, 13 bp, Artificial Sequence
  Oligonucleotide for detection of SNP TSC0038690
tattatatatttc

SEQ ID NO: 153081 - DNA, 13 bp, Artificial Sequence
  Oligonucleotide for detection of SNP TSC0038690
gaaataaataata

SEQ ID NO: 153082 - DNA, 13 bp, Artificial Sequence
  Oligonucleotide for detection of SNP TSC0038690
tattatttatttc

SEQ ID NO: 153083 - DNA, 13 bp, Artificial Sequence
  Oligonucleotide for detection of SNP TSC0038691
tttattattaaty

SEQ ID NO: 153084 - DNA, 13 bp, Artificial Sequence
  Oligonucleotide for detection of SNP TSC0038691
rattaataataaa

SEQ ID NO: 153085 - DNA, 13 bp, Artificial Sequence
  Oligonucleotide for detection of SNP TSC0038691
tttattgttaaty

SEQ ID NO: 153086 - DNA, 13 bp, Artificial Sequence
  Oligonucleotide for detection of SNP TSC0038691
rattaacaataaa

SEQ ID NO: 153087 - DNA, 13 bp, Artificial Sequence
  Oligonucleotide for detection of SNP TSC0038691
tttatcgttaaty

SEQ ID NO: 153088 - DNA, 13 bp, Artificial Sequence
  Oligonucleotide for detection of SNP TSC0038691
rattaacgataaa

SEQ ID NO: 153089 - DNA, 13 bp, Artificial Sequence
  Oligonucleotide for detection of SNP TSC0038691
ggttaatggtaga

SEQ ID NO: 153090 - DNA, 13 bp, Artificial Sequence
  Oligonucleotide for detection of SNP TSC0038691
tctaccattaacc

SEQ ID NO: 153091 - DNA, 13 bp, Artificial Sequence
  Oligonucleotide for detection of SNP TSC0038691
ggttaacggtaga

SEQ ID NO: 153092 - DNA, 13 bp, Artificial Sequence
  Oligonucleotide for detection of SNP TSC0038691
tctaccgttaacc

SEQ ID NO: 153093 - DNA, 13 bp, Artificial Sequence
  Oligonucleotide for detection of SNP TSC0038692
ggttttgatgtty

SEQ ID NO: 153094 - DNA, 13 bp, Artificial Sequence
  Oligonucleotide for detection of SNP TSC0038692
raacatcaaaacc

SEQ ID NO: 153095 - DNA, 13 bp, Artificial Sequence
  Oligonucleotide for detection of SNP TSC0038692
ggtttttatgtty

SEQ ID NO: 153096 - DNA, 13 bp, Artificial Sequence
  Oligonucleotide for detection of SNP TSC0038692
raacataaaaacc

SEQ ID NO: 153097 - DNA, 13 bp, Artificial Sequence
  Oligonucleotide for detection of SNP TSC0038692
ggatattaagaty

SEQ ID NO: 153098 - DNA, 13 bp, Artificial Sequence
  Oligonucleotide for detection of SNP TSC0038692
ratcttaatatcc

SEQ ID NO: 153099 - DNA, 13 bp, Artificial Sequence
  Oligonucleotide for detection of SNP TSC0038692
ggatataaagaty

SEQ ID NO: 153100 - DNA, 13 bp, Artificial Sequence
  Oligonucleotide for detection of SNP TSC0038692
ratctttatatcc

SEQ ID NO: 153101 - DNA, 13 bp, Artificial Sequence
  Oligonucleotide for detection of SNP TSC0038693
gagttggtttata

SEQ ID NO: 153102 - DNA, 13 bp, Artificial Sequence
  Oligonucleotide for detection of SNP TSC0038693
tataaaccaactc

SEQ ID NO: 153103 - DNA, 13 bp, Artificial Sequence
  Oligonucleotide for detection of SNP TSC0038693
gagttgttttata

SEQ ID NO: 153104 - DNA, 13 bp, Artificial Sequence
  Oligonucleotide for detection of SNP TSC0038693
tataaaacaactc

SEQ ID NO: 153105 - DNA, 13 bp, Artificial Sequence
  Oligonucleotide for detection of SNP TSC0038693
tgtgaattaatty

SEQ ID NO: 153106 - DNA, 13 bp, Artificial Sequence
  Oligonucleotide for detection of SNP TSC0038693
raattaattcaca

SEQ ID NO: 153107 - DNA, 13 bp, Artificial Sequence
  Oligonucleotide for detection of SNP TSC0038693
tgtgaaataatty

SEQ ID NO: 153108 - DNA, 13 bp, Artificial Sequence
  Oligonucleotide for detection of SNP TSC0038693
raattatttcaca

SEQ ID NO: 153109 - DNA, 13 bp, Artificial Sequence
  Oligonucleotide for detection of SNP TSC0038694
aaagggagtggag

SEQ ID NO: 153110 - DNA, 13 bp, Artificial Sequence
  Oligonucleotide for detection of SNP TSC0038694
ctccactcccttt

SEQ ID NO: 153111 - DNA, 13 bp, Artificial Sequence
  Oligonucleotide for detection of SNP TSC0038694
aaagggggtggag

SEQ ID NO: 153112 - DNA, 13 bp, Artificial Sequence
  Oligonucleotide for detection of SNP TSC0038694
ctccacccccttt

SEQ ID NO: 153113 - DNA, 13 bp, Artificial Sequence
  Oligonucleotide for detection of SNP TSC0038695
taggagatgtgag

SEQ ID NO: 153114 - DNA, 13 bp, Artificial Sequence
  Oligonucleotide for detection of SNP TSC0038695
ctcacatctccta

SEQ ID NO: 153115 - DNA, 13 bp, Artificial Sequence
  Oligonucleotide for detection of SNP TSC0038695
taggaggtgtgag

SEQ ID NO: 153116 - DNA, 13 bp, Artificial Sequence
  Oligonucleotide for detection of SNP TSC0038695
ctcacacctccta

SEQ ID NO: 153117 - DNA, 13 bp, Artificial Sequence
  Oligonucleotide for detection of SNP TSC0038698
taaaatgtattty

SEQ ID NO: 153118 - DNA, 13 bp, Artificial Sequence
  Oligonucleotide for detection of SNP TSC0038698
raaatacatttta

SEQ ID NO: 153119 - DNA, 13 bp, Artificial Sequence
  Oligonucleotide for detection of SNP TSC0038698
taaaatatattty

SEQ ID NO: 153120 - DNA, 13 bp, Artificial Sequence
  Oligonucleotide for detection of SNP TSC0038698
raaatatatttta

SEQ ID NO: 153121 - DNA, 13 bp, Artificial Sequence
  Oligonucleotide for detection of SNP TSC0038699
tgtggtagtgggy

SEQ ID NO: 153122 - DNA, 13 bp, Artificial Sequence
  Oligonucleotide for detection of SNP TSC0038699
rcccactaccaca

SEQ ID NO: 153123 - DNA, 13 bp, Artificial Sequence
  Oligonucleotide for detection of SNP TSC0038699
cgtggtagtgggy

SEQ ID NO: 153124 - DNA, 13 bp, Artificial Sequence
  Oligonucleotide for detection of SNP TSC0038699
rcccactaccacg

SEQ ID NO: 153125 - DNA, 13 bp, Artificial Sequence
  Oligonucleotide for detection of SNP TSC0038699
cgtggtggtgggy

SEQ ID NO: 153126 - DNA, 13 bp, Artificial Sequence
  Oligonucleotide for detection of SNP TSC0038699
rcccaccaccacg

SEQ ID NO: 153127 - DNA, 13 bp, Artificial Sequence
  Oligonucleotide for detection of SNP TSC0038699
tgtggtagcgggy

SEQ ID NO: 153128 - DNA, 13 bp, Artificial Sequence
  Oligonucleotide for detection of SNP TSC0038699
rcccgctaccaca

SEQ ID NO: 153129 - DNA, 13 bp, Artificial Sequence
  Oligonucleotide for detection of SNP TSC0038699
tgtggtggcgggy

SEQ ID NO: 153130 - DNA, 13 bp, Artificial Sequence
  Oligonucleotide for detection of SNP TSC0038699
rcccgccaccaca

SEQ ID NO: 153131 - DNA, 13 bp, Artificial Sequence
  Oligonucleotide for detection of SNP TSC0038699
cgtggtagcgggy

SEQ ID NO: 153132 - DNA, 13 bp, Artificial Sequence
  Oligonucleotide for detection of SNP TSC0038699
rcccgctaccacg

SEQ ID NO: 153133 - DNA, 13 bp, Artificial Sequence
  Oligonucleotide for detection of SNP TSC0038699
cgtggtggcgggy

SEQ ID NO: 153134 - DNA, 13 bp, Artificial Sequence
  Oligonucleotide for detection of SNP TSC0038699
rcccgccaccacg

SEQ ID NO: 153135 - DNA, 13 bp, Artificial Sequence
  Oligonucleotide for detection of SNP TSC0038700
tttagatgtttta

SEQ ID NO: 153136 - DNA, 13 bp, Artificial Sequence
  Oligonucleotide for detection of SNP TSC0038700
taaaacatctaaa

SEQ ID NO: 153137 - DNA, 13 bp, Artificial Sequence
  Oligonucleotide for detection of SNP TSC0038700
tgggatttttggg

SEQ ID NO: 153138 - DNA, 13 bp, Artificial Sequence
  Oligonucleotide for detection of SNP TSC0038700
cccaaaaatccca

SEQ ID NO: 153139 - DNA, 13 bp, Artificial Sequence
  Oligonucleotide for detection of SNP TSC0038700
tgggatatttggg

SEQ ID NO: 153140 - DNA, 13 bp, Artificial Sequence
  Oligonucleotide for detection of SNP TSC0038700
cccaaatatccca

SEQ ID NO: 153141 - DNA, 13 bp, Artificial Sequence
  Oligonucleotide for detection of SNP TSC0038702
ggaaatgttaaga

SEQ ID NO: 153142 - DNA, 13 bp, Artificial Sequence
  Oligonucleotide for detection of SNP TSC0038702
tcttaacatttcc

SEQ ID NO: 153143 - DNA, 13 bp, Artificial Sequence
  Oligonucleotide for detection of SNP TSC0038702
ggaaatattaaga

SEQ ID NO: 153144 - DNA, 13 bp, Artificial Sequence
  Oligonucleotide for detection of SNP TSC0038702
tcttaatatttcc

SEQ ID NO: 153145 - DNA, 13 bp, Artificial Sequence
  Oligonucleotide for detection of SNP TSC0038703
tatgaagtagttg

SEQ ID NO: 153146 - DNA, 13 bp, Artificial Sequence
  Oligonucleotide for detection of SNP TSC0038703
caactacttcata

SEQ ID NO: 153147 - DNA, 13 bp, Artificial Sequence
  Oligonucleotide for detection of SNP TSC0038703
tatgaaatagttg

SEQ ID NO: 153148 - DNA, 13 bp, Artificial Sequence
  Oligonucleotide for detection of SNP TSC0038703
caactatttcata

SEQ ID NO: 153149 - DNA, 13 bp, Artificial Sequence
  Oligonucleotide for detection of SNP TSC0038705
tattttatagtgt

SEQ ID NO: 153150 - DNA, 13 bp, Artificial Sequence
  Oligonucleotide for detection of SNP TSC0038705
acactataaaata

SEQ ID NO: 153151 - DNA, 13 bp, Artificial Sequence
  Oligonucleotide for detection of SNP TSC0038705
tattttttagtgt

SEQ ID NO: 153152 - DNA, 13 bp, Artificial Sequence
  Oligonucleotide for detection of SNP TSC0038705
acactaaaaaata

SEQ ID NO: 153153 - DNA, 13 bp, Artificial Sequence
  Oligonucleotide for detection of SNP TSC0038705
atattgtaaagtg

SEQ ID NO: 153154 - DNA, 13 bp, Artificial Sequence
  Oligonucleotide for detection of SNP TSC0038705
cactttacaatat

SEQ ID NO: 153155 - DNA, 13 bp, Artificial Sequence
  Oligonucleotide for detection of SNP TSC0038705
atattggaaagtg

SEQ ID NO: 153156 - DNA, 13 bp, Artificial Sequence
  Oligonucleotide for detection of SNP TSC0038705
cactttccaatat

SEQ ID NO: 153157 - DNA, 13 bp, Artificial Sequence
  Oligonucleotide for detection of SNP TSC0038707
aaatgttggtagt

SEQ ID NO: 153158 - DNA, 13 bp, Artificial Sequence
  Oligonucleotide for detection of SNP TSC0038707
actaccaacattt

SEQ ID NO: 153159 - DNA, 13 bp, Artificial Sequence
  Oligonucleotide for detection of SNP TSC0038707
aaatgtgggtagt

SEQ ID NO: 153160 - DNA, 13 bp, Artificial Sequence
  Oligonucleotide for detection of SNP TSC0038707
actacccacattt

SEQ ID NO: 153161 - DNA, 13 bp, Artificial Sequence
  Oligonucleotide for detection of SNP TSC0038707
aaatgtcggtagt

SEQ ID NO: 153162 - DNA, 13 bp, Artificial Sequence
  Oligonucleotide for detection of SNP TSC0038707
actaccgacattt

SEQ ID NO: 153163 - DNA, 13 bp, Artificial Sequence
  Oligonucleotide for detection of SNP TSC0038707
aaatgcgggtagt

SEQ ID NO: 153164 - DNA, 13 bp, Artificial Sequence
  Oligonucleotide for detection of SNP TSC0038707
actacccgcattt

SEQ ID NO: 153165 - DNA, 13 bp, Artificial Sequence
  Oligonucleotide for detection of SNP TSC0038707
attgttggtattt

SEQ ID NO: 153166 - DNA, 13 bp, Artificial Sequence
  Oligonucleotide for detection of SNP TSC0038707
aaataccaacaat

SEQ ID NO: 153167 - DNA, 13 bp, Artificial Sequence
  Oligonucleotide for detection of SNP TSC0038707
attgtttgtattt

SEQ ID NO: 153168 - DNA, 13 bp, Artificial Sequence
  Oligonucleotide for detection of SNP TSC0038707
aaatacaaacaat

SEQ ID NO: 153169 - DNA, 13 bp, Artificial Sequence
  Oligonucleotide for detection of SNP TSC0038707
attgtcggtattt

SEQ ID NO: 153170 - DNA, 13 bp, Artificial Sequence
  Oligonucleotide for detection of SNP TSC0038707
aaataccgacaat

SEQ ID NO: 153171 - DNA, 13 bp, Artificial Sequence
  Oligonucleotide for detection of SNP TSC0038707
attgttcgtattt

SEQ ID NO: 153172 - DNA, 13 bp, Artificial Sequence
  Oligonucleotide for detection of SNP TSC0038707
aaatacgaacaat

SEQ ID NO: 153173 - DNA, 13 bp, Artificial Sequence
  Oligonucleotide for detection of SNP TSC0038708
tgggtatttgaty

SEQ ID NO: 153174 - DNA, 13 bp, Artificial Sequence
  Oligonucleotide for detection of SNP TSC0038708
ratcaaataccca

SEQ ID NO: 153175 - DNA, 13 bp, Artificial Sequence
  Oligonucleotide for detection of SNP TSC0038708
tgggtagttgaty

SEQ ID NO: 153176 - DNA, 13 bp, Artificial Sequence
  Oligonucleotide for detection of SNP TSC0038708
ratcaactaccca

SEQ ID NO: 153177 - DNA, 13 bp, Artificial Sequence
  Oligonucleotide for detection of SNP TSC0038708
gattaagtattta

SEQ ID NO: 153178 - DNA, 13 bp, Artificial Sequence
  Oligonucleotide for detection of SNP TSC0038708
taaatacttaatc

SEQ ID NO: 153179 - DNA, 13 bp, Artificial Sequence
  Oligonucleotide for detection of SNP TSC0038708
gattaattattta

SEQ ID NO: 153180 - DNA, 13 bp, Artificial Sequence
  Oligonucleotide for detection of SNP TSC0038708
taaataattaatc

SEQ ID NO: 153181 - DNA, 13 bp, Artificial Sequence
  Oligonucleotide for detection of SNP TSC0038711
tatagtaatattt

SEQ ID NO: 153182 - DNA, 13 bp, Artificial Sequence
  Oligonucleotide for detection of SNP TSC0038711
aaatattactata

SEQ ID NO: 153183 - DNA, 13 bp, Artificial Sequence
  Oligonucleotide for detection of SNP TSC0038711
tatagtgatattt

SEQ ID NO: 153184 - DNA, 13 bp, Artificial Sequence
  Oligonucleotide for detection of SNP TSC0038711
aaatatcactata

SEQ ID NO: 153185 - DNA, 13 bp, Artificial Sequence
  Oligonucleotide for detection of SNP TSC0038711
tatagcgatattt

SEQ ID NO: 153186 - DNA, 13 bp, Artificial Sequence
  Oligonucleotide for detection of SNP TSC0038711
aaatatcgctata

SEQ ID NO: 153187 - DNA, 13 bp, Artificial Sequence
  Oligonucleotide for detection of SNP TSC0038711
aagtattgttata

SEQ ID NO: 153188 - DNA, 13 bp, Artificial Sequence
  Oligonucleotide for detection of SNP TSC0038711
tataacaatactt

SEQ ID NO: 153189 - DNA, 13 bp, Artificial Sequence
  Oligonucleotide for detection of SNP TSC0038711
aagtatcgttata

SEQ ID NO: 153190 - DNA, 13 bp, Artificial Sequence
  Oligonucleotide for detection of SNP TSC0038711
tataacgatactt

SEQ ID NO: 153191 - DNA, 13 bp, Artificial Sequence
  Oligonucleotide for detection of SNP TSC0038712
taaaggaaaagaa

SEQ ID NO: 153192 - DNA, 13 bp, Artificial Sequence
  Oligonucleotide for detection of SNP TSC0038712
ttcttttccttta

SEQ ID NO: 153193 - DNA, 13 bp, Artificial Sequence
  Oligonucleotide for detection of SNP TSC0038712
taaagggaaagaa

SEQ ID NO: 153194 - DNA, 13 bp, Artificial Sequence
  Oligonucleotide for detection of SNP TSC0038712
ttctttcccttta

SEQ ID NO: 153195 - DNA, 13 bp, Artificial Sequence
  Oligonucleotide for detection of SNP TSC0038713
attttatgataga

SEQ ID NO: 153196 - DNA, 13 bp, Artificial Sequence
  Oligonucleotide for detection of SNP TSC0038713
tctatcataaaat

SEQ ID NO: 153197 - DNA, 13 bp, Artificial Sequence
  Oligonucleotide for detection of SNP TSC0038713
attttacgataga

SEQ ID NO: 153198 - DNA, 13 bp, Artificial Sequence
  Oligonucleotide for detection of SNP TSC0038713
tctatcgtaaaat

SEQ ID NO: 153199 - DNA, 13 bp, Artificial Sequence
  Oligonucleotide for detection of SNP TSC0038713
tttgttgtgaaat

SEQ ID NO: 153200 - DNA, 13 bp, Artificial Sequence
  Oligonucleotide for detection of SNP TSC0038713
atttcacaacaaa

SEQ ID NO: 153201 - DNA, 13 bp, Artificial Sequence
  Oligonucleotide for detection of SNP TSC0038713
tttgttatgaaat

SEQ ID NO: 153202 - DNA, 13 bp, Artificial Sequence
  Oligonucleotide for detection of SNP TSC0038713
atttcataacaaa

SEQ ID NO: 153203 - DNA, 13 bp, Artificial Sequence
  Oligonucleotide for detection of SNP TSC0038713
tttgtcgtgaaat

SEQ ID NO: 153204 - DNA, 13 bp, Artificial Sequence
  Oligonucleotide for detection of SNP TSC0038713
atttcacgacaaa

SEQ ID NO: 153205 - DNA, 13 bp, Artificial Sequence
  Oligonucleotide for detection of SNP TSC0038719
gttatagttttta

SEQ ID NO: 153206 - DNA, 13 bp, Artificial Sequence
  Oligonucleotide for detection of SNP TSC0038719
taaaaactataac

SEQ ID NO: 153207 - DNA, 13 bp, Artificial Sequence
  Oligonucleotide for detection of SNP TSC0038719
gttataattttta

SEQ ID NO: 153208 - DNA, 13 bp, Artificial Sequence
  Oligonucleotide for detection of SNP TSC0038719
taaaaattataac

SEQ ID NO: 153209 - DNA, 13 bp, Artificial Sequence
  Oligonucleotide for detection of SNP TSC0038730
agtatagtaagty

SEQ ID NO: 153210 - DNA, 13 bp, Artificial Sequence
  Oligonucleotide for detection of SNP TSC0038730
racttactatact

SEQ ID NO: 153211 - DNA, 13 bp, Artificial Sequence
  Oligonucleotide for detection of SNP TSC0038730
agtataataagty

SEQ ID NO: 153212 - DNA, 13 bp, Artificial Sequence
  Oligonucleotide for detection of SNP TSC0038730
racttattatact

SEQ ID NO: 153213 - DNA, 13 bp, Artificial Sequence
  Oligonucleotide for detection of SNP TSC0038731
tttattgttagtg

SEQ ID NO: 153214 - DNA, 13 bp, Artificial Sequence
  Oligonucleotide for detection of SNP TSC0038731
cactaacaataaa

SEQ ID NO: 153215 - DNA, 13 bp, Artificial Sequence
  Oligonucleotide for detection of SNP TSC0038731
tttattattagtg

SEQ ID NO: 153216 - DNA, 13 bp, Artificial Sequence
  Oligonucleotide for detection of SNP TSC0038731
cactaataataaa

SEQ ID NO: 153217 - DNA, 13 bp, Artificial Sequence
  Oligonucleotide for detection of SNP TSC0038733
tgtattaattttt

SEQ ID NO: 153218 - DNA, 13 bp, Artificial Sequence
  Oligonucleotide for detection of SNP TSC0038733
aaaaattaataca

SEQ ID NO: 153219 - DNA, 13 bp, Artificial Sequence
  Oligonucleotide for detection of SNP TSC0038733
tgtattgattttt

SEQ ID NO: 153220 - DNA, 13 bp, Artificial Sequence
  Oligonucleotide for detection of SNP TSC0038733
aaaaatcaataca

SEQ ID NO: 153221 - DNA, 13 bp, Artificial Sequence
  Oligonucleotide for detection of SNP TSC0038738
ggttagatattga

SEQ ID NO: 153222 - DNA, 13 bp, Artificial Sequence
  Oligonucleotide for detection of SNP TSC0038738
tcaatatctaacc

SEQ ID NO: 153223 - DNA, 13 bp, Artificial Sequence
  Oligonucleotide for detection of SNP TSC0038738
ggttaggtattga

SEQ ID NO: 153224 - DNA, 13 bp, Artificial Sequence
  Oligonucleotide for detection of SNP TSC0038738
tcaatacctaacc

SEQ ID NO: 153225 - DNA, 13 bp, Artificial Sequence
  Oligonucleotide for detection of SNP TSC0038742
ttaagaggatggy

SEQ ID NO: 153226 - DNA, 13 bp, Artificial Sequence
  Oligonucleotide for detection of SNP TSC0038742
rccatcctcttaa

SEQ ID NO: 153227 - DNA, 13 bp, Artificial Sequence
  Oligonucleotide for detection of SNP TSC0038742
ttaagaagatggy

SEQ ID NO: 153228 - DNA, 13 bp, Artificial Sequence
  Oligonucleotide for detection of SNP TSC0038742
rccatcttcttaa

SEQ ID NO: 153229 - DNA, 13 bp, Artificial Sequence
  Oligonucleotide for detection of SNP TSC0038742
ttaagaggacggy

SEQ ID NO: 153230 - DNA, 13 bp, Artificial Sequence
  Oligonucleotide for detection of SNP TSC0038742
rccgtcctcttaa

SEQ ID NO: 153231 - DNA, 13 bp, Artificial Sequence
  Oligonucleotide for detection of SNP TSC0038742
ttaagaagacggy

SEQ ID NO: 153232 - DNA, 13 bp, Artificial Sequence
  Oligonucleotide for detection of SNP TSC0038742
rccgtcttcttaa

SEQ ID NO: 153233 - DNA, 13 bp, Artificial Sequence
  Oligonucleotide for detection of SNP TSC0038744
gtgtgtatttggy

SEQ ID NO: 153234 - DNA, 13 bp, Artificial Sequence
  Oligonucleotide for detection of SNP TSC0038744
rccaaatacacac

SEQ ID NO: 153235 - DNA, 13 bp, Artificial Sequence
  Oligonucleotide for detection of SNP TSC0038744
gtgtgtgtttggy

SEQ ID NO: 153236 - DNA, 13 bp, Artificial Sequence
  Oligonucleotide for detection of SNP TSC0038744
rccaaacacacac

SEQ ID NO: 153237 - DNA, 13 bp, Artificial Sequence
  Oligonucleotide for detection of SNP TSC0038744
gcgtgtatttggy

SEQ ID NO: 153238 - DNA, 13 bp, Artificial Sequence
  Oligonucleotide for detection of SNP TSC0038744
rccaaatacacgc

SEQ ID NO: 153239 - DNA, 13 bp, Artificial Sequence
  Oligonucleotide for detection of SNP TSC0038744
gcgtgtgtttggy

SEQ ID NO: 153240 - DNA, 13 bp, Artificial Sequence
  Oligonucleotide for detection of SNP TSC0038744
rccaaacacacgc

SEQ ID NO: 153241 - DNA, 13 bp, Artificial Sequence
  Oligonucleotide for detection of SNP TSC0038744
gtgtgcgtttggy

SEQ ID NO: 153242 - DNA, 13 bp, Artificial Sequence
  Oligonucleotide for detection of SNP TSC0038744
rccaaacgcacac

SEQ ID NO: 153243 - DNA, 13 bp, Artificial Sequence
  Oligonucleotide for detection of SNP TSC0038744
gcgtgcgtttggy

SEQ ID NO: 153244 - DNA, 13 bp, Artificial Sequence
  Oligonucleotide for detection of SNP TSC0038744
rccaaacgcacgc

SEQ ID NO: 153245 - DNA, 13 bp, Artificial Sequence
  Oligonucleotide for detection of SNP TSC0038744
gttaggtgtatgy

SEQ ID NO: 153246 - DNA, 13 bp, Artificial Sequence
  Oligonucleotide for detection of SNP TSC0038744
rcatacacctaac

SEQ ID NO: 153247 - DNA, 13 bp, Artificial Sequence
  Oligonucleotide for detection of SNP TSC0038744
gttaggtgtacgy

SEQ ID NO: 153248 - DNA, 13 bp, Artificial Sequence
  Oligonucleotide for detection of SNP TSC0038744
rcgtacacctaac

SEQ ID NO: 153249 - DNA, 13 bp, Artificial Sequence
  Oligonucleotide for detection of SNP TSC0038744
gttaggcgtatgy

SEQ ID NO: 153250 - DNA, 13 bp, Artificial Sequence
  Oligonucleotide for detection of SNP TSC0038744
rcatacgcctaac

SEQ ID NO: 153251 - DNA, 13 bp, Artificial Sequence
  Oligonucleotide for detection of SNP TSC0038744
gttaggcgtacgy

SEQ ID NO: 153252 - DNA, 13 bp, Artificial Sequence
  Oligonucleotide for detection of SNP TSC0038744
rcgtacgcctaac

SEQ ID NO: 153253 - DNA, 13 bp, Artificial Sequence
  Oligonucleotide for detection of SNP TSC0038745
attgttgttttta

SEQ ID NO: 153254 - DNA, 13 bp, Artificial Sequence
  Oligonucleotide for detection of SNP TSC0038745
taaaaacaacaat

SEQ ID NO: 153255 - DNA, 13 bp, Artificial Sequence
  Oligonucleotide for detection of SNP TSC0038745
attgtttttttta

SEQ ID NO: 153256 - DNA, 13 bp, Artificial Sequence
  Oligonucleotide for detection of SNP TSC0038745
taaaaaaaacaat

SEQ ID NO: 153257 - DNA, 13 bp, Artificial Sequence
  Oligonucleotide for detection of SNP TSC0038745
tgaaagtaataat

SEQ ID NO: 153258 - DNA, 13 bp, Artificial Sequence
  Oligonucleotide for detection of SNP TSC0038745
attattactttca

SEQ ID NO: 153259 - DNA, 13 bp, Artificial Sequence
  Oligonucleotide for detection of SNP TSC0038745
tgaaagaaataat

SEQ ID NO: 153260 - DNA, 13 bp, Artificial Sequence
  Oligonucleotide for detection of SNP TSC0038745
attatttctttca

SEQ ID NO: 153261 - DNA, 13 bp, Artificial Sequence
  Oligonucleotide for detection of SNP TSC0038747
agatttatggtat

SEQ ID NO: 153262 - DNA, 13 bp, Artificial Sequence
  Oligonucleotide for detection of SNP TSC0038747
ataccataaatct

SEQ ID NO: 153263 - DNA, 13 bp, Artificial Sequence
  Oligonucleotide for detection of SNP TSC0038747
agatttgtggtat

SEQ ID NO: 153264 - DNA, 13 bp, Artificial Sequence
  Oligonucleotide for detection of SNP TSC0038747
ataccacaaatct

SEQ ID NO: 153265 - DNA, 13 bp, Artificial Sequence
  Oligonucleotide for detection of SNP TSC0038752
ttagttatagaat

SEQ ID NO: 153266 - DNA, 13 bp, Artificial Sequence
  Oligonucleotide for detection of SNP TSC0038752
attctataactaa

SEQ ID NO: 153267 - DNA, 13 bp, Artificial Sequence
  Oligonucleotide for detection of SNP TSC0038752
ttagttgtagaat

SEQ ID NO: 153268 - DNA, 13 bp, Artificial Sequence
  Oligonucleotide for detection of SNP TSC0038752
attctacaactaa

SEQ ID NO: 153269 - DNA, 13 bp, Artificial Sequence
  Oligonucleotide for detection of SNP TSC0038754
tgtttaattattt

SEQ ID NO: 153270 - DNA, 13 bp, Artificial Sequence
  Oligonucleotide for detection of SNP TSC0038754
aaataattaaaca

SEQ ID NO: 153271 - DNA, 13 bp, Artificial Sequence
  Oligonucleotide for detection of SNP TSC0038754
tgtttatttattt

SEQ ID NO: 153272 - DNA, 13 bp, Artificial Sequence
  Oligonucleotide for detection of SNP TSC0038754
aaataaataaaca

SEQ ID NO: 153273 - DNA, 13 bp, Artificial Sequence
  Oligonucleotide for detection of SNP TSC0038754
agatgattaaata

SEQ ID NO: 153274 - DNA, 13 bp, Artificial Sequence
  Oligonucleotide for detection of SNP TSC0038754
tatttaatcatct

SEQ ID NO: 153275 - DNA, 13 bp, Artificial Sequence
  Oligonucleotide for detection of SNP TSC0038754
agatgagtaaata

SEQ ID NO: 153276 - DNA, 13 bp, Artificial Sequence
  Oligonucleotide for detection of SNP TSC0038754
tatttactcatct

SEQ ID NO: 153277 - DNA, 13 bp, Artificial Sequence
  Oligonucleotide for detection of SNP TSC0038755
tgaataatttttt

SEQ ID NO: 153278 - DNA, 13 bp, Artificial Sequence
  Oligonucleotide for detection of SNP TSC0038755
aaaaaattattca

SEQ ID NO: 153279 - DNA, 13 bp, Artificial Sequence
  Oligonucleotide for detection of SNP TSC0038755
tgaatagtttttt

SEQ ID NO: 153280 - DNA, 13 bp, Artificial Sequence
  Oligonucleotide for detection of SNP TSC0038755
aaaaaactattca

SEQ ID NO: 153281 - DNA, 13 bp, Artificial Sequence
  Oligonucleotide for detection of SNP TSC0038756
tttttgattggtg

SEQ ID NO: 153282 - DNA, 13 bp, Artificial Sequence
  Oligonucleotide for detection of SNP TSC0038756
caccaatcaaaaa

SEQ ID NO: 153283 - DNA, 13 bp, Artificial Sequence
  Oligonucleotide for detection of SNP TSC0038756
tttttggttggtg

SEQ ID NO: 153284 - DNA, 13 bp, Artificial Sequence
  Oligonucleotide for detection of SNP TSC0038756
caccaaccaaaaa

SEQ ID NO: 153285 - DNA, 13 bp, Artificial Sequence
  Oligonucleotide for detection of SNP TSC0038756
tttttgatcggtg

SEQ ID NO: 153286 - DNA, 13 bp, Artificial Sequence
  Oligonucleotide for detection of SNP TSC0038756
caccgatcaaaaa

SEQ ID NO: 153287 - DNA, 13 bp, Artificial Sequence
  Oligonucleotide for detection of SNP TSC0038756
tttttggtcggtg

SEQ ID NO: 153288 - DNA, 13 bp, Artificial Sequence
  Oligonucleotide for detection of SNP TSC0038756
caccgaccaaaaa

SEQ ID NO: 153289 - DNA, 13 bp, Artificial Sequence
  Oligonucleotide for detection of SNP TSC0038758
gatagtagtgttt

SEQ ID NO: 153290 - DNA, 13 bp, Artificial Sequence
  Oligonucleotide for detection of SNP TSC0038758
aaacactactatc

SEQ ID NO: 153291 - DNA, 13 bp, Artificial Sequence
  Oligonucleotide for detection of SNP TSC0038758
gatagtggtgttt

SEQ ID NO: 153292 - DNA, 13 bp, Artificial Sequence
  Oligonucleotide for detection of SNP TSC0038758
aaacaccactatc

SEQ ID NO: 153293 - DNA, 13 bp, Artificial Sequence
  Oligonucleotide for detection of SNP TSC0038758
gatagtagcgttt

SEQ ID NO: 153294 - DNA, 13 bp, Artificial Sequence
  Oligonucleotide for detection of SNP TSC0038758
aaacgctactatc

SEQ ID NO: 153295 - DNA, 13 bp, Artificial Sequence
  Oligonucleotide for detection of SNP TSC0038758
gatagcggtgttt

SEQ ID NO: 153296 - DNA, 13 bp, Artificial Sequence
  Oligonucleotide for detection of SNP TSC0038758
aaacaccgctatc

SEQ ID NO: 153297 - DNA, 13 bp, Artificial Sequence
  Oligonucleotide for detection of SNP TSC0038758
gatagtggcgttt

SEQ ID NO: 153298 - DNA, 13 bp, Artificial Sequence
  Oligonucleotide for detection of SNP TSC0038758
aaacgccactatc

SEQ ID NO: 153299 - DNA, 13 bp, Artificial Sequence
  Oligonucleotide for detection of SNP TSC0038758
gatagcggcgttt

SEQ ID NO: 153300 - DNA, 13 bp, Artificial Sequence
  Oligonucleotide for detection of SNP TSC0038758
aaacgccgctatc

SEQ ID NO: 153301 - DNA, 13 bp, Artificial Sequence
  Oligonucleotide for detection of SNP TSC0038758
aagtgttgttgty

SEQ ID NO: 153302 - DNA, 13 bp, Artificial Sequence
  Oligonucleotide for detection of SNP TSC0038758
racaacaacactt

SEQ ID NO: 153303 - DNA, 13 bp, Artificial Sequence
  Oligonucleotide for detection of SNP TSC0038758
aagcgttgttgty

SEQ ID NO: 153304 - DNA, 13 bp, Artificial Sequence
  Oligonucleotide for detection of SNP TSC0038758
racaacaacgctt

SEQ ID NO: 153305 - DNA, 13 bp, Artificial Sequence
  Oligonucleotide for detection of SNP TSC0038758
aagtgtcgttgty

SEQ ID NO: 153306 - DNA, 13 bp, Artificial Sequence
  Oligonucleotide for detection of SNP TSC0038758
racaacgacactt

SEQ ID NO: 153307 - DNA, 13 bp, Artificial Sequence
  Oligonucleotide for detection of SNP TSC0038758
aagcgtcgttgty

SEQ ID NO: 153308 - DNA, 13 bp, Artificial Sequence
  Oligonucleotide for detection of SNP TSC0038758
racaacgacgctt

SEQ ID NO: 153309 - DNA, 13 bp, Artificial Sequence
  Oligonucleotide for detection of SNP TSC0038759
gagttgggagagy

SEQ ID NO: 153310 - DNA, 13 bp, Artificial Sequence
  Oligonucleotide for detection of SNP TSC0038759
rctctcccaactc

SEQ ID NO: 153311 - DNA, 13 bp, Artificial Sequence
  Oligonucleotide for detection of SNP TSC0038759
gagttgagagagy

SEQ ID NO: 153312 - DNA, 13 bp, Artificial Sequence
  Oligonucleotide for detection of SNP TSC0038759
rctctctcaactc

SEQ ID NO: 153313 - DNA, 13 bp, Artificial Sequence
  Oligonucleotide for detection of SNP TSC0038760
gtttataagcgag

SEQ ID NO: 153314 - DNA, 13 bp, Artificial Sequence
  Oligonucleotide for detection of SNP TSC0038760
ctcgcttataaac

SEQ ID NO: 153315 - DNA, 13 bp, Artificial Sequence
  Oligonucleotide for detection of SNP TSC0038760
gtttatgagcgag

SEQ ID NO: 153316 - DNA, 13 bp, Artificial Sequence
  Oligonucleotide for detection of SNP TSC0038760
ctcgctcataaac

SEQ ID NO: 153317 - DNA, 13 bp, Artificial Sequence
  Oligonucleotide for detection of SNP TSC0038760
gtttacgagcgag

SEQ ID NO: 153318 - DNA, 13 bp, Artificial Sequence
  Oligonucleotide for detection of SNP TSC0038760
ctcgctcgtaaac

SEQ ID NO: 153319 - DNA, 13 bp, Artificial Sequence
  Oligonucleotide for detection of SNP TSC0038760
tttgtttgtgggy

SEQ ID NO: 153320 - DNA, 13 bp, Artificial Sequence
  Oligonucleotide for detection of SNP TSC0038760
rcccacaaacaaa

SEQ ID NO: 153321 - DNA, 13 bp, Artificial Sequence
  Oligonucleotide for detection of SNP TSC0038760
ttcgtttgtgggy

SEQ ID NO: 153322 - DNA, 13 bp, Artificial Sequence
  Oligonucleotide for detection of SNP TSC0038760
rcccacaaacgaa

SEQ ID NO: 153323 - DNA, 13 bp, Artificial Sequence
  Oligonucleotide for detection of SNP TSC0038760
tttgttcgtgggy

SEQ ID NO: 153324 - DNA, 13 bp, Artificial Sequence
  Oligonucleotide for detection of SNP TSC0038760
rcccacgaacaaa

SEQ ID NO: 153325 - DNA, 13 bp, Artificial Sequence
  Oligonucleotide for detection of SNP TSC0038760
ttcgttcgtgggy

SEQ ID NO: 153326 - DNA, 13 bp, Artificial Sequence
  Oligonucleotide for detection of SNP TSC0038760
rcccacgaacgaa

SEQ ID NO: 153327 - DNA, 13 bp, Artificial Sequence
  Oligonucleotide for detection of SNP TSC0038761
gtttaaatggtaa

SEQ ID NO: 153328 - DNA, 13 bp, Artificial Sequence
  Oligonucleotide for detection of SNP TSC0038761
ttaccatttaaac

SEQ ID NO: 153329 - DNA, 13 bp, Artificial Sequence
  Oligonucleotide for detection of SNP TSC0038761
gtttaattggtaa

SEQ ID NO: 153330 - DNA, 13 bp, Artificial Sequence
  Oligonucleotide for detection of SNP TSC0038761
ttaccaattaaac

SEQ ID NO: 153331 - DNA, 13 bp, Artificial Sequence
  Oligonucleotide for detection of SNP TSC0038761
ttgttatttgggy

SEQ ID NO: 153332 - DNA, 13 bp, Artificial Sequence
  Oligonucleotide for detection of SNP TSC0038761
rcccaaataacaa

SEQ ID NO: 153333 - DNA, 13 bp, Artificial Sequence
  Oligonucleotide for detection of SNP TSC0038761
ttgttaattgggy

SEQ ID NO: 153334 - DNA, 13 bp, Artificial Sequence
  Oligonucleotide for detection of SNP TSC0038761
rcccaattaacaa

SEQ ID NO: 153335 - DNA, 13 bp, Artificial Sequence
  Oligonucleotide for detection of SNP TSC0038762
atttatagttggg

SEQ ID NO: 153336 - DNA, 13 bp, Artificial Sequence
  Oligonucleotide for detection of SNP TSC0038762
cccaactataaat

SEQ ID NO: 153337 - DNA, 13 bp, Artificial Sequence
  Oligonucleotide for detection of SNP TSC0038762
atttatggttggg

SEQ ID NO: 153338 - DNA, 13 bp, Artificial Sequence
  Oligonucleotide for detection of SNP TSC0038762
cccaaccataaat

SEQ ID NO: 153339 - DNA, 13 bp, Artificial Sequence
  Oligonucleotide for detection of SNP TSC0038762
atttatagtcggg

SEQ ID NO: 153340 - DNA, 13 bp, Artificial Sequence
  Oligonucleotide for detection of SNP TSC0038762
cccgactataaat

SEQ ID NO: 153341 - DNA, 13 bp, Artificial Sequence
  Oligonucleotide for detection of SNP TSC0038762
atttacggttggg

SEQ ID NO: 153342 - DNA, 13 bp, Artificial Sequence
  Oligonucleotide for detection of SNP TSC0038762
cccaaccgtaaat

SEQ ID NO: 153343 - DNA, 13 bp, Artificial Sequence
  Oligonucleotide for detection of SNP TSC0038762
atttatggtcggg

SEQ ID NO: 153344 - DNA, 13 bp, Artificial Sequence
  Oligonucleotide for detection of SNP TSC0038762
cccgaccataaat

SEQ ID NO: 153345 - DNA, 13 bp, Artificial Sequence
  Oligonucleotide for detection of SNP TSC0038762
atttacggtcggg

SEQ ID NO: 153346 - DNA, 13 bp, Artificial Sequence
  Oligonucleotide for detection of SNP TSC0038762
cccgaccgtaaat

SEQ ID NO: 153347 - DNA, 13 bp, Artificial Sequence
  Oligonucleotide for detection of SNP TSC0038762
tttggttgtaagt

SEQ ID NO: 153348 - DNA, 13 bp, Artificial Sequence
  Oligonucleotide for detection of SNP TSC0038762
acttacaaccaaa

SEQ ID NO: 153349 - DNA, 13 bp, Artificial Sequence
  Oligonucleotide for detection of SNP TSC0038762
ttcggttgtaagt

SEQ ID NO: 153350 - DNA, 13 bp, Artificial Sequence
  Oligonucleotide for detection of SNP TSC0038762
acttacaaccgaa

SEQ ID NO: 153351 - DNA, 13 bp, Artificial Sequence
  Oligonucleotide for detection of SNP TSC0038762
tttggtcgtaagt

SEQ ID NO: 153352 - DNA, 13 bp, Artificial Sequence
  Oligonucleotide for detection of SNP TSC0038762
acttacgaccaaa

SEQ ID NO: 153353 - DNA, 13 bp, Artificial Sequence
  Oligonucleotide for detection of SNP TSC0038762
ttcggtcgtaagt

SEQ ID NO: 153354 - DNA, 13 bp, Artificial Sequence
  Oligonucleotide for detection of SNP TSC0038762
acttacgaccgaa

SEQ ID NO: 153355 - DNA, 13 bp, Artificial Sequence
  Oligonucleotide for detection of SNP TSC0038763
tgggatttgaatt

SEQ ID NO: 153356 - DNA, 13 bp, Artificial Sequence
  Oligonucleotide for detection of SNP TSC0038763
aattcaaatccca

SEQ ID NO: 153357 - DNA, 13 bp, Artificial Sequence
  Oligonucleotide for detection of SNP TSC0038763
tgggatgtgaatt

SEQ ID NO: 153358 - DNA, 13 bp, Artificial Sequence
  Oligonucleotide for detection of SNP TSC0038763
aattcacatccca

SEQ ID NO: 153359 - DNA, 13 bp, Artificial Sequence
  Oligonucleotide for detection of SNP TSC0038763
agtttagatttta

SEQ ID NO: 153360 - DNA, 13 bp, Artificial Sequence
  Oligonucleotide for detection of SNP TSC0038763
taaaatctaaact

SEQ ID NO: 153361 - DNA, 13 bp, Artificial Sequence
  Oligonucleotide for detection of SNP TSC0038764
tattttattagag

SEQ ID NO: 153362 - DNA, 13 bp, Artificial Sequence
  Oligonucleotide for detection of SNP TSC0038764
ctctaataaaata

SEQ ID NO: 153363 - DNA, 13 bp, Artificial Sequence
  Oligonucleotide for detection of SNP TSC0038764
tattttgttagag

SEQ ID NO: 153364 - DNA, 13 bp, Artificial Sequence
  Oligonucleotide for detection of SNP TSC0038764
ctctaacaaaata

SEQ ID NO: 153365 - DNA, 13 bp, Artificial Sequence
  Oligonucleotide for detection of SNP TSC0038764
tatttcgttagag

SEQ ID NO: 153366 - DNA, 13 bp, Artificial Sequence
  Oligonucleotide for detection of SNP TSC0038764
ctctaacgaaata

SEQ ID NO: 153367 - DNA, 13 bp, Artificial Sequence
  Oligonucleotide for detection of SNP TSC0038764
ttttgatggaata

SEQ ID NO: 153368 - DNA, 13 bp, Artificial Sequence
  Oligonucleotide for detection of SNP TSC0038764
tattccatcaaaa

SEQ ID NO: 153369 - DNA, 13 bp, Artificial Sequence
  Oligonucleotide for detection of SNP TSC0038764
ttttgacggaata

SEQ ID NO: 153370 - DNA, 13 bp, Artificial Sequence
  Oligonucleotide for detection of SNP TSC0038764
tattccgtcaaaa

SEQ ID NO: 153371 - DNA, 13 bp, Artificial Sequence
  Oligonucleotide for detection of SNP TSC0038770
aggtttaaattat

SEQ ID NO: 153372 - DNA, 13 bp, Artificial Sequence
  Oligonucleotide for detection of SNP TSC0038770
ataatttaaacct

SEQ ID NO: 153373 - DNA, 13 bp, Artificial Sequence
  Oligonucleotide for detection of SNP TSC0038770
aggttttaattat

SEQ ID NO: 153374 - DNA, 13 bp, Artificial Sequence
  Oligonucleotide for detection of SNP TSC0038770
ataattaaaacct

SEQ ID NO: 153375 - DNA, 13 bp, Artificial Sequence
  Oligonucleotide for detection of SNP TSC0038770
atagtttgggttt

SEQ ID NO: 153376 - DNA, 13 bp, Artificial Sequence
  Oligonucleotide for detection of SNP TSC0038770
aaacccaaactat

SEQ ID NO: 153377 - DNA, 13 bp, Artificial Sequence
  Oligonucleotide for detection of SNP TSC0038770
atagttggggttt

SEQ ID NO: 153378 - DNA, 13 bp, Artificial Sequence
  Oligonucleotide for detection of SNP TSC0038770
aaaccccaactat

SEQ ID NO: 153379 - DNA, 13 bp, Artificial Sequence
  Oligonucleotide for detection of SNP TSC0038771
gaatttataataa

SEQ ID NO: 153380 - DNA, 13 bp, Artificial Sequence
  Oligonucleotide for detection of SNP TSC0038771
ttattataaattc

SEQ ID NO: 153381 - DNA, 13 bp, Artificial Sequence
  Oligonucleotide for detection of SNP TSC0038771
gaatttgtaataa

SEQ ID NO: 153382 - DNA, 13 bp, Artificial Sequence
  Oligonucleotide for detection of SNP TSC0038771
ttattacaaattc

SEQ ID NO: 153383 - DNA, 13 bp, Artificial Sequence
  Oligonucleotide for detection of SNP TSC0038771
gaattcgtaataa

SEQ ID NO: 153384 - DNA, 13 bp, Artificial Sequence
  Oligonucleotide for detection of SNP TSC0038771
ttattacgaattc

SEQ ID NO: 153385 - DNA, 13 bp, Artificial Sequence
  Oligonucleotide for detection of SNP TSC0038771
ttattatgggtty

SEQ ID NO: 153386 - DNA, 13 bp, Artificial Sequence
  Oligonucleotide for detection of SNP TSC0038771
raacccataataa

SEQ ID NO: 153387 - DNA, 13 bp, Artificial Sequence
  Oligonucleotide for detection of SNP TSC0038771
ttattacgggtty

SEQ ID NO: 153388 - DNA, 13 bp, Artificial Sequence
  Oligonucleotide for detection of SNP TSC0038771
raacccgtaataa

SEQ ID NO: 153389 - DNA, 13 bp, Artificial Sequence
  Oligonucleotide for detection of SNP TSC0038776
aaagtagttatag

SEQ ID NO: 153390 - DNA, 13 bp, Artificial Sequence
  Oligonucleotide for detection of SNP TSC0038776
ctataactacttt

SEQ ID NO: 153391 - DNA, 13 bp, Artificial Sequence
  Oligonucleotide for detection of SNP TSC0038776
aaagtaattatag

SEQ ID NO: 153392 - DNA, 13 bp, Artificial Sequence
  Oligonucleotide for detection of SNP TSC0038776
ctataattacttt

SEQ ID NO: 153393 - DNA, 13 bp, Artificial Sequence
  Oligonucleotide for detection of SNP TSC0038777
gaaaataaaatta

SEQ ID NO: 153394 - DNA, 13 bp, Artificial Sequence
  Oligonucleotide for detection of SNP TSC0038777
taattttattttc

SEQ ID NO: 153395 - DNA, 13 bp, Artificial Sequence
  Oligonucleotide for detection of SNP TSC0038777
gaaaatgaaatta

SEQ ID NO: 153396 - DNA, 13 bp, Artificial Sequence
  Oligonucleotide for detection of SNP TSC0038777
taatttcattttc

SEQ ID NO: 153397 - DNA, 13 bp, Artificial Sequence
  Oligonucleotide for detection of SNP TSC0038778
atttgagtttatt

SEQ ID NO: 153398 - DNA, 13 bp, Artificial Sequence
  Oligonucleotide for detection of SNP TSC0038778
aataaactcaaat

SEQ ID NO: 153399 - DNA, 13 bp, Artificial Sequence
  Oligonucleotide for detection of SNP TSC0038778
atttgattttatt

SEQ ID NO: 153400 - DNA, 13 bp, Artificial Sequence
  Oligonucleotide for detection of SNP TSC0038778
aataaaatcaaat

SEQ ID NO: 153401 - DNA, 13 bp, Artificial Sequence
  Oligonucleotide for detection of SNP TSC0038778
aatagatttaaat

SEQ ID NO: 153402 - DNA, 13 bp, Artificial Sequence
  Oligonucleotide for detection of SNP TSC0038778
atttaaatctatt

SEQ ID NO: 153403 - DNA, 13 bp, Artificial Sequence
  Oligonucleotide for detection of SNP TSC0038778
aatagaattaaat

SEQ ID NO: 153404 - DNA, 13 bp, Artificial Sequence
  Oligonucleotide for detection of SNP TSC0038778
atttaattctatt

SEQ ID NO: 153405 - DNA, 13 bp, Artificial Sequence
  Oligonucleotide for detection of SNP TSC0038779
gattgaagaaagg

SEQ ID NO: 153406 - DNA, 13 bp, Artificial Sequence
  Oligonucleotide for detection of SNP TSC0038779
cctttcttcaatc

SEQ ID NO: 153407 - DNA, 13 bp, Artificial Sequence
  Oligonucleotide for detection of SNP TSC0038779
gattgaggaaagg

SEQ ID NO: 153408 - DNA, 13 bp, Artificial Sequence
  Oligonucleotide for detection of SNP TSC0038779
cctttcctcaatc

SEQ ID NO: 153409 - DNA, 13 bp, Artificial Sequence
  Oligonucleotide for detection of SNP TSC0038780
tagttggagatgy

SEQ ID NO: 153410 - DNA, 13 bp, Artificial Sequence
  Oligonucleotide for detection of SNP TSC0038780
rcatctccaacta

SEQ ID NO: 153411 - DNA, 13 bp, Artificial Sequence
  Oligonucleotide for detection of SNP TSC0038780
tagttgaagatgy

SEQ ID NO: 153412 - DNA, 13 bp, Artificial Sequence
  Oligonucleotide for detection of SNP TSC0038780
rcatcttcaacta

SEQ ID NO: 153413 - DNA, 13 bp, Artificial Sequence
  Oligonucleotide for detection of SNP TSC0038781
tttaaggtttagy

SEQ ID NO: 153414 - DNA, 13 bp, Artificial Sequence
  Oligonucleotide for detection of SNP TSC0038781
rctaaaccttaaa

SEQ ID NO: 153415 - DNA, 13 bp, Artificial Sequence
  Oligonucleotide for detection of SNP TSC0038781
tttaagttttagy

SEQ ID NO: 153416 - DNA, 13 bp, Artificial Sequence
  Oligonucleotide for detection of SNP TSC0038781
rctaaaacttaaa

SEQ ID NO: 153417 - DNA, 13 bp, Artificial Sequence
  Oligonucleotide for detection of SNP TSC0038781
gttgggttttgga

SEQ ID NO: 153418 - DNA, 13 bp, Artificial Sequence
  Oligonucleotide for detection of SNP TSC0038781
tccaaaacccaac

SEQ ID NO: 153419 - DNA, 13 bp, Artificial Sequence
  Oligonucleotide for detection of SNP TSC0038781
gttgggatttgga

SEQ ID NO: 153420 - DNA, 13 bp, Artificial Sequence
  Oligonucleotide for detection of SNP TSC0038781
tccaaatcccaac

SEQ ID NO: 153421 - DNA, 13 bp, Artificial Sequence
  Oligonucleotide for detection of SNP TSC0038782
gtagtattggtga

SEQ ID NO: 153422 - DNA, 13 bp, Artificial Sequence
  Oligonucleotide for detection of SNP TSC0038782
tcaccaatactac

SEQ ID NO: 153423 - DNA, 13 bp, Artificial Sequence
  Oligonucleotide for detection of SNP TSC0038782
gtagtagtggtga

SEQ ID NO: 153424 - DNA, 13 bp, Artificial Sequence
  Oligonucleotide for detection of SNP TSC0038782
tcaccactactac

SEQ ID NO: 153425 - DNA, 13 bp, Artificial Sequence
  Oligonucleotide for detection of SNP TSC0038782
gtagtatcggtga

SEQ ID NO: 153426 - DNA, 13 bp, Artificial Sequence
  Oligonucleotide for detection of SNP TSC0038782
tcaccgatactac

SEQ ID NO: 153427 - DNA, 13 bp, Artificial Sequence
  Oligonucleotide for detection of SNP TSC0038782
gtagtagcggtga

SEQ ID NO: 153428 - DNA, 13 bp, Artificial Sequence
  Oligonucleotide for detection of SNP TSC0038782
tcaccgctactac

SEQ ID NO: 153429 - DNA, 13 bp, Artificial Sequence
  Oligonucleotide for detection of SNP TSC0038782
ttattggtgttgy

SEQ ID NO: 153430 - DNA, 13 bp, Artificial Sequence
  Oligonucleotide for detection of SNP TSC0038782
rcaacaccaataa

SEQ ID NO: 153431 - DNA, 13 bp, Artificial Sequence
  Oligonucleotide for detection of SNP TSC0038782
ttattgttgttgy

SEQ ID NO: 153432 - DNA, 13 bp, Artificial Sequence
  Oligonucleotide for detection of SNP TSC0038782
rcaacaacaataa

SEQ ID NO: 153433 - DNA, 13 bp, Artificial Sequence
  Oligonucleotide for detection of SNP TSC0038782
ttatcggtgttgy

SEQ ID NO: 153434 - DNA, 13 bp, Artificial Sequence
  Oligonucleotide for detection of SNP TSC0038782
rcaacaccgataa

SEQ ID NO: 153435 - DNA, 13 bp, Artificial Sequence
  Oligonucleotide for detection of SNP TSC0038782
ttatcgttgttgy

SEQ ID NO: 153436 - DNA, 13 bp, Artificial Sequence
  Oligonucleotide for detection of SNP TSC0038782
rcaacaacgataa

SEQ ID NO: 153437 - DNA, 13 bp, Artificial Sequence
  Oligonucleotide for detection of SNP TSC0038783
tttaaagaagtty

SEQ ID NO: 153438 - DNA, 13 bp, Artificial Sequence
  Oligonucleotide for detection of SNP TSC0038783
raacttctttaaa

SEQ ID NO: 153439 - DNA, 13 bp, Artificial Sequence
  Oligonucleotide for detection of SNP TSC0038783
tttaaaaaagtty

SEQ ID NO: 153440 - DNA, 13 bp, Artificial Sequence
  Oligonucleotide for detection of SNP TSC0038783
raacttttttaaa

SEQ ID NO: 153441 - DNA, 13 bp, Artificial Sequence
  Oligonucleotide for detection of SNP TSC0038785
gaagggtgagtag

SEQ ID NO: 153442 - DNA, 13 bp, Artificial Sequence
  Oligonucleotide for detection of SNP TSC0038785
ctactcacccttc

SEQ ID NO: 153443 - DNA, 13 bp, Artificial Sequence
  Oligonucleotide for detection of SNP TSC0038785
gaagggcgagtag

SEQ ID NO: 153444 - DNA, 13 bp, Artificial Sequence
  Oligonucleotide for detection of SNP TSC0038785
ctactcgcccttc

SEQ ID NO: 153445 - DNA, 13 bp, Artificial Sequence
  Oligonucleotide for detection of SNP TSC0038786
gtggggtggtggy

SEQ ID NO: 153446 - DNA, 13 bp, Artificial Sequence
  Oligonucleotide for detection of SNP TSC0038786
rccaccaccccac

SEQ ID NO: 153447 - DNA, 13 bp, Artificial Sequence
  Oligonucleotide for detection of SNP TSC0038786
gtgggggggtggy

SEQ ID NO: 153448 - DNA, 13 bp, Artificial Sequence
  Oligonucleotide for detection of SNP TSC0038786
rccacccccccac

SEQ ID NO: 153449 - DNA, 13 bp, Artificial Sequence
  Oligonucleotide for detection of SNP TSC0038786
gcggggtggtggy

SEQ ID NO: 153450 - DNA, 13 bp, Artificial Sequence
  Oligonucleotide for detection of SNP TSC0038786
rccaccaccccgc

SEQ ID NO: 153451 - DNA, 13 bp, Artificial Sequence
  Oligonucleotide for detection of SNP TSC0038786
gcgggggggtggy

SEQ ID NO: 153452 - DNA, 13 bp, Artificial Sequence
  Oligonucleotide for detection of SNP TSC0038786
rccacccccccgc

SEQ ID NO: 153453 - DNA, 13 bp, Artificial Sequence
  Oligonucleotide for detection of SNP TSC0038786
gtggggcggtggy

SEQ ID NO: 153454 - DNA, 13 bp, Artificial Sequence
  Oligonucleotide for detection of SNP TSC0038786
rccaccgccccac

SEQ ID NO: 153455 - DNA, 13 bp, Artificial Sequence
  Oligonucleotide for detection of SNP TSC0038786
gcggggcggtggy

SEQ ID NO: 153456 - DNA, 13 bp, Artificial Sequence
  Oligonucleotide for detection of SNP TSC0038786
rccaccgccccgc

SEQ ID NO: 153457 - DNA, 13 bp, Artificial Sequence
  Oligonucleotide for detection of SNP TSC0038786
gttattgttttgy

SEQ ID NO: 153458 - DNA, 13 bp, Artificial Sequence
  Oligonucleotide for detection of SNP TSC0038786
rcaaaacaataac

SEQ ID NO: 153459 - DNA, 13 bp, Artificial Sequence
  Oligonucleotide for detection of SNP TSC0038786
gttatttttttgy

SEQ ID NO: 153460 - DNA, 13 bp, Artificial Sequence
  Oligonucleotide for detection of SNP TSC0038786
rcaaaaaaataac

SEQ ID NO: 153461 - DNA, 13 bp, Artificial Sequence
  Oligonucleotide for detection of SNP TSC0038786
gttatcgttttgy

SEQ ID NO: 153462 - DNA, 13 bp, Artificial Sequence
  Oligonucleotide for detection of SNP TSC0038786
rcaaaacgataac

SEQ ID NO: 153463 - DNA, 13 bp, Artificial Sequence
  Oligonucleotide for detection of SNP TSC0038786
gttattttttcgy

SEQ ID NO: 153464 - DNA, 13 bp, Artificial Sequence
  Oligonucleotide for detection of SNP TSC0038786
rcgaaaaaataac

SEQ ID NO: 153465 - DNA, 13 bp, Artificial Sequence
  Oligonucleotide for detection of SNP TSC0038786
gttattgtttcgy

SEQ ID NO: 153466 - DNA, 13 bp, Artificial Sequence
  Oligonucleotide for detection of SNP TSC0038786
rcgaaacaataac

SEQ ID NO: 153467 - DNA, 13 bp, Artificial Sequence
  Oligonucleotide for detection of SNP TSC0038786
gttatcgtttcgy

SEQ ID NO: 153468 - DNA, 13 bp, Artificial Sequence
  Oligonucleotide for detection of SNP TSC0038786
rcgaaacgataac

SEQ ID NO: 153469 - DNA, 13 bp, Artificial Sequence
  Oligonucleotide for detection of SNP TSC0038787
agtataggttagg

SEQ ID NO: 153470 - DNA, 13 bp, Artificial Sequence
  Oligonucleotide for detection of SNP TSC0038787
cctaacctatact

SEQ ID NO: 153471 - DNA, 13 bp, Artificial Sequence
  Oligonucleotide for detection of SNP TSC0038787
agtatatgttagg

SEQ ID NO: 153472 - DNA, 13 bp, Artificial Sequence
  Oligonucleotide for detection of SNP TSC0038787
cctaacatatact

SEQ ID NO: 153473 - DNA, 13 bp, Artificial Sequence
  Oligonucleotide for detection of SNP TSC0038787
tttggtttgtgtt

SEQ ID NO: 153474 - DNA, 13 bp, Artificial Sequence
  Oligonucleotide for detection of SNP TSC0038787
aacacaaaccaaa

SEQ ID NO: 153475 - DNA, 13 bp, Artificial Sequence
  Oligonucleotide for detection of SNP TSC0038787
tttggtatgtgtt

SEQ ID NO: 153476 - DNA, 13 bp, Artificial Sequence
  Oligonucleotide for detection of SNP TSC0038787
aacacataccaaa

SEQ ID NO: 153477 - DNA, 13 bp, Artificial Sequence
  Oligonucleotide for detection of SNP TSC0038788
tatgtttgggaag

SEQ ID NO: 153478 - DNA, 13 bp, Artificial Sequence
  Oligonucleotide for detection of SNP TSC0038788
cttcccaaacata

SEQ ID NO: 153479 - DNA, 13 bp, Artificial Sequence
  Oligonucleotide for detection of SNP TSC0038788
tatgttcgggaag

SEQ ID NO: 153480 - DNA, 13 bp, Artificial Sequence
  Oligonucleotide for detection of SNP TSC0038788
cttcccgaacata

SEQ ID NO: 153481 - DNA, 13 bp, Artificial Sequence
  Oligonucleotide for detection of SNP TSC0038788
ttttttgagtatg

SEQ ID NO: 153482 - DNA, 13 bp, Artificial Sequence
  Oligonucleotide for detection of SNP TSC0038788
catactcaaaaaa

SEQ ID NO: 153483 - DNA, 13 bp, Artificial Sequence
  Oligonucleotide for detection of SNP TSC0038788
ttttttaagtatg

SEQ ID NO: 153484 - DNA, 13 bp, Artificial Sequence
  Oligonucleotide for detection of SNP TSC0038788
catacttaaaaaa

SEQ ID NO: 153485 - DNA, 13 bp, Artificial Sequence
  Oligonucleotide for detection of SNP TSC0038788
tttttcgagtatg

SEQ ID NO: 153486 - DNA, 13 bp, Artificial Sequence
  Oligonucleotide for detection of SNP TSC0038788
catactcgaaaaa

SEQ ID NO: 153487 - DNA, 13 bp, Artificial Sequence
  Oligonucleotide for detection of SNP TSC0038789
tattgggtagtat

SEQ ID NO: 153488 - DNA, 13 bp, Artificial Sequence
  Oligonucleotide for detection of SNP TSC0038789
atactacccaata

SEQ ID NO: 153489 - DNA, 13 bp, Artificial Sequence
  Oligonucleotide for detection of SNP TSC0038789
tattggatagtat

SEQ ID NO: 153490 - DNA, 13 bp, Artificial Sequence
  Oligonucleotide for detection of SNP TSC0038789
atactatccaata

SEQ ID NO: 153491 - DNA, 13 bp, Artificial Sequence
  Oligonucleotide for detection of SNP TSC0038795
ttattaattgtaa

SEQ ID NO: 153492 - DNA, 13 bp, Artificial Sequence
  Oligonucleotide for detection of SNP TSC0038795
ttacaattaataa

SEQ ID NO: 153493 - DNA, 13 bp, Artificial Sequence
  Oligonucleotide for detection of SNP TSC0038796
taaaaaaagtttt

SEQ ID NO: 153494 - DNA, 13 bp, Artificial Sequence
  Oligonucleotide for detection of SNP TSC0038796
aaaacttttttta

SEQ ID NO: 153495 - DNA, 13 bp, Artificial Sequence
  Oligonucleotide for detection of SNP TSC0038796
taaaaatagtttt

SEQ ID NO: 153496 - DNA, 13 bp, Artificial Sequence
  Oligonucleotide for detection of SNP TSC0038796
aaaactattttta

SEQ ID NO: 153497 - DNA, 13 bp, Artificial Sequence
  Oligonucleotide for detection of SNP TSC0038796
agaatttttttta

SEQ ID NO: 153498 - DNA, 13 bp, Artificial Sequence
  Oligonucleotide for detection of SNP TSC0038796
taaaaaaaattct

SEQ ID NO: 153499 - DNA, 13 bp, Artificial Sequence
  Oligonucleotide for detection of SNP TSC0038796
agaattattttta

SEQ ID NO: 153500 - DNA, 13 bp, Artificial Sequence
  Oligonucleotide for detection of SNP TSC0038796
taaaaataattct

SEQ ID NO: 153501 - DNA, 13 bp, Artificial Sequence
  Oligonucleotide for detection of SNP TSC0038797
aatttaatataat

SEQ ID NO: 153502 - DNA, 13 bp, Artificial Sequence
  Oligonucleotide for detection of SNP TSC0038797
attatattaaatt

SEQ ID NO: 153503 - DNA, 13 bp, Artificial Sequence
  Oligonucleotide for detection of SNP TSC0038797
aatttagtataat

SEQ ID NO: 153504 - DNA, 13 bp, Artificial Sequence
  Oligonucleotide for detection of SNP TSC0038797
attatactaaatt

SEQ ID NO: 153505 - DNA, 13 bp, Artificial Sequence
  Oligonucleotide for detection of SNP TSC0038803
tttaaagtataaa

SEQ ID NO: 153506 - DNA, 13 bp, Artificial Sequence
  Oligonucleotide for detection of SNP TSC0038803
tttatactttaaa

SEQ ID NO: 153507 - DNA, 13 bp, Artificial Sequence
  Oligonucleotide for detection of SNP TSC0038803
tttaaattataaa

SEQ ID NO: 153508 - DNA, 13 bp, Artificial Sequence
  Oligonucleotide for detection of SNP TSC0038803
tttataatttaaa

SEQ ID NO: 153509 - DNA, 13 bp, Artificial Sequence
  Oligonucleotide for detection of SNP TSC0038803
tttgtgatttgaa

SEQ ID NO: 153510 - DNA, 13 bp, Artificial Sequence
  Oligonucleotide for detection of SNP TSC0038803
ttcaaatcacaaa

SEQ ID NO: 153511 - DNA, 13 bp, Artificial Sequence
  Oligonucleotide for detection of SNP TSC0038807
attattattgtat

SEQ ID NO: 153512 - DNA, 13 bp, Artificial Sequence
  Oligonucleotide for detection of SNP TSC0038807
atacaataataat

SEQ ID NO: 153513 - DNA, 13 bp, Artificial Sequence
  Oligonucleotide for detection of SNP TSC0038807
attattgttgtat

SEQ ID NO: 153514 - DNA, 13 bp, Artificial Sequence
  Oligonucleotide for detection of SNP TSC0038807
atacaacaataat

SEQ ID NO: 153515 - DNA, 13 bp, Artificial Sequence
  Oligonucleotide for detection of SNP TSC0038807
attatcgttgtat

SEQ ID NO: 153516 - DNA, 13 bp, Artificial Sequence
  Oligonucleotide for detection of SNP TSC0038807
atacaacgataat

SEQ ID NO: 153517 - DNA, 13 bp, Artificial Sequence
  Oligonucleotide for detection of SNP TSC0038807
atatagtggtggt

SEQ ID NO: 153518 - DNA, 13 bp, Artificial Sequence
  Oligonucleotide for detection of SNP TSC0038807
accaccactatat

SEQ ID NO: 153519 - DNA, 13 bp, Artificial Sequence
  Oligonucleotide for detection of SNP TSC0038807
atatagcggtggt

SEQ ID NO: 153520 - DNA, 13 bp, Artificial Sequence
  Oligonucleotide for detection of SNP TSC0038807
accaccgctatat

SEQ ID NO: 153521 - DNA, 13 bp, Artificial Sequence
  Oligonucleotide for detection of SNP TSC0038808
tttgagataagty

SEQ ID NO: 153522 - DNA, 13 bp, Artificial Sequence
  Oligonucleotide for detection of SNP TSC0038808
racttatctcaaa

SEQ ID NO: 153523 - DNA, 13 bp, Artificial Sequence
  Oligonucleotide for detection of SNP TSC0038808
tttgagttaagty

SEQ ID NO: 153524 - DNA, 13 bp, Artificial Sequence
  Oligonucleotide for detection of SNP TSC0038808
racttaactcaaa

SEQ ID NO: 153525 - DNA, 13 bp, Artificial Sequence
  Oligonucleotide for detection of SNP TSC0038808
gatttgttttaag

SEQ ID NO: 153526 - DNA, 13 bp, Artificial Sequence
  Oligonucleotide for detection of SNP TSC0038808
cttaaaacaaatc

SEQ ID NO: 153527 - DNA, 13 bp, Artificial Sequence
  Oligonucleotide for detection of SNP TSC0038808
gatttgatttaag

SEQ ID NO: 153528 - DNA, 13 bp, Artificial Sequence
  Oligonucleotide for detection of SNP TSC0038808
cttaaatcaaatc

SEQ ID NO: 153529 - DNA, 13 bp, Artificial Sequence
  Oligonucleotide for detection of SNP TSC0038813
ttaaaatgaatat

SEQ ID NO: 153530 - DNA, 13 bp, Artificial Sequence
  Oligonucleotide for detection of SNP TSC0038813
atattcattttaa

SEQ ID NO: 153531 - DNA, 13 bp, Artificial Sequence
  Oligonucleotide for detection of SNP TSC0038813
ttaaaacgaatat

SEQ ID NO: 153532 - DNA, 13 bp, Artificial Sequence
  Oligonucleotide for detection of SNP TSC0038813
atattcgttttaa

SEQ ID NO: 153533 - DNA, 13 bp, Artificial Sequence
  Oligonucleotide for detection of SNP TSC0038813
atatttgttttaa

SEQ ID NO: 153534 - DNA, 13 bp, Artificial Sequence
  Oligonucleotide for detection of SNP TSC0038813
ttaaaacaaatat

SEQ ID NO: 153535 - DNA, 13 bp, Artificial Sequence
  Oligonucleotide for detection of SNP TSC0038813
atatttattttaa

SEQ ID NO: 153536 - DNA, 13 bp, Artificial Sequence
  Oligonucleotide for detection of SNP TSC0038813
ttaaaataaatat

SEQ ID NO: 153537 - DNA, 13 bp, Artificial Sequence
  Oligonucleotide for detection of SNP TSC0038815
tgaagatggtttg

SEQ ID NO: 153538 - DNA, 13 bp, Artificial Sequence
  Oligonucleotide for detection of SNP TSC0038815
caaaccatcttca

SEQ ID NO: 153539 - DNA, 13 bp, Artificial Sequence
  Oligonucleotide for detection of SNP TSC0038815
tgaagacggtttg

SEQ ID NO: 153540 - DNA, 13 bp, Artificial Sequence
  Oligonucleotide for detection of SNP TSC0038815
caaaccgtcttca

SEQ ID NO: 153541 - DNA, 13 bp, Artificial Sequence
  Oligonucleotide for detection of SNP TSC0038815
taggttgttttta

SEQ ID NO: 153542 - DNA, 13 bp, Artificial Sequence
  Oligonucleotide for detection of SNP TSC0038815
taaaaacaaccta

SEQ ID NO: 153543 - DNA, 13 bp, Artificial Sequence
  Oligonucleotide for detection of SNP TSC0038815
taggttattttta

SEQ ID NO: 153544 - DNA, 13 bp, Artificial Sequence
  Oligonucleotide for detection of SNP TSC0038815
taaaaataaccta

SEQ ID NO: 153545 - DNA, 13 bp, Artificial Sequence
  Oligonucleotide for detection of SNP TSC0038815
taggtcgttttta

SEQ ID NO: 153546 - DNA, 13 bp, Artificial Sequence
  Oligonucleotide for detection of SNP TSC0038815
taaaaacgaccta

SEQ ID NO: 153547 - DNA, 13 bp, Artificial Sequence
  Oligonucleotide for detection of SNP TSC0038817
ttgattatgtgty

SEQ ID NO: 153548 - DNA, 13 bp, Artificial Sequence
  Oligonucleotide for detection of SNP TSC0038817
racacataatcaa

SEQ ID NO: 153549 - DNA, 13 bp, Artificial Sequence
  Oligonucleotide for detection of SNP TSC0038817
ttgattgtgtgty

SEQ ID NO: 153550 - DNA, 13 bp, Artificial Sequence
  Oligonucleotide for detection of SNP TSC0038817
racacacaatcaa

SEQ ID NO: 153551 - DNA, 13 bp, Artificial Sequence
  Oligonucleotide for detection of SNP TSC0038818
tttatagtagttt

SEQ ID NO: 153552 - DNA, 13 bp, Artificial Sequence
  Oligonucleotide for detection of SNP TSC0038818
aaactactataaa

SEQ ID NO: 153553 - DNA, 13 bp, Artificial Sequence
  Oligonucleotide for detection of SNP TSC0038818
tttatattagttt

SEQ ID NO: 153554 - DNA, 13 bp, Artificial Sequence
  Oligonucleotide for detection of SNP TSC0038818
aaactaatataaa

SEQ ID NO: 153555 - DNA, 13 bp, Artificial Sequence
  Oligonucleotide for detection of SNP TSC0038818
aagttgttatgga

SEQ ID NO: 153556 - DNA, 13 bp, Artificial Sequence
  Oligonucleotide for detection of SNP TSC0038818
tccataacaactt

SEQ ID NO: 153557 - DNA, 13 bp, Artificial Sequence
  Oligonucleotide for detection of SNP TSC0038818
aagttgatatgga

SEQ ID NO: 153558 - DNA, 13 bp, Artificial Sequence
  Oligonucleotide for detection of SNP TSC0038818
tccatatcaactt

SEQ ID NO: 153559 - DNA, 13 bp, Artificial Sequence
  Oligonucleotide for detection of SNP TSC0038819
aaatagatattag

SEQ ID NO: 153560 - DNA, 13 bp, Artificial Sequence
  Oligonucleotide for detection of SNP TSC0038819
ctaatatctattt

SEQ ID NO: 153561 - DNA, 13 bp, Artificial Sequence
  Oligonucleotide for detection of SNP TSC0038819
aaataggtattag

SEQ ID NO: 153562 - DNA, 13 bp, Artificial Sequence
  Oligonucleotide for detection of SNP TSC0038819
ctaatacctattt

SEQ ID NO: 153563 - DNA, 13 bp, Artificial Sequence
  Oligonucleotide for detection of SNP TSC0038820
ttaggttgaaaag

SEQ ID NO: 153564 - DNA, 13 bp, Artificial Sequence
  Oligonucleotide for detection of SNP TSC0038820
cttttcaacctaa

SEQ ID NO: 153565 - DNA, 13 bp, Artificial Sequence
  Oligonucleotide for detection of SNP TSC0038820
ttaggtcgaaaag

SEQ ID NO: 153566 - DNA, 13 bp, Artificial Sequence
  Oligonucleotide for detection of SNP TSC0038820
cttttcgacctaa

SEQ ID NO: 153567 - DNA, 13 bp, Artificial Sequence
  Oligonucleotide for detection of SNP TSC0038820
ttttttggtttaa

SEQ ID NO: 153568 - DNA, 13 bp, Artificial Sequence
  Oligonucleotide for detection of SNP TSC0038820
ttaaaccaaaaaa

SEQ ID NO: 153569 - DNA, 13 bp, Artificial Sequence
  Oligonucleotide for detection of SNP TSC0038820
ttttttagtttaa

SEQ ID NO: 153570 - DNA, 13 bp, Artificial Sequence
  Oligonucleotide for detection of SNP TSC0038820
ttaaactaaaaaa

SEQ ID NO: 153571 - DNA, 13 bp, Artificial Sequence
  Oligonucleotide for detection of SNP TSC0038820
tttttcggtttaa

SEQ ID NO: 153572 - DNA, 13 bp, Artificial Sequence
  Oligonucleotide for detection of SNP TSC0038820
ttaaaccgaaaaa

SEQ ID NO: 153573 - DNA, 13 bp, Artificial Sequence
  Oligonucleotide for detection of SNP TSC0038826
ttgatggtgatay

SEQ ID NO: 153574 - DNA, 13 bp, Artificial Sequence
  Oligonucleotide for detection of SNP TSC0038826
rtatcaccatcaa

SEQ ID NO: 153575 - DNA, 13 bp, Artificial Sequence
  Oligonucleotide for detection of SNP TSC0038826
ttgatgatgatay

SEQ ID NO: 153576 - DNA, 13 bp, Artificial Sequence
  Oligonucleotide for detection of SNP TSC0038826
rtatcatcatcaa

SEQ ID NO: 153577 - DNA, 13 bp, Artificial Sequence
  Oligonucleotide for detection of SNP TSC0038830
tttttatggataa

SEQ ID NO: 153578 - DNA, 13 bp, Artificial Sequence
  Oligonucleotide for detection of SNP TSC0038830
ttatccataaaaa

SEQ ID NO: 153579 - DNA, 13 bp, Artificial Sequence
  Oligonucleotide for detection of SNP TSC0038830
tttttacggataa

SEQ ID NO: 153580 - DNA, 13 bp, Artificial Sequence
  Oligonucleotide for detection of SNP TSC0038830
ttatccgtaaaaa

SEQ ID NO: 153581 - DNA, 13 bp, Artificial Sequence
  Oligonucleotide for detection of SNP TSC0038830
ttgtttgtggaga

SEQ ID NO: 153582 - DNA, 13 bp, Artificial Sequence
  Oligonucleotide for detection of SNP TSC0038830
tctccacaaacaa

SEQ ID NO: 153583 - DNA, 13 bp, Artificial Sequence
  Oligonucleotide for detection of SNP TSC0038830
ttgtttatggaga

SEQ ID NO: 153584 - DNA, 13 bp, Artificial Sequence
  Oligonucleotide for detection of SNP TSC0038830
tctccataaacaa

SEQ ID NO: 153585 - DNA, 13 bp, Artificial Sequence
  Oligonucleotide for detection of SNP TSC0038830
ttgttcgtggaga

SEQ ID NO: 153586 - DNA, 13 bp, Artificial Sequence
  Oligonucleotide for detection of SNP TSC0038830
tctccacgaacaa

SEQ ID NO: 153587 - DNA, 13 bp, Artificial Sequence
  Oligonucleotide for detection of SNP TSC0038831
aaagttagtattt

SEQ ID NO: 153588 - DNA, 13 bp, Artificial Sequence
  Oligonucleotide for detection of SNP TSC0038831
aaatactaacttt

SEQ ID NO: 153589 - DNA, 13 bp, Artificial Sequence
  Oligonucleotide for detection of SNP TSC0038831
aaagttggtattt

SEQ ID NO: 153590 - DNA, 13 bp, Artificial Sequence
  Oligonucleotide for detection of SNP TSC0038831
aaataccaacttt

SEQ ID NO: 153591 - DNA, 13 bp, Artificial Sequence
  Oligonucleotide for detection of SNP TSC0038833
tattttatagaga

SEQ ID NO: 153592 - DNA, 13 bp, Artificial Sequence
  Oligonucleotide for detection of SNP TSC0038833
tctctataaaata

SEQ ID NO: 153593 - DNA, 13 bp, Artificial Sequence
  Oligonucleotide for detection of SNP TSC0038833
tattttgtagaga

SEQ ID NO: 153594 - DNA, 13 bp, Artificial Sequence
  Oligonucleotide for detection of SNP TSC0038833
tctctacaaaata

SEQ ID NO: 153595 - DNA, 13 bp, Artificial Sequence
  Oligonucleotide for detection of SNP TSC0038833
tatttcgtagaga

SEQ ID NO: 153596 - DNA, 13 bp, Artificial Sequence
  Oligonucleotide for detection of SNP TSC0038833
tctctacgaaata

SEQ ID NO: 153597 - DNA, 13 bp, Artificial Sequence
  Oligonucleotide for detection of SNP TSC0038833
tttttatgagata

SEQ ID NO: 153598 - DNA, 13 bp, Artificial Sequence
  Oligonucleotide for detection of SNP TSC0038833
tatctcataaaaa

SEQ ID NO: 153599 - DNA, 13 bp, Artificial Sequence
  Oligonucleotide for detection of SNP TSC0038833
tttttacgagata

SEQ ID NO: 153600 - DNA, 13 bp, Artificial Sequence
  Oligonucleotide for detection of SNP TSC0038833
tatctcgtaaaaa

SEQ ID NO: 153601 - DNA, 13 bp, Artificial Sequence
  Oligonucleotide for detection of SNP TSC0038834
ttaaagaatgaay

SEQ ID NO: 153602 - DNA, 13 bp, Artificial Sequence
  Oligonucleotide for detection of SNP TSC0038834
rttcattctttaa

SEQ ID NO: 153603 - DNA, 13 bp, Artificial Sequence
  Oligonucleotide for detection of SNP TSC0038834
ttaaaggatgaay

SEQ ID NO: 153604 - DNA, 13 bp, Artificial Sequence
  Oligonucleotide for detection of SNP TSC0038834
rttcatcctttaa

SEQ ID NO: 153605 - DNA, 13 bp, Artificial Sequence
  Oligonucleotide for detection of SNP TSC0038835
tttagagtggtat

SEQ ID NO: 153606 - DNA, 13 bp, Artificial Sequence
  Oligonucleotide for detection of SNP TSC0038835
ataccactctaaa

SEQ ID NO: 153607 - DNA, 13 bp, Artificial Sequence
  Oligonucleotide for detection of SNP TSC0038835
tttagaatggtat

SEQ ID NO: 153608 - DNA, 13 bp, Artificial Sequence
  Oligonucleotide for detection of SNP TSC0038835
ataccattctaaa

SEQ ID NO: 153609 - DNA, 13 bp, Artificial Sequence
  Oligonucleotide for detection of SNP TSC0038839
tgttttattggty

SEQ ID NO: 153610 - DNA, 13 bp, Artificial Sequence
  Oligonucleotide for detection of SNP TSC0038839
raccaataaaaca

SEQ ID NO: 153611 - DNA, 13 bp, Artificial Sequence
  Oligonucleotide for detection of SNP TSC0038839
tgtttttttggty

SEQ ID NO: 153612 - DNA, 13 bp, Artificial Sequence
  Oligonucleotide for detection of SNP TSC0038839
raccaaaaaaaca

SEQ ID NO: 153613 - DNA, 13 bp, Artificial Sequence
  Oligonucleotide for detection of SNP TSC0038839
ggttagtgaagta

SEQ ID NO: 153614 - DNA, 13 bp, Artificial Sequence
  Oligonucleotide for detection of SNP TSC0038839
tacttcactaacc

SEQ ID NO: 153615 - DNA, 13 bp, Artificial Sequence
  Oligonucleotide for detection of SNP TSC0038839
ggttagggaagta

SEQ ID NO: 153616 - DNA, 13 bp, Artificial Sequence
  Oligonucleotide for detection of SNP TSC0038839
tacttccctaacc

SEQ ID NO: 153617 - DNA, 13 bp, Artificial Sequence
  Oligonucleotide for detection of SNP TSC0038840
tatagtgattgtt

SEQ ID NO: 153618 - DNA, 13 bp, Artificial Sequence
  Oligonucleotide for detection of SNP TSC0038840
aacaatcactata

SEQ ID NO: 153619 - DNA, 13 bp, Artificial Sequence
  Oligonucleotide for detection of SNP TSC0038840
tatagtaattgtt

SEQ ID NO: 153620 - DNA, 13 bp, Artificial Sequence
  Oligonucleotide for detection of SNP TSC0038840
aacaattactata

SEQ ID NO: 153621 - DNA, 13 bp, Artificial Sequence
  Oligonucleotide for detection of SNP TSC0038841
gttttttttaaat

SEQ ID NO: 153622 - DNA, 13 bp, Artificial Sequence
  Oligonucleotide for detection of SNP TSC0038841
atttaaaaaaaac

SEQ ID NO: 153623 - DNA, 13 bp, Artificial Sequence
  Oligonucleotide for detection of SNP TSC0038841
gtttttgttaaat

SEQ ID NO: 153624 - DNA, 13 bp, Artificial Sequence
  Oligonucleotide for detection of SNP TSC0038841
atttaacaaaaac

SEQ ID NO: 153625 - DNA, 13 bp, Artificial Sequence
  Oligonucleotide for detection of SNP TSC0038841
atttaagaggggy

SEQ ID NO: 153626 - DNA, 13 bp, Artificial Sequence
  Oligonucleotide for detection of SNP TSC0038841
rcccctcttaaat

SEQ ID NO: 153627 - DNA, 13 bp, Artificial Sequence
  Oligonucleotide for detection of SNP TSC0038841
atttaataggggy

SEQ ID NO: 153628 - DNA, 13 bp, Artificial Sequence
  Oligonucleotide for detection of SNP TSC0038841
rcccctattaaat

SEQ ID NO: 153629 - DNA, 13 bp, Artificial Sequence
  Oligonucleotide for detection of SNP TSC0038842
atttttagaggtt

SEQ ID NO: 153630 - DNA, 13 bp, Artificial Sequence
  Oligonucleotide for detection of SNP TSC0038842
aacctctaaaaat

SEQ ID NO: 153631 - DNA, 13 bp, Artificial Sequence
  Oligonucleotide for detection of SNP TSC0038842
atttttggaggtt

SEQ ID NO: 153632 - DNA, 13 bp, Artificial Sequence
  Oligonucleotide for detection of SNP TSC0038842
aacctccaaaaat

SEQ ID NO: 153633 - DNA, 13 bp, Artificial Sequence
  Oligonucleotide for detection of SNP TSC0038843
tataatagaaaga

SEQ ID NO: 153634 - DNA, 13 bp, Artificial Sequence
  Oligonucleotide for detection of SNP TSC0038843
tctttctattata

SEQ ID NO: 153635 - DNA, 13 bp, Artificial Sequence
  Oligonucleotide for detection of SNP TSC0038843
tataattgaaaga

SEQ ID NO: 153636 - DNA, 13 bp, Artificial Sequence
  Oligonucleotide for detection of SNP TSC0038843
tctttcaattata

SEQ ID NO: 153637 - DNA, 13 bp, Artificial Sequence
  Oligonucleotide for detection of SNP TSC0038843
tataatcgaaaga

SEQ ID NO: 153638 - DNA, 13 bp, Artificial Sequence
  Oligonucleotide for detection of SNP TSC0038843
tctttcgattata

SEQ ID NO: 153639 - DNA, 13 bp, Artificial Sequence
  Oligonucleotide for detection of SNP TSC0038843
ttttttggttata

SEQ ID NO: 153640 - DNA, 13 bp, Artificial Sequence
  Oligonucleotide for detection of SNP TSC0038843
tataaccaaaaaa

SEQ ID NO: 153641 - DNA, 13 bp, Artificial Sequence
  Oligonucleotide for detection of SNP TSC0038843
tttttcggttata

SEQ ID NO: 153642 - DNA, 13 bp, Artificial Sequence
  Oligonucleotide for detection of SNP TSC0038843
tataaccgaaaaa

SEQ ID NO: 153643 - DNA, 13 bp, Artificial Sequence
  Oligonucleotide for detection of SNP TSC0038845
gggtaggatagag

SEQ ID NO: 153644 - DNA, 13 bp, Artificial Sequence
  Oligonucleotide for detection of SNP TSC0038845
ctctatcctaccc

SEQ ID NO: 153645 - DNA, 13 bp, Artificial Sequence
  Oligonucleotide for detection of SNP TSC0038845
gggtagaatagag

SEQ ID NO: 153646 - DNA, 13 bp, Artificial Sequence
  Oligonucleotide for detection of SNP TSC0038845
ctctattctaccc

SEQ ID NO: 153647 - DNA, 13 bp, Artificial Sequence
  Oligonucleotide for detection of SNP TSC0038846
tataaaaattttt

SEQ ID NO: 153648 - DNA, 13 bp, Artificial Sequence
  Oligonucleotide for detection of SNP TSC0038846
aaaaatttttata

SEQ ID NO: 153649 - DNA, 13 bp, Artificial Sequence
  Oligonucleotide for detection of SNP TSC0038846
tataaagattttt

SEQ ID NO: 153650 - DNA, 13 bp, Artificial Sequence
  Oligonucleotide for detection of SNP TSC0038846
aaaaatctttata

SEQ ID NO: 153651 - DNA, 13 bp, Artificial Sequence
  Oligonucleotide for detection of SNP TSC0038847
gagagataggatg

SEQ ID NO: 153652 - DNA, 13 bp, Artificial Sequence
  Oligonucleotide for detection of SNP TSC0038847
catcctatctctc

SEQ ID NO: 153653 - DNA, 13 bp, Artificial Sequence
  Oligonucleotide for detection of SNP TSC0038847
gagagagaggatg

SEQ ID NO: 153654 - DNA, 13 bp, Artificial Sequence
  Oligonucleotide for detection of SNP TSC0038847
catcctctctctc

SEQ ID NO: 153655 - DNA, 13 bp, Artificial Sequence
  Oligonucleotide for detection of SNP TSC0038847
gagagataggacg

SEQ ID NO: 153656 - DNA, 13 bp, Artificial Sequence
  Oligonucleotide for detection of SNP TSC0038847
cgtcctatctctc

SEQ ID NO: 153657 - DNA, 13 bp, Artificial Sequence
  Oligonucleotide for detection of SNP TSC0038847
gagagagaggacg

SEQ ID NO: 153658 - DNA, 13 bp, Artificial Sequence
  Oligonucleotide for detection of SNP TSC0038847
cgtcctctctctc

SEQ ID NO: 153659 - DNA, 13 bp, Artificial Sequence
  Oligonucleotide for detection of SNP TSC0038847
cgttttgttttty

SEQ ID NO: 153660 - DNA, 13 bp, Artificial Sequence
  Oligonucleotide for detection of SNP TSC0038847
raaaaacaaaacg

SEQ ID NO: 153661 - DNA, 13 bp, Artificial Sequence
  Oligonucleotide for detection of SNP TSC0038847
cgtttttttttty

SEQ ID NO: 153662 - DNA, 13 bp, Artificial Sequence
  Oligonucleotide for detection of SNP TSC0038847
raaaaaaaaaacg

SEQ ID NO: 153663 - DNA, 13 bp, Artificial Sequence
  Oligonucleotide for detection of SNP TSC0038848
aaaggagtagtaa

SEQ ID NO: 153664 - DNA, 13 bp, Artificial Sequence
  Oligonucleotide for detection of SNP TSC0038848
ttactactccttt

SEQ ID NO: 153665 - DNA, 13 bp, Artificial Sequence
  Oligonucleotide for detection of SNP TSC0038848
aaaggaatagtaa

SEQ ID NO: 153666 - DNA, 13 bp, Artificial Sequence
  Oligonucleotide for detection of SNP TSC0038848
ttactattccttt

SEQ ID NO: 153667 - DNA, 13 bp, Artificial Sequence
  Oligonucleotide for detection of SNP TSC0038849
agttgtgttattt

SEQ ID NO: 153668 - DNA, 13 bp, Artificial Sequence
  Oligonucleotide for detection of SNP TSC0038849
aaataacacaact

SEQ ID NO: 153669 - DNA, 13 bp, Artificial Sequence
  Oligonucleotide for detection of SNP TSC0038849
agttgtattattt

SEQ ID NO: 153670 - DNA, 13 bp, Artificial Sequence
  Oligonucleotide for detection of SNP TSC0038849
aaataatacaact

SEQ ID NO: 153671 - DNA, 13 bp, Artificial Sequence
  Oligonucleotide for detection of SNP TSC0038850
agtttagttagta

SEQ ID NO: 153672 - DNA, 13 bp, Artificial Sequence
  Oligonucleotide for detection of SNP TSC0038850
tactaactaaact

SEQ ID NO: 153673 - DNA, 13 bp, Artificial Sequence
  Oligonucleotide for detection of SNP TSC0038850
agtttatttagta

SEQ ID NO: 153674 - DNA, 13 bp, Artificial Sequence
  Oligonucleotide for detection of SNP TSC0038850
tactaaataaact

SEQ ID NO: 153675 - DNA, 13 bp, Artificial Sequence
  Oligonucleotide for detection of SNP TSC0038850
tgttgattgggtt

SEQ ID NO: 153676 - DNA, 13 bp, Artificial Sequence
  Oligonucleotide for detection of SNP TSC0038850
aacccaatcaaca

SEQ ID NO: 153677 - DNA, 13 bp, Artificial Sequence
  Oligonucleotide for detection of SNP TSC0038850
tgttgaatgggtt

SEQ ID NO: 153678 - DNA, 13 bp, Artificial Sequence
  Oligonucleotide for detection of SNP TSC0038850
aacccattcaaca

SEQ ID NO: 153679 - DNA, 13 bp, Artificial Sequence
  Oligonucleotide for detection of SNP TSC0038853
ggtttaggggtag

SEQ ID NO: 153680 - DNA, 13 bp, Artificial Sequence
  Oligonucleotide for detection of SNP TSC0038853
ctacccctaaacc

SEQ ID NO: 153681 - DNA, 13 bp, Artificial Sequence
  Oligonucleotide for detection of SNP TSC0038853
ggtttaagggtag

SEQ ID NO: 153682 - DNA, 13 bp, Artificial Sequence
  Oligonucleotide for detection of SNP TSC0038853
ctacccttaaacc

SEQ ID NO: 153683 - DNA, 13 bp, Artificial Sequence
  Oligonucleotide for detection of SNP TSC0038854
ggaggaattgttt

SEQ ID NO: 153684 - DNA, 13 bp, Artificial Sequence
  Oligonucleotide for detection of SNP TSC0038854
aaacaattcctcc

SEQ ID NO: 153685 - DNA, 13 bp, Artificial Sequence
  Oligonucleotide for detection of SNP TSC0038854
ggaggagttgttt

SEQ ID NO: 153686 - DNA, 13 bp, Artificial Sequence
  Oligonucleotide for detection of SNP TSC0038854
aaacaactcctcc

SEQ ID NO: 153687 - DNA, 13 bp, Artificial Sequence
  Oligonucleotide for detection of SNP TSC0038856
ttattagtgggtt

SEQ ID NO: 153688 - DNA, 13 bp, Artificial Sequence
  Oligonucleotide for detection of SNP TSC0038856
aacccactaataa

SEQ ID NO: 153689 - DNA, 13 bp, Artificial Sequence
  Oligonucleotide for detection of SNP TSC0038856
ttattaatgggtt

SEQ ID NO: 153690 - DNA, 13 bp, Artificial Sequence
  Oligonucleotide for detection of SNP TSC0038856
aacccattaataa

SEQ ID NO: 153691 - DNA, 13 bp, Artificial Sequence
  Oligonucleotide for detection of SNP TSC0038857
atagaggtttaty

SEQ ID NO: 153692 - DNA, 13 bp, Artificial Sequence
  Oligonucleotide for detection of SNP TSC0038857
rataaacctctat

SEQ ID NO: 153693 - DNA, 13 bp, Artificial Sequence
  Oligonucleotide for detection of SNP TSC0038857
atagagttttaty

SEQ ID NO: 153694 - DNA, 13 bp, Artificial Sequence
  Oligonucleotide for detection of SNP TSC0038857
rataaaactctat

SEQ ID NO: 153695 - DNA, 13 bp, Artificial Sequence
  Oligonucleotide for detection of SNP TSC0038857
ggtaggtttttgt

SEQ ID NO: 153696 - DNA, 13 bp, Artificial Sequence
  Oligonucleotide for detection of SNP TSC0038857
acaaaaacctacc

SEQ ID NO: 153697 - DNA, 13 bp, Artificial Sequence
  Oligonucleotide for detection of SNP TSC0038857
ggtaggattttgt

SEQ ID NO: 153698 - DNA, 13 bp, Artificial Sequence
  Oligonucleotide for detection of SNP TSC0038857
acaaaatcctacc

SEQ ID NO: 153699 - DNA, 13 bp, Artificial Sequence
  Oligonucleotide for detection of SNP TSC0038858
tatattattatty

SEQ ID NO: 153700 - DNA, 13 bp, Artificial Sequence
  Oligonucleotide for detection of SNP TSC0038858
raataataatata

SEQ ID NO: 153701 - DNA, 13 bp, Artificial Sequence
  Oligonucleotide for detection of SNP TSC0038858
ggatggtgatgtg

SEQ ID NO: 153702 - DNA, 13 bp, Artificial Sequence
  Oligonucleotide for detection of SNP TSC0038858
cacatcaccatcc

SEQ ID NO: 153703 - DNA, 13 bp, Artificial Sequence
  Oligonucleotide for detection of SNP TSC0038858
ggatggagatgtg

SEQ ID NO: 153704 - DNA, 13 bp, Artificial Sequence
  Oligonucleotide for detection of SNP TSC0038858
cacatctccatcc

SEQ ID NO: 153705 - DNA, 13 bp, Artificial Sequence
  Oligonucleotide for detection of SNP TSC0038860
tattttattggay

SEQ ID NO: 153706 - DNA, 13 bp, Artificial Sequence
  Oligonucleotide for detection of SNP TSC0038860
rtccaataaaata

SEQ ID NO: 153707 - DNA, 13 bp, Artificial Sequence
  Oligonucleotide for detection of SNP TSC0038860
tattttgttggay

SEQ ID NO: 153708 - DNA, 13 bp, Artificial Sequence
  Oligonucleotide for detection of SNP TSC0038860
rtccaacaaaata

SEQ ID NO: 153709 - DNA, 13 bp, Artificial Sequence
  Oligonucleotide for detection of SNP TSC0038860
tatttcgttggay

SEQ ID NO: 153710 - DNA, 13 bp, Artificial Sequence
  Oligonucleotide for detection of SNP TSC0038860
rtccaacgaaata

SEQ ID NO: 153711 - DNA, 13 bp, Artificial Sequence
  Oligonucleotide for detection of SNP TSC0038860
gtttagtggagtg

SEQ ID NO: 153712 - DNA, 13 bp, Artificial Sequence
  Oligonucleotide for detection of SNP TSC0038860
cactccactaaac

SEQ ID NO: 153713 - DNA, 13 bp, Artificial Sequence
  Oligonucleotide for detection of SNP TSC0038860
gtttagcggagtg

SEQ ID NO: 153714 - DNA, 13 bp, Artificial Sequence
  Oligonucleotide for detection of SNP TSC0038860
cactccgctaaac

SEQ ID NO: 153715 - DNA, 13 bp, Artificial Sequence
  Oligonucleotide for detection of SNP TSC0038861
gtagtagttttaa

SEQ ID NO: 153716 - DNA, 13 bp, Artificial Sequence
  Oligonucleotide for detection of SNP TSC0038861
ttaaaactactac

SEQ ID NO: 153717 - DNA, 13 bp, Artificial Sequence
  Oligonucleotide for detection of SNP TSC0038861
gtagtaattttaa

SEQ ID NO: 153718 - DNA, 13 bp, Artificial Sequence
  Oligonucleotide for detection of SNP TSC0038861
ttaaaattactac

SEQ ID NO: 153719 - DNA, 13 bp, Artificial Sequence
  Oligonucleotide for detection of SNP TSC0038864
gggaaaaagattt

SEQ ID NO: 153720 - DNA, 13 bp, Artificial Sequence
  Oligonucleotide for detection of SNP TSC0038864
aaatctttttccc

SEQ ID NO: 153721 - DNA, 13 bp, Artificial Sequence
  Oligonucleotide for detection of SNP TSC0038864
gggaaagagattt

SEQ ID NO: 153722 - DNA, 13 bp, Artificial Sequence
  Oligonucleotide for detection of SNP TSC0038864
aaatctctttccc

SEQ ID NO: 153723 - DNA, 13 bp, Artificial Sequence
  Oligonucleotide for detection of SNP TSC0038866
atatttatgatta

SEQ ID NO: 153724 - DNA, 13 bp, Artificial Sequence
  Oligonucleotide for detection of SNP TSC0038866
taatcataaatat

SEQ ID NO: 153725 - DNA, 13 bp, Artificial Sequence
  Oligonucleotide for detection of SNP TSC0038866
atatttttgatta

SEQ ID NO: 153726 - DNA, 13 bp, Artificial Sequence
  Oligonucleotide for detection of SNP TSC0038866
taatcaaaaatat

SEQ ID NO: 153727 - DNA, 13 bp, Artificial Sequence
  Oligonucleotide for detection of SNP TSC0038866
tgattatgaatgt

SEQ ID NO: 153728 - DNA, 13 bp, Artificial Sequence
  Oligonucleotide for detection of SNP TSC0038866
acattcataatca

SEQ ID NO: 153729 - DNA, 13 bp, Artificial Sequence
  Oligonucleotide for detection of SNP TSC0038866
tgattaagaatgt

SEQ ID NO: 153730 - DNA, 13 bp, Artificial Sequence
  Oligonucleotide for detection of SNP TSC0038866
acattcttaatca

SEQ ID NO: 153731 - DNA, 13 bp, Artificial Sequence
  Oligonucleotide for detection of SNP TSC0038867
ttaagtattagga

SEQ ID NO: 153732 - DNA, 13 bp, Artificial Sequence
  Oligonucleotide for detection of SNP TSC0038867
tcctaatacttaa

SEQ ID NO: 153733 - DNA, 13 bp, Artificial Sequence
  Oligonucleotide for detection of SNP TSC0038867
ttaagtgttagga

SEQ ID NO: 153734 - DNA, 13 bp, Artificial Sequence
  Oligonucleotide for detection of SNP TSC0038867
tcctaacacttaa

SEQ ID NO: 153735 - DNA, 13 bp, Artificial Sequence
  Oligonucleotide for detection of SNP TSC0038867
ttaagcgttagga

SEQ ID NO: 153736 - DNA, 13 bp, Artificial Sequence
  Oligonucleotide for detection of SNP TSC0038867
tcctaacgcttaa

SEQ ID NO: 153737 - DNA, 13 bp, Artificial Sequence
  Oligonucleotide for detection of SNP TSC0038867
ttttggtgtttaa

SEQ ID NO: 153738 - DNA, 13 bp, Artificial Sequence
  Oligonucleotide for detection of SNP TSC0038867
ttaaacaccaaaa

SEQ ID NO: 153739 - DNA, 13 bp, Artificial Sequence
  Oligonucleotide for detection of SNP TSC0038867
ttttggcgtttaa

SEQ ID NO: 153740 - DNA, 13 bp, Artificial Sequence
  Oligonucleotide for detection of SNP TSC0038867
ttaaacgccaaaa

SEQ ID NO: 153741 - DNA, 13 bp, Artificial Sequence
  Oligonucleotide for detection of SNP TSC0038868
gtgtagtgtaggy

SEQ ID NO: 153742 - DNA, 13 bp, Artificial Sequence
  Oligonucleotide for detection of SNP TSC0038868
rcctacactacac

SEQ ID NO: 153743 - DNA, 13 bp, Artificial Sequence
  Oligonucleotide for detection of SNP TSC0038868
gtgtagcgtaggy

SEQ ID NO: 153744 - DNA, 13 bp, Artificial Sequence
  Oligonucleotide for detection of SNP TSC0038868
rcctacgctacac

SEQ ID NO: 153745 - DNA, 13 bp, Artificial Sequence
  Oligonucleotide for detection of SNP TSC0038868
gtttatgttgtay

SEQ ID NO: 153746 - DNA, 13 bp, Artificial Sequence
  Oligonucleotide for detection of SNP TSC0038868
rtacaacataaac

SEQ ID NO: 153747 - DNA, 13 bp, Artificial Sequence
  Oligonucleotide for detection of SNP TSC0038868
gtttatattgtay

SEQ ID NO: 153748 - DNA, 13 bp, Artificial Sequence
  Oligonucleotide for detection of SNP TSC0038868
rtacaatataaac

SEQ ID NO: 153749 - DNA, 13 bp, Artificial Sequence
  Oligonucleotide for detection of SNP TSC0038868
gtttacgttgtay

SEQ ID NO: 153750 - DNA, 13 bp, Artificial Sequence
  Oligonucleotide for detection of SNP TSC0038868
rtacaacgtaaac

SEQ ID NO: 153751 - DNA, 13 bp, Artificial Sequence
  Oligonucleotide for detection of SNP TSC0038870
gttgttaagtttt

SEQ ID NO: 153752 - DNA, 13 bp, Artificial Sequence
  Oligonucleotide for detection of SNP TSC0038870
aaaacttaacaac

SEQ ID NO: 153753 - DNA, 13 bp, Artificial Sequence
  Oligonucleotide for detection of SNP TSC0038870
gttgttgagtttt

SEQ ID NO: 153754 - DNA, 13 bp, Artificial Sequence
  Oligonucleotide for detection of SNP TSC0038870
aaaactcaacaac

SEQ ID NO: 153755 - DNA, 13 bp, Artificial Sequence
  Oligonucleotide for detection of SNP TSC0038870
gttgtcgagtttt

SEQ ID NO: 153756 - DNA, 13 bp, Artificial Sequence
  Oligonucleotide for detection of SNP TSC0038870
aaaactcgacaac

SEQ ID NO: 153757 - DNA, 13 bp, Artificial Sequence
  Oligonucleotide for detection of SNP TSC0038870
aggatttgatagy

SEQ ID NO: 153758 - DNA, 13 bp, Artificial Sequence
  Oligonucleotide for detection of SNP TSC0038870
rctatcaaatcct

SEQ ID NO: 153759 - DNA, 13 bp, Artificial Sequence
  Oligonucleotide for detection of SNP TSC0038870
aggattcgatagy

SEQ ID NO: 153760 - DNA, 13 bp, Artificial Sequence
  Oligonucleotide for detection of SNP TSC0038870
rctatcgaatcct

SEQ ID NO: 153761 - DNA, 13 bp, Artificial Sequence
  Oligonucleotide for detection of SNP TSC0038871
tttggtaagggta

SEQ ID NO: 153762 - DNA, 13 bp, Artificial Sequence
  Oligonucleotide for detection of SNP TSC0038871
tacccttaccaaa

SEQ ID NO: 153763 - DNA, 13 bp, Artificial Sequence
  Oligonucleotide for detection of SNP TSC0038871
tttggttagggta

SEQ ID NO: 153764 - DNA, 13 bp, Artificial Sequence
  Oligonucleotide for detection of SNP TSC0038871
taccctaaccaaa

SEQ ID NO: 153765 - DNA, 13 bp, Artificial Sequence
  Oligonucleotide for detection of SNP TSC0038871
tgttttagttaaa

SEQ ID NO: 153766 - DNA, 13 bp, Artificial Sequence
  Oligonucleotide for detection of SNP TSC0038871
tttaactaaaaca

SEQ ID NO: 153767 - DNA, 13 bp, Artificial Sequence
  Oligonucleotide for detection of SNP TSC0038872
ttgaaattaaaaa

SEQ ID NO: 153768 - DNA, 13 bp, Artificial Sequence
  Oligonucleotide for detection of SNP TSC0038872
tttttaatttcaa

SEQ ID NO: 153769 - DNA, 13 bp, Artificial Sequence
  Oligonucleotide for detection of SNP TSC0038872
ttgaaagtaaaaa

SEQ ID NO: 153770 - DNA, 13 bp, Artificial Sequence
  Oligonucleotide for detection of SNP TSC0038872
tttttactttcaa

SEQ ID NO: 153771 - DNA, 13 bp, Artificial Sequence
  Oligonucleotide for detection of SNP TSC0038873
gttttagttatty

SEQ ID NO: 153772 - DNA, 13 bp, Artificial Sequence
  Oligonucleotide for detection of SNP TSC0038873
raataactaaaac

SEQ ID NO: 153773 - DNA, 13 bp, Artificial Sequence
  Oligonucleotide for detection of SNP TSC0038873
gagtaagtaagay

SEQ ID NO: 153774 - DNA, 13 bp, Artificial Sequence
  Oligonucleotide for detection of SNP TSC0038873
rtcttacttactc

SEQ ID NO: 153775 - DNA, 13 bp, Artificial Sequence
  Oligonucleotide for detection of SNP TSC0038873
gagtaattaagay

SEQ ID NO: 153776 - DNA, 13 bp, Artificial Sequence
  Oligonucleotide for detection of SNP TSC0038873
rtcttaattactc

SEQ ID NO: 153777 - DNA, 13 bp, Artificial Sequence
  Oligonucleotide for detection of SNP TSC0038875
gaagttgaatata

SEQ ID NO: 153778 - DNA, 13 bp, Artificial Sequence
  Oligonucleotide for detection of SNP TSC0038875
tatattcaacttc

SEQ ID NO: 153779 - DNA, 13 bp, Artificial Sequence
  Oligonucleotide for detection of SNP TSC0038875
gaagttaaatata

SEQ ID NO: 153780 - DNA, 13 bp, Artificial Sequence
  Oligonucleotide for detection of SNP TSC0038875
tatatttaacttc

SEQ ID NO: 153781 - DNA, 13 bp, Artificial Sequence
  Oligonucleotide for detection of SNP TSC0038876
gaggtttattttt

SEQ ID NO: 153782 - DNA, 13 bp, Artificial Sequence
  Oligonucleotide for detection of SNP TSC0038876
aaaaataaacctc

SEQ ID NO: 153783 - DNA, 13 bp, Artificial Sequence
  Oligonucleotide for detection of SNP TSC0038876
aaaaattggttty

SEQ ID NO: 153784 - DNA, 13 bp, Artificial Sequence
  Oligonucleotide for detection of SNP TSC0038876
raaaccaattttt

SEQ ID NO: 153785 - DNA, 13 bp, Artificial Sequence
  Oligonucleotide for detection of SNP TSC0038876
aaaaatgggttty

SEQ ID NO: 153786 - DNA, 13 bp, Artificial Sequence
  Oligonucleotide for detection of SNP TSC0038876
raaacccattttt

SEQ ID NO: 153787 - DNA, 13 bp, Artificial Sequence
  Oligonucleotide for detection of SNP TSC0038880
aatttggttagtt

SEQ ID NO: 153788 - DNA, 13 bp, Artificial Sequence
  Oligonucleotide for detection of SNP TSC0038880
aactaaccaaatt

SEQ ID NO: 153789 - DNA, 13 bp, Artificial Sequence
  Oligonucleotide for detection of SNP TSC0038880
aatttgattagtt

SEQ ID NO: 153790 - DNA, 13 bp, Artificial Sequence
  Oligonucleotide for detection of SNP TSC0038880
aactaatcaaatt

SEQ ID NO: 153791 - DNA, 13 bp, Artificial Sequence
  Oligonucleotide for detection of SNP TSC0038881
tgtaatattttgt

SEQ ID NO: 153792 - DNA, 13 bp, Artificial Sequence
  Oligonucleotide for detection of SNP TSC0038881
acaaaatattaca

SEQ ID NO: 153793 - DNA, 13 bp, Artificial Sequence
  Oligonucleotide for detection of SNP TSC0038881
tgtaatgttttgt

SEQ ID NO: 153794 - DNA, 13 bp, Artificial Sequence
  Oligonucleotide for detection of SNP TSC0038881
acaaaacattaca

SEQ ID NO: 153795 - DNA, 13 bp, Artificial Sequence
  Oligonucleotide for detection of SNP TSC0038881
cgtaatattttgt

SEQ ID NO: 153796 - DNA, 13 bp, Artificial Sequence
  Oligonucleotide for detection of SNP TSC0038881
acaaaatattacg

SEQ ID NO: 153797 - DNA, 13 bp, Artificial Sequence
  Oligonucleotide for detection of SNP TSC0038881
cgtaatgttttgt

SEQ ID NO: 153798 - DNA, 13 bp, Artificial Sequence
  Oligonucleotide for detection of SNP TSC0038881
acaaaacattacg

SEQ ID NO: 153799 - DNA, 13 bp, Artificial Sequence
  Oligonucleotide for detection of SNP TSC0038881
tgtaacgttttgt

SEQ ID NO: 153800 - DNA, 13 bp, Artificial Sequence
  Oligonucleotide for detection of SNP TSC0038881
acaaaacgttaca

SEQ ID NO: 153801 - DNA, 13 bp, Artificial Sequence
  Oligonucleotide for detection of SNP TSC0038881
cgtaacgttttgt

SEQ ID NO: 153802 - DNA, 13 bp, Artificial Sequence
  Oligonucleotide for detection of SNP TSC0038881
acaaaacgttacg

SEQ ID NO: 153803 - DNA, 13 bp, Artificial Sequence
  Oligonucleotide for detection of SNP TSC0038881
ataggatgttgtg

SEQ ID NO: 153804 - DNA, 13 bp, Artificial Sequence
  Oligonucleotide for detection of SNP TSC0038881
cacaacatcctat

SEQ ID NO: 153805 - DNA, 13 bp, Artificial Sequence
  Oligonucleotide for detection of SNP TSC0038881
ataggatgttgcg

SEQ ID NO: 153806 - DNA, 13 bp, Artificial Sequence
  Oligonucleotide for detection of SNP TSC0038881
cgcaacatcctat

SEQ ID NO: 153807 - DNA, 13 bp, Artificial Sequence
  Oligonucleotide for detection of SNP TSC0038881
ataggacgttgtg

SEQ ID NO: 153808 - DNA, 13 bp, Artificial Sequence
  Oligonucleotide for detection of SNP TSC0038881
cacaacgtcctat

SEQ ID NO: 153809 - DNA, 13 bp, Artificial Sequence
  Oligonucleotide for detection of SNP TSC0038881
ataggacgttgcg

SEQ ID NO: 153810 - DNA, 13 bp, Artificial Sequence
  Oligonucleotide for detection of SNP TSC0038881
cgcaacgtcctat

SEQ ID NO: 153811 - DNA, 13 bp, Artificial Sequence
  Oligonucleotide for detection of SNP TSC0038884
gttgatgtttata

SEQ ID NO: 153812 - DNA, 13 bp, Artificial Sequence
  Oligonucleotide for detection of SNP TSC0038884
tataaacatcaac

SEQ ID NO: 153813 - DNA, 13 bp, Artificial Sequence
  Oligonucleotide for detection of SNP TSC0038886
atgttagggttay

SEQ ID NO: 153814 - DNA, 13 bp, Artificial Sequence
  Oligonucleotide for detection of SNP TSC0038886
rtaaccctaacat

SEQ ID NO: 153815 - DNA, 13 bp, Artificial Sequence
  Oligonucleotide for detection of SNP TSC0038886
atgttaaggttay

SEQ ID NO: 153816 - DNA, 13 bp, Artificial Sequence
  Oligonucleotide for detection of SNP TSC0038886
rtaaccttaacat

SEQ ID NO: 153817 - DNA, 13 bp, Artificial Sequence
  Oligonucleotide for detection of SNP TSC0038887
ttataatgatgtt

SEQ ID NO: 153818 - DNA, 13 bp, Artificial Sequence
  Oligonucleotide for detection of SNP TSC0038887
aacatcattataa

SEQ ID NO: 153819 - DNA, 13 bp, Artificial Sequence
  Oligonucleotide for detection of SNP TSC0038887
ttataacgatgtt

SEQ ID NO: 153820 - DNA, 13 bp, Artificial Sequence
  Oligonucleotide for detection of SNP TSC0038887
aacatcgttataa

SEQ ID NO: 153821 - DNA, 13 bp, Artificial Sequence
  Oligonucleotide for detection of SNP TSC0038887
aatattgttgtaa

SEQ ID NO: 153822 - DNA, 13 bp, Artificial Sequence
  Oligonucleotide for detection of SNP TSC0038887
ttacaacaatatt

SEQ ID NO: 153823 - DNA, 13 bp, Artificial Sequence
  Oligonucleotide for detection of SNP TSC0038887
aatattattgtaa

SEQ ID NO: 153824 - DNA, 13 bp, Artificial Sequence
  Oligonucleotide for detection of SNP TSC0038887
ttacaataatatt

SEQ ID NO: 153825 - DNA, 13 bp, Artificial Sequence
  Oligonucleotide for detection of SNP TSC0038887
aatatcgttgtaa

SEQ ID NO: 153826 - DNA, 13 bp, Artificial Sequence
  Oligonucleotide for detection of SNP TSC0038887
ttacaacgatatt

SEQ ID NO: 153827 - DNA, 13 bp, Artificial Sequence
  Oligonucleotide for detection of SNP TSC0038892
ttggtgtggtatg

SEQ ID NO: 153828 - DNA, 13 bp, Artificial Sequence
  Oligonucleotide for detection of SNP TSC0038892
cataccacaccaa

SEQ ID NO: 153829 - DNA, 13 bp, Artificial Sequence
  Oligonucleotide for detection of SNP TSC0038892
ttggtggggtatg

SEQ ID NO: 153830 - DNA, 13 bp, Artificial Sequence
  Oligonucleotide for detection of SNP TSC0038892
cataccccaccaa

SEQ ID NO: 153831 - DNA, 13 bp, Artificial Sequence
  Oligonucleotide for detection of SNP TSC0038892
ttggtgcggtatg

SEQ ID NO: 153832 - DNA, 13 bp, Artificial Sequence
  Oligonucleotide for detection of SNP TSC0038892
cataccgcaccaa

SEQ ID NO: 153833 - DNA, 13 bp, Artificial Sequence
  Oligonucleotide for detection of SNP TSC0038892
tatgttgtattag

SEQ ID NO: 153834 - DNA, 13 bp, Artificial Sequence
  Oligonucleotide for detection of SNP TSC0038892
ctaatacaacata

SEQ ID NO: 153835 - DNA, 13 bp, Artificial Sequence
  Oligonucleotide for detection of SNP TSC0038892
tatgttttattag

SEQ ID NO: 153836 - DNA, 13 bp, Artificial Sequence
  Oligonucleotide for detection of SNP TSC0038892
ctaataaaacata

SEQ ID NO: 153837 - DNA, 13 bp, Artificial Sequence
  Oligonucleotide for detection of SNP TSC0038892
tatgtcgtattag

SEQ ID NO: 153838 - DNA, 13 bp, Artificial Sequence
  Oligonucleotide for detection of SNP TSC0038892
ctaatacgacata

SEQ ID NO: 153839 - DNA, 13 bp, Artificial Sequence
  Oligonucleotide for detection of SNP TSC0038893
aaattcgtttttt

SEQ ID NO: 153840 - DNA, 13 bp, Artificial Sequence
  Oligonucleotide for detection of SNP TSC0038893
aaaaaacgaattt

SEQ ID NO: 153841 - DNA, 13 bp, Artificial Sequence
  Oligonucleotide for detection of SNP TSC0038893
aaggaatgaattt

SEQ ID NO: 153842 - DNA, 13 bp, Artificial Sequence
  Oligonucleotide for detection of SNP TSC0038893
aaattcattcctt

SEQ ID NO: 153843 - DNA, 13 bp, Artificial Sequence
  Oligonucleotide for detection of SNP TSC0038893
aaggaacgaattt

SEQ ID NO: 153844 - DNA, 13 bp, Artificial Sequence
  Oligonucleotide for detection of SNP TSC0038893
aaattcgttcctt

SEQ ID NO: 153845 - DNA, 13 bp, Artificial Sequence
  Oligonucleotide for detection of SNP TSC0038898
ttttttgtattaa

SEQ ID NO: 153846 - DNA, 13 bp, Artificial Sequence
  Oligonucleotide for detection of SNP TSC0038898
ttaatacaaaaaa

SEQ ID NO: 153847 - DNA, 13 bp, Artificial Sequence
  Oligonucleotide for detection of SNP TSC0038898
ttggtaaaggagg

SEQ ID NO: 153848 - DNA, 13 bp, Artificial Sequence
  Oligonucleotide for detection of SNP TSC0038898
cctcctttaccaa

SEQ ID NO: 153849 - DNA, 13 bp, Artificial Sequence
  Oligonucleotide for detection of SNP TSC0038898
ttggtataggagg

SEQ ID NO: 153850 - DNA, 13 bp, Artificial Sequence
  Oligonucleotide for detection of SNP TSC0038898
cctcctataccaa

SEQ ID NO: 153851 - DNA, 13 bp, Artificial Sequence
  Oligonucleotide for detection of SNP TSC0038901
tgaagatagagaa

SEQ ID NO: 153852 - DNA, 13 bp, Artificial Sequence
  Oligonucleotide for detection of SNP TSC0038901
ttctctatcttca

SEQ ID NO: 153853 - DNA, 13 bp, Artificial Sequence
  Oligonucleotide for detection of SNP TSC0038901
tgaagagagagaa

SEQ ID NO: 153854 - DNA, 13 bp, Artificial Sequence
  Oligonucleotide for detection of SNP TSC0038901
ttctctctcttca

SEQ ID NO: 153855 - DNA, 13 bp, Artificial Sequence
  Oligonucleotide for detection of SNP TSC0004808
taaaagtattgta

SEQ ID NO: 153856 - DNA, 13 bp, Artificial Sequence
  Oligonucleotide for detection of SNP TSC0004808
tacaatactttta

SEQ ID NO: 153857 - DNA, 13 bp, Artificial Sequence
  Oligonucleotide for detection of SNP TSC0004808
taaaaggattgta

SEQ ID NO: 153858 - DNA, 13 bp, Artificial Sequence
  Oligonucleotide for detection of SNP TSC0004808
tacaatcctttta

SEQ ID NO: 153859 - DNA, 13 bp, Artificial Sequence
  Oligonucleotide for detection of SNP TSC0004808
tataatatttttg

SEQ ID NO: 153860 - DNA, 13 bp, Artificial Sequence
  Oligonucleotide for detection of SNP TSC0004808
caaaaatattata

SEQ ID NO: 153861 - DNA, 13 bp, Artificial Sequence
  Oligonucleotide for detection of SNP TSC0004808
tataatttttttg

SEQ ID NO: 153862 - DNA, 13 bp, Artificial Sequence
  Oligonucleotide for detection of SNP TSC0004808
caaaaaaattata

SEQ ID NO: 153863 - DNA, 13 bp, Artificial Sequence
  Oligonucleotide for detection of SNP TSC0006430
gaattatattttt

SEQ ID NO: 153864 - DNA, 13 bp, Artificial Sequence
  Oligonucleotide for detection of SNP TSC0006430
aaaaatataattc

SEQ ID NO: 153865 - DNA, 13 bp, Artificial Sequence
  Oligonucleotide for detection of SNP TSC0006430
gaattagattttt

SEQ ID NO: 153866 - DNA, 13 bp, Artificial Sequence
  Oligonucleotide for detection of SNP TSC0006430
aaaaatctaattc

SEQ ID NO: 153867 - DNA, 13 bp, Artificial Sequence
  Oligonucleotide for detection of SNP TSC0006430
agaagtatgatty

SEQ ID NO: 153868 - DNA, 13 bp, Artificial Sequence
  Oligonucleotide for detection of SNP TSC0006430
raatcatacttct

SEQ ID NO: 153869 - DNA, 13 bp, Artificial Sequence
  Oligonucleotide for detection of SNP TSC0006430
agaagtttgatty

SEQ ID NO: 153870 - DNA, 13 bp, Artificial Sequence
  Oligonucleotide for detection of SNP TSC0006430
raatcaaacttct

SEQ ID NO: 153871 - DNA, 13 bp, Artificial Sequence
  Oligonucleotide for detection of SNP TSC0038903
ggggttgtaggta

SEQ ID NO: 153872 - DNA, 13 bp, Artificial Sequence
  Oligonucleotide for detection of SNP TSC0038903
tacctacaacccc

SEQ ID NO: 153873 - DNA, 13 bp, Artificial Sequence
  Oligonucleotide for detection of SNP TSC0038903
ggggttataggta

SEQ ID NO: 153874 - DNA, 13 bp, Artificial Sequence
  Oligonucleotide for detection of SNP TSC0038903
tacctataacccc

SEQ ID NO: 153875 - DNA, 13 bp, Artificial Sequence
  Oligonucleotide for detection of SNP TSC0038904
atgggtaaatggt

SEQ ID NO: 153876 - DNA, 13 bp, Artificial Sequence
  Oligonucleotide for detection of SNP TSC0038904
accatttacccat

SEQ ID NO: 153877 - DNA, 13 bp, Artificial Sequence
  Oligonucleotide for detection of SNP TSC0038904
atgggttaatggt

SEQ ID NO: 153878 - DNA, 13 bp, Artificial Sequence
  Oligonucleotide for detection of SNP TSC0038904
accattaacccat

SEQ ID NO: 153879 - DNA, 13 bp, Artificial Sequence
  Oligonucleotide for detection of SNP TSC0038904
attatttatttat

SEQ ID NO: 153880 - DNA, 13 bp, Artificial Sequence
  Oligonucleotide for detection of SNP TSC0038904
ataaataaataat

SEQ ID NO: 153881 - DNA, 13 bp, Artificial Sequence
  Oligonucleotide for detection of SNP TSC0038904
attattgatttat

SEQ ID NO: 153882 - DNA, 13 bp, Artificial Sequence
  Oligonucleotide for detection of SNP TSC0038904
ataaatcaataat

SEQ ID NO: 153883 - DNA, 13 bp, Artificial Sequence
  Oligonucleotide for detection of SNP TSC0038905
aattttaggtata

SEQ ID NO: 153884 - DNA, 13 bp, Artificial Sequence
  Oligonucleotide for detection of SNP TSC0038905
tatacctaaaatt

SEQ ID NO: 153885 - DNA, 13 bp, Artificial Sequence
  Oligonucleotide for detection of SNP TSC0038905
aattttgggtata

SEQ ID NO: 153886 - DNA, 13 bp, Artificial Sequence
  Oligonucleotide for detection of SNP TSC0038905
tatacccaaaatt

SEQ ID NO: 153887 - DNA, 13 bp, Artificial Sequence
  Oligonucleotide for detection of SNP TSC0038905
aatttcgggtata

SEQ ID NO: 153888 - DNA, 13 bp, Artificial Sequence
  Oligonucleotide for detection of SNP TSC0038905
tatacccgaaatt

SEQ ID NO: 153889 - DNA, 13 bp, Artificial Sequence
  Oligonucleotide for detection of SNP TSC0038905
tgtgtttggaatt

SEQ ID NO: 153890 - DNA, 13 bp, Artificial Sequence
  Oligonucleotide for detection of SNP TSC0038905
aattccaaacaca

SEQ ID NO: 153891 - DNA, 13 bp, Artificial Sequence
  Oligonucleotide for detection of SNP TSC0038905
tgtgttcggaatt

SEQ ID NO: 153892 - DNA, 13 bp, Artificial Sequence
  Oligonucleotide for detection of SNP TSC0038905
aattccgaacaca

SEQ ID NO: 153893 - DNA, 13 bp, Artificial Sequence
  Oligonucleotide for detection of SNP TSC0038906
ttgtgaattggaa

SEQ ID NO: 153894 - DNA, 13 bp, Artificial Sequence
  Oligonucleotide for detection of SNP TSC0038906
ttccaattcacaa

SEQ ID NO: 153895 - DNA, 13 bp, Artificial Sequence
  Oligonucleotide for detection of SNP TSC0038906
ttgtgagttggaa

SEQ ID NO: 153896 - DNA, 13 bp, Artificial Sequence
  Oligonucleotide for detection of SNP TSC0038906
ttccaactcacaa

SEQ ID NO: 153897 - DNA, 13 bp, Artificial Sequence
  Oligonucleotide for detection of SNP TSC0038906
tcgtgaattggaa

SEQ ID NO: 153898 - DNA, 13 bp, Artificial Sequence
  Oligonucleotide for detection of SNP TSC0038906
ttccaattcacga

SEQ ID NO: 153899 - DNA, 13 bp, Artificial Sequence
  Oligonucleotide for detection of SNP TSC0038906
tcgtgagttggaa

SEQ ID NO: 153900 - DNA, 13 bp, Artificial Sequence
  Oligonucleotide for detection of SNP TSC0038906
ttccaactcacga

SEQ ID NO: 153901 - DNA, 13 bp, Artificial Sequence
  Oligonucleotide for detection of SNP TSC0007618
tgtttggttttat

SEQ ID NO: 153902 - DNA, 13 bp, Artificial Sequence
  Oligonucleotide for detection of SNP TSC0007618
ataaaaccaaaca

SEQ ID NO: 153903 - DNA, 13 bp, Artificial Sequence
  Oligonucleotide for detection of SNP TSC0007618
tgtttgattttat

SEQ ID NO: 153904 - DNA, 13 bp, Artificial Sequence
  Oligonucleotide for detection of SNP TSC0007618
ataaaatcaaaca

SEQ ID NO: 153905 - DNA, 13 bp, Artificial Sequence
  Oligonucleotide for detection of SNP TSC0038907
tgtaatatttttt

SEQ ID NO: 153906 - DNA, 13 bp, Artificial Sequence
  Oligonucleotide for detection of SNP TSC0038907
aaaaaatattaca

SEQ ID NO: 153907 - DNA, 13 bp, Artificial Sequence
  Oligonucleotide for detection of SNP TSC0038907
tgtaatttttttt

SEQ ID NO: 153908 - DNA, 13 bp, Artificial Sequence
  Oligonucleotide for detection of SNP TSC0038907
aaaaaaaattaca

SEQ ID NO: 153909 - DNA, 13 bp, Artificial Sequence
  Oligonucleotide for detection of SNP TSC0038907
aggaaatgttata

SEQ ID NO: 153910 - DNA, 13 bp, Artificial Sequence
  Oligonucleotide for detection of SNP TSC0038907
tataacatttcct

SEQ ID NO: 153911 - DNA, 13 bp, Artificial Sequence
  Oligonucleotide for detection of SNP TSC0038907
aggaaaggttata

SEQ ID NO: 153912 - DNA, 13 bp, Artificial Sequence
  Oligonucleotide for detection of SNP TSC0038907
tataacctttcct

SEQ ID NO: 153913 - DNA, 13 bp, Artificial Sequence
  Oligonucleotide for detection of SNP TSC0038908
ttagtgtgaatga

SEQ ID NO: 153914 - DNA, 13 bp, Artificial Sequence
  Oligonucleotide for detection of SNP TSC0038908
tcattcacactaa

SEQ ID NO: 153915 - DNA, 13 bp, Artificial Sequence
  Oligonucleotide for detection of SNP TSC0038908
ttagtgcgaatga

SEQ ID NO: 153916 - DNA, 13 bp, Artificial Sequence
  Oligonucleotide for detection of SNP TSC0038908
tcattcgcactaa

SEQ ID NO: 153917 - DNA, 13 bp, Artificial Sequence
  Oligonucleotide for detection of SNP TSC0038908
ttatttatattga

SEQ ID NO: 153918 - DNA, 13 bp, Artificial Sequence
  Oligonucleotide for detection of SNP TSC0038908
tcaatataaataa

SEQ ID NO: 153919 - DNA, 13 bp, Artificial Sequence
  Oligonucleotide for detection of SNP TSC0038908
ttattcgtattga

SEQ ID NO: 153920 - DNA, 13 bp, Artificial Sequence
  Oligonucleotide for detection of SNP TSC0038908
tcaatacgaataa

SEQ ID NO: 153921 - DNA, 13 bp, Artificial Sequence
  Oligonucleotide for detection of SNP TSC0038909
atttaaatattaa

SEQ ID NO: 153922 - DNA, 13 bp, Artificial Sequence
  Oligonucleotide for detection of SNP TSC0038909
ttaatatttaaat

SEQ ID NO: 153923 - DNA, 13 bp, Artificial Sequence
  Oligonucleotide for detection of SNP TSC0038909
atttaagtattaa

SEQ ID NO: 153924 - DNA, 13 bp, Artificial Sequence
  Oligonucleotide for detection of SNP TSC0038909
ttaatacttaaat

SEQ ID NO: 153925 - DNA, 13 bp, Artificial Sequence
  Oligonucleotide for detection of SNP TSC0038910
ttgtttaaatttg

SEQ ID NO: 153926 - DNA, 13 bp, Artificial Sequence
  Oligonucleotide for detection of SNP TSC0038910
caaatttaaacaa

SEQ ID NO: 153927 - DNA, 13 bp, Artificial Sequence
  Oligonucleotide for detection of SNP TSC0038910
ttgtttgaatttg

SEQ ID NO: 153928 - DNA, 13 bp, Artificial Sequence
  Oligonucleotide for detection of SNP TSC0038910
caaattcaaacaa

SEQ ID NO: 153929 - DNA, 13 bp, Artificial Sequence
  Oligonucleotide for detection of SNP TSC0038910
tcgtttaaatttg

SEQ ID NO: 153930 - DNA, 13 bp, Artificial Sequence
  Oligonucleotide for detection of SNP TSC0038910
caaatttaaacga

SEQ ID NO: 153931 - DNA, 13 bp, Artificial Sequence
  Oligonucleotide for detection of SNP TSC0038910
tcgtttgaatttg

SEQ ID NO: 153932 - DNA, 13 bp, Artificial Sequence
  Oligonucleotide for detection of SNP TSC0038910
caaattcaaacga

SEQ ID NO: 153933 - DNA, 13 bp, Artificial Sequence
  Oligonucleotide for detection of SNP TSC0038910
ttgtttaaattcg

SEQ ID NO: 153934 - DNA, 13 bp, Artificial Sequence
  Oligonucleotide for detection of SNP TSC0038910
cgaatttaaacaa

SEQ ID NO: 153935 - DNA, 13 bp, Artificial Sequence
  Oligonucleotide for detection of SNP TSC0038910
ttgtttgaattcg

SEQ ID NO: 153936 - DNA, 13 bp, Artificial Sequence
  Oligonucleotide for detection of SNP TSC0038910
cgaattcaaacaa

SEQ ID NO: 153937 - DNA, 13 bp, Artificial Sequence
  Oligonucleotide for detection of SNP TSC0038910
tcgtttaaattcg

SEQ ID NO: 153938 - DNA, 13 bp, Artificial Sequence
  Oligonucleotide for detection of SNP TSC0038910
cgaatttaaacga

SEQ ID NO: 153939 - DNA, 13 bp, Artificial Sequence
  Oligonucleotide for detection of SNP TSC0038910
tcgtttgaattcg

SEQ ID NO: 153940 - DNA, 13 bp, Artificial Sequence
  Oligonucleotide for detection of SNP TSC0038910
cgaattcaaacga

SEQ ID NO: 153941 - DNA, 13 bp, Artificial Sequence
  Oligonucleotide for detection of SNP TSC0038911
tggtatagtttgg

SEQ ID NO: 153942 - DNA, 13 bp, Artificial Sequence
  Oligonucleotide for detection of SNP TSC0038911
ccaaactatacca

SEQ ID NO: 153943 - DNA, 13 bp, Artificial Sequence
  Oligonucleotide for detection of SNP TSC0038911
tggtatggtttgg

SEQ ID NO: 153944 - DNA, 13 bp, Artificial Sequence
  Oligonucleotide for detection of SNP TSC0038911
ccaaaccatacca

SEQ ID NO: 153945 - DNA, 13 bp, Artificial Sequence
  Oligonucleotide for detection of SNP TSC0038911
tggtacggtttgg

SEQ ID NO: 153946 - DNA, 13 bp, Artificial Sequence
  Oligonucleotide for detection of SNP TSC0038911
ccaaaccgtacca

SEQ ID NO: 153947 - DNA, 13 bp, Artificial Sequence
  Oligonucleotide for detection of SNP TSC0038911
ttaaattgtgtta

SEQ ID NO: 153948 - DNA, 13 bp, Artificial Sequence
  Oligonucleotide for detection of SNP TSC0038911
taacacaatttaa

SEQ ID NO: 153949 - DNA, 13 bp, Artificial Sequence
  Oligonucleotide for detection of SNP TSC0038911
ttaaatcgtgtta

SEQ ID NO: 153950 - DNA, 13 bp, Artificial Sequence
  Oligonucleotide for detection of SNP TSC0038911
taacacgatttaa

SEQ ID NO: 153951 - DNA, 13 bp, Artificial Sequence
  Oligonucleotide for detection of SNP TSC0038912
taagagattgtat

SEQ ID NO: 153952 - DNA, 13 bp, Artificial Sequence
  Oligonucleotide for detection of SNP TSC0038912
atacaatctctta

SEQ ID NO: 153953 - DNA, 13 bp, Artificial Sequence
  Oligonucleotide for detection of SNP TSC0038912
taagagtttgtat

SEQ ID NO: 153954 - DNA, 13 bp, Artificial Sequence
  Oligonucleotide for detection of SNP TSC0038912
atacaaactctta

SEQ ID NO: 153955 - DNA, 13 bp, Artificial Sequence
  Oligonucleotide for detection of SNP TSC0038912
atataattttttg

SEQ ID NO: 153956 - DNA, 13 bp, Artificial Sequence
  Oligonucleotide for detection of SNP TSC0038912
caaaaaattatat

SEQ ID NO: 153957 - DNA, 13 bp, Artificial Sequence
  Oligonucleotide for detection of SNP TSC0038912
atataagtttttg

SEQ ID NO: 153958 - DNA, 13 bp, Artificial Sequence
  Oligonucleotide for detection of SNP TSC0038912
caaaaacttatat

SEQ ID NO: 153959 - DNA, 13 bp, Artificial Sequence
  Oligonucleotide for detection of SNP TSC0038913
ttgtttgatgatg

SEQ ID NO: 153960 - DNA, 13 bp, Artificial Sequence
  Oligonucleotide for detection of SNP TSC0038913
catcatcaaacaa

SEQ ID NO: 153961 - DNA, 13 bp, Artificial Sequence
  Oligonucleotide for detection of SNP TSC0038913
ttgtttaatgatg

SEQ ID NO: 153962 - DNA, 13 bp, Artificial Sequence
  Oligonucleotide for detection of SNP TSC0038913
catcattaaacaa

SEQ ID NO: 153963 - DNA, 13 bp, Artificial Sequence
  Oligonucleotide for detection of SNP TSC0038914
gtataataaatgt

SEQ ID NO: 153964 - DNA, 13 bp, Artificial Sequence
  Oligonucleotide for detection of SNP TSC0038914
acatttattatac

SEQ ID NO: 153965 - DNA, 13 bp, Artificial Sequence
  Oligonucleotide for detection of SNP TSC0038914
gtataagaaatgt

SEQ ID NO: 153966 - DNA, 13 bp, Artificial Sequence
  Oligonucleotide for detection of SNP TSC0038914
acatttcttatac

SEQ ID NO: 153967 - DNA, 13 bp, Artificial Sequence
  Oligonucleotide for detection of SNP TSC0038914
atatttgttatgy

SEQ ID NO: 153968 - DNA, 13 bp, Artificial Sequence
  Oligonucleotide for detection of SNP TSC0038914
rcataacaaatat

SEQ ID NO: 153969 - DNA, 13 bp, Artificial Sequence
  Oligonucleotide for detection of SNP TSC0038914
atattttttatgy

SEQ ID NO: 153970 - DNA, 13 bp, Artificial Sequence
  Oligonucleotide for detection of SNP TSC0038914
rcataaaaaatat

SEQ ID NO: 153971 - DNA, 13 bp, Artificial Sequence
  Oligonucleotide for detection of SNP TSC0009742
atgttagtaatay

SEQ ID NO: 153972 - DNA, 13 bp, Artificial Sequence
  Oligonucleotide for detection of SNP TSC0009742
rtattactaacat

SEQ ID NO: 153973 - DNA, 13 bp, Artificial Sequence
  Oligonucleotide for detection of SNP TSC0009742
atgttaataatay

SEQ ID NO: 153974 - DNA, 13 bp, Artificial Sequence
  Oligonucleotide for detection of SNP TSC0009742
rtattattaacat

SEQ ID NO: 153975 - DNA, 13 bp, Artificial Sequence
  Oligonucleotide for detection of SNP TSC0000782
aattaaatattat

SEQ ID NO: 153976 - DNA, 13 bp, Artificial Sequence
  Oligonucleotide for detection of SNP TSC0000782
ataatatttaatt

SEQ ID NO: 153977 - DNA, 13 bp, Artificial Sequence
  Oligonucleotide for detection of SNP TSC0000782
aattaattattat

SEQ ID NO: 153978 - DNA, 13 bp, Artificial Sequence
  Oligonucleotide for detection of SNP TSC0000782
ataataattaatt

SEQ ID NO: 153979 - DNA, 13 bp, Artificial Sequence
  Oligonucleotide for detection of SNP TSC0000782
atggtgtttaatt

SEQ ID NO: 153980 - DNA, 13 bp, Artificial Sequence
  Oligonucleotide for detection of SNP TSC0000782
aattaaacaccat

SEQ ID NO: 153981 - DNA, 13 bp, Artificial Sequence
  Oligonucleotide for detection of SNP TSC0000782
atggtggttaatt

SEQ ID NO: 153982 - DNA, 13 bp, Artificial Sequence
  Oligonucleotide for detection of SNP TSC0000782
aattaaccaccat

SEQ ID NO: 153983 - DNA, 13 bp, Artificial Sequence
  Oligonucleotide for detection of SNP TSC0000783
ttatttagtttat

SEQ ID NO: 153984 - DNA, 13 bp, Artificial Sequence
  Oligonucleotide for detection of SNP TSC0000783
ataaactaaataa

SEQ ID NO: 153985 - DNA, 13 bp, Artificial Sequence
  Oligonucleotide for detection of SNP TSC0000783
ttatttggtttat

SEQ ID NO: 153986 - DNA, 13 bp, Artificial Sequence
  Oligonucleotide for detection of SNP TSC0000783
ataaaccaaataa

SEQ ID NO: 153987 - DNA, 13 bp, Artificial Sequence
  Oligonucleotide for detection of SNP TSC0000783
ttattcggtttat

SEQ ID NO: 153988 - DNA, 13 bp, Artificial Sequence
  Oligonucleotide for detection of SNP TSC0000783
ataaaccgaataa

SEQ ID NO: 153989 - DNA, 13 bp, Artificial Sequence
  Oligonucleotide for detection of SNP TSC0000783
atagattgagtaa

SEQ ID NO: 153990 - DNA, 13 bp, Artificial Sequence
  Oligonucleotide for detection of SNP TSC0000783
ttactcaatctat

SEQ ID NO: 153991 - DNA, 13 bp, Artificial Sequence
  Oligonucleotide for detection of SNP TSC0000783
atagatcgagtaa

SEQ ID NO: 153992 - DNA, 13 bp, Artificial Sequence
  Oligonucleotide for detection of SNP TSC0000783
ttactcgatctat

SEQ ID NO: 153993 - DNA, 13 bp, Artificial Sequence
  Oligonucleotide for detection of SNP TSC0038919
ataaaaatgttgy

SEQ ID NO: 153994 - DNA, 13 bp, Artificial Sequence
  Oligonucleotide for detection of SNP TSC0038919
rcaacatttttat

SEQ ID NO: 153995 - DNA, 13 bp, Artificial Sequence
  Oligonucleotide for detection of SNP TSC0038919
ataaaagtgttgy

SEQ ID NO: 153996 - DNA, 13 bp, Artificial Sequence
  Oligonucleotide for detection of SNP TSC0038919
rcaacacttttat

SEQ ID NO: 153997 - DNA, 13 bp, Artificial Sequence
  Oligonucleotide for detection of SNP TSC0009713
gtagttagaatta

SEQ ID NO: 153998 - DNA, 13 bp, Artificial Sequence
  Oligonucleotide for detection of SNP TSC0009713
taattctaactac

SEQ ID NO: 153999 - DNA, 13 bp, Artificial Sequence
  Oligonucleotide for detection of SNP TSC0009713
gtagttggaatta

SEQ ID NO: 154000 - DNA, 13 bp, Artificial Sequence
  Oligonucleotide for detection of SNP TSC0009713
taattccaactac

SEQ ID NO: 154001 - DNA, 13 bp, Artificial Sequence
  Oligonucleotide for detection of SNP TSC0038921
ttgggtggagggg

SEQ ID NO: 154002 - DNA, 13 bp, Artificial Sequence
  Oligonucleotide for detection of SNP TSC0038921
cccctccacccaa

SEQ ID NO: 154003 - DNA, 13 bp, Artificial Sequence
  Oligonucleotide for detection of SNP TSC0038921
ttgggtagagggg

SEQ ID NO: 154004 - DNA, 13 bp, Artificial Sequence
  Oligonucleotide for detection of SNP TSC0038921
cccctctacccaa

SEQ ID NO: 154005 - DNA, 13 bp, Artificial Sequence
  Oligonucleotide for detection of SNP TSC0038921
ttgggcggagggg

SEQ ID NO: 154006 - DNA, 13 bp, Artificial Sequence
  Oligonucleotide for detection of SNP TSC0038921
cccctccgcccaa

SEQ ID NO: 154007 - DNA, 13 bp, Artificial Sequence
  Oligonucleotide for detection of SNP TSC0000281
ataattaattgtg

SEQ ID NO: 154008 - DNA, 13 bp, Artificial Sequence
  Oligonucleotide for detection of SNP TSC0000281
cacaattaattat

SEQ ID NO: 154009 - DNA, 13 bp, Artificial Sequence
  Oligonucleotide for detection of SNP TSC0000281
ataattgattgtg

SEQ ID NO: 154010 - DNA, 13 bp, Artificial Sequence
  Oligonucleotide for detection of SNP TSC0000281
cacaatcaattat

SEQ ID NO: 154011 - DNA, 13 bp, Artificial Sequence
  Oligonucleotide for detection of SNP TSC0038922
agataagttggga

SEQ ID NO: 154012 - DNA, 13 bp, Artificial Sequence
  Oligonucleotide for detection of SNP TSC0038922
tcccaacttatct

SEQ ID NO: 154013 - DNA, 13 bp, Artificial Sequence
  Oligonucleotide for detection of SNP TSC0038922
agataatttggga

SEQ ID NO: 154014 - DNA, 13 bp, Artificial Sequence
  Oligonucleotide for detection of SNP TSC0038922
tcccaaattatct

SEQ ID NO: 154015 - DNA, 13 bp, Artificial Sequence
  Oligonucleotide for detection of SNP TSC0000768
gttgaagttagaa

SEQ ID NO: 154016 - DNA, 13 bp, Artificial Sequence
  Oligonucleotide for detection of SNP TSC0000768
ttctaacttcaac

SEQ ID NO: 154017 - DNA, 13 bp, Artificial Sequence
  Oligonucleotide for detection of SNP TSC0000768
gttgaaattagaa

SEQ ID NO: 154018 - DNA, 13 bp, Artificial Sequence
  Oligonucleotide for detection of SNP TSC0000768
ttctaatttcaac

SEQ ID NO: 154019 - DNA, 13 bp, Artificial Sequence
  Oligonucleotide for detection of SNP TSC0038924
atgtatatggttt

SEQ ID NO: 154020 - DNA, 13 bp, Artificial Sequence
  Oligonucleotide for detection of SNP TSC0038924
aaaccatatacat

SEQ ID NO: 154021 - DNA, 13 bp, Artificial Sequence
  Oligonucleotide for detection of SNP TSC0038924
atgtatttggttt

SEQ ID NO: 154022 - DNA, 13 bp, Artificial Sequence
  Oligonucleotide for detection of SNP TSC0038924
aaaccaaatacat

SEQ ID NO: 154023 - DNA, 13 bp, Artificial Sequence
  Oligonucleotide for detection of SNP TSC0038924
aagttatgtgtat

SEQ ID NO: 154024 - DNA, 13 bp, Artificial Sequence
  Oligonucleotide for detection of SNP TSC0038924
atacacataactt

SEQ ID NO: 154025 - DNA, 13 bp, Artificial Sequence
  Oligonucleotide for detection of SNP TSC0038924
aagttaagtgtat

SEQ ID NO: 154026 - DNA, 13 bp, Artificial Sequence
  Oligonucleotide for detection of SNP TSC0038924
atacacttaactt

SEQ ID NO: 154027 - DNA, 13 bp, Artificial Sequence
  Oligonucleotide for detection of SNP TSC0038925
tagtatataagtt

SEQ ID NO: 154028 - DNA, 13 bp, Artificial Sequence
  Oligonucleotide for detection of SNP TSC0038925
aacttatatacta

SEQ ID NO: 154029 - DNA, 13 bp, Artificial Sequence
  Oligonucleotide for detection of SNP TSC0038925
tagtatgtaagtt

SEQ ID NO: 154030 - DNA, 13 bp, Artificial Sequence
  Oligonucleotide for detection of SNP TSC0038925
aacttacatacta

SEQ ID NO: 154031 - DNA, 13 bp, Artificial Sequence
  Oligonucleotide for detection of SNP TSC0000939
gaattttgtttay

SEQ ID NO: 154032 - DNA, 13 bp, Artificial Sequence
  Oligonucleotide for detection of SNP TSC0000939
rtaaacaaaattc

SEQ ID NO: 154033 - DNA, 13 bp, Artificial Sequence
  Oligonucleotide for detection of SNP TSC0000939
gaatttggtttay

SEQ ID NO: 154034 - DNA, 13 bp, Artificial Sequence
  Oligonucleotide for detection of SNP TSC0000939
rtaaaccaaattc

SEQ ID NO: 154035 - DNA, 13 bp, Artificial Sequence
  Oligonucleotide for detection of SNP TSC0000939
gaattcggtttay

SEQ ID NO: 154036 - DNA, 13 bp, Artificial Sequence
  Oligonucleotide for detection of SNP TSC0000939
rtaaaccgaattc

SEQ ID NO: 154037 - DNA, 13 bp, Artificial Sequence
  Oligonucleotide for detection of SNP TSC0000939
gtgagtagaatty

SEQ ID NO: 154038 - DNA, 13 bp, Artificial Sequence
  Oligonucleotide for detection of SNP TSC0000939
raattctactcac

SEQ ID NO: 154039 - DNA, 13 bp, Artificial Sequence
  Oligonucleotide for detection of SNP TSC0000939
gtgagttgaatty

SEQ ID NO: 154040 - DNA, 13 bp, Artificial Sequence
  Oligonucleotide for detection of SNP TSC0000939
raattcaactcac

SEQ ID NO: 154041 - DNA, 13 bp, Artificial Sequence
  Oligonucleotide for detection of SNP TSC0000939
gtgagtcgaatty

SEQ ID NO: 154042 - DNA, 13 bp, Artificial Sequence
  Oligonucleotide for detection of SNP TSC0000939
raattcgactcac

SEQ ID NO: 154043 - DNA, 13 bp, Artificial Sequence
  Oligonucleotide for detection of SNP TSC0038928
gttatggttttaa

SEQ ID NO: 154044 - DNA, 13 bp, Artificial Sequence
  Oligonucleotide for detection of SNP TSC0038928
ttaaaaccataac

SEQ ID NO: 154045 - DNA, 13 bp, Artificial Sequence
  Oligonucleotide for detection of SNP TSC0038928
gttatgattttaa

SEQ ID NO: 154046 - DNA, 13 bp, Artificial Sequence
  Oligonucleotide for detection of SNP TSC0038928
ttaaaatcataac

SEQ ID NO: 154047 - DNA, 13 bp, Artificial Sequence
  Oligonucleotide for detection of SNP TSC0038929
taaataaagttay

SEQ ID NO: 154048 - DNA, 13 bp, Artificial Sequence
  Oligonucleotide for detection of SNP TSC0038929
rtaactttattta

SEQ ID NO: 154049 - DNA, 13 bp, Artificial Sequence
  Oligonucleotide for detection of SNP TSC0038929
taaatagagttay

SEQ ID NO: 154050 - DNA, 13 bp, Artificial Sequence
  Oligonucleotide for detection of SNP TSC0038929
rtaactctattta

SEQ ID NO: 154051 - DNA, 13 bp, Artificial Sequence
  Oligonucleotide for detection of SNP TSC0038930
ggatgaaggggaa

SEQ ID NO: 154052 - DNA, 13 bp, Artificial Sequence
  Oligonucleotide for detection of SNP TSC0038930
ttccccttcatcc

SEQ ID NO: 154053 - DNA, 13 bp, Artificial Sequence
  Oligonucleotide for detection of SNP TSC0038930
ggatgagggggaa

SEQ ID NO: 154054 - DNA, 13 bp, Artificial Sequence
  Oligonucleotide for detection of SNP TSC0038930
ttccccctcatcc

SEQ ID NO: 154055 - DNA, 13 bp, Artificial Sequence
  Oligonucleotide for detection of SNP TSC0000577
taatattttttty

SEQ ID NO: 154056 - DNA, 13 bp, Artificial Sequence
  Oligonucleotide for detection of SNP TSC0000577
raaaaaaatatta

SEQ ID NO: 154057 - DNA, 13 bp, Artificial Sequence
  Oligonucleotide for detection of SNP TSC0000577
gagggaggtgtta

SEQ ID NO: 154058 - DNA, 13 bp, Artificial Sequence
  Oligonucleotide for detection of SNP TSC0000577
taacacctccctc

SEQ ID NO: 154059 - DNA, 13 bp, Artificial Sequence
  Oligonucleotide for detection of SNP TSC0000577
gagggatgtgtta

SEQ ID NO: 154060 - DNA, 13 bp, Artificial Sequence
  Oligonucleotide for detection of SNP TSC0000577
taacacatccctc

SEQ ID NO: 154061 - DNA, 13 bp, Artificial Sequence
  Oligonucleotide for detection of SNP TSC0000577
gagggacgtgtta

SEQ ID NO: 154062 - DNA, 13 bp, Artificial Sequence
  Oligonucleotide for detection of SNP TSC0000577
taacacgtccctc

SEQ ID NO: 154063 - DNA, 13 bp, Artificial Sequence
  Oligonucleotide for detection of SNP TSC0000578
gttaggaatttta

SEQ ID NO: 154064 - DNA, 13 bp, Artificial Sequence
  Oligonucleotide for detection of SNP TSC0000578
taaaattcctaac

SEQ ID NO: 154065 - DNA, 13 bp, Artificial Sequence
  Oligonucleotide for detection of SNP TSC0000578
gttagggatttta

SEQ ID NO: 154066 - DNA, 13 bp, Artificial Sequence
  Oligonucleotide for detection of SNP TSC0000578
taaaatccctaac

SEQ ID NO: 154067 - DNA, 13 bp, Artificial Sequence
  Oligonucleotide for detection of SNP TSC0001115
taggtagagggaa

SEQ ID NO: 154068 - DNA, 13 bp, Artificial Sequence
  Oligonucleotide for detection of SNP TSC0001115
ttccctctaccta

SEQ ID NO: 154069 - DNA, 13 bp, Artificial Sequence
  Oligonucleotide for detection of SNP TSC0001115
taggtaaagggaa

SEQ ID NO: 154070 - DNA, 13 bp, Artificial Sequence
  Oligonucleotide for detection of SNP TSC0001115
ttccctttaccta

SEQ ID NO: 154071 - DNA, 13 bp, Artificial Sequence
  Oligonucleotide for detection of SNP TSC0038932
aatttgagatatt

SEQ ID NO: 154072 - DNA, 13 bp, Artificial Sequence
  Oligonucleotide for detection of SNP TSC0038932
aatatctcaaatt

SEQ ID NO: 154073 - DNA, 13 bp, Artificial Sequence
  Oligonucleotide for detection of SNP TSC0038932
aatttgggatatt

SEQ ID NO: 154074 - DNA, 13 bp, Artificial Sequence
  Oligonucleotide for detection of SNP TSC0038932
aatatcccaaatt

SEQ ID NO: 154075 - DNA, 13 bp, Artificial Sequence
  Oligonucleotide for detection of SNP TSC0038933
tagttaatgtgaa

SEQ ID NO: 154076 - DNA, 13 bp, Artificial Sequence
  Oligonucleotide for detection of SNP TSC0038933
ttcacattaacta

SEQ ID NO: 154077 - DNA, 13 bp, Artificial Sequence
  Oligonucleotide for detection of SNP TSC0038933
tagttattgtgaa

SEQ ID NO: 154078 - DNA, 13 bp, Artificial Sequence
  Oligonucleotide for detection of SNP TSC0038933
ttcacaataacta

SEQ ID NO: 154079 - DNA, 13 bp, Artificial Sequence
  Oligonucleotide for detection of SNP TSC0038933
tttatattagttg

SEQ ID NO: 154080 - DNA, 13 bp, Artificial Sequence
  Oligonucleotide for detection of SNP TSC0038933
caactaatataaa

SEQ ID NO: 154081 - DNA, 13 bp, Artificial Sequence
  Oligonucleotide for detection of SNP TSC0038933
tttatagtagttg

SEQ ID NO: 154082 - DNA, 13 bp, Artificial Sequence
  Oligonucleotide for detection of SNP TSC0038933
caactactataaa

SEQ ID NO: 154083 - DNA, 13 bp, Artificial Sequence
  Oligonucleotide for detection of SNP TSC0038934
ttttaagttagaa

SEQ ID NO: 154084 - DNA, 13 bp, Artificial Sequence
  Oligonucleotide for detection of SNP TSC0038934
ttctaacttaaaa

SEQ ID NO: 154085 - DNA, 13 bp, Artificial Sequence
  Oligonucleotide for detection of SNP TSC0038934
ttttaaattagaa

SEQ ID NO: 154086 - DNA, 13 bp, Artificial Sequence
  Oligonucleotide for detection of SNP TSC0038934
ttctaatttaaaa

SEQ ID NO: 154087 - DNA, 13 bp, Artificial Sequence
  Oligonucleotide for detection of SNP TSC0038935
gaattagtttttt

SEQ ID NO: 154088 - DNA, 13 bp, Artificial Sequence
  Oligonucleotide for detection of SNP TSC0038935
aaaaaactaattc

SEQ ID NO: 154089 - DNA, 13 bp, Artificial Sequence
  Oligonucleotide for detection of SNP TSC0038935
gaattaatttttt

SEQ ID NO: 154090 - DNA, 13 bp, Artificial Sequence
  Oligonucleotide for detection of SNP TSC0038935
aaaaaattaattc

SEQ ID NO: 154091 - DNA, 13 bp, Artificial Sequence
  Oligonucleotide for detection of SNP TSC0038937
agggttattagta

SEQ ID NO: 154092 - DNA, 13 bp, Artificial Sequence
  Oligonucleotide for detection of SNP TSC0038937
tactaataaccct

SEQ ID NO: 154093 - DNA, 13 bp, Artificial Sequence
  Oligonucleotide for detection of SNP TSC0038937
agggttgttagta

SEQ ID NO: 154094 - DNA, 13 bp, Artificial Sequence
  Oligonucleotide for detection of SNP TSC0038937
tactaacaaccct

SEQ ID NO: 154095 - DNA, 13 bp, Artificial Sequence
  Oligonucleotide for detection of SNP TSC0038943
ttgtaagttaaay

SEQ ID NO: 154096 - DNA, 13 bp, Artificial Sequence
  Oligonucleotide for detection of SNP TSC0038943
rtttaacttacaa

SEQ ID NO: 154097 - DNA, 13 bp, Artificial Sequence
  Oligonucleotide for detection of SNP TSC0038943
ttgtaaattaaay

SEQ ID NO: 154098 - DNA, 13 bp, Artificial Sequence
  Oligonucleotide for detection of SNP TSC0038943
rtttaatttacaa

SEQ ID NO: 154099 - DNA, 13 bp, Artificial Sequence
  Oligonucleotide for detection of SNP TSC0038944
tatttatgttgaa

SEQ ID NO: 154100 - DNA, 13 bp, Artificial Sequence
  Oligonucleotide for detection of SNP TSC0038944
ttcaacataaata

SEQ ID NO: 154101 - DNA, 13 bp, Artificial Sequence
  Oligonucleotide for detection of SNP TSC0038944
tatttacgttgaa

SEQ ID NO: 154102 - DNA, 13 bp, Artificial Sequence
  Oligonucleotide for detection of SNP TSC0038944
ttcaacgtaaata

SEQ ID NO: 154103 - DNA, 13 bp, Artificial Sequence
  Oligonucleotide for detection of SNP TSC0001401
gaattttttggat

SEQ ID NO: 154104 - DNA, 13 bp, Artificial Sequence
  Oligonucleotide for detection of SNP TSC0001401
atccaaaaaattc

SEQ ID NO: 154105 - DNA, 13 bp, Artificial Sequence
  Oligonucleotide for detection of SNP TSC0001401
gaatttgttggat

SEQ ID NO: 154106 - DNA, 13 bp, Artificial Sequence
  Oligonucleotide for detection of SNP TSC0001401
atccaacaaattc

SEQ ID NO: 154107 - DNA, 13 bp, Artificial Sequence
  Oligonucleotide for detection of SNP TSC0001401
atttagaaaatty

SEQ ID NO: 154108 - DNA, 13 bp, Artificial Sequence
  Oligonucleotide for detection of SNP TSC0001401
raattttctaaat

SEQ ID NO: 154109 - DNA, 13 bp, Artificial Sequence
  Oligonucleotide for detection of SNP TSC0001401
atttagtaaatty

SEQ ID NO: 154110 - DNA, 13 bp, Artificial Sequence
  Oligonucleotide for detection of SNP TSC0001401
raatttactaaat

SEQ ID NO: 154111 - DNA, 13 bp, Artificial Sequence
  Oligonucleotide for detection of SNP TSC0001225
taatttattgttt

SEQ ID NO: 154112 - DNA, 13 bp, Artificial Sequence
  Oligonucleotide for detection of SNP TSC0001225
aaacaataaatta

SEQ ID NO: 154113 - DNA, 13 bp, Artificial Sequence
  Oligonucleotide for detection of SNP TSC0001225
taatttgttgttt

SEQ ID NO: 154114 - DNA, 13 bp, Artificial Sequence
  Oligonucleotide for detection of SNP TSC0001225
aaacaacaaatta

SEQ ID NO: 154115 - DNA, 13 bp, Artificial Sequence
  Oligonucleotide for detection of SNP TSC0001225
taattcgttgttt

SEQ ID NO: 154116 - DNA, 13 bp, Artificial Sequence
  Oligonucleotide for detection of SNP TSC0001225
aaacaacgaatta

SEQ ID NO: 154117 - DNA, 13 bp, Artificial Sequence
  Oligonucleotide for detection of SNP TSC0001225
aaataatgaattg

SEQ ID NO: 154118 - DNA, 13 bp, Artificial Sequence
  Oligonucleotide for detection of SNP TSC0001225
caattcattattt

SEQ ID NO: 154119 - DNA, 13 bp, Artificial Sequence
  Oligonucleotide for detection of SNP TSC0001225
aaataacgaattg

SEQ ID NO: 154120 - DNA, 13 bp, Artificial Sequence
  Oligonucleotide for detection of SNP TSC0001225
caattcgttattt

SEQ ID NO: 154121 - DNA, 13 bp, Artificial Sequence
  Oligonucleotide for detection of SNP TSC0001020
tttaggtttaggy

SEQ ID NO: 154122 - DNA, 13 bp, Artificial Sequence
  Oligonucleotide for detection of SNP TSC0001020
rcctaaacctaaa

SEQ ID NO: 154123 - DNA, 13 bp, Artificial Sequence
  Oligonucleotide for detection of SNP TSC0001020
tttagggttaggy

SEQ ID NO: 154124 - DNA, 13 bp, Artificial Sequence
  Oligonucleotide for detection of SNP TSC0001020
rcctaaccctaaa

SEQ ID NO: 154125 - DNA, 13 bp, Artificial Sequence
  Oligonucleotide for detection of SNP TSC0001020
gtttgggtttgaa

SEQ ID NO: 154126 - DNA, 13 bp, Artificial Sequence
  Oligonucleotide for detection of SNP TSC0001020
ttcaaacccaaac

SEQ ID NO: 154127 - DNA, 13 bp, Artificial Sequence
  Oligonucleotide for detection of SNP TSC0001020
gtttggttttgaa

SEQ ID NO: 154128 - DNA, 13 bp, Artificial Sequence
  Oligonucleotide for detection of SNP TSC0001020
ttcaaaaccaaac

SEQ ID NO: 154129 - DNA, 13 bp, Artificial Sequence
  Oligonucleotide for detection of SNP TSC0038953
aattgaatatatt

SEQ ID NO: 154130 - DNA, 13 bp, Artificial Sequence
  Oligonucleotide for detection of SNP TSC0038953
aatatattcaatt

SEQ ID NO: 154131 - DNA, 13 bp, Artificial Sequence
  Oligonucleotide for detection of SNP TSC0038953
aattgattatatt

SEQ ID NO: 154132 - DNA, 13 bp, Artificial Sequence
  Oligonucleotide for detection of SNP TSC0038953
aatataatcaatt

SEQ ID NO: 154133 - DNA, 13 bp, Artificial Sequence
  Oligonucleotide for detection of SNP TSC0038953
aatatgtttaatt

SEQ ID NO: 154134 - DNA, 13 bp, Artificial Sequence
  Oligonucleotide for detection of SNP TSC0038953
aattaaacatatt

SEQ ID NO: 154135 - DNA, 13 bp, Artificial Sequence
  Oligonucleotide for detection of SNP TSC0038953
aatatggttaatt

SEQ ID NO: 154136 - DNA, 13 bp, Artificial Sequence
  Oligonucleotide for detection of SNP TSC0038953
aattaaccatatt

SEQ ID NO: 154137 - DNA, 13 bp, Artificial Sequence
  Oligonucleotide for detection of SNP TSC0038954
ttaagtatttaty

SEQ ID NO: 154138 - DNA, 13 bp, Artificial Sequence
  Oligonucleotide for detection of SNP TSC0038954
rataaatacttaa

SEQ ID NO: 154139 - DNA, 13 bp, Artificial Sequence
  Oligonucleotide for detection of SNP TSC0038955
ggagaaaagtaag

SEQ ID NO: 154140 - DNA, 13 bp, Artificial Sequence
  Oligonucleotide for detection of SNP TSC0038955
cttacttttctcc

SEQ ID NO: 154141 - DNA, 13 bp, Artificial Sequence
  Oligonucleotide for detection of SNP TSC0038955
ggagaatagtaag

SEQ ID NO: 154142 - DNA, 13 bp, Artificial Sequence
  Oligonucleotide for detection of SNP TSC0038955
cttactattctcc

SEQ ID NO: 154143 - DNA, 13 bp, Artificial Sequence
  Oligonucleotide for detection of SNP TSC0038956
gatgtgagtattt

SEQ ID NO: 154144 - DNA, 13 bp, Artificial Sequence
  Oligonucleotide for detection of SNP TSC0038956
aaatactcacatc

SEQ ID NO: 154145 - DNA, 13 bp, Artificial Sequence
  Oligonucleotide for detection of SNP TSC0038956
gatgtgggtattt

SEQ ID NO: 154146 - DNA, 13 bp, Artificial Sequence
  Oligonucleotide for detection of SNP TSC0038956
aaatacccacatc

SEQ ID NO: 154147 - DNA, 13 bp, Artificial Sequence
  Oligonucleotide for detection of SNP TSC0038957
tgattgtattgtt

SEQ ID NO: 154148 - DNA, 13 bp, Artificial Sequence
  Oligonucleotide for detection of SNP TSC0038957
aacaatacaatca

SEQ ID NO: 154149 - DNA, 13 bp, Artificial Sequence
  Oligonucleotide for detection of SNP TSC0038957
tgattggattgtt

SEQ ID NO: 154150 - DNA, 13 bp, Artificial Sequence
  Oligonucleotide for detection of SNP TSC0038957
aacaatccaatca

SEQ ID NO: 154151 - DNA, 13 bp, Artificial Sequence
  Oligonucleotide for detection of SNP TSC0038957
aatagtgtaatta

SEQ ID NO: 154152 - DNA, 13 bp, Artificial Sequence
  Oligonucleotide for detection of SNP TSC0038957
taattacactatt

SEQ ID NO: 154153 - DNA, 13 bp, Artificial Sequence
  Oligonucleotide for detection of SNP TSC0038957
aatagtttaatta

SEQ ID NO: 154154 - DNA, 13 bp, Artificial Sequence
  Oligonucleotide for detection of SNP TSC0038957
taattaaactatt

SEQ ID NO: 154155 - DNA, 13 bp, Artificial Sequence
  Oligonucleotide for detection of SNP TSC0038958
tttttaattatgt

SEQ ID NO: 154156 - DNA, 13 bp, Artificial Sequence
  Oligonucleotide for detection of SNP TSC0038958
acataattaaaaa

SEQ ID NO: 154157 - DNA, 13 bp, Artificial Sequence
  Oligonucleotide for detection of SNP TSC0038958
tttttatttatgt

SEQ ID NO: 154158 - DNA, 13 bp, Artificial Sequence
  Oligonucleotide for detection of SNP TSC0038958
acataaataaaaa

SEQ ID NO: 154159 - DNA, 13 bp, Artificial Sequence
  Oligonucleotide for detection of SNP TSC0038958
atataattggaag

SEQ ID NO: 154160 - DNA, 13 bp, Artificial Sequence
  Oligonucleotide for detection of SNP TSC0038958
cttccaattatat

SEQ ID NO: 154161 - DNA, 13 bp, Artificial Sequence
  Oligonucleotide for detection of SNP TSC0038958
atataagtggaag

SEQ ID NO: 154162 - DNA, 13 bp, Artificial Sequence
  Oligonucleotide for detection of SNP TSC0038958
cttccacttatat

SEQ ID NO: 154163 - DNA, 13 bp, Artificial Sequence
  Oligonucleotide for detection of SNP TSC0038959
ttttttgttttaa

SEQ ID NO: 154164 - DNA, 13 bp, Artificial Sequence
  Oligonucleotide for detection of SNP TSC0038959
ttaaaacaaaaaa

SEQ ID NO: 154165 - DNA, 13 bp, Artificial Sequence
  Oligonucleotide for detection of SNP TSC0038965
gtattgtttttag

SEQ ID NO: 154166 - DNA, 13 bp, Artificial Sequence
  Oligonucleotide for detection of SNP TSC0038965
ctaaaaacaatac

SEQ ID NO: 154167 - DNA, 13 bp, Artificial Sequence
  Oligonucleotide for detection of SNP TSC0038965
gtattggttttag

SEQ ID NO: 154168 - DNA, 13 bp, Artificial Sequence
  Oligonucleotide for detection of SNP TSC0038965
ctaaaaccaatac

SEQ ID NO: 154169 - DNA, 13 bp, Artificial Sequence
  Oligonucleotide for detection of SNP TSC0038965
ttaggggtagtay

SEQ ID NO: 154170 - DNA, 13 bp, Artificial Sequence
  Oligonucleotide for detection of SNP TSC0038965
rtactacccctaa

SEQ ID NO: 154171 - DNA, 13 bp, Artificial Sequence
  Oligonucleotide for detection of SNP TSC0038965
ttagggatagtay

SEQ ID NO: 154172 - DNA, 13 bp, Artificial Sequence
  Oligonucleotide for detection of SNP TSC0038965
rtactatccctaa

SEQ ID NO: 154173 - DNA, 13 bp, Artificial Sequence
  Oligonucleotide for detection of SNP TSC0038965
ttagggttagtay

SEQ ID NO: 154174 - DNA, 13 bp, Artificial Sequence
  Oligonucleotide for detection of SNP TSC0038965
rtactaaccctaa

SEQ ID NO: 154175 - DNA, 13 bp, Artificial Sequence
  Oligonucleotide for detection of SNP TSC0038966
tttagggttttta

SEQ ID NO: 154176 - DNA, 13 bp, Artificial Sequence
  Oligonucleotide for detection of SNP TSC0038966
taaaaaccctaaa

SEQ ID NO: 154177 - DNA, 13 bp, Artificial Sequence
  Oligonucleotide for detection of SNP TSC0038968
ttttatataaata

SEQ ID NO: 154178 - DNA, 13 bp, Artificial Sequence
  Oligonucleotide for detection of SNP TSC0038968
tatttatataaaa

SEQ ID NO: 154179 - DNA, 13 bp, Artificial Sequence
  Oligonucleotide for detection of SNP TSC0038968
ttttatttaaata

SEQ ID NO: 154180 - DNA, 13 bp, Artificial Sequence
  Oligonucleotide for detection of SNP TSC0038968
tatttaaataaaa

SEQ ID NO: 154181 - DNA, 13 bp, Artificial Sequence
  Oligonucleotide for detection of SNP TSC0038968
tgtttatataaag

SEQ ID NO: 154182 - DNA, 13 bp, Artificial Sequence
  Oligonucleotide for detection of SNP TSC0038968
ctttatataaaca

SEQ ID NO: 154183 - DNA, 13 bp, Artificial Sequence
  Oligonucleotide for detection of SNP TSC0038968
tgtttaaataaag

SEQ ID NO: 154184 - DNA, 13 bp, Artificial Sequence
  Oligonucleotide for detection of SNP TSC0038968
ctttatttaaaca

SEQ ID NO: 154185 - DNA, 13 bp, Artificial Sequence
  Oligonucleotide for detection of SNP TSC0038969
tgattatgtgggt

SEQ ID NO: 154186 - DNA, 13 bp, Artificial Sequence
  Oligonucleotide for detection of SNP TSC0038969
acccacataatca

SEQ ID NO: 154187 - DNA, 13 bp, Artificial Sequence
  Oligonucleotide for detection of SNP TSC0038969
tgattacgtgggt

SEQ ID NO: 154188 - DNA, 13 bp, Artificial Sequence
  Oligonucleotide for detection of SNP TSC0038969
acccacgtaatca

SEQ ID NO: 154189 - DNA, 13 bp, Artificial Sequence
  Oligonucleotide for detection of SNP TSC0038969
atttatgtgatta

SEQ ID NO: 154190 - DNA, 13 bp, Artificial Sequence
  Oligonucleotide for detection of SNP TSC0038969
taatcacataaat

SEQ ID NO: 154191 - DNA, 13 bp, Artificial Sequence
  Oligonucleotide for detection of SNP TSC0038969
atttatatgatta

SEQ ID NO: 154192 - DNA, 13 bp, Artificial Sequence
  Oligonucleotide for detection of SNP TSC0038969
taatcatataaat

SEQ ID NO: 154193 - DNA, 13 bp, Artificial Sequence
  Oligonucleotide for detection of SNP TSC0038969
atttacgtgatta

SEQ ID NO: 154194 - DNA, 13 bp, Artificial Sequence
  Oligonucleotide for detection of SNP TSC0038969
taatcacgtaaat

SEQ ID NO: 154195 - DNA, 13 bp, Artificial Sequence
  Oligonucleotide for detection of SNP TSC0038970
tgtagatggttta

SEQ ID NO: 154196 - DNA, 13 bp, Artificial Sequence
  Oligonucleotide for detection of SNP TSC0038970
taaaccatctaca

SEQ ID NO: 154197 - DNA, 13 bp, Artificial Sequence
  Oligonucleotide for detection of SNP TSC0038970
tgtagacggttta

SEQ ID NO: 154198 - DNA, 13 bp, Artificial Sequence
  Oligonucleotide for detection of SNP TSC0038970
taaaccgtctaca

SEQ ID NO: 154199 - DNA, 13 bp, Artificial Sequence
  Oligonucleotide for detection of SNP TSC0038970
taggtcgtttgta

SEQ ID NO: 154200 - DNA, 13 bp, Artificial Sequence
  Oligonucleotide for detection of SNP TSC0038970
tacaaacgaccta

SEQ ID NO: 154201 - DNA, 13 bp, Artificial Sequence
  Oligonucleotide for detection of SNP TSC0038973
ttattgatttttt

SEQ ID NO: 154202 - DNA, 13 bp, Artificial Sequence
  Oligonucleotide for detection of SNP TSC0038973
aaaaaatcaataa

SEQ ID NO: 154203 - DNA, 13 bp, Artificial Sequence
  Oligonucleotide for detection of SNP TSC0038974
gtataagttagag

SEQ ID NO: 154204 - DNA, 13 bp, Artificial Sequence
  Oligonucleotide for detection of SNP TSC0038974
ctctaacttatac

SEQ ID NO: 154205 - DNA, 13 bp, Artificial Sequence
  Oligonucleotide for detection of SNP TSC0038974
gtataaattagag

SEQ ID NO: 154206 - DNA, 13 bp, Artificial Sequence
  Oligonucleotide for detection of SNP TSC0038974
ctctaatttatac

SEQ ID NO: 154207 - DNA, 13 bp, Artificial Sequence
  Oligonucleotide for detection of SNP TSC0038975
aataattggataa

SEQ ID NO: 154208 - DNA, 13 bp, Artificial Sequence
  Oligonucleotide for detection of SNP TSC0038975
ttatccaattatt

SEQ ID NO: 154209 - DNA, 13 bp, Artificial Sequence
  Oligonucleotide for detection of SNP TSC0038975
aataatcggataa

SEQ ID NO: 154210 - DNA, 13 bp, Artificial Sequence
  Oligonucleotide for detection of SNP TSC0038975
ttatccgattatt

SEQ ID NO: 154211 - DNA, 13 bp, Artificial Sequence
  Oligonucleotide for detection of SNP TSC0038975
ttatttggttgtt

SEQ ID NO: 154212 - DNA, 13 bp, Artificial Sequence
  Oligonucleotide for detection of SNP TSC0038975
aacaaccaaataa

SEQ ID NO: 154213 - DNA, 13 bp, Artificial Sequence
  Oligonucleotide for detection of SNP TSC0038975
ttatttagttgtt

SEQ ID NO: 154214 - DNA, 13 bp, Artificial Sequence
  Oligonucleotide for detection of SNP TSC0038975
aacaactaaataa

SEQ ID NO: 154215 - DNA, 13 bp, Artificial Sequence
  Oligonucleotide for detection of SNP TSC0038975
ttattcggttgtt

SEQ ID NO: 154216 - DNA, 13 bp, Artificial Sequence
  Oligonucleotide for detection of SNP TSC0038975
aacaaccgaataa

SEQ ID NO: 154217 - DNA, 13 bp, Artificial Sequence
  Oligonucleotide for detection of SNP TSC0038976
tatgtaataggtt

SEQ ID NO: 154218 - DNA, 13 bp, Artificial Sequence
  Oligonucleotide for detection of SNP TSC0038976
aacctattacata

SEQ ID NO: 154219 - DNA, 13 bp, Artificial Sequence
  Oligonucleotide for detection of SNP TSC0038976
tatgtagtaggtt

SEQ ID NO: 154220 - DNA, 13 bp, Artificial Sequence
  Oligonucleotide for detection of SNP TSC0038976
aacctactacata

SEQ ID NO: 154221 - DNA, 13 bp, Artificial Sequence
  Oligonucleotide for detection of SNP TSC0038977
agggaatagaaay

SEQ ID NO: 154222 - DNA, 13 bp, Artificial Sequence
  Oligonucleotide for detection of SNP TSC0038977
rtttctattccct

SEQ ID NO: 154223 - DNA, 13 bp, Artificial Sequence
  Oligonucleotide for detection of SNP TSC0038977
agggaagagaaay

SEQ ID NO: 154224 - DNA, 13 bp, Artificial Sequence
  Oligonucleotide for detection of SNP TSC0038977
rtttctcttccct

SEQ ID NO: 154225 - DNA, 13 bp, Artificial Sequence
  Oligonucleotide for detection of SNP TSC0038978
ttggaaatttaaa

SEQ ID NO: 154226 - DNA, 13 bp, Artificial Sequence
  Oligonucleotide for detection of SNP TSC0038978
tttaaatttccaa

SEQ ID NO: 154227 - DNA, 13 bp, Artificial Sequence
  Oligonucleotide for detection of SNP TSC0038978
ttggaagtttaaa

SEQ ID NO: 154228 - DNA, 13 bp, Artificial Sequence
  Oligonucleotide for detection of SNP TSC0038978
tttaaacttccaa

SEQ ID NO: 154229 - DNA, 13 bp, Artificial Sequence
  Oligonucleotide for detection of SNP TSC0038979
aaaaagtgtttta

SEQ ID NO: 154230 - DNA, 13 bp, Artificial Sequence
  Oligonucleotide for detection of SNP TSC0038979
taaaacacttttt

SEQ ID NO: 154231 - DNA, 13 bp, Artificial Sequence
  Oligonucleotide for detection of SNP TSC0038979
aaaaagcgtttta

SEQ ID NO: 154232 - DNA, 13 bp, Artificial Sequence
  Oligonucleotide for detection of SNP TSC0038979
taaaacgcttttt

SEQ ID NO: 154233 - DNA, 13 bp, Artificial Sequence
  Oligonucleotide for detection of SNP TSC0038979
tgaaacgtttttt

SEQ ID NO: 154234 - DNA, 13 bp, Artificial Sequence
  Oligonucleotide for detection of SNP TSC0038979
aaaaaacgtttca

SEQ ID NO: 154235 - DNA, 13 bp, Artificial Sequence
  Oligonucleotide for detection of SNP TSC0038980
tttgtatgagttg

SEQ ID NO: 154236 - DNA, 13 bp, Artificial Sequence
  Oligonucleotide for detection of SNP TSC0038980
caactcatacaaa

SEQ ID NO: 154237 - DNA, 13 bp, Artificial Sequence
  Oligonucleotide for detection of SNP TSC0038980
tttgtacgagttg

SEQ ID NO: 154238 - DNA, 13 bp, Artificial Sequence
  Oligonucleotide for detection of SNP TSC0038980
caactcgtacaaa

SEQ ID NO: 154239 - DNA, 13 bp, Artificial Sequence
  Oligonucleotide for detection of SNP TSC0038980
tagtttatgtaga

SEQ ID NO: 154240 - DNA, 13 bp, Artificial Sequence
  Oligonucleotide for detection of SNP TSC0038980
tctacataaacta

SEQ ID NO: 154241 - DNA, 13 bp, Artificial Sequence
  Oligonucleotide for detection of SNP TSC0038980
tagttcgtgtaga

SEQ ID NO: 154242 - DNA, 13 bp, Artificial Sequence
  Oligonucleotide for detection of SNP TSC0038980
tctacacgaacta

SEQ ID NO: 154243 - DNA, 13 bp, Artificial Sequence
  Oligonucleotide for detection of SNP TSC0038982
tgggttggatatt

SEQ ID NO: 154244 - DNA, 13 bp, Artificial Sequence
  Oligonucleotide for detection of SNP TSC0038982
aatatccaaccca

SEQ ID NO: 154245 - DNA, 13 bp, Artificial Sequence
  Oligonucleotide for detection of SNP TSC0038982
tgggttagatatt

SEQ ID NO: 154246 - DNA, 13 bp, Artificial Sequence
  Oligonucleotide for detection of SNP TSC0038982
aatatctaaccca

SEQ ID NO: 154247 - DNA, 13 bp, Artificial Sequence
  Oligonucleotide for detection of SNP TSC0038983
aattttttttggg

SEQ ID NO: 154248 - DNA, 13 bp, Artificial Sequence
  Oligonucleotide for detection of SNP TSC0038983
cccaaaaaaaatt

SEQ ID NO: 154249 - DNA, 13 bp, Artificial Sequence
  Oligonucleotide for detection of SNP TSC0038983
tttaggagggatt

SEQ ID NO: 154250 - DNA, 13 bp, Artificial Sequence
  Oligonucleotide for detection of SNP TSC0038983
aatccctcctaaa

SEQ ID NO: 154251 - DNA, 13 bp, Artificial Sequence
  Oligonucleotide for detection of SNP TSC0038983
tttaggtgggatt

SEQ ID NO: 154252 - DNA, 13 bp, Artificial Sequence
  Oligonucleotide for detection of SNP TSC0038983
aatcccacctaaa

SEQ ID NO: 154253 - DNA, 13 bp, Artificial Sequence
  Oligonucleotide for detection of SNP TSC0038983
tttaggcgggatt

SEQ ID NO: 154254 - DNA, 13 bp, Artificial Sequence
  Oligonucleotide for detection of SNP TSC0038983
aatcccgcctaaa

SEQ ID NO: 154255 - DNA, 13 bp, Artificial Sequence
  Oligonucleotide for detection of SNP TSC0038985
ttattaattttag

SEQ ID NO: 154256 - DNA, 13 bp, Artificial Sequence
  Oligonucleotide for detection of SNP TSC0038985
ctaaaattaataa

SEQ ID NO: 154257 - DNA, 13 bp, Artificial Sequence
  Oligonucleotide for detection of SNP TSC0038985
ttattatttttag

SEQ ID NO: 154258 - DNA, 13 bp, Artificial Sequence
  Oligonucleotide for detection of SNP TSC0038985
ctaaaaataataa

SEQ ID NO: 154259 - DNA, 13 bp, Artificial Sequence
  Oligonucleotide for detection of SNP TSC0038985
ttggggttggtga

SEQ ID NO: 154260 - DNA, 13 bp, Artificial Sequence
  Oligonucleotide for detection of SNP TSC0038985
tcaccaaccccaa

SEQ ID NO: 154261 - DNA, 13 bp, Artificial Sequence
  Oligonucleotide for detection of SNP TSC0038985
ttgggggtggtga

SEQ ID NO: 154262 - DNA, 13 bp, Artificial Sequence
  Oligonucleotide for detection of SNP TSC0038985
tcaccacccccaa

SEQ ID NO: 154263 - DNA, 13 bp, Artificial Sequence
  Oligonucleotide for detection of SNP TSC0038987
ttgttggtagaty

SEQ ID NO: 154264 - DNA, 13 bp, Artificial Sequence
  Oligonucleotide for detection of SNP TSC0038987
ratctaccaacaa

SEQ ID NO: 154265 - DNA, 13 bp, Artificial Sequence
  Oligonucleotide for detection of SNP TSC0038987
ttgttgatagaty

SEQ ID NO: 154266 - DNA, 13 bp, Artificial Sequence
  Oligonucleotide for detection of SNP TSC0038987
ratctatcaacaa

SEQ ID NO: 154267 - DNA, 13 bp, Artificial Sequence
  Oligonucleotide for detection of SNP TSC0038990
aatttaagatgat

SEQ ID NO: 154268 - DNA, 13 bp, Artificial Sequence
  Oligonucleotide for detection of SNP TSC0038990
atcatcttaaatt

SEQ ID NO: 154269 - DNA, 13 bp, Artificial Sequence
  Oligonucleotide for detection of SNP TSC0038990
aatttaggatgat

SEQ ID NO: 154270 - DNA, 13 bp, Artificial Sequence
  Oligonucleotide for detection of SNP TSC0038990
atcatcctaaatt

SEQ ID NO: 154271 - DNA, 13 bp, Artificial Sequence
  Oligonucleotide for detection of SNP TSC0038991
atatagtgggttg

SEQ ID NO: 154272 - DNA, 13 bp, Artificial Sequence
  Oligonucleotide for detection of SNP TSC0038991
caacccactatat

SEQ ID NO: 154273 - DNA, 13 bp, Artificial Sequence
  Oligonucleotide for detection of SNP TSC0038991
atatagcgggttg

SEQ ID NO: 154274 - DNA, 13 bp, Artificial Sequence
  Oligonucleotide for detection of SNP TSC0038991
caacccgctatat

SEQ ID NO: 154275 - DNA, 13 bp, Artificial Sequence
  Oligonucleotide for detection of SNP TSC0038991
taatttattgtat

SEQ ID NO: 154276 - DNA, 13 bp, Artificial Sequence
  Oligonucleotide for detection of SNP TSC0038991
atacaataaatta

SEQ ID NO: 154277 - DNA, 13 bp, Artificial Sequence
  Oligonucleotide for detection of SNP TSC0038991
taattcgttgtat

SEQ ID NO: 154278 - DNA, 13 bp, Artificial Sequence
  Oligonucleotide for detection of SNP TSC0038991
atacaacgaatta

SEQ ID NO: 154279 - DNA, 13 bp, Artificial Sequence
  Oligonucleotide for detection of SNP TSC0038992
tatttggaagtat

SEQ ID NO: 154280 - DNA, 13 bp, Artificial Sequence
  Oligonucleotide for detection of SNP TSC0038992
atacttccaaata

SEQ ID NO: 154281 - DNA, 13 bp, Artificial Sequence
  Oligonucleotide for detection of SNP TSC0038992
tatttgaaagtat

SEQ ID NO: 154282 - DNA, 13 bp, Artificial Sequence
  Oligonucleotide for detection of SNP TSC0038992
atactttcaaata

SEQ ID NO: 154283 - DNA, 13 bp, Artificial Sequence
  Oligonucleotide for detection of SNP TSC0038994
tttggtaagaaag

SEQ ID NO: 154284 - DNA, 13 bp, Artificial Sequence
  Oligonucleotide for detection of SNP TSC0038994
ctttcttaccaaa

SEQ ID NO: 154285 - DNA, 13 bp, Artificial Sequence
  Oligonucleotide for detection of SNP TSC0038994
tttggtgagaaag

SEQ ID NO: 154286 - DNA, 13 bp, Artificial Sequence
  Oligonucleotide for detection of SNP TSC0038994
ctttctcaccaaa

SEQ ID NO: 154287 - DNA, 13 bp, Artificial Sequence
  Oligonucleotide for detection of SNP TSC0038995
tataatgaggtaa

SEQ ID NO: 154288 - DNA, 13 bp, Artificial Sequence
  Oligonucleotide for detection of SNP TSC0038995
ttacctcattata

SEQ ID NO: 154289 - DNA, 13 bp, Artificial Sequence
  Oligonucleotide for detection of SNP TSC0038995
tataataaggtaa

SEQ ID NO: 154290 - DNA, 13 bp, Artificial Sequence
  Oligonucleotide for detection of SNP TSC0038995
ttaccttattata

SEQ ID NO: 154291 - DNA, 13 bp, Artificial Sequence
  Oligonucleotide for detection of SNP TSC0038996
ggttatgtaatty

SEQ ID NO: 154292 - DNA, 13 bp, Artificial Sequence
  Oligonucleotide for detection of SNP TSC0038996
raattacataacc

SEQ ID NO: 154293 - DNA, 13 bp, Artificial Sequence
  Oligonucleotide for detection of SNP TSC0038996
ggttatataatty

SEQ ID NO: 154294 - DNA, 13 bp, Artificial Sequence
  Oligonucleotide for detection of SNP TSC0038996
raattatataacc

SEQ ID NO: 154295 - DNA, 13 bp, Artificial Sequence
  Oligonucleotide for detection of SNP TSC0038997
tatgtttttgtaa

SEQ ID NO: 154296 - DNA, 13 bp, Artificial Sequence
  Oligonucleotide for detection of SNP TSC0038997
ttacaaaaacata

SEQ ID NO: 154297 - DNA, 13 bp, Artificial Sequence
  Oligonucleotide for detection of SNP TSC0038997
tatgttgttgtaa

SEQ ID NO: 154298 - DNA, 13 bp, Artificial Sequence
  Oligonucleotide for detection of SNP TSC0038997
ttacaacaacata

SEQ ID NO: 154299 - DNA, 13 bp, Artificial Sequence
  Oligonucleotide for detection of SNP TSC0038997
tatgtcgttgtaa

SEQ ID NO: 154300 - DNA, 13 bp, Artificial Sequence
  Oligonucleotide for detection of SNP TSC0038997
ttacaacgacata

SEQ ID NO: 154301 - DNA, 13 bp, Artificial Sequence
  Oligonucleotide for detection of SNP TSC0038997
ttataggggtata

SEQ ID NO: 154302 - DNA, 13 bp, Artificial Sequence
  Oligonucleotide for detection of SNP TSC0038997
tatacccctataa

SEQ ID NO: 154303 - DNA, 13 bp, Artificial Sequence
  Oligonucleotide for detection of SNP TSC0038997
ttatagaggtata

SEQ ID NO: 154304 - DNA, 13 bp, Artificial Sequence
  Oligonucleotide for detection of SNP TSC0038997
tatacctctataa

SEQ ID NO: 154305 - DNA, 13 bp, Artificial Sequence
  Oligonucleotide for detection of SNP TSC0038997
ttatagtggtata

SEQ ID NO: 154306 - DNA, 13 bp, Artificial Sequence
  Oligonucleotide for detection of SNP TSC0038997
tataccactataa

SEQ ID NO: 154307 - DNA, 13 bp, Artificial Sequence
  Oligonucleotide for detection of SNP TSC0038997
ttatagcggtata

SEQ ID NO: 154308 - DNA, 13 bp, Artificial Sequence
  Oligonucleotide for detection of SNP TSC0038997
tataccgctataa

SEQ ID NO: 154309 - DNA, 13 bp, Artificial Sequence
  Oligonucleotide for detection of SNP TSC0038998
ttggataaagaga

SEQ ID NO: 154310 - DNA, 13 bp, Artificial Sequence
  Oligonucleotide for detection of SNP TSC0038998
tctctttatccaa

SEQ ID NO: 154311 - DNA, 13 bp, Artificial Sequence
  Oligonucleotide for detection of SNP TSC0038998
ttggatgaagaga

SEQ ID NO: 154312 - DNA, 13 bp, Artificial Sequence
  Oligonucleotide for detection of SNP TSC0038998
tctcttcatccaa

SEQ ID NO: 154313 - DNA, 13 bp, Artificial Sequence
  Oligonucleotide for detection of SNP TSC0039001
ttgaagtgggaaa

SEQ ID NO: 154314 - DNA, 13 bp, Artificial Sequence
  Oligonucleotide for detection of SNP TSC0039001
tttcccacttcaa

SEQ ID NO: 154315 - DNA, 13 bp, Artificial Sequence
  Oligonucleotide for detection of SNP TSC0039001
ttgaagggggaaa

SEQ ID NO: 154316 - DNA, 13 bp, Artificial Sequence
  Oligonucleotide for detection of SNP TSC0039001
tttcccccttcaa

SEQ ID NO: 154317 - DNA, 13 bp, Artificial Sequence
  Oligonucleotide for detection of SNP TSC0039002
tagaaaaaataat

SEQ ID NO: 154318 - DNA, 13 bp, Artificial Sequence
  Oligonucleotide for detection of SNP TSC0039002
attattttttcta

SEQ ID NO: 154319 - DNA, 13 bp, Artificial Sequence
  Oligonucleotide for detection of SNP TSC0039002
tagaaagaataat

SEQ ID NO: 154320 - DNA, 13 bp, Artificial Sequence
  Oligonucleotide for detection of SNP TSC0039002
attattctttcta

SEQ ID NO: 154321 - DNA, 13 bp, Artificial Sequence
  Oligonucleotide for detection of SNP TSC0039004
agtaattgaaaag

SEQ ID NO: 154322 - DNA, 13 bp, Artificial Sequence
  Oligonucleotide for detection of SNP TSC0039004
cttttcaattact

SEQ ID NO: 154323 - DNA, 13 bp, Artificial Sequence
  Oligonucleotide for detection of SNP TSC0039004
agtaatcgaaaag

SEQ ID NO: 154324 - DNA, 13 bp, Artificial Sequence
  Oligonucleotide for detection of SNP TSC0039004
cttttcgattact

SEQ ID NO: 154325 - DNA, 13 bp, Artificial Sequence
  Oligonucleotide for detection of SNP TSC0039005
aaagaattaagag

SEQ ID NO: 154326 - DNA, 13 bp, Artificial Sequence
  Oligonucleotide for detection of SNP TSC0039005
ctcttaattcttt

SEQ ID NO: 154327 - DNA, 13 bp, Artificial Sequence
  Oligonucleotide for detection of SNP TSC0039005
aaagaagtaagag

SEQ ID NO: 154328 - DNA, 13 bp, Artificial Sequence
  Oligonucleotide for detection of SNP TSC0039005
ctcttacttcttt

SEQ ID NO: 154329 - DNA, 13 bp, Artificial Sequence
  Oligonucleotide for detection of SNP TSC0039006
aaggttagtttgt

SEQ ID NO: 154330 - DNA, 13 bp, Artificial Sequence
  Oligonucleotide for detection of SNP TSC0039006
acaaactaacctt

SEQ ID NO: 154331 - DNA, 13 bp, Artificial Sequence
  Oligonucleotide for detection of SNP TSC0039006
aaggttggtttgt

SEQ ID NO: 154332 - DNA, 13 bp, Artificial Sequence
  Oligonucleotide for detection of SNP TSC0039006
acaaaccaacctt

SEQ ID NO: 154333 - DNA, 13 bp, Artificial Sequence
  Oligonucleotide for detection of SNP TSC0039006
aaggttagttcgt

SEQ ID NO: 154334 - DNA, 13 bp, Artificial Sequence
  Oligonucleotide for detection of SNP TSC0039006
acgaactaacctt

SEQ ID NO: 154335 - DNA, 13 bp, Artificial Sequence
  Oligonucleotide for detection of SNP TSC0039006
aaggtcggtttgt

SEQ ID NO: 154336 - DNA, 13 bp, Artificial Sequence
  Oligonucleotide for detection of SNP TSC0039006
acaaaccgacctt

SEQ ID NO: 154337 - DNA, 13 bp, Artificial Sequence
  Oligonucleotide for detection of SNP TSC0039006
aaggttggttcgt

SEQ ID NO: 154338 - DNA, 13 bp, Artificial Sequence
  Oligonucleotide for detection of SNP TSC0039006
acgaaccaacctt

SEQ ID NO: 154339 - DNA, 13 bp, Artificial Sequence
  Oligonucleotide for detection of SNP TSC0039006
aaggtcggttcgt

SEQ ID NO: 154340 - DNA, 13 bp, Artificial Sequence
  Oligonucleotide for detection of SNP TSC0039006
acgaaccgacctt

SEQ ID NO: 154341 - DNA, 13 bp, Artificial Sequence
  Oligonucleotide for detection of SNP TSC0039006
atgggttggtttt

SEQ ID NO: 154342 - DNA, 13 bp, Artificial Sequence
  Oligonucleotide for detection of SNP TSC0039006
aaaaccaacccat

SEQ ID NO: 154343 - DNA, 13 bp, Artificial Sequence
  Oligonucleotide for detection of SNP TSC0039006
acgggttggtttt

SEQ ID NO: 154344 - DNA, 13 bp, Artificial Sequence
  Oligonucleotide for detection of SNP TSC0039006
aaaaccaacccgt

SEQ ID NO: 154345 - DNA, 13 bp, Artificial Sequence
  Oligonucleotide for detection of SNP TSC0039006
atgggtcggtttt

SEQ ID NO: 154346 - DNA, 13 bp, Artificial Sequence
  Oligonucleotide for detection of SNP TSC0039006
aaaaccgacccat

SEQ ID NO: 154347 - DNA, 13 bp, Artificial Sequence
  Oligonucleotide for detection of SNP TSC0039006
acgggtcggtttt

SEQ ID NO: 154348 - DNA, 13 bp, Artificial Sequence
  Oligonucleotide for detection of SNP TSC0039006
aaaaccgacccgt

SEQ ID NO: 154349 - DNA, 13 bp, Artificial Sequence
  Oligonucleotide for detection of SNP TSC0039007
cggtttattttty

SEQ ID NO: 154350 - DNA, 13 bp, Artificial Sequence
  Oligonucleotide for detection of SNP TSC0039007
raaaaataaaccg

SEQ ID NO: 154351 - DNA, 13 bp, Artificial Sequence
  Oligonucleotide for detection of SNP TSC0039007
cggtttgttttty

SEQ ID NO: 154352 - DNA, 13 bp, Artificial Sequence
  Oligonucleotide for detection of SNP TSC0039007
raaaaacaaaccg

SEQ ID NO: 154353 - DNA, 13 bp, Artificial Sequence
  Oligonucleotide for detection of SNP TSC0039007
tggttcgttttty

SEQ ID NO: 154354 - DNA, 13 bp, Artificial Sequence
  Oligonucleotide for detection of SNP TSC0039007
raaaaacgaacca

SEQ ID NO: 154355 - DNA, 13 bp, Artificial Sequence
  Oligonucleotide for detection of SNP TSC0039007
cggttcgttttty

SEQ ID NO: 154356 - DNA, 13 bp, Artificial Sequence
  Oligonucleotide for detection of SNP TSC0039007
raaaaacgaaccg

SEQ ID NO: 154357 - DNA, 13 bp, Artificial Sequence
  Oligonucleotide for detection of SNP TSC0039007
gaaagatgggttg

SEQ ID NO: 154358 - DNA, 13 bp, Artificial Sequence
  Oligonucleotide for detection of SNP TSC0039007
caacccatctttc

SEQ ID NO: 154359 - DNA, 13 bp, Artificial Sequence
  Oligonucleotide for detection of SNP TSC0039007
gaaagatgggtcg

SEQ ID NO: 154360 - DNA, 13 bp, Artificial Sequence
  Oligonucleotide for detection of SNP TSC0039007
cgacccatctttc

SEQ ID NO: 154361 - DNA, 13 bp, Artificial Sequence
  Oligonucleotide for detection of SNP TSC0039007
gaaagacgggttg

SEQ ID NO: 154362 - DNA, 13 bp, Artificial Sequence
  Oligonucleotide for detection of SNP TSC0039007
caacccgtctttc

SEQ ID NO: 154363 - DNA, 13 bp, Artificial Sequence
  Oligonucleotide for detection of SNP TSC0039007
gaaagacgggtcg

SEQ ID NO: 154364 - DNA, 13 bp, Artificial Sequence
  Oligonucleotide for detection of SNP TSC0039007
cgacccgtctttc

SEQ ID NO: 154365 - DNA, 13 bp, Artificial Sequence
  Oligonucleotide for detection of SNP TSC0039008
gagggtagttggy

SEQ ID NO: 154366 - DNA, 13 bp, Artificial Sequence
  Oligonucleotide for detection of SNP TSC0039008
rccaactaccctc

SEQ ID NO: 154367 - DNA, 13 bp, Artificial Sequence
  Oligonucleotide for detection of SNP TSC0039008
gagggtggttggy

SEQ ID NO: 154368 - DNA, 13 bp, Artificial Sequence
  Oligonucleotide for detection of SNP TSC0039008
rccaaccaccctc

SEQ ID NO: 154369 - DNA, 13 bp, Artificial Sequence
  Oligonucleotide for detection of SNP TSC0039008
gagggtagtcggy

SEQ ID NO: 154370 - DNA, 13 bp, Artificial Sequence
  Oligonucleotide for detection of SNP TSC0039008
rccgactaccctc

SEQ ID NO: 154371 - DNA, 13 bp, Artificial Sequence
  Oligonucleotide for detection of SNP TSC0039008
gagggcggttggy

SEQ ID NO: 154372 - DNA, 13 bp, Artificial Sequence
  Oligonucleotide for detection of SNP TSC0039008
rccaaccgccctc

SEQ ID NO: 154373 - DNA, 13 bp, Artificial Sequence
  Oligonucleotide for detection of SNP TSC0039008
gagggtggtcggy

SEQ ID NO: 154374 - DNA, 13 bp, Artificial Sequence
  Oligonucleotide for detection of SNP TSC0039008
rccgaccaccctc

SEQ ID NO: 154375 - DNA, 13 bp, Artificial Sequence
  Oligonucleotide for detection of SNP TSC0039008
gagggcggtcggy

SEQ ID NO: 154376 - DNA, 13 bp, Artificial Sequence
  Oligonucleotide for detection of SNP TSC0039008
rccgaccgccctc

SEQ ID NO: 154377 - DNA, 13 bp, Artificial Sequence
  Oligonucleotide for detection of SNP TSC0039008
gttggttgtttty

SEQ ID NO: 154378 - DNA, 13 bp, Artificial Sequence
  Oligonucleotide for detection of SNP TSC0039008
raaaacaaccaac

SEQ ID NO: 154379 - DNA, 13 bp, Artificial Sequence
  Oligonucleotide for detection of SNP TSC0039008
gtcggttgtttty

SEQ ID NO: 154380 - DNA, 13 bp, Artificial Sequence
  Oligonucleotide for detection of SNP TSC0039008
raaaacaaccgac

SEQ ID NO: 154381 - DNA, 13 bp, Artificial Sequence
  Oligonucleotide for detection of SNP TSC0039008
gttggtcgtttty

SEQ ID NO: 154382 - DNA, 13 bp, Artificial Sequence
  Oligonucleotide for detection of SNP TSC0039008
raaaacgaccaac

SEQ ID NO: 154383 - DNA, 13 bp, Artificial Sequence
  Oligonucleotide for detection of SNP TSC0039008
gtcggtcgtttty

SEQ ID NO: 154384 - DNA, 13 bp, Artificial Sequence
  Oligonucleotide for detection of SNP TSC0039008
raaaacgaccgac

SEQ ID NO: 154385 - DNA, 13 bp, Artificial Sequence
  Oligonucleotide for detection of SNP TSC0039013
ttttttaatgtgy

SEQ ID NO: 154386 - DNA, 13 bp, Artificial Sequence
  Oligonucleotide for detection of SNP TSC0039013
rcacattaaaaaa

SEQ ID NO: 154387 - DNA, 13 bp, Artificial Sequence
  Oligonucleotide for detection of SNP TSC0039013
tttttttatgtgy

SEQ ID NO: 154388 - DNA, 13 bp, Artificial Sequence
  Oligonucleotide for detection of SNP TSC0039013
rcacataaaaaaa

SEQ ID NO: 154389 - DNA, 13 bp, Artificial Sequence
  Oligonucleotide for detection of SNP TSC0039013
gtatattgaggag

SEQ ID NO: 154390 - DNA, 13 bp, Artificial Sequence
  Oligonucleotide for detection of SNP TSC0039013
ctcctcaatatac

SEQ ID NO: 154391 - DNA, 13 bp, Artificial Sequence
  Oligonucleotide for detection of SNP TSC0039013
gtatatggaggag

SEQ ID NO: 154392 - DNA, 13 bp, Artificial Sequence
  Oligonucleotide for detection of SNP TSC0039013
ctcctccatatac

SEQ ID NO: 154393 - DNA, 13 bp, Artificial Sequence
  Oligonucleotide for detection of SNP TSC0039014
taaagtattattg

SEQ ID NO: 154394 - DNA, 13 bp, Artificial Sequence
  Oligonucleotide for detection of SNP TSC0039014
caataatacttta

SEQ ID NO: 154395 - DNA, 13 bp, Artificial Sequence
  Oligonucleotide for detection of SNP TSC0039014
taaagtgttattg

SEQ ID NO: 154396 - DNA, 13 bp, Artificial Sequence
  Oligonucleotide for detection of SNP TSC0039014
caataacacttta

SEQ ID NO: 154397 - DNA, 13 bp, Artificial Sequence
  Oligonucleotide for detection of SNP TSC0039014
taaagcgttattg

SEQ ID NO: 154398 - DNA, 13 bp, Artificial Sequence
  Oligonucleotide for detection of SNP TSC0039014
caataacgcttta

SEQ ID NO: 154399 - DNA, 13 bp, Artificial Sequence
  Oligonucleotide for detection of SNP TSC0039014
tagtggtgttttg

SEQ ID NO: 154400 - DNA, 13 bp, Artificial Sequence
  Oligonucleotide for detection of SNP TSC0039014
caaaacaccacta

SEQ ID NO: 154401 - DNA, 13 bp, Artificial Sequence
  Oligonucleotide for detection of SNP TSC0039014
tagtggcgttttg

SEQ ID NO: 154402 - DNA, 13 bp, Artificial Sequence
  Oligonucleotide for detection of SNP TSC0039014
caaaacgccacta

SEQ ID NO: 154403 - DNA, 13 bp, Artificial Sequence
  Oligonucleotide for detection of SNP TSC0039015
ggatgtatagatt

SEQ ID NO: 154404 - DNA, 13 bp, Artificial Sequence
  Oligonucleotide for detection of SNP TSC0039015
aatctatacatcc

SEQ ID NO: 154405 - DNA, 13 bp, Artificial Sequence
  Oligonucleotide for detection of SNP TSC0039015
ggatgtgtagatt

SEQ ID NO: 154406 - DNA, 13 bp, Artificial Sequence
  Oligonucleotide for detection of SNP TSC0039015
aatctacacatcc

SEQ ID NO: 154407 - DNA, 13 bp, Artificial Sequence
  Oligonucleotide for detection of SNP TSC0039016
tttggtaagggay

SEQ ID NO: 154408 - DNA, 13 bp, Artificial Sequence
  Oligonucleotide for detection of SNP TSC0039016
rtcccttaccaaa

SEQ ID NO: 154409 - DNA, 13 bp, Artificial Sequence
  Oligonucleotide for detection of SNP TSC0039016
tttggttagggay

SEQ ID NO: 154410 - DNA, 13 bp, Artificial Sequence
  Oligonucleotide for detection of SNP TSC0039016
rtccctaaccaaa

SEQ ID NO: 154411 - DNA, 13 bp, Artificial Sequence
  Oligonucleotide for detection of SNP TSC0039016
gttttttattagg

SEQ ID NO: 154412 - DNA, 13 bp, Artificial Sequence
  Oligonucleotide for detection of SNP TSC0039016
cctaataaaaaac

SEQ ID NO: 154413 - DNA, 13 bp, Artificial Sequence
  Oligonucleotide for detection of SNP TSC0039016
gtttttaattagg

SEQ ID NO: 154414 - DNA, 13 bp, Artificial Sequence
  Oligonucleotide for detection of SNP TSC0039016
cctaattaaaaac

SEQ ID NO: 154415 - DNA, 13 bp, Artificial Sequence
  Oligonucleotide for detection of SNP TSC0039021
agtatttttaaag

SEQ ID NO: 154416 - DNA, 13 bp, Artificial Sequence
  Oligonucleotide for detection of SNP TSC0039021
ctttaaaaatact

SEQ ID NO: 154417 - DNA, 13 bp, Artificial Sequence
  Oligonucleotide for detection of SNP TSC0039021
agtattgttaaag

SEQ ID NO: 154418 - DNA, 13 bp, Artificial Sequence
  Oligonucleotide for detection of SNP TSC0039021
ctttaacaatact

SEQ ID NO: 154419 - DNA, 13 bp, Artificial Sequence
  Oligonucleotide for detection of SNP TSC0039021
agtatcgttaaag

SEQ ID NO: 154420 - DNA, 13 bp, Artificial Sequence
  Oligonucleotide for detection of SNP TSC0039021
ctttaacgatact

SEQ ID NO: 154421 - DNA, 13 bp, Artificial Sequence
  Oligonucleotide for detection of SNP TSC0039021
ttttaaggatatt

SEQ ID NO: 154422 - DNA, 13 bp, Artificial Sequence
  Oligonucleotide for detection of SNP TSC0039021
aatatccttaaaa

SEQ ID NO: 154423 - DNA, 13 bp, Artificial Sequence
  Oligonucleotide for detection of SNP TSC0039021
ttttaatgatatt

SEQ ID NO: 154424 - DNA, 13 bp, Artificial Sequence
  Oligonucleotide for detection of SNP TSC0039021
aatatcattaaaa

SEQ ID NO: 154425 - DNA, 13 bp, Artificial Sequence
  Oligonucleotide for detection of SNP TSC0039021
ttttaacgatatt

SEQ ID NO: 154426 - DNA, 13 bp, Artificial Sequence
  Oligonucleotide for detection of SNP TSC0039021
aatatcgttaaaa

SEQ ID NO: 154427 - DNA, 13 bp, Artificial Sequence
  Oligonucleotide for detection of SNP TSC0039022
gagttaaaatata

SEQ ID NO: 154428 - DNA, 13 bp, Artificial Sequence
  Oligonucleotide for detection of SNP TSC0039022
tatattttaactc

SEQ ID NO: 154429 - DNA, 13 bp, Artificial Sequence
  Oligonucleotide for detection of SNP TSC0039022
gagttagaatata

SEQ ID NO: 154430 - DNA, 13 bp, Artificial Sequence
  Oligonucleotide for detection of SNP TSC0039022
tatattctaactc

SEQ ID NO: 154431 - DNA, 13 bp, Artificial Sequence
  Oligonucleotide for detection of SNP TSC0039030
tttgaggttttta

SEQ ID NO: 154432 - DNA, 13 bp, Artificial Sequence
  Oligonucleotide for detection of SNP TSC0039030
taaaaacctcaaa

SEQ ID NO: 154433 - DNA, 13 bp, Artificial Sequence
  Oligonucleotide for detection of SNP TSC0039031
gtgagtatgttat

SEQ ID NO: 154434 - DNA, 13 bp, Artificial Sequence
  Oligonucleotide for detection of SNP TSC0039031
ataacatactcac

SEQ ID NO: 154435 - DNA, 13 bp, Artificial Sequence
  Oligonucleotide for detection of SNP TSC0039031
gtgagtgtgttat

SEQ ID NO: 154436 - DNA, 13 bp, Artificial Sequence
  Oligonucleotide for detection of SNP TSC0039031
ataacacactcac

SEQ ID NO: 154437 - DNA, 13 bp, Artificial Sequence
  Oligonucleotide for detection of SNP TSC0039032
atgatagttttaa

SEQ ID NO: 154438 - DNA, 13 bp, Artificial Sequence
  Oligonucleotide for detection of SNP TSC0039032
ttaaaactatcat

SEQ ID NO: 154439 - DNA, 13 bp, Artificial Sequence
  Oligonucleotide for detection of SNP TSC0039032
atgataattttaa

SEQ ID NO: 154440 - DNA, 13 bp, Artificial Sequence
  Oligonucleotide for detection of SNP TSC0039032
ttaaaattatcat

SEQ ID NO: 154441 - DNA, 13 bp, Artificial Sequence
  Oligonucleotide for detection of SNP TSC0039033
tgttttggtataa

SEQ ID NO: 154442 - DNA, 13 bp, Artificial Sequence
  Oligonucleotide for detection of SNP TSC0039033
ttataccaaaaca

SEQ ID NO: 154443 - DNA, 13 bp, Artificial Sequence
  Oligonucleotide for detection of SNP TSC0039033
tgttttagtataa

SEQ ID NO: 154444 - DNA, 13 bp, Artificial Sequence
  Oligonucleotide for detection of SNP TSC0039033
ttatactaaaaca

SEQ ID NO: 154445 - DNA, 13 bp, Artificial Sequence
  Oligonucleotide for detection of SNP TSC0039034
gatgtatgggtag

SEQ ID NO: 154446 - DNA, 13 bp, Artificial Sequence
  Oligonucleotide for detection of SNP TSC0039034
ctacccatacatc

SEQ ID NO: 154447 - DNA, 13 bp, Artificial Sequence
  Oligonucleotide for detection of SNP TSC0039034
gatgtaggggtag

SEQ ID NO: 154448 - DNA, 13 bp, Artificial Sequence
  Oligonucleotide for detection of SNP TSC0039034
ctacccctacatc

SEQ ID NO: 154449 - DNA, 13 bp, Artificial Sequence
  Oligonucleotide for detection of SNP TSC0039034
ttatttatgtaty

SEQ ID NO: 154450 - DNA, 13 bp, Artificial Sequence
  Oligonucleotide for detection of SNP TSC0039034
ratacataaataa

SEQ ID NO: 154451 - DNA, 13 bp, Artificial Sequence
  Oligonucleotide for detection of SNP TSC0039034
ttatttttgtaty

SEQ ID NO: 154452 - DNA, 13 bp, Artificial Sequence
  Oligonucleotide for detection of SNP TSC0039034
ratacaaaaataa

SEQ ID NO: 154453 - DNA, 13 bp, Artificial Sequence
  Oligonucleotide for detection of SNP TSC0039038
tatttaatgttaa

SEQ ID NO: 154454 - DNA, 13 bp, Artificial Sequence
  Oligonucleotide for detection of SNP TSC0039038
ttaacattaaata

SEQ ID NO: 154455 - DNA, 13 bp, Artificial Sequence
  Oligonucleotide for detection of SNP TSC0039038
tatttagtgttaa

SEQ ID NO: 154456 - DNA, 13 bp, Artificial Sequence
  Oligonucleotide for detection of SNP TSC0039038
ttaacactaaata

SEQ ID NO: 154457 - DNA, 13 bp, Artificial Sequence
  Oligonucleotide for detection of SNP TSC0039039
ggatataaaatat

SEQ ID NO: 154458 - DNA, 13 bp, Artificial Sequence
  Oligonucleotide for detection of SNP TSC0039039
atattttatatcc

SEQ ID NO: 154459 - DNA, 13 bp, Artificial Sequence
  Oligonucleotide for detection of SNP TSC0039039
ggatatgaaatat

SEQ ID NO: 154460 - DNA, 13 bp, Artificial Sequence
  Oligonucleotide for detection of SNP TSC0039039
atatttcatatcc

SEQ ID NO: 154461 - DNA, 13 bp, Artificial Sequence
  Oligonucleotide for detection of SNP TSC0039039
ggatacgaaatat

SEQ ID NO: 154462 - DNA, 13 bp, Artificial Sequence
  Oligonucleotide for detection of SNP TSC0039039
atatttcgtatcc

SEQ ID NO: 154463 - DNA, 13 bp, Artificial Sequence
  Oligonucleotide for detection of SNP TSC0039039
atattttgtatty

SEQ ID NO: 154464 - DNA, 13 bp, Artificial Sequence
  Oligonucleotide for detection of SNP TSC0039039
raatacaaaatat

SEQ ID NO: 154465 - DNA, 13 bp, Artificial Sequence
  Oligonucleotide for detection of SNP TSC0039039
atatttcgtatty

SEQ ID NO: 154466 - DNA, 13 bp, Artificial Sequence
  Oligonucleotide for detection of SNP TSC0039039
raatacgaaatat

SEQ ID NO: 154467 - DNA, 13 bp, Artificial Sequence
  Oligonucleotide for detection of SNP TSC0039040
aaggtatatttat

SEQ ID NO: 154468 - DNA, 13 bp, Artificial Sequence
  Oligonucleotide for detection of SNP TSC0039040
ataaatatacctt

SEQ ID NO: 154469 - DNA, 13 bp, Artificial Sequence
  Oligonucleotide for detection of SNP TSC0039040
aaggtagatttat

SEQ ID NO: 154470 - DNA, 13 bp, Artificial Sequence
  Oligonucleotide for detection of SNP TSC0039040
ataaatctacctt

SEQ ID NO: 154471 - DNA, 13 bp, Artificial Sequence
  Oligonucleotide for detection of SNP TSC0039040
atgggtgtgtttt

SEQ ID NO: 154472 - DNA, 13 bp, Artificial Sequence
  Oligonucleotide for detection of SNP TSC0039040
aaaacacacccat

SEQ ID NO: 154473 - DNA, 13 bp, Artificial Sequence
  Oligonucleotide for detection of SNP TSC0039040
atgggtttgtttt

SEQ ID NO: 154474 - DNA, 13 bp, Artificial Sequence
  Oligonucleotide for detection of SNP TSC0039040
aaaacaaacccat

SEQ ID NO: 154475 - DNA, 13 bp, Artificial Sequence
  Oligonucleotide for detection of SNP TSC0039041
gatattaaagtga

SEQ ID NO: 154476 - DNA, 13 bp, Artificial Sequence
  Oligonucleotide for detection of SNP TSC0039041
tcactttaatatc

SEQ ID NO: 154477 - DNA, 13 bp, Artificial Sequence
  Oligonucleotide for detection of SNP TSC0039041
gatattgaagtga

SEQ ID NO: 154478 - DNA, 13 bp, Artificial Sequence
  Oligonucleotide for detection of SNP TSC0039041
tcacttcaatatc

SEQ ID NO: 154479 - DNA, 13 bp, Artificial Sequence
  Oligonucleotide for detection of SNP TSC0039041
gatatcgaagtga

SEQ ID NO: 154480 - DNA, 13 bp, Artificial Sequence
  Oligonucleotide for detection of SNP TSC0039041
tcacttcgatatc

SEQ ID NO: 154481 - DNA, 13 bp, Artificial Sequence
  Oligonucleotide for detection of SNP TSC0039041
ttattttgatgty

SEQ ID NO: 154482 - DNA, 13 bp, Artificial Sequence
  Oligonucleotide for detection of SNP TSC0039041
racatcaaaataa

SEQ ID NO: 154483 - DNA, 13 bp, Artificial Sequence
  Oligonucleotide for detection of SNP TSC0039041
ttatttcgatgty

SEQ ID NO: 154484 - DNA, 13 bp, Artificial Sequence
  Oligonucleotide for detection of SNP TSC0039041
racatcgaaataa

SEQ ID NO: 154485 - DNA, 13 bp, Artificial Sequence
  Oligonucleotide for detection of SNP TSC0039042
tattggtaaaaat

SEQ ID NO: 154486 - DNA, 13 bp, Artificial Sequence
  Oligonucleotide for detection of SNP TSC0039042
atttttaccaata

SEQ ID NO: 154487 - DNA, 13 bp, Artificial Sequence
  Oligonucleotide for detection of SNP TSC0039042
tattgggaaaaat

SEQ ID NO: 154488 - DNA, 13 bp, Artificial Sequence
  Oligonucleotide for detection of SNP TSC0039042
atttttcccaata

SEQ ID NO: 154489 - DNA, 13 bp, Artificial Sequence
  Oligonucleotide for detection of SNP TSC0039042
atttttattagta

SEQ ID NO: 154490 - DNA, 13 bp, Artificial Sequence
  Oligonucleotide for detection of SNP TSC0039042
tactaataaaaat

SEQ ID NO: 154491 - DNA, 13 bp, Artificial Sequence
  Oligonucleotide for detection of SNP TSC0039042
attttttttagta

SEQ ID NO: 154492 - DNA, 13 bp, Artificial Sequence
  Oligonucleotide for detection of SNP TSC0039042
tactaaaaaaaat

SEQ ID NO: 154493 - DNA, 13 bp, Artificial Sequence
  Oligonucleotide for detection of SNP TSC0039043
tttttatagttag

SEQ ID NO: 154494 - DNA, 13 bp, Artificial Sequence
  Oligonucleotide for detection of SNP TSC0039043
ctaactataaaaa

SEQ ID NO: 154495 - DNA, 13 bp, Artificial Sequence
  Oligonucleotide for detection of SNP TSC0039043
tttttagagttag

SEQ ID NO: 154496 - DNA, 13 bp, Artificial Sequence
  Oligonucleotide for detection of SNP TSC0039043
ctaactctaaaaa

SEQ ID NO: 154497 - DNA, 13 bp, Artificial Sequence
  Oligonucleotide for detection of SNP TSC0039043
ttggttgtgggag

SEQ ID NO: 154498 - DNA, 13 bp, Artificial Sequence
  Oligonucleotide for detection of SNP TSC0039043
ctcccacaaccaa

SEQ ID NO: 154499 - DNA, 13 bp, Artificial Sequence
  Oligonucleotide for detection of SNP TSC0039043
ttggttttgggag

SEQ ID NO: 154500 - DNA, 13 bp, Artificial Sequence
  Oligonucleotide for detection of SNP TSC0039043
ctcccaaaaccaa

SEQ ID NO: 154501 - DNA, 13 bp, Artificial Sequence
  Oligonucleotide for detection of SNP TSC0039046
attatttttattg

SEQ ID NO: 154502 - DNA, 13 bp, Artificial Sequence
  Oligonucleotide for detection of SNP TSC0039046
caataaaaataat

SEQ ID NO: 154503 - DNA, 13 bp, Artificial Sequence
  Oligonucleotide for detection of SNP TSC0039046
attattgttattg

SEQ ID NO: 154504 - DNA, 13 bp, Artificial Sequence
  Oligonucleotide for detection of SNP TSC0039046
caataacaataat

SEQ ID NO: 154505 - DNA, 13 bp, Artificial Sequence
  Oligonucleotide for detection of SNP TSC0039046
attatcgttattg

SEQ ID NO: 154506 - DNA, 13 bp, Artificial Sequence
  Oligonucleotide for detection of SNP TSC0039046
caataacgataat

SEQ ID NO: 154507 - DNA, 13 bp, Artificial Sequence
  Oligonucleotide for detection of SNP TSC0039046
tagtagggatagt

SEQ ID NO: 154508 - DNA, 13 bp, Artificial Sequence
  Oligonucleotide for detection of SNP TSC0039046
actatccctacta

SEQ ID NO: 154509 - DNA, 13 bp, Artificial Sequence
  Oligonucleotide for detection of SNP TSC0039046
tagtagtgatagt

SEQ ID NO: 154510 - DNA, 13 bp, Artificial Sequence
  Oligonucleotide for detection of SNP TSC0039046
actatcactacta

SEQ ID NO: 154511 - DNA, 13 bp, Artificial Sequence
  Oligonucleotide for detection of SNP TSC0039046
tagtagcgatagt

SEQ ID NO: 154512 - DNA, 13 bp, Artificial Sequence
  Oligonucleotide for detection of SNP TSC0039046
actatcgctacta

SEQ ID NO: 154513 - DNA, 13 bp, Artificial Sequence
  Oligonucleotide for detection of SNP TSC0039047
tttttgataggta

SEQ ID NO: 154514 - DNA, 13 bp, Artificial Sequence
  Oligonucleotide for detection of SNP TSC0039047
tacctatcaaaaa

SEQ ID NO: 154515 - DNA, 13 bp, Artificial Sequence
  Oligonucleotide for detection of SNP TSC0039047
tttttggtaggta

SEQ ID NO: 154516 - DNA, 13 bp, Artificial Sequence
  Oligonucleotide for detection of SNP TSC0039047
tacctaccaaaaa

SEQ ID NO: 154517 - DNA, 13 bp, Artificial Sequence
  Oligonucleotide for detection of SNP TSC0039048
ttatttagtatgg

SEQ ID NO: 154518 - DNA, 13 bp, Artificial Sequence
  Oligonucleotide for detection of SNP TSC0039048
ccatactaaataa

SEQ ID NO: 154519 - DNA, 13 bp, Artificial Sequence
  Oligonucleotide for detection of SNP TSC0039048
ttattttgtatgg

SEQ ID NO: 154520 - DNA, 13 bp, Artificial Sequence
  Oligonucleotide for detection of SNP TSC0039048
ccatacaaaataa

SEQ ID NO: 154521 - DNA, 13 bp, Artificial Sequence
  Oligonucleotide for detection of SNP TSC0039048
ttatttcgtatgg

SEQ ID NO: 154522 - DNA, 13 bp, Artificial Sequence
  Oligonucleotide for detection of SNP TSC0039048
ccatacgaaataa

SEQ ID NO: 154523 - DNA, 13 bp, Artificial Sequence
  Oligonucleotide for detection of SNP TSC0039048
ttatatggagtga

SEQ ID NO: 154524 - DNA, 13 bp, Artificial Sequence
  Oligonucleotide for detection of SNP TSC0039048
tcactccatataa

SEQ ID NO: 154525 - DNA, 13 bp, Artificial Sequence
  Oligonucleotide for detection of SNP TSC0039048
ttatacggagtga

SEQ ID NO: 154526 - DNA, 13 bp, Artificial Sequence
  Oligonucleotide for detection of SNP TSC0039048
tcactccgtataa

SEQ ID NO: 154527 - DNA, 13 bp, Artificial Sequence
  Oligonucleotide for detection of SNP TSC0039051
aggaaatgaataa

SEQ ID NO: 154528 - DNA, 13 bp, Artificial Sequence
  Oligonucleotide for detection of SNP TSC0039051
ttattcatttcct

SEQ ID NO: 154529 - DNA, 13 bp, Artificial Sequence
  Oligonucleotide for detection of SNP TSC0039051
aggaaacgaataa

SEQ ID NO: 154530 - DNA, 13 bp, Artificial Sequence
  Oligonucleotide for detection of SNP TSC0039051
ttattcgtttcct

SEQ ID NO: 154531 - DNA, 13 bp, Artificial Sequence
  Oligonucleotide for detection of SNP TSC0039052
tttatattgattt

SEQ ID NO: 154532 - DNA, 13 bp, Artificial Sequence
  Oligonucleotide for detection of SNP TSC0039052
aaatcaatataaa

SEQ ID NO: 154533 - DNA, 13 bp, Artificial Sequence
  Oligonucleotide for detection of SNP TSC0039052
tttatagtgattt

SEQ ID NO: 154534 - DNA, 13 bp, Artificial Sequence
  Oligonucleotide for detection of SNP TSC0039052
aaatcactataaa

SEQ ID NO: 154535 - DNA, 13 bp, Artificial Sequence
  Oligonucleotide for detection of SNP TSC0039052
aggttattgtggg

SEQ ID NO: 154536 - DNA, 13 bp, Artificial Sequence
  Oligonucleotide for detection of SNP TSC0039052
cccacaataacct

SEQ ID NO: 154537 - DNA, 13 bp, Artificial Sequence
  Oligonucleotide for detection of SNP TSC0039055
attataaaaaaat

SEQ ID NO: 154538 - DNA, 13 bp, Artificial Sequence
  Oligonucleotide for detection of SNP TSC0039055
atttttttataat

SEQ ID NO: 154539 - DNA, 13 bp, Artificial Sequence
  Oligonucleotide for detection of SNP TSC0039055
attatataaaaat

SEQ ID NO: 154540 - DNA, 13 bp, Artificial Sequence
  Oligonucleotide for detection of SNP TSC0039055
atttttatataat

SEQ ID NO: 154541 - DNA, 13 bp, Artificial Sequence
  Oligonucleotide for detection of SNP TSC0039058
atagaatgagaaa

SEQ ID NO: 154542 - DNA, 13 bp, Artificial Sequence
  Oligonucleotide for detection of SNP TSC0039058
tttctcattctat

SEQ ID NO: 154543 - DNA, 13 bp, Artificial Sequence
  Oligonucleotide for detection of SNP TSC0039058
atagaacgagaaa

SEQ ID NO: 154544 - DNA, 13 bp, Artificial Sequence
  Oligonucleotide for detection of SNP TSC0039058
tttctcgttctat

SEQ ID NO: 154545 - DNA, 13 bp, Artificial Sequence
  Oligonucleotide for detection of SNP TSC0039062
gggaggatgaggy

SEQ ID NO: 154546 - DNA, 13 bp, Artificial Sequence
  Oligonucleotide for detection of SNP TSC0039062
rcctcatcctccc

SEQ ID NO: 154547 - DNA, 13 bp, Artificial Sequence
  Oligonucleotide for detection of SNP TSC0039063
ttatatgatttga

SEQ ID NO: 154548 - DNA, 13 bp, Artificial Sequence
  Oligonucleotide for detection of SNP TSC0039063
tcaaatcatataa

SEQ ID NO: 154549 - DNA, 13 bp, Artificial Sequence
  Oligonucleotide for detection of SNP TSC0039063
ttatataatttga

SEQ ID NO: 154550 - DNA, 13 bp, Artificial Sequence
  Oligonucleotide for detection of SNP TSC0039063
tcaaattatataa

SEQ ID NO: 154551 - DNA, 13 bp, Artificial Sequence
  Oligonucleotide for detection of SNP TSC0039064
gatattaaaatta

SEQ ID NO: 154552 - DNA, 13 bp, Artificial Sequence
  Oligonucleotide for detection of SNP TSC0039064
taattttaatatc

SEQ ID NO: 154553 - DNA, 13 bp, Artificial Sequence
  Oligonucleotide for detection of SNP TSC0039064
gatattgaaatta

SEQ ID NO: 154554 - DNA, 13 bp, Artificial Sequence
  Oligonucleotide for detection of SNP TSC0039064
taatttcaatatc

SEQ ID NO: 154555 - DNA, 13 bp, Artificial Sequence
  Oligonucleotide for detection of SNP TSC0039064
gatatcgaaatta

SEQ ID NO: 154556 - DNA, 13 bp, Artificial Sequence
  Oligonucleotide for detection of SNP TSC0039064
taatttcgatatc

SEQ ID NO: 154557 - DNA, 13 bp, Artificial Sequence
  Oligonucleotide for detection of SNP TSC0039064
taattttggtgty

SEQ ID NO: 154558 - DNA, 13 bp, Artificial Sequence
  Oligonucleotide for detection of SNP TSC0039064
racaccaaaatta

SEQ ID NO: 154559 - DNA, 13 bp, Artificial Sequence
  Oligonucleotide for detection of SNP TSC0039064
taatttcggtgty

SEQ ID NO: 154560 - DNA, 13 bp, Artificial Sequence
  Oligonucleotide for detection of SNP TSC0039064
racaccgaaatta

SEQ ID NO: 154561 - DNA, 13 bp, Artificial Sequence
  Oligonucleotide for detection of SNP TSC0039065
ttattagggataa

SEQ ID NO: 154562 - DNA, 13 bp, Artificial Sequence
  Oligonucleotide for detection of SNP TSC0039065
ttatccctaataa

SEQ ID NO: 154563 - DNA, 13 bp, Artificial Sequence
  Oligonucleotide for detection of SNP TSC0039065
ttattaaggataa

SEQ ID NO: 154564 - DNA, 13 bp, Artificial Sequence
  Oligonucleotide for detection of SNP TSC0039065
ttatccttaataa

SEQ ID NO: 154565 - DNA, 13 bp, Artificial Sequence
  Oligonucleotide for detection of SNP TSC0039067
aggtgaagttttg

SEQ ID NO: 154566 - DNA, 13 bp, Artificial Sequence
  Oligonucleotide for detection of SNP TSC0039067
caaaacttcacct

SEQ ID NO: 154567 - DNA, 13 bp, Artificial Sequence
  Oligonucleotide for detection of SNP TSC0039067
aggtgaggttttg

SEQ ID NO: 154568 - DNA, 13 bp, Artificial Sequence
  Oligonucleotide for detection of SNP TSC0039067
caaaacctcacct

SEQ ID NO: 154569 - DNA, 13 bp, Artificial Sequence
  Oligonucleotide for detection of SNP TSC0039068
taataagttttag

SEQ ID NO: 154570 - DNA, 13 bp, Artificial Sequence
  Oligonucleotide for detection of SNP TSC0039068
ctaaaacttatta

SEQ ID NO: 154571 - DNA, 13 bp, Artificial Sequence
  Oligonucleotide for detection of SNP TSC0039068
taataaattttag

SEQ ID NO: 154572 - DNA, 13 bp, Artificial Sequence
  Oligonucleotide for detection of SNP TSC0039068
ctaaaatttatta

SEQ ID NO: 154573 - DNA, 13 bp, Artificial Sequence
  Oligonucleotide for detection of SNP TSC0039070
aattttgaggtaa

SEQ ID NO: 154574 - DNA, 13 bp, Artificial Sequence
  Oligonucleotide for detection of SNP TSC0039070
ttacctcaaaatt

SEQ ID NO: 154575 - DNA, 13 bp, Artificial Sequence
  Oligonucleotide for detection of SNP TSC0039070
aattttaaggtaa

SEQ ID NO: 154576 - DNA, 13 bp, Artificial Sequence
  Oligonucleotide for detection of SNP TSC0039070
ttaccttaaaatt

SEQ ID NO: 154577 - DNA, 13 bp, Artificial Sequence
  Oligonucleotide for detection of SNP TSC0039074
atgtatgttagag

SEQ ID NO: 154578 - DNA, 13 bp, Artificial Sequence
  Oligonucleotide for detection of SNP TSC0039074
ctctaacatacat

SEQ ID NO: 154579 - DNA, 13 bp, Artificial Sequence
  Oligonucleotide for detection of SNP TSC0039074
atgtatattagag

SEQ ID NO: 154580 - DNA, 13 bp, Artificial Sequence
  Oligonucleotide for detection of SNP TSC0039074
ctctaatatacat

SEQ ID NO: 154581 - DNA, 13 bp, Artificial Sequence
  Oligonucleotide for detection of SNP TSC0039079
gtgggatggagtt

SEQ ID NO: 154582 - DNA, 13 bp, Artificial Sequence
  Oligonucleotide for detection of SNP TSC0039079
aactccatcccac

SEQ ID NO: 154583 - DNA, 13 bp, Artificial Sequence
  Oligonucleotide for detection of SNP TSC0039079
gtgggacggagtt

SEQ ID NO: 154584 - DNA, 13 bp, Artificial Sequence
  Oligonucleotide for detection of SNP TSC0039079
aactccgtcccac

SEQ ID NO: 154585 - DNA, 13 bp, Artificial Sequence
  Oligonucleotide for detection of SNP TSC0039082
gtttatgtgatag

SEQ ID NO: 154586 - DNA, 13 bp, Artificial Sequence
  Oligonucleotide for detection of SNP TSC0039082
ctatcacataaac

SEQ ID NO: 154587 - DNA, 13 bp, Artificial Sequence
  Oligonucleotide for detection of SNP TSC0039082
gtttatatgatag

SEQ ID NO: 154588 - DNA, 13 bp, Artificial Sequence
  Oligonucleotide for detection of SNP TSC0039082
ctatcatataaac

SEQ ID NO: 154589 - DNA, 13 bp, Artificial Sequence
  Oligonucleotide for detection of SNP TSC0039083
ttttaaattattt

SEQ ID NO: 154590 - DNA, 13 bp, Artificial Sequence
  Oligonucleotide for detection of SNP TSC0039083
aaataatttaaaa

SEQ ID NO: 154591 - DNA, 13 bp, Artificial Sequence
  Oligonucleotide for detection of SNP TSC0039083
aaatgatttaaga

SEQ ID NO: 154592 - DNA, 13 bp, Artificial Sequence
  Oligonucleotide for detection of SNP TSC0039083
tcttaaatcattt

SEQ ID NO: 154593 - DNA, 13 bp, Artificial Sequence
  Oligonucleotide for detection of SNP TSC0039083
aaatgagttaaga

SEQ ID NO: 154594 - DNA, 13 bp, Artificial Sequence
  Oligonucleotide for detection of SNP TSC0039083
tcttaactcattt

SEQ ID NO: 154595 - DNA, 13 bp, Artificial Sequence
  Oligonucleotide for detection of SNP TSC0039085
aaaagaaaaaatt

SEQ ID NO: 154596 - DNA, 13 bp, Artificial Sequence
  Oligonucleotide for detection of SNP TSC0039085
aattttttctttt

SEQ ID NO: 154597 - DNA, 13 bp, Artificial Sequence
  Oligonucleotide for detection of SNP TSC0039085
aaaagagaaaatt

SEQ ID NO: 154598 - DNA, 13 bp, Artificial Sequence
  Oligonucleotide for detection of SNP TSC0039085
aattttctctttt

SEQ ID NO: 154599 - DNA, 13 bp, Artificial Sequence
  Oligonucleotide for detection of SNP TSC0039087
tatagaaagtaaa

SEQ ID NO: 154600 - DNA, 13 bp, Artificial Sequence
  Oligonucleotide for detection of SNP TSC0039087
tttactttctata

SEQ ID NO: 154601 - DNA, 13 bp, Artificial Sequence
  Oligonucleotide for detection of SNP TSC0039087
tatagagagtaaa

SEQ ID NO: 154602 - DNA, 13 bp, Artificial Sequence
  Oligonucleotide for detection of SNP TSC0039087
tttactctctata

SEQ ID NO: 154603 - DNA, 13 bp, Artificial Sequence
  Oligonucleotide for detection of SNP TSC0039090
tgttatatatgty

SEQ ID NO: 154604 - DNA, 13 bp, Artificial Sequence
  Oligonucleotide for detection of SNP TSC0039090
racatatataaca

SEQ ID NO: 154605 - DNA, 13 bp, Artificial Sequence
  Oligonucleotide for detection of SNP TSC0039090
tgttatgtatgty

SEQ ID NO: 154606 - DNA, 13 bp, Artificial Sequence
  Oligonucleotide for detection of SNP TSC0039090
racatacataaca

SEQ ID NO: 154607 - DNA, 13 bp, Artificial Sequence
  Oligonucleotide for detection of SNP TSC0039090
tgttacgtatgty

SEQ ID NO: 154608 - DNA, 13 bp, Artificial Sequence
  Oligonucleotide for detection of SNP TSC0039090
racatacgtaaca

SEQ ID NO: 154609 - DNA, 13 bp, Artificial Sequence
  Oligonucleotide for detection of SNP TSC0039090
gatatgtgtgata

SEQ ID NO: 154610 - DNA, 13 bp, Artificial Sequence
  Oligonucleotide for detection of SNP TSC0039090
tatcacacatatc

SEQ ID NO: 154611 - DNA, 13 bp, Artificial Sequence
  Oligonucleotide for detection of SNP TSC0039090
gatatgcgtgata

SEQ ID NO: 154612 - DNA, 13 bp, Artificial Sequence
  Oligonucleotide for detection of SNP TSC0039090
tatcacgcatatc

SEQ ID NO: 154613 - DNA, 13 bp, Artificial Sequence
  Oligonucleotide for detection of SNP TSC0039091
taattaaaatagt

SEQ ID NO: 154614 - DNA, 13 bp, Artificial Sequence
  Oligonucleotide for detection of SNP TSC0039091
actattttaatta

SEQ ID NO: 154615 - DNA, 13 bp, Artificial Sequence
  Oligonucleotide for detection of SNP TSC0039091
taattagaatagt

SEQ ID NO: 154616 - DNA, 13 bp, Artificial Sequence
  Oligonucleotide for detection of SNP TSC0039091
actattctaatta

SEQ ID NO: 154617 - DNA, 13 bp, Artificial Sequence
  Oligonucleotide for detection of SNP TSC0039092
agagataggtagg

SEQ ID NO: 154618 - DNA, 13 bp, Artificial Sequence
  Oligonucleotide for detection of SNP TSC0039092
cctacctatctct

SEQ ID NO: 154619 - DNA, 13 bp, Artificial Sequence
  Oligonucleotide for detection of SNP TSC0039092
agagattggtagg

SEQ ID NO: 154620 - DNA, 13 bp, Artificial Sequence
  Oligonucleotide for detection of SNP TSC0039092
cctaccaatctct

SEQ ID NO: 154621 - DNA, 13 bp, Artificial Sequence
  Oligonucleotide for detection of SNP TSC0039092
tttattagttttt

SEQ ID NO: 154622 - DNA, 13 bp, Artificial Sequence
  Oligonucleotide for detection of SNP TSC0039092
aaaaactaataaa

SEQ ID NO: 154623 - DNA, 13 bp, Artificial Sequence
  Oligonucleotide for detection of SNP TSC0039093
gtttttaatttag

SEQ ID NO: 154624 - DNA, 13 bp, Artificial Sequence
  Oligonucleotide for detection of SNP TSC0039093
ctaaattaaaaac

SEQ ID NO: 154625 - DNA, 13 bp, Artificial Sequence
  Oligonucleotide for detection of SNP TSC0039093
gtttttgatttag

SEQ ID NO: 154626 - DNA, 13 bp, Artificial Sequence
  Oligonucleotide for detection of SNP TSC0039093
ctaaatcaaaaac

SEQ ID NO: 154627 - DNA, 13 bp, Artificial Sequence
  Oligonucleotide for detection of SNP TSC0039093
gttttcgatttag

SEQ ID NO: 154628 - DNA, 13 bp, Artificial Sequence
  Oligonucleotide for detection of SNP TSC0039093
ctaaatcgaaaac

SEQ ID NO: 154629 - DNA, 13 bp, Artificial Sequence
  Oligonucleotide for detection of SNP TSC0039093
ttaagttggagay

SEQ ID NO: 154630 - DNA, 13 bp, Artificial Sequence
  Oligonucleotide for detection of SNP TSC0039093
rtctccaacttaa

SEQ ID NO: 154631 - DNA, 13 bp, Artificial Sequence
  Oligonucleotide for detection of SNP TSC0039093
ttaagtcggagay

SEQ ID NO: 154632 - DNA, 13 bp, Artificial Sequence
  Oligonucleotide for detection of SNP TSC0039093
rtctccgacttaa

SEQ ID NO: 154633 - DNA, 13 bp, Artificial Sequence
  Oligonucleotide for detection of SNP TSC0039094
ataatagagtaag

SEQ ID NO: 154634 - DNA, 13 bp, Artificial Sequence
  Oligonucleotide for detection of SNP TSC0039094
cttactctattat

SEQ ID NO: 154635 - DNA, 13 bp, Artificial Sequence
  Oligonucleotide for detection of SNP TSC0039094
ataataaagtaag

SEQ ID NO: 154636 - DNA, 13 bp, Artificial Sequence
  Oligonucleotide for detection of SNP TSC0039094
cttactttattat

SEQ ID NO: 154637 - DNA, 13 bp, Artificial Sequence
  Oligonucleotide for detection of SNP TSC0039095
ataggatggttty

SEQ ID NO: 154638 - DNA, 13 bp, Artificial Sequence
  Oligonucleotide for detection of SNP TSC0039095
raaaccatcctat

SEQ ID NO: 154639 - DNA, 13 bp, Artificial Sequence
  Oligonucleotide for detection of SNP TSC0039095
ataggacggttty

SEQ ID NO: 154640 - DNA, 13 bp, Artificial Sequence
  Oligonucleotide for detection of SNP TSC0039095
raaaccgtcctat

SEQ ID NO: 154641 - DNA, 13 bp, Artificial Sequence
  Oligonucleotide for detection of SNP TSC0039095
gagattgttttgt

SEQ ID NO: 154642 - DNA, 13 bp, Artificial Sequence
  Oligonucleotide for detection of SNP TSC0039095
acaaaacaatctc

SEQ ID NO: 154643 - DNA, 13 bp, Artificial Sequence
  Oligonucleotide for detection of SNP TSC0039095
gagattattttgt

SEQ ID NO: 154644 - DNA, 13 bp, Artificial Sequence
  Oligonucleotide for detection of SNP TSC0039095
acaaaataatctc

SEQ ID NO: 154645 - DNA, 13 bp, Artificial Sequence
  Oligonucleotide for detection of SNP TSC0039095
gagatcgttttgt

SEQ ID NO: 154646 - DNA, 13 bp, Artificial Sequence
  Oligonucleotide for detection of SNP TSC0039095
acaaaacgatctc

SEQ ID NO: 154647 - DNA, 13 bp, Artificial Sequence
  Oligonucleotide for detection of SNP TSC0039096
aagggagtgttta

SEQ ID NO: 154648 - DNA, 13 bp, Artificial Sequence
  Oligonucleotide for detection of SNP TSC0039096
taaacactccctt

SEQ ID NO: 154649 - DNA, 13 bp, Artificial Sequence
  Oligonucleotide for detection of SNP TSC0039096
aagggaatgttta

SEQ ID NO: 154650 - DNA, 13 bp, Artificial Sequence
  Oligonucleotide for detection of SNP TSC0039096
taaacattccctt

SEQ ID NO: 154651 - DNA, 13 bp, Artificial Sequence
  Oligonucleotide for detection of SNP TSC0039100
ataaataagataa

SEQ ID NO: 154652 - DNA, 13 bp, Artificial Sequence
  Oligonucleotide for detection of SNP TSC0039100
ttatcttatttat

SEQ ID NO: 154653 - DNA, 13 bp, Artificial Sequence
  Oligonucleotide for detection of SNP TSC0039100
ataaattagataa

SEQ ID NO: 154654 - DNA, 13 bp, Artificial Sequence
  Oligonucleotide for detection of SNP TSC0039100
ttatctaatttat

SEQ ID NO: 154655 - DNA, 13 bp, Artificial Sequence
  Oligonucleotide for detection of SNP TSC0039100
ttatttggtttgt

SEQ ID NO: 154656 - DNA, 13 bp, Artificial Sequence
  Oligonucleotide for detection of SNP TSC0039100
acaaaccaaataa

SEQ ID NO: 154657 - DNA, 13 bp, Artificial Sequence
  Oligonucleotide for detection of SNP TSC0039103
ttttttcgaattt

SEQ ID NO: 154658 - DNA, 13 bp, Artificial Sequence
  Oligonucleotide for detection of SNP TSC0039103
aaattcgaaaaaa

SEQ ID NO: 154659 - DNA, 13 bp, Artificial Sequence
  Oligonucleotide for detection of SNP TSC0039103
agatttggagagg

SEQ ID NO: 154660 - DNA, 13 bp, Artificial Sequence
  Oligonucleotide for detection of SNP TSC0039103
cctctccaaatct

SEQ ID NO: 154661 - DNA, 13 bp, Artificial Sequence
  Oligonucleotide for detection of SNP TSC0039103
agatttagagagg

SEQ ID NO: 154662 - DNA, 13 bp, Artificial Sequence
  Oligonucleotide for detection of SNP TSC0039103
cctctctaaatct

SEQ ID NO: 154663 - DNA, 13 bp, Artificial Sequence
  Oligonucleotide for detection of SNP TSC0039103
agattcggagagg

SEQ ID NO: 154664 - DNA, 13 bp, Artificial Sequence
  Oligonucleotide for detection of SNP TSC0039103
cctctccgaatct

SEQ ID NO: 154665 - DNA, 13 bp, Artificial Sequence
  Oligonucleotide for detection of SNP TSC0009835
aggaaataatttt

SEQ ID NO: 154666 - DNA, 13 bp, Artificial Sequence
  Oligonucleotide for detection of SNP TSC0009835
aaaattatttcct

SEQ ID NO: 154667 - DNA, 13 bp, Artificial Sequence
  Oligonucleotide for detection of SNP TSC0009835
aggaaagaatttt

SEQ ID NO: 154668 - DNA, 13 bp, Artificial Sequence
  Oligonucleotide for detection of SNP TSC0009835
aaaattctttcct

SEQ ID NO: 154669 - DNA, 13 bp, Artificial Sequence
  Oligonucleotide for detection of SNP TSC0009835
agaattatttttt

SEQ ID NO: 154670 - DNA, 13 bp, Artificial Sequence
  Oligonucleotide for detection of SNP TSC0009835
aaaaaataattct

SEQ ID NO: 154671 - DNA, 13 bp, Artificial Sequence
  Oligonucleotide for detection of SNP TSC0009835
agaattttttttt

SEQ ID NO: 154672 - DNA, 13 bp, Artificial Sequence
  Oligonucleotide for detection of SNP TSC0009835
aaaaaaaaattct

SEQ ID NO: 154673 - DNA, 13 bp, Artificial Sequence
  Oligonucleotide for detection of SNP TSC0039105
tgattttgtggtt

SEQ ID NO: 154674 - DNA, 13 bp, Artificial Sequence
  Oligonucleotide for detection of SNP TSC0039105
aaccacaaaatca

SEQ ID NO: 154675 - DNA, 13 bp, Artificial Sequence
  Oligonucleotide for detection of SNP TSC0039105
tgatttcgtggtt

SEQ ID NO: 154676 - DNA, 13 bp, Artificial Sequence
  Oligonucleotide for detection of SNP TSC0039105
aaccacgaaatca

SEQ ID NO: 154677 - DNA, 13 bp, Artificial Sequence
  Oligonucleotide for detection of SNP TSC0039105
agttatggggtta

SEQ ID NO: 154678 - DNA, 13 bp, Artificial Sequence
  Oligonucleotide for detection of SNP TSC0039105
taaccccataact

SEQ ID NO: 154679 - DNA, 13 bp, Artificial Sequence
  Oligonucleotide for detection of SNP TSC0039105
agttatagggtta

SEQ ID NO: 154680 - DNA, 13 bp, Artificial Sequence
  Oligonucleotide for detection of SNP TSC0039105
taaccctataact

SEQ ID NO: 154681 - DNA, 13 bp, Artificial Sequence
  Oligonucleotide for detection of SNP TSC0039105
agttacggggtta

SEQ ID NO: 154682 - DNA, 13 bp, Artificial Sequence
  Oligonucleotide for detection of SNP TSC0039105
taaccccgtaact

SEQ ID NO: 154683 - DNA, 13 bp, Artificial Sequence
  Oligonucleotide for detection of SNP TSC0039106
tttttgtgaggtt

SEQ ID NO: 154684 - DNA, 13 bp, Artificial Sequence
  Oligonucleotide for detection of SNP TSC0039106
aacctcacaaaaa

SEQ ID NO: 154685 - DNA, 13 bp, Artificial Sequence
  Oligonucleotide for detection of SNP TSC0039106
tttttgcgaggtt

SEQ ID NO: 154686 - DNA, 13 bp, Artificial Sequence
  Oligonucleotide for detection of SNP TSC0039106
aacctcgcaaaaa

SEQ ID NO: 154687 - DNA, 13 bp, Artificial Sequence
  Oligonucleotide for detection of SNP TSC0039106
aattttgtagggg

SEQ ID NO: 154688 - DNA, 13 bp, Artificial Sequence
  Oligonucleotide for detection of SNP TSC0039106
cccctacaaaatt

SEQ ID NO: 154689 - DNA, 13 bp, Artificial Sequence
  Oligonucleotide for detection of SNP TSC0039106
aattttatagggg

SEQ ID NO: 154690 - DNA, 13 bp, Artificial Sequence
  Oligonucleotide for detection of SNP TSC0039106
cccctataaaatt

SEQ ID NO: 154691 - DNA, 13 bp, Artificial Sequence
  Oligonucleotide for detection of SNP TSC0039106
aatttcgtagggg

SEQ ID NO: 154692 - DNA, 13 bp, Artificial Sequence
  Oligonucleotide for detection of SNP TSC0039106
cccctacgaaatt

SEQ ID NO: 154693 - DNA, 13 bp, Artificial Sequence
  Oligonucleotide for detection of SNP TSC0039108
agtaatagttgtt

SEQ ID NO: 154694 - DNA, 13 bp, Artificial Sequence
  Oligonucleotide for detection of SNP TSC0039108
aacaactattact

SEQ ID NO: 154695 - DNA, 13 bp, Artificial Sequence
  Oligonucleotide for detection of SNP TSC0039108
agtaattgttgtt

SEQ ID NO: 154696 - DNA, 13 bp, Artificial Sequence
  Oligonucleotide for detection of SNP TSC0039108
aacaacaattact

SEQ ID NO: 154697 - DNA, 13 bp, Artificial Sequence
  Oligonucleotide for detection of SNP TSC0039108
agtaatcgttgtt

SEQ ID NO: 154698 - DNA, 13 bp, Artificial Sequence
  Oligonucleotide for detection of SNP TSC0039108
aacaacgattact

SEQ ID NO: 154699 - DNA, 13 bp, Artificial Sequence
  Oligonucleotide for detection of SNP TSC0039108
aatagttgttatt

SEQ ID NO: 154700 - DNA, 13 bp, Artificial Sequence
  Oligonucleotide for detection of SNP TSC0039108
aataacaactatt

SEQ ID NO: 154701 - DNA, 13 bp, Artificial Sequence
  Oligonucleotide for detection of SNP TSC0039108
aatagtggttatt

SEQ ID NO: 154702 - DNA, 13 bp, Artificial Sequence
  Oligonucleotide for detection of SNP TSC0039108
aataaccactatt

SEQ ID NO: 154703 - DNA, 13 bp, Artificial Sequence
  Oligonucleotide for detection of SNP TSC0039108
aatagcggttatt

SEQ ID NO: 154704 - DNA, 13 bp, Artificial Sequence
  Oligonucleotide for detection of SNP TSC0039108
aataaccgctatt

SEQ ID NO: 154705 - DNA, 13 bp, Artificial Sequence
  Oligonucleotide for detection of SNP TSC0039109
taaaaatgaaatt

SEQ ID NO: 154706 - DNA, 13 bp, Artificial Sequence
  Oligonucleotide for detection of SNP TSC0039109
aatttcattttta

SEQ ID NO: 154707 - DNA, 13 bp, Artificial Sequence
  Oligonucleotide for detection of SNP TSC0008278
tatgaaagtaaty

SEQ ID NO: 154708 - DNA, 13 bp, Artificial Sequence
  Oligonucleotide for detection of SNP TSC0008278
rattactttcata

SEQ ID NO: 154709 - DNA, 13 bp, Artificial Sequence
  Oligonucleotide for detection of SNP TSC0008278
tatgaaggtaaty

SEQ ID NO: 154710 - DNA, 13 bp, Artificial Sequence
  Oligonucleotide for detection of SNP TSC0008278
rattaccttcata

SEQ ID NO: 154711 - DNA, 13 bp, Artificial Sequence
  Oligonucleotide for detection of SNP TSC0039111
gaaagaaattgtt

SEQ ID NO: 154712 - DNA, 13 bp, Artificial Sequence
  Oligonucleotide for detection of SNP TSC0039111
aacaatttctttc

SEQ ID NO: 154713 - DNA, 13 bp, Artificial Sequence
  Oligonucleotide for detection of SNP TSC0039111
gaaagatattgtt

SEQ ID NO: 154714 - DNA, 13 bp, Artificial Sequence
  Oligonucleotide for detection of SNP TSC0039111
aacaatatctttc

SEQ ID NO: 154715 - DNA, 13 bp, Artificial Sequence
  Oligonucleotide for detection of SNP TSC0039111
agtagttttttty

SEQ ID NO: 154716 - DNA, 13 bp, Artificial Sequence
  Oligonucleotide for detection of SNP TSC0039111
raaaaaaactact

SEQ ID NO: 154717 - DNA, 13 bp, Artificial Sequence
  Oligonucleotide for detection of SNP TSC0039111
agtagtgttttty

SEQ ID NO: 154718 - DNA, 13 bp, Artificial Sequence
  Oligonucleotide for detection of SNP TSC0039111
raaaaacactact

SEQ ID NO: 154719 - DNA, 13 bp, Artificial Sequence
  Oligonucleotide for detection of SNP TSC0039112
gagggaataaaaa

SEQ ID NO: 154720 - DNA, 13 bp, Artificial Sequence
  Oligonucleotide for detection of SNP TSC0039112
tttttattccctc

SEQ ID NO: 154721 - DNA, 13 bp, Artificial Sequence
  Oligonucleotide for detection of SNP TSC0039112
gagggagtaaaaa

SEQ ID NO: 154722 - DNA, 13 bp, Artificial Sequence
  Oligonucleotide for detection of SNP TSC0039112
tttttactccctc

SEQ ID NO: 154723 - DNA, 13 bp, Artificial Sequence
  Oligonucleotide for detection of SNP TSC0039114
attgttattttgt

SEQ ID NO: 154724 - DNA, 13 bp, Artificial Sequence
  Oligonucleotide for detection of SNP TSC0039114
acaaaataacaat

SEQ ID NO: 154725 - DNA, 13 bp, Artificial Sequence
  Oligonucleotide for detection of SNP TSC0039114
attgttgttttgt

SEQ ID NO: 154726 - DNA, 13 bp, Artificial Sequence
  Oligonucleotide for detection of SNP TSC0039114
acaaaacaacaat

SEQ ID NO: 154727 - DNA, 13 bp, Artificial Sequence
  Oligonucleotide for detection of SNP TSC0039114
attgttatttcgt

SEQ ID NO: 154728 - DNA, 13 bp, Artificial Sequence
  Oligonucleotide for detection of SNP TSC0039114
acgaaataacaat

SEQ ID NO: 154729 - DNA, 13 bp, Artificial Sequence
  Oligonucleotide for detection of SNP TSC0039114
attgtcgttttgt

SEQ ID NO: 154730 - DNA, 13 bp, Artificial Sequence
  Oligonucleotide for detection of SNP TSC0039114
acaaaacgacaat

SEQ ID NO: 154731 - DNA, 13 bp, Artificial Sequence
  Oligonucleotide for detection of SNP TSC0039114
attgttgtttcgt

SEQ ID NO: 154732 - DNA, 13 bp, Artificial Sequence
  Oligonucleotide for detection of SNP TSC0039114
acgaaacaacaat

SEQ ID NO: 154733 - DNA, 13 bp, Artificial Sequence
  Oligonucleotide for detection of SNP TSC0039114
attgtcgtttcgt

SEQ ID NO: 154734 - DNA, 13 bp, Artificial Sequence
  Oligonucleotide for detection of SNP TSC0039114
acgaaacgacaat

SEQ ID NO: 154735 - DNA, 13 bp, Artificial Sequence
  Oligonucleotide for detection of SNP TSC0039114
atggggtggtagt

SEQ ID NO: 154736 - DNA, 13 bp, Artificial Sequence
  Oligonucleotide for detection of SNP TSC0039114
actaccaccccat

SEQ ID NO: 154737 - DNA, 13 bp, Artificial Sequence
  Oligonucleotide for detection of SNP TSC0039114
acggggtggtagt

SEQ ID NO: 154738 - DNA, 13 bp, Artificial Sequence
  Oligonucleotide for detection of SNP TSC0039114
actaccaccccgt

SEQ ID NO: 154739 - DNA, 13 bp, Artificial Sequence
  Oligonucleotide for detection of SNP TSC0039114
atggggcggtagt

SEQ ID NO: 154740 - DNA, 13 bp, Artificial Sequence
  Oligonucleotide for detection of SNP TSC0039114
actaccgccccat

SEQ ID NO: 154741 - DNA, 13 bp, Artificial Sequence
  Oligonucleotide for detection of SNP TSC0039114
acggggcggtagt

SEQ ID NO: 154742 - DNA, 13 bp, Artificial Sequence
  Oligonucleotide for detection of SNP TSC0039114
actaccgccccgt

SEQ ID NO: 154743 - DNA, 13 bp, Artificial Sequence
  Oligonucleotide for detection of SNP TSC0039115
agtgaaattttat

SEQ ID NO: 154744 - DNA, 13 bp, Artificial Sequence
  Oligonucleotide for detection of SNP TSC0039115
ataaaatttcact

SEQ ID NO: 154745 - DNA, 13 bp, Artificial Sequence
  Oligonucleotide for detection of SNP TSC0039115
agtgaagttttat

SEQ ID NO: 154746 - DNA, 13 bp, Artificial Sequence
  Oligonucleotide for detection of SNP TSC0039115
ataaaacttcact

SEQ ID NO: 154747 - DNA, 13 bp, Artificial Sequence
  Oligonucleotide for detection of SNP TSC0039115
agcgaaattttat

SEQ ID NO: 154748 - DNA, 13 bp, Artificial Sequence
  Oligonucleotide for detection of SNP TSC0039115
ataaaatttcgct

SEQ ID NO: 154749 - DNA, 13 bp, Artificial Sequence
  Oligonucleotide for detection of SNP TSC0039115
agcgaagttttat

SEQ ID NO: 154750 - DNA, 13 bp, Artificial Sequence
  Oligonucleotide for detection of SNP TSC0039115
ataaaacttcgct

SEQ ID NO: 154751 - DNA, 13 bp, Artificial Sequence
  Oligonucleotide for detection of SNP TSC0039119
tgtatatgtatay

SEQ ID NO: 154752 - DNA, 13 bp, Artificial Sequence
  Oligonucleotide for detection of SNP TSC0039119
rtatacatataca

SEQ ID NO: 154753 - DNA, 13 bp, Artificial Sequence
  Oligonucleotide for detection of SNP TSC0039119
tgtatacgtatay

SEQ ID NO: 154754 - DNA, 13 bp, Artificial Sequence
  Oligonucleotide for detection of SNP TSC0039119
rtatacgtataca

SEQ ID NO: 154755 - DNA, 13 bp, Artificial Sequence
  Oligonucleotide for detection of SNP TSC0039119
gtgtgcgtgtgta

SEQ ID NO: 154756 - DNA, 13 bp, Artificial Sequence
  Oligonucleotide for detection of SNP TSC0039119
tacacacgcacac

SEQ ID NO: 154757 - DNA, 13 bp, Artificial Sequence
  Oligonucleotide for detection of SNP TSC0039120
aggttgtgttagt

SEQ ID NO: 154758 - DNA, 13 bp, Artificial Sequence
  Oligonucleotide for detection of SNP TSC0039120
actaacacaacct

SEQ ID NO: 154759 - DNA, 13 bp, Artificial Sequence
  Oligonucleotide for detection of SNP TSC0039120
aggttgggttagt

SEQ ID NO: 154760 - DNA, 13 bp, Artificial Sequence
  Oligonucleotide for detection of SNP TSC0039120
actaacccaacct

SEQ ID NO: 154761 - DNA, 13 bp, Artificial Sequence
  Oligonucleotide for detection of SNP TSC0039120
attaatataattt

SEQ ID NO: 154762 - DNA, 13 bp, Artificial Sequence
  Oligonucleotide for detection of SNP TSC0039120
aaattatattaat

SEQ ID NO: 154763 - DNA, 13 bp, Artificial Sequence
  Oligonucleotide for detection of SNP TSC0039120
attaatttaattt

SEQ ID NO: 154764 - DNA, 13 bp, Artificial Sequence
  Oligonucleotide for detection of SNP TSC0039120
aaattaaattaat

SEQ ID NO: 154765 - DNA, 13 bp, Artificial Sequence
  Oligonucleotide for detection of SNP TSC0039121
atattaatttgty

SEQ ID NO: 154766 - DNA, 13 bp, Artificial Sequence
  Oligonucleotide for detection of SNP TSC0039121
racaaattaatat

SEQ ID NO: 154767 - DNA, 13 bp, Artificial Sequence
  Oligonucleotide for detection of SNP TSC0039121
atattattttgty

SEQ ID NO: 154768 - DNA, 13 bp, Artificial Sequence
  Oligonucleotide for detection of SNP TSC0039121
racaaaataatat

SEQ ID NO: 154769 - DNA, 13 bp, Artificial Sequence
  Oligonucleotide for detection of SNP TSC0039121
ggtagattggtgt

SEQ ID NO: 154770 - DNA, 13 bp, Artificial Sequence
  Oligonucleotide for detection of SNP TSC0039121
acaccaatctacc

SEQ ID NO: 154771 - DNA, 13 bp, Artificial Sequence
  Oligonucleotide for detection of SNP TSC0039121
ggtagaatggtgt

SEQ ID NO: 154772 - DNA, 13 bp, Artificial Sequence
  Oligonucleotide for detection of SNP TSC0039121
acaccattctacc

SEQ ID NO: 154773 - DNA, 13 bp, Artificial Sequence
  Oligonucleotide for detection of SNP TSC0039122
tattttatagaag

SEQ ID NO: 154774 - DNA, 13 bp, Artificial Sequence
  Oligonucleotide for detection of SNP TSC0039122
cttctataaaata

SEQ ID NO: 154775 - DNA, 13 bp, Artificial Sequence
  Oligonucleotide for detection of SNP TSC0039122
tattttttagaag

SEQ ID NO: 154776 - DNA, 13 bp, Artificial Sequence
  Oligonucleotide for detection of SNP TSC0039122
cttctaaaaaata

SEQ ID NO: 154777 - DNA, 13 bp, Artificial Sequence
  Oligonucleotide for detection of SNP TSC0039122
tttttgtgaaatg

SEQ ID NO: 154778 - DNA, 13 bp, Artificial Sequence
  Oligonucleotide for detection of SNP TSC0039122
catttcacaaaaa

SEQ ID NO: 154779 - DNA, 13 bp, Artificial Sequence
  Oligonucleotide for detection of SNP TSC0039122
tttttgggaaatg

SEQ ID NO: 154780 - DNA, 13 bp, Artificial Sequence
  Oligonucleotide for detection of SNP TSC0039122
catttcccaaaaa

SEQ ID NO: 154781 - DNA, 13 bp, Artificial Sequence
  Oligonucleotide for detection of SNP TSC0007554
ttgtatgttatgg

SEQ ID NO: 154782 - DNA, 13 bp, Artificial Sequence
  Oligonucleotide for detection of SNP TSC0007554
ccataacatacaa

SEQ ID NO: 154783 - DNA, 13 bp, Artificial Sequence
  Oligonucleotide for detection of SNP TSC0007554
ttgtatattatgg

SEQ ID NO: 154784 - DNA, 13 bp, Artificial Sequence
  Oligonucleotide for detection of SNP TSC0007554
ccataatatacaa

SEQ ID NO: 154785 - DNA, 13 bp, Artificial Sequence
  Oligonucleotide for detection of SNP TSC0007554
tcgtatgttatgg

SEQ ID NO: 154786 - DNA, 13 bp, Artificial Sequence
  Oligonucleotide for detection of SNP TSC0007554
ccataacatacga

SEQ ID NO: 154787 - DNA, 13 bp, Artificial Sequence
  Oligonucleotide for detection of SNP TSC0007554
tcgtatattatgg

SEQ ID NO: 154788 - DNA, 13 bp, Artificial Sequence
  Oligonucleotide for detection of SNP TSC0007554
ccataatatacga

SEQ ID NO: 154789 - DNA, 13 bp, Artificial Sequence
  Oligonucleotide for detection of SNP TSC0009515
aataaatatatty

SEQ ID NO: 154790 - DNA, 13 bp, Artificial Sequence
  Oligonucleotide for detection of SNP TSC0009515
raatatatttatt

SEQ ID NO: 154791 - DNA, 13 bp, Artificial Sequence
  Oligonucleotide for detection of SNP TSC0009515
aataaagatatty

SEQ ID NO: 154792 - DNA, 13 bp, Artificial Sequence
  Oligonucleotide for detection of SNP TSC0009515
raatatctttatt

SEQ ID NO: 154793 - DNA, 13 bp, Artificial Sequence
  Oligonucleotide for detection of SNP TSC0009515
gaatatatttatt

SEQ ID NO: 154794 - DNA, 13 bp, Artificial Sequence
  Oligonucleotide for detection of SNP TSC0009515
aataaatatattc

SEQ ID NO: 154795 - DNA, 13 bp, Artificial Sequence
  Oligonucleotide for detection of SNP TSC0009515
gaatatttttatt

SEQ ID NO: 154796 - DNA, 13 bp, Artificial Sequence
  Oligonucleotide for detection of SNP TSC0009515
aataaaaatattc

SEQ ID NO: 154797 - DNA, 13 bp, Artificial Sequence
  Oligonucleotide for detection of SNP TSC0039126
agggatatggatt

SEQ ID NO: 154798 - DNA, 13 bp, Artificial Sequence
  Oligonucleotide for detection of SNP TSC0039126
aatccatatccct

SEQ ID NO: 154799 - DNA, 13 bp, Artificial Sequence
  Oligonucleotide for detection of SNP TSC0039126
agggatgtggatt

SEQ ID NO: 154800 - DNA, 13 bp, Artificial Sequence
  Oligonucleotide for detection of SNP TSC0039126
aatccacatccct

SEQ ID NO: 154801 - DNA, 13 bp, Artificial Sequence
  Oligonucleotide for detection of SNP TSC0039126
agggacgtggatt

SEQ ID NO: 154802 - DNA, 13 bp, Artificial Sequence
  Oligonucleotide for detection of SNP TSC0039126
aatccacgtccct

SEQ ID NO: 154803 - DNA, 13 bp, Artificial Sequence
  Oligonucleotide for detection of SNP TSC0039126
agtttatgttttt

SEQ ID NO: 154804 - DNA, 13 bp, Artificial Sequence
  Oligonucleotide for detection of SNP TSC0039126
aaaaacataaact

SEQ ID NO: 154805 - DNA, 13 bp, Artificial Sequence
  Oligonucleotide for detection of SNP TSC0039126
agtttacgttttt

SEQ ID NO: 154806 - DNA, 13 bp, Artificial Sequence
  Oligonucleotide for detection of SNP TSC0039126
aaaaacgtaaact

SEQ ID NO: 154807 - DNA, 13 bp, Artificial Sequence
  Oligonucleotide for detection of SNP TSC0039127
gtgtttagattay

SEQ ID NO: 154808 - DNA, 13 bp, Artificial Sequence
  Oligonucleotide for detection of SNP TSC0039127
rtaatctaaacac

SEQ ID NO: 154809 - DNA, 13 bp, Artificial Sequence
  Oligonucleotide for detection of SNP TSC0039127
gtgtttggattay

SEQ ID NO: 154810 - DNA, 13 bp, Artificial Sequence
  Oligonucleotide for detection of SNP TSC0039127
rtaatccaaacac

SEQ ID NO: 154811 - DNA, 13 bp, Artificial Sequence
  Oligonucleotide for detection of SNP TSC0039127
gtgttcggattay

SEQ ID NO: 154812 - DNA, 13 bp, Artificial Sequence
  Oligonucleotide for detection of SNP TSC0039127
rtaatccgaacac

SEQ ID NO: 154813 - DNA, 13 bp, Artificial Sequence
  Oligonucleotide for detection of SNP TSC0039127
gtaatttgagtay

SEQ ID NO: 154814 - DNA, 13 bp, Artificial Sequence
  Oligonucleotide for detection of SNP TSC0039127
rtactcaaattac

SEQ ID NO: 154815 - DNA, 13 bp, Artificial Sequence
  Oligonucleotide for detection of SNP TSC0039127
gtaattcgagtay

SEQ ID NO: 154816 - DNA, 13 bp, Artificial Sequence
  Oligonucleotide for detection of SNP TSC0039127
rtactcgaattac

SEQ ID NO: 154817 - DNA, 13 bp, Artificial Sequence
  Oligonucleotide for detection of SNP TSC0039128
agttttttttatg

SEQ ID NO: 154818 - DNA, 13 bp, Artificial Sequence
  Oligonucleotide for detection of SNP TSC0039128
cataaaaaaaact

SEQ ID NO: 154819 - DNA, 13 bp, Artificial Sequence
  Oligonucleotide for detection of SNP TSC0039128
agttttgtttatg

SEQ ID NO: 154820 - DNA, 13 bp, Artificial Sequence
  Oligonucleotide for detection of SNP TSC0039128
cataaacaaaact

SEQ ID NO: 154821 - DNA, 13 bp, Artificial Sequence
  Oligonucleotide for detection of SNP TSC0039128
tataagaaggatt

SEQ ID NO: 154822 - DNA, 13 bp, Artificial Sequence
  Oligonucleotide for detection of SNP TSC0039128
aatccttcttata

SEQ ID NO: 154823 - DNA, 13 bp, Artificial Sequence
  Oligonucleotide for detection of SNP TSC0039128
tataagtaggatt

SEQ ID NO: 154824 - DNA, 13 bp, Artificial Sequence
  Oligonucleotide for detection of SNP TSC0039128
aatcctacttata

SEQ ID NO: 154825 - DNA, 13 bp, Artificial Sequence
  Oligonucleotide for detection of SNP TSC0039129
tatttagtttaga

SEQ ID NO: 154826 - DNA, 13 bp, Artificial Sequence
  Oligonucleotide for detection of SNP TSC0039129
tctaaactaaata

SEQ ID NO: 154827 - DNA, 13 bp, Artificial Sequence
  Oligonucleotide for detection of SNP TSC0039130
aaaaatagatggt

SEQ ID NO: 154828 - DNA, 13 bp, Artificial Sequence
  Oligonucleotide for detection of SNP TSC0039130
accatctattttt

SEQ ID NO: 154829 - DNA, 13 bp, Artificial Sequence
  Oligonucleotide for detection of SNP TSC0039130
aaaaattgatggt

SEQ ID NO: 154830 - DNA, 13 bp, Artificial Sequence
  Oligonucleotide for detection of SNP TSC0039130
accatcaattttt

SEQ ID NO: 154831 - DNA, 13 bp, Artificial Sequence
  Oligonucleotide for detection of SNP TSC0039130
attatttattttt

SEQ ID NO: 154832 - DNA, 13 bp, Artificial Sequence
  Oligonucleotide for detection of SNP TSC0039130
aaaaataaataat

SEQ ID NO: 154833 - DNA, 13 bp, Artificial Sequence
  Oligonucleotide for detection of SNP TSC0039131
tttaaagagaaay

SEQ ID NO: 154834 - DNA, 13 bp, Artificial Sequence
  Oligonucleotide for detection of SNP TSC0039131
rtttctctttaaa

SEQ ID NO: 154835 - DNA, 13 bp, Artificial Sequence
  Oligonucleotide for detection of SNP TSC0039131
tttaaaaagaaay

SEQ ID NO: 154836 - DNA, 13 bp, Artificial Sequence
  Oligonucleotide for detection of SNP TSC0039131
rtttctttttaaa

SEQ ID NO: 154837 - DNA, 13 bp, Artificial Sequence
  Oligonucleotide for detection of SNP TSC0039132
atttagattattt

SEQ ID NO: 154838 - DNA, 13 bp, Artificial Sequence
  Oligonucleotide for detection of SNP TSC0039132
aaataatctaaat

SEQ ID NO: 154839 - DNA, 13 bp, Artificial Sequence
  Oligonucleotide for detection of SNP TSC0039133
tttataaatttga

SEQ ID NO: 154840 - DNA, 13 bp, Artificial Sequence
  Oligonucleotide for detection of SNP TSC0039133
tcaaatttataaa

SEQ ID NO: 154841 - DNA, 13 bp, Artificial Sequence
  Oligonucleotide for detection of SNP TSC0039135
ttatttgtatagg

SEQ ID NO: 154842 - DNA, 13 bp, Artificial Sequence
  Oligonucleotide for detection of SNP TSC0039135
cctatacaaataa

SEQ ID NO: 154843 - DNA, 13 bp, Artificial Sequence
  Oligonucleotide for detection of SNP TSC0039135
ttatttatatagg

SEQ ID NO: 154844 - DNA, 13 bp, Artificial Sequence
  Oligonucleotide for detection of SNP TSC0039135
cctatataaataa

SEQ ID NO: 154845 - DNA, 13 bp, Artificial Sequence
  Oligonucleotide for detection of SNP TSC0039136
tttagggaatttg

SEQ ID NO: 154846 - DNA, 13 bp, Artificial Sequence
  Oligonucleotide for detection of SNP TSC0039136
caaattccctaaa

SEQ ID NO: 154847 - DNA, 13 bp, Artificial Sequence
  Oligonucleotide for detection of SNP TSC0039138
gtagggtgggtty

SEQ ID NO: 154848 - DNA, 13 bp, Artificial Sequence
  Oligonucleotide for detection of SNP TSC0039138
raacccaccctac

SEQ ID NO: 154849 - DNA, 13 bp, Artificial Sequence
  Oligonucleotide for detection of SNP TSC0039138
gtagggcgggtty

SEQ ID NO: 154850 - DNA, 13 bp, Artificial Sequence
  Oligonucleotide for detection of SNP TSC0039138
raacccgccctac

SEQ ID NO: 154851 - DNA, 13 bp, Artificial Sequence
  Oligonucleotide for detection of SNP TSC0039138
gggtttgttttay

SEQ ID NO: 154852 - DNA, 13 bp, Artificial Sequence
  Oligonucleotide for detection of SNP TSC0039138
rtaaaacaaaccc

SEQ ID NO: 154853 - DNA, 13 bp, Artificial Sequence
  Oligonucleotide for detection of SNP TSC0039138
gggtttattttay

SEQ ID NO: 154854 - DNA, 13 bp, Artificial Sequence
  Oligonucleotide for detection of SNP TSC0039138
rtaaaataaaccc

SEQ ID NO: 154855 - DNA, 13 bp, Artificial Sequence
  Oligonucleotide for detection of SNP TSC0039138
gggttcgttttay

SEQ ID NO: 154856 - DNA, 13 bp, Artificial Sequence
  Oligonucleotide for detection of SNP TSC0039138
rtaaaacgaaccc

SEQ ID NO: 154857 - DNA, 13 bp, Artificial Sequence
  Oligonucleotide for detection of SNP TSC0039139
tagtaggtgttag

SEQ ID NO: 154858 - DNA, 13 bp, Artificial Sequence
  Oligonucleotide for detection of SNP TSC0039139
ctaacacctacta

SEQ ID NO: 154859 - DNA, 13 bp, Artificial Sequence
  Oligonucleotide for detection of SNP TSC0039139
tagtagatgttag

SEQ ID NO: 154860 - DNA, 13 bp, Artificial Sequence
  Oligonucleotide for detection of SNP TSC0039139
ctaacatctacta

SEQ ID NO: 154861 - DNA, 13 bp, Artificial Sequence
  Oligonucleotide for detection of SNP TSC0039140
tttttaagtagaa

SEQ ID NO: 154862 - DNA, 13 bp, Artificial Sequence
  Oligonucleotide for detection of SNP TSC0039140
ttctacttaaaaa

SEQ ID NO: 154863 - DNA, 13 bp, Artificial Sequence
  Oligonucleotide for detection of SNP TSC0039140
tttttaggtagaa

SEQ ID NO: 154864 - DNA, 13 bp, Artificial Sequence
  Oligonucleotide for detection of SNP TSC0039140
ttctacctaaaaa

SEQ ID NO: 154865 - DNA, 13 bp, Artificial Sequence
  Oligonucleotide for detection of SNP TSC0006464
taagggatttgaa

SEQ ID NO: 154866 - DNA, 13 bp, Artificial Sequence
  Oligonucleotide for detection of SNP TSC0006464
ttcaaatccctta

SEQ ID NO: 154867 - DNA, 13 bp, Artificial Sequence
  Oligonucleotide for detection of SNP TSC0006464
taaggggtttgaa

SEQ ID NO: 154868 - DNA, 13 bp, Artificial Sequence
  Oligonucleotide for detection of SNP TSC0006464
ttcaaacccctta

SEQ ID NO: 154869 - DNA, 13 bp, Artificial Sequence
  Oligonucleotide for detection of SNP TSC0039141
ttttgtatgttty

SEQ ID NO: 154870 - DNA, 13 bp, Artificial Sequence
  Oligonucleotide for detection of SNP TSC0039141
raaacatacaaaa

SEQ ID NO: 154871 - DNA, 13 bp, Artificial Sequence
  Oligonucleotide for detection of SNP TSC0039141
ttttgcgtgttty

SEQ ID NO: 154872 - DNA, 13 bp, Artificial Sequence
  Oligonucleotide for detection of SNP TSC0039141
raaacacgcaaaa

SEQ ID NO: 154873 - DNA, 13 bp, Artificial Sequence
  Oligonucleotide for detection of SNP TSC0039141
gaggtatgtaaag

SEQ ID NO: 154874 - DNA, 13 bp, Artificial Sequence
  Oligonucleotide for detection of SNP TSC0039141
ctttacatacctc

SEQ ID NO: 154875 - DNA, 13 bp, Artificial Sequence
  Oligonucleotide for detection of SNP TSC0039141
gaggtacgtaaag

SEQ ID NO: 154876 - DNA, 13 bp, Artificial Sequence
  Oligonucleotide for detection of SNP TSC0039141
ctttacgtacctc

SEQ ID NO: 154877 - DNA, 13 bp, Artificial Sequence
  Oligonucleotide for detection of SNP TSC0039142
atttaaattaaag

SEQ ID NO: 154878 - DNA, 13 bp, Artificial Sequence
  Oligonucleotide for detection of SNP TSC0039142
ctttaatttaaat

SEQ ID NO: 154879 - DNA, 13 bp, Artificial Sequence
  Oligonucleotide for detection of SNP TSC0039142
atttaagttaaag

SEQ ID NO: 154880 - DNA, 13 bp, Artificial Sequence
  Oligonucleotide for detection of SNP TSC0039142
ctttaacttaaat

SEQ ID NO: 154881 - DNA, 13 bp, Artificial Sequence
  Oligonucleotide for detection of SNP TSC0039143
ttttaaatatgtt

SEQ ID NO: 154882 - DNA, 13 bp, Artificial Sequence
  Oligonucleotide for detection of SNP TSC0039143
aacatatttaaaa

SEQ ID NO: 154883 - DNA, 13 bp, Artificial Sequence
  Oligonucleotide for detection of SNP TSC0039143
ttttaagtatgtt

SEQ ID NO: 154884 - DNA, 13 bp, Artificial Sequence
  Oligonucleotide for detection of SNP TSC0039143
aacatacttaaaa

SEQ ID NO: 154885 - DNA, 13 bp, Artificial Sequence
  Oligonucleotide for detection of SNP TSC0039144
tttatggataagt

SEQ ID NO: 154886 - DNA, 13 bp, Artificial Sequence
  Oligonucleotide for detection of SNP TSC0039144
acttatccataaa

SEQ ID NO: 154887 - DNA, 13 bp, Artificial Sequence
  Oligonucleotide for detection of SNP TSC0039144
tttatgaataagt

SEQ ID NO: 154888 - DNA, 13 bp, Artificial Sequence
  Oligonucleotide for detection of SNP TSC0039144
acttattcataaa

SEQ ID NO: 154889 - DNA, 13 bp, Artificial Sequence
  Oligonucleotide for detection of SNP TSC0039145
tgaatgagtataa

SEQ ID NO: 154890 - DNA, 13 bp, Artificial Sequence
  Oligonucleotide for detection of SNP TSC0039145
ttatactcattca

SEQ ID NO: 154891 - DNA, 13 bp, Artificial Sequence
  Oligonucleotide for detection of SNP TSC0039145
tgaatgtgtataa

SEQ ID NO: 154892 - DNA, 13 bp, Artificial Sequence
  Oligonucleotide for detection of SNP TSC0039145
ttatacacattca

SEQ ID NO: 154893 - DNA, 13 bp, Artificial Sequence
  Oligonucleotide for detection of SNP TSC0039145
ttatgtttattta

SEQ ID NO: 154894 - DNA, 13 bp, Artificial Sequence
  Oligonucleotide for detection of SNP TSC0039145
taaataaacataa

SEQ ID NO: 154895 - DNA, 13 bp, Artificial Sequence
  Oligonucleotide for detection of SNP TSC0039145
ttatgtatattta

SEQ ID NO: 154896 - DNA, 13 bp, Artificial Sequence
  Oligonucleotide for detection of SNP TSC0039145
taaatatacataa

SEQ ID NO: 154897 - DNA, 13 bp, Artificial Sequence
  Oligonucleotide for detection of SNP TSC0039146
aaggttagaagag

SEQ ID NO: 154898 - DNA, 13 bp, Artificial Sequence
  Oligonucleotide for detection of SNP TSC0039146
ctcttctaacctt

SEQ ID NO: 154899 - DNA, 13 bp, Artificial Sequence
  Oligonucleotide for detection of SNP TSC0039146
aaggtttgaagag

SEQ ID NO: 154900 - DNA, 13 bp, Artificial Sequence
  Oligonucleotide for detection of SNP TSC0039146
ctcttcaaacctt

SEQ ID NO: 154901 - DNA, 13 bp, Artificial Sequence
  Oligonucleotide for detection of SNP TSC0039147
aaattttgtattg

SEQ ID NO: 154902 - DNA, 13 bp, Artificial Sequence
  Oligonucleotide for detection of SNP TSC0039147
caatacaaaattt

SEQ ID NO: 154903 - DNA, 13 bp, Artificial Sequence
  Oligonucleotide for detection of SNP TSC0039147
aaatttcgtattg

SEQ ID NO: 154904 - DNA, 13 bp, Artificial Sequence
  Oligonucleotide for detection of SNP TSC0039147
caatacgaaattt

SEQ ID NO: 154905 - DNA, 13 bp, Artificial Sequence
  Oligonucleotide for detection of SNP TSC0039147
tagtgtggaattt

SEQ ID NO: 154906 - DNA, 13 bp, Artificial Sequence
  Oligonucleotide for detection of SNP TSC0039147
aaattccacacta

SEQ ID NO: 154907 - DNA, 13 bp, Artificial Sequence
  Oligonucleotide for detection of SNP TSC0039147
tagtgtagaattt

SEQ ID NO: 154908 - DNA, 13 bp, Artificial Sequence
  Oligonucleotide for detection of SNP TSC0039147
aaattctacacta

SEQ ID NO: 154909 - DNA, 13 bp, Artificial Sequence
  Oligonucleotide for detection of SNP TSC0039147
tagtgcggaattt

SEQ ID NO: 154910 - DNA, 13 bp, Artificial Sequence
  Oligonucleotide for detection of SNP TSC0039147
aaattccgcacta

SEQ ID NO: 154911 - DNA, 13 bp, Artificial Sequence
  Oligonucleotide for detection of SNP TSC0039151
aagtatttgatgg

SEQ ID NO: 154912 - DNA, 13 bp, Artificial Sequence
  Oligonucleotide for detection of SNP TSC0039151
ccatcaaatactt

SEQ ID NO: 154913 - DNA, 13 bp, Artificial Sequence
  Oligonucleotide for detection of SNP TSC0039151
aagtatgtgatgg

SEQ ID NO: 154914 - DNA, 13 bp, Artificial Sequence
  Oligonucleotide for detection of SNP TSC0039151
ccatcacatactt

SEQ ID NO: 154915 - DNA, 13 bp, Artificial Sequence
  Oligonucleotide for detection of SNP TSC0039151
ttattagatattt

SEQ ID NO: 154916 - DNA, 13 bp, Artificial Sequence
  Oligonucleotide for detection of SNP TSC0039151
aaatatctaataa

SEQ ID NO: 154917 - DNA, 13 bp, Artificial Sequence
  Oligonucleotide for detection of SNP TSC0039151
ttattatatattt

SEQ ID NO: 154918 - DNA, 13 bp, Artificial Sequence
  Oligonucleotide for detection of SNP TSC0039151
aaatatataataa

SEQ ID NO: 154919 - DNA, 13 bp, Artificial Sequence
  Oligonucleotide for detection of SNP TSC0039152
aaaattatgttgt

SEQ ID NO: 154920 - DNA, 13 bp, Artificial Sequence
  Oligonucleotide for detection of SNP TSC0039152
acaacataatttt

SEQ ID NO: 154921 - DNA, 13 bp, Artificial Sequence
  Oligonucleotide for detection of SNP TSC0039152
aaaattgtgttgt

SEQ ID NO: 154922 - DNA, 13 bp, Artificial Sequence
  Oligonucleotide for detection of SNP TSC0039152
acaacacaatttt

SEQ ID NO: 154923 - DNA, 13 bp, Artificial Sequence
  Oligonucleotide for detection of SNP TSC0039153
taaggttgggtgt

SEQ ID NO: 154924 - DNA, 13 bp, Artificial Sequence
  Oligonucleotide for detection of SNP TSC0039153
acacccaacctta

SEQ ID NO: 154925 - DNA, 13 bp, Artificial Sequence
  Oligonucleotide for detection of SNP TSC0039153
taaggtcgggtgt

SEQ ID NO: 154926 - DNA, 13 bp, Artificial Sequence
  Oligonucleotide for detection of SNP TSC0039153
acacccgacctta

SEQ ID NO: 154927 - DNA, 13 bp, Artificial Sequence
  Oligonucleotide for detection of SNP TSC0039153
taaggttgggcgt

SEQ ID NO: 154928 - DNA, 13 bp, Artificial Sequence
  Oligonucleotide for detection of SNP TSC0039153
acgcccaacctta

SEQ ID NO: 154929 - DNA, 13 bp, Artificial Sequence
  Oligonucleotide for detection of SNP TSC0039153
taaggtcgggcgt

SEQ ID NO: 154930 - DNA, 13 bp, Artificial Sequence
  Oligonucleotide for detection of SNP TSC0039153
acgcccgacctta

SEQ ID NO: 154931 - DNA, 13 bp, Artificial Sequence
  Oligonucleotide for detection of SNP TSC0039153
acgtttggtttta

SEQ ID NO: 154932 - DNA, 13 bp, Artificial Sequence
  Oligonucleotide for detection of SNP TSC0039153
taaaaccaaacgt

SEQ ID NO: 154933 - DNA, 13 bp, Artificial Sequence
  Oligonucleotide for detection of SNP TSC0039153
acgtttagtttta

SEQ ID NO: 154934 - DNA, 13 bp, Artificial Sequence
  Oligonucleotide for detection of SNP TSC0039153
taaaactaaacgt

SEQ ID NO: 154935 - DNA, 13 bp, Artificial Sequence
  Oligonucleotide for detection of SNP TSC0039153
acgttcggtttta

SEQ ID NO: 154936 - DNA, 13 bp, Artificial Sequence
  Oligonucleotide for detection of SNP TSC0039153
taaaaccgaacgt

SEQ ID NO: 154937 - DNA, 13 bp, Artificial Sequence
  Oligonucleotide for detection of SNP TSC0039154
atatatataaaag

SEQ ID NO: 154938 - DNA, 13 bp, Artificial Sequence
  Oligonucleotide for detection of SNP TSC0039154
cttttatatatat

SEQ ID NO: 154939 - DNA, 13 bp, Artificial Sequence
  Oligonucleotide for detection of SNP TSC0039154
atatatgtaaaag

SEQ ID NO: 154940 - DNA, 13 bp, Artificial Sequence
  Oligonucleotide for detection of SNP TSC0039154
cttttacatatat

SEQ ID NO: 154941 - DNA, 13 bp, Artificial Sequence
  Oligonucleotide for detection of SNP TSC0039154
atatacgtaaaag

SEQ ID NO: 154942 - DNA, 13 bp, Artificial Sequence
  Oligonucleotide for detection of SNP TSC0039154
cttttacgtatat

SEQ ID NO: 154943 - DNA, 13 bp, Artificial Sequence
  Oligonucleotide for detection of SNP TSC0039155
attatttgtgtat

SEQ ID NO: 154944 - DNA, 13 bp, Artificial Sequence
  Oligonucleotide for detection of SNP TSC0039155
atacacaaataat

SEQ ID NO: 154945 - DNA, 13 bp, Artificial Sequence
  Oligonucleotide for detection of SNP TSC0039155
attattcgtgtat

SEQ ID NO: 154946 - DNA, 13 bp, Artificial Sequence
  Oligonucleotide for detection of SNP TSC0039155
atacacgaataat

SEQ ID NO: 154947 - DNA, 13 bp, Artificial Sequence
  Oligonucleotide for detection of SNP TSC0039155
attatttgcgtat

SEQ ID NO: 154948 - DNA, 13 bp, Artificial Sequence
  Oligonucleotide for detection of SNP TSC0039155
atacgcaaataat

SEQ ID NO: 154949 - DNA, 13 bp, Artificial Sequence
  Oligonucleotide for detection of SNP TSC0039155
attattcgcgtat

SEQ ID NO: 154950 - DNA, 13 bp, Artificial Sequence
  Oligonucleotide for detection of SNP TSC0039155
atacgcgaataat

SEQ ID NO: 154951 - DNA, 13 bp, Artificial Sequence
  Oligonucleotide for detection of SNP TSC0039155
atatgtgggtgat

SEQ ID NO: 154952 - DNA, 13 bp, Artificial Sequence
  Oligonucleotide for detection of SNP TSC0039155
atcacccacatat

SEQ ID NO: 154953 - DNA, 13 bp, Artificial Sequence
  Oligonucleotide for detection of SNP TSC0039155
atatgtaggtgat

SEQ ID NO: 154954 - DNA, 13 bp, Artificial Sequence
  Oligonucleotide for detection of SNP TSC0039155
atcacctacatat

SEQ ID NO: 154955 - DNA, 13 bp, Artificial Sequence
  Oligonucleotide for detection of SNP TSC0039155
atacgtgggtgat

SEQ ID NO: 154956 - DNA, 13 bp, Artificial Sequence
  Oligonucleotide for detection of SNP TSC0039155
atcacccacgtat

SEQ ID NO: 154957 - DNA, 13 bp, Artificial Sequence
  Oligonucleotide for detection of SNP TSC0039155
atacgtaggtgat

SEQ ID NO: 154958 - DNA, 13 bp, Artificial Sequence
  Oligonucleotide for detection of SNP TSC0039155
atcacctacgtat

SEQ ID NO: 154959 - DNA, 13 bp, Artificial Sequence
  Oligonucleotide for detection of SNP TSC0039155
atatgcgggtgat

SEQ ID NO: 154960 - DNA, 13 bp, Artificial Sequence
  Oligonucleotide for detection of SNP TSC0039155
atcacccgcatat

SEQ ID NO: 154961 - DNA, 13 bp, Artificial Sequence
  Oligonucleotide for detection of SNP TSC0039155
atacgcgggtgat

SEQ ID NO: 154962 - DNA, 13 bp, Artificial Sequence
  Oligonucleotide for detection of SNP TSC0039155
atcacccgcgtat

SEQ ID NO: 154963 - DNA, 13 bp, Artificial Sequence
  Oligonucleotide for detection of SNP TSC0039156
tttaataattgta

SEQ ID NO: 154964 - DNA, 13 bp, Artificial Sequence
  Oligonucleotide for detection of SNP TSC0039156
tacaattattaaa

SEQ ID NO: 154965 - DNA, 13 bp, Artificial Sequence
  Oligonucleotide for detection of SNP TSC0039156
tttaattattgta

SEQ ID NO: 154966 - DNA, 13 bp, Artificial Sequence
  Oligonucleotide for detection of SNP TSC0039156
tacaataattaaa

SEQ ID NO: 154967 - DNA, 13 bp, Artificial Sequence
  Oligonucleotide for detection of SNP TSC0039156
tgtagttattaag

SEQ ID NO: 154968 - DNA, 13 bp, Artificial Sequence
  Oligonucleotide for detection of SNP TSC0039156
cttaataactaca

SEQ ID NO: 154969 - DNA, 13 bp, Artificial Sequence
  Oligonucleotide for detection of SNP TSC0039156
tgtagtgattaag

SEQ ID NO: 154970 - DNA, 13 bp, Artificial Sequence
  Oligonucleotide for detection of SNP TSC0039156
cttaatcactaca

SEQ ID NO: 154971 - DNA, 13 bp, Artificial Sequence
  Oligonucleotide for detection of SNP TSC0039157
ttatgaatgttty

SEQ ID NO: 154972 - DNA, 13 bp, Artificial Sequence
  Oligonucleotide for detection of SNP TSC0039157
raaacattcataa

SEQ ID NO: 154973 - DNA, 13 bp, Artificial Sequence
  Oligonucleotide for detection of SNP TSC0039157
ttatgagtgttty

SEQ ID NO: 154974 - DNA, 13 bp, Artificial Sequence
  Oligonucleotide for detection of SNP TSC0039157
raaacactcataa

SEQ ID NO: 154975 - DNA, 13 bp, Artificial Sequence
  Oligonucleotide for detection of SNP TSC0039158
gtgttttgtattt

SEQ ID NO: 154976 - DNA, 13 bp, Artificial Sequence
  Oligonucleotide for detection of SNP TSC0039158
aaatacaaaacac

SEQ ID NO: 154977 - DNA, 13 bp, Artificial Sequence
  Oligonucleotide for detection of SNP TSC0039158
gtgtttcgtattt

SEQ ID NO: 154978 - DNA, 13 bp, Artificial Sequence
  Oligonucleotide for detection of SNP TSC0039158
aaatacgaaacac

SEQ ID NO: 154979 - DNA, 13 bp, Artificial Sequence
  Oligonucleotide for detection of SNP TSC0039158
aaatgtgaggtay

SEQ ID NO: 154980 - DNA, 13 bp, Artificial Sequence
  Oligonucleotide for detection of SNP TSC0039158
rtacctcacattt

SEQ ID NO: 154981 - DNA, 13 bp, Artificial Sequence
  Oligonucleotide for detection of SNP TSC0039158
aaatgttaggtay

SEQ ID NO: 154982 - DNA, 13 bp, Artificial Sequence
  Oligonucleotide for detection of SNP TSC0039158
rtacctaacattt

SEQ ID NO: 154983 - DNA, 13 bp, Artificial Sequence
  Oligonucleotide for detection of SNP TSC0039158
aaatgcgaggtay

SEQ ID NO: 154984 - DNA, 13 bp, Artificial Sequence
  Oligonucleotide for detection of SNP TSC0039158
rtacctcgcattt

SEQ ID NO: 154985 - DNA, 13 bp, Artificial Sequence
  Oligonucleotide for detection of SNP TSC0004553
ttgattagtaaaa

SEQ ID NO: 154986 - DNA, 13 bp, Artificial Sequence
  Oligonucleotide for detection of SNP TSC0004553
ttttactaatcaa

SEQ ID NO: 154987 - DNA, 13 bp, Artificial Sequence
  Oligonucleotide for detection of SNP TSC0004553
ttgattggtaaaa

SEQ ID NO: 154988 - DNA, 13 bp, Artificial Sequence
  Oligonucleotide for detection of SNP TSC0004553
ttttaccaatcaa

SEQ ID NO: 154989 - DNA, 13 bp, Artificial Sequence
  Oligonucleotide for detection of SNP TSC0004553
ttgatcggtaaaa

SEQ ID NO: 154990 - DNA, 13 bp, Artificial Sequence
  Oligonucleotide for detection of SNP TSC0004553
ttttaccgatcaa

SEQ ID NO: 154991 - DNA, 13 bp, Artificial Sequence
  Oligonucleotide for detection of SNP TSC0039160
ttttttgttaaay

SEQ ID NO: 154992 - DNA, 13 bp, Artificial Sequence
  Oligonucleotide for detection of SNP TSC0039160
rtttaacaaaaaa

SEQ ID NO: 154993 - DNA, 13 bp, Artificial Sequence
  Oligonucleotide for detection of SNP TSC0039160
ttttttattaaay

SEQ ID NO: 154994 - DNA, 13 bp, Artificial Sequence
  Oligonucleotide for detection of SNP TSC0039160
rtttaataaaaaa

SEQ ID NO: 154995 - DNA, 13 bp, Artificial Sequence
  Oligonucleotide for detection of SNP TSC0039161
gattaagtaattt

SEQ ID NO: 154996 - DNA, 13 bp, Artificial Sequence
  Oligonucleotide for detection of SNP TSC0039161
aaattacttaatc

SEQ ID NO: 154997 - DNA, 13 bp, Artificial Sequence
  Oligonucleotide for detection of SNP TSC0039161
gattaaataattt

SEQ ID NO: 154998 - DNA, 13 bp, Artificial Sequence
  Oligonucleotide for detection of SNP TSC0039161
aaattatttaatc

SEQ ID NO: 154999 - DNA, 13 bp, Artificial Sequence
  Oligonucleotide for detection of SNP TSC0039162
tattttatgttga

SEQ ID NO: 155000 - DNA, 13 bp, Artificial Sequence
  Oligonucleotide for detection of SNP TSC0039162
tcaacataaaata

SEQ ID NO: 155001 - DNA, 13 bp, Artificial Sequence
  Oligonucleotide for detection of SNP TSC0039162
tattttgtgttga

SEQ ID NO: 155002 - DNA, 13 bp, Artificial Sequence
  Oligonucleotide for detection of SNP TSC0039162
tcaacacaaaata

SEQ ID NO: 155003 - DNA, 13 bp, Artificial Sequence
  Oligonucleotide for detection of SNP TSC0039169
ggaagaataaaat

SEQ ID NO: 155004 - DNA, 13 bp, Artificial Sequence
  Oligonucleotide for detection of SNP TSC0039169
attttattcttcc

SEQ ID NO: 155005 - DNA, 13 bp, Artificial Sequence
  Oligonucleotide for detection of SNP TSC0039169
ggaagattaaaat

SEQ ID NO: 155006 - DNA, 13 bp, Artificial Sequence
  Oligonucleotide for detection of SNP TSC0039169
attttaatcttcc

SEQ ID NO: 155007 - DNA, 13 bp, Artificial Sequence
  Oligonucleotide for detection of SNP TSC0039170
tggaagtataaaa

SEQ ID NO: 155008 - DNA, 13 bp, Artificial Sequence
  Oligonucleotide for detection of SNP TSC0039170
ttttatacttcca

SEQ ID NO: 155009 - DNA, 13 bp, Artificial Sequence
  Oligonucleotide for detection of SNP TSC0039170
tggaagaataaaa

SEQ ID NO: 155010 - DNA, 13 bp, Artificial Sequence
  Oligonucleotide for detection of SNP TSC0039170
ttttattcttcca

SEQ ID NO: 155011 - DNA, 13 bp, Artificial Sequence
  Oligonucleotide for detection of SNP TSC0039172
atttgaaattgga

SEQ ID NO: 155012 - DNA, 13 bp, Artificial Sequence
  Oligonucleotide for detection of SNP TSC0039172
tccaatttcaaat

SEQ ID NO: 155013 - DNA, 13 bp, Artificial Sequence
  Oligonucleotide for detection of SNP TSC0039172
atttgagattgga

SEQ ID NO: 155014 - DNA, 13 bp, Artificial Sequence
  Oligonucleotide for detection of SNP TSC0039172
tccaatctcaaat

SEQ ID NO: 155015 - DNA, 13 bp, Artificial Sequence
  Oligonucleotide for detection of SNP TSC0039173
ttattatggtaga

SEQ ID NO: 155016 - DNA, 13 bp, Artificial Sequence
  Oligonucleotide for detection of SNP TSC0039173
tctaccataataa

SEQ ID NO: 155017 - DNA, 13 bp, Artificial Sequence
  Oligonucleotide for detection of SNP TSC0039173
ttattacggtaga

SEQ ID NO: 155018 - DNA, 13 bp, Artificial Sequence
  Oligonucleotide for detection of SNP TSC0039173
tctaccgtaataa

SEQ ID NO: 155019 - DNA, 13 bp, Artificial Sequence
  Oligonucleotide for detection of SNP TSC0039173
tttgttgtgatag

SEQ ID NO: 155020 - DNA, 13 bp, Artificial Sequence
  Oligonucleotide for detection of SNP TSC0039173
ctatcacaacaaa

SEQ ID NO: 155021 - DNA, 13 bp, Artificial Sequence
  Oligonucleotide for detection of SNP TSC0039173
tttgttatgatag

SEQ ID NO: 155022 - DNA, 13 bp, Artificial Sequence
  Oligonucleotide for detection of SNP TSC0039173
ctatcataacaaa

SEQ ID NO: 155023 - DNA, 13 bp, Artificial Sequence
  Oligonucleotide for detection of SNP TSC0039173
tttgtcgtgatag

SEQ ID NO: 155024 - DNA, 13 bp, Artificial Sequence
  Oligonucleotide for detection of SNP TSC0039173
ctatcacgacaaa

SEQ ID NO: 155025 - DNA, 13 bp, Artificial Sequence
  Oligonucleotide for detection of SNP TSC0039174
agtagaaaggtgy

SEQ ID NO: 155026 - DNA, 13 bp, Artificial Sequence
  Oligonucleotide for detection of SNP TSC0039174
rcacctttctact

SEQ ID NO: 155027 - DNA, 13 bp, Artificial Sequence
  Oligonucleotide for detection of SNP TSC0039174
agtagagaggtgy

SEQ ID NO: 155028 - DNA, 13 bp, Artificial Sequence
  Oligonucleotide for detection of SNP TSC0039174
rcacctctctact

SEQ ID NO: 155029 - DNA, 13 bp, Artificial Sequence
  Oligonucleotide for detection of SNP TSC0039178
gttttgagtattg

SEQ ID NO: 155030 - DNA, 13 bp, Artificial Sequence
  Oligonucleotide for detection of SNP TSC0039178
caatactcaaaac

SEQ ID NO: 155031 - DNA, 13 bp, Artificial Sequence
  Oligonucleotide for detection of SNP TSC0039178
gttttgtgtattg

SEQ ID NO: 155032 - DNA, 13 bp, Artificial Sequence
  Oligonucleotide for detection of SNP TSC0039178
caatacacaaaac

SEQ ID NO: 155033 - DNA, 13 bp, Artificial Sequence
  Oligonucleotide for detection of SNP TSC0039178
gttttgcgtattg

SEQ ID NO: 155034 - DNA, 13 bp, Artificial Sequence
  Oligonucleotide for detection of SNP TSC0039178
caatacgcaaaac

SEQ ID NO: 155035 - DNA, 13 bp, Artificial Sequence
  Oligonucleotide for detection of SNP TSC0039178
taatatttagaay

SEQ ID NO: 155036 - DNA, 13 bp, Artificial Sequence
  Oligonucleotide for detection of SNP TSC0039178
rttctaaatatta

SEQ ID NO: 155037 - DNA, 13 bp, Artificial Sequence
  Oligonucleotide for detection of SNP TSC0039178
taatatgtagaay

SEQ ID NO: 155038 - DNA, 13 bp, Artificial Sequence
  Oligonucleotide for detection of SNP TSC0039178
rttctacatatta

SEQ ID NO: 155039 - DNA, 13 bp, Artificial Sequence
  Oligonucleotide for detection of SNP TSC0039178
taatatatagaay

SEQ ID NO: 155040 - DNA, 13 bp, Artificial Sequence
  Oligonucleotide for detection of SNP TSC0039178
rttctatatatta

SEQ ID NO: 155041 - DNA, 13 bp, Artificial Sequence
  Oligonucleotide for detection of SNP TSC0039178
taatacgtagaay

SEQ ID NO: 155042 - DNA, 13 bp, Artificial Sequence
  Oligonucleotide for detection of SNP TSC0039178
rttctacgtatta

SEQ ID NO: 155043 - DNA, 13 bp, Artificial Sequence
  Oligonucleotide for detection of SNP TSC0039179
ttttgtagaaagg

SEQ ID NO: 155044 - DNA, 13 bp, Artificial Sequence
  Oligonucleotide for detection of SNP TSC0039179
cctttctacaaaa

SEQ ID NO: 155045 - DNA, 13 bp, Artificial Sequence
  Oligonucleotide for detection of SNP TSC0039179
ttttgttgaaagg

SEQ ID NO: 155046 - DNA, 13 bp, Artificial Sequence
  Oligonucleotide for detection of SNP TSC0039179
cctttcaacaaaa

SEQ ID NO: 155047 - DNA, 13 bp, Artificial Sequence
  Oligonucleotide for detection of SNP TSC0039179
ttttgtggaaagg

SEQ ID NO: 155048 - DNA, 13 bp, Artificial Sequence
  Oligonucleotide for detection of SNP TSC0039179
cctttccacaaaa

SEQ ID NO: 155049 - DNA, 13 bp, Artificial Sequence
  Oligonucleotide for detection of SNP TSC0039179
ttttgtcgaaagg

SEQ ID NO: 155050 - DNA, 13 bp, Artificial Sequence
  Oligonucleotide for detection of SNP TSC0039179
cctttcgacaaaa

SEQ ID NO: 155051 - DNA, 13 bp, Artificial Sequence
  Oligonucleotide for detection of SNP TSC0039179
tttttcgataaaa

SEQ ID NO: 155052 - DNA, 13 bp, Artificial Sequence
  Oligonucleotide for detection of SNP TSC0039179
ttttatcgaaaaa

SEQ ID NO: 155053 - DNA, 13 bp, Artificial Sequence
  Oligonucleotide for detection of SNP TSC0039180
taaatggaagtaa

SEQ ID NO: 155054 - DNA, 13 bp, Artificial Sequence
  Oligonucleotide for detection of SNP TSC0039180
ttacttccattta

SEQ ID NO: 155055 - DNA, 13 bp, Artificial Sequence
  Oligonucleotide for detection of SNP TSC0039180
taaatgaaagtaa

SEQ ID NO: 155056 - DNA, 13 bp, Artificial Sequence
  Oligonucleotide for detection of SNP TSC0039180
ttactttcattta

SEQ ID NO: 155057 - DNA, 13 bp, Artificial Sequence
  Oligonucleotide for detection of SNP TSC0006399
tttttcggtttta

SEQ ID NO: 155058 - DNA, 13 bp, Artificial Sequence
  Oligonucleotide for detection of SNP TSC0006399
taaaaccgaaaaa

SEQ ID NO: 155059 - DNA, 13 bp, Artificial Sequence
  Oligonucleotide for detection of SNP TSC0006399
tgaaatggagaga

SEQ ID NO: 155060 - DNA, 13 bp, Artificial Sequence
  Oligonucleotide for detection of SNP TSC0006399
tctctccatttca

SEQ ID NO: 155061 - DNA, 13 bp, Artificial Sequence
  Oligonucleotide for detection of SNP TSC0006399
tgaaattgagaga

SEQ ID NO: 155062 - DNA, 13 bp, Artificial Sequence
  Oligonucleotide for detection of SNP TSC0006399
tctctcaatttca

SEQ ID NO: 155063 - DNA, 13 bp, Artificial Sequence
  Oligonucleotide for detection of SNP TSC0006399
tgaaacggagaga

SEQ ID NO: 155064 - DNA, 13 bp, Artificial Sequence
  Oligonucleotide for detection of SNP TSC0006399
tctctccgtttca

SEQ ID NO: 155065 - DNA, 13 bp, Artificial Sequence
  Oligonucleotide for detection of SNP TSC0006399
tgaaatcgagaga

SEQ ID NO: 155066 - DNA, 13 bp, Artificial Sequence
  Oligonucleotide for detection of SNP TSC0006399
tctctcgatttca

SEQ ID NO: 155067 - DNA, 13 bp, Artificial Sequence
  Oligonucleotide for detection of SNP TSC0039182
ttgttgcgttaty

SEQ ID NO: 155068 - DNA, 13 bp, Artificial Sequence
  Oligonucleotide for detection of SNP TSC0039182
rataacgcaacaa

SEQ ID NO: 155069 - DNA, 13 bp, Artificial Sequence
  Oligonucleotide for detection of SNP TSC0039182
gatgatgtagtag

SEQ ID NO: 155070 - DNA, 13 bp, Artificial Sequence
  Oligonucleotide for detection of SNP TSC0039182
ctactacatcatc

SEQ ID NO: 155071 - DNA, 13 bp, Artificial Sequence
  Oligonucleotide for detection of SNP TSC0039182
gatgatatagtag

SEQ ID NO: 155072 - DNA, 13 bp, Artificial Sequence
  Oligonucleotide for detection of SNP TSC0039182
ctactatatcatc

SEQ ID NO: 155073 - DNA, 13 bp, Artificial Sequence
  Oligonucleotide for detection of SNP TSC0039182
gatgacgtagtag

SEQ ID NO: 155074 - DNA, 13 bp, Artificial Sequence
  Oligonucleotide for detection of SNP TSC0039182
ctactacgtcatc

SEQ ID NO: 155075 - DNA, 13 bp, Artificial Sequence
  Oligonucleotide for detection of SNP TSC0039184
gatttagtatttt

SEQ ID NO: 155076 - DNA, 13 bp, Artificial Sequence
  Oligonucleotide for detection of SNP TSC0039184
aaaatactaaatc

SEQ ID NO: 155077 - DNA, 13 bp, Artificial Sequence
  Oligonucleotide for detection of SNP TSC0039184
gatttaatatttt

SEQ ID NO: 155078 - DNA, 13 bp, Artificial Sequence
  Oligonucleotide for detection of SNP TSC0039184
aaaatattaaatc

SEQ ID NO: 155079 - DNA, 13 bp, Artificial Sequence
  Oligonucleotide for detection of SNP TSC0000100
agtttagtataat

SEQ ID NO: 155080 - DNA, 13 bp, Artificial Sequence
  Oligonucleotide for detection of SNP TSC0000100
attatactaaact

SEQ ID NO: 155081 - DNA, 13 bp, Artificial Sequence
  Oligonucleotide for detection of SNP TSC0000100
agtttaatataat

SEQ ID NO: 155082 - DNA, 13 bp, Artificial Sequence
  Oligonucleotide for detection of SNP TSC0000100
attatattaaact

SEQ ID NO: 155083 - DNA, 13 bp, Artificial Sequence
  Oligonucleotide for detection of SNP TSC0000101
tgttttagtaagg

SEQ ID NO: 155084 - DNA, 13 bp, Artificial Sequence
  Oligonucleotide for detection of SNP TSC0000101
ccttactaaaaca

SEQ ID NO: 155085 - DNA, 13 bp, Artificial Sequence
  Oligonucleotide for detection of SNP TSC0000101
tgttttggtaagg

SEQ ID NO: 155086 - DNA, 13 bp, Artificial Sequence
  Oligonucleotide for detection of SNP TSC0000101
ccttaccaaaaca

SEQ ID NO: 155087 - DNA, 13 bp, Artificial Sequence
  Oligonucleotide for detection of SNP TSC0000101
tgtttcggtaagg

SEQ ID NO: 155088 - DNA, 13 bp, Artificial Sequence
  Oligonucleotide for detection of SNP TSC0000101
ccttaccgaaaca

SEQ ID NO: 155089 - DNA, 13 bp, Artificial Sequence
  Oligonucleotide for detection of SNP TSC0000101
ttttattgaggta

SEQ ID NO: 155090 - DNA, 13 bp, Artificial Sequence
  Oligonucleotide for detection of SNP TSC0000101
tacctcaataaaa

SEQ ID NO: 155091 - DNA, 13 bp, Artificial Sequence
  Oligonucleotide for detection of SNP TSC0000101
ttttatcgaggta

SEQ ID NO: 155092 - DNA, 13 bp, Artificial Sequence
  Oligonucleotide for detection of SNP TSC0000101
tacctcgataaaa

SEQ ID NO: 155093 - DNA, 13 bp, Artificial Sequence
  Oligonucleotide for detection of SNP TSC0000880
agttaaaattaga

SEQ ID NO: 155094 - DNA, 13 bp, Artificial Sequence
  Oligonucleotide for detection of SNP TSC0000880
tctaattttaact

SEQ ID NO: 155095 - DNA, 13 bp, Artificial Sequence
  Oligonucleotide for detection of SNP TSC0000880
agttaagattaga

SEQ ID NO: 155096 - DNA, 13 bp, Artificial Sequence
  Oligonucleotide for detection of SNP TSC0000880
tctaatcttaact

SEQ ID NO: 155097 - DNA, 13 bp, Artificial Sequence
  Oligonucleotide for detection of SNP TSC0039186
agggtagtaggta

SEQ ID NO: 155098 - DNA, 13 bp, Artificial Sequence
  Oligonucleotide for detection of SNP TSC0039186
tacctactaccct

SEQ ID NO: 155099 - DNA, 13 bp, Artificial Sequence
  Oligonucleotide for detection of SNP TSC0039186
agggtaataggta

SEQ ID NO: 155100 - DNA, 13 bp, Artificial Sequence
  Oligonucleotide for detection of SNP TSC0039186
tacctattaccct

SEQ ID NO: 155101 - DNA, 13 bp, Artificial Sequence
  Oligonucleotide for detection of SNP TSC0039187
aggaggtggtagy

SEQ ID NO: 155102 - DNA, 13 bp, Artificial Sequence
  Oligonucleotide for detection of SNP TSC0039187
rctaccacctcct

SEQ ID NO: 155103 - DNA, 13 bp, Artificial Sequence
  Oligonucleotide for detection of SNP TSC0039187
aggaggcggtagy

SEQ ID NO: 155104 - DNA, 13 bp, Artificial Sequence
  Oligonucleotide for detection of SNP TSC0039187
rctaccgcctcct

SEQ ID NO: 155105 - DNA, 13 bp, Artificial Sequence
  Oligonucleotide for detection of SNP TSC0039188
ttatttaatagag

SEQ ID NO: 155106 - DNA, 13 bp, Artificial Sequence
  Oligonucleotide for detection of SNP TSC0039188
ctctattaaataa

SEQ ID NO: 155107 - DNA, 13 bp, Artificial Sequence
  Oligonucleotide for detection of SNP TSC0039188
ttatttgatagag

SEQ ID NO: 155108 - DNA, 13 bp, Artificial Sequence
  Oligonucleotide for detection of SNP TSC0039188
ctctatcaaataa

SEQ ID NO: 155109 - DNA, 13 bp, Artificial Sequence
  Oligonucleotide for detection of SNP TSC0039188
ttattcgatagag

SEQ ID NO: 155110 - DNA, 13 bp, Artificial Sequence
  Oligonucleotide for detection of SNP TSC0039188
ctctatcgaataa

SEQ ID NO: 155111 - DNA, 13 bp, Artificial Sequence
  Oligonucleotide for detection of SNP TSC0039188
ttttgttgagtga

SEQ ID NO: 155112 - DNA, 13 bp, Artificial Sequence
  Oligonucleotide for detection of SNP TSC0039188
tcactcaacaaaa

SEQ ID NO: 155113 - DNA, 13 bp, Artificial Sequence
  Oligonucleotide for detection of SNP TSC0039188
ttttgtcgagtga

SEQ ID NO: 155114 - DNA, 13 bp, Artificial Sequence
  Oligonucleotide for detection of SNP TSC0039188
tcactcgacaaaa

SEQ ID NO: 155115 - DNA, 13 bp, Artificial Sequence
  Oligonucleotide for detection of SNP TSC0000409
taggttgattttt

SEQ ID NO: 155116 - DNA, 13 bp, Artificial Sequence
  Oligonucleotide for detection of SNP TSC0000409
aaaaatcaaccta

SEQ ID NO: 155117 - DNA, 13 bp, Artificial Sequence
  Oligonucleotide for detection of SNP TSC0000409
taggttaattttt

SEQ ID NO: 155118 - DNA, 13 bp, Artificial Sequence
  Oligonucleotide for detection of SNP TSC0000409
aaaaattaaccta

SEQ ID NO: 155119 - DNA, 13 bp, Artificial Sequence
  Oligonucleotide for detection of SNP TSC0039190
gaatatttattaa

SEQ ID NO: 155120 - DNA, 13 bp, Artificial Sequence
  Oligonucleotide for detection of SNP TSC0039190
ttaataaatattc

SEQ ID NO: 155121 - DNA, 13 bp, Artificial Sequence
  Oligonucleotide for detection of SNP TSC0039190
gaatatgtattaa

SEQ ID NO: 155122 - DNA, 13 bp, Artificial Sequence
  Oligonucleotide for detection of SNP TSC0039190
ttaatacatattc

SEQ ID NO: 155123 - DNA, 13 bp, Artificial Sequence
  Oligonucleotide for detection of SNP TSC0039190
gaatacgtattaa

SEQ ID NO: 155124 - DNA, 13 bp, Artificial Sequence
  Oligonucleotide for detection of SNP TSC0039190
ttaatacgtattc

SEQ ID NO: 155125 - DNA, 13 bp, Artificial Sequence
  Oligonucleotide for detection of SNP TSC0039190
ttgataagtatty

SEQ ID NO: 155126 - DNA, 13 bp, Artificial Sequence
  Oligonucleotide for detection of SNP TSC0039190
raatacttatcaa

SEQ ID NO: 155127 - DNA, 13 bp, Artificial Sequence
  Oligonucleotide for detection of SNP TSC0039190
ttgatatgtatty

SEQ ID NO: 155128 - DNA, 13 bp, Artificial Sequence
  Oligonucleotide for detection of SNP TSC0039190
raatacatatcaa

SEQ ID NO: 155129 - DNA, 13 bp, Artificial Sequence
  Oligonucleotide for detection of SNP TSC0039190
ttgatacgtatty

SEQ ID NO: 155130 - DNA, 13 bp, Artificial Sequence
  Oligonucleotide for detection of SNP TSC0039190
raatacgtatcaa

SEQ ID NO: 155131 - DNA, 13 bp, Artificial Sequence
  Oligonucleotide for detection of SNP TSC0039191
tagttaaatgaaa

SEQ ID NO: 155132 - DNA, 13 bp, Artificial Sequence
  Oligonucleotide for detection of SNP TSC0039191
tttcatttaacta

SEQ ID NO: 155133 - DNA, 13 bp, Artificial Sequence
  Oligonucleotide for detection of SNP TSC0039191
tagttagatgaaa

SEQ ID NO: 155134 - DNA, 13 bp, Artificial Sequence
  Oligonucleotide for detection of SNP TSC0039191
tttcatctaacta

SEQ ID NO: 155135 - DNA, 13 bp, Artificial Sequence
  Oligonucleotide for detection of SNP TSC0039192
gagggtgtggaag

SEQ ID NO: 155136 - DNA, 13 bp, Artificial Sequence
  Oligonucleotide for detection of SNP TSC0039192
cttccacaccctc

SEQ ID NO: 155137 - DNA, 13 bp, Artificial Sequence
  Oligonucleotide for detection of SNP TSC0039192
gagggtatggaag

SEQ ID NO: 155138 - DNA, 13 bp, Artificial Sequence
  Oligonucleotide for detection of SNP TSC0039192
cttccataccctc

SEQ ID NO: 155139 - DNA, 13 bp, Artificial Sequence
  Oligonucleotide for detection of SNP TSC0039192
gagggcgtggaag

SEQ ID NO: 155140 - DNA, 13 bp, Artificial Sequence
  Oligonucleotide for detection of SNP TSC0039192
cttccacgccctc

SEQ ID NO: 155141 - DNA, 13 bp, Artificial Sequence
  Oligonucleotide for detection of SNP TSC0039193
tttagttgtttgg

SEQ ID NO: 155142 - DNA, 13 bp, Artificial Sequence
  Oligonucleotide for detection of SNP TSC0039193
ccaaacaactaaa

SEQ ID NO: 155143 - DNA, 13 bp, Artificial Sequence
  Oligonucleotide for detection of SNP TSC0039193
tttagtcgtttgg

SEQ ID NO: 155144 - DNA, 13 bp, Artificial Sequence
  Oligonucleotide for detection of SNP TSC0039193
ccaaacgactaaa

SEQ ID NO: 155145 - DNA, 13 bp, Artificial Sequence
  Oligonucleotide for detection of SNP TSC0039193
ttagatggttgga

SEQ ID NO: 155146 - DNA, 13 bp, Artificial Sequence
  Oligonucleotide for detection of SNP TSC0039193
tccaaccatctaa

SEQ ID NO: 155147 - DNA, 13 bp, Artificial Sequence
  Oligonucleotide for detection of SNP TSC0039193
ttagatagttgga

SEQ ID NO: 155148 - DNA, 13 bp, Artificial Sequence
  Oligonucleotide for detection of SNP TSC0039193
tccaactatctaa

SEQ ID NO: 155149 - DNA, 13 bp, Artificial Sequence
  Oligonucleotide for detection of SNP TSC0039193
ttagacggttgga

SEQ ID NO: 155150 - DNA, 13 bp, Artificial Sequence
  Oligonucleotide for detection of SNP TSC0039193
tccaaccgtctaa

SEQ ID NO: 155151 - DNA, 13 bp, Artificial Sequence
  Oligonucleotide for detection of SNP TSC0039194
aaggtgtttgagt

SEQ ID NO: 155152 - DNA, 13 bp, Artificial Sequence
  Oligonucleotide for detection of SNP TSC0039194
actcaaacacctt

SEQ ID NO: 155153 - DNA, 13 bp, Artificial Sequence
  Oligonucleotide for detection of SNP TSC0039194
aaggtggttgagt

SEQ ID NO: 155154 - DNA, 13 bp, Artificial Sequence
  Oligonucleotide for detection of SNP TSC0039194
actcaaccacctt

SEQ ID NO: 155155 - DNA, 13 bp, Artificial Sequence
  Oligonucleotide for detection of SNP TSC0039195
tatatagagtttt

SEQ ID NO: 155156 - DNA, 13 bp, Artificial Sequence
  Oligonucleotide for detection of SNP TSC0039195
aaaactctatata

SEQ ID NO: 155157 - DNA, 13 bp, Artificial Sequence
  Oligonucleotide for detection of SNP TSC0039195
tatataaagtttt

SEQ ID NO: 155158 - DNA, 13 bp, Artificial Sequence
  Oligonucleotide for detection of SNP TSC0039195
aaaactttatata

SEQ ID NO: 155159 - DNA, 13 bp, Artificial Sequence
  Oligonucleotide for detection of SNP TSC0039196
taattgaatatat

SEQ ID NO: 155160 - DNA, 13 bp, Artificial Sequence
  Oligonucleotide for detection of SNP TSC0039196
atatattcaatta

SEQ ID NO: 155161 - DNA, 13 bp, Artificial Sequence
  Oligonucleotide for detection of SNP TSC0039196
taattgtatatat

SEQ ID NO: 155162 - DNA, 13 bp, Artificial Sequence
  Oligonucleotide for detection of SNP TSC0039196
atatatacaatta

SEQ ID NO: 155163 - DNA, 13 bp, Artificial Sequence
  Oligonucleotide for detection of SNP TSC0039196
atgtatttaattg

SEQ ID NO: 155164 - DNA, 13 bp, Artificial Sequence
  Oligonucleotide for detection of SNP TSC0039196
caattaaatacat

SEQ ID NO: 155165 - DNA, 13 bp, Artificial Sequence
  Oligonucleotide for detection of SNP TSC0039196
atgtatataattg

SEQ ID NO: 155166 - DNA, 13 bp, Artificial Sequence
  Oligonucleotide for detection of SNP TSC0039196
caattatatacat

SEQ ID NO: 155167 - DNA, 13 bp, Artificial Sequence
  Oligonucleotide for detection of SNP TSC0039197
tttttagatatta

SEQ ID NO: 155168 - DNA, 13 bp, Artificial Sequence
  Oligonucleotide for detection of SNP TSC0039197
taatatctaaaaa

SEQ ID NO: 155169 - DNA, 13 bp, Artificial Sequence
  Oligonucleotide for detection of SNP TSC0039197
tttttaaatatta

SEQ ID NO: 155170 - DNA, 13 bp, Artificial Sequence
  Oligonucleotide for detection of SNP TSC0039197
taatatttaaaaa

SEQ ID NO: 155171 - DNA, 13 bp, Artificial Sequence
  Oligonucleotide for detection of SNP TSC0039199
aaggtgggtatat

SEQ ID NO: 155172 - DNA, 13 bp, Artificial Sequence
  Oligonucleotide for detection of SNP TSC0039199
atatacccacctt

SEQ ID NO: 155173 - DNA, 13 bp, Artificial Sequence
  Oligonucleotide for detection of SNP TSC0039199
aaggtgagtatat

SEQ ID NO: 155174 - DNA, 13 bp, Artificial Sequence
  Oligonucleotide for detection of SNP TSC0039199
atatactcacctt

SEQ ID NO: 155175 - DNA, 13 bp, Artificial Sequence
  Oligonucleotide for detection of SNP TSC0000753
attaatattattt

SEQ ID NO: 155176 - DNA, 13 bp, Artificial Sequence
  Oligonucleotide for detection of SNP TSC0000753
aaataatattaat

SEQ ID NO: 155177 - DNA, 13 bp, Artificial Sequence
  Oligonucleotide for detection of SNP TSC0000753
attaattttattt

SEQ ID NO: 155178 - DNA, 13 bp, Artificial Sequence
  Oligonucleotide for detection of SNP TSC0000753
aaataaaattaat

SEQ ID NO: 155179 - DNA, 13 bp, Artificial Sequence
  Oligonucleotide for detection of SNP TSC0000753
aaataatgttagt

SEQ ID NO: 155180 - DNA, 13 bp, Artificial Sequence
  Oligonucleotide for detection of SNP TSC0000753
actaacattattt

SEQ ID NO: 155181 - DNA, 13 bp, Artificial Sequence
  Oligonucleotide for detection of SNP TSC0000753
aaataaagttagt

SEQ ID NO: 155182 - DNA, 13 bp, Artificial Sequence
  Oligonucleotide for detection of SNP TSC0000753
actaactttattt

SEQ ID NO: 155183 - DNA, 13 bp, Artificial Sequence
  Oligonucleotide for detection of SNP TSC0039200
agtaataattgag

SEQ ID NO: 155184 - DNA, 13 bp, Artificial Sequence
  Oligonucleotide for detection of SNP TSC0039200
ctcaattattact

SEQ ID NO: 155185 - DNA, 13 bp, Artificial Sequence
  Oligonucleotide for detection of SNP TSC0039200
agtaatgattgag

SEQ ID NO: 155186 - DNA, 13 bp, Artificial Sequence
  Oligonucleotide for detection of SNP TSC0039200
ctcaatcattact

SEQ ID NO: 155187 - DNA, 13 bp, Artificial Sequence
  Oligonucleotide for detection of SNP TSC0039201
tttagggttgttt

SEQ ID NO: 155188 - DNA, 13 bp, Artificial Sequence
  Oligonucleotide for detection of SNP TSC0039201
aaacaaccctaaa

SEQ ID NO: 155189 - DNA, 13 bp, Artificial Sequence
  Oligonucleotide for detection of SNP TSC0039201
tttaggattgttt

SEQ ID NO: 155190 - DNA, 13 bp, Artificial Sequence
  Oligonucleotide for detection of SNP TSC0039201
aaacaatcctaaa

SEQ ID NO: 155191 - DNA, 13 bp, Artificial Sequence
  Oligonucleotide for detection of SNP TSC0039202
tttttgatatatt

SEQ ID NO: 155192 - DNA, 13 bp, Artificial Sequence
  Oligonucleotide for detection of SNP TSC0039202
aatatatcaaaaa

SEQ ID NO: 155193 - DNA, 13 bp, Artificial Sequence
  Oligonucleotide for detection of SNP TSC0039202
tttttgttatatt

SEQ ID NO: 155194 - DNA, 13 bp, Artificial Sequence
  Oligonucleotide for detection of SNP TSC0039202
aatataacaaaaa

SEQ ID NO: 155195 - DNA, 13 bp, Artificial Sequence
  Oligonucleotide for detection of SNP TSC0039202
aatatgttaagaa

SEQ ID NO: 155196 - DNA, 13 bp, Artificial Sequence
  Oligonucleotide for detection of SNP TSC0039202
ttcttaacatatt

SEQ ID NO: 155197 - DNA, 13 bp, Artificial Sequence
  Oligonucleotide for detection of SNP TSC0039202
aatatgataagaa

SEQ ID NO: 155198 - DNA, 13 bp, Artificial Sequence
  Oligonucleotide for detection of SNP TSC0039202
ttcttatcatatt

SEQ ID NO: 155199 - DNA, 13 bp, Artificial Sequence
  Oligonucleotide for detection of SNP TSC0039203
ttttacgtagttt

SEQ ID NO: 155200 - DNA, 13 bp, Artificial Sequence
  Oligonucleotide for detection of SNP TSC0039203
aaactacgtaaaa

SEQ ID NO: 155201 - DNA, 13 bp, Artificial Sequence
  Oligonucleotide for detection of SNP TSC0039203
agattatgtgaga

SEQ ID NO: 155202 - DNA, 13 bp, Artificial Sequence
  Oligonucleotide for detection of SNP TSC0039203
tctcacataatct

SEQ ID NO: 155203 - DNA, 13 bp, Artificial Sequence
  Oligonucleotide for detection of SNP TSC0039203
agattacgtgaga

SEQ ID NO: 155204 - DNA, 13 bp, Artificial Sequence
  Oligonucleotide for detection of SNP TSC0039203
tctcacgtaatct

SEQ ID NO: 155205 - DNA, 13 bp, Artificial Sequence
  Oligonucleotide for detection of SNP TSC0039205
gatttttggaaga

SEQ ID NO: 155206 - DNA, 13 bp, Artificial Sequence
  Oligonucleotide for detection of SNP TSC0039205
tcttccaaaaatc

SEQ ID NO: 155207 - DNA, 13 bp, Artificial Sequence
  Oligonucleotide for detection of SNP TSC0039205
gattttcggaaga

SEQ ID NO: 155208 - DNA, 13 bp, Artificial Sequence
  Oligonucleotide for detection of SNP TSC0039205
tcttccgaaaatc

SEQ ID NO: 155209 - DNA, 13 bp, Artificial Sequence
  Oligonucleotide for detection of SNP TSC0039205
ttttttggaagty

SEQ ID NO: 155210 - DNA, 13 bp, Artificial Sequence
  Oligonucleotide for detection of SNP TSC0039205
racttccaaaaaa

SEQ ID NO: 155211 - DNA, 13 bp, Artificial Sequence
  Oligonucleotide for detection of SNP TSC0039205
ttttttagaagty

SEQ ID NO: 155212 - DNA, 13 bp, Artificial Sequence
  Oligonucleotide for detection of SNP TSC0039205
racttctaaaaaa

SEQ ID NO: 155213 - DNA, 13 bp, Artificial Sequence
  Oligonucleotide for detection of SNP TSC0039205
tttttcggaagty

SEQ ID NO: 155214 - DNA, 13 bp, Artificial Sequence
  Oligonucleotide for detection of SNP TSC0039205
racttccgaaaaa

SEQ ID NO: 155215 - DNA, 13 bp, Artificial Sequence
  Oligonucleotide for detection of SNP TSC0039206
tttgggtgttaga

SEQ ID NO: 155216 - DNA, 13 bp, Artificial Sequence
  Oligonucleotide for detection of SNP TSC0039206
tctaacacccaaa

SEQ ID NO: 155217 - DNA, 13 bp, Artificial Sequence
  Oligonucleotide for detection of SNP TSC0039206
tttgggggttaga

SEQ ID NO: 155218 - DNA, 13 bp, Artificial Sequence
  Oligonucleotide for detection of SNP TSC0039206
tctaacccccaaa

SEQ ID NO: 155219 - DNA, 13 bp, Artificial Sequence
  Oligonucleotide for detection of SNP TSC0039206
tttgggcgttaga

SEQ ID NO: 155220 - DNA, 13 bp, Artificial Sequence
  Oligonucleotide for detection of SNP TSC0039206
tctaacgcccaaa

SEQ ID NO: 155221 - DNA, 13 bp, Artificial Sequence
  Oligonucleotide for detection of SNP TSC0039206
tttggtgtttaaa

SEQ ID NO: 155222 - DNA, 13 bp, Artificial Sequence
  Oligonucleotide for detection of SNP TSC0039206
tttaaacaccaaa

SEQ ID NO: 155223 - DNA, 13 bp, Artificial Sequence
  Oligonucleotide for detection of SNP TSC0039206
tttggtttttaaa

SEQ ID NO: 155224 - DNA, 13 bp, Artificial Sequence
  Oligonucleotide for detection of SNP TSC0039206
tttaaaaaccaaa

SEQ ID NO: 155225 - DNA, 13 bp, Artificial Sequence
  Oligonucleotide for detection of SNP TSC0039206
tttggcgtttaaa

SEQ ID NO: 155226 - DNA, 13 bp, Artificial Sequence
  Oligonucleotide for detection of SNP TSC0039206
tttaaacgccaaa

SEQ ID NO: 155227 - DNA, 13 bp, Artificial Sequence
  Oligonucleotide for detection of SNP TSC0000912
aaagtgtgtatga

SEQ ID NO: 155228 - DNA, 13 bp, Artificial Sequence
  Oligonucleotide for detection of SNP TSC0000912
tcatacacacttt

SEQ ID NO: 155229 - DNA, 13 bp, Artificial Sequence
  Oligonucleotide for detection of SNP TSC0000912
aaagtgcgtatga

SEQ ID NO: 155230 - DNA, 13 bp, Artificial Sequence
  Oligonucleotide for detection of SNP TSC0000912
tcatacgcacttt

SEQ ID NO: 155231 - DNA, 13 bp, Artificial Sequence
  Oligonucleotide for detection of SNP TSC0000325
tgttatgaaattt

SEQ ID NO: 155232 - DNA, 13 bp, Artificial Sequence
  Oligonucleotide for detection of SNP TSC0000325
aaatttcataaca

SEQ ID NO: 155233 - DNA, 13 bp, Artificial Sequence
  Oligonucleotide for detection of SNP TSC0000325
tgttataaaattt

SEQ ID NO: 155234 - DNA, 13 bp, Artificial Sequence
  Oligonucleotide for detection of SNP TSC0000325
aaattttataaca

SEQ ID NO: 155235 - DNA, 13 bp, Artificial Sequence
  Oligonucleotide for detection of SNP TSC0001255
attgattttatga

SEQ ID NO: 155236 - DNA, 13 bp, Artificial Sequence
  Oligonucleotide for detection of SNP TSC0001255
tcataaaatcaat

SEQ ID NO: 155237 - DNA, 13 bp, Artificial Sequence
  Oligonucleotide for detection of SNP TSC0001255
attgatgttatga

SEQ ID NO: 155238 - DNA, 13 bp, Artificial Sequence
  Oligonucleotide for detection of SNP TSC0001255
tcataacatcaat

SEQ ID NO: 155239 - DNA, 13 bp, Artificial Sequence
  Oligonucleotide for detection of SNP TSC0001255
attgacgttatga

SEQ ID NO: 155240 - DNA, 13 bp, Artificial Sequence
  Oligonucleotide for detection of SNP TSC0001255
tcataacgtcaat

SEQ ID NO: 155241 - DNA, 13 bp, Artificial Sequence
  Oligonucleotide for detection of SNP TSC0001255
ttatgaggttagt

SEQ ID NO: 155242 - DNA, 13 bp, Artificial Sequence
  Oligonucleotide for detection of SNP TSC0001255
actaacctcataa

SEQ ID NO: 155243 - DNA, 13 bp, Artificial Sequence
  Oligonucleotide for detection of SNP TSC0001255
ttatgatgttagt

SEQ ID NO: 155244 - DNA, 13 bp, Artificial Sequence
  Oligonucleotide for detection of SNP TSC0001255
actaacatcataa

SEQ ID NO: 155245 - DNA, 13 bp, Artificial Sequence
  Oligonucleotide for detection of SNP TSC0001255
ttatgacgttagt

SEQ ID NO: 155246 - DNA, 13 bp, Artificial Sequence
  Oligonucleotide for detection of SNP TSC0001255
actaacgtcataa

SEQ ID NO: 155247 - DNA, 13 bp, Artificial Sequence
  Oligonucleotide for detection of SNP TSC0039210
ggtttagtgtttt

SEQ ID NO: 155248 - DNA, 13 bp, Artificial Sequence
  Oligonucleotide for detection of SNP TSC0039210
aaaacactaaacc

SEQ ID NO: 155249 - DNA, 13 bp, Artificial Sequence
  Oligonucleotide for detection of SNP TSC0039210
ggtttaatgtttt

SEQ ID NO: 155250 - DNA, 13 bp, Artificial Sequence
  Oligonucleotide for detection of SNP TSC0039210
aaaacattaaacc

SEQ ID NO: 155251 - DNA, 13 bp, Artificial Sequence
  Oligonucleotide for detection of SNP TSC0039211
atagaaattttag

SEQ ID NO: 155252 - DNA, 13 bp, Artificial Sequence
  Oligonucleotide for detection of SNP TSC0039211
ctaaaatttctat

SEQ ID NO: 155253 - DNA, 13 bp, Artificial Sequence
  Oligonucleotide for detection of SNP TSC0039211
atagaagttttag

SEQ ID NO: 155254 - DNA, 13 bp, Artificial Sequence
  Oligonucleotide for detection of SNP TSC0039211
ctaaaacttctat

SEQ ID NO: 155255 - DNA, 13 bp, Artificial Sequence
  Oligonucleotide for detection of SNP TSC0039212
agggtgattttta

SEQ ID NO: 155256 - DNA, 13 bp, Artificial Sequence
  Oligonucleotide for detection of SNP TSC0039212
taaaaatcaccct

SEQ ID NO: 155257 - DNA, 13 bp, Artificial Sequence
  Oligonucleotide for detection of SNP TSC0039212
agggtggttttta

SEQ ID NO: 155258 - DNA, 13 bp, Artificial Sequence
  Oligonucleotide for detection of SNP TSC0039212
taaaaaccaccct

SEQ ID NO: 155259 - DNA, 13 bp, Artificial Sequence
  Oligonucleotide for detection of SNP TSC0000956
tatatagtgagty

SEQ ID NO: 155260 - DNA, 13 bp, Artificial Sequence
  Oligonucleotide for detection of SNP TSC0000956
ractcactatata

SEQ ID NO: 155261 - DNA, 13 bp, Artificial Sequence
  Oligonucleotide for detection of SNP TSC0000956
tatataatgagty

SEQ ID NO: 155262 - DNA, 13 bp, Artificial Sequence
  Oligonucleotide for detection of SNP TSC0000956
ractcattatata

SEQ ID NO: 155263 - DNA, 13 bp, Artificial Sequence
  Oligonucleotide for detection of SNP TSC0000958
atttagtataata

SEQ ID NO: 155264 - DNA, 13 bp, Artificial Sequence
  Oligonucleotide for detection of SNP TSC0000958
tattatactaaat

SEQ ID NO: 155265 - DNA, 13 bp, Artificial Sequence
  Oligonucleotide for detection of SNP TSC0000958
atttaggataata

SEQ ID NO: 155266 - DNA, 13 bp, Artificial Sequence
  Oligonucleotide for detection of SNP TSC0000958
tattatcctaaat

SEQ ID NO: 155267 - DNA, 13 bp, Artificial Sequence
  Oligonucleotide for detection of SNP TSC0000958
tgttgtgttggat

SEQ ID NO: 155268 - DNA, 13 bp, Artificial Sequence
  Oligonucleotide for detection of SNP TSC0000958
atccaacacaaca

SEQ ID NO: 155269 - DNA, 13 bp, Artificial Sequence
  Oligonucleotide for detection of SNP TSC0000958
tgttgttttggat

SEQ ID NO: 155270 - DNA, 13 bp, Artificial Sequence
  Oligonucleotide for detection of SNP TSC0000958
atccaaaacaaca

SEQ ID NO: 155271 - DNA, 13 bp, Artificial Sequence
  Oligonucleotide for detection of SNP TSC0001450
gtttaagatgaaa

SEQ ID NO: 155272 - DNA, 13 bp, Artificial Sequence
  Oligonucleotide for detection of SNP TSC0001450
tttcatcttaaac

SEQ ID NO: 155273 - DNA, 13 bp, Artificial Sequence
  Oligonucleotide for detection of SNP TSC0001450
gtttaaaatgaaa

SEQ ID NO: 155274 - DNA, 13 bp, Artificial Sequence
  Oligonucleotide for detection of SNP TSC0001450
tttcattttaaac

SEQ ID NO: 155275 - DNA, 13 bp, Artificial Sequence
  Oligonucleotide for detection of SNP TSC0000290
tttatagtgtttg

SEQ ID NO: 155276 - DNA, 13 bp, Artificial Sequence
  Oligonucleotide for detection of SNP TSC0000290
caaacactataaa

SEQ ID NO: 155277 - DNA, 13 bp, Artificial Sequence
  Oligonucleotide for detection of SNP TSC0000290
tttataatgtttg

SEQ ID NO: 155278 - DNA, 13 bp, Artificial Sequence
  Oligonucleotide for detection of SNP TSC0000290
caaacattataaa

SEQ ID NO: 155279 - DNA, 13 bp, Artificial Sequence
  Oligonucleotide for detection of SNP TSC0000291
ggagataaattgy

SEQ ID NO: 155280 - DNA, 13 bp, Artificial Sequence
  Oligonucleotide for detection of SNP TSC0000291
rcaatttatctcc

SEQ ID NO: 155281 - DNA, 13 bp, Artificial Sequence
  Oligonucleotide for detection of SNP TSC0000291
ggagatgaattgy

SEQ ID NO: 155282 - DNA, 13 bp, Artificial Sequence
  Oligonucleotide for detection of SNP TSC0000291
rcaattcatctcc

SEQ ID NO: 155283 - DNA, 13 bp, Artificial Sequence
  Oligonucleotide for detection of SNP TSC0000291
ggagacgaattgy

SEQ ID NO: 155284 - DNA, 13 bp, Artificial Sequence
  Oligonucleotide for detection of SNP TSC0000291
rcaattcgtctcc

SEQ ID NO: 155285 - DNA, 13 bp, Artificial Sequence
  Oligonucleotide for detection of SNP TSC0000291
gtagtttgtttty

SEQ ID NO: 155286 - DNA, 13 bp, Artificial Sequence
  Oligonucleotide for detection of SNP TSC0000291
raaaacaaactac

SEQ ID NO: 155287 - DNA, 13 bp, Artificial Sequence
  Oligonucleotide for detection of SNP TSC0000291
gtagttcgtttty

SEQ ID NO: 155288 - DNA, 13 bp, Artificial Sequence
  Oligonucleotide for detection of SNP TSC0000291
raaaacgaactac

SEQ ID NO: 155289 - DNA, 13 bp, Artificial Sequence
  Oligonucleotide for detection of SNP TSC0001350
taggggatttttg

SEQ ID NO: 155290 - DNA, 13 bp, Artificial Sequence
  Oligonucleotide for detection of SNP TSC0001350
caaaaatccccta

SEQ ID NO: 155291 - DNA, 13 bp, Artificial Sequence
  Oligonucleotide for detection of SNP TSC0001351
aatttagagtaty

SEQ ID NO: 155292 - DNA, 13 bp, Artificial Sequence
  Oligonucleotide for detection of SNP TSC0001351
ratactctaaatt

SEQ ID NO: 155293 - DNA, 13 bp, Artificial Sequence
  Oligonucleotide for detection of SNP TSC0001351
aatttaaagtaty

SEQ ID NO: 155294 - DNA, 13 bp, Artificial Sequence
  Oligonucleotide for detection of SNP TSC0001351
ratactttaaatt

SEQ ID NO: 155295 - DNA, 13 bp, Artificial Sequence
  Oligonucleotide for detection of SNP TSC0000798
agagagaggaagy

SEQ ID NO: 155296 - DNA, 13 bp, Artificial Sequence
  Oligonucleotide for detection of SNP TSC0000798
rcttcctctctct

SEQ ID NO: 155297 - DNA, 13 bp, Artificial Sequence
  Oligonucleotide for detection of SNP TSC0000798
agagaggggaagy

SEQ ID NO: 155298 - DNA, 13 bp, Artificial Sequence
  Oligonucleotide for detection of SNP TSC0000798
rcttcccctctct

SEQ ID NO: 155299 - DNA, 13 bp, Artificial Sequence
  Oligonucleotide for detection of SNP TSC0039217
agttaaattaaaa

SEQ ID NO: 155300 - DNA, 13 bp, Artificial Sequence
  Oligonucleotide for detection of SNP TSC0039217
ttttaatttaact

SEQ ID NO: 155301 - DNA, 13 bp, Artificial Sequence
  Oligonucleotide for detection of SNP TSC0039217
agttaagttaaaa

SEQ ID NO: 155302 - DNA, 13 bp, Artificial Sequence
  Oligonucleotide for detection of SNP TSC0039217
ttttaacttaact

SEQ ID NO: 155303 - DNA, 13 bp, Artificial Sequence
  Oligonucleotide for detection of SNP TSC0039221
aaagggagatatt

SEQ ID NO: 155304 - DNA, 13 bp, Artificial Sequence
  Oligonucleotide for detection of SNP TSC0039221
aatatctcccttt

SEQ ID NO: 155305 - DNA, 13 bp, Artificial Sequence
  Oligonucleotide for detection of SNP TSC0039221
aaagggggatatt

SEQ ID NO: 155306 - DNA, 13 bp, Artificial Sequence
  Oligonucleotide for detection of SNP TSC0039221
aatatcccccttt

SEQ ID NO: 155307 - DNA, 13 bp, Artificial Sequence
  Oligonucleotide for detection of SNP TSC0039222
ggttattaggttt

SEQ ID NO: 155308 - DNA, 13 bp, Artificial Sequence
  Oligonucleotide for detection of SNP TSC0039222
aaacctaataacc

SEQ ID NO: 155309 - DNA, 13 bp, Artificial Sequence
  Oligonucleotide for detection of SNP TSC0039222
ggttatgaggttt

SEQ ID NO: 155310 - DNA, 13 bp, Artificial Sequence
  Oligonucleotide for detection of SNP TSC0039222
aaacctcataacc

SEQ ID NO: 155311 - DNA, 13 bp, Artificial Sequence
  Oligonucleotide for detection of SNP TSC0039222
aagtttgatgaty

SEQ ID NO: 155312 - DNA, 13 bp, Artificial Sequence
  Oligonucleotide for detection of SNP TSC0039222
ratcatcaaactt

SEQ ID NO: 155313 - DNA, 13 bp, Artificial Sequence
  Oligonucleotide for detection of SNP TSC0039222
aagttttatgaty

SEQ ID NO: 155314 - DNA, 13 bp, Artificial Sequence
  Oligonucleotide for detection of SNP TSC0039222
ratcataaaactt

SEQ ID NO: 155315 - DNA, 13 bp, Artificial Sequence
  Oligonucleotide for detection of SNP TSC0039224
agtttattgttat

SEQ ID NO: 155316 - DNA, 13 bp, Artificial Sequence
  Oligonucleotide for detection of SNP TSC0039224
ataacaataaact

SEQ ID NO: 155317 - DNA, 13 bp, Artificial Sequence
  Oligonucleotide for detection of SNP TSC0039224
agtttagtgttat

SEQ ID NO: 155318 - DNA, 13 bp, Artificial Sequence
  Oligonucleotide for detection of SNP TSC0039224
ataacactaaact

SEQ ID NO: 155319 - DNA, 13 bp, Artificial Sequence
  Oligonucleotide for detection of SNP TSC0039224
atgatagtgggtt

SEQ ID NO: 155320 - DNA, 13 bp, Artificial Sequence
  Oligonucleotide for detection of SNP TSC0039224
aacccactatcat

SEQ ID NO: 155321 - DNA, 13 bp, Artificial Sequence
  Oligonucleotide for detection of SNP TSC0039224
atgatattgggtt

SEQ ID NO: 155322 - DNA, 13 bp, Artificial Sequence
  Oligonucleotide for detection of SNP TSC0039224
aacccaatatcat

SEQ ID NO: 155323 - DNA, 13 bp, Artificial Sequence
  Oligonucleotide for detection of SNP TSC0039227
taagtttgtattt

SEQ ID NO: 155324 - DNA, 13 bp, Artificial Sequence
  Oligonucleotide for detection of SNP TSC0039227
aaatacaaactta

SEQ ID NO: 155325 - DNA, 13 bp, Artificial Sequence
  Oligonucleotide for detection of SNP TSC0039227
taagttcgtattt

SEQ ID NO: 155326 - DNA, 13 bp, Artificial Sequence
  Oligonucleotide for detection of SNP TSC0039227
aaatacgaactta

SEQ ID NO: 155327 - DNA, 13 bp, Artificial Sequence
  Oligonucleotide for detection of SNP TSC0039227
aaatatgaatttg

SEQ ID NO: 155328 - DNA, 13 bp, Artificial Sequence
  Oligonucleotide for detection of SNP TSC0039227
caaattcatattt

SEQ ID NO: 155329 - DNA, 13 bp, Artificial Sequence
  Oligonucleotide for detection of SNP TSC0039227
aaatataaatttg

SEQ ID NO: 155330 - DNA, 13 bp, Artificial Sequence
  Oligonucleotide for detection of SNP TSC0039227
caaatttatattt

SEQ ID NO: 155331 - DNA, 13 bp, Artificial Sequence
  Oligonucleotide for detection of SNP TSC0039227
aaatacgaatttg

SEQ ID NO: 155332 - DNA, 13 bp, Artificial Sequence
  Oligonucleotide for detection of SNP TSC0039227
caaattcgtattt

SEQ ID NO: 155333 - DNA, 13 bp, Artificial Sequence
  Oligonucleotide for detection of SNP TSC0039228
gatgagggtgaga

SEQ ID NO: 155334 - DNA, 13 bp, Artificial Sequence
  Oligonucleotide for detection of SNP TSC0039228
tctcaccctcatc

SEQ ID NO: 155335 - DNA, 13 bp, Artificial Sequence
  Oligonucleotide for detection of SNP TSC0039228
gatgagagtgaga

SEQ ID NO: 155336 - DNA, 13 bp, Artificial Sequence
  Oligonucleotide for detection of SNP TSC0039228
tctcactctcatc

SEQ ID NO: 155337 - DNA, 13 bp, Artificial Sequence
  Oligonucleotide for detection of SNP TSC0039228
gatgagggcgaga

SEQ ID NO: 155338 - DNA, 13 bp, Artificial Sequence
  Oligonucleotide for detection of SNP TSC0039228
tctcgccctcatc

SEQ ID NO: 155339 - DNA, 13 bp, Artificial Sequence
  Oligonucleotide for detection of SNP TSC0039228
gatgagagcgaga

SEQ ID NO: 155340 - DNA, 13 bp, Artificial Sequence
  Oligonucleotide for detection of SNP TSC0039228
tctcgctctcatc

SEQ ID NO: 155341 - DNA, 13 bp, Artificial Sequence
  Oligonucleotide for detection of SNP TSC0039229
ttgaaaatgagta

SEQ ID NO: 155342 - DNA, 13 bp, Artificial Sequence
  Oligonucleotide for detection of SNP TSC0039229
tactcattttcaa

SEQ ID NO: 155343 - DNA, 13 bp, Artificial Sequence
  Oligonucleotide for detection of SNP TSC0039229
ttgaaattgagta

SEQ ID NO: 155344 - DNA, 13 bp, Artificial Sequence
  Oligonucleotide for detection of SNP TSC0039229
tactcaatttcaa

SEQ ID NO: 155345 - DNA, 13 bp, Artificial Sequence
  Oligonucleotide for detection of SNP TSC0039230
ttagtatgttaaa

SEQ ID NO: 155346 - DNA, 13 bp, Artificial Sequence
  Oligonucleotide for detection of SNP TSC0039230
tttaacatactaa

SEQ ID NO: 155347 - DNA, 13 bp, Artificial Sequence
  Oligonucleotide for detection of SNP TSC0039230
ttagtacgttaaa

SEQ ID NO: 155348 - DNA, 13 bp, Artificial Sequence
  Oligonucleotide for detection of SNP TSC0039230
tttaacgtactaa

SEQ ID NO: 155349 - DNA, 13 bp, Artificial Sequence
  Oligonucleotide for detection of SNP TSC0039233
gaataagagatag

SEQ ID NO: 155350 - DNA, 13 bp, Artificial Sequence
  Oligonucleotide for detection of SNP TSC0039233
ctatctcttattc

SEQ ID NO: 155351 - DNA, 13 bp, Artificial Sequence
  Oligonucleotide for detection of SNP TSC0039233
gaataaaagatag

SEQ ID NO: 155352 - DNA, 13 bp, Artificial Sequence
  Oligonucleotide for detection of SNP TSC0039233
ctatcttttattc

SEQ ID NO: 155353 - DNA, 13 bp, Artificial Sequence
  Oligonucleotide for detection of SNP TSC0039235
aaatgttttgggg

SEQ ID NO: 155354 - DNA, 13 bp, Artificial Sequence
  Oligonucleotide for detection of SNP TSC0039235
ccccaaaacattt

SEQ ID NO: 155355 - DNA, 13 bp, Artificial Sequence
  Oligonucleotide for detection of SNP TSC0039235
aaatgtgttgggg

SEQ ID NO: 155356 - DNA, 13 bp, Artificial Sequence
  Oligonucleotide for detection of SNP TSC0039235
ccccaacacattt

SEQ ID NO: 155357 - DNA, 13 bp, Artificial Sequence
  Oligonucleotide for detection of SNP TSC0039235
ttttaggatattt

SEQ ID NO: 155358 - DNA, 13 bp, Artificial Sequence
  Oligonucleotide for detection of SNP TSC0039235
aaatatcctaaaa

SEQ ID NO: 155359 - DNA, 13 bp, Artificial Sequence
  Oligonucleotide for detection of SNP TSC0039235
ttttagtatattt

SEQ ID NO: 155360 - DNA, 13 bp, Artificial Sequence
  Oligonucleotide for detection of SNP TSC0039235
aaatatactaaaa

SEQ ID NO: 155361 - DNA, 13 bp, Artificial Sequence
  Oligonucleotide for detection of SNP TSC0039236
tagatatgaagaa

SEQ ID NO: 155362 - DNA, 13 bp, Artificial Sequence
  Oligonucleotide for detection of SNP TSC0039236
ttcttcatatcta

SEQ ID NO: 155363 - DNA, 13 bp, Artificial Sequence
  Oligonucleotide for detection of SNP TSC0039236
tagataggaagaa

SEQ ID NO: 155364 - DNA, 13 bp, Artificial Sequence
  Oligonucleotide for detection of SNP TSC0039236
ttcttcctatcta

SEQ ID NO: 155365 - DNA, 13 bp, Artificial Sequence
  Oligonucleotide for detection of SNP TSC0039236
tagatacgaagaa

SEQ ID NO: 155366 - DNA, 13 bp, Artificial Sequence
  Oligonucleotide for detection of SNP TSC0039236
ttcttcgtatcta

SEQ ID NO: 155367 - DNA, 13 bp, Artificial Sequence
  Oligonucleotide for detection of SNP TSC0039237
ttttaagatggaa

SEQ ID NO: 155368 - DNA, 13 bp, Artificial Sequence
  Oligonucleotide for detection of SNP TSC0039237
ttccatcttaaaa

SEQ ID NO: 155369 - DNA, 13 bp, Artificial Sequence
  Oligonucleotide for detection of SNP TSC0039237
ttttaaaatggaa

SEQ ID NO: 155370 - DNA, 13 bp, Artificial Sequence
  Oligonucleotide for detection of SNP TSC0039237
ttccattttaaaa

SEQ ID NO: 155371 - DNA, 13 bp, Artificial Sequence
  Oligonucleotide for detection of SNP TSC0039238
ttttaagttgttg

SEQ ID NO: 155372 - DNA, 13 bp, Artificial Sequence
  Oligonucleotide for detection of SNP TSC0039238
caacaacttaaaa

SEQ ID NO: 155373 - DNA, 13 bp, Artificial Sequence
  Oligonucleotide for detection of SNP TSC0039239
ggtggtggtagtg

SEQ ID NO: 155374 - DNA, 13 bp, Artificial Sequence
  Oligonucleotide for detection of SNP TSC0039239
cactaccaccacc

SEQ ID NO: 155375 - DNA, 13 bp, Artificial Sequence
  Oligonucleotide for detection of SNP TSC0039239
ggtggtagtagtg

SEQ ID NO: 155376 - DNA, 13 bp, Artificial Sequence
  Oligonucleotide for detection of SNP TSC0039239
cactactaccacc

SEQ ID NO: 155377 - DNA, 13 bp, Artificial Sequence
  Oligonucleotide for detection of SNP TSC0039240
ttaatatgattgg

SEQ ID NO: 155378 - DNA, 13 bp, Artificial Sequence
  Oligonucleotide for detection of SNP TSC0039240
ccaatcatattaa

SEQ ID NO: 155379 - DNA, 13 bp, Artificial Sequence
  Oligonucleotide for detection of SNP TSC0039240
ttaatacgattgg

SEQ ID NO: 155380 - DNA, 13 bp, Artificial Sequence
  Oligonucleotide for detection of SNP TSC0039240
ccaatcgtattaa

SEQ ID NO: 155381 - DNA, 13 bp, Artificial Sequence
  Oligonucleotide for detection of SNP TSC0039240
ttagttgtattgg

SEQ ID NO: 155382 - DNA, 13 bp, Artificial Sequence
  Oligonucleotide for detection of SNP TSC0039240
ccaatacaactaa

SEQ ID NO: 155383 - DNA, 13 bp, Artificial Sequence
  Oligonucleotide for detection of SNP TSC0039240
ttagttatattgg

SEQ ID NO: 155384 - DNA, 13 bp, Artificial Sequence
  Oligonucleotide for detection of SNP TSC0039240
ccaatataactaa

SEQ ID NO: 155385 - DNA, 13 bp, Artificial Sequence
  Oligonucleotide for detection of SNP TSC0039240
ttagtcgtattgg

SEQ ID NO: 155386 - DNA, 13 bp, Artificial Sequence
  Oligonucleotide for detection of SNP TSC0039240
ccaatacgactaa

SEQ ID NO: 155387 - DNA, 13 bp, Artificial Sequence
  Oligonucleotide for detection of SNP TSC0039241
ttatttatatagy

SEQ ID NO: 155388 - DNA, 13 bp, Artificial Sequence
  Oligonucleotide for detection of SNP TSC0039241
rctatataaataa

SEQ ID NO: 155389 - DNA, 13 bp, Artificial Sequence
  Oligonucleotide for detection of SNP TSC0039241
ttatttttatagy

SEQ ID NO: 155390 - DNA, 13 bp, Artificial Sequence
  Oligonucleotide for detection of SNP TSC0039241
rctataaaaataa

SEQ ID NO: 155391 - DNA, 13 bp, Artificial Sequence
  Oligonucleotide for detection of SNP TSC0039241
gttgtgtagatga

SEQ ID NO: 155392 - DNA, 13 bp, Artificial Sequence
  Oligonucleotide for detection of SNP TSC0039241
tcatctacacaac

SEQ ID NO: 155393 - DNA, 13 bp, Artificial Sequence
  Oligonucleotide for detection of SNP TSC0039241
gttgtggagatga

SEQ ID NO: 155394 - DNA, 13 bp, Artificial Sequence
  Oligonucleotide for detection of SNP TSC0039241
tcatctccacaac

SEQ ID NO: 155395 - DNA, 13 bp, Artificial Sequence
  Oligonucleotide for detection of SNP TSC0039242
gttgttagtgtgy

SEQ ID NO: 155396 - DNA, 13 bp, Artificial Sequence
  Oligonucleotide for detection of SNP TSC0039242
rcacactaacaac

SEQ ID NO: 155397 - DNA, 13 bp, Artificial Sequence
  Oligonucleotide for detection of SNP TSC0039242
gttgttggtgtgy

SEQ ID NO: 155398 - DNA, 13 bp, Artificial Sequence
  Oligonucleotide for detection of SNP TSC0039242
rcacaccaacaac

SEQ ID NO: 155399 - DNA, 13 bp, Artificial Sequence
  Oligonucleotide for detection of SNP TSC0039242
gttgttagcgtgy

SEQ ID NO: 155400 - DNA, 13 bp, Artificial Sequence
  Oligonucleotide for detection of SNP TSC0039242
rcacgctaacaac

SEQ ID NO: 155401 - DNA, 13 bp, Artificial Sequence
  Oligonucleotide for detection of SNP TSC0039242
gttgttggcgtgy

SEQ ID NO: 155402 - DNA, 13 bp, Artificial Sequence
  Oligonucleotide for detection of SNP TSC0039242
rcacgccaacaac

SEQ ID NO: 155403 - DNA, 13 bp, Artificial Sequence
  Oligonucleotide for detection of SNP TSC0039243
gtttagagttatt

SEQ ID NO: 155404 - DNA, 13 bp, Artificial Sequence
  Oligonucleotide for detection of SNP TSC0039243
aataactctaaac

SEQ ID NO: 155405 - DNA, 13 bp, Artificial Sequence
  Oligonucleotide for detection of SNP TSC0039243
gtttagtgttatt

SEQ ID NO: 155406 - DNA, 13 bp, Artificial Sequence
  Oligonucleotide for detection of SNP TSC0039243
aataacactaaac

SEQ ID NO: 155407 - DNA, 13 bp, Artificial Sequence
  Oligonucleotide for detection of SNP TSC0039243
aatggttttgagy

SEQ ID NO: 155408 - DNA, 13 bp, Artificial Sequence
  Oligonucleotide for detection of SNP TSC0039243
rctcaaaaccatt

SEQ ID NO: 155409 - DNA, 13 bp, Artificial Sequence
  Oligonucleotide for detection of SNP TSC0039243
aatggtattgagy

SEQ ID NO: 155410 - DNA, 13 bp, Artificial Sequence
  Oligonucleotide for detection of SNP TSC0039243
rctcaataccatt

SEQ ID NO: 155411 - DNA, 13 bp, Artificial Sequence
  Oligonucleotide for detection of SNP TSC0039244
gtttatatggaay

SEQ ID NO: 155412 - DNA, 13 bp, Artificial Sequence
  Oligonucleotide for detection of SNP TSC0039244
rttccatataaac

SEQ ID NO: 155413 - DNA, 13 bp, Artificial Sequence
  Oligonucleotide for detection of SNP TSC0039244
gtttatgtggaay

SEQ ID NO: 155414 - DNA, 13 bp, Artificial Sequence
  Oligonucleotide for detection of SNP TSC0039244
rttccacataaac

SEQ ID NO: 155415 - DNA, 13 bp, Artificial Sequence
  Oligonucleotide for detection of SNP TSC0039244
gtttacgtggaay

SEQ ID NO: 155416 - DNA, 13 bp, Artificial Sequence
  Oligonucleotide for detection of SNP TSC0039244
rttccacgtaaac

SEQ ID NO: 155417 - DNA, 13 bp, Artificial Sequence
  Oligonucleotide for detection of SNP TSC0039244
gttttatgtgggy

SEQ ID NO: 155418 - DNA, 13 bp, Artificial Sequence
  Oligonucleotide for detection of SNP TSC0039244
rcccacataaaac

SEQ ID NO: 155419 - DNA, 13 bp, Artificial Sequence
  Oligonucleotide for detection of SNP TSC0039244
gttttacgtgggy

SEQ ID NO: 155420 - DNA, 13 bp, Artificial Sequence
  Oligonucleotide for detection of SNP TSC0039244
rcccacgtaaaac

SEQ ID NO: 155421 - DNA, 13 bp, Artificial Sequence
  Oligonucleotide for detection of SNP TSC0039246
tttagtaattgtg

SEQ ID NO: 155422 - DNA, 13 bp, Artificial Sequence
  Oligonucleotide for detection of SNP TSC0039246
cacaattactaaa

SEQ ID NO: 155423 - DNA, 13 bp, Artificial Sequence
  Oligonucleotide for detection of SNP TSC0039246
tttagcgattgtg

SEQ ID NO: 155424 - DNA, 13 bp, Artificial Sequence
  Oligonucleotide for detection of SNP TSC0039246
cacaatcgctaaa

SEQ ID NO: 155425 - DNA, 13 bp, Artificial Sequence
  Oligonucleotide for detection of SNP TSC0039246
tatagttgttgag

SEQ ID NO: 155426 - DNA, 13 bp, Artificial Sequence
  Oligonucleotide for detection of SNP TSC0039246
ctcaacaactata

SEQ ID NO: 155427 - DNA, 13 bp, Artificial Sequence
  Oligonucleotide for detection of SNP TSC0039246
tatagtcgttgag

SEQ ID NO: 155428 - DNA, 13 bp, Artificial Sequence
  Oligonucleotide for detection of SNP TSC0039246
ctcaacgactata

SEQ ID NO: 155429 - DNA, 13 bp, Artificial Sequence
  Oligonucleotide for detection of SNP TSC0039247
taggatatggtta

SEQ ID NO: 155430 - DNA, 13 bp, Artificial Sequence
  Oligonucleotide for detection of SNP TSC0039247
taaccatatccta

SEQ ID NO: 155431 - DNA, 13 bp, Artificial Sequence
  Oligonucleotide for detection of SNP TSC0039247
taggatgtggtta

SEQ ID NO: 155432 - DNA, 13 bp, Artificial Sequence
  Oligonucleotide for detection of SNP TSC0039247
taaccacatccta

SEQ ID NO: 155433 - DNA, 13 bp, Artificial Sequence
  Oligonucleotide for detection of SNP TSC0039248
ttagggtgttaat

SEQ ID NO: 155434 - DNA, 13 bp, Artificial Sequence
  Oligonucleotide for detection of SNP TSC0039248
attaacaccctaa

SEQ ID NO: 155435 - DNA, 13 bp, Artificial Sequence
  Oligonucleotide for detection of SNP TSC0039248
ttagggggttaat

SEQ ID NO: 155436 - DNA, 13 bp, Artificial Sequence
  Oligonucleotide for detection of SNP TSC0039248
attaaccccctaa

SEQ ID NO: 155437 - DNA, 13 bp, Artificial Sequence
  Oligonucleotide for detection of SNP TSC0039248
attgatattttaa

SEQ ID NO: 155438 - DNA, 13 bp, Artificial Sequence
  Oligonucleotide for detection of SNP TSC0039248
ttaaaatatcaat

SEQ ID NO: 155439 - DNA, 13 bp, Artificial Sequence
  Oligonucleotide for detection of SNP TSC0039248
attgattttttaa

SEQ ID NO: 155440 - DNA, 13 bp, Artificial Sequence
  Oligonucleotide for detection of SNP TSC0039248
ttaaaaaatcaat

SEQ ID NO: 155441 - DNA, 13 bp, Artificial Sequence
  Oligonucleotide for detection of SNP TSC0039249
atattagtaaaaa

SEQ ID NO: 155442 - DNA, 13 bp, Artificial Sequence
  Oligonucleotide for detection of SNP TSC0039249
tttttactaatat

SEQ ID NO: 155443 - DNA, 13 bp, Artificial Sequence
  Oligonucleotide for detection of SNP TSC0039252
gttttatgagatg

SEQ ID NO: 155444 - DNA, 13 bp, Artificial Sequence
  Oligonucleotide for detection of SNP TSC0039252
catctcataaaac

SEQ ID NO: 155445 - DNA, 13 bp, Artificial Sequence
  Oligonucleotide for detection of SNP TSC0039252
gttttaggagatg

SEQ ID NO: 155446 - DNA, 13 bp, Artificial Sequence
  Oligonucleotide for detection of SNP TSC0039252
catctcctaaaac

SEQ ID NO: 155447 - DNA, 13 bp, Artificial Sequence
  Oligonucleotide for detection of SNP TSC0039252
gttttacgagatg

SEQ ID NO: 155448 - DNA, 13 bp, Artificial Sequence
  Oligonucleotide for detection of SNP TSC0039252
catctcgtaaaac

SEQ ID NO: 155449 - DNA, 13 bp, Artificial Sequence
  Oligonucleotide for detection of SNP TSC0039252
tattttgtgggay

SEQ ID NO: 155450 - DNA, 13 bp, Artificial Sequence
  Oligonucleotide for detection of SNP TSC0039252
rtcccacaaaata

SEQ ID NO: 155451 - DNA, 13 bp, Artificial Sequence
  Oligonucleotide for detection of SNP TSC0039252
tattttttgggay

SEQ ID NO: 155452 - DNA, 13 bp, Artificial Sequence
  Oligonucleotide for detection of SNP TSC0039252
rtcccaaaaaata

SEQ ID NO: 155453 - DNA, 13 bp, Artificial Sequence
  Oligonucleotide for detection of SNP TSC0039252
tatttcgtgggay

SEQ ID NO: 155454 - DNA, 13 bp, Artificial Sequence
  Oligonucleotide for detection of SNP TSC0039252
rtcccacgaaata

SEQ ID NO: 155455 - DNA, 13 bp, Artificial Sequence
  Oligonucleotide for detection of SNP TSC0039254
ttatatatttgta

SEQ ID NO: 155456 - DNA, 13 bp, Artificial Sequence
  Oligonucleotide for detection of SNP TSC0039254
tacaaatatataa

SEQ ID NO: 155457 - DNA, 13 bp, Artificial Sequence
  Oligonucleotide for detection of SNP TSC0039254
ttatatgtttgta

SEQ ID NO: 155458 - DNA, 13 bp, Artificial Sequence
  Oligonucleotide for detection of SNP TSC0039254
tacaaacatataa

SEQ ID NO: 155459 - DNA, 13 bp, Artificial Sequence
  Oligonucleotide for detection of SNP TSC0039254
ttatacgtttgta

SEQ ID NO: 155460 - DNA, 13 bp, Artificial Sequence
  Oligonucleotide for detection of SNP TSC0039254
tacaaacgtataa

SEQ ID NO: 155461 - DNA, 13 bp, Artificial Sequence
  Oligonucleotide for detection of SNP TSC0039254
tataaatgtgtaa

SEQ ID NO: 155462 - DNA, 13 bp, Artificial Sequence
  Oligonucleotide for detection of SNP TSC0039254
ttacacatttata

SEQ ID NO: 155463 - DNA, 13 bp, Artificial Sequence
  Oligonucleotide for detection of SNP TSC0039254
tataaacgtgtaa

SEQ ID NO: 155464 - DNA, 13 bp, Artificial Sequence
  Oligonucleotide for detection of SNP TSC0039254
ttacacgtttata

SEQ ID NO: 155465 - DNA, 13 bp, Artificial Sequence
  Oligonucleotide for detection of SNP TSC0039255
gtttagtttatay

SEQ ID NO: 155466 - DNA, 13 bp, Artificial Sequence
  Oligonucleotide for detection of SNP TSC0039255
rtataaactaaac

SEQ ID NO: 155467 - DNA, 13 bp, Artificial Sequence
  Oligonucleotide for detection of SNP TSC0039255
gtttaggttatay

SEQ ID NO: 155468 - DNA, 13 bp, Artificial Sequence
  Oligonucleotide for detection of SNP TSC0039255
rtataacctaaac

SEQ ID NO: 155469 - DNA, 13 bp, Artificial Sequence
  Oligonucleotide for detection of SNP TSC0039255
gtgtgagttaaay

SEQ ID NO: 155470 - DNA, 13 bp, Artificial Sequence
  Oligonucleotide for detection of SNP TSC0039255
rtttaactcacac

SEQ ID NO: 155471 - DNA, 13 bp, Artificial Sequence
  Oligonucleotide for detection of SNP TSC0039255
gtgtgatttaaay

SEQ ID NO: 155472 - DNA, 13 bp, Artificial Sequence
  Oligonucleotide for detection of SNP TSC0039255
rtttaaatcacac

SEQ ID NO: 155473 - DNA, 13 bp, Artificial Sequence
  Oligonucleotide for detection of SNP TSC0039257
aaaggtaggtatg

SEQ ID NO: 155474 - DNA, 13 bp, Artificial Sequence
  Oligonucleotide for detection of SNP TSC0039257
catacctaccttt

SEQ ID NO: 155475 - DNA, 13 bp, Artificial Sequence
  Oligonucleotide for detection of SNP TSC0039257
aaaggtgggtatg

SEQ ID NO: 155476 - DNA, 13 bp, Artificial Sequence
  Oligonucleotide for detection of SNP TSC0039257
catacccaccttt

SEQ ID NO: 155477 - DNA, 13 bp, Artificial Sequence
  Oligonucleotide for detection of SNP TSC0039258
ttttaaagtttta

SEQ ID NO: 155478 - DNA, 13 bp, Artificial Sequence
  Oligonucleotide for detection of SNP TSC0039258
taaaactttaaaa

SEQ ID NO: 155479 - DNA, 13 bp, Artificial Sequence
  Oligonucleotide for detection of SNP TSC0039258
ttttaatgtttta

SEQ ID NO: 155480 - DNA, 13 bp, Artificial Sequence
  Oligonucleotide for detection of SNP TSC0039258
taaaacattaaaa

SEQ ID NO: 155481 - DNA, 13 bp, Artificial Sequence
  Oligonucleotide for detection of SNP TSC0039258
tgaaattttaaaa

SEQ ID NO: 155482 - DNA, 13 bp, Artificial Sequence
  Oligonucleotide for detection of SNP TSC0039258
ttttaaaatttca

SEQ ID NO: 155483 - DNA, 13 bp, Artificial Sequence
  Oligonucleotide for detection of SNP TSC0039258
tgaaatattaaaa

SEQ ID NO: 155484 - DNA, 13 bp, Artificial Sequence
  Oligonucleotide for detection of SNP TSC0039258
ttttaatatttca

SEQ ID NO: 155485 - DNA, 13 bp, Artificial Sequence
  Oligonucleotide for detection of SNP TSC0039259
agatgaaaggttt

SEQ ID NO: 155486 - DNA, 13 bp, Artificial Sequence
  Oligonucleotide for detection of SNP TSC0039259
aaacctttcatct

SEQ ID NO: 155487 - DNA, 13 bp, Artificial Sequence
  Oligonucleotide for detection of SNP TSC0039259
agatgagaggttt

SEQ ID NO: 155488 - DNA, 13 bp, Artificial Sequence
  Oligonucleotide for detection of SNP TSC0039259
aaacctctcatct

SEQ ID NO: 155489 - DNA, 13 bp, Artificial Sequence
  Oligonucleotide for detection of SNP TSC0039263
tgtatttgattat

SEQ ID NO: 155490 - DNA, 13 bp, Artificial Sequence
  Oligonucleotide for detection of SNP TSC0039263
ataatcaaataca

SEQ ID NO: 155491 - DNA, 13 bp, Artificial Sequence
  Oligonucleotide for detection of SNP TSC0039263
tgtattcgattat

SEQ ID NO: 155492 - DNA, 13 bp, Artificial Sequence
  Oligonucleotide for detection of SNP TSC0039263
ataatcgaataca

SEQ ID NO: 155493 - DNA, 13 bp, Artificial Sequence
  Oligonucleotide for detection of SNP TSC0039263
atagttgaatgta

SEQ ID NO: 155494 - DNA, 13 bp, Artificial Sequence
  Oligonucleotide for detection of SNP TSC0039263
tacattcaactat

SEQ ID NO: 155495 - DNA, 13 bp, Artificial Sequence
  Oligonucleotide for detection of SNP TSC0039263
atagttaaatgta

SEQ ID NO: 155496 - DNA, 13 bp, Artificial Sequence
  Oligonucleotide for detection of SNP TSC0039263
tacatttaactat

SEQ ID NO: 155497 - DNA, 13 bp, Artificial Sequence
  Oligonucleotide for detection of SNP TSC0039263
atagtcgaatgta

SEQ ID NO: 155498 - DNA, 13 bp, Artificial Sequence
  Oligonucleotide for detection of SNP TSC0039263
tacattcgactat

SEQ ID NO: 155499 - DNA, 13 bp, Artificial Sequence
  Oligonucleotide for detection of SNP TSC0039264
gaaattagttttt

SEQ ID NO: 155500 - DNA, 13 bp, Artificial Sequence
  Oligonucleotide for detection of SNP TSC0039264
aaaaactaatttc

SEQ ID NO: 155501 - DNA, 13 bp, Artificial Sequence
  Oligonucleotide for detection of SNP TSC0039264
gaaattggttttt

SEQ ID NO: 155502 - DNA, 13 bp, Artificial Sequence
  Oligonucleotide for detection of SNP TSC0039264
aaaaaccaatttc

SEQ ID NO: 155503 - DNA, 13 bp, Artificial Sequence
  Oligonucleotide for detection of SNP TSC0039269
agttataggggta

SEQ ID NO: 155504 - DNA, 13 bp, Artificial Sequence
  Oligonucleotide for detection of SNP TSC0039269
tacccctataact

SEQ ID NO: 155505 - DNA, 13 bp, Artificial Sequence
  Oligonucleotide for detection of SNP TSC0039269
agttatgggggta

SEQ ID NO: 155506 - DNA, 13 bp, Artificial Sequence
  Oligonucleotide for detection of SNP TSC0039269
tacccccataact

SEQ ID NO: 155507 - DNA, 13 bp, Artificial Sequence
  Oligonucleotide for detection of SNP TSC0039269
agttacgggggta

SEQ ID NO: 155508 - DNA, 13 bp, Artificial Sequence
  Oligonucleotide for detection of SNP TSC0039269
tacccccgtaact

SEQ ID NO: 155509 - DNA, 13 bp, Artificial Sequence
  Oligonucleotide for detection of SNP TSC0039269
tgtttttgtgatt

SEQ ID NO: 155510 - DNA, 13 bp, Artificial Sequence
  Oligonucleotide for detection of SNP TSC0039269
aatcacaaaaaca

SEQ ID NO: 155511 - DNA, 13 bp, Artificial Sequence
  Oligonucleotide for detection of SNP TSC0039269
tgttttcgtgatt

SEQ ID NO: 155512 - DNA, 13 bp, Artificial Sequence
  Oligonucleotide for detection of SNP TSC0039269
aatcacgaaaaca

SEQ ID NO: 155513 - DNA, 13 bp, Artificial Sequence
  Oligonucleotide for detection of SNP TSC0039273
ataaatagaataa

SEQ ID NO: 155514 - DNA, 13 bp, Artificial Sequence
  Oligonucleotide for detection of SNP TSC0039273
ttattctatttat

SEQ ID NO: 155515 - DNA, 13 bp, Artificial Sequence
  Oligonucleotide for detection of SNP TSC0039273
ataaatggaataa

SEQ ID NO: 155516 - DNA, 13 bp, Artificial Sequence
  Oligonucleotide for detection of SNP TSC0039273
ttattccatttat

SEQ ID NO: 155517 - DNA, 13 bp, Artificial Sequence
  Oligonucleotide for detection of SNP TSC0039274
taataaaagtata

SEQ ID NO: 155518 - DNA, 13 bp, Artificial Sequence
  Oligonucleotide for detection of SNP TSC0039274
tatacttttatta

SEQ ID NO: 155519 - DNA, 13 bp, Artificial Sequence
  Oligonucleotide for detection of SNP TSC0039274
taataatagtata

SEQ ID NO: 155520 - DNA, 13 bp, Artificial Sequence
  Oligonucleotide for detection of SNP TSC0039274
tatactattatta

SEQ ID NO: 155521 - DNA, 13 bp, Artificial Sequence
  Oligonucleotide for detection of SNP TSC0039274
tatgtttttattg

SEQ ID NO: 155522 - DNA, 13 bp, Artificial Sequence
  Oligonucleotide for detection of SNP TSC0039274
caataaaaacata

SEQ ID NO: 155523 - DNA, 13 bp, Artificial Sequence
  Oligonucleotide for detection of SNP TSC0005659
atttgttgtttgy

SEQ ID NO: 155524 - DNA, 13 bp, Artificial Sequence
  Oligonucleotide for detection of SNP TSC0005659
rcaaacaacaaat

SEQ ID NO: 155525 - DNA, 13 bp, Artificial Sequence
  Oligonucleotide for detection of SNP TSC0005659
atttgtcgtttgy

SEQ ID NO: 155526 - DNA, 13 bp, Artificial Sequence
  Oligonucleotide for detection of SNP TSC0005659
rcaaacgacaaat

SEQ ID NO: 155527 - DNA, 13 bp, Artificial Sequence
  Oligonucleotide for detection of SNP TSC0005659
gtaagtggtaggt

SEQ ID NO: 155528 - DNA, 13 bp, Artificial Sequence
  Oligonucleotide for detection of SNP TSC0005659
acctaccacttac

SEQ ID NO: 155529 - DNA, 13 bp, Artificial Sequence
  Oligonucleotide for detection of SNP TSC0005659
gtaagtagtaggt

SEQ ID NO: 155530 - DNA, 13 bp, Artificial Sequence
  Oligonucleotide for detection of SNP TSC0005659
acctactacttac

SEQ ID NO: 155531 - DNA, 13 bp, Artificial Sequence
  Oligonucleotide for detection of SNP TSC0005659
gtaagcggtaggt

SEQ ID NO: 155532 - DNA, 13 bp, Artificial Sequence
  Oligonucleotide for detection of SNP TSC0005659
acctaccgcttac

SEQ ID NO: 155533 - DNA, 13 bp, Artificial Sequence
  Oligonucleotide for detection of SNP TSC0039275
taaggagttttty

SEQ ID NO: 155534 - DNA, 13 bp, Artificial Sequence
  Oligonucleotide for detection of SNP TSC0039275
raaaaactcctta

SEQ ID NO: 155535 - DNA, 13 bp, Artificial Sequence
  Oligonucleotide for detection of SNP TSC0039275
taaggaattttty

SEQ ID NO: 155536 - DNA, 13 bp, Artificial Sequence
  Oligonucleotide for detection of SNP TSC0039275
raaaaattcctta

SEQ ID NO: 155537 - DNA, 13 bp, Artificial Sequence
  Oligonucleotide for detection of SNP TSC0039276
tggttgattttty

SEQ ID NO: 155538 - DNA, 13 bp, Artificial Sequence
  Oligonucleotide for detection of SNP TSC0039276
raaaaatcaacca

SEQ ID NO: 155539 - DNA, 13 bp, Artificial Sequence
  Oligonucleotide for detection of SNP TSC0039276
tggttgtttttty

SEQ ID NO: 155540 - DNA, 13 bp, Artificial Sequence
  Oligonucleotide for detection of SNP TSC0039276
raaaaaacaacca

SEQ ID NO: 155541 - DNA, 13 bp, Artificial Sequence
  Oligonucleotide for detection of SNP TSC0039276
gagaagttagtta

SEQ ID NO: 155542 - DNA, 13 bp, Artificial Sequence
  Oligonucleotide for detection of SNP TSC0039276
taactaacttctc

SEQ ID NO: 155543 - DNA, 13 bp, Artificial Sequence
  Oligonucleotide for detection of SNP TSC0039276
gagaaggtagtta

SEQ ID NO: 155544 - DNA, 13 bp, Artificial Sequence
  Oligonucleotide for detection of SNP TSC0039276
taactaccttctc

SEQ ID NO: 155545 - DNA, 13 bp, Artificial Sequence
  Oligonucleotide for detection of SNP TSC0039277
ttaatgaaagatg

SEQ ID NO: 155546 - DNA, 13 bp, Artificial Sequence
  Oligonucleotide for detection of SNP TSC0039277
catctttcattaa

SEQ ID NO: 155547 - DNA, 13 bp, Artificial Sequence
  Oligonucleotide for detection of SNP TSC0039277
ttaatggaagatg

SEQ ID NO: 155548 - DNA, 13 bp, Artificial Sequence
  Oligonucleotide for detection of SNP TSC0039277
catcttccattaa

SEQ ID NO: 155549 - DNA, 13 bp, Artificial Sequence
  Oligonucleotide for detection of SNP TSC0039278
gttaaaatagata

SEQ ID NO: 155550 - DNA, 13 bp, Artificial Sequence
  Oligonucleotide for detection of SNP TSC0039278
tatctattttaac

SEQ ID NO: 155551 - DNA, 13 bp, Artificial Sequence
  Oligonucleotide for detection of SNP TSC0039278
gttaaagtagata

SEQ ID NO: 155552 - DNA, 13 bp, Artificial Sequence
  Oligonucleotide for detection of SNP TSC0039278
tatctactttaac

SEQ ID NO: 155553 - DNA, 13 bp, Artificial Sequence
  Oligonucleotide for detection of SNP TSC0004578
gattgttaagatg

SEQ ID NO: 155554 - DNA, 13 bp, Artificial Sequence
  Oligonucleotide for detection of SNP TSC0004578
catcttaacaatc

SEQ ID NO: 155555 - DNA, 13 bp, Artificial Sequence
  Oligonucleotide for detection of SNP TSC0004578
gattgtgaagatg

SEQ ID NO: 155556 - DNA, 13 bp, Artificial Sequence
  Oligonucleotide for detection of SNP TSC0004578
catcttcacaatc

SEQ ID NO: 155557 - DNA, 13 bp, Artificial Sequence
  Oligonucleotide for detection of SNP TSC0004578
gattgcgaagatg

SEQ ID NO: 155558 - DNA, 13 bp, Artificial Sequence
  Oligonucleotide for detection of SNP TSC0004578
catcttcgcaatc

SEQ ID NO: 155559 - DNA, 13 bp, Artificial Sequence
  Oligonucleotide for detection of SNP TSC0004578
tattttggtaaty

SEQ ID NO: 155560 - DNA, 13 bp, Artificial Sequence
  Oligonucleotide for detection of SNP TSC0004578
rattaccaaaata

SEQ ID NO: 155561 - DNA, 13 bp, Artificial Sequence
  Oligonucleotide for detection of SNP TSC0004578
tattttcgtaaty

SEQ ID NO: 155562 - DNA, 13 bp, Artificial Sequence
  Oligonucleotide for detection of SNP TSC0004578
rattacgaaaata

SEQ ID NO: 155563 - DNA, 13 bp, Artificial Sequence
  Oligonucleotide for detection of SNP TSC0004579
atttgtatttgay

SEQ ID NO: 155564 - DNA, 13 bp, Artificial Sequence
  Oligonucleotide for detection of SNP TSC0004579
rtcaaatacaaat

SEQ ID NO: 155565 - DNA, 13 bp, Artificial Sequence
  Oligonucleotide for detection of SNP TSC0004579
atttgtgtttgay

SEQ ID NO: 155566 - DNA, 13 bp, Artificial Sequence
  Oligonucleotide for detection of SNP TSC0004579
rtcaaacacaaat

SEQ ID NO: 155567 - DNA, 13 bp, Artificial Sequence
  Oligonucleotide for detection of SNP TSC0004579
atttgcgtttgay

SEQ ID NO: 155568 - DNA, 13 bp, Artificial Sequence
  Oligonucleotide for detection of SNP TSC0004579
rtcaaacgcaaat

SEQ ID NO: 155569 - DNA, 13 bp, Artificial Sequence
  Oligonucleotide for detection of SNP TSC0004579
gttagatgtaggt

SEQ ID NO: 155570 - DNA, 13 bp, Artificial Sequence
  Oligonucleotide for detection of SNP TSC0004579
acctacatctaac

SEQ ID NO: 155571 - DNA, 13 bp, Artificial Sequence
  Oligonucleotide for detection of SNP TSC0004579
gttagacgtaggt

SEQ ID NO: 155572 - DNA, 13 bp, Artificial Sequence
  Oligonucleotide for detection of SNP TSC0004579
acctacgtctaac

SEQ ID NO: 155573 - DNA, 13 bp, Artificial Sequence
  Oligonucleotide for detection of SNP TSC0039279
ttaataggtatgt

SEQ ID NO: 155574 - DNA, 13 bp, Artificial Sequence
  Oligonucleotide for detection of SNP TSC0039279
acatacctattaa

SEQ ID NO: 155575 - DNA, 13 bp, Artificial Sequence
  Oligonucleotide for detection of SNP TSC0039279
ttaataagtatgt

SEQ ID NO: 155576 - DNA, 13 bp, Artificial Sequence
  Oligonucleotide for detection of SNP TSC0039279
acatacttattaa

SEQ ID NO: 155577 - DNA, 13 bp, Artificial Sequence
  Oligonucleotide for detection of SNP TSC0039280
tgaatgggtgggt

SEQ ID NO: 155578 - DNA, 13 bp, Artificial Sequence
  Oligonucleotide for detection of SNP TSC0039280
acccacccattca

SEQ ID NO: 155579 - DNA, 13 bp, Artificial Sequence
  Oligonucleotide for detection of SNP TSC0039280
tgaatgagtgggt

SEQ ID NO: 155580 - DNA, 13 bp, Artificial Sequence
  Oligonucleotide for detection of SNP TSC0039280
acccactcattca

SEQ ID NO: 155581 - DNA, 13 bp, Artificial Sequence
  Oligonucleotide for detection of SNP TSC0039281
taaattgtttagt

SEQ ID NO: 155582 - DNA, 13 bp, Artificial Sequence
  Oligonucleotide for detection of SNP TSC0039281
actaaacaattta

SEQ ID NO: 155583 - DNA, 13 bp, Artificial Sequence
  Oligonucleotide for detection of SNP TSC0039281
attggaaaattta

SEQ ID NO: 155584 - DNA, 13 bp, Artificial Sequence
  Oligonucleotide for detection of SNP TSC0039281
taaattttccaat

SEQ ID NO: 155585 - DNA, 13 bp, Artificial Sequence
  Oligonucleotide for detection of SNP TSC0039281
attggataattta

SEQ ID NO: 155586 - DNA, 13 bp, Artificial Sequence
  Oligonucleotide for detection of SNP TSC0039281
taaattatccaat

SEQ ID NO: 155587 - DNA, 13 bp, Artificial Sequence
  Oligonucleotide for detection of SNP TSC0039282
tttgggaatgttt

SEQ ID NO: 155588 - DNA, 13 bp, Artificial Sequence
  Oligonucleotide for detection of SNP TSC0039282
aaacattcccaaa

SEQ ID NO: 155589 - DNA, 13 bp, Artificial Sequence
  Oligonucleotide for detection of SNP TSC0039282
tttgggtatgttt

SEQ ID NO: 155590 - DNA, 13 bp, Artificial Sequence
  Oligonucleotide for detection of SNP TSC0039282
aaacatacccaaa

SEQ ID NO: 155591 - DNA, 13 bp, Artificial Sequence
  Oligonucleotide for detection of SNP TSC0039282
agatatttttaag

SEQ ID NO: 155592 - DNA, 13 bp, Artificial Sequence
  Oligonucleotide for detection of SNP TSC0039282
cttaaaaatatct

SEQ ID NO: 155593 - DNA, 13 bp, Artificial Sequence
  Oligonucleotide for detection of SNP TSC0039282
agatatatttaag

SEQ ID NO: 155594 - DNA, 13 bp, Artificial Sequence
  Oligonucleotide for detection of SNP TSC0039282
cttaaatatatct

SEQ ID NO: 155595 - DNA, 13 bp, Artificial Sequence
  Oligonucleotide for detection of SNP TSC0039283
gtttttattagta

SEQ ID NO: 155596 - DNA, 13 bp, Artificial Sequence
  Oligonucleotide for detection of SNP TSC0039283
tactaataaaaac

SEQ ID NO: 155597 - DNA, 13 bp, Artificial Sequence
  Oligonucleotide for detection of SNP TSC0039283
tgttgataaagay

SEQ ID NO: 155598 - DNA, 13 bp, Artificial Sequence
  Oligonucleotide for detection of SNP TSC0039283
rtctttatcaaca

SEQ ID NO: 155599 - DNA, 13 bp, Artificial Sequence
  Oligonucleotide for detection of SNP TSC0039283
tgttgagaaagay

SEQ ID NO: 155600 - DNA, 13 bp, Artificial Sequence
  Oligonucleotide for detection of SNP TSC0039283
rtctttctcaaca

SEQ ID NO: 155601 - DNA, 13 bp, Artificial Sequence
  Oligonucleotide for detection of SNP TSC0039286
tatggtattatat

SEQ ID NO: 155602 - DNA, 13 bp, Artificial Sequence
  Oligonucleotide for detection of SNP TSC0039286
atataataccata

SEQ ID NO: 155603 - DNA, 13 bp, Artificial Sequence
  Oligonucleotide for detection of SNP TSC0039286
tatggtgttatat

SEQ ID NO: 155604 - DNA, 13 bp, Artificial Sequence
  Oligonucleotide for detection of SNP TSC0039286
atataacaccata

SEQ ID NO: 155605 - DNA, 13 bp, Artificial Sequence
  Oligonucleotide for detection of SNP TSC0039291
gaatttaaaaaat

SEQ ID NO: 155606 - DNA, 13 bp, Artificial Sequence
  Oligonucleotide for detection of SNP TSC0039291
attttttaaattc

SEQ ID NO: 155607 - DNA, 13 bp, Artificial Sequence
  Oligonucleotide for detection of SNP TSC0039291
gaattttaaaaat

SEQ ID NO: 155608 - DNA, 13 bp, Artificial Sequence
  Oligonucleotide for detection of SNP TSC0039291
atttttaaaattc

SEQ ID NO: 155609 - DNA, 13 bp, Artificial Sequence
  Oligonucleotide for detection of SNP TSC0039291
attttttgaatty

SEQ ID NO: 155610 - DNA, 13 bp, Artificial Sequence
  Oligonucleotide for detection of SNP TSC0039291
raattcaaaaaat

SEQ ID NO: 155611 - DNA, 13 bp, Artificial Sequence
  Oligonucleotide for detection of SNP TSC0039291
atttttggaatty

SEQ ID NO: 155612 - DNA, 13 bp, Artificial Sequence
  Oligonucleotide for detection of SNP TSC0039291
raattccaaaaat

SEQ ID NO: 155613 - DNA, 13 bp, Artificial Sequence
  Oligonucleotide for detection of SNP TSC0000350
ttagatgtaaagy

SEQ ID NO: 155614 - DNA, 13 bp, Artificial Sequence
  Oligonucleotide for detection of SNP TSC0000350
rctttacatctaa

SEQ ID NO: 155615 - DNA, 13 bp, Artificial Sequence
  Oligonucleotide for detection of SNP TSC0000350
ttagatataaagy

SEQ ID NO: 155616 - DNA, 13 bp, Artificial Sequence
  Oligonucleotide for detection of SNP TSC0000350
rctttatatctaa

SEQ ID NO: 155617 - DNA, 13 bp, Artificial Sequence
  Oligonucleotide for detection of SNP TSC0000350
ttagacgtaaagy

SEQ ID NO: 155618 - DNA, 13 bp, Artificial Sequence
  Oligonucleotide for detection of SNP TSC0000350
rctttacgtctaa

SEQ ID NO: 155619 - DNA, 13 bp, Artificial Sequence
  Oligonucleotide for detection of SNP TSC0001748
tggagattgggtg

SEQ ID NO: 155620 - DNA, 13 bp, Artificial Sequence
  Oligonucleotide for detection of SNP TSC0001748
cacccaatctcca

SEQ ID NO: 155621 - DNA, 13 bp, Artificial Sequence
  Oligonucleotide for detection of SNP TSC0001748
tggagagtgggtg

SEQ ID NO: 155622 - DNA, 13 bp, Artificial Sequence
  Oligonucleotide for detection of SNP TSC0001748
cacccactctcca

SEQ ID NO: 155623 - DNA, 13 bp, Artificial Sequence
  Oligonucleotide for detection of SNP TSC0001749
gttagtattatga

SEQ ID NO: 155624 - DNA, 13 bp, Artificial Sequence
  Oligonucleotide for detection of SNP TSC0001749
tcataatactaac

SEQ ID NO: 155625 - DNA, 13 bp, Artificial Sequence
  Oligonucleotide for detection of SNP TSC0001749
gttagttttatga

SEQ ID NO: 155626 - DNA, 13 bp, Artificial Sequence
  Oligonucleotide for detection of SNP TSC0001749
tcataaaactaac

SEQ ID NO: 155627 - DNA, 13 bp, Artificial Sequence
  Oligonucleotide for detection of SNP TSC0001749
ttatggtgttggy

SEQ ID NO: 155628 - DNA, 13 bp, Artificial Sequence
  Oligonucleotide for detection of SNP TSC0001749
rccaacaccataa

SEQ ID NO: 155629 - DNA, 13 bp, Artificial Sequence
  Oligonucleotide for detection of SNP TSC0039295
tatttaaaatata

SEQ ID NO: 155630 - DNA, 13 bp, Artificial Sequence
  Oligonucleotide for detection of SNP TSC0039295
tatattttaaata

SEQ ID NO: 155631 - DNA, 13 bp, Artificial Sequence
  Oligonucleotide for detection of SNP TSC0039295
tgtgttttaaata

SEQ ID NO: 155632 - DNA, 13 bp, Artificial Sequence
  Oligonucleotide for detection of SNP TSC0039295
tatttaaaacaca

SEQ ID NO: 155633 - DNA, 13 bp, Artificial Sequence
  Oligonucleotide for detection of SNP TSC0039295
tgtgttataaata

SEQ ID NO: 155634 - DNA, 13 bp, Artificial Sequence
  Oligonucleotide for detection of SNP TSC0039295
tatttataacaca

SEQ ID NO: 155635 - DNA, 13 bp, Artificial Sequence
  Oligonucleotide for detection of SNP TSC0004851
gggatgatatagy

SEQ ID NO: 155636 - DNA, 13 bp, Artificial Sequence
  Oligonucleotide for detection of SNP TSC0004851
rctatatcatccc

SEQ ID NO: 155637 - DNA, 13 bp, Artificial Sequence
  Oligonucleotide for detection of SNP TSC0004851
gggatggtatagy

SEQ ID NO: 155638 - DNA, 13 bp, Artificial Sequence
  Oligonucleotide for detection of SNP TSC0004851
rctataccatccc

SEQ ID NO: 155639 - DNA, 13 bp, Artificial Sequence
  Oligonucleotide for detection of SNP TSC0039296
tatggttataaag

SEQ ID NO: 155640 - DNA, 13 bp, Artificial Sequence
  Oligonucleotide for detection of SNP TSC0039296
ctttataaccata

SEQ ID NO: 155641 - DNA, 13 bp, Artificial Sequence
  Oligonucleotide for detection of SNP TSC0039296
tatggtgataaag

SEQ ID NO: 155642 - DNA, 13 bp, Artificial Sequence
  Oligonucleotide for detection of SNP TSC0039296
ctttatcaccata

SEQ ID NO: 155643 - DNA, 13 bp, Artificial Sequence
  Oligonucleotide for detection of SNP TSC0039296
ttttataattata

SEQ ID NO: 155644 - DNA, 13 bp, Artificial Sequence
  Oligonucleotide for detection of SNP TSC0039296
tataattataaaa

SEQ ID NO: 155645 - DNA, 13 bp, Artificial Sequence
  Oligonucleotide for detection of SNP TSC0039296
ttttattattata

SEQ ID NO: 155646 - DNA, 13 bp, Artificial Sequence
  Oligonucleotide for detection of SNP TSC0039296
tataataataaaa

SEQ ID NO: 155647 - DNA, 13 bp, Artificial Sequence
  Oligonucleotide for detection of SNP TSC0039297
gaagttaagaata

SEQ ID NO: 155648 - DNA, 13 bp, Artificial Sequence
  Oligonucleotide for detection of SNP TSC0039297
tattcttaacttc

SEQ ID NO: 155649 - DNA, 13 bp, Artificial Sequence
  Oligonucleotide for detection of SNP TSC0039297
gaagttgagaata

SEQ ID NO: 155650 - DNA, 13 bp, Artificial Sequence
  Oligonucleotide for detection of SNP TSC0039297
tattctcaacttc

SEQ ID NO: 155651 - DNA, 13 bp, Artificial Sequence
  Oligonucleotide for detection of SNP TSC0039297
gaagtcgagaata

SEQ ID NO: 155652 - DNA, 13 bp, Artificial Sequence
  Oligonucleotide for detection of SNP TSC0039297
tattctcgacttc

SEQ ID NO: 155653 - DNA, 13 bp, Artificial Sequence
  Oligonucleotide for detection of SNP TSC0039299
tattaagattaag

SEQ ID NO: 155654 - DNA, 13 bp, Artificial Sequence
  Oligonucleotide for detection of SNP TSC0039299
cttaatcttaata

SEQ ID NO: 155655 - DNA, 13 bp, Artificial Sequence
  Oligonucleotide for detection of SNP TSC0039299
tattaaaattaag

SEQ ID NO: 155656 - DNA, 13 bp, Artificial Sequence
  Oligonucleotide for detection of SNP TSC0039299
cttaattttaata

SEQ ID NO: 155657 - DNA, 13 bp, Artificial Sequence
  Oligonucleotide for detection of SNP TSC0039302
ggggttgaggtag

SEQ ID NO: 155658 - DNA, 13 bp, Artificial Sequence
  Oligonucleotide for detection of SNP TSC0039302
ctacctcaacccc

SEQ ID NO: 155659 - DNA, 13 bp, Artificial Sequence
  Oligonucleotide for detection of SNP TSC0039302
ggggttaaggtag

SEQ ID NO: 155660 - DNA, 13 bp, Artificial Sequence
  Oligonucleotide for detection of SNP TSC0039302
ctaccttaacccc

SEQ ID NO: 155661 - DNA, 13 bp, Artificial Sequence
  Oligonucleotide for detection of SNP TSC0039302
ggggtcgaggtag

SEQ ID NO: 155662 - DNA, 13 bp, Artificial Sequence
  Oligonucleotide for detection of SNP TSC0039302
ctacctcgacccc

SEQ ID NO: 155663 - DNA, 13 bp, Artificial Sequence
  Oligonucleotide for detection of SNP TSC0039307
taaaaagtattta

SEQ ID NO: 155664 - DNA, 13 bp, Artificial Sequence
  Oligonucleotide for detection of SNP TSC0039307
taaatacttttta

SEQ ID NO: 155665 - DNA, 13 bp, Artificial Sequence
  Oligonucleotide for detection of SNP TSC0039307
taaaaaatattta

SEQ ID NO: 155666 - DNA, 13 bp, Artificial Sequence
  Oligonucleotide for detection of SNP TSC0039307
taaatatttttta

SEQ ID NO: 155667 - DNA, 13 bp, Artificial Sequence
  Oligonucleotide for detection of SNP TSC0005052
taattaatattga

SEQ ID NO: 155668 - DNA, 13 bp, Artificial Sequence
  Oligonucleotide for detection of SNP TSC0005052
tcaatattaatta

SEQ ID NO: 155669 - DNA, 13 bp, Artificial Sequence
  Oligonucleotide for detection of SNP TSC0005052
taattagtattga

SEQ ID NO: 155670 - DNA, 13 bp, Artificial Sequence
  Oligonucleotide for detection of SNP TSC0005052
tcaatactaatta

SEQ ID NO: 155671 - DNA, 13 bp, Artificial Sequence
  Oligonucleotide for detection of SNP TSC0039309
ttgatggttttta

SEQ ID NO: 155672 - DNA, 13 bp, Artificial Sequence
  Oligonucleotide for detection of SNP TSC0039309
taaaaaccatcaa

SEQ ID NO: 155673 - DNA, 13 bp, Artificial Sequence
  Oligonucleotide for detection of SNP TSC0039309
ttgatgattttta

SEQ ID NO: 155674 - DNA, 13 bp, Artificial Sequence
  Oligonucleotide for detection of SNP TSC0039309
taaaaatcatcaa

SEQ ID NO: 155675 - DNA, 13 bp, Artificial Sequence
  Oligonucleotide for detection of SNP TSC0039313
ggttagtaatgta

SEQ ID NO: 155676 - DNA, 13 bp, Artificial Sequence
  Oligonucleotide for detection of SNP TSC0039313
tacattactaacc

SEQ ID NO: 155677 - DNA, 13 bp, Artificial Sequence
  Oligonucleotide for detection of SNP TSC0039313
ggttaggaatgta

SEQ ID NO: 155678 - DNA, 13 bp, Artificial Sequence
  Oligonucleotide for detection of SNP TSC0039313
tacattcctaacc

SEQ ID NO: 155679 - DNA, 13 bp, Artificial Sequence
  Oligonucleotide for detection of SNP TSC0039313
tgtattgttagty

SEQ ID NO: 155680 - DNA, 13 bp, Artificial Sequence
  Oligonucleotide for detection of SNP TSC0039313
ractaacaataca

SEQ ID NO: 155681 - DNA, 13 bp, Artificial Sequence
  Oligonucleotide for detection of SNP TSC0039313
tgtatttttagty

SEQ ID NO: 155682 - DNA, 13 bp, Artificial Sequence
  Oligonucleotide for detection of SNP TSC0039313
ractaaaaataca

SEQ ID NO: 155683 - DNA, 13 bp, Artificial Sequence
  Oligonucleotide for detection of SNP TSC0039314
tttataataatag

SEQ ID NO: 155684 - DNA, 13 bp, Artificial Sequence
  Oligonucleotide for detection of SNP TSC0039314
ctattattataaa

SEQ ID NO: 155685 - DNA, 13 bp, Artificial Sequence
  Oligonucleotide for detection of SNP TSC0039314
tttatattaatag

SEQ ID NO: 155686 - DNA, 13 bp, Artificial Sequence
  Oligonucleotide for detection of SNP TSC0039314
ctattaatataaa

SEQ ID NO: 155687 - DNA, 13 bp, Artificial Sequence
  Oligonucleotide for detection of SNP TSC0039314
ttgttattatgag

SEQ ID NO: 155688 - DNA, 13 bp, Artificial Sequence
  Oligonucleotide for detection of SNP TSC0039314
ctcataataacaa

SEQ ID NO: 155689 - DNA, 13 bp, Artificial Sequence
  Oligonucleotide for detection of SNP TSC0039314
ttgttagtatgag

SEQ ID NO: 155690 - DNA, 13 bp, Artificial Sequence
  Oligonucleotide for detection of SNP TSC0039314
ctcatactaacaa

SEQ ID NO: 155691 - DNA, 13 bp, Artificial Sequence
  Oligonucleotide for detection of SNP TSC0039315
aggtgtattttay

SEQ ID NO: 155692 - DNA, 13 bp, Artificial Sequence
  Oligonucleotide for detection of SNP TSC0039315
rtaaaatacacct

SEQ ID NO: 155693 - DNA, 13 bp, Artificial Sequence
  Oligonucleotide for detection of SNP TSC0039315
aggtgtgttttay

SEQ ID NO: 155694 - DNA, 13 bp, Artificial Sequence
  Oligonucleotide for detection of SNP TSC0039315
rtaaaacacacct

SEQ ID NO: 155695 - DNA, 13 bp, Artificial Sequence
  Oligonucleotide for detection of SNP TSC0039316
atttatatttatg

SEQ ID NO: 155696 - DNA, 13 bp, Artificial Sequence
  Oligonucleotide for detection of SNP TSC0039316
cataaatataaat

SEQ ID NO: 155697 - DNA, 13 bp, Artificial Sequence
  Oligonucleotide for detection of SNP TSC0039316
atttatgtttatg

SEQ ID NO: 155698 - DNA, 13 bp, Artificial Sequence
  Oligonucleotide for detection of SNP TSC0039316
cataaacataaat

SEQ ID NO: 155699 - DNA, 13 bp, Artificial Sequence
  Oligonucleotide for detection of SNP TSC0039316
atttacgtttatg

SEQ ID NO: 155700 - DNA, 13 bp, Artificial Sequence
  Oligonucleotide for detection of SNP TSC0039316
cataaacgtaaat

SEQ ID NO: 155701 - DNA, 13 bp, Artificial Sequence
  Oligonucleotide for detection of SNP TSC0039316
tataggtgtgagt

SEQ ID NO: 155702 - DNA, 13 bp, Artificial Sequence
  Oligonucleotide for detection of SNP TSC0039316
actcacacctata

SEQ ID NO: 155703 - DNA, 13 bp, Artificial Sequence
  Oligonucleotide for detection of SNP TSC0039316
tataggcgtgagt

SEQ ID NO: 155704 - DNA, 13 bp, Artificial Sequence
  Oligonucleotide for detection of SNP TSC0039316
actcacgcctata

SEQ ID NO: 155705 - DNA, 13 bp, Artificial Sequence
  Oligonucleotide for detection of SNP TSC0039318
ttttttatatgty

SEQ ID NO: 155706 - DNA, 13 bp, Artificial Sequence
  Oligonucleotide for detection of SNP TSC0039318
racatataaaaaa

SEQ ID NO: 155707 - DNA, 13 bp, Artificial Sequence
  Oligonucleotide for detection of SNP TSC0039318
tttttcgtatgty

SEQ ID NO: 155708 - DNA, 13 bp, Artificial Sequence
  Oligonucleotide for detection of SNP TSC0039318
racatacgaaaaa

SEQ ID NO: 155709 - DNA, 13 bp, Artificial Sequence
  Oligonucleotide for detection of SNP TSC0039318
gatatgtgaagag

SEQ ID NO: 155710 - DNA, 13 bp, Artificial Sequence
  Oligonucleotide for detection of SNP TSC0039318
ctcttcacatatc

SEQ ID NO: 155711 - DNA, 13 bp, Artificial Sequence
  Oligonucleotide for detection of SNP TSC0039318
gatatgcgaagag

SEQ ID NO: 155712 - DNA, 13 bp, Artificial Sequence
  Oligonucleotide for detection of SNP TSC0039318
ctcttcgcatatc

SEQ ID NO: 155713 - DNA, 13 bp, Artificial Sequence
  Oligonucleotide for detection of SNP TSC0039319
tttttagtgtagg

SEQ ID NO: 155714 - DNA, 13 bp, Artificial Sequence
  Oligonucleotide for detection of SNP TSC0039319
cctacactaaaaa

SEQ ID NO: 155715 - DNA, 13 bp, Artificial Sequence
  Oligonucleotide for detection of SNP TSC0039319
tttttaatgtagg

SEQ ID NO: 155716 - DNA, 13 bp, Artificial Sequence
  Oligonucleotide for detection of SNP TSC0039319
cctacattaaaaa

SEQ ID NO: 155717 - DNA, 13 bp, Artificial Sequence
  Oligonucleotide for detection of SNP TSC0039321
taagttagtttag

SEQ ID NO: 155718 - DNA, 13 bp, Artificial Sequence
  Oligonucleotide for detection of SNP TSC0039321
ctaaactaactta

SEQ ID NO: 155719 - DNA, 13 bp, Artificial Sequence
  Oligonucleotide for detection of SNP TSC0039321
taagttggtttag

SEQ ID NO: 155720 - DNA, 13 bp, Artificial Sequence
  Oligonucleotide for detection of SNP TSC0039321
ctaaaccaactta

SEQ ID NO: 155721 - DNA, 13 bp, Artificial Sequence
  Oligonucleotide for detection of SNP TSC0039321
taagtcggtttag

SEQ ID NO: 155722 - DNA, 13 bp, Artificial Sequence
  Oligonucleotide for detection of SNP TSC0039321
ctaaaccgactta

SEQ ID NO: 155723 - DNA, 13 bp, Artificial Sequence
  Oligonucleotide for detection of SNP TSC0039321
ttgggttgattta

SEQ ID NO: 155724 - DNA, 13 bp, Artificial Sequence
  Oligonucleotide for detection of SNP TSC0039321
taaatcaacccaa

SEQ ID NO: 155725 - DNA, 13 bp, Artificial Sequence
  Oligonucleotide for detection of SNP TSC0039321
ttgggtcgattta

SEQ ID NO: 155726 - DNA, 13 bp, Artificial Sequence
  Oligonucleotide for detection of SNP TSC0039321
taaatcgacccaa

SEQ ID NO: 155727 - DNA, 13 bp, Artificial Sequence
  Oligonucleotide for detection of SNP TSC0039322
aagatagatgtgg

SEQ ID NO: 155728 - DNA, 13 bp, Artificial Sequence
  Oligonucleotide for detection of SNP TSC0039322
ccacatctatctt

SEQ ID NO: 155729 - DNA, 13 bp, Artificial Sequence
  Oligonucleotide for detection of SNP TSC0039322
aagatatatgtgg

SEQ ID NO: 155730 - DNA, 13 bp, Artificial Sequence
  Oligonucleotide for detection of SNP TSC0039322
ccacatatatctt

SEQ ID NO: 155731 - DNA, 13 bp, Artificial Sequence
  Oligonucleotide for detection of SNP TSC0039323
agttttatggtty

SEQ ID NO: 155732 - DNA, 13 bp, Artificial Sequence
  Oligonucleotide for detection of SNP TSC0039323
raaccataaaact

SEQ ID NO: 155733 - DNA, 13 bp, Artificial Sequence
  Oligonucleotide for detection of SNP TSC0039323
agttttttggtty

SEQ ID NO: 155734 - DNA, 13 bp, Artificial Sequence
  Oligonucleotide for detection of SNP TSC0039323
raaccaaaaaact

SEQ ID NO: 155735 - DNA, 13 bp, Artificial Sequence
  Oligonucleotide for detection of SNP TSC0039323
gagttatggaatt

SEQ ID NO: 155736 - DNA, 13 bp, Artificial Sequence
  Oligonucleotide for detection of SNP TSC0039323
aattccataactc

SEQ ID NO: 155737 - DNA, 13 bp, Artificial Sequence
  Oligonucleotide for detection of SNP TSC0039323
gagttaaggaatt

SEQ ID NO: 155738 - DNA, 13 bp, Artificial Sequence
  Oligonucleotide for detection of SNP TSC0039323
aattccttaactc

SEQ ID NO: 155739 - DNA, 13 bp, Artificial Sequence
  Oligonucleotide for detection of SNP TSC0039325
aattatataagga

SEQ ID NO: 155740 - DNA, 13 bp, Artificial Sequence
  Oligonucleotide for detection of SNP TSC0039325
tccttatataatt

SEQ ID NO: 155741 - DNA, 13 bp, Artificial Sequence
  Oligonucleotide for detection of SNP TSC0039325
aattatgtaagga

SEQ ID NO: 155742 - DNA, 13 bp, Artificial Sequence
  Oligonucleotide for detection of SNP TSC0039325
tccttacataatt

SEQ ID NO: 155743 - DNA, 13 bp, Artificial Sequence
  Oligonucleotide for detection of SNP TSC0039325
aattacgtaagga

SEQ ID NO: 155744 - DNA, 13 bp, Artificial Sequence
  Oligonucleotide for detection of SNP TSC0039325
tccttacgtaatt

SEQ ID NO: 155745 - DNA, 13 bp, Artificial Sequence
  Oligonucleotide for detection of SNP TSC0039325
tttttgtgtaatt

SEQ ID NO: 155746 - DNA, 13 bp, Artificial Sequence
  Oligonucleotide for detection of SNP TSC0039325
aattacacaaaaa

SEQ ID NO: 155747 - DNA, 13 bp, Artificial Sequence
  Oligonucleotide for detection of SNP TSC0039325
tttttgcgtaatt

SEQ ID NO: 155748 - DNA, 13 bp, Artificial Sequence
  Oligonucleotide for detection of SNP TSC0039325
aattacgcaaaaa

SEQ ID NO: 155749 - DNA, 13 bp, Artificial Sequence
  Oligonucleotide for detection of SNP TSC0039326
ttattggagtgaa

SEQ ID NO: 155750 - DNA, 13 bp, Artificial Sequence
  Oligonucleotide for detection of SNP TSC0039326
ttcactccaataa

SEQ ID NO: 155751 - DNA, 13 bp, Artificial Sequence
  Oligonucleotide for detection of SNP TSC0039326
ttattgaagtgaa

SEQ ID NO: 155752 - DNA, 13 bp, Artificial Sequence
  Oligonucleotide for detection of SNP TSC0039326
ttcacttcaataa

SEQ ID NO: 155753 - DNA, 13 bp, Artificial Sequence
  Oligonucleotide for detection of SNP TSC0039327
tttataaatataa

SEQ ID NO: 155754 - DNA, 13 bp, Artificial Sequence
  Oligonucleotide for detection of SNP TSC0039327
ttatatttataaa

SEQ ID NO: 155755 - DNA, 13 bp, Artificial Sequence
  Oligonucleotide for detection of SNP TSC0039327
tttatagatataa

SEQ ID NO: 155756 - DNA, 13 bp, Artificial Sequence
  Oligonucleotide for detection of SNP TSC0039327
ttatatctataaa

SEQ ID NO: 155757 - DNA, 13 bp, Artificial Sequence
  Oligonucleotide for detection of SNP TSC0039328
agggatgatttat

SEQ ID NO: 155758 - DNA, 13 bp, Artificial Sequence
  Oligonucleotide for detection of SNP TSC0039328
ataaatcatccct

SEQ ID NO: 155759 - DNA, 13 bp, Artificial Sequence
  Oligonucleotide for detection of SNP TSC0039328
agggataatttat

SEQ ID NO: 155760 - DNA, 13 bp, Artificial Sequence
  Oligonucleotide for detection of SNP TSC0039328
ataaattatccct

SEQ ID NO: 155761 - DNA, 13 bp, Artificial Sequence
  Oligonucleotide for detection of SNP TSC0039330
gatgatggtagtg

SEQ ID NO: 155762 - DNA, 13 bp, Artificial Sequence
  Oligonucleotide for detection of SNP TSC0039330
cactaccatcatc

SEQ ID NO: 155763 - DNA, 13 bp, Artificial Sequence
  Oligonucleotide for detection of SNP TSC0039330
gatgatagtagtg

SEQ ID NO: 155764 - DNA, 13 bp, Artificial Sequence
  Oligonucleotide for detection of SNP TSC0039330
cactactatcatc

SEQ ID NO: 155765 - DNA, 13 bp, Artificial Sequence
  Oligonucleotide for detection of SNP TSC0039330
gatgacggtagtg

SEQ ID NO: 155766 - DNA, 13 bp, Artificial Sequence
  Oligonucleotide for detection of SNP TSC0039330
cactaccgtcatc

SEQ ID NO: 155767 - DNA, 13 bp, Artificial Sequence
  Oligonucleotide for detection of SNP TSC0007431
taagggatgggta

SEQ ID NO: 155768 - DNA, 13 bp, Artificial Sequence
  Oligonucleotide for detection of SNP TSC0007431
tacccatccctta

SEQ ID NO: 155769 - DNA, 13 bp, Artificial Sequence
  Oligonucleotide for detection of SNP TSC0007431
taagggttgggta

SEQ ID NO: 155770 - DNA, 13 bp, Artificial Sequence
  Oligonucleotide for detection of SNP TSC0007431
tacccaaccctta

SEQ ID NO: 155771 - DNA, 13 bp, Artificial Sequence
  Oligonucleotide for detection of SNP TSC0039332
tttaaatgaagag

SEQ ID NO: 155772 - DNA, 13 bp, Artificial Sequence
  Oligonucleotide for detection of SNP TSC0039332
ctcttcatttaaa

SEQ ID NO: 155773 - DNA, 13 bp, Artificial Sequence
  Oligonucleotide for detection of SNP TSC0039332
tttaaaagaagag

SEQ ID NO: 155774 - DNA, 13 bp, Artificial Sequence
  Oligonucleotide for detection of SNP TSC0039332
ctcttcttttaaa

SEQ ID NO: 155775 - DNA, 13 bp, Artificial Sequence
  Oligonucleotide for detection of SNP TSC0039333
ttaagtttatata

SEQ ID NO: 155776 - DNA, 13 bp, Artificial Sequence
  Oligonucleotide for detection of SNP TSC0039333
tatataaacttaa

SEQ ID NO: 155777 - DNA, 13 bp, Artificial Sequence
  Oligonucleotide for detection of SNP TSC0039333
tatgtagatttga

SEQ ID NO: 155778 - DNA, 13 bp, Artificial Sequence
  Oligonucleotide for detection of SNP TSC0039333
tcaaatctacata

SEQ ID NO: 155779 - DNA, 13 bp, Artificial Sequence
  Oligonucleotide for detection of SNP TSC0039333
tatgtatatttga

SEQ ID NO: 155780 - DNA, 13 bp, Artificial Sequence
  Oligonucleotide for detection of SNP TSC0039333
tcaaatatacata

SEQ ID NO: 155781 - DNA, 13 bp, Artificial Sequence
  Oligonucleotide for detection of SNP TSC0039334
aaaaaaaaggttt

SEQ ID NO: 155782 - DNA, 13 bp, Artificial Sequence
  Oligonucleotide for detection of SNP TSC0039334
aaacctttttttt

SEQ ID NO: 155783 - DNA, 13 bp, Artificial Sequence
  Oligonucleotide for detection of SNP TSC0039334
aaaaaagaggttt

SEQ ID NO: 155784 - DNA, 13 bp, Artificial Sequence
  Oligonucleotide for detection of SNP TSC0039334
aaacctctttttt

SEQ ID NO: 155785 - DNA, 13 bp, Artificial Sequence
  Oligonucleotide for detection of SNP TSC0039335
tatatgtttggga

SEQ ID NO: 155786 - DNA, 13 bp, Artificial Sequence
  Oligonucleotide for detection of SNP TSC0039335
tcccaaacatata

SEQ ID NO: 155787 - DNA, 13 bp, Artificial Sequence
  Oligonucleotide for detection of SNP TSC0039335
tatatggttggga

SEQ ID NO: 155788 - DNA, 13 bp, Artificial Sequence
  Oligonucleotide for detection of SNP TSC0039335
tcccaaccatata

SEQ ID NO: 155789 - DNA, 13 bp, Artificial Sequence
  Oligonucleotide for detection of SNP TSC0039335
ttttaggtatgtg

SEQ ID NO: 155790 - DNA, 13 bp, Artificial Sequence
  Oligonucleotide for detection of SNP TSC0039335
cacatacctaaaa

SEQ ID NO: 155791 - DNA, 13 bp, Artificial Sequence
  Oligonucleotide for detection of SNP TSC0039335
ttttagttatgtg

SEQ ID NO: 155792 - DNA, 13 bp, Artificial Sequence
  Oligonucleotide for detection of SNP TSC0039335
cacataactaaaa

SEQ ID NO: 155793 - DNA, 13 bp, Artificial Sequence
  Oligonucleotide for detection of SNP TSC0039336
tttgttgagtata

SEQ ID NO: 155794 - DNA, 13 bp, Artificial Sequence
  Oligonucleotide for detection of SNP TSC0039336
tatactcaacaaa

SEQ ID NO: 155795 - DNA, 13 bp, Artificial Sequence
  Oligonucleotide for detection of SNP TSC0039336
tttgttaagtata

SEQ ID NO: 155796 - DNA, 13 bp, Artificial Sequence
  Oligonucleotide for detection of SNP TSC0039336
tatacttaacaaa

SEQ ID NO: 155797 - DNA, 13 bp, Artificial Sequence
  Oligonucleotide for detection of SNP TSC0039338
atggggtttagag

SEQ ID NO: 155798 - DNA, 13 bp, Artificial Sequence
  Oligonucleotide for detection of SNP TSC0039338
ctctaaaccccat

SEQ ID NO: 155799 - DNA, 13 bp, Artificial Sequence
  Oligonucleotide for detection of SNP TSC0039338
atgggggttagag

SEQ ID NO: 155800 - DNA, 13 bp, Artificial Sequence
  Oligonucleotide for detection of SNP TSC0039338
ctctaacccccat

SEQ ID NO: 155801 - DNA, 13 bp, Artificial Sequence
  Oligonucleotide for detection of SNP TSC0039338
acggggtttagag

SEQ ID NO: 155802 - DNA, 13 bp, Artificial Sequence
  Oligonucleotide for detection of SNP TSC0039338
ctctaaaccccgt

SEQ ID NO: 155803 - DNA, 13 bp, Artificial Sequence
  Oligonucleotide for detection of SNP TSC0039338
acgggggttagag

SEQ ID NO: 155804 - DNA, 13 bp, Artificial Sequence
  Oligonucleotide for detection of SNP TSC0039338
ctctaacccccgt

SEQ ID NO: 155805 - DNA, 13 bp, Artificial Sequence
  Oligonucleotide for detection of SNP TSC0039338
ttttaggttttgt

SEQ ID NO: 155806 - DNA, 13 bp, Artificial Sequence
  Oligonucleotide for detection of SNP TSC0039338
acaaaacctaaaa

SEQ ID NO: 155807 - DNA, 13 bp, Artificial Sequence
  Oligonucleotide for detection of SNP TSC0039338
ttttagtttttgt

SEQ ID NO: 155808 - DNA, 13 bp, Artificial Sequence
  Oligonucleotide for detection of SNP TSC0039338
acaaaaactaaaa

SEQ ID NO: 155809 - DNA, 13 bp, Artificial Sequence
  Oligonucleotide for detection of SNP TSC0039338
ttttaggtttcgt

SEQ ID NO: 155810 - DNA, 13 bp, Artificial Sequence
  Oligonucleotide for detection of SNP TSC0039338
acgaaacctaaaa

SEQ ID NO: 155811 - DNA, 13 bp, Artificial Sequence
  Oligonucleotide for detection of SNP TSC0039338
ttttagttttcgt

SEQ ID NO: 155812 - DNA, 13 bp, Artificial Sequence
  Oligonucleotide for detection of SNP TSC0039338
acgaaaactaaaa

SEQ ID NO: 155813 - DNA, 13 bp, Artificial Sequence
  Oligonucleotide for detection of SNP TSC0039339
ggggtgttagtgg

SEQ ID NO: 155814 - DNA, 13 bp, Artificial Sequence
  Oligonucleotide for detection of SNP TSC0039339
ccactaacacccc

SEQ ID NO: 155815 - DNA, 13 bp, Artificial Sequence
  Oligonucleotide for detection of SNP TSC0039339
ggggtggtagtgg

SEQ ID NO: 155816 - DNA, 13 bp, Artificial Sequence
  Oligonucleotide for detection of SNP TSC0039339
ccactaccacccc

SEQ ID NO: 155817 - DNA, 13 bp, Artificial Sequence
  Oligonucleotide for detection of SNP TSC0039339
ttattgatattty

SEQ ID NO: 155818 - DNA, 13 bp, Artificial Sequence
  Oligonucleotide for detection of SNP TSC0039339
raaatatcaataa

SEQ ID NO: 155819 - DNA, 13 bp, Artificial Sequence
  Oligonucleotide for detection of SNP TSC0039339
ttattgttattty

SEQ ID NO: 155820 - DNA, 13 bp, Artificial Sequence
  Oligonucleotide for detection of SNP TSC0039339
raaataacaataa

SEQ ID NO: 155821 - DNA, 13 bp, Artificial Sequence
  Oligonucleotide for detection of SNP TSC0039340
agatttagaaggt

SEQ ID NO: 155822 - DNA, 13 bp, Artificial Sequence
  Oligonucleotide for detection of SNP TSC0039340
accttctaaatct

SEQ ID NO: 155823 - DNA, 13 bp, Artificial Sequence
  Oligonucleotide for detection of SNP TSC0039340
agattttgaaggt

SEQ ID NO: 155824 - DNA, 13 bp, Artificial Sequence
  Oligonucleotide for detection of SNP TSC0039340
accttcaaaatct

SEQ ID NO: 155825 - DNA, 13 bp, Artificial Sequence
  Oligonucleotide for detection of SNP TSC0039340
agatttcgaaggt

SEQ ID NO: 155826 - DNA, 13 bp, Artificial Sequence
  Oligonucleotide for detection of SNP TSC0039340
accttcgaaatct

SEQ ID NO: 155827 - DNA, 13 bp, Artificial Sequence
  Oligonucleotide for detection of SNP TSC0039340
attttttaagttt

SEQ ID NO: 155828 - DNA, 13 bp, Artificial Sequence
  Oligonucleotide for detection of SNP TSC0039340
aaacttaaaaaat

SEQ ID NO: 155829 - DNA, 13 bp, Artificial Sequence
  Oligonucleotide for detection of SNP TSC0039340
atttttgaagttt

SEQ ID NO: 155830 - DNA, 13 bp, Artificial Sequence
  Oligonucleotide for detection of SNP TSC0039340
aaacttcaaaaat

SEQ ID NO: 155831 - DNA, 13 bp, Artificial Sequence
  Oligonucleotide for detection of SNP TSC0039340
attttcgaagttt

SEQ ID NO: 155832 - DNA, 13 bp, Artificial Sequence
  Oligonucleotide for detection of SNP TSC0039340
aaacttcgaaaat

SEQ ID NO: 155833 - DNA, 13 bp, Artificial Sequence
  Oligonucleotide for detection of SNP TSC0039341
atttatatagggy

SEQ ID NO: 155834 - DNA, 13 bp, Artificial Sequence
  Oligonucleotide for detection of SNP TSC0039341
rccctatataaat

SEQ ID NO: 155835 - DNA, 13 bp, Artificial Sequence
  Oligonucleotide for detection of SNP TSC0039341
atttatttagggy

SEQ ID NO: 155836 - DNA, 13 bp, Artificial Sequence
  Oligonucleotide for detection of SNP TSC0039341
rccctaaataaat

SEQ ID NO: 155837 - DNA, 13 bp, Artificial Sequence
  Oligonucleotide for detection of SNP TSC0039341
gttttatgtaaat

SEQ ID NO: 155838 - DNA, 13 bp, Artificial Sequence
  Oligonucleotide for detection of SNP TSC0039341
atttacataaaac

SEQ ID NO: 155839 - DNA, 13 bp, Artificial Sequence
  Oligonucleotide for detection of SNP TSC0039341
gttttaggtaaat

SEQ ID NO: 155840 - DNA, 13 bp, Artificial Sequence
  Oligonucleotide for detection of SNP TSC0039341
atttacctaaaac

SEQ ID NO: 155841 - DNA, 13 bp, Artificial Sequence
  Oligonucleotide for detection of SNP TSC0039342
aaatgtaagtaaa

SEQ ID NO: 155842 - DNA, 13 bp, Artificial Sequence
  Oligonucleotide for detection of SNP TSC0039342
tttacttacattt

SEQ ID NO: 155843 - DNA, 13 bp, Artificial Sequence
  Oligonucleotide for detection of SNP TSC0039342
aaatgtgagtaaa

SEQ ID NO: 155844 - DNA, 13 bp, Artificial Sequence
  Oligonucleotide for detection of SNP TSC0039342
tttactcacattt

SEQ ID NO: 155845 - DNA, 13 bp, Artificial Sequence
  Oligonucleotide for detection of SNP TSC0039342
aaatgcgagtaaa

SEQ ID NO: 155846 - DNA, 13 bp, Artificial Sequence
  Oligonucleotide for detection of SNP TSC0039342
tttactcgcattt

SEQ ID NO: 155847 - DNA, 13 bp, Artificial Sequence
  Oligonucleotide for detection of SNP TSC0039343
gggtaaagtatay

SEQ ID NO: 155848 - DNA, 13 bp, Artificial Sequence
  Oligonucleotide for detection of SNP TSC0039343
rtatactttaccc

SEQ ID NO: 155849 - DNA, 13 bp, Artificial Sequence
  Oligonucleotide for detection of SNP TSC0039343
gggtaaggtatay

SEQ ID NO: 155850 - DNA, 13 bp, Artificial Sequence
  Oligonucleotide for detection of SNP TSC0039343
rtataccttaccc

SEQ ID NO: 155851 - DNA, 13 bp, Artificial Sequence
  Oligonucleotide for detection of SNP TSC0039345
ttaggagtgaaaa

SEQ ID NO: 155852 - DNA, 13 bp, Artificial Sequence
  Oligonucleotide for detection of SNP TSC0039345
ttttcactcctaa

SEQ ID NO: 155853 - DNA, 13 bp, Artificial Sequence
  Oligonucleotide for detection of SNP TSC0039345
ttaggaatgaaaa

SEQ ID NO: 155854 - DNA, 13 bp, Artificial Sequence
  Oligonucleotide for detection of SNP TSC0039345
ttttcattcctaa

SEQ ID NO: 155855 - DNA, 13 bp, Artificial Sequence
  Oligonucleotide for detection of SNP TSC0039346
gataatggggagt

SEQ ID NO: 155856 - DNA, 13 bp, Artificial Sequence
  Oligonucleotide for detection of SNP TSC0039346
actccccattatc

SEQ ID NO: 155857 - DNA, 13 bp, Artificial Sequence
  Oligonucleotide for detection of SNP TSC0039346
gataatagggagt

SEQ ID NO: 155858 - DNA, 13 bp, Artificial Sequence
  Oligonucleotide for detection of SNP TSC0039346
actccctattatc

SEQ ID NO: 155859 - DNA, 13 bp, Artificial Sequence
  Oligonucleotide for detection of SNP TSC0039347
atttttgaaatta

SEQ ID NO: 155860 - DNA, 13 bp, Artificial Sequence
  Oligonucleotide for detection of SNP TSC0039347
taatttcaaaaat

SEQ ID NO: 155861 - DNA, 13 bp, Artificial Sequence
  Oligonucleotide for detection of SNP TSC0039347
attttcgaaatta

SEQ ID NO: 155862 - DNA, 13 bp, Artificial Sequence
  Oligonucleotide for detection of SNP TSC0039347
taatttcgaaaat

SEQ ID NO: 155863 - DNA, 13 bp, Artificial Sequence
  Oligonucleotide for detection of SNP TSC0039347
tgattttgggaat

SEQ ID NO: 155864 - DNA, 13 bp, Artificial Sequence
  Oligonucleotide for detection of SNP TSC0039347
attcccaaaatca

SEQ ID NO: 155865 - DNA, 13 bp, Artificial Sequence
  Oligonucleotide for detection of SNP TSC0039347
tgatttcgggaat

SEQ ID NO: 155866 - DNA, 13 bp, Artificial Sequence
  Oligonucleotide for detection of SNP TSC0039347
attcccgaaatca

SEQ ID NO: 155867 - DNA, 13 bp, Artificial Sequence
  Oligonucleotide for detection of SNP TSC0039348
atttttattgtaa

SEQ ID NO: 155868 - DNA, 13 bp, Artificial Sequence
  Oligonucleotide for detection of SNP TSC0039348
ttacaataaaaat

SEQ ID NO: 155869 - DNA, 13 bp, Artificial Sequence
  Oligonucleotide for detection of SNP TSC0039348
atttttgttgtaa

SEQ ID NO: 155870 - DNA, 13 bp, Artificial Sequence
  Oligonucleotide for detection of SNP TSC0039348
ttacaacaaaaat

SEQ ID NO: 155871 - DNA, 13 bp, Artificial Sequence
  Oligonucleotide for detection of SNP TSC0039348
attttcgttgtaa

SEQ ID NO: 155872 - DNA, 13 bp, Artificial Sequence
  Oligonucleotide for detection of SNP TSC0039348
ttacaacgaaaat

SEQ ID NO: 155873 - DNA, 13 bp, Artificial Sequence
  Oligonucleotide for detection of SNP TSC0039348
ttgtagtgagaat

SEQ ID NO: 155874 - DNA, 13 bp, Artificial Sequence
  Oligonucleotide for detection of SNP TSC0039348
attctcactacaa

SEQ ID NO: 155875 - DNA, 13 bp, Artificial Sequence
  Oligonucleotide for detection of SNP TSC0039348
ttgtagcgagaat

SEQ ID NO: 155876 - DNA, 13 bp, Artificial Sequence
  Oligonucleotide for detection of SNP TSC0039348
attctcgctacaa

SEQ ID NO: 155877 - DNA, 13 bp, Artificial Sequence
  Oligonucleotide for detection of SNP TSC0001355
ggttaggaaaagy

SEQ ID NO: 155878 - DNA, 13 bp, Artificial Sequence
  Oligonucleotide for detection of SNP TSC0001355
rcttttcctaacc

SEQ ID NO: 155879 - DNA, 13 bp, Artificial Sequence
  Oligonucleotide for detection of SNP TSC0001356
tgagttaattaaa

SEQ ID NO: 155880 - DNA, 13 bp, Artificial Sequence
  Oligonucleotide for detection of SNP TSC0001356
tttaattaactca

SEQ ID NO: 155881 - DNA, 13 bp, Artificial Sequence
  Oligonucleotide for detection of SNP TSC0001356
tgagttgattaaa

SEQ ID NO: 155882 - DNA, 13 bp, Artificial Sequence
  Oligonucleotide for detection of SNP TSC0001356
tttaatcaactca

SEQ ID NO: 155883 - DNA, 13 bp, Artificial Sequence
  Oligonucleotide for detection of SNP TSC0001356
tgagtcgattaaa

SEQ ID NO: 155884 - DNA, 13 bp, Artificial Sequence
  Oligonucleotide for detection of SNP TSC0001356
tttaatcgactca

SEQ ID NO: 155885 - DNA, 13 bp, Artificial Sequence
  Oligonucleotide for detection of SNP TSC0001356
tttaattgattta

SEQ ID NO: 155886 - DNA, 13 bp, Artificial Sequence
  Oligonucleotide for detection of SNP TSC0001356
taaatcaattaaa

SEQ ID NO: 155887 - DNA, 13 bp, Artificial Sequence
  Oligonucleotide for detection of SNP TSC0001356
tttaatcgattta

SEQ ID NO: 155888 - DNA, 13 bp, Artificial Sequence
  Oligonucleotide for detection of SNP TSC0001356
taaatcgattaaa

SEQ ID NO: 155889 - DNA, 13 bp, Artificial Sequence
  Oligonucleotide for detection of SNP TSC0039349
attggaagagtgt

SEQ ID NO: 155890 - DNA, 13 bp, Artificial Sequence
  Oligonucleotide for detection of SNP TSC0039349
acactcttccaat

SEQ ID NO: 155891 - DNA, 13 bp, Artificial Sequence
  Oligonucleotide for detection of SNP TSC0039349
attggatgagtgt

SEQ ID NO: 155892 - DNA, 13 bp, Artificial Sequence
  Oligonucleotide for detection of SNP TSC0039349
acactcatccaat

SEQ ID NO: 155893 - DNA, 13 bp, Artificial Sequence
  Oligonucleotide for detection of SNP TSC0039349
atatttttttaat

SEQ ID NO: 155894 - DNA, 13 bp, Artificial Sequence
  Oligonucleotide for detection of SNP TSC0039349
attaaaaaaatat

SEQ ID NO: 155895 - DNA, 13 bp, Artificial Sequence
  Oligonucleotide for detection of SNP TSC0039349
atatttatttaat

SEQ ID NO: 155896 - DNA, 13 bp, Artificial Sequence
  Oligonucleotide for detection of SNP TSC0039349
attaaataaatat

SEQ ID NO: 155897 - DNA, 13 bp, Artificial Sequence
  Oligonucleotide for detection of SNP TSC0005708
tttttggatttgg

SEQ ID NO: 155898 - DNA, 13 bp, Artificial Sequence
  Oligonucleotide for detection of SNP TSC0005708
ccaaatccaaaaa

SEQ ID NO: 155899 - DNA, 13 bp, Artificial Sequence
  Oligonucleotide for detection of SNP TSC0039351
ggagtttgtttga

SEQ ID NO: 155900 - DNA, 13 bp, Artificial Sequence
  Oligonucleotide for detection of SNP TSC0039351
tcaaacaaactcc

SEQ ID NO: 155901 - DNA, 13 bp, Artificial Sequence
  Oligonucleotide for detection of SNP TSC0039351
ggagttcgtttga

SEQ ID NO: 155902 - DNA, 13 bp, Artificial Sequence
  Oligonucleotide for detection of SNP TSC0039351
tcaaacgaactcc

SEQ ID NO: 155903 - DNA, 13 bp, Artificial Sequence
  Oligonucleotide for detection of SNP TSC0039351
ttaggtggattty

SEQ ID NO: 155904 - DNA, 13 bp, Artificial Sequence
  Oligonucleotide for detection of SNP TSC0039351
raaatccacctaa

SEQ ID NO: 155905 - DNA, 13 bp, Artificial Sequence
  Oligonucleotide for detection of SNP TSC0039351
ttaggtagattty

SEQ ID NO: 155906 - DNA, 13 bp, Artificial Sequence
  Oligonucleotide for detection of SNP TSC0039351
raaatctacctaa

SEQ ID NO: 155907 - DNA, 13 bp, Artificial Sequence
  Oligonucleotide for detection of SNP TSC0039351
ttaggcggattty

SEQ ID NO: 155908 - DNA, 13 bp, Artificial Sequence
  Oligonucleotide for detection of SNP TSC0039351
raaatccgcctaa

SEQ ID NO: 155909 - DNA, 13 bp, Artificial Sequence
  Oligonucleotide for detection of SNP TSC0039352
gggattatgatty

SEQ ID NO: 155910 - DNA, 13 bp, Artificial Sequence
  Oligonucleotide for detection of SNP TSC0039352
raatcataatccc

SEQ ID NO: 155911 - DNA, 13 bp, Artificial Sequence
  Oligonucleotide for detection of SNP TSC0039352
gggattgtgatty

SEQ ID NO: 155912 - DNA, 13 bp, Artificial Sequence
  Oligonucleotide for detection of SNP TSC0039352
raatcacaatccc

SEQ ID NO: 155913 - DNA, 13 bp, Artificial Sequence
  Oligonucleotide for detection of SNP TSC0039352
gggatcgtgatty

SEQ ID NO: 155914 - DNA, 13 bp, Artificial Sequence
  Oligonucleotide for detection of SNP TSC0039352
raatcacgatccc

SEQ ID NO: 155915 - DNA, 13 bp, Artificial Sequence
  Oligonucleotide for detection of SNP TSC0039352
gaattatggttty

SEQ ID NO: 155916 - DNA, 13 bp, Artificial Sequence
  Oligonucleotide for detection of SNP TSC0039352
raaaccataattc

SEQ ID NO: 155917 - DNA, 13 bp, Artificial Sequence
  Oligonucleotide for detection of SNP TSC0039352
gaattacggttty

SEQ ID NO: 155918 - DNA, 13 bp, Artificial Sequence
  Oligonucleotide for detection of SNP TSC0039352
raaaccgtaattc

SEQ ID NO: 155919 - DNA, 13 bp, Artificial Sequence
  Oligonucleotide for detection of SNP TSC0039353
gtaatgtattgag

SEQ ID NO: 155920 - DNA, 13 bp, Artificial Sequence
  Oligonucleotide for detection of SNP TSC0039353
ctcaatacattac

SEQ ID NO: 155921 - DNA, 13 bp, Artificial Sequence
  Oligonucleotide for detection of SNP TSC0039353
gtaatggattgag

SEQ ID NO: 155922 - DNA, 13 bp, Artificial Sequence
  Oligonucleotide for detection of SNP TSC0039353
ctcaatccattac

SEQ ID NO: 155923 - DNA, 13 bp, Artificial Sequence
  Oligonucleotide for detection of SNP TSC0039353
tttaatatattay

SEQ ID NO: 155924 - DNA, 13 bp, Artificial Sequence
  Oligonucleotide for detection of SNP TSC0039353
rtaatatattaaa

SEQ ID NO: 155925 - DNA, 13 bp, Artificial Sequence
  Oligonucleotide for detection of SNP TSC0039353
tttaatttattay

SEQ ID NO: 155926 - DNA, 13 bp, Artificial Sequence
  Oligonucleotide for detection of SNP TSC0039353
rtaataaattaaa

SEQ ID NO: 155927 - DNA, 13 bp, Artificial Sequence
  Oligonucleotide for detection of SNP TSC0039354
aggatatgtggga

SEQ ID NO: 155928 - DNA, 13 bp, Artificial Sequence
  Oligonucleotide for detection of SNP TSC0039354
tcccacatatcct

SEQ ID NO: 155929 - DNA, 13 bp, Artificial Sequence
  Oligonucleotide for detection of SNP TSC0039354
aggatacgtggga

SEQ ID NO: 155930 - DNA, 13 bp, Artificial Sequence
  Oligonucleotide for detection of SNP TSC0039354
tcccacgtatcct

SEQ ID NO: 155931 - DNA, 13 bp, Artificial Sequence
  Oligonucleotide for detection of SNP TSC0039357
agtaagagataay

SEQ ID NO: 155932 - DNA, 13 bp, Artificial Sequence
  Oligonucleotide for detection of SNP TSC0039357
rttatctcttact

SEQ ID NO: 155933 - DNA, 13 bp, Artificial Sequence
  Oligonucleotide for detection of SNP TSC0039357
agtaagggataay

SEQ ID NO: 155934 - DNA, 13 bp, Artificial Sequence
  Oligonucleotide for detection of SNP TSC0039357
rttatcccttact

SEQ ID NO: 155935 - DNA, 13 bp, Artificial Sequence
  Oligonucleotide for detection of SNP TSC0039358
tagtttattttcg

SEQ ID NO: 155936 - DNA, 13 bp, Artificial Sequence
  Oligonucleotide for detection of SNP TSC0039358
cgaaaataaacta

SEQ ID NO: 155937 - DNA, 13 bp, Artificial Sequence
  Oligonucleotide for detection of SNP TSC0039358
tagtttgttttcg

SEQ ID NO: 155938 - DNA, 13 bp, Artificial Sequence
  Oligonucleotide for detection of SNP TSC0039358
cgaaaacaaacta

SEQ ID NO: 155939 - DNA, 13 bp, Artificial Sequence
  Oligonucleotide for detection of SNP TSC0039358
tagttcgttttcg

SEQ ID NO: 155940 - DNA, 13 bp, Artificial Sequence
  Oligonucleotide for detection of SNP TSC0039358
cgaaaacgaacta

SEQ ID NO: 155941 - DNA, 13 bp, Artificial Sequence
  Oligonucleotide for detection of SNP TSC0039358
tgagaatggatta

SEQ ID NO: 155942 - DNA, 13 bp, Artificial Sequence
  Oligonucleotide for detection of SNP TSC0039358
taatccattctca

SEQ ID NO: 155943 - DNA, 13 bp, Artificial Sequence
  Oligonucleotide for detection of SNP TSC0039358
cgagaatggatta

SEQ ID NO: 155944 - DNA, 13 bp, Artificial Sequence
  Oligonucleotide for detection of SNP TSC0039358
taatccattctcg

SEQ ID NO: 155945 - DNA, 13 bp, Artificial Sequence
  Oligonucleotide for detection of SNP TSC0039358
tgagaacggatta

SEQ ID NO: 155946 - DNA, 13 bp, Artificial Sequence
  Oligonucleotide for detection of SNP TSC0039358
taatccgttctca

SEQ ID NO: 155947 - DNA, 13 bp, Artificial Sequence
  Oligonucleotide for detection of SNP TSC0039358
cgagaacggatta

SEQ ID NO: 155948 - DNA, 13 bp, Artificial Sequence
  Oligonucleotide for detection of SNP TSC0039358
taatccgttctcg

SEQ ID NO: 155949 - DNA, 13 bp, Artificial Sequence
  Oligonucleotide for detection of SNP TSC0039360
ataaggataaaty

SEQ ID NO: 155950 - DNA, 13 bp, Artificial Sequence
  Oligonucleotide for detection of SNP TSC0039360
ratttatccttat

SEQ ID NO: 155951 - DNA, 13 bp, Artificial Sequence
  Oligonucleotide for detection of SNP TSC0039360
ataaggttaaaty

SEQ ID NO: 155952 - DNA, 13 bp, Artificial Sequence
  Oligonucleotide for detection of SNP TSC0039360
ratttaaccttat

SEQ ID NO: 155953 - DNA, 13 bp, Artificial Sequence
  Oligonucleotide for detection of SNP TSC0039360
ggtttatttttgt

SEQ ID NO: 155954 - DNA, 13 bp, Artificial Sequence
  Oligonucleotide for detection of SNP TSC0039360
acaaaaataaacc

SEQ ID NO: 155955 - DNA, 13 bp, Artificial Sequence
  Oligonucleotide for detection of SNP TSC0039360
ggtttagttttgt

SEQ ID NO: 155956 - DNA, 13 bp, Artificial Sequence
  Oligonucleotide for detection of SNP TSC0039360
acaaaactaaacc

SEQ ID NO: 155957 - DNA, 13 bp, Artificial Sequence
  Oligonucleotide for detection of SNP TSC0039361
tgatttgtattga

SEQ ID NO: 155958 - DNA, 13 bp, Artificial Sequence
  Oligonucleotide for detection of SNP TSC0039361
tcaatacaaatca

SEQ ID NO: 155959 - DNA, 13 bp, Artificial Sequence
  Oligonucleotide for detection of SNP TSC0039361
tgatttatattga

SEQ ID NO: 155960 - DNA, 13 bp, Artificial Sequence
  Oligonucleotide for detection of SNP TSC0039361
tcaatataaatca

SEQ ID NO: 155961 - DNA, 13 bp, Artificial Sequence
  Oligonucleotide for detection of SNP TSC0039361
tgattcgtattga

SEQ ID NO: 155962 - DNA, 13 bp, Artificial Sequence
  Oligonucleotide for detection of SNP TSC0039361
tcaatacgaatca

SEQ ID NO: 155963 - DNA, 13 bp, Artificial Sequence
  Oligonucleotide for detection of SNP TSC0007085
taggagagtattt

SEQ ID NO: 155964 - DNA, 13 bp, Artificial Sequence
  Oligonucleotide for detection of SNP TSC0007085
aaatactctccta

SEQ ID NO: 155965 - DNA, 13 bp, Artificial Sequence
  Oligonucleotide for detection of SNP TSC0007085
taggagggtattt

SEQ ID NO: 155966 - DNA, 13 bp, Artificial Sequence
  Oligonucleotide for detection of SNP TSC0007085
aaataccctccta

SEQ ID NO: 155967 - DNA, 13 bp, Artificial Sequence
  Oligonucleotide for detection of SNP TSC0039362
attttaaagttta

SEQ ID NO: 155968 - DNA, 13 bp, Artificial Sequence
  Oligonucleotide for detection of SNP TSC0039362
taaactttaaaat

SEQ ID NO: 155969 - DNA, 13 bp, Artificial Sequence
  Oligonucleotide for detection of SNP TSC0039362
attttagagttta

SEQ ID NO: 155970 - DNA, 13 bp, Artificial Sequence
  Oligonucleotide for detection of SNP TSC0039362
taaactctaaaat

SEQ ID NO: 155971 - DNA, 13 bp, Artificial Sequence
  Oligonucleotide for detection of SNP TSC0039363
tttgttaagtatg

SEQ ID NO: 155972 - DNA, 13 bp, Artificial Sequence
  Oligonucleotide for detection of SNP TSC0039363
catacttaacaaa

SEQ ID NO: 155973 - DNA, 13 bp, Artificial Sequence
  Oligonucleotide for detection of SNP TSC0039363
tttgttgagtatg

SEQ ID NO: 155974 - DNA, 13 bp, Artificial Sequence
  Oligonucleotide for detection of SNP TSC0039363
catactcaacaaa

SEQ ID NO: 155975 - DNA, 13 bp, Artificial Sequence
  Oligonucleotide for detection of SNP TSC0039363
tttgttaagtacg

SEQ ID NO: 155976 - DNA, 13 bp, Artificial Sequence
  Oligonucleotide for detection of SNP TSC0039363
cgtacttaacaaa

SEQ ID NO: 155977 - DNA, 13 bp, Artificial Sequence
  Oligonucleotide for detection of SNP TSC0039363
tttgttgagtacg

SEQ ID NO: 155978 - DNA, 13 bp, Artificial Sequence
  Oligonucleotide for detection of SNP TSC0039363
cgtactcaacaaa

SEQ ID NO: 155979 - DNA, 13 bp, Artificial Sequence
  Oligonucleotide for detection of SNP TSC0039364
tatagtattgagt

SEQ ID NO: 155980 - DNA, 13 bp, Artificial Sequence
  Oligonucleotide for detection of SNP TSC0039364
actcaatactata

SEQ ID NO: 155981 - DNA, 13 bp, Artificial Sequence
  Oligonucleotide for detection of SNP TSC0039364
tatagtgttgagt

SEQ ID NO: 155982 - DNA, 13 bp, Artificial Sequence
  Oligonucleotide for detection of SNP TSC0039364
actcaacactata

SEQ ID NO: 155983 - DNA, 13 bp, Artificial Sequence
  Oligonucleotide for detection of SNP TSC0005267
tggtttattgagg

SEQ ID NO: 155984 - DNA, 13 bp, Artificial Sequence
  Oligonucleotide for detection of SNP TSC0005267
cctcaataaacca

SEQ ID NO: 155985 - DNA, 13 bp, Artificial Sequence
  Oligonucleotide for detection of SNP TSC0005267
tggtttgttgagg

SEQ ID NO: 155986 - DNA, 13 bp, Artificial Sequence
  Oligonucleotide for detection of SNP TSC0005267
cctcaacaaacca

SEQ ID NO: 155987 - DNA, 13 bp, Artificial Sequence
  Oligonucleotide for detection of SNP TSC0005267
tggttcgttgagg

SEQ ID NO: 155988 - DNA, 13 bp, Artificial Sequence
  Oligonucleotide for detection of SNP TSC0005267
cctcaacgaacca

SEQ ID NO: 155989 - DNA, 13 bp, Artificial Sequence
  Oligonucleotide for detection of SNP TSC0005267
ttttaatggatta

SEQ ID NO: 155990 - DNA, 13 bp, Artificial Sequence
  Oligonucleotide for detection of SNP TSC0005267
taatccattaaaa

SEQ ID NO: 155991 - DNA, 13 bp, Artificial Sequence
  Oligonucleotide for detection of SNP TSC0005267
ttttaacggatta

SEQ ID NO: 155992 - DNA, 13 bp, Artificial Sequence
  Oligonucleotide for detection of SNP TSC0005267
taatccgttaaaa

SEQ ID NO: 155993 - DNA, 13 bp, Artificial Sequence
  Oligonucleotide for detection of SNP TSC0039365
tttaggatggagt

SEQ ID NO: 155994 - DNA, 13 bp, Artificial Sequence
  Oligonucleotide for detection of SNP TSC0039365
actccatcctaaa

SEQ ID NO: 155995 - DNA, 13 bp, Artificial Sequence
  Oligonucleotide for detection of SNP TSC0039365
tttaggttggagt

SEQ ID NO: 155996 - DNA, 13 bp, Artificial Sequence
  Oligonucleotide for detection of SNP TSC0039365
actccaacctaaa

SEQ ID NO: 155997 - DNA, 13 bp, Artificial Sequence
  Oligonucleotide for detection of SNP TSC0039366
agtgatagagtaa

SEQ ID NO: 155998 - DNA, 13 bp, Artificial Sequence
  Oligonucleotide for detection of SNP TSC0039366
ttactctatcact

SEQ ID NO: 155999 - DNA, 13 bp, Artificial Sequence
  Oligonucleotide for detection of SNP TSC0039366
agtgatggagtaa

SEQ ID NO: 156000 - DNA, 13 bp, Artificial Sequence
  Oligonucleotide for detection of SNP TSC0039366
ttactccatcact

SEQ ID NO: 156001 - DNA, 13 bp, Artificial Sequence
  Oligonucleotide for detection of SNP TSC0039366
agcgatagagtaa

SEQ ID NO: 156002 - DNA, 13 bp, Artificial Sequence
  Oligonucleotide for detection of SNP TSC0039366
ttactctatcgct

SEQ ID NO: 156003 - DNA, 13 bp, Artificial Sequence
  Oligonucleotide for detection of SNP TSC0039366
agcgatggagtaa

SEQ ID NO: 156004 - DNA, 13 bp, Artificial Sequence
  Oligonucleotide for detection of SNP TSC0039366
ttactccatcgct

SEQ ID NO: 156005 - DNA, 13 bp, Artificial Sequence
  Oligonucleotide for detection of SNP TSC0039366
agtgacggagtaa

SEQ ID NO: 156006 - DNA, 13 bp, Artificial Sequence
  Oligonucleotide for detection of SNP TSC0039366
ttactccgtcact

SEQ ID NO: 156007 - DNA, 13 bp, Artificial Sequence
  Oligonucleotide for detection of SNP TSC0039366
agcgacggagtaa

SEQ ID NO: 156008 - DNA, 13 bp, Artificial Sequence
  Oligonucleotide for detection of SNP TSC0039366
ttactccgtcgct

SEQ ID NO: 156009 - DNA, 13 bp, Artificial Sequence
  Oligonucleotide for detection of SNP TSC0039366
ttgttttgttgtt

SEQ ID NO: 156010 - DNA, 13 bp, Artificial Sequence
  Oligonucleotide for detection of SNP TSC0039366
aacaacaaaacaa

SEQ ID NO: 156011 - DNA, 13 bp, Artificial Sequence
  Oligonucleotide for detection of SNP TSC0039366
ttgttttgtcgtt

SEQ ID NO: 156012 - DNA, 13 bp, Artificial Sequence
  Oligonucleotide for detection of SNP TSC0039366
aacgacaaaacaa

SEQ ID NO: 156013 - DNA, 13 bp, Artificial Sequence
  Oligonucleotide for detection of SNP TSC0039366
ttgtttcgttgtt

SEQ ID NO: 156014 - DNA, 13 bp, Artificial Sequence
  Oligonucleotide for detection of SNP TSC0039366
aacaacgaaacaa

SEQ ID NO: 156015 - DNA, 13 bp, Artificial Sequence
  Oligonucleotide for detection of SNP TSC0039366
ttgtttcgtcgtt

SEQ ID NO: 156016 - DNA, 13 bp, Artificial Sequence
  Oligonucleotide for detection of SNP TSC0039366
aacgacgaaacaa

SEQ ID NO: 156017 - DNA, 13 bp, Artificial Sequence
  Oligonucleotide for detection of SNP TSC0039367
atattttttttgy

SEQ ID NO: 156018 - DNA, 13 bp, Artificial Sequence
  Oligonucleotide for detection of SNP TSC0039367
rcaaaaaaaatat

SEQ ID NO: 156019 - DNA, 13 bp, Artificial Sequence
  Oligonucleotide for detection of SNP TSC0039367
gtaaagagagtat

SEQ ID NO: 156020 - DNA, 13 bp, Artificial Sequence
  Oligonucleotide for detection of SNP TSC0039367
atactctctttac

SEQ ID NO: 156021 - DNA, 13 bp, Artificial Sequence
  Oligonucleotide for detection of SNP TSC0039367
gtaaagtgagtat

SEQ ID NO: 156022 - DNA, 13 bp, Artificial Sequence
  Oligonucleotide for detection of SNP TSC0039367
atactcactttac

SEQ ID NO: 156023 - DNA, 13 bp, Artificial Sequence
  Oligonucleotide for detection of SNP TSC0039367
gtaaagcgagtat

SEQ ID NO: 156024 - DNA, 13 bp, Artificial Sequence
  Oligonucleotide for detection of SNP TSC0039367
atactcgctttac

SEQ ID NO: 156025 - DNA, 13 bp, Artificial Sequence
  Oligonucleotide for detection of SNP TSC0039368
attttaatgaata

SEQ ID NO: 156026 - DNA, 13 bp, Artificial Sequence
  Oligonucleotide for detection of SNP TSC0039368
tattcattaaaat

SEQ ID NO: 156027 - DNA, 13 bp, Artificial Sequence
  Oligonucleotide for detection of SNP TSC0039368
attttagtgaata

SEQ ID NO: 156028 - DNA, 13 bp, Artificial Sequence
  Oligonucleotide for detection of SNP TSC0039368
tattcactaaaat

SEQ ID NO: 156029 - DNA, 13 bp, Artificial Sequence
  Oligonucleotide for detection of SNP TSC0039369
gattaaagagtta

SEQ ID NO: 156030 - DNA, 13 bp, Artificial Sequence
  Oligonucleotide for detection of SNP TSC0039369
taactctttaatc

SEQ ID NO: 156031 - DNA, 13 bp, Artificial Sequence
  Oligonucleotide for detection of SNP TSC0039369
gattaaggagtta

SEQ ID NO: 156032 - DNA, 13 bp, Artificial Sequence
  Oligonucleotide for detection of SNP TSC0039369
taactccttaatc

SEQ ID NO: 156033 - DNA, 13 bp, Artificial Sequence
  Oligonucleotide for detection of SNP TSC0039371
tttgagtggtaat

SEQ ID NO: 156034 - DNA, 13 bp, Artificial Sequence
  Oligonucleotide for detection of SNP TSC0039371
attaccactcaaa

SEQ ID NO: 156035 - DNA, 13 bp, Artificial Sequence
  Oligonucleotide for detection of SNP TSC0039371
tttgagcggtaat

SEQ ID NO: 156036 - DNA, 13 bp, Artificial Sequence
  Oligonucleotide for detection of SNP TSC0039371
attaccgctcaaa

SEQ ID NO: 156037 - DNA, 13 bp, Artificial Sequence
  Oligonucleotide for detection of SNP TSC0039371
attgttgtttagg

SEQ ID NO: 156038 - DNA, 13 bp, Artificial Sequence
  Oligonucleotide for detection of SNP TSC0039371
cctaaacaacaat

SEQ ID NO: 156039 - DNA, 13 bp, Artificial Sequence
  Oligonucleotide for detection of SNP TSC0039371
attgtcgtttagg

SEQ ID NO: 156040 - DNA, 13 bp, Artificial Sequence
  Oligonucleotide for detection of SNP TSC0039371
cctaaacgacaat

SEQ ID NO: 156041 - DNA, 13 bp, Artificial Sequence
  Oligonucleotide for detection of SNP TSC0039372
aaggagaatgaga

SEQ ID NO: 156042 - DNA, 13 bp, Artificial Sequence
  Oligonucleotide for detection of SNP TSC0039372
tctcattctcctt

SEQ ID NO: 156043 - DNA, 13 bp, Artificial Sequence
  Oligonucleotide for detection of SNP TSC0039372
aaggagtatgaga

SEQ ID NO: 156044 - DNA, 13 bp, Artificial Sequence
  Oligonucleotide for detection of SNP TSC0039372
tctcatactcctt

SEQ ID NO: 156045 - DNA, 13 bp, Artificial Sequence
  Oligonucleotide for detection of SNP TSC0006829
ttgtttagtttag

SEQ ID NO: 156046 - DNA, 13 bp, Artificial Sequence
  Oligonucleotide for detection of SNP TSC0006829
ctaaactaaacaa

SEQ ID NO: 156047 - DNA, 13 bp, Artificial Sequence
  Oligonucleotide for detection of SNP TSC0006829
ttgtttggtttag

SEQ ID NO: 156048 - DNA, 13 bp, Artificial Sequence
  Oligonucleotide for detection of SNP TSC0006829
ctaaaccaaacaa

SEQ ID NO: 156049 - DNA, 13 bp, Artificial Sequence
  Oligonucleotide for detection of SNP TSC0039373
atgtatataatat

SEQ ID NO: 156050 - DNA, 13 bp, Artificial Sequence
  Oligonucleotide for detection of SNP TSC0039373
atattatatacat

SEQ ID NO: 156051 - DNA, 13 bp, Artificial Sequence
  Oligonucleotide for detection of SNP TSC0039373
atgtatgtaatat

SEQ ID NO: 156052 - DNA, 13 bp, Artificial Sequence
  Oligonucleotide for detection of SNP TSC0039373
atattacatacat

SEQ ID NO: 156053 - DNA, 13 bp, Artificial Sequence
  Oligonucleotide for detection of SNP TSC0039374
ttgttatgttagg

SEQ ID NO: 156054 - DNA, 13 bp, Artificial Sequence
  Oligonucleotide for detection of SNP TSC0039374
cctaacataacaa

SEQ ID NO: 156055 - DNA, 13 bp, Artificial Sequence
  Oligonucleotide for detection of SNP TSC0039374
ttgttacgttagg

SEQ ID NO: 156056 - DNA, 13 bp, Artificial Sequence
  Oligonucleotide for detection of SNP TSC0039374
cctaacgtaacaa

SEQ ID NO: 156057 - DNA, 13 bp, Artificial Sequence
  Oligonucleotide for detection of SNP TSC0039374
tttggtgtggtag

SEQ ID NO: 156058 - DNA, 13 bp, Artificial Sequence
  Oligonucleotide for detection of SNP TSC0039374
ctaccacaccaaa

SEQ ID NO: 156059 - DNA, 13 bp, Artificial Sequence
  Oligonucleotide for detection of SNP TSC0039374
tttggtatggtag

SEQ ID NO: 156060 - DNA, 13 bp, Artificial Sequence
  Oligonucleotide for detection of SNP TSC0039374
ctaccataccaaa

SEQ ID NO: 156061 - DNA, 13 bp, Artificial Sequence
  Oligonucleotide for detection of SNP TSC0039374
tttggcgtggtag

SEQ ID NO: 156062 - DNA, 13 bp, Artificial Sequence
  Oligonucleotide for detection of SNP TSC0039374
ctaccacgccaaa

SEQ ID NO: 156063 - DNA, 13 bp, Artificial Sequence
  Oligonucleotide for detection of SNP TSC0039375
aattatatgagga

SEQ ID NO: 156064 - DNA, 13 bp, Artificial Sequence
  Oligonucleotide for detection of SNP TSC0039375
tcctcatataatt

SEQ ID NO: 156065 - DNA, 13 bp, Artificial Sequence
  Oligonucleotide for detection of SNP TSC0039375
aattatgtgagga

SEQ ID NO: 156066 - DNA, 13 bp, Artificial Sequence
  Oligonucleotide for detection of SNP TSC0039375
tcctcacataatt

SEQ ID NO: 156067 - DNA, 13 bp, Artificial Sequence
  Oligonucleotide for detection of SNP TSC0039375
aattacgtgagga

SEQ ID NO: 156068 - DNA, 13 bp, Artificial Sequence
  Oligonucleotide for detection of SNP TSC0039375
tcctcacgtaatt

SEQ ID NO: 156069 - DNA, 13 bp, Artificial Sequence
  Oligonucleotide for detection of SNP TSC0039375
tttttatgtgatt

SEQ ID NO: 156070 - DNA, 13 bp, Artificial Sequence
  Oligonucleotide for detection of SNP TSC0039375
aatcacataaaaa

SEQ ID NO: 156071 - DNA, 13 bp, Artificial Sequence
  Oligonucleotide for detection of SNP TSC0039375
tttttacgtgatt

SEQ ID NO: 156072 - DNA, 13 bp, Artificial Sequence
  Oligonucleotide for detection of SNP TSC0039375
aatcacgtaaaaa

SEQ ID NO: 156073 - DNA, 13 bp, Artificial Sequence
  Oligonucleotide for detection of SNP TSC0039376
aaaaaaattagty

SEQ ID NO: 156074 - DNA, 13 bp, Artificial Sequence
  Oligonucleotide for detection of SNP TSC0039376
ractaattttttt

SEQ ID NO: 156075 - DNA, 13 bp, Artificial Sequence
  Oligonucleotide for detection of SNP TSC0039376
aaaaaatttagty

SEQ ID NO: 156076 - DNA, 13 bp, Artificial Sequence
  Oligonucleotide for detection of SNP TSC0039376
ractaaatttttt

SEQ ID NO: 156077 - DNA, 13 bp, Artificial Sequence
  Oligonucleotide for detection of SNP TSC0039376
ggttaattttttt

SEQ ID NO: 156078 - DNA, 13 bp, Artificial Sequence
  Oligonucleotide for detection of SNP TSC0039376
aaaaaaattaacc

SEQ ID NO: 156079 - DNA, 13 bp, Artificial Sequence
  Oligonucleotide for detection of SNP TSC0039376
ggttaaatttttt

SEQ ID NO: 156080 - DNA, 13 bp, Artificial Sequence
  Oligonucleotide for detection of SNP TSC0039376
aaaaaatttaacc

SEQ ID NO: 156081 - DNA, 13 bp, Artificial Sequence
  Oligonucleotide for detection of SNP TSC0039378
attttaagtttaa

SEQ ID NO: 156082 - DNA, 13 bp, Artificial Sequence
  Oligonucleotide for detection of SNP TSC0039378
ttaaacttaaaat

SEQ ID NO: 156083 - DNA, 13 bp, Artificial Sequence
  Oligonucleotide for detection of SNP TSC0039378
attttaggtttaa

SEQ ID NO: 156084 - DNA, 13 bp, Artificial Sequence
  Oligonucleotide for detection of SNP TSC0039378
ttaaacctaaaat

SEQ ID NO: 156085 - DNA, 13 bp, Artificial Sequence
  Oligonucleotide for detection of SNP TSC0039379
tttgttgatgatt

SEQ ID NO: 156086 - DNA, 13 bp, Artificial Sequence
  Oligonucleotide for detection of SNP TSC0039379
aatcatcaacaaa

SEQ ID NO: 156087 - DNA, 13 bp, Artificial Sequence
  Oligonucleotide for detection of SNP TSC0039379
tttgttaatgatt

SEQ ID NO: 156088 - DNA, 13 bp, Artificial Sequence
  Oligonucleotide for detection of SNP TSC0039379
aatcattaacaaa

SEQ ID NO: 156089 - DNA, 13 bp, Artificial Sequence
  Oligonucleotide for detection of SNP TSC0039380
ttaggtatgggag

SEQ ID NO: 156090 - DNA, 13 bp, Artificial Sequence
  Oligonucleotide for detection of SNP TSC0039380
ctcccatacctaa

SEQ ID NO: 156091 - DNA, 13 bp, Artificial Sequence
  Oligonucleotide for detection of SNP TSC0039380
ttaggtttgggag

SEQ ID NO: 156092 - DNA, 13 bp, Artificial Sequence
  Oligonucleotide for detection of SNP TSC0039380
ctcccaaacctaa

SEQ ID NO: 156093 - DNA, 13 bp, Artificial Sequence
  Oligonucleotide for detection of SNP TSC0039380
tttttaggtttgg

SEQ ID NO: 156094 - DNA, 13 bp, Artificial Sequence
  Oligonucleotide for detection of SNP TSC0039380
ccaaacctaaaaa

SEQ ID NO: 156095 - DNA, 13 bp, Artificial Sequence
  Oligonucleotide for detection of SNP TSC0039381
attgttagaattt

SEQ ID NO: 156096 - DNA, 13 bp, Artificial Sequence
  Oligonucleotide for detection of SNP TSC0039381
aaattctaacaat

SEQ ID NO: 156097 - DNA, 13 bp, Artificial Sequence
  Oligonucleotide for detection of SNP TSC0039381
attgtttgaattt

SEQ ID NO: 156098 - DNA, 13 bp, Artificial Sequence
  Oligonucleotide for detection of SNP TSC0039381
aaattcaaacaat

SEQ ID NO: 156099 - DNA, 13 bp, Artificial Sequence
  Oligonucleotide for detection of SNP TSC0039381
atcgttagaattt

SEQ ID NO: 156100 - DNA, 13 bp, Artificial Sequence
  Oligonucleotide for detection of SNP TSC0039381
aaattctaacgat

SEQ ID NO: 156101 - DNA, 13 bp, Artificial Sequence
  Oligonucleotide for detection of SNP TSC0039381
atcgtttgaattt

SEQ ID NO: 156102 - DNA, 13 bp, Artificial Sequence
  Oligonucleotide for detection of SNP TSC0039381
aaattcaaacgat

SEQ ID NO: 156103 - DNA, 13 bp, Artificial Sequence
  Oligonucleotide for detection of SNP TSC0039381
aggttttagtgat

SEQ ID NO: 156104 - DNA, 13 bp, Artificial Sequence
  Oligonucleotide for detection of SNP TSC0039381
atcactaaaacct

SEQ ID NO: 156105 - DNA, 13 bp, Artificial Sequence
  Oligonucleotide for detection of SNP TSC0039381
aggttttagcgat

SEQ ID NO: 156106 - DNA, 13 bp, Artificial Sequence
  Oligonucleotide for detection of SNP TSC0039381
atcgctaaaacct

SEQ ID NO: 156107 - DNA, 13 bp, Artificial Sequence
  Oligonucleotide for detection of SNP TSC0039381
aggtttaagcgat

SEQ ID NO: 156108 - DNA, 13 bp, Artificial Sequence
  Oligonucleotide for detection of SNP TSC0039381
atcgcttaaacct

SEQ ID NO: 156109 - DNA, 13 bp, Artificial Sequence
  Oligonucleotide for detection of SNP TSC0039382
aagataagttatt

SEQ ID NO: 156110 - DNA, 13 bp, Artificial Sequence
  Oligonucleotide for detection of SNP TSC0039382
aataacttatctt

SEQ ID NO: 156111 - DNA, 13 bp, Artificial Sequence
  Oligonucleotide for detection of SNP TSC0039382
aagataggttatt

SEQ ID NO: 156112 - DNA, 13 bp, Artificial Sequence
  Oligonucleotide for detection of SNP TSC0039382
aataacctatctt

SEQ ID NO: 156113 - DNA, 13 bp, Artificial Sequence
  Oligonucleotide for detection of SNP TSC0039386
ggggaggggtgtg

SEQ ID NO: 156114 - DNA, 13 bp, Artificial Sequence
  Oligonucleotide for detection of SNP TSC0039386
cacacccctcccc

SEQ ID NO: 156115 - DNA, 13 bp, Artificial Sequence
  Oligonucleotide for detection of SNP TSC0039386
ggggagaggtgtg

SEQ ID NO: 156116 - DNA, 13 bp, Artificial Sequence
  Oligonucleotide for detection of SNP TSC0039386
cacacctctcccc

SEQ ID NO: 156117 - DNA, 13 bp, Artificial Sequence
  Oligonucleotide for detection of SNP TSC0007934
gtaagagggaaga

SEQ ID NO: 156118 - DNA, 13 bp, Artificial Sequence
  Oligonucleotide for detection of SNP TSC0007934
tcttccctcttac

SEQ ID NO: 156119 - DNA, 13 bp, Artificial Sequence
  Oligonucleotide for detection of SNP TSC0007934
gtaagatggaaga

SEQ ID NO: 156120 - DNA, 13 bp, Artificial Sequence
  Oligonucleotide for detection of SNP TSC0007934
tcttccatcttac

SEQ ID NO: 156121 - DNA, 13 bp, Artificial Sequence
  Oligonucleotide for detection of SNP TSC0007934
gtaagacggaaga

SEQ ID NO: 156122 - DNA, 13 bp, Artificial Sequence
  Oligonucleotide for detection of SNP TSC0007934
tcttccgtcttac

SEQ ID NO: 156123 - DNA, 13 bp, Artificial Sequence
  Oligonucleotide for detection of SNP TSC0039387
atatttattagcg

SEQ ID NO: 156124 - DNA, 13 bp, Artificial Sequence
  Oligonucleotide for detection of SNP TSC0039387
cgctaataaatat

SEQ ID NO: 156125 - DNA, 13 bp, Artificial Sequence
  Oligonucleotide for detection of SNP TSC0039387
atattcgttagtg

SEQ ID NO: 156126 - DNA, 13 bp, Artificial Sequence
  Oligonucleotide for detection of SNP TSC0039387
cactaacgaatat

SEQ ID NO: 156127 - DNA, 13 bp, Artificial Sequence
  Oligonucleotide for detection of SNP TSC0039387
atatttgttagcg

SEQ ID NO: 156128 - DNA, 13 bp, Artificial Sequence
  Oligonucleotide for detection of SNP TSC0039387
cgctaacaaatat

SEQ ID NO: 156129 - DNA, 13 bp, Artificial Sequence
  Oligonucleotide for detection of SNP TSC0039387
atattcgttagcg

SEQ ID NO: 156130 - DNA, 13 bp, Artificial Sequence
  Oligonucleotide for detection of SNP TSC0039387
cgctaacgaatat

SEQ ID NO: 156131 - DNA, 13 bp, Artificial Sequence
  Oligonucleotide for detection of SNP TSC0039387
tgttaatgggtat

SEQ ID NO: 156132 - DNA, 13 bp, Artificial Sequence
  Oligonucleotide for detection of SNP TSC0039387
atacccattaaca

SEQ ID NO: 156133 - DNA, 13 bp, Artificial Sequence
  Oligonucleotide for detection of SNP TSC0039387
cgttaatgggtat

SEQ ID NO: 156134 - DNA, 13 bp, Artificial Sequence
  Oligonucleotide for detection of SNP TSC0039387
atacccattaacg

SEQ ID NO: 156135 - DNA, 13 bp, Artificial Sequence
  Oligonucleotide for detection of SNP TSC0039387
tgttaacgggtat

SEQ ID NO: 156136 - DNA, 13 bp, Artificial Sequence
  Oligonucleotide for detection of SNP TSC0039387
atacccgttaaca

SEQ ID NO: 156137 - DNA, 13 bp, Artificial Sequence
  Oligonucleotide for detection of SNP TSC0039387
cgttaacgggtat

SEQ ID NO: 156138 - DNA, 13 bp, Artificial Sequence
  Oligonucleotide for detection of SNP TSC0039387
atacccgttaacg

SEQ ID NO: 156139 - DNA, 13 bp, Artificial Sequence
  Oligonucleotide for detection of SNP TSC0039388
aaagtggttgtta

SEQ ID NO: 156140 - DNA, 13 bp, Artificial Sequence
  Oligonucleotide for detection of SNP TSC0039388
taacaaccacttt

SEQ ID NO: 156141 - DNA, 13 bp, Artificial Sequence
  Oligonucleotide for detection of SNP TSC0039388
aaagtgattgtta

SEQ ID NO: 156142 - DNA, 13 bp, Artificial Sequence
  Oligonucleotide for detection of SNP TSC0039388
taacaatcacttt

SEQ ID NO: 156143 - DNA, 13 bp, Artificial Sequence
  Oligonucleotide for detection of SNP TSC0039388
aaagtggtcgtta

SEQ ID NO: 156144 - DNA, 13 bp, Artificial Sequence
  Oligonucleotide for detection of SNP TSC0039388
taacgaccacttt

SEQ ID NO: 156145 - DNA, 13 bp, Artificial Sequence
  Oligonucleotide for detection of SNP TSC0039388
aaagtgatcgtta

SEQ ID NO: 156146 - DNA, 13 bp, Artificial Sequence
  Oligonucleotide for detection of SNP TSC0039388
taacgatcacttt

SEQ ID NO: 156147 - DNA, 13 bp, Artificial Sequence
  Oligonucleotide for detection of SNP TSC0039394
ttaattaagatgg

SEQ ID NO: 156148 - DNA, 13 bp, Artificial Sequence
  Oligonucleotide for detection of SNP TSC0039394
ccatcttaattaa

SEQ ID NO: 156149 - DNA, 13 bp, Artificial Sequence
  Oligonucleotide for detection of SNP TSC0039394
ttaattgagatgg

SEQ ID NO: 156150 - DNA, 13 bp, Artificial Sequence
  Oligonucleotide for detection of SNP TSC0039394
ccatctcaattaa

SEQ ID NO: 156151 - DNA, 13 bp, Artificial Sequence
  Oligonucleotide for detection of SNP TSC0039394
ttaatcgagatgg

SEQ ID NO: 156152 - DNA, 13 bp, Artificial Sequence
  Oligonucleotide for detection of SNP TSC0039394
ccatctcgattaa

SEQ ID NO: 156153 - DNA, 13 bp, Artificial Sequence
  Oligonucleotide for detection of SNP TSC0039395
taaaaaatagata

SEQ ID NO: 156154 - DNA, 13 bp, Artificial Sequence
  Oligonucleotide for detection of SNP TSC0039395
tatctatttttta

SEQ ID NO: 156155 - DNA, 13 bp, Artificial Sequence
  Oligonucleotide for detection of SNP TSC0039395
taaaaattagata

SEQ ID NO: 156156 - DNA, 13 bp, Artificial Sequence
  Oligonucleotide for detection of SNP TSC0039395
tatctaattttta

SEQ ID NO: 156157 - DNA, 13 bp, Artificial Sequence
  Oligonucleotide for detection of SNP TSC0039395
tatttgttttttg

SEQ ID NO: 156158 - DNA, 13 bp, Artificial Sequence
  Oligonucleotide for detection of SNP TSC0039395
caaaaaacaaata

SEQ ID NO: 156159 - DNA, 13 bp, Artificial Sequence
  Oligonucleotide for detection of SNP TSC0039396
tgaggttgtagag

SEQ ID NO: 156160 - DNA, 13 bp, Artificial Sequence
  Oligonucleotide for detection of SNP TSC0039396
ctctacaacctca

SEQ ID NO: 156161 - DNA, 13 bp, Artificial Sequence
  Oligonucleotide for detection of SNP TSC0039396
tgaggtggtagag

SEQ ID NO: 156162 - DNA, 13 bp, Artificial Sequence
  Oligonucleotide for detection of SNP TSC0039396
ctctaccacctca

SEQ ID NO: 156163 - DNA, 13 bp, Artificial Sequence
  Oligonucleotide for detection of SNP TSC0039397
ttgatggttgtta

SEQ ID NO: 156164 - DNA, 13 bp, Artificial Sequence
  Oligonucleotide for detection of SNP TSC0039397
taacaaccatcaa

SEQ ID NO: 156165 - DNA, 13 bp, Artificial Sequence
  Oligonucleotide for detection of SNP TSC0039397
ttgatgattgtta

SEQ ID NO: 156166 - DNA, 13 bp, Artificial Sequence
  Oligonucleotide for detection of SNP TSC0039397
taacaatcatcaa

SEQ ID NO: 156167 - DNA, 13 bp, Artificial Sequence
  Oligonucleotide for detection of SNP TSC0039398
tgtttgagggaay

SEQ ID NO: 156168 - DNA, 13 bp, Artificial Sequence
  Oligonucleotide for detection of SNP TSC0039398
rttccctcaaaca

SEQ ID NO: 156169 - DNA, 13 bp, Artificial Sequence
  Oligonucleotide for detection of SNP TSC0039398
tgtttgggggaay

SEQ ID NO: 156170 - DNA, 13 bp, Artificial Sequence
  Oligonucleotide for detection of SNP TSC0039398
rttcccccaaaca

SEQ ID NO: 156171 - DNA, 13 bp, Artificial Sequence
  Oligonucleotide for detection of SNP TSC0010497
tagagattgtagt

SEQ ID NO: 156172 - DNA, 13 bp, Artificial Sequence
  Oligonucleotide for detection of SNP TSC0010497
actacaatctcta

SEQ ID NO: 156173 - DNA, 13 bp, Artificial Sequence
  Oligonucleotide for detection of SNP TSC0010497
tagagagtgtagt

SEQ ID NO: 156174 - DNA, 13 bp, Artificial Sequence
  Oligonucleotide for detection of SNP TSC0010497
actacactctcta

SEQ ID NO: 156175 - DNA, 13 bp, Artificial Sequence
  Oligonucleotide for detection of SNP TSC0010497
tagagaatgtagt

SEQ ID NO: 156176 - DNA, 13 bp, Artificial Sequence
  Oligonucleotide for detection of SNP TSC0010497
actacattctcta

SEQ ID NO: 156177 - DNA, 13 bp, Artificial Sequence
  Oligonucleotide for detection of SNP TSC0005072
ttaatagttgttt

SEQ ID NO: 156178 - DNA, 13 bp, Artificial Sequence
  Oligonucleotide for detection of SNP TSC0005072
aaacaactattaa

SEQ ID NO: 156179 - DNA, 13 bp, Artificial Sequence
  Oligonucleotide for detection of SNP TSC0039401
tagtggtgtttgt

SEQ ID NO: 156180 - DNA, 13 bp, Artificial Sequence
  Oligonucleotide for detection of SNP TSC0039401
acaaacaccacta

SEQ ID NO: 156181 - DNA, 13 bp, Artificial Sequence
  Oligonucleotide for detection of SNP TSC0039401
tagtggcgtttgt

SEQ ID NO: 156182 - DNA, 13 bp, Artificial Sequence
  Oligonucleotide for detection of SNP TSC0039401
acaaacgccacta

SEQ ID NO: 156183 - DNA, 13 bp, Artificial Sequence
  Oligonucleotide for detection of SNP TSC0039401
ataaatgttattg

SEQ ID NO: 156184 - DNA, 13 bp, Artificial Sequence
  Oligonucleotide for detection of SNP TSC0039401
caataacatttat

SEQ ID NO: 156185 - DNA, 13 bp, Artificial Sequence
  Oligonucleotide for detection of SNP TSC0039401
ataaatattattg

SEQ ID NO: 156186 - DNA, 13 bp, Artificial Sequence
  Oligonucleotide for detection of SNP TSC0039401
caataatatttat

SEQ ID NO: 156187 - DNA, 13 bp, Artificial Sequence
  Oligonucleotide for detection of SNP TSC0039401
ataaacgttattg

SEQ ID NO: 156188 - DNA, 13 bp, Artificial Sequence
  Oligonucleotide for detection of SNP TSC0039401
caataacgtttat

SEQ ID NO: 156189 - DNA, 13 bp, Artificial Sequence
  Oligonucleotide for detection of SNP TSC0039402
ttttatgaaggga

SEQ ID NO: 156190 - DNA, 13 bp, Artificial Sequence
  Oligonucleotide for detection of SNP TSC0039402
tcccttcataaaa

SEQ ID NO: 156191 - DNA, 13 bp, Artificial Sequence
  Oligonucleotide for detection of SNP TSC0039402
ttttataaaggga

SEQ ID NO: 156192 - DNA, 13 bp, Artificial Sequence
  Oligonucleotide for detection of SNP TSC0039402
tccctttataaaa

SEQ ID NO: 156193 - DNA, 13 bp, Artificial Sequence
  Oligonucleotide for detection of SNP TSC0039402
ttttacgaaggga

SEQ ID NO: 156194 - DNA, 13 bp, Artificial Sequence
  Oligonucleotide for detection of SNP TSC0039402
tcccttcgtaaaa

SEQ ID NO: 156195 - DNA, 13 bp, Artificial Sequence
  Oligonucleotide for detection of SNP TSC0039403
agtttggaaggaa

SEQ ID NO: 156196 - DNA, 13 bp, Artificial Sequence
  Oligonucleotide for detection of SNP TSC0039403
ttccttccaaact

SEQ ID NO: 156197 - DNA, 13 bp, Artificial Sequence
  Oligonucleotide for detection of SNP TSC0039403
agtttgaaaggaa

SEQ ID NO: 156198 - DNA, 13 bp, Artificial Sequence
  Oligonucleotide for detection of SNP TSC0039403
ttcctttcaaact

SEQ ID NO: 156199 - DNA, 13 bp, Artificial Sequence
  Oligonucleotide for detection of SNP TSC0039404
tttatcggaattt

SEQ ID NO: 156200 - DNA, 13 bp, Artificial Sequence
  Oligonucleotide for detection of SNP TSC0039404
aaattccgataaa

SEQ ID NO: 156201 - DNA, 13 bp, Artificial Sequence
  Oligonucleotide for detection of SNP TSC0039404
aaattttggtgga

SEQ ID NO: 156202 - DNA, 13 bp, Artificial Sequence
  Oligonucleotide for detection of SNP TSC0039404
tccaccaaaattt

SEQ ID NO: 156203 - DNA, 13 bp, Artificial Sequence
  Oligonucleotide for detection of SNP TSC0039404
aaatttcggtgga

SEQ ID NO: 156204 - DNA, 13 bp, Artificial Sequence
  Oligonucleotide for detection of SNP TSC0039404
tccaccgaaattt

SEQ ID NO: 156205 - DNA, 13 bp, Artificial Sequence
  Oligonucleotide for detection of SNP TSC0039405
aattaagtatagg

SEQ ID NO: 156206 - DNA, 13 bp, Artificial Sequence
  Oligonucleotide for detection of SNP TSC0039405
cctatacttaatt

SEQ ID NO: 156207 - DNA, 13 bp, Artificial Sequence
  Oligonucleotide for detection of SNP TSC0039405
aattaaatatagg

SEQ ID NO: 156208 - DNA, 13 bp, Artificial Sequence
  Oligonucleotide for detection of SNP TSC0039405
cctatatttaatt

SEQ ID NO: 156209 - DNA, 13 bp, Artificial Sequence
  Oligonucleotide for detection of SNP TSC0039406
attttaaatggta

SEQ ID NO: 156210 - DNA, 13 bp, Artificial Sequence
  Oligonucleotide for detection of SNP TSC0039406
taccatttaaaat

SEQ ID NO: 156211 - DNA, 13 bp, Artificial Sequence
  Oligonucleotide for detection of SNP TSC0039406
attttatatggta

SEQ ID NO: 156212 - DNA, 13 bp, Artificial Sequence
  Oligonucleotide for detection of SNP TSC0039406
taccatataaaat

SEQ ID NO: 156213 - DNA, 13 bp, Artificial Sequence
  Oligonucleotide for detection of SNP TSC0039406
tgttatttaaaat

SEQ ID NO: 156214 - DNA, 13 bp, Artificial Sequence
  Oligonucleotide for detection of SNP TSC0039406
attttaaataaca

SEQ ID NO: 156215 - DNA, 13 bp, Artificial Sequence
  Oligonucleotide for detection of SNP TSC0039406
tgttatgtaaaat

SEQ ID NO: 156216 - DNA, 13 bp, Artificial Sequence
  Oligonucleotide for detection of SNP TSC0039406
attttacataaca

SEQ ID NO: 156217 - DNA, 13 bp, Artificial Sequence
  Oligonucleotide for detection of SNP TSC0039407
tatgtaatggaaa

SEQ ID NO: 156218 - DNA, 13 bp, Artificial Sequence
  Oligonucleotide for detection of SNP TSC0039407
tttccattacata

SEQ ID NO: 156219 - DNA, 13 bp, Artificial Sequence
  Oligonucleotide for detection of SNP TSC0039407
tatgtattggaaa

SEQ ID NO: 156220 - DNA, 13 bp, Artificial Sequence
  Oligonucleotide for detection of SNP TSC0039407
tttccaatacata

SEQ ID NO: 156221 - DNA, 13 bp, Artificial Sequence
  Oligonucleotide for detection of SNP TSC0039407
tttttattgtatg

SEQ ID NO: 156222 - DNA, 13 bp, Artificial Sequence
  Oligonucleotide for detection of SNP TSC0039407
catacaataaaaa

SEQ ID NO: 156223 - DNA, 13 bp, Artificial Sequence
  Oligonucleotide for detection of SNP TSC0039408
aagttgggtttta

SEQ ID NO: 156224 - DNA, 13 bp, Artificial Sequence
  Oligonucleotide for detection of SNP TSC0039408
taaaacccaactt

SEQ ID NO: 156225 - DNA, 13 bp, Artificial Sequence
  Oligonucleotide for detection of SNP TSC0039408
aagttgagtttta

SEQ ID NO: 156226 - DNA, 13 bp, Artificial Sequence
  Oligonucleotide for detection of SNP TSC0039408
taaaactcaactt

SEQ ID NO: 156227 - DNA, 13 bp, Artificial Sequence
  Oligonucleotide for detection of SNP TSC0039409
taagaattaagtg

SEQ ID NO: 156228 - DNA, 13 bp, Artificial Sequence
  Oligonucleotide for detection of SNP TSC0039409
cacttaattctta

SEQ ID NO: 156229 - DNA, 13 bp, Artificial Sequence
  Oligonucleotide for detection of SNP TSC0039409
taagaagtaagtg

SEQ ID NO: 156230 - DNA, 13 bp, Artificial Sequence
  Oligonucleotide for detection of SNP TSC0039409
cacttacttctta

SEQ ID NO: 156231 - DNA, 13 bp, Artificial Sequence
  Oligonucleotide for detection of SNP TSC0039411
tattaggttttgg

SEQ ID NO: 156232 - DNA, 13 bp, Artificial Sequence
  Oligonucleotide for detection of SNP TSC0039411
ccaaaacctaata

SEQ ID NO: 156233 - DNA, 13 bp, Artificial Sequence
  Oligonucleotide for detection of SNP TSC0039411
tattagattttgg

SEQ ID NO: 156234 - DNA, 13 bp, Artificial Sequence
  Oligonucleotide for detection of SNP TSC0039411
ccaaaatctaata

SEQ ID NO: 156235 - DNA, 13 bp, Artificial Sequence
  Oligonucleotide for detection of SNP TSC0039412
agagttaaaatta

SEQ ID NO: 156236 - DNA, 13 bp, Artificial Sequence
  Oligonucleotide for detection of SNP TSC0039412
taattttaactct

SEQ ID NO: 156237 - DNA, 13 bp, Artificial Sequence
  Oligonucleotide for detection of SNP TSC0039412
agagttgaaatta

SEQ ID NO: 156238 - DNA, 13 bp, Artificial Sequence
  Oligonucleotide for detection of SNP TSC0039412
taatttcaactct

SEQ ID NO: 156239 - DNA, 13 bp, Artificial Sequence
  Oligonucleotide for detection of SNP TSC0039412
agagtcgaaatta

SEQ ID NO: 156240 - DNA, 13 bp, Artificial Sequence
  Oligonucleotide for detection of SNP TSC0039412
taatttcgactct

SEQ ID NO: 156241 - DNA, 13 bp, Artificial Sequence
  Oligonucleotide for detection of SNP TSC0039412
tgattttgatttt

SEQ ID NO: 156242 - DNA, 13 bp, Artificial Sequence
  Oligonucleotide for detection of SNP TSC0039412
aaaatcaaaatca

SEQ ID NO: 156243 - DNA, 13 bp, Artificial Sequence
  Oligonucleotide for detection of SNP TSC0039412
tgatttcgatttt

SEQ ID NO: 156244 - DNA, 13 bp, Artificial Sequence
  Oligonucleotide for detection of SNP TSC0039412
aaaatcgaaatca

SEQ ID NO: 156245 - DNA, 13 bp, Artificial Sequence
  Oligonucleotide for detection of SNP TSC0039418
ttaaatgttttty

SEQ ID NO: 156246 - DNA, 13 bp, Artificial Sequence
  Oligonucleotide for detection of SNP TSC0039418
raaaaacatttaa

SEQ ID NO: 156247 - DNA, 13 bp, Artificial Sequence
  Oligonucleotide for detection of SNP TSC0039418
ttaaacgttttty

SEQ ID NO: 156248 - DNA, 13 bp, Artificial Sequence
  Oligonucleotide for detection of SNP TSC0039418
raaaaacgtttaa

SEQ ID NO: 156249 - DNA, 13 bp, Artificial Sequence
  Oligonucleotide for detection of SNP TSC0039418
gaagagggtttag

SEQ ID NO: 156250 - DNA, 13 bp, Artificial Sequence
  Oligonucleotide for detection of SNP TSC0039418
ctaaaccctcttc

SEQ ID NO: 156251 - DNA, 13 bp, Artificial Sequence
  Oligonucleotide for detection of SNP TSC0039418
gaagagtgtttag

SEQ ID NO: 156252 - DNA, 13 bp, Artificial Sequence
  Oligonucleotide for detection of SNP TSC0039418
ctaaacactcttc

SEQ ID NO: 156253 - DNA, 13 bp, Artificial Sequence
  Oligonucleotide for detection of SNP TSC0039418
gaagagcgtttag

SEQ ID NO: 156254 - DNA, 13 bp, Artificial Sequence
  Oligonucleotide for detection of SNP TSC0039418
ctaaacgctcttc

SEQ ID NO: 156255 - DNA, 13 bp, Artificial Sequence
  Oligonucleotide for detection of SNP TSC0039419
atatagatatata

SEQ ID NO: 156256 - DNA, 13 bp, Artificial Sequence
  Oligonucleotide for detection of SNP TSC0039419
tatatatctatat

SEQ ID NO: 156257 - DNA, 13 bp, Artificial Sequence
  Oligonucleotide for detection of SNP TSC0039419
atataggtatata

SEQ ID NO: 156258 - DNA, 13 bp, Artificial Sequence
  Oligonucleotide for detection of SNP TSC0039419
tatatacctatat

SEQ ID NO: 156259 - DNA, 13 bp, Artificial Sequence
  Oligonucleotide for detection of SNP TSC0039420
tttggatagattt

SEQ ID NO: 156260 - DNA, 13 bp, Artificial Sequence
  Oligonucleotide for detection of SNP TSC0039420
aaatctatccaaa

SEQ ID NO: 156261 - DNA, 13 bp, Artificial Sequence
  Oligonucleotide for detection of SNP TSC0039420
tttggagagattt

SEQ ID NO: 156262 - DNA, 13 bp, Artificial Sequence
  Oligonucleotide for detection of SNP TSC0039420
aaatctctccaaa

SEQ ID NO: 156263 - DNA, 13 bp, Artificial Sequence
  Oligonucleotide for detection of SNP TSC0039420
aaatttgtttaag

SEQ ID NO: 156264 - DNA, 13 bp, Artificial Sequence
  Oligonucleotide for detection of SNP TSC0039420
cttaaacaaattt

SEQ ID NO: 156265 - DNA, 13 bp, Artificial Sequence
  Oligonucleotide for detection of SNP TSC0039420
aaatttttttaag

SEQ ID NO: 156266 - DNA, 13 bp, Artificial Sequence
  Oligonucleotide for detection of SNP TSC0039420
cttaaaaaaattt

SEQ ID NO: 156267 - DNA, 13 bp, Artificial Sequence
  Oligonucleotide for detection of SNP TSC0039421
aaattatttttty

SEQ ID NO: 156268 - DNA, 13 bp, Artificial Sequence
  Oligonucleotide for detection of SNP TSC0039421
raaaaaataattt

SEQ ID NO: 156269 - DNA, 13 bp, Artificial Sequence
  Oligonucleotide for detection of SNP TSC0039421
gagaagataattt

SEQ ID NO: 156270 - DNA, 13 bp, Artificial Sequence
  Oligonucleotide for detection of SNP TSC0039421
aaattatcttctc

SEQ ID NO: 156271 - DNA, 13 bp, Artificial Sequence
  Oligonucleotide for detection of SNP TSC0039422
atttttgtaagta

SEQ ID NO: 156272 - DNA, 13 bp, Artificial Sequence
  Oligonucleotide for detection of SNP TSC0039422
tacttacaaaaat

SEQ ID NO: 156273 - DNA, 13 bp, Artificial Sequence
  Oligonucleotide for detection of SNP TSC0039422
atttttataagta

SEQ ID NO: 156274 - DNA, 13 bp, Artificial Sequence
  Oligonucleotide for detection of SNP TSC0039422
tacttataaaaat

SEQ ID NO: 156275 - DNA, 13 bp, Artificial Sequence
  Oligonucleotide for detection of SNP TSC0039423
ttttttatgtggt

SEQ ID NO: 156276 - DNA, 13 bp, Artificial Sequence
  Oligonucleotide for detection of SNP TSC0039423
accacataaaaaa

SEQ ID NO: 156277 - DNA, 13 bp, Artificial Sequence
  Oligonucleotide for detection of SNP TSC0039423
ttttttgtgtggt

SEQ ID NO: 156278 - DNA, 13 bp, Artificial Sequence
  Oligonucleotide for detection of SNP TSC0039423
accacacaaaaaa

SEQ ID NO: 156279 - DNA, 13 bp, Artificial Sequence
  Oligonucleotide for detection of SNP TSC0039423
tttttcgtgtggt

SEQ ID NO: 156280 - DNA, 13 bp, Artificial Sequence
  Oligonucleotide for detection of SNP TSC0039423
accacacgaaaaa

SEQ ID NO: 156281 - DNA, 13 bp, Artificial Sequence
  Oligonucleotide for detection of SNP TSC0039423
attatatgaggga

SEQ ID NO: 156282 - DNA, 13 bp, Artificial Sequence
  Oligonucleotide for detection of SNP TSC0039423
tccctcatataat

SEQ ID NO: 156283 - DNA, 13 bp, Artificial Sequence
  Oligonucleotide for detection of SNP TSC0039423
attatacgaggga

SEQ ID NO: 156284 - DNA, 13 bp, Artificial Sequence
  Oligonucleotide for detection of SNP TSC0039423
tccctcgtataat

SEQ ID NO: 156285 - DNA, 13 bp, Artificial Sequence
  Oligonucleotide for detection of SNP TSC0039424
ttcggtatttttg

SEQ ID NO: 156286 - DNA, 13 bp, Artificial Sequence
  Oligonucleotide for detection of SNP TSC0039424
caaaaataccgaa

SEQ ID NO: 156287 - DNA, 13 bp, Artificial Sequence
  Oligonucleotide for detection of SNP TSC0039424
ttcggtgtttttg

SEQ ID NO: 156288 - DNA, 13 bp, Artificial Sequence
  Oligonucleotide for detection of SNP TSC0039424
caaaaacaccgaa

SEQ ID NO: 156289 - DNA, 13 bp, Artificial Sequence
  Oligonucleotide for detection of SNP TSC0039424
ttcggcgtttttg

SEQ ID NO: 156290 - DNA, 13 bp, Artificial Sequence
  Oligonucleotide for detection of SNP TSC0039424
caaaaacgccgaa

SEQ ID NO: 156291 - DNA, 13 bp, Artificial Sequence
  Oligonucleotide for detection of SNP TSC0039424
tagagatgtcgag

SEQ ID NO: 156292 - DNA, 13 bp, Artificial Sequence
  Oligonucleotide for detection of SNP TSC0039424
ctcgacatctcta

SEQ ID NO: 156293 - DNA, 13 bp, Artificial Sequence
  Oligonucleotide for detection of SNP TSC0039424
tagagacgttgag

SEQ ID NO: 156294 - DNA, 13 bp, Artificial Sequence
  Oligonucleotide for detection of SNP TSC0039424
ctcaacgtctcta

SEQ ID NO: 156295 - DNA, 13 bp, Artificial Sequence
  Oligonucleotide for detection of SNP TSC0039424
tagagacgtcgag

SEQ ID NO: 156296 - DNA, 13 bp, Artificial Sequence
  Oligonucleotide for detection of SNP TSC0039424
ctcgacgtctcta

SEQ ID NO: 156297 - DNA, 13 bp, Artificial Sequence
  Oligonucleotide for detection of SNP TSC0039425
aagtttaaagggy

SEQ ID NO: 156298 - DNA, 13 bp, Artificial Sequence
  Oligonucleotide for detection of SNP TSC0039425
rccctttaaactt

SEQ ID NO: 156299 - DNA, 13 bp, Artificial Sequence
  Oligonucleotide for detection of SNP TSC0039425
aagttttaagggy

SEQ ID NO: 156300 - DNA, 13 bp, Artificial Sequence
  Oligonucleotide for detection of SNP TSC0039425
rcccttaaaactt

SEQ ID NO: 156301 - DNA, 13 bp, Artificial Sequence
  Oligonucleotide for detection of SNP TSC0039426
atagtatgtgaga

SEQ ID NO: 156302 - DNA, 13 bp, Artificial Sequence
  Oligonucleotide for detection of SNP TSC0039426
tctcacatactat

SEQ ID NO: 156303 - DNA, 13 bp, Artificial Sequence
  Oligonucleotide for detection of SNP TSC0039426
atagtacgtgaga

SEQ ID NO: 156304 - DNA, 13 bp, Artificial Sequence
  Oligonucleotide for detection of SNP TSC0039426
tctcacgtactat

SEQ ID NO: 156305 - DNA, 13 bp, Artificial Sequence
  Oligonucleotide for detection of SNP TSC0039426
ttttatgtgttat

SEQ ID NO: 156306 - DNA, 13 bp, Artificial Sequence
  Oligonucleotide for detection of SNP TSC0039426
ataacacataaaa

SEQ ID NO: 156307 - DNA, 13 bp, Artificial Sequence
  Oligonucleotide for detection of SNP TSC0039426
ttttatatgttat

SEQ ID NO: 156308 - DNA, 13 bp, Artificial Sequence
  Oligonucleotide for detection of SNP TSC0039426
ataacatataaaa

SEQ ID NO: 156309 - DNA, 13 bp, Artificial Sequence
  Oligonucleotide for detection of SNP TSC0039426
ttttacgtgttat

SEQ ID NO: 156310 - DNA, 13 bp, Artificial Sequence
  Oligonucleotide for detection of SNP TSC0039426
ataacacgtaaaa

SEQ ID NO: 156311 - DNA, 13 bp, Artificial Sequence
  Oligonucleotide for detection of SNP TSC0039427
aaagaaagttgta

SEQ ID NO: 156312 - DNA, 13 bp, Artificial Sequence
  Oligonucleotide for detection of SNP TSC0039427
tacaactttcttt

SEQ ID NO: 156313 - DNA, 13 bp, Artificial Sequence
  Oligonucleotide for detection of SNP TSC0039427
aaagaaggttgta

SEQ ID NO: 156314 - DNA, 13 bp, Artificial Sequence
  Oligonucleotide for detection of SNP TSC0039427
tacaaccttcttt

SEQ ID NO: 156315 - DNA, 13 bp, Artificial Sequence
  Oligonucleotide for detection of SNP TSC0039428
tttatagttatgt

SEQ ID NO: 156316 - DNA, 13 bp, Artificial Sequence
  Oligonucleotide for detection of SNP TSC0039428
acataactataaa

SEQ ID NO: 156317 - DNA, 13 bp, Artificial Sequence
  Oligonucleotide for detection of SNP TSC0039428
tttataattatgt

SEQ ID NO: 156318 - DNA, 13 bp, Artificial Sequence
  Oligonucleotide for detection of SNP TSC0039428
acataattataaa

SEQ ID NO: 156319 - DNA, 13 bp, Artificial Sequence
  Oligonucleotide for detection of SNP TSC0039432
tttgtggatttta

SEQ ID NO: 156320 - DNA, 13 bp, Artificial Sequence
  Oligonucleotide for detection of SNP TSC0039432
taaaatccacaaa

SEQ ID NO: 156321 - DNA, 13 bp, Artificial Sequence
  Oligonucleotide for detection of SNP TSC0039432
tttgtgaatttta

SEQ ID NO: 156322 - DNA, 13 bp, Artificial Sequence
  Oligonucleotide for detection of SNP TSC0039432
taaaattcacaaa

SEQ ID NO: 156323 - DNA, 13 bp, Artificial Sequence
  Oligonucleotide for detection of SNP TSC0039432
ttcgtggatttta

SEQ ID NO: 156324 - DNA, 13 bp, Artificial Sequence
  Oligonucleotide for detection of SNP TSC0039432
taaaatccacgaa

SEQ ID NO: 156325 - DNA, 13 bp, Artificial Sequence
  Oligonucleotide for detection of SNP TSC0039432
ttcgtgaatttta

SEQ ID NO: 156326 - DNA, 13 bp, Artificial Sequence
  Oligonucleotide for detection of SNP TSC0039432
taaaattcacgaa

SEQ ID NO: 156327 - DNA, 13 bp, Artificial Sequence
  Oligonucleotide for detection of SNP TSC0039433
attttttgtgtgy

SEQ ID NO: 156328 - DNA, 13 bp, Artificial Sequence
  Oligonucleotide for detection of SNP TSC0039433
rcacacaaaaaat

SEQ ID NO: 156329 - DNA, 13 bp, Artificial Sequence
  Oligonucleotide for detection of SNP TSC0039433
gtatattgaagat

SEQ ID NO: 156330 - DNA, 13 bp, Artificial Sequence
  Oligonucleotide for detection of SNP TSC0039433
atcttcaatatac

SEQ ID NO: 156331 - DNA, 13 bp, Artificial Sequence
  Oligonucleotide for detection of SNP TSC0039433
gtatatagaagat

SEQ ID NO: 156332 - DNA, 13 bp, Artificial Sequence
  Oligonucleotide for detection of SNP TSC0039433
atcttctatatac

SEQ ID NO: 156333 - DNA, 13 bp, Artificial Sequence
  Oligonucleotide for detection of SNP TSC0039434
tataagatgaagt

SEQ ID NO: 156334 - DNA, 13 bp, Artificial Sequence
  Oligonucleotide for detection of SNP TSC0039434
acttcatcttata

SEQ ID NO: 156335 - DNA, 13 bp, Artificial Sequence
  Oligonucleotide for detection of SNP TSC0039434
tataaggtgaagt

SEQ ID NO: 156336 - DNA, 13 bp, Artificial Sequence
  Oligonucleotide for detection of SNP TSC0039434
acttcaccttata

SEQ ID NO: 156337 - DNA, 13 bp, Artificial Sequence
  Oligonucleotide for detection of SNP TSC0039435
tggataggtataa

SEQ ID NO: 156338 - DNA, 13 bp, Artificial Sequence
  Oligonucleotide for detection of SNP TSC0039435
ttatacctatcca

SEQ ID NO: 156339 - DNA, 13 bp, Artificial Sequence
  Oligonucleotide for detection of SNP TSC0039435
tggataagtataa

SEQ ID NO: 156340 - DNA, 13 bp, Artificial Sequence
  Oligonucleotide for detection of SNP TSC0039435
ttatacttatcca

SEQ ID NO: 156341 - DNA, 13 bp, Artificial Sequence
  Oligonucleotide for detection of SNP TSC0005376
aattttaaaaatt

SEQ ID NO: 156342 - DNA, 13 bp, Artificial Sequence
  Oligonucleotide for detection of SNP TSC0005376
aatttttaaaatt

SEQ ID NO: 156343 - DNA, 13 bp, Artificial Sequence
  Oligonucleotide for detection of SNP TSC0039436
agaataatttaaa

SEQ ID NO: 156344 - DNA, 13 bp, Artificial Sequence
  Oligonucleotide for detection of SNP TSC0039436
tttaaattattct

SEQ ID NO: 156345 - DNA, 13 bp, Artificial Sequence
  Oligonucleotide for detection of SNP TSC0039436
agaatagtttaaa

SEQ ID NO: 156346 - DNA, 13 bp, Artificial Sequence
  Oligonucleotide for detection of SNP TSC0039436
tttaaactattct

SEQ ID NO: 156347 - DNA, 13 bp, Artificial Sequence
  Oligonucleotide for detection of SNP TSC0039437
tttgatgtgatgy

SEQ ID NO: 156348 - DNA, 13 bp, Artificial Sequence
  Oligonucleotide for detection of SNP TSC0039437
rcatcacatcaaa

SEQ ID NO: 156349 - DNA, 13 bp, Artificial Sequence
  Oligonucleotide for detection of SNP TSC0039437
tttgatatgatgy

SEQ ID NO: 156350 - DNA, 13 bp, Artificial Sequence
  Oligonucleotide for detection of SNP TSC0039437
rcatcatatcaaa

SEQ ID NO: 156351 - DNA, 13 bp, Artificial Sequence
  Oligonucleotide for detection of SNP TSC0039438
tgtttagtatgay

SEQ ID NO: 156352 - DNA, 13 bp, Artificial Sequence
  Oligonucleotide for detection of SNP TSC0039438
rtcatactaaaca

SEQ ID NO: 156353 - DNA, 13 bp, Artificial Sequence
  Oligonucleotide for detection of SNP TSC0039438
tgtttaatatgay

SEQ ID NO: 156354 - DNA, 13 bp, Artificial Sequence
  Oligonucleotide for detection of SNP TSC0039438
rtcatattaaaca

SEQ ID NO: 156355 - DNA, 13 bp, Artificial Sequence
  Oligonucleotide for detection of SNP TSC0039438
tgtttagtacgay

SEQ ID NO: 156356 - DNA, 13 bp, Artificial Sequence
  Oligonucleotide for detection of SNP TSC0039438
rtcgtactaaaca

SEQ ID NO: 156357 - DNA, 13 bp, Artificial Sequence
  Oligonucleotide for detection of SNP TSC0039438
tgtttaatacgay

SEQ ID NO: 156358 - DNA, 13 bp, Artificial Sequence
  Oligonucleotide for detection of SNP TSC0039438
rtcgtattaaaca

SEQ ID NO: 156359 - DNA, 13 bp, Artificial Sequence
  Oligonucleotide for detection of SNP TSC0039439
gattatattaagt

SEQ ID NO: 156360 - DNA, 13 bp, Artificial Sequence
  Oligonucleotide for detection of SNP TSC0039439
acttaatataatc

SEQ ID NO: 156361 - DNA, 13 bp, Artificial Sequence
  Oligonucleotide for detection of SNP TSC0039439
gattatgttaagt

SEQ ID NO: 156362 - DNA, 13 bp, Artificial Sequence
  Oligonucleotide for detection of SNP TSC0039439
acttaacataatc

SEQ ID NO: 156363 - DNA, 13 bp, Artificial Sequence
  Oligonucleotide for detection of SNP TSC0039439
gattacgttaagt

SEQ ID NO: 156364 - DNA, 13 bp, Artificial Sequence
  Oligonucleotide for detection of SNP TSC0039439
acttaacgtaatc

SEQ ID NO: 156365 - DNA, 13 bp, Artificial Sequence
  Oligonucleotide for detection of SNP TSC0039439
atttgatgtggty

SEQ ID NO: 156366 - DNA, 13 bp, Artificial Sequence
  Oligonucleotide for detection of SNP TSC0039439
raccacatcaaat

SEQ ID NO: 156367 - DNA, 13 bp, Artificial Sequence
  Oligonucleotide for detection of SNP TSC0039439
atttgacgtggty

SEQ ID NO: 156368 - DNA, 13 bp, Artificial Sequence
  Oligonucleotide for detection of SNP TSC0039439
raccacgtcaaat

SEQ ID NO: 156369 - DNA, 13 bp, Artificial Sequence
  Oligonucleotide for detection of SNP TSC0039442
tggttgtttatag

SEQ ID NO: 156370 - DNA, 13 bp, Artificial Sequence
  Oligonucleotide for detection of SNP TSC0039442
ctataaacaacca

SEQ ID NO: 156371 - DNA, 13 bp, Artificial Sequence
  Oligonucleotide for detection of SNP TSC0039442
tggttggttatag

SEQ ID NO: 156372 - DNA, 13 bp, Artificial Sequence
  Oligonucleotide for detection of SNP TSC0039442
ctataaccaacca

SEQ ID NO: 156373 - DNA, 13 bp, Artificial Sequence
  Oligonucleotide for detection of SNP TSC0039442
ttgtaaataatta

SEQ ID NO: 156374 - DNA, 13 bp, Artificial Sequence
  Oligonucleotide for detection of SNP TSC0039442
taattatttacaa

SEQ ID NO: 156375 - DNA, 13 bp, Artificial Sequence
  Oligonucleotide for detection of SNP TSC0039442
ttgtaattaatta

SEQ ID NO: 156376 - DNA, 13 bp, Artificial Sequence
  Oligonucleotide for detection of SNP TSC0039442
taattaattacaa

SEQ ID NO: 156377 - DNA, 13 bp, Artificial Sequence
  Oligonucleotide for detection of SNP TSC0039443
gaatgtgttataa

SEQ ID NO: 156378 - DNA, 13 bp, Artificial Sequence
  Oligonucleotide for detection of SNP TSC0039443
ttataacacattc

SEQ ID NO: 156379 - DNA, 13 bp, Artificial Sequence
  Oligonucleotide for detection of SNP TSC0039444
tggaatgttgaty

SEQ ID NO: 156380 - DNA, 13 bp, Artificial Sequence
  Oligonucleotide for detection of SNP TSC0039444
ratcaacattcca

SEQ ID NO: 156381 - DNA, 13 bp, Artificial Sequence
  Oligonucleotide for detection of SNP TSC0039444
tggaatattgaty

SEQ ID NO: 156382 - DNA, 13 bp, Artificial Sequence
  Oligonucleotide for detection of SNP TSC0039444
ratcaatattcca

SEQ ID NO: 156383 - DNA, 13 bp, Artificial Sequence
  Oligonucleotide for detection of SNP TSC0039445
agagaaaaagaaa

SEQ ID NO: 156384 - DNA, 13 bp, Artificial Sequence
  Oligonucleotide for detection of SNP TSC0039445
tttctttttctct

SEQ ID NO: 156385 - DNA, 13 bp, Artificial Sequence
  Oligonucleotide for detection of SNP TSC0039445
agagaagaagaaa

SEQ ID NO: 156386 - DNA, 13 bp, Artificial Sequence
  Oligonucleotide for detection of SNP TSC0039445
tttcttcttctct

SEQ ID NO: 156387 - DNA, 13 bp, Artificial Sequence
  Oligonucleotide for detection of SNP TSC0039446
gttgagaaagaga

SEQ ID NO: 156388 - DNA, 13 bp, Artificial Sequence
  Oligonucleotide for detection of SNP TSC0039446
tctctttctcaac

SEQ ID NO: 156389 - DNA, 13 bp, Artificial Sequence
  Oligonucleotide for detection of SNP TSC0039446
gttgaggaagaga

SEQ ID NO: 156390 - DNA, 13 bp, Artificial Sequence
  Oligonucleotide for detection of SNP TSC0039446
tctcttcctcaac

SEQ ID NO: 156391 - DNA, 13 bp, Artificial Sequence
  Oligonucleotide for detection of SNP TSC0039447
ataataaaattgt

SEQ ID NO: 156392 - DNA, 13 bp, Artificial Sequence
  Oligonucleotide for detection of SNP TSC0039447
acaattttattat

SEQ ID NO: 156393 - DNA, 13 bp, Artificial Sequence
  Oligonucleotide for detection of SNP TSC0039447
ataatataattgt

SEQ ID NO: 156394 - DNA, 13 bp, Artificial Sequence
  Oligonucleotide for detection of SNP TSC0039447
acaattatattat

SEQ ID NO: 156395 - DNA, 13 bp, Artificial Sequence
  Oligonucleotide for detection of SNP TSC0039447
ataattttattat

SEQ ID NO: 156396 - DNA, 13 bp, Artificial Sequence
  Oligonucleotide for detection of SNP TSC0039447
ataataaaattat

SEQ ID NO: 156397 - DNA, 13 bp, Artificial Sequence
  Oligonucleotide for detection of SNP TSC0039447
ataattgtattat

SEQ ID NO: 156398 - DNA, 13 bp, Artificial Sequence
  Oligonucleotide for detection of SNP TSC0039447
ataatacaattat

SEQ ID NO: 156399 - DNA, 13 bp, Artificial Sequence
  Oligonucleotide for detection of SNP TSC0039448
aagtatttgtttg

SEQ ID NO: 156400 - DNA, 13 bp, Artificial Sequence
  Oligonucleotide for detection of SNP TSC0039448
caaacaaatactt

SEQ ID NO: 156401 - DNA, 13 bp, Artificial Sequence
  Oligonucleotide for detection of SNP TSC0039448
aagtatgtgtttg

SEQ ID NO: 156402 - DNA, 13 bp, Artificial Sequence
  Oligonucleotide for detection of SNP TSC0039448
caaacacatactt

SEQ ID NO: 156403 - DNA, 13 bp, Artificial Sequence
  Oligonucleotide for detection of SNP TSC0039448
tagatagatgttt

SEQ ID NO: 156404 - DNA, 13 bp, Artificial Sequence
  Oligonucleotide for detection of SNP TSC0039448
aaacatctatcta

SEQ ID NO: 156405 - DNA, 13 bp, Artificial Sequence
  Oligonucleotide for detection of SNP TSC0039448
tagatatatgttt

SEQ ID NO: 156406 - DNA, 13 bp, Artificial Sequence
  Oligonucleotide for detection of SNP TSC0039448
aaacatatatcta

SEQ ID NO: 156407 - DNA, 13 bp, Artificial Sequence
  Oligonucleotide for detection of SNP TSC0000982
tgagtttggtgtg

SEQ ID NO: 156408 - DNA, 13 bp, Artificial Sequence
  Oligonucleotide for detection of SNP TSC0000982
cacaccaaactca

SEQ ID NO: 156409 - DNA, 13 bp, Artificial Sequence
  Oligonucleotide for detection of SNP TSC0000982
tgagtttggcgtg

SEQ ID NO: 156410 - DNA, 13 bp, Artificial Sequence
  Oligonucleotide for detection of SNP TSC0000982
cacgccaaactca

SEQ ID NO: 156411 - DNA, 13 bp, Artificial Sequence
  Oligonucleotide for detection of SNP TSC0000982
tatgttaggttta

SEQ ID NO: 156412 - DNA, 13 bp, Artificial Sequence
  Oligonucleotide for detection of SNP TSC0000982
taaacctaacata

SEQ ID NO: 156413 - DNA, 13 bp, Artificial Sequence
  Oligonucleotide for detection of SNP TSC0000982
tacgttaggttta

SEQ ID NO: 156414 - DNA, 13 bp, Artificial Sequence
  Oligonucleotide for detection of SNP TSC0000982
taaacctaacgta

SEQ ID NO: 156415 - DNA, 13 bp, Artificial Sequence
  Oligonucleotide for detection of SNP TSC0001415
aaaataattattt

SEQ ID NO: 156416 - DNA, 13 bp, Artificial Sequence
  Oligonucleotide for detection of SNP TSC0001415
aaataattatttt

SEQ ID NO: 156417 - DNA, 13 bp, Artificial Sequence
  Oligonucleotide for detection of SNP TSC0000830
tatggtggggagg

SEQ ID NO: 156418 - DNA, 13 bp, Artificial Sequence
  Oligonucleotide for detection of SNP TSC0000830
cctccccaccata

SEQ ID NO: 156419 - DNA, 13 bp, Artificial Sequence
  Oligonucleotide for detection of SNP TSC0000830
tatggtagggagg

SEQ ID NO: 156420 - DNA, 13 bp, Artificial Sequence
  Oligonucleotide for detection of SNP TSC0000830
cctccctaccata

SEQ ID NO: 156421 - DNA, 13 bp, Artificial Sequence
  Oligonucleotide for detection of SNP TSC0000831
atgtagttggttg

SEQ ID NO: 156422 - DNA, 13 bp, Artificial Sequence
  Oligonucleotide for detection of SNP TSC0000831
caaccaactacat

SEQ ID NO: 156423 - DNA, 13 bp, Artificial Sequence
  Oligonucleotide for detection of SNP TSC0000831
atgtaggtggttg

SEQ ID NO: 156424 - DNA, 13 bp, Artificial Sequence
  Oligonucleotide for detection of SNP TSC0000831
caaccacctacat

SEQ ID NO: 156425 - DNA, 13 bp, Artificial Sequence
  Oligonucleotide for detection of SNP TSC0000831
tagttaattgtat

SEQ ID NO: 156426 - DNA, 13 bp, Artificial Sequence
  Oligonucleotide for detection of SNP TSC0000831
atacaattaacta

SEQ ID NO: 156427 - DNA, 13 bp, Artificial Sequence
  Oligonucleotide for detection of SNP TSC0000831
tagttatttgtat

SEQ ID NO: 156428 - DNA, 13 bp, Artificial Sequence
  Oligonucleotide for detection of SNP TSC0000831
atacaaataacta

SEQ ID NO: 156429 - DNA, 13 bp, Artificial Sequence
  Oligonucleotide for detection of SNP TSC0039451
gtagtgtgaaatg

SEQ ID NO: 156430 - DNA, 13 bp, Artificial Sequence
  Oligonucleotide for detection of SNP TSC0039451
catttcacactac

SEQ ID NO: 156431 - DNA, 13 bp, Artificial Sequence
  Oligonucleotide for detection of SNP TSC0039451
gtagtgcgaaatg

SEQ ID NO: 156432 - DNA, 13 bp, Artificial Sequence
  Oligonucleotide for detection of SNP TSC0039451
catttcgcactac

SEQ ID NO: 156433 - DNA, 13 bp, Artificial Sequence
  Oligonucleotide for detection of SNP TSC0039451
tattttgtattgy

SEQ ID NO: 156434 - DNA, 13 bp, Artificial Sequence
  Oligonucleotide for detection of SNP TSC0039451
rcaatacaaaata

SEQ ID NO: 156435 - DNA, 13 bp, Artificial Sequence
  Oligonucleotide for detection of SNP TSC0039451
tattttatattgy

SEQ ID NO: 156436 - DNA, 13 bp, Artificial Sequence
  Oligonucleotide for detection of SNP TSC0039451
rcaatataaaata

SEQ ID NO: 156437 - DNA, 13 bp, Artificial Sequence
  Oligonucleotide for detection of SNP TSC0039451
tatttcgtattgy

SEQ ID NO: 156438 - DNA, 13 bp, Artificial Sequence
  Oligonucleotide for detection of SNP TSC0039451
rcaatacgaaata

SEQ ID NO: 156439 - DNA, 13 bp, Artificial Sequence
  Oligonucleotide for detection of SNP TSC0039452
ttttaatgttgta

SEQ ID NO: 156440 - DNA, 13 bp, Artificial Sequence
  Oligonucleotide for detection of SNP TSC0039452
tacaacattaaaa

SEQ ID NO: 156441 - DNA, 13 bp, Artificial Sequence
  Oligonucleotide for detection of SNP TSC0039452
ttttaacgttgta

SEQ ID NO: 156442 - DNA, 13 bp, Artificial Sequence
  Oligonucleotide for detection of SNP TSC0039452
tacaacgttaaaa

SEQ ID NO: 156443 - DNA, 13 bp, Artificial Sequence
  Oligonucleotide for detection of SNP TSC0039452
tatagtgttagag

SEQ ID NO: 156444 - DNA, 13 bp, Artificial Sequence
  Oligonucleotide for detection of SNP TSC0039452
ctctaacactata

SEQ ID NO: 156445 - DNA, 13 bp, Artificial Sequence
  Oligonucleotide for detection of SNP TSC0039452
tatagtattagag

SEQ ID NO: 156446 - DNA, 13 bp, Artificial Sequence
  Oligonucleotide for detection of SNP TSC0039452
ctctaatactata

SEQ ID NO: 156447 - DNA, 13 bp, Artificial Sequence
  Oligonucleotide for detection of SNP TSC0039452
tatagcgttagag

SEQ ID NO: 156448 - DNA, 13 bp, Artificial Sequence
  Oligonucleotide for detection of SNP TSC0039452
ctctaacgctata

SEQ ID NO: 156449 - DNA, 13 bp, Artificial Sequence
  Oligonucleotide for detection of SNP TSC0000084
aataatttatttt

SEQ ID NO: 156450 - DNA, 13 bp, Artificial Sequence
  Oligonucleotide for detection of SNP TSC0000084
aaaataaattatt

SEQ ID NO: 156451 - DNA, 13 bp, Artificial Sequence
  Oligonucleotide for detection of SNP TSC0000084
aataatgtatttt

SEQ ID NO: 156452 - DNA, 13 bp, Artificial Sequence
  Oligonucleotide for detection of SNP TSC0000084
aaaatacattatt

SEQ ID NO: 156453 - DNA, 13 bp, Artificial Sequence
  Oligonucleotide for detection of SNP TSC0000084
aaagtagattgtt

SEQ ID NO: 156454 - DNA, 13 bp, Artificial Sequence
  Oligonucleotide for detection of SNP TSC0000084
aacaatctacttt

SEQ ID NO: 156455 - DNA, 13 bp, Artificial Sequence
  Oligonucleotide for detection of SNP TSC0000084
aaagtatattgtt

SEQ ID NO: 156456 - DNA, 13 bp, Artificial Sequence
  Oligonucleotide for detection of SNP TSC0000084
aacaatatacttt

SEQ ID NO: 156457 - DNA, 13 bp, Artificial Sequence
  Oligonucleotide for detection of SNP TSC0000085
ataatgatggggg

SEQ ID NO: 156458 - DNA, 13 bp, Artificial Sequence
  Oligonucleotide for detection of SNP TSC0000085
cccccatcattat

SEQ ID NO: 156459 - DNA, 13 bp, Artificial Sequence
  Oligonucleotide for detection of SNP TSC0000085
ataatggtggggg

SEQ ID NO: 156460 - DNA, 13 bp, Artificial Sequence
  Oligonucleotide for detection of SNP TSC0000085
cccccaccattat

SEQ ID NO: 156461 - DNA, 13 bp, Artificial Sequence
  Oligonucleotide for detection of SNP TSC0001096
ttttttggtttga

SEQ ID NO: 156462 - DNA, 13 bp, Artificial Sequence
  Oligonucleotide for detection of SNP TSC0001096
tcaaaccaaaaaa

SEQ ID NO: 156463 - DNA, 13 bp, Artificial Sequence
  Oligonucleotide for detection of SNP TSC0001096
ttttttagtttga

SEQ ID NO: 156464 - DNA, 13 bp, Artificial Sequence
  Oligonucleotide for detection of SNP TSC0001096
tcaaactaaaaaa

SEQ ID NO: 156465 - DNA, 13 bp, Artificial Sequence
  Oligonucleotide for detection of SNP TSC0039453
ggtaaaaaattta

SEQ ID NO: 156466 - DNA, 13 bp, Artificial Sequence
  Oligonucleotide for detection of SNP TSC0039453
taaattttttacc

SEQ ID NO: 156467 - DNA, 13 bp, Artificial Sequence
  Oligonucleotide for detection of SNP TSC0039453
ggtaaagaattta

SEQ ID NO: 156468 - DNA, 13 bp, Artificial Sequence
  Oligonucleotide for detection of SNP TSC0039453
taaattctttacc

SEQ ID NO: 156469 - DNA, 13 bp, Artificial Sequence
  Oligonucleotide for detection of SNP TSC0039456
attaaaatttttt

SEQ ID NO: 156470 - DNA, 13 bp, Artificial Sequence
  Oligonucleotide for detection of SNP TSC0039456
aaaaaattttaat

SEQ ID NO: 156471 - DNA, 13 bp, Artificial Sequence
  Oligonucleotide for detection of SNP TSC0039456
attaaattttttt

SEQ ID NO: 156472 - DNA, 13 bp, Artificial Sequence
  Oligonucleotide for detection of SNP TSC0039456
aaaaaaatttaat

SEQ ID NO: 156473 - DNA, 13 bp, Artificial Sequence
  Oligonucleotide for detection of SNP TSC0039456
aaagagttttaat

SEQ ID NO: 156474 - DNA, 13 bp, Artificial Sequence
  Oligonucleotide for detection of SNP TSC0039456
attaaaactcttt

SEQ ID NO: 156475 - DNA, 13 bp, Artificial Sequence
  Oligonucleotide for detection of SNP TSC0039456
aaagaggtttaat

SEQ ID NO: 156476 - DNA, 13 bp, Artificial Sequence
  Oligonucleotide for detection of SNP TSC0039456
attaaacctcttt

SEQ ID NO: 156477 - DNA, 13 bp, Artificial Sequence
  Oligonucleotide for detection of SNP TSC0039457
atttgtgattata

SEQ ID NO: 156478 - DNA, 13 bp, Artificial Sequence
  Oligonucleotide for detection of SNP TSC0039457
tataatcacaaat

SEQ ID NO: 156479 - DNA, 13 bp, Artificial Sequence
  Oligonucleotide for detection of SNP TSC0039457
atttgcgattata

SEQ ID NO: 156480 - DNA, 13 bp, Artificial Sequence
  Oligonucleotide for detection of SNP TSC0039457
tataatcgcaaat

SEQ ID NO: 156481 - DNA, 13 bp, Artificial Sequence
  Oligonucleotide for detection of SNP TSC0039458
ttttgtggtataa

SEQ ID NO: 156482 - DNA, 13 bp, Artificial Sequence
  Oligonucleotide for detection of SNP TSC0039458
ttataccacaaaa

SEQ ID NO: 156483 - DNA, 13 bp, Artificial Sequence
  Oligonucleotide for detection of SNP TSC0039458
ttttgtagtataa

SEQ ID NO: 156484 - DNA, 13 bp, Artificial Sequence
  Oligonucleotide for detection of SNP TSC0039458
ttatactacaaaa

SEQ ID NO: 156485 - DNA, 13 bp, Artificial Sequence
  Oligonucleotide for detection of SNP TSC0039459
aatggggtaatag

SEQ ID NO: 156486 - DNA, 13 bp, Artificial Sequence
  Oligonucleotide for detection of SNP TSC0039459
ctattaccccatt

SEQ ID NO: 156487 - DNA, 13 bp, Artificial Sequence
  Oligonucleotide for detection of SNP TSC0039459
aatgggataatag

SEQ ID NO: 156488 - DNA, 13 bp, Artificial Sequence
  Oligonucleotide for detection of SNP TSC0039459
ctattatcccatt

SEQ ID NO: 156489 - DNA, 13 bp, Artificial Sequence
  Oligonucleotide for detection of SNP TSC0039461
ttagtatggtgaa

SEQ ID NO: 156490 - DNA, 13 bp, Artificial Sequence
  Oligonucleotide for detection of SNP TSC0039461
ttcaccatactaa

SEQ ID NO: 156491 - DNA, 13 bp, Artificial Sequence
  Oligonucleotide for detection of SNP TSC0039461
ttagtacggtgaa

SEQ ID NO: 156492 - DNA, 13 bp, Artificial Sequence
  Oligonucleotide for detection of SNP TSC0039461
ttcaccgtactaa

SEQ ID NO: 156493 - DNA, 13 bp, Artificial Sequence
  Oligonucleotide for detection of SNP TSC0039461
ttagtatggcgaa

SEQ ID NO: 156494 - DNA, 13 bp, Artificial Sequence
  Oligonucleotide for detection of SNP TSC0039461
ttcgccatactaa

SEQ ID NO: 156495 - DNA, 13 bp, Artificial Sequence
  Oligonucleotide for detection of SNP TSC0039461
ttagtacggcgaa

SEQ ID NO: 156496 - DNA, 13 bp, Artificial Sequence
  Oligonucleotide for detection of SNP TSC0039461
ttcgccgtactaa

SEQ ID NO: 156497 - DNA, 13 bp, Artificial Sequence
  Oligonucleotide for detection of SNP TSC0039461
ttcgttgtgttgg

SEQ ID NO: 156498 - DNA, 13 bp, Artificial Sequence
  Oligonucleotide for detection of SNP TSC0039461
ccaacacaacgaa

SEQ ID NO: 156499 - DNA, 13 bp, Artificial Sequence
  Oligonucleotide for detection of SNP TSC0039461
ttcgttatgttgg

SEQ ID NO: 156500 - DNA, 13 bp, Artificial Sequence
  Oligonucleotide for detection of SNP TSC0039461
ccaacataacgaa

SEQ ID NO: 156501 - DNA, 13 bp, Artificial Sequence
  Oligonucleotide for detection of SNP TSC0039461
ttcgtcgtgttgg

SEQ ID NO: 156502 - DNA, 13 bp, Artificial Sequence
  Oligonucleotide for detection of SNP TSC0039461
ccaacacgacgaa

SEQ ID NO: 156503 - DNA, 13 bp, Artificial Sequence
  Oligonucleotide for detection of SNP TSC0039462
ggggtttggttty

SEQ ID NO: 156504 - DNA, 13 bp, Artificial Sequence
  Oligonucleotide for detection of SNP TSC0039462
raaaccaaacccc

SEQ ID NO: 156505 - DNA, 13 bp, Artificial Sequence
  Oligonucleotide for detection of SNP TSC0039462
ggggttgggttty

SEQ ID NO: 156506 - DNA, 13 bp, Artificial Sequence
  Oligonucleotide for detection of SNP TSC0039462
raaacccaacccc

SEQ ID NO: 156507 - DNA, 13 bp, Artificial Sequence
  Oligonucleotide for detection of SNP TSC0039462
ggggttcggttty

SEQ ID NO: 156508 - DNA, 13 bp, Artificial Sequence
  Oligonucleotide for detection of SNP TSC0039462
raaaccgaacccc

SEQ ID NO: 156509 - DNA, 13 bp, Artificial Sequence
  Oligonucleotide for detection of SNP TSC0039462
ggggtcgggttty

SEQ ID NO: 156510 - DNA, 13 bp, Artificial Sequence
  Oligonucleotide for detection of SNP TSC0039462
raaacccgacccc

SEQ ID NO: 156511 - DNA, 13 bp, Artificial Sequence
  Oligonucleotide for detection of SNP TSC0039462
ggggttggattty

SEQ ID NO: 156512 - DNA, 13 bp, Artificial Sequence
  Oligonucleotide for detection of SNP TSC0039462
raaatccaacccc

SEQ ID NO: 156513 - DNA, 13 bp, Artificial Sequence
  Oligonucleotide for detection of SNP TSC0039462
ggggtttgattty

SEQ ID NO: 156514 - DNA, 13 bp, Artificial Sequence
  Oligonucleotide for detection of SNP TSC0039462
raaatcaaacccc

SEQ ID NO: 156515 - DNA, 13 bp, Artificial Sequence
  Oligonucleotide for detection of SNP TSC0039462
ggggtcggattty

SEQ ID NO: 156516 - DNA, 13 bp, Artificial Sequence
  Oligonucleotide for detection of SNP TSC0039462
raaatccgacccc

SEQ ID NO: 156517 - DNA, 13 bp, Artificial Sequence
  Oligonucleotide for detection of SNP TSC0039462
ggggttcgattty

SEQ ID NO: 156518 - DNA, 13 bp, Artificial Sequence
  Oligonucleotide for detection of SNP TSC0039462
raaatcgaacccc

SEQ ID NO: 156519 - DNA, 13 bp, Artificial Sequence
  Oligonucleotide for detection of SNP TSC0000253
ttttaaattgtgg

SEQ ID NO: 156520 - DNA, 13 bp, Artificial Sequence
  Oligonucleotide for detection of SNP TSC0000253
ccacaatttaaaa

SEQ ID NO: 156521 - DNA, 13 bp, Artificial Sequence
  Oligonucleotide for detection of SNP TSC0000253
ttttaagttgtgg

SEQ ID NO: 156522 - DNA, 13 bp, Artificial Sequence
  Oligonucleotide for detection of SNP TSC0000253
ccacaacttaaaa

SEQ ID NO: 156523 - DNA, 13 bp, Artificial Sequence
  Oligonucleotide for detection of SNP TSC0000253
ttttaaatcgtgg

SEQ ID NO: 156524 - DNA, 13 bp, Artificial Sequence
  Oligonucleotide for detection of SNP TSC0000253
ccacgatttaaaa

SEQ ID NO: 156525 - DNA, 13 bp, Artificial Sequence
  Oligonucleotide for detection of SNP TSC0000253
ttttaagtcgtgg

SEQ ID NO: 156526 - DNA, 13 bp, Artificial Sequence
  Oligonucleotide for detection of SNP TSC0000253
ccacgacttaaaa

SEQ ID NO: 156527 - DNA, 13 bp, Artificial Sequence
  Oligonucleotide for detection of SNP TSC0039463
taagtaagaagtt

SEQ ID NO: 156528 - DNA, 13 bp, Artificial Sequence
  Oligonucleotide for detection of SNP TSC0039463
aacttcttactta

SEQ ID NO: 156529 - DNA, 13 bp, Artificial Sequence
  Oligonucleotide for detection of SNP TSC0039463
taagtaggaagtt

SEQ ID NO: 156530 - DNA, 13 bp, Artificial Sequence
  Oligonucleotide for detection of SNP TSC0039463
aacttcctactta

SEQ ID NO: 156531 - DNA, 13 bp, Artificial Sequence
  Oligonucleotide for detection of SNP TSC0000661
ataaaggaataty

SEQ ID NO: 156532 - DNA, 13 bp, Artificial Sequence
  Oligonucleotide for detection of SNP TSC0000661
ratattcctttat

SEQ ID NO: 156533 - DNA, 13 bp, Artificial Sequence
  Oligonucleotide for detection of SNP TSC0000661
ataaagaaataty

SEQ ID NO: 156534 - DNA, 13 bp, Artificial Sequence
  Oligonucleotide for detection of SNP TSC0000661
ratatttctttat

SEQ ID NO: 156535 - DNA, 13 bp, Artificial Sequence
  Oligonucleotide for detection of SNP TSC0039464
ttttgtaagattt

SEQ ID NO: 156536 - DNA, 13 bp, Artificial Sequence
  Oligonucleotide for detection of SNP TSC0039464
aaatcttacaaaa

SEQ ID NO: 156537 - DNA, 13 bp, Artificial Sequence
  Oligonucleotide for detection of SNP TSC0039466
tgtataattttat

SEQ ID NO: 156538 - DNA, 13 bp, Artificial Sequence
  Oligonucleotide for detection of SNP TSC0039466
ataaaattataca

SEQ ID NO: 156539 - DNA, 13 bp, Artificial Sequence
  Oligonucleotide for detection of SNP TSC0039466
tgtatagttttat

SEQ ID NO: 156540 - DNA, 13 bp, Artificial Sequence
  Oligonucleotide for detection of SNP TSC0039466
ataaaactataca

SEQ ID NO: 156541 - DNA, 13 bp, Artificial Sequence
  Oligonucleotide for detection of SNP TSC0039468
ggatttaggaagg

SEQ ID NO: 156542 - DNA, 13 bp, Artificial Sequence
  Oligonucleotide for detection of SNP TSC0039468
ccttcctaaatcc

SEQ ID NO: 156543 - DNA, 13 bp, Artificial Sequence
  Oligonucleotide for detection of SNP TSC0039468
ggatttgggaagg

SEQ ID NO: 156544 - DNA, 13 bp, Artificial Sequence
  Oligonucleotide for detection of SNP TSC0039468
ccttcccaaatcc

SEQ ID NO: 156545 - DNA, 13 bp, Artificial Sequence
  Oligonucleotide for detection of SNP TSC0039468
ggattcgggaagg

SEQ ID NO: 156546 - DNA, 13 bp, Artificial Sequence
  Oligonucleotide for detection of SNP TSC0039468
ccttcccgaatcc

SEQ ID NO: 156547 - DNA, 13 bp, Artificial Sequence
  Oligonucleotide for detection of SNP TSC0039468
ttttttcgggtty

SEQ ID NO: 156548 - DNA, 13 bp, Artificial Sequence
  Oligonucleotide for detection of SNP TSC0039468
raacccgaaaaaa

SEQ ID NO: 156549 - DNA, 13 bp, Artificial Sequence
  Oligonucleotide for detection of SNP TSC0039469
attatgagttatt

SEQ ID NO: 156550 - DNA, 13 bp, Artificial Sequence
  Oligonucleotide for detection of SNP TSC0039469
aataactcataat

SEQ ID NO: 156551 - DNA, 13 bp, Artificial Sequence
  Oligonucleotide for detection of SNP TSC0039469
attatgggttatt

SEQ ID NO: 156552 - DNA, 13 bp, Artificial Sequence
  Oligonucleotide for detection of SNP TSC0039469
aataacccataat

SEQ ID NO: 156553 - DNA, 13 bp, Artificial Sequence
  Oligonucleotide for detection of SNP TSC0039469
attacgagttatt

SEQ ID NO: 156554 - DNA, 13 bp, Artificial Sequence
  Oligonucleotide for detection of SNP TSC0039469
aataactcgtaat

SEQ ID NO: 156555 - DNA, 13 bp, Artificial Sequence
  Oligonucleotide for detection of SNP TSC0039469
attacgggttatt

SEQ ID NO: 156556 - DNA, 13 bp, Artificial Sequence
  Oligonucleotide for detection of SNP TSC0039469
aataacccgtaat

SEQ ID NO: 156557 - DNA, 13 bp, Artificial Sequence
  Oligonucleotide for detection of SNP TSC0039473
ttattgaatataa

SEQ ID NO: 156558 - DNA, 13 bp, Artificial Sequence
  Oligonucleotide for detection of SNP TSC0039473
ttatattcaataa

SEQ ID NO: 156559 - DNA, 13 bp, Artificial Sequence
  Oligonucleotide for detection of SNP TSC0039473
ttattggatataa

SEQ ID NO: 156560 - DNA, 13 bp, Artificial Sequence
  Oligonucleotide for detection of SNP TSC0039473
ttatatccaataa

SEQ ID NO: 156561 - DNA, 13 bp, Artificial Sequence
  Oligonucleotide for detection of SNP TSC0039474
agaataataaggg

SEQ ID NO: 156562 - DNA, 13 bp, Artificial Sequence
  Oligonucleotide for detection of SNP TSC0039474
cccttattattct

SEQ ID NO: 156563 - DNA, 13 bp, Artificial Sequence
  Oligonucleotide for detection of SNP TSC0039474
agaatattaaggg

SEQ ID NO: 156564 - DNA, 13 bp, Artificial Sequence
  Oligonucleotide for detection of SNP TSC0039474
cccttaatattct

SEQ ID NO: 156565 - DNA, 13 bp, Artificial Sequence
  Oligonucleotide for detection of SNP TSC0039479
tgaataattatgg

SEQ ID NO: 156566 - DNA, 13 bp, Artificial Sequence
  Oligonucleotide for detection of SNP TSC0039479
ccataattattca

SEQ ID NO: 156567 - DNA, 13 bp, Artificial Sequence
  Oligonucleotide for detection of SNP TSC0039479
tgaatatttatgg

SEQ ID NO: 156568 - DNA, 13 bp, Artificial Sequence
  Oligonucleotide for detection of SNP TSC0039479
ccataaatattca

SEQ ID NO: 156569 - DNA, 13 bp, Artificial Sequence
  Oligonucleotide for detection of SNP TSC0039479
ttatagttgttta

SEQ ID NO: 156570 - DNA, 13 bp, Artificial Sequence
  Oligonucleotide for detection of SNP TSC0039479
taaacaactataa

SEQ ID NO: 156571 - DNA, 13 bp, Artificial Sequence
  Oligonucleotide for detection of SNP TSC0039479
ttatagatgttta

SEQ ID NO: 156572 - DNA, 13 bp, Artificial Sequence
  Oligonucleotide for detection of SNP TSC0039479
taaacatctataa

SEQ ID NO: 156573 - DNA, 13 bp, Artificial Sequence
  Oligonucleotide for detection of SNP TSC0039480
atttataagaata

SEQ ID NO: 156574 - DNA, 13 bp, Artificial Sequence
  Oligonucleotide for detection of SNP TSC0039480
tattcttataaat

SEQ ID NO: 156575 - DNA, 13 bp, Artificial Sequence
  Oligonucleotide for detection of SNP TSC0039480
atttatgagaata

SEQ ID NO: 156576 - DNA, 13 bp, Artificial Sequence
  Oligonucleotide for detection of SNP TSC0039480
tattctcataaat

SEQ ID NO: 156577 - DNA, 13 bp, Artificial Sequence
  Oligonucleotide for detection of SNP TSC0039480
atttacgagaata

SEQ ID NO: 156578 - DNA, 13 bp, Artificial Sequence
  Oligonucleotide for detection of SNP TSC0039480
tattctcgtaaat

SEQ ID NO: 156579 - DNA, 13 bp, Artificial Sequence
  Oligonucleotide for detection of SNP TSC0039480
tatttttgtggat

SEQ ID NO: 156580 - DNA, 13 bp, Artificial Sequence
  Oligonucleotide for detection of SNP TSC0039480
atccacaaaaata

SEQ ID NO: 156581 - DNA, 13 bp, Artificial Sequence
  Oligonucleotide for detection of SNP TSC0039480
tattttcgtggat

SEQ ID NO: 156582 - DNA, 13 bp, Artificial Sequence
  Oligonucleotide for detection of SNP TSC0039480
atccacgaaaata

SEQ ID NO: 156583 - DNA, 13 bp, Artificial Sequence
  Oligonucleotide for detection of SNP TSC0039483
ttttttaatatat

SEQ ID NO: 156584 - DNA, 13 bp, Artificial Sequence
  Oligonucleotide for detection of SNP TSC0039483
atatattaaaaaa

SEQ ID NO: 156585 - DNA, 13 bp, Artificial Sequence
  Oligonucleotide for detection of SNP TSC0039483
tttttttatatat

SEQ ID NO: 156586 - DNA, 13 bp, Artificial Sequence
  Oligonucleotide for detection of SNP TSC0039483
atatataaaaaaa

SEQ ID NO: 156587 - DNA, 13 bp, Artificial Sequence
  Oligonucleotide for detection of SNP TSC0039483
atgtattaaaaaa

SEQ ID NO: 156588 - DNA, 13 bp, Artificial Sequence
  Oligonucleotide for detection of SNP TSC0039483
ttttttaatacat

SEQ ID NO: 156589 - DNA, 13 bp, Artificial Sequence
  Oligonucleotide for detection of SNP TSC0039483
atgtataaaaaaa

SEQ ID NO: 156590 - DNA, 13 bp, Artificial Sequence
  Oligonucleotide for detection of SNP TSC0039483
tttttttatacat

SEQ ID NO: 156591 - DNA, 13 bp, Artificial Sequence
  Oligonucleotide for detection of SNP TSC0039484
agttttaatagtt

SEQ ID NO: 156592 - DNA, 13 bp, Artificial Sequence
  Oligonucleotide for detection of SNP TSC0039484
aactattaaaact

SEQ ID NO: 156593 - DNA, 13 bp, Artificial Sequence
  Oligonucleotide for detection of SNP TSC0039484
agtttttatagtt

SEQ ID NO: 156594 - DNA, 13 bp, Artificial Sequence
  Oligonucleotide for detection of SNP TSC0039484
aactataaaaact

SEQ ID NO: 156595 - DNA, 13 bp, Artificial Sequence
  Oligonucleotide for detection of SNP TSC0039484
aattgttgaaatt

SEQ ID NO: 156596 - DNA, 13 bp, Artificial Sequence
  Oligonucleotide for detection of SNP TSC0039484
aatttcaacaatt

SEQ ID NO: 156597 - DNA, 13 bp, Artificial Sequence
  Oligonucleotide for detection of SNP TSC0039484
aattgtagaaatt

SEQ ID NO: 156598 - DNA, 13 bp, Artificial Sequence
  Oligonucleotide for detection of SNP TSC0039484
aatttctacaatt

SEQ ID NO: 156599 - DNA, 13 bp, Artificial Sequence
  Oligonucleotide for detection of SNP TSC0008903
aattttttgtata

SEQ ID NO: 156600 - DNA, 13 bp, Artificial Sequence
  Oligonucleotide for detection of SNP TSC0008903
tatacaaaaaatt

SEQ ID NO: 156601 - DNA, 13 bp, Artificial Sequence
  Oligonucleotide for detection of SNP TSC0008903
aattttgtgtata

SEQ ID NO: 156602 - DNA, 13 bp, Artificial Sequence
  Oligonucleotide for detection of SNP TSC0008903
tatacacaaaatt

SEQ ID NO: 156603 - DNA, 13 bp, Artificial Sequence
  Oligonucleotide for detection of SNP TSC0008903
tgtataaaaaatt

SEQ ID NO: 156604 - DNA, 13 bp, Artificial Sequence
  Oligonucleotide for detection of SNP TSC0008903
aattttttataca

SEQ ID NO: 156605 - DNA, 13 bp, Artificial Sequence
  Oligonucleotide for detection of SNP TSC0008903
tgtatataaaatt

SEQ ID NO: 156606 - DNA, 13 bp, Artificial Sequence
  Oligonucleotide for detection of SNP TSC0008903
aattttatataca

SEQ ID NO: 156607 - DNA, 13 bp, Artificial Sequence
  Oligonucleotide for detection of SNP TSC0039485
atattaagttttt

SEQ ID NO: 156608 - DNA, 13 bp, Artificial Sequence
  Oligonucleotide for detection of SNP TSC0039485
aaaaacttaatat

SEQ ID NO: 156609 - DNA, 13 bp, Artificial Sequence
  Oligonucleotide for detection of SNP TSC0039486
gtgaagattaaat

SEQ ID NO: 156610 - DNA, 13 bp, Artificial Sequence
  Oligonucleotide for detection of SNP TSC0039486
atttaatcttcac

SEQ ID NO: 156611 - DNA, 13 bp, Artificial Sequence
  Oligonucleotide for detection of SNP TSC0039486
gtgaaggttaaat

SEQ ID NO: 156612 - DNA, 13 bp, Artificial Sequence
  Oligonucleotide for detection of SNP TSC0039486
atttaaccttcac

SEQ ID NO: 156613 - DNA, 13 bp, Artificial Sequence
  Oligonucleotide for detection of SNP TSC0039487
tagtgaaaaaatt

SEQ ID NO: 156614 - DNA, 13 bp, Artificial Sequence
  Oligonucleotide for detection of SNP TSC0039487
aattttttcacta

SEQ ID NO: 156615 - DNA, 13 bp, Artificial Sequence
  Oligonucleotide for detection of SNP TSC0039487
tagtgataaaatt

SEQ ID NO: 156616 - DNA, 13 bp, Artificial Sequence
  Oligonucleotide for detection of SNP TSC0039487
aattttatcacta

SEQ ID NO: 156617 - DNA, 13 bp, Artificial Sequence
  Oligonucleotide for detection of SNP TSC0039487
agtttttttatta

SEQ ID NO: 156618 - DNA, 13 bp, Artificial Sequence
  Oligonucleotide for detection of SNP TSC0039487
taataaaaaaact

SEQ ID NO: 156619 - DNA, 13 bp, Artificial Sequence
  Oligonucleotide for detection of SNP TSC0039487
agttttgttatta

SEQ ID NO: 156620 - DNA, 13 bp, Artificial Sequence
  Oligonucleotide for detection of SNP TSC0039487
taataacaaaact

SEQ ID NO: 156621 - DNA, 13 bp, Artificial Sequence
  Oligonucleotide for detection of SNP TSC0039488
aggtgggaagtaa

SEQ ID NO: 156622 - DNA, 13 bp, Artificial Sequence
  Oligonucleotide for detection of SNP TSC0039488
ttacttcccacct

SEQ ID NO: 156623 - DNA, 13 bp, Artificial Sequence
  Oligonucleotide for detection of SNP TSC0039488
aggtggaaagtaa

SEQ ID NO: 156624 - DNA, 13 bp, Artificial Sequence
  Oligonucleotide for detection of SNP TSC0039488
ttactttccacct

SEQ ID NO: 156625 - DNA, 13 bp, Artificial Sequence
  Oligonucleotide for detection of SNP TSC0006320
gtggatgtattaa

SEQ ID NO: 156626 - DNA, 13 bp, Artificial Sequence
  Oligonucleotide for detection of SNP TSC0006320
ttaatacatccac

SEQ ID NO: 156627 - DNA, 13 bp, Artificial Sequence
  Oligonucleotide for detection of SNP TSC0006320
gtggatatattaa

SEQ ID NO: 156628 - DNA, 13 bp, Artificial Sequence
  Oligonucleotide for detection of SNP TSC0006320
ttaatatatccac

SEQ ID NO: 156629 - DNA, 13 bp, Artificial Sequence
  Oligonucleotide for detection of SNP TSC0039494
ttttaatgggaaa

SEQ ID NO: 156630 - DNA, 13 bp, Artificial Sequence
  Oligonucleotide for detection of SNP TSC0039494
tttcccattaaaa

SEQ ID NO: 156631 - DNA, 13 bp, Artificial Sequence
  Oligonucleotide for detection of SNP TSC0039494
ttttaacgggaaa

SEQ ID NO: 156632 - DNA, 13 bp, Artificial Sequence
  Oligonucleotide for detection of SNP TSC0039494
tttcccgttaaaa

SEQ ID NO: 156633 - DNA, 13 bp, Artificial Sequence
  Oligonucleotide for detection of SNP TSC0039495
gaatatttattta

SEQ ID NO: 156634 - DNA, 13 bp, Artificial Sequence
  Oligonucleotide for detection of SNP TSC0039495
taaataaatattc

SEQ ID NO: 156635 - DNA, 13 bp, Artificial Sequence
  Oligonucleotide for detection of SNP TSC0039495
tgggtatatatty

SEQ ID NO: 156636 - DNA, 13 bp, Artificial Sequence
  Oligonucleotide for detection of SNP TSC0039495
raatatataccca

SEQ ID NO: 156637 - DNA, 13 bp, Artificial Sequence
  Oligonucleotide for detection of SNP TSC0039495
tgggtaaatatty

SEQ ID NO: 156638 - DNA, 13 bp, Artificial Sequence
  Oligonucleotide for detection of SNP TSC0039495
raatatttaccca

SEQ ID NO: 156639 - DNA, 13 bp, Artificial Sequence
  Oligonucleotide for detection of SNP TSC0039496
ataagatttttty

SEQ ID NO: 156640 - DNA, 13 bp, Artificial Sequence
  Oligonucleotide for detection of SNP TSC0039496
raaaaaatcttat

SEQ ID NO: 156641 - DNA, 13 bp, Artificial Sequence
  Oligonucleotide for detection of SNP TSC0039496
ataagagttttty

SEQ ID NO: 156642 - DNA, 13 bp, Artificial Sequence
  Oligonucleotide for detection of SNP TSC0039496
raaaaactcttat

SEQ ID NO: 156643 - DNA, 13 bp, Artificial Sequence
  Oligonucleotide for detection of SNP TSC0039496
ggggaaattttgt

SEQ ID NO: 156644 - DNA, 13 bp, Artificial Sequence
  Oligonucleotide for detection of SNP TSC0039496
acaaaatttcccc

SEQ ID NO: 156645 - DNA, 13 bp, Artificial Sequence
  Oligonucleotide for detection of SNP TSC0039496
ggggaatttttgt

SEQ ID NO: 156646 - DNA, 13 bp, Artificial Sequence
  Oligonucleotide for detection of SNP TSC0039496
acaaaaattcccc

SEQ ID NO: 156647 - DNA, 13 bp, Artificial Sequence
  Oligonucleotide for detection of SNP TSC0039497
gaggttgtttttg

SEQ ID NO: 156648 - DNA, 13 bp, Artificial Sequence
  Oligonucleotide for detection of SNP TSC0039497
caaaaacaacctc

SEQ ID NO: 156649 - DNA, 13 bp, Artificial Sequence
  Oligonucleotide for detection of SNP TSC0039497
gaggttatttttg

SEQ ID NO: 156650 - DNA, 13 bp, Artificial Sequence
  Oligonucleotide for detection of SNP TSC0039497
caaaaataacctc

SEQ ID NO: 156651 - DNA, 13 bp, Artificial Sequence
  Oligonucleotide for detection of SNP TSC0039497
gaggtcgtttttg

SEQ ID NO: 156652 - DNA, 13 bp, Artificial Sequence
  Oligonucleotide for detection of SNP TSC0039497
caaaaacgacctc

SEQ ID NO: 156653 - DNA, 13 bp, Artificial Sequence
  Oligonucleotide for detection of SNP TSC0039498
ttagtggttttty

SEQ ID NO: 156654 - DNA, 13 bp, Artificial Sequence
  Oligonucleotide for detection of SNP TSC0039498
raaaaaccactaa

SEQ ID NO: 156655 - DNA, 13 bp, Artificial Sequence
  Oligonucleotide for detection of SNP TSC0039498
ttagtgattttty

SEQ ID NO: 156656 - DNA, 13 bp, Artificial Sequence
  Oligonucleotide for detection of SNP TSC0039498
raaaaatcactaa

SEQ ID NO: 156657 - DNA, 13 bp, Artificial Sequence
  Oligonucleotide for detection of SNP TSC0039499
ttagaagtttatt

SEQ ID NO: 156658 - DNA, 13 bp, Artificial Sequence
  Oligonucleotide for detection of SNP TSC0039499
aataaacttctaa

SEQ ID NO: 156659 - DNA, 13 bp, Artificial Sequence
  Oligonucleotide for detection of SNP TSC0039499
ttagaaatttatt

SEQ ID NO: 156660 - DNA, 13 bp, Artificial Sequence
  Oligonucleotide for detection of SNP TSC0039499
aataaatttctaa

SEQ ID NO: 156661 - DNA, 13 bp, Artificial Sequence
  Oligonucleotide for detection of SNP TSC0039500
tttagtaagaaay

SEQ ID NO: 156662 - DNA, 13 bp, Artificial Sequence
  Oligonucleotide for detection of SNP TSC0039500
rtttcttactaaa

SEQ ID NO: 156663 - DNA, 13 bp, Artificial Sequence
  Oligonucleotide for detection of SNP TSC0039500
tttagtgagaaay

SEQ ID NO: 156664 - DNA, 13 bp, Artificial Sequence
  Oligonucleotide for detection of SNP TSC0039500
rtttctcactaaa

SEQ ID NO: 156665 - DNA, 13 bp, Artificial Sequence
  Oligonucleotide for detection of SNP TSC0039500
tttagcgagaaay

SEQ ID NO: 156666 - DNA, 13 bp, Artificial Sequence
  Oligonucleotide for detection of SNP TSC0039500
rtttctcgctaaa

SEQ ID NO: 156667 - DNA, 13 bp, Artificial Sequence
  Oligonucleotide for detection of SNP TSC0039500
gttttttgttgag

SEQ ID NO: 156668 - DNA, 13 bp, Artificial Sequence
  Oligonucleotide for detection of SNP TSC0039500
ctcaacaaaaaac

SEQ ID NO: 156669 - DNA, 13 bp, Artificial Sequence
  Oligonucleotide for detection of SNP TSC0039500
gtttttcgttgag

SEQ ID NO: 156670 - DNA, 13 bp, Artificial Sequence
  Oligonucleotide for detection of SNP TSC0039500
ctcaacgaaaaac

SEQ ID NO: 156671 - DNA, 13 bp, Artificial Sequence
  Oligonucleotide for detection of SNP TSC0039506
tttttgttttgtt

SEQ ID NO: 156672 - DNA, 13 bp, Artificial Sequence
  Oligonucleotide for detection of SNP TSC0039506
aacaaaacaaaaa

SEQ ID NO: 156673 - DNA, 13 bp, Artificial Sequence
  Oligonucleotide for detection of SNP TSC0039506
tttttgatttgtt

SEQ ID NO: 156674 - DNA, 13 bp, Artificial Sequence
  Oligonucleotide for detection of SNP TSC0039506
aacaaatcaaaaa

SEQ ID NO: 156675 - DNA, 13 bp, Artificial Sequence
  Oligonucleotide for detection of SNP TSC0039507
ggttttagtagtg

SEQ ID NO: 156676 - DNA, 13 bp, Artificial Sequence
  Oligonucleotide for detection of SNP TSC0039507
cactactaaaacc

SEQ ID NO: 156677 - DNA, 13 bp, Artificial Sequence
  Oligonucleotide for detection of SNP TSC0039507
ggtttttgtagtg

SEQ ID NO: 156678 - DNA, 13 bp, Artificial Sequence
  Oligonucleotide for detection of SNP TSC0039507
cactacaaaaacc

SEQ ID NO: 156679 - DNA, 13 bp, Artificial Sequence
  Oligonucleotide for detection of SNP TSC0039507
ggttttcgtagtg

SEQ ID NO: 156680 - DNA, 13 bp, Artificial Sequence
  Oligonucleotide for detection of SNP TSC0039507
cactacgaaaacc

SEQ ID NO: 156681 - DNA, 13 bp, Artificial Sequence
  Oligonucleotide for detection of SNP TSC0039507
tattgttgaggty

SEQ ID NO: 156682 - DNA, 13 bp, Artificial Sequence
  Oligonucleotide for detection of SNP TSC0039507
racctcaacaata

SEQ ID NO: 156683 - DNA, 13 bp, Artificial Sequence
  Oligonucleotide for detection of SNP TSC0039507
tattgtggaggty

SEQ ID NO: 156684 - DNA, 13 bp, Artificial Sequence
  Oligonucleotide for detection of SNP TSC0039507
racctccacaata

SEQ ID NO: 156685 - DNA, 13 bp, Artificial Sequence
  Oligonucleotide for detection of SNP TSC0039507
tattgcggaggty

SEQ ID NO: 156686 - DNA, 13 bp, Artificial Sequence
  Oligonucleotide for detection of SNP TSC0039507
racctccgcaata

SEQ ID NO: 156687 - DNA, 13 bp, Artificial Sequence
  Oligonucleotide for detection of SNP TSC0039508
tgaggagggtgtg

SEQ ID NO: 156688 - DNA, 13 bp, Artificial Sequence
  Oligonucleotide for detection of SNP TSC0039508
cacaccctcctca

SEQ ID NO: 156689 - DNA, 13 bp, Artificial Sequence
  Oligonucleotide for detection of SNP TSC0039508
tgaggaaggtgtg

SEQ ID NO: 156690 - DNA, 13 bp, Artificial Sequence
  Oligonucleotide for detection of SNP TSC0039508
cacaccttcctca

SEQ ID NO: 156691 - DNA, 13 bp, Artificial Sequence
  Oligonucleotide for detection of SNP TSC0039509
tttagtgtgtgty

SEQ ID NO: 156692 - DNA, 13 bp, Artificial Sequence
  Oligonucleotide for detection of SNP TSC0039509
racacacactaaa

SEQ ID NO: 156693 - DNA, 13 bp, Artificial Sequence
  Oligonucleotide for detection of SNP TSC0039509
tttagtatgtgty

SEQ ID NO: 156694 - DNA, 13 bp, Artificial Sequence
  Oligonucleotide for detection of SNP TSC0039509
racacatactaaa

SEQ ID NO: 156695 - DNA, 13 bp, Artificial Sequence
  Oligonucleotide for detection of SNP TSC0039510
tggagattgggag

SEQ ID NO: 156696 - DNA, 13 bp, Artificial Sequence
  Oligonucleotide for detection of SNP TSC0039510
ctcccaatctcca

SEQ ID NO: 156697 - DNA, 13 bp, Artificial Sequence
  Oligonucleotide for detection of SNP TSC0039510
tggagaatgggag

SEQ ID NO: 156698 - DNA, 13 bp, Artificial Sequence
  Oligonucleotide for detection of SNP TSC0039510
ctcccattctcca

SEQ ID NO: 156699 - DNA, 13 bp, Artificial Sequence
  Oligonucleotide for detection of SNP TSC0039514
tttgtgataggta

SEQ ID NO: 156700 - DNA, 13 bp, Artificial Sequence
  Oligonucleotide for detection of SNP TSC0039514
tacctatcacaaa

SEQ ID NO: 156701 - DNA, 13 bp, Artificial Sequence
  Oligonucleotide for detection of SNP TSC0039514
tttgtggtaggta

SEQ ID NO: 156702 - DNA, 13 bp, Artificial Sequence
  Oligonucleotide for detection of SNP TSC0039514
tacctaccacaaa

SEQ ID NO: 156703 - DNA, 13 bp, Artificial Sequence
  Oligonucleotide for detection of SNP TSC0039515
tatttgaaaaggt

SEQ ID NO: 156704 - DNA, 13 bp, Artificial Sequence
  Oligonucleotide for detection of SNP TSC0039515
accttttcaaata

SEQ ID NO: 156705 - DNA, 13 bp, Artificial Sequence
  Oligonucleotide for detection of SNP TSC0039518
gtaatttttttta

SEQ ID NO: 156706 - DNA, 13 bp, Artificial Sequence
  Oligonucleotide for detection of SNP TSC0039518
taaaaaaaattac

SEQ ID NO: 156707 - DNA, 13 bp, Artificial Sequence
  Oligonucleotide for detection of SNP TSC0039518
gtaattgttttta

SEQ ID NO: 156708 - DNA, 13 bp, Artificial Sequence
  Oligonucleotide for detection of SNP TSC0039518
taaaaacaattac

SEQ ID NO: 156709 - DNA, 13 bp, Artificial Sequence
  Oligonucleotide for detection of SNP TSC0039518
gtaatcgttttta

SEQ ID NO: 156710 - DNA, 13 bp, Artificial Sequence
  Oligonucleotide for detection of SNP TSC0039518
taaaaacgattac

SEQ ID NO: 156711 - DNA, 13 bp, Artificial Sequence
  Oligonucleotide for detection of SNP TSC0039518
taaagaggattgy

SEQ ID NO: 156712 - DNA, 13 bp, Artificial Sequence
  Oligonucleotide for detection of SNP TSC0039518
rcaatcctcttta

SEQ ID NO: 156713 - DNA, 13 bp, Artificial Sequence
  Oligonucleotide for detection of SNP TSC0039519
gttattaatgaga

SEQ ID NO: 156714 - DNA, 13 bp, Artificial Sequence
  Oligonucleotide for detection of SNP TSC0039519
tctcattaataac

SEQ ID NO: 156715 - DNA, 13 bp, Artificial Sequence
  Oligonucleotide for detection of SNP TSC0039519
gttattgatgaga

SEQ ID NO: 156716 - DNA, 13 bp, Artificial Sequence
  Oligonucleotide for detection of SNP TSC0039519
tctcatcaataac

SEQ ID NO: 156717 - DNA, 13 bp, Artificial Sequence
  Oligonucleotide for detection of SNP TSC0039519
gttatcgatgaga

SEQ ID NO: 156718 - DNA, 13 bp, Artificial Sequence
  Oligonucleotide for detection of SNP TSC0039519
tctcatcgataac

SEQ ID NO: 156719 - DNA, 13 bp, Artificial Sequence
  Oligonucleotide for detection of SNP TSC0039519
ttttattggtagy

SEQ ID NO: 156720 - DNA, 13 bp, Artificial Sequence
  Oligonucleotide for detection of SNP TSC0039519
rctaccaataaaa

SEQ ID NO: 156721 - DNA, 13 bp, Artificial Sequence
  Oligonucleotide for detection of SNP TSC0039519
ttttatcggtagy

SEQ ID NO: 156722 - DNA, 13 bp, Artificial Sequence
  Oligonucleotide for detection of SNP TSC0039519
rctaccgataaaa

SEQ ID NO: 156723 - DNA, 13 bp, Artificial Sequence
  Oligonucleotide for detection of SNP TSC0006978
tggtagtgaataa

SEQ ID NO: 156724 - DNA, 13 bp, Artificial Sequence
  Oligonucleotide for detection of SNP TSC0006978
ttattcactacca

SEQ ID NO: 156725 - DNA, 13 bp, Artificial Sequence
  Oligonucleotide for detection of SNP TSC0006978
tggtagcgaataa

SEQ ID NO: 156726 - DNA, 13 bp, Artificial Sequence
  Oligonucleotide for detection of SNP TSC0006978
ttattcgctacca

SEQ ID NO: 156727 - DNA, 13 bp, Artificial Sequence
  Oligonucleotide for detection of SNP TSC0039520
gagaggagaaaty

SEQ ID NO: 156728 - DNA, 13 bp, Artificial Sequence
  Oligonucleotide for detection of SNP TSC0039520
ratttctcctctc

SEQ ID NO: 156729 - DNA, 13 bp, Artificial Sequence
  Oligonucleotide for detection of SNP TSC0039520
gagaggggaaaty

SEQ ID NO: 156730 - DNA, 13 bp, Artificial Sequence
  Oligonucleotide for detection of SNP TSC0039520
ratttcccctctc

SEQ ID NO: 156731 - DNA, 13 bp, Artificial Sequence
  Oligonucleotide for detection of SNP TSC0039522
aagaagggtatag

SEQ ID NO: 156732 - DNA, 13 bp, Artificial Sequence
  Oligonucleotide for detection of SNP TSC0039522
ctatacccttctt

SEQ ID NO: 156733 - DNA, 13 bp, Artificial Sequence
  Oligonucleotide for detection of SNP TSC0039522
aagaagagtatag

SEQ ID NO: 156734 - DNA, 13 bp, Artificial Sequence
  Oligonucleotide for detection of SNP TSC0039522
ctatactcttctt

SEQ ID NO: 156735 - DNA, 13 bp, Artificial Sequence
  Oligonucleotide for detection of SNP TSC0039523
gtatttaagttty

SEQ ID NO: 156736 - DNA, 13 bp, Artificial Sequence
  Oligonucleotide for detection of SNP TSC0039523
raaacttaaatac

SEQ ID NO: 156737 - DNA, 13 bp, Artificial Sequence
  Oligonucleotide for detection of SNP TSC0039523
gtatttgagttty

SEQ ID NO: 156738 - DNA, 13 bp, Artificial Sequence
  Oligonucleotide for detection of SNP TSC0039523
raaactcaaatac

SEQ ID NO: 156739 - DNA, 13 bp, Artificial Sequence
  Oligonucleotide for detection of SNP TSC0039524
tgggttagttagy

SEQ ID NO: 156740 - DNA, 13 bp, Artificial Sequence
  Oligonucleotide for detection of SNP TSC0039524
rctaactaaccca

SEQ ID NO: 156741 - DNA, 13 bp, Artificial Sequence
  Oligonucleotide for detection of SNP TSC0039524
tgggttggttagy

SEQ ID NO: 156742 - DNA, 13 bp, Artificial Sequence
  Oligonucleotide for detection of SNP TSC0039524
rctaaccaaccca

SEQ ID NO: 156743 - DNA, 13 bp, Artificial Sequence
  Oligonucleotide for detection of SNP TSC0039524
cgggttagttagy

SEQ ID NO: 156744 - DNA, 13 bp, Artificial Sequence
  Oligonucleotide for detection of SNP TSC0039524
rctaactaacccg

SEQ ID NO: 156745 - DNA, 13 bp, Artificial Sequence
  Oligonucleotide for detection of SNP TSC0039524
cgggttggttagy

SEQ ID NO: 156746 - DNA, 13 bp, Artificial Sequence
  Oligonucleotide for detection of SNP TSC0039524
rctaaccaacccg

SEQ ID NO: 156747 - DNA, 13 bp, Artificial Sequence
  Oligonucleotide for detection of SNP TSC0039524
tgggtcggttagy

SEQ ID NO: 156748 - DNA, 13 bp, Artificial Sequence
  Oligonucleotide for detection of SNP TSC0039524
rctaaccgaccca

SEQ ID NO: 156749 - DNA, 13 bp, Artificial Sequence
  Oligonucleotide for detection of SNP TSC0039524
cgggtcggttagy

SEQ ID NO: 156750 - DNA, 13 bp, Artificial Sequence
  Oligonucleotide for detection of SNP TSC0039524
rctaaccgacccg

SEQ ID NO: 156751 - DNA, 13 bp, Artificial Sequence
  Oligonucleotide for detection of SNP TSC0039524
gttggttgatttg

SEQ ID NO: 156752 - DNA, 13 bp, Artificial Sequence
  Oligonucleotide for detection of SNP TSC0039524
caaatcaaccaac

SEQ ID NO: 156753 - DNA, 13 bp, Artificial Sequence
  Oligonucleotide for detection of SNP TSC0039524
gttggttgattcg

SEQ ID NO: 156754 - DNA, 13 bp, Artificial Sequence
  Oligonucleotide for detection of SNP TSC0039524
cgaatcaaccaac

SEQ ID NO: 156755 - DNA, 13 bp, Artificial Sequence
  Oligonucleotide for detection of SNP TSC0039524
gttggtcgatttg

SEQ ID NO: 156756 - DNA, 13 bp, Artificial Sequence
  Oligonucleotide for detection of SNP TSC0039524
caaatcgaccaac

SEQ ID NO: 156757 - DNA, 13 bp, Artificial Sequence
  Oligonucleotide for detection of SNP TSC0039524
gttggtcgattcg

SEQ ID NO: 156758 - DNA, 13 bp, Artificial Sequence
  Oligonucleotide for detection of SNP TSC0039524
cgaatcgaccaac

SEQ ID NO: 156759 - DNA, 13 bp, Artificial Sequence
  Oligonucleotide for detection of SNP TSC0039525
attgttatattag

SEQ ID NO: 156760 - DNA, 13 bp, Artificial Sequence
  Oligonucleotide for detection of SNP TSC0039525
ctaatataacaat

SEQ ID NO: 156761 - DNA, 13 bp, Artificial Sequence
  Oligonucleotide for detection of SNP TSC0039525
attgttgtattag

SEQ ID NO: 156762 - DNA, 13 bp, Artificial Sequence
  Oligonucleotide for detection of SNP TSC0039525
ctaatacaacaat

SEQ ID NO: 156763 - DNA, 13 bp, Artificial Sequence
  Oligonucleotide for detection of SNP TSC0039525
atcgttatattag

SEQ ID NO: 156764 - DNA, 13 bp, Artificial Sequence
  Oligonucleotide for detection of SNP TSC0039525
ctaatataacgat

SEQ ID NO: 156765 - DNA, 13 bp, Artificial Sequence
  Oligonucleotide for detection of SNP TSC0039525
atcgttgtattag

SEQ ID NO: 156766 - DNA, 13 bp, Artificial Sequence
  Oligonucleotide for detection of SNP TSC0039525
ctaatacaacgat

SEQ ID NO: 156767 - DNA, 13 bp, Artificial Sequence
  Oligonucleotide for detection of SNP TSC0039525
attgtcgtattag

SEQ ID NO: 156768 - DNA, 13 bp, Artificial Sequence
  Oligonucleotide for detection of SNP TSC0039525
ctaatacgacaat

SEQ ID NO: 156769 - DNA, 13 bp, Artificial Sequence
  Oligonucleotide for detection of SNP TSC0039525
atcgtcgtattag

SEQ ID NO: 156770 - DNA, 13 bp, Artificial Sequence
  Oligonucleotide for detection of SNP TSC0039525
ctaatacgacgat

SEQ ID NO: 156771 - DNA, 13 bp, Artificial Sequence
  Oligonucleotide for detection of SNP TSC0039525
ttggtgtggtgat

SEQ ID NO: 156772 - DNA, 13 bp, Artificial Sequence
  Oligonucleotide for detection of SNP TSC0039525
atcaccacaccaa

SEQ ID NO: 156773 - DNA, 13 bp, Artificial Sequence
  Oligonucleotide for detection of SNP TSC0039525
ttggtgtggcgat

SEQ ID NO: 156774 - DNA, 13 bp, Artificial Sequence
  Oligonucleotide for detection of SNP TSC0039525
atcgccacaccaa

SEQ ID NO: 156775 - DNA, 13 bp, Artificial Sequence
  Oligonucleotide for detection of SNP TSC0039525
ttggtgcggtgat

SEQ ID NO: 156776 - DNA, 13 bp, Artificial Sequence
  Oligonucleotide for detection of SNP TSC0039525
atcaccgcaccaa

SEQ ID NO: 156777 - DNA, 13 bp, Artificial Sequence
  Oligonucleotide for detection of SNP TSC0039525
ttggtgcggcgat

SEQ ID NO: 156778 - DNA, 13 bp, Artificial Sequence
  Oligonucleotide for detection of SNP TSC0039525
atcgccgcaccaa

SEQ ID NO: 156779 - DNA, 13 bp, Artificial Sequence
  Oligonucleotide for detection of SNP TSC0039530
tagtagtttgtgy

SEQ ID NO: 156780 - DNA, 13 bp, Artificial Sequence
  Oligonucleotide for detection of SNP TSC0039530
rcacaaactacta

SEQ ID NO: 156781 - DNA, 13 bp, Artificial Sequence
  Oligonucleotide for detection of SNP TSC0039530
tagtaggttgtgy

SEQ ID NO: 156782 - DNA, 13 bp, Artificial Sequence
  Oligonucleotide for detection of SNP TSC0039530
rcacaacctacta

SEQ ID NO: 156783 - DNA, 13 bp, Artificial Sequence
  Oligonucleotide for detection of SNP TSC0039530
gtatagattgttg

SEQ ID NO: 156784 - DNA, 13 bp, Artificial Sequence
  Oligonucleotide for detection of SNP TSC0039530
caacaatctatac

SEQ ID NO: 156785 - DNA, 13 bp, Artificial Sequence
  Oligonucleotide for detection of SNP TSC0039530
gtatagtttgttg

SEQ ID NO: 156786 - DNA, 13 bp, Artificial Sequence
  Oligonucleotide for detection of SNP TSC0039530
caacaaactatac

SEQ ID NO: 156787 - DNA, 13 bp, Artificial Sequence
  Oligonucleotide for detection of SNP TSC0039531
ttttatgttggga

SEQ ID NO: 156788 - DNA, 13 bp, Artificial Sequence
  Oligonucleotide for detection of SNP TSC0039531
tcccaacataaaa

SEQ ID NO: 156789 - DNA, 13 bp, Artificial Sequence
  Oligonucleotide for detection of SNP TSC0039531
ttttatattggga

SEQ ID NO: 156790 - DNA, 13 bp, Artificial Sequence
  Oligonucleotide for detection of SNP TSC0039531
tcccaatataaaa

SEQ ID NO: 156791 - DNA, 13 bp, Artificial Sequence
  Oligonucleotide for detection of SNP TSC0039534
tttttagtaaaay

SEQ ID NO: 156792 - DNA, 13 bp, Artificial Sequence
  Oligonucleotide for detection of SNP TSC0039534
rttttactaaaaa

SEQ ID NO: 156793 - DNA, 13 bp, Artificial Sequence
  Oligonucleotide for detection of SNP TSC0039534
tttttaataaaay

SEQ ID NO: 156794 - DNA, 13 bp, Artificial Sequence
  Oligonucleotide for detection of SNP TSC0039534
rttttattaaaaa

SEQ ID NO: 156795 - DNA, 13 bp, Artificial Sequence
  Oligonucleotide for detection of SNP TSC0039535
ttattaaataggy

SEQ ID NO: 156796 - DNA, 13 bp, Artificial Sequence
  Oligonucleotide for detection of SNP TSC0039535
rcctatttaataa

SEQ ID NO: 156797 - DNA, 13 bp, Artificial Sequence
  Oligonucleotide for detection of SNP TSC0039535
ttattatataggy

SEQ ID NO: 156798 - DNA, 13 bp, Artificial Sequence
  Oligonucleotide for detection of SNP TSC0039535
rcctatataataa

SEQ ID NO: 156799 - DNA, 13 bp, Artificial Sequence
  Oligonucleotide for detection of SNP TSC0039535
gtttatttggtga

SEQ ID NO: 156800 - DNA, 13 bp, Artificial Sequence
  Oligonucleotide for detection of SNP TSC0039535
tcaccaaataaac

SEQ ID NO: 156801 - DNA, 13 bp, Artificial Sequence
  Oligonucleotide for detection of SNP TSC0039535
gtttatgtggtga

SEQ ID NO: 156802 - DNA, 13 bp, Artificial Sequence
  Oligonucleotide for detection of SNP TSC0039535
tcaccacataaac

SEQ ID NO: 156803 - DNA, 13 bp, Artificial Sequence
  Oligonucleotide for detection of SNP TSC0008189
gttagttgagaga

SEQ ID NO: 156804 - DNA, 13 bp, Artificial Sequence
  Oligonucleotide for detection of SNP TSC0008189
tctctcaactaac

SEQ ID NO: 156805 - DNA, 13 bp, Artificial Sequence
  Oligonucleotide for detection of SNP TSC0008189
gttagtcgagaga

SEQ ID NO: 156806 - DNA, 13 bp, Artificial Sequence
  Oligonucleotide for detection of SNP TSC0008189
tctctcgactaac

SEQ ID NO: 156807 - DNA, 13 bp, Artificial Sequence
  Oligonucleotide for detection of SNP TSC0039536
gattgtatgttty

SEQ ID NO: 156808 - DNA, 13 bp, Artificial Sequence
  Oligonucleotide for detection of SNP TSC0039536
raaacatacaatc

SEQ ID NO: 156809 - DNA, 13 bp, Artificial Sequence
  Oligonucleotide for detection of SNP TSC0039536
gattgtgtgttty

SEQ ID NO: 156810 - DNA, 13 bp, Artificial Sequence
  Oligonucleotide for detection of SNP TSC0039536
raaacacacaatc

SEQ ID NO: 156811 - DNA, 13 bp, Artificial Sequence
  Oligonucleotide for detection of SNP TSC0039537
gttttaagttaay

SEQ ID NO: 156812 - DNA, 13 bp, Artificial Sequence
  Oligonucleotide for detection of SNP TSC0039537
rttaacttaaaac

SEQ ID NO: 156813 - DNA, 13 bp, Artificial Sequence
  Oligonucleotide for detection of SNP TSC0039537
gttttatgttaay

SEQ ID NO: 156814 - DNA, 13 bp, Artificial Sequence
  Oligonucleotide for detection of SNP TSC0039537
rttaacataaaac

SEQ ID NO: 156815 - DNA, 13 bp, Artificial Sequence
  Oligonucleotide for detection of SNP TSC0039537
gttttacgttaay

SEQ ID NO: 156816 - DNA, 13 bp, Artificial Sequence
  Oligonucleotide for detection of SNP TSC0039537
rttaacgtaaaac

SEQ ID NO: 156817 - DNA, 13 bp, Artificial Sequence
  Oligonucleotide for detection of SNP TSC0039537
gttagtttgaaay

SEQ ID NO: 156818 - DNA, 13 bp, Artificial Sequence
  Oligonucleotide for detection of SNP TSC0039537
rtttcaaactaac

SEQ ID NO: 156819 - DNA, 13 bp, Artificial Sequence
  Oligonucleotide for detection of SNP TSC0039537
gttagtgtgaaay

SEQ ID NO: 156820 - DNA, 13 bp, Artificial Sequence
  Oligonucleotide for detection of SNP TSC0039537
rtttcacactaac

SEQ ID NO: 156821 - DNA, 13 bp, Artificial Sequence
  Oligonucleotide for detection of SNP TSC0039537
gttagcgtgaaay

SEQ ID NO: 156822 - DNA, 13 bp, Artificial Sequence
  Oligonucleotide for detection of SNP TSC0039537
rtttcacgctaac

SEQ ID NO: 156823 - DNA, 13 bp, Artificial Sequence
  Oligonucleotide for detection of SNP TSC0039538
atgttagtgtgtg

SEQ ID NO: 156824 - DNA, 13 bp, Artificial Sequence
  Oligonucleotide for detection of SNP TSC0039538
cacacactaacat

SEQ ID NO: 156825 - DNA, 13 bp, Artificial Sequence
  Oligonucleotide for detection of SNP TSC0039538
atgttaatgtgtg

SEQ ID NO: 156826 - DNA, 13 bp, Artificial Sequence
  Oligonucleotide for detection of SNP TSC0039538
cacacattaacat

SEQ ID NO: 156827 - DNA, 13 bp, Artificial Sequence
  Oligonucleotide for detection of SNP TSC0039539
agaaagatgatag

SEQ ID NO: 156828 - DNA, 13 bp, Artificial Sequence
  Oligonucleotide for detection of SNP TSC0039539
ctatcatctttct

SEQ ID NO: 156829 - DNA, 13 bp, Artificial Sequence
  Oligonucleotide for detection of SNP TSC0039539
agaaaggtgatag

SEQ ID NO: 156830 - DNA, 13 bp, Artificial Sequence
  Oligonucleotide for detection of SNP TSC0039539
ctatcacctttct

SEQ ID NO: 156831 - DNA, 13 bp, Artificial Sequence
  Oligonucleotide for detection of SNP TSC0039540
agtggtttggatg

SEQ ID NO: 156832 - DNA, 13 bp, Artificial Sequence
  Oligonucleotide for detection of SNP TSC0039540
catccaaaccact

SEQ ID NO: 156833 - DNA, 13 bp, Artificial Sequence
  Oligonucleotide for detection of SNP TSC0039540
agtggtgtggatg

SEQ ID NO: 156834 - DNA, 13 bp, Artificial Sequence
  Oligonucleotide for detection of SNP TSC0039540
catccacaccact

SEQ ID NO: 156835 - DNA, 13 bp, Artificial Sequence
  Oligonucleotide for detection of SNP TSC0039540
agtggcgtggatg

SEQ ID NO: 156836 - DNA, 13 bp, Artificial Sequence
  Oligonucleotide for detection of SNP TSC0039540
catccacgccact

SEQ ID NO: 156837 - DNA, 13 bp, Artificial Sequence
  Oligonucleotide for detection of SNP TSC0039540
tatttaggttatt

SEQ ID NO: 156838 - DNA, 13 bp, Artificial Sequence
  Oligonucleotide for detection of SNP TSC0039540
aataacctaaata

SEQ ID NO: 156839 - DNA, 13 bp, Artificial Sequence
  Oligonucleotide for detection of SNP TSC0039545
tttttaaaaatay

SEQ ID NO: 156840 - DNA, 13 bp, Artificial Sequence
  Oligonucleotide for detection of SNP TSC0039545
rtatttttaaaaa

SEQ ID NO: 156841 - DNA, 13 bp, Artificial Sequence
  Oligonucleotide for detection of SNP TSC0039546
gatataattagag

SEQ ID NO: 156842 - DNA, 13 bp, Artificial Sequence
  Oligonucleotide for detection of SNP TSC0039546
ctctaattatatc

SEQ ID NO: 156843 - DNA, 13 bp, Artificial Sequence
  Oligonucleotide for detection of SNP TSC0039546
gatatagttagag

SEQ ID NO: 156844 - DNA, 13 bp, Artificial Sequence
  Oligonucleotide for detection of SNP TSC0039546
ctctaactatatc

SEQ ID NO: 156845 - DNA, 13 bp, Artificial Sequence
  Oligonucleotide for detection of SNP TSC0039547
atattagtaatta

SEQ ID NO: 156846 - DNA, 13 bp, Artificial Sequence
  Oligonucleotide for detection of SNP TSC0039547
taattactaatat

SEQ ID NO: 156847 - DNA, 13 bp, Artificial Sequence
  Oligonucleotide for detection of SNP TSC0039547
atattaataatta

SEQ ID NO: 156848 - DNA, 13 bp, Artificial Sequence
  Oligonucleotide for detection of SNP TSC0039547
taattattaatat

SEQ ID NO: 156849 - DNA, 13 bp, Artificial Sequence
  Oligonucleotide for detection of SNP TSC0039548
tgaaaaaaattty

SEQ ID NO: 156850 - DNA, 13 bp, Artificial Sequence
  Oligonucleotide for detection of SNP TSC0039548
raaatttttttca

SEQ ID NO: 156851 - DNA, 13 bp, Artificial Sequence
  Oligonucleotide for detection of SNP TSC0039548
tgaaaagaattty

SEQ ID NO: 156852 - DNA, 13 bp, Artificial Sequence
  Oligonucleotide for detection of SNP TSC0039548
raaattcttttca

SEQ ID NO: 156853 - DNA, 13 bp, Artificial Sequence
  Oligonucleotide for detection of SNP TSC0039549
agagttagaaaag

SEQ ID NO: 156854 - DNA, 13 bp, Artificial Sequence
  Oligonucleotide for detection of SNP TSC0039549
cttttctaactct

SEQ ID NO: 156855 - DNA, 13 bp, Artificial Sequence
  Oligonucleotide for detection of SNP TSC0039549
agagttggaaaag

SEQ ID NO: 156856 - DNA, 13 bp, Artificial Sequence
  Oligonucleotide for detection of SNP TSC0039549
cttttccaactct

SEQ ID NO: 156857 - DNA, 13 bp, Artificial Sequence
  Oligonucleotide for detection of SNP TSC0039549
agagtcggaaaag

SEQ ID NO: 156858 - DNA, 13 bp, Artificial Sequence
  Oligonucleotide for detection of SNP TSC0039549
cttttccgactct

SEQ ID NO: 156859 - DNA, 13 bp, Artificial Sequence
  Oligonucleotide for detection of SNP TSC0039550
atatttgtatgtt

SEQ ID NO: 156860 - DNA, 13 bp, Artificial Sequence
  Oligonucleotide for detection of SNP TSC0039550
aacatacaaatat

SEQ ID NO: 156861 - DNA, 13 bp, Artificial Sequence
  Oligonucleotide for detection of SNP TSC0039550
atatttatatgtt

SEQ ID NO: 156862 - DNA, 13 bp, Artificial Sequence
  Oligonucleotide for detection of SNP TSC0039550
aacatataaatat

SEQ ID NO: 156863 - DNA, 13 bp, Artificial Sequence
  Oligonucleotide for detection of SNP TSC0039551
gattttaaaaagy

SEQ ID NO: 156864 - DNA, 13 bp, Artificial Sequence
  Oligonucleotide for detection of SNP TSC0039551
rctttttaaaatc

SEQ ID NO: 156865 - DNA, 13 bp, Artificial Sequence
  Oligonucleotide for detection of SNP TSC0039551
gattttgaaaagy

SEQ ID NO: 156866 - DNA, 13 bp, Artificial Sequence
  Oligonucleotide for detection of SNP TSC0039551
rcttttcaaaatc

SEQ ID NO: 156867 - DNA, 13 bp, Artificial Sequence
  Oligonucleotide for detection of SNP TSC0039551
gatttcgaaaagy

SEQ ID NO: 156868 - DNA, 13 bp, Artificial Sequence
  Oligonucleotide for detection of SNP TSC0039551
rcttttcgaaatc

SEQ ID NO: 156869 - DNA, 13 bp, Artificial Sequence
  Oligonucleotide for detection of SNP TSC0039552
atagttttaaaat

SEQ ID NO: 156870 - DNA, 13 bp, Artificial Sequence
  Oligonucleotide for detection of SNP TSC0039552
attttaaaactat

SEQ ID NO: 156871 - DNA, 13 bp, Artificial Sequence
  Oligonucleotide for detection of SNP TSC0039552
atagttgtaaaat

SEQ ID NO: 156872 - DNA, 13 bp, Artificial Sequence
  Oligonucleotide for detection of SNP TSC0039552
attttacaactat

SEQ ID NO: 156873 - DNA, 13 bp, Artificial Sequence
  Oligonucleotide for detection of SNP TSC0039552
atagtcgtaaaat

SEQ ID NO: 156874 - DNA, 13 bp, Artificial Sequence
  Oligonucleotide for detection of SNP TSC0039552
attttacgactat

SEQ ID NO: 156875 - DNA, 13 bp, Artificial Sequence
  Oligonucleotide for detection of SNP TSC0039552
attttaggattat

SEQ ID NO: 156876 - DNA, 13 bp, Artificial Sequence
  Oligonucleotide for detection of SNP TSC0039552
ataatcctaaaat

SEQ ID NO: 156877 - DNA, 13 bp, Artificial Sequence
  Oligonucleotide for detection of SNP TSC0039552
attttatgattat

SEQ ID NO: 156878 - DNA, 13 bp, Artificial Sequence
  Oligonucleotide for detection of SNP TSC0039552
ataatcataaaat

SEQ ID NO: 156879 - DNA, 13 bp, Artificial Sequence
  Oligonucleotide for detection of SNP TSC0039552
attttacgattat

SEQ ID NO: 156880 - DNA, 13 bp, Artificial Sequence
  Oligonucleotide for detection of SNP TSC0039552
ataatcgtaaaat

SEQ ID NO: 156881 - DNA, 13 bp, Artificial Sequence
  Oligonucleotide for detection of SNP TSC0007848
ggtttgggagtty

SEQ ID NO: 156882 - DNA, 13 bp, Artificial Sequence
  Oligonucleotide for detection of SNP TSC0007848
raactcccaaacc

SEQ ID NO: 156883 - DNA, 13 bp, Artificial Sequence
  Oligonucleotide for detection of SNP TSC0007848
ggtttgagagtty

SEQ ID NO: 156884 - DNA, 13 bp, Artificial Sequence
  Oligonucleotide for detection of SNP TSC0007848
raactctcaaacc

SEQ ID NO: 156885 - DNA, 13 bp, Artificial Sequence
  Oligonucleotide for detection of SNP TSC0007633
tattatatgattt

SEQ ID NO: 156886 - DNA, 13 bp, Artificial Sequence
  Oligonucleotide for detection of SNP TSC0007633
aaatcatataata

SEQ ID NO: 156887 - DNA, 13 bp, Artificial Sequence
  Oligonucleotide for detection of SNP TSC0007633
tattatttgattt

SEQ ID NO: 156888 - DNA, 13 bp, Artificial Sequence
  Oligonucleotide for detection of SNP TSC0007633
aaatcaaataata

SEQ ID NO: 156889 - DNA, 13 bp, Artificial Sequence
  Oligonucleotide for detection of SNP TSC0007633
aaattatgtgatg

SEQ ID NO: 156890 - DNA, 13 bp, Artificial Sequence
  Oligonucleotide for detection of SNP TSC0007633
catcacataattt

SEQ ID NO: 156891 - DNA, 13 bp, Artificial Sequence
  Oligonucleotide for detection of SNP TSC0007633
aaattaggtgatg

SEQ ID NO: 156892 - DNA, 13 bp, Artificial Sequence
  Oligonucleotide for detection of SNP TSC0007633
catcacctaattt

SEQ ID NO: 156893 - DNA, 13 bp, Artificial Sequence
  Oligonucleotide for detection of SNP TSC0039555
ttttagggtattt

SEQ ID NO: 156894 - DNA, 13 bp, Artificial Sequence
  Oligonucleotide for detection of SNP TSC0039555
aaataccctaaaa

SEQ ID NO: 156895 - DNA, 13 bp, Artificial Sequence
  Oligonucleotide for detection of SNP TSC0039555
ttttagagtattt

SEQ ID NO: 156896 - DNA, 13 bp, Artificial Sequence
  Oligonucleotide for detection of SNP TSC0039555
aaatactctaaaa

SEQ ID NO: 156897 - DNA, 13 bp, Artificial Sequence
  Oligonucleotide for detection of SNP TSC0039556
ttggagaaaattt

SEQ ID NO: 156898 - DNA, 13 bp, Artificial Sequence
  Oligonucleotide for detection of SNP TSC0039556
aaattttctccaa

SEQ ID NO: 156899 - DNA, 13 bp, Artificial Sequence
  Oligonucleotide for detection of SNP TSC0039556
ttggagtaaattt

SEQ ID NO: 156900 - DNA, 13 bp, Artificial Sequence
  Oligonucleotide for detection of SNP TSC0039556
aaatttactccaa

SEQ ID NO: 156901 - DNA, 13 bp, Artificial Sequence
  Oligonucleotide for detection of SNP TSC0039557
tattttgtaaaty

SEQ ID NO: 156902 - DNA, 13 bp, Artificial Sequence
  Oligonucleotide for detection of SNP TSC0039557
ratttacaaaata

SEQ ID NO: 156903 - DNA, 13 bp, Artificial Sequence
  Oligonucleotide for detection of SNP TSC0039557
ggtttgaaaaatg

SEQ ID NO: 156904 - DNA, 13 bp, Artificial Sequence
  Oligonucleotide for detection of SNP TSC0039557
catttttcaaacc

SEQ ID NO: 156905 - DNA, 13 bp, Artificial Sequence
  Oligonucleotide for detection of SNP TSC0039557
ggtttgtaaaatg

SEQ ID NO: 156906 - DNA, 13 bp, Artificial Sequence
  Oligonucleotide for detection of SNP TSC0039557
cattttacaaacc

SEQ ID NO: 156907 - DNA, 13 bp, Artificial Sequence
  Oligonucleotide for detection of SNP TSC0039558
agtttagttgggy

SEQ ID NO: 156908 - DNA, 13 bp, Artificial Sequence
  Oligonucleotide for detection of SNP TSC0039558
rcccaactaaact

SEQ ID NO: 156909 - DNA, 13 bp, Artificial Sequence
  Oligonucleotide for detection of SNP TSC0039558
agtttaattgggy

SEQ ID NO: 156910 - DNA, 13 bp, Artificial Sequence
  Oligonucleotide for detection of SNP TSC0039558
rcccaattaaact

SEQ ID NO: 156911 - DNA, 13 bp, Artificial Sequence
  Oligonucleotide for detection of SNP TSC0039559
gttgtagtaattt

SEQ ID NO: 156912 - DNA, 13 bp, Artificial Sequence
  Oligonucleotide for detection of SNP TSC0039559
aaattactacaac

SEQ ID NO: 156913 - DNA, 13 bp, Artificial Sequence
  Oligonucleotide for detection of SNP TSC0039559
gttgtaataattt

SEQ ID NO: 156914 - DNA, 13 bp, Artificial Sequence
  Oligonucleotide for detection of SNP TSC0039559
aaattattacaac

SEQ ID NO: 156915 - DNA, 13 bp, Artificial Sequence
  Oligonucleotide for detection of SNP TSC0039560
gatagtaagagaa

SEQ ID NO: 156916 - DNA, 13 bp, Artificial Sequence
  Oligonucleotide for detection of SNP TSC0039560
ttctcttactatc

SEQ ID NO: 156917 - DNA, 13 bp, Artificial Sequence
  Oligonucleotide for detection of SNP TSC0039560
gatagtgagagaa

SEQ ID NO: 156918 - DNA, 13 bp, Artificial Sequence
  Oligonucleotide for detection of SNP TSC0039560
ttctctcactatc

SEQ ID NO: 156919 - DNA, 13 bp, Artificial Sequence
  Oligonucleotide for detection of SNP TSC0008260
tatgtgtttttay

SEQ ID NO: 156920 - DNA, 13 bp, Artificial Sequence
  Oligonucleotide for detection of SNP TSC0008260
rtaaaaacacata

SEQ ID NO: 156921 - DNA, 13 bp, Artificial Sequence
  Oligonucleotide for detection of SNP TSC0008260
tatgtggttttay

SEQ ID NO: 156922 - DNA, 13 bp, Artificial Sequence
  Oligonucleotide for detection of SNP TSC0008260
rtaaaaccacata

SEQ ID NO: 156923 - DNA, 13 bp, Artificial Sequence
  Oligonucleotide for detection of SNP TSC0008260
gtaggaatatata

SEQ ID NO: 156924 - DNA, 13 bp, Artificial Sequence
  Oligonucleotide for detection of SNP TSC0008260
tatatattcctac

SEQ ID NO: 156925 - DNA, 13 bp, Artificial Sequence
  Oligonucleotide for detection of SNP TSC0008260
gtaggattatata

SEQ ID NO: 156926 - DNA, 13 bp, Artificial Sequence
  Oligonucleotide for detection of SNP TSC0008260
tatataatcctac

SEQ ID NO: 156927 - DNA, 13 bp, Artificial Sequence
  Oligonucleotide for detection of SNP TSC0039563
gtttttgaaagta

SEQ ID NO: 156928 - DNA, 13 bp, Artificial Sequence
  Oligonucleotide for detection of SNP TSC0039563
tactttcaaaaac

SEQ ID NO: 156929 - DNA, 13 bp, Artificial Sequence
  Oligonucleotide for detection of SNP TSC0039564
taagttgatttat

SEQ ID NO: 156930 - DNA, 13 bp, Artificial Sequence
  Oligonucleotide for detection of SNP TSC0039564
ataaatcaactta

SEQ ID NO: 156931 - DNA, 13 bp, Artificial Sequence
  Oligonucleotide for detection of SNP TSC0039565
aatgtagattaaa

SEQ ID NO: 156932 - DNA, 13 bp, Artificial Sequence
  Oligonucleotide for detection of SNP TSC0039565
tttaatctacatt

SEQ ID NO: 156933 - DNA, 13 bp, Artificial Sequence
  Oligonucleotide for detection of SNP TSC0039568
taggatggttata

SEQ ID NO: 156934 - DNA, 13 bp, Artificial Sequence
  Oligonucleotide for detection of SNP TSC0039568
tataaccatccta

SEQ ID NO: 156935 - DNA, 13 bp, Artificial Sequence
  Oligonucleotide for detection of SNP TSC0039568
taggatagttata

SEQ ID NO: 156936 - DNA, 13 bp, Artificial Sequence
  Oligonucleotide for detection of SNP TSC0039568
tataactatccta

SEQ ID NO: 156937 - DNA, 13 bp, Artificial Sequence
  Oligonucleotide for detection of SNP TSC0039569
taataagtggttt

SEQ ID NO: 156938 - DNA, 13 bp, Artificial Sequence
  Oligonucleotide for detection of SNP TSC0039569
aaaccacttatta

SEQ ID NO: 156939 - DNA, 13 bp, Artificial Sequence
  Oligonucleotide for detection of SNP TSC0039569
aaattatttattg

SEQ ID NO: 156940 - DNA, 13 bp, Artificial Sequence
  Oligonucleotide for detection of SNP TSC0039569
caataaataattt

SEQ ID NO: 156941 - DNA, 13 bp, Artificial Sequence
  Oligonucleotide for detection of SNP TSC0039570
tgtaatagaaaty

SEQ ID NO: 156942 - DNA, 13 bp, Artificial Sequence
  Oligonucleotide for detection of SNP TSC0039570
ratttctattaca

SEQ ID NO: 156943 - DNA, 13 bp, Artificial Sequence
  Oligonucleotide for detection of SNP TSC0039570
tgtaattgaaaty

SEQ ID NO: 156944 - DNA, 13 bp, Artificial Sequence
  Oligonucleotide for detection of SNP TSC0039570
ratttcaattaca

SEQ ID NO: 156945 - DNA, 13 bp, Artificial Sequence
  Oligonucleotide for detection of SNP TSC0039570
gatttttattata

SEQ ID NO: 156946 - DNA, 13 bp, Artificial Sequence
  Oligonucleotide for detection of SNP TSC0039570
tataataaaaatc

SEQ ID NO: 156947 - DNA, 13 bp, Artificial Sequence
  Oligonucleotide for detection of SNP TSC0039570
gattttaattata

SEQ ID NO: 156948 - DNA, 13 bp, Artificial Sequence
  Oligonucleotide for detection of SNP TSC0039570
tataattaaaatc

SEQ ID NO: 156949 - DNA, 13 bp, Artificial Sequence
  Oligonucleotide for detection of SNP TSC0039571
agtttattgaaag

SEQ ID NO: 156950 - DNA, 13 bp, Artificial Sequence
  Oligonucleotide for detection of SNP TSC0039571
ctttcaataaact

SEQ ID NO: 156951 - DNA, 13 bp, Artificial Sequence
  Oligonucleotide for detection of SNP TSC0039571
agtttagtgaaag

SEQ ID NO: 156952 - DNA, 13 bp, Artificial Sequence
  Oligonucleotide for detection of SNP TSC0039571
ctttcactaaact

SEQ ID NO: 156953 - DNA, 13 bp, Artificial Sequence
  Oligonucleotide for detection of SNP TSC0039571
tttttaatagatt

SEQ ID NO: 156954 - DNA, 13 bp, Artificial Sequence
  Oligonucleotide for detection of SNP TSC0039571
aatctattaaaaa

SEQ ID NO: 156955 - DNA, 13 bp, Artificial Sequence
  Oligonucleotide for detection of SNP TSC0039571
tttttattagatt

SEQ ID NO: 156956 - DNA, 13 bp, Artificial Sequence
  Oligonucleotide for detection of SNP TSC0039571
aatctaataaaaa

SEQ ID NO: 156957 - DNA, 13 bp, Artificial Sequence
  Oligonucleotide for detection of SNP TSC0010657
tattgagaattaa

SEQ ID NO: 156958 - DNA, 13 bp, Artificial Sequence
  Oligonucleotide for detection of SNP TSC0010657
ttaattctcaata

SEQ ID NO: 156959 - DNA, 13 bp, Artificial Sequence
  Oligonucleotide for detection of SNP TSC0010657
tattgaaaattaa

SEQ ID NO: 156960 - DNA, 13 bp, Artificial Sequence
  Oligonucleotide for detection of SNP TSC0010657
ttaattttcaata

SEQ ID NO: 156961 - DNA, 13 bp, Artificial Sequence
  Oligonucleotide for detection of SNP TSC0039572
ttgtagtgtatag

SEQ ID NO: 156962 - DNA, 13 bp, Artificial Sequence
  Oligonucleotide for detection of SNP TSC0039572
ctatacactacaa

SEQ ID NO: 156963 - DNA, 13 bp, Artificial Sequence
  Oligonucleotide for detection of SNP TSC0039572
ttgtagcgtatag

SEQ ID NO: 156964 - DNA, 13 bp, Artificial Sequence
  Oligonucleotide for detection of SNP TSC0039572
ctatacgctacaa

SEQ ID NO: 156965 - DNA, 13 bp, Artificial Sequence
  Oligonucleotide for detection of SNP TSC0039572
ttgtatgttatag

SEQ ID NO: 156966 - DNA, 13 bp, Artificial Sequence
  Oligonucleotide for detection of SNP TSC0039572
ctataacatacaa

SEQ ID NO: 156967 - DNA, 13 bp, Artificial Sequence
  Oligonucleotide for detection of SNP TSC0039572
ttgtatattatag

SEQ ID NO: 156968 - DNA, 13 bp, Artificial Sequence
  Oligonucleotide for detection of SNP TSC0039572
ctataatatacaa

SEQ ID NO: 156969 - DNA, 13 bp, Artificial Sequence
  Oligonucleotide for detection of SNP TSC0039572
ttgtacgttatag

SEQ ID NO: 156970 - DNA, 13 bp, Artificial Sequence
  Oligonucleotide for detection of SNP TSC0039572
ctataacgtacaa

SEQ ID NO: 156971 - DNA, 13 bp, Artificial Sequence
  Oligonucleotide for detection of SNP TSC0039573
gttatcgtttttt

SEQ ID NO: 156972 - DNA, 13 bp, Artificial Sequence
  Oligonucleotide for detection of SNP TSC0039573
aaaaaacgataac

SEQ ID NO: 156973 - DNA, 13 bp, Artificial Sequence
  Oligonucleotide for detection of SNP TSC0039573
aaaaaatggtgay

SEQ ID NO: 156974 - DNA, 13 bp, Artificial Sequence
  Oligonucleotide for detection of SNP TSC0039573
rtcaccatttttt

SEQ ID NO: 156975 - DNA, 13 bp, Artificial Sequence
  Oligonucleotide for detection of SNP TSC0039573
aaaaaacggtgay

SEQ ID NO: 156976 - DNA, 13 bp, Artificial Sequence
  Oligonucleotide for detection of SNP TSC0039573
rtcaccgtttttt

SEQ ID NO: 156977 - DNA, 13 bp, Artificial Sequence
  Oligonucleotide for detection of SNP TSC0039574
tttttaatatagy

SEQ ID NO: 156978 - DNA, 13 bp, Artificial Sequence
  Oligonucleotide for detection of SNP TSC0039574
rctatattaaaaa

SEQ ID NO: 156979 - DNA, 13 bp, Artificial Sequence
  Oligonucleotide for detection of SNP TSC0039574
tttttattatagy

SEQ ID NO: 156980 - DNA, 13 bp, Artificial Sequence
  Oligonucleotide for detection of SNP TSC0039574
rctataataaaaa

SEQ ID NO: 156981 - DNA, 13 bp, Artificial Sequence
  Oligonucleotide for detection of SNP TSC0039574
gttgtattgaaaa

SEQ ID NO: 156982 - DNA, 13 bp, Artificial Sequence
  Oligonucleotide for detection of SNP TSC0039574
ttttcaatacaac

SEQ ID NO: 156983 - DNA, 13 bp, Artificial Sequence
  Oligonucleotide for detection of SNP TSC0039574
gttgtaatgaaaa

SEQ ID NO: 156984 - DNA, 13 bp, Artificial Sequence
  Oligonucleotide for detection of SNP TSC0039574
ttttcattacaac

SEQ ID NO: 156985 - DNA, 13 bp, Artificial Sequence
  Oligonucleotide for detection of SNP TSC0007116
tttaagatagtay

SEQ ID NO: 156986 - DNA, 13 bp, Artificial Sequence
  Oligonucleotide for detection of SNP TSC0007116
rtactatcttaaa

SEQ ID NO: 156987 - DNA, 13 bp, Artificial Sequence
  Oligonucleotide for detection of SNP TSC0007116
tttaaggtagtay

SEQ ID NO: 156988 - DNA, 13 bp, Artificial Sequence
  Oligonucleotide for detection of SNP TSC0007116
rtactaccttaaa

SEQ ID NO: 156989 - DNA, 13 bp, Artificial Sequence
  Oligonucleotide for detection of SNP TSC0039576
ttgaaggaagagg

SEQ ID NO: 156990 - DNA, 13 bp, Artificial Sequence
  Oligonucleotide for detection of SNP TSC0039576
cctcttccttcaa

SEQ ID NO: 156991 - DNA, 13 bp, Artificial Sequence
  Oligonucleotide for detection of SNP TSC0039576
ttgaagaaagagg

SEQ ID NO: 156992 - DNA, 13 bp, Artificial Sequence
  Oligonucleotide for detection of SNP TSC0039576
cctctttcttcaa

SEQ ID NO: 156993 - DNA, 13 bp, Artificial Sequence
  Oligonucleotide for detection of SNP TSC0039577
atatttttagggy

SEQ ID NO: 156994 - DNA, 13 bp, Artificial Sequence
  Oligonucleotide for detection of SNP TSC0039577
rccctaaaaatat

SEQ ID NO: 156995 - DNA, 13 bp, Artificial Sequence
  Oligonucleotide for detection of SNP TSC0039577
atatttgtagggy

SEQ ID NO: 156996 - DNA, 13 bp, Artificial Sequence
  Oligonucleotide for detection of SNP TSC0039577
rccctacaaatat

SEQ ID NO: 156997 - DNA, 13 bp, Artificial Sequence
  Oligonucleotide for detection of SNP TSC0039577
gttttggaggtat

SEQ ID NO: 156998 - DNA, 13 bp, Artificial Sequence
  Oligonucleotide for detection of SNP TSC0039577
atacctccaaaac

SEQ ID NO: 156999 - DNA, 13 bp, Artificial Sequence
  Oligonucleotide for detection of SNP TSC0039577
gttttgtaggtat

SEQ ID NO: 157000 - DNA, 13 bp, Artificial Sequence
  Oligonucleotide for detection of SNP TSC0039577
atacctacaaaac

SEQ ID NO: 157001 - DNA, 13 bp, Artificial Sequence
  Oligonucleotide for detection of SNP TSC0039578
gttaattgaatta

SEQ ID NO: 157002 - DNA, 13 bp, Artificial Sequence
  Oligonucleotide for detection of SNP TSC0039578
taattcaattaac

SEQ ID NO: 157003 - DNA, 13 bp, Artificial Sequence
  Oligonucleotide for detection of SNP TSC0039578
gttaatggaatta

SEQ ID NO: 157004 - DNA, 13 bp, Artificial Sequence
  Oligonucleotide for detection of SNP TSC0039578
taattccattaac

SEQ ID NO: 157005 - DNA, 13 bp, Artificial Sequence
  Oligonucleotide for detection of SNP TSC0039578
gttaacggaatta

SEQ ID NO: 157006 - DNA, 13 bp, Artificial Sequence
  Oligonucleotide for detection of SNP TSC0039578
taattccgttaac

SEQ ID NO: 157007 - DNA, 13 bp, Artificial Sequence
  Oligonucleotide for detection of SNP TSC0039578
tggtttagttaay

SEQ ID NO: 157008 - DNA, 13 bp, Artificial Sequence
  Oligonucleotide for detection of SNP TSC0039578
rttaactaaacca

SEQ ID NO: 157009 - DNA, 13 bp, Artificial Sequence
  Oligonucleotide for detection of SNP TSC0039578
tggttttgttaay

SEQ ID NO: 157010 - DNA, 13 bp, Artificial Sequence
  Oligonucleotide for detection of SNP TSC0039578
rttaacaaaacca

SEQ ID NO: 157011 - DNA, 13 bp, Artificial Sequence
  Oligonucleotide for detection of SNP TSC0039578
tggtttcgttaay

SEQ ID NO: 157012 - DNA, 13 bp, Artificial Sequence
  Oligonucleotide for detection of SNP TSC0039578
rttaacgaaacca

SEQ ID NO: 157013 - DNA, 13 bp, Artificial Sequence
  Oligonucleotide for detection of SNP TSC0039579
tgaaaatgaagaa

SEQ ID NO: 157014 - DNA, 13 bp, Artificial Sequence
  Oligonucleotide for detection of SNP TSC0039579
ttcttcattttca

SEQ ID NO: 157015 - DNA, 13 bp, Artificial Sequence
  Oligonucleotide for detection of SNP TSC0039579
tgaaaacgaagaa

SEQ ID NO: 157016 - DNA, 13 bp, Artificial Sequence
  Oligonucleotide for detection of SNP TSC0039579
ttcttcgttttca

SEQ ID NO: 157017 - DNA, 13 bp, Artificial Sequence
  Oligonucleotide for detection of SNP TSC0039580
ttgattatgaatt

SEQ ID NO: 157018 - DNA, 13 bp, Artificial Sequence
  Oligonucleotide for detection of SNP TSC0039580
aattcataatcaa

SEQ ID NO: 157019 - DNA, 13 bp, Artificial Sequence
  Oligonucleotide for detection of SNP TSC0039580
ttgattgtgaatt

SEQ ID NO: 157020 - DNA, 13 bp, Artificial Sequence
  Oligonucleotide for detection of SNP TSC0039580
aattcacaatcaa

SEQ ID NO: 157021 - DNA, 13 bp, Artificial Sequence
  Oligonucleotide for detection of SNP TSC0039580
ttgatcgtgaatt

SEQ ID NO: 157022 - DNA, 13 bp, Artificial Sequence
  Oligonucleotide for detection of SNP TSC0039580
aattcacgatcaa

SEQ ID NO: 157023 - DNA, 13 bp, Artificial Sequence
  Oligonucleotide for detection of SNP TSC0039580
aatttatgattag

SEQ ID NO: 157024 - DNA, 13 bp, Artificial Sequence
  Oligonucleotide for detection of SNP TSC0039580
ctaatcataaatt

SEQ ID NO: 157025 - DNA, 13 bp, Artificial Sequence
  Oligonucleotide for detection of SNP TSC0039580
aatttacgattag

SEQ ID NO: 157026 - DNA, 13 bp, Artificial Sequence
  Oligonucleotide for detection of SNP TSC0039580
ctaatcgtaaatt

SEQ ID NO: 157027 - DNA, 13 bp, Artificial Sequence
  Oligonucleotide for detection of SNP TSC0039581
ttgtattgtagga

SEQ ID NO: 157028 - DNA, 13 bp, Artificial Sequence
  Oligonucleotide for detection of SNP TSC0039581
tcctacaatacaa

SEQ ID NO: 157029 - DNA, 13 bp, Artificial Sequence
  Oligonucleotide for detection of SNP TSC0039581
ttgtatggtagga

SEQ ID NO: 157030 - DNA, 13 bp, Artificial Sequence
  Oligonucleotide for detection of SNP TSC0039581
tcctaccatacaa

SEQ ID NO: 157031 - DNA, 13 bp, Artificial Sequence
  Oligonucleotide for detection of SNP TSC0039581
ttgtacggtagga

SEQ ID NO: 157032 - DNA, 13 bp, Artificial Sequence
  Oligonucleotide for detection of SNP TSC0039581
tcctaccgtacaa

SEQ ID NO: 157033 - DNA, 13 bp, Artificial Sequence
  Oligonucleotide for detection of SNP TSC0039581
ttttgtagtatag

SEQ ID NO: 157034 - DNA, 13 bp, Artificial Sequence
  Oligonucleotide for detection of SNP TSC0039581
ctatactacaaaa

SEQ ID NO: 157035 - DNA, 13 bp, Artificial Sequence
  Oligonucleotide for detection of SNP TSC0039581
ttttgttgtatag

SEQ ID NO: 157036 - DNA, 13 bp, Artificial Sequence
  Oligonucleotide for detection of SNP TSC0039581
ctatacaacaaaa

SEQ ID NO: 157037 - DNA, 13 bp, Artificial Sequence
  Oligonucleotide for detection of SNP TSC0039581
ttttgtcgtatag

SEQ ID NO: 157038 - DNA, 13 bp, Artificial Sequence
  Oligonucleotide for detection of SNP TSC0039581
ctatacgacaaaa

SEQ ID NO: 157039 - DNA, 13 bp, Artificial Sequence
  Oligonucleotide for detection of SNP TSC0039586
atgtggattgggy

SEQ ID NO: 157040 - DNA, 13 bp, Artificial Sequence
  Oligonucleotide for detection of SNP TSC0039586
rcccaatccacat

SEQ ID NO: 157041 - DNA, 13 bp, Artificial Sequence
  Oligonucleotide for detection of SNP TSC0039586
atgtgggttgggy

SEQ ID NO: 157042 - DNA, 13 bp, Artificial Sequence
  Oligonucleotide for detection of SNP TSC0039586
rcccaacccacat

SEQ ID NO: 157043 - DNA, 13 bp, Artificial Sequence
  Oligonucleotide for detection of SNP TSC0039586
atgcggattgggy

SEQ ID NO: 157044 - DNA, 13 bp, Artificial Sequence
  Oligonucleotide for detection of SNP TSC0039586
rcccaatccgcat

SEQ ID NO: 157045 - DNA, 13 bp, Artificial Sequence
  Oligonucleotide for detection of SNP TSC0039586
atgcgggttgggy

SEQ ID NO: 157046 - DNA, 13 bp, Artificial Sequence
  Oligonucleotide for detection of SNP TSC0039586
rcccaacccgcat

SEQ ID NO: 157047 - DNA, 13 bp, Artificial Sequence
  Oligonucleotide for detection of SNP TSC0039587
atgtattgtgatt

SEQ ID NO: 157048 - DNA, 13 bp, Artificial Sequence
  Oligonucleotide for detection of SNP TSC0039587
aatcacaatacat

SEQ ID NO: 157049 - DNA, 13 bp, Artificial Sequence
  Oligonucleotide for detection of SNP TSC0039587
atgtatggtgatt

SEQ ID NO: 157050 - DNA, 13 bp, Artificial Sequence
  Oligonucleotide for detection of SNP TSC0039587
aatcaccatacat

SEQ ID NO: 157051 - DNA, 13 bp, Artificial Sequence
  Oligonucleotide for detection of SNP TSC0039587
agttattatgtat

SEQ ID NO: 157052 - DNA, 13 bp, Artificial Sequence
  Oligonucleotide for detection of SNP TSC0039587
atacataataact

SEQ ID NO: 157053 - DNA, 13 bp, Artificial Sequence
  Oligonucleotide for detection of SNP TSC0039592
tgttaatggttay

SEQ ID NO: 157054 - DNA, 13 bp, Artificial Sequence
  Oligonucleotide for detection of SNP TSC0039592
rtaaccattaaca

SEQ ID NO: 157055 - DNA, 13 bp, Artificial Sequence
  Oligonucleotide for detection of SNP TSC0039592
tgttaacggttay

SEQ ID NO: 157056 - DNA, 13 bp, Artificial Sequence
  Oligonucleotide for detection of SNP TSC0039592
rtaaccgttaaca

SEQ ID NO: 157057 - DNA, 13 bp, Artificial Sequence
  Oligonucleotide for detection of SNP TSC0039592
gtagttgttggta

SEQ ID NO: 157058 - DNA, 13 bp, Artificial Sequence
  Oligonucleotide for detection of SNP TSC0039592
taccaacaactac

SEQ ID NO: 157059 - DNA, 13 bp, Artificial Sequence
  Oligonucleotide for detection of SNP TSC0039592
gtagttattggta

SEQ ID NO: 157060 - DNA, 13 bp, Artificial Sequence
  Oligonucleotide for detection of SNP TSC0039592
taccaataactac

SEQ ID NO: 157061 - DNA, 13 bp, Artificial Sequence
  Oligonucleotide for detection of SNP TSC0039592
gtagtcgttggta

SEQ ID NO: 157062 - DNA, 13 bp, Artificial Sequence
  Oligonucleotide for detection of SNP TSC0039592
taccaacgactac

SEQ ID NO: 157063 - DNA, 13 bp, Artificial Sequence
  Oligonucleotide for detection of SNP TSC0039600
atagtaatattgy

SEQ ID NO: 157064 - DNA, 13 bp, Artificial Sequence
  Oligonucleotide for detection of SNP TSC0039600
rcaatattactat

SEQ ID NO: 157065 - DNA, 13 bp, Artificial Sequence
  Oligonucleotide for detection of SNP TSC0039600
atagtagtattgy

SEQ ID NO: 157066 - DNA, 13 bp, Artificial Sequence
  Oligonucleotide for detection of SNP TSC0039600
rcaatactactat

SEQ ID NO: 157067 - DNA, 13 bp, Artificial Sequence
  Oligonucleotide for detection of SNP TSC0039601
gttagatggttta

SEQ ID NO: 157068 - DNA, 13 bp, Artificial Sequence
  Oligonucleotide for detection of SNP TSC0039601
taaaccatctaac

SEQ ID NO: 157069 - DNA, 13 bp, Artificial Sequence
  Oligonucleotide for detection of SNP TSC0039601
gttagacggttta

SEQ ID NO: 157070 - DNA, 13 bp, Artificial Sequence
  Oligonucleotide for detection of SNP TSC0039601
taaaccgtctaac

SEQ ID NO: 157071 - DNA, 13 bp, Artificial Sequence
  Oligonucleotide for detection of SNP TSC0039601
tggattgtttggy

SEQ ID NO: 157072 - DNA, 13 bp, Artificial Sequence
  Oligonucleotide for detection of SNP TSC0039601
rccaaacaatcca

SEQ ID NO: 157073 - DNA, 13 bp, Artificial Sequence
  Oligonucleotide for detection of SNP TSC0039601
tggattatttggy

SEQ ID NO: 157074 - DNA, 13 bp, Artificial Sequence
  Oligonucleotide for detection of SNP TSC0039601
rccaaataatcca

SEQ ID NO: 157075 - DNA, 13 bp, Artificial Sequence
  Oligonucleotide for detection of SNP TSC0039601
tggatcgtttggy

SEQ ID NO: 157076 - DNA, 13 bp, Artificial Sequence
  Oligonucleotide for detection of SNP TSC0039601
rccaaacgatcca

SEQ ID NO: 157077 - DNA, 13 bp, Artificial Sequence
  Oligonucleotide for detection of SNP TSC0039602
tatggttttttta

SEQ ID NO: 157078 - DNA, 13 bp, Artificial Sequence
  Oligonucleotide for detection of SNP TSC0039602
taaaaaaaccata

SEQ ID NO: 157079 - DNA, 13 bp, Artificial Sequence
  Oligonucleotide for detection of SNP TSC0039602
tatggtgttttta

SEQ ID NO: 157080 - DNA, 13 bp, Artificial Sequence
  Oligonucleotide for detection of SNP TSC0039602
taaaaacaccata

SEQ ID NO: 157081 - DNA, 13 bp, Artificial Sequence
  Oligonucleotide for detection of SNP TSC0039602
tggggaaattatg

SEQ ID NO: 157082 - DNA, 13 bp, Artificial Sequence
  Oligonucleotide for detection of SNP TSC0039602
cataatttcccca

SEQ ID NO: 157083 - DNA, 13 bp, Artificial Sequence
  Oligonucleotide for detection of SNP TSC0039602
tggggatattatg

SEQ ID NO: 157084 - DNA, 13 bp, Artificial Sequence
  Oligonucleotide for detection of SNP TSC0039602
cataatatcccca

SEQ ID NO: 157085 - DNA, 13 bp, Artificial Sequence
  Oligonucleotide for detection of SNP TSC0039603
ataggtatattty

SEQ ID NO: 157086 - DNA, 13 bp, Artificial Sequence
  Oligonucleotide for detection of SNP TSC0039603
raaatatacctat

SEQ ID NO: 157087 - DNA, 13 bp, Artificial Sequence
  Oligonucleotide for detection of SNP TSC0039603
ataggtttattty

SEQ ID NO: 157088 - DNA, 13 bp, Artificial Sequence
  Oligonucleotide for detection of SNP TSC0039603
raaataaacctat

SEQ ID NO: 157089 - DNA, 13 bp, Artificial Sequence
  Oligonucleotide for detection of SNP TSC0039603
ggggtgtgtttat

SEQ ID NO: 157090 - DNA, 13 bp, Artificial Sequence
  Oligonucleotide for detection of SNP TSC0039603
ataaacacacccc

SEQ ID NO: 157091 - DNA, 13 bp, Artificial Sequence
  Oligonucleotide for detection of SNP TSC0039603
ggggtgggtttat

SEQ ID NO: 157092 - DNA, 13 bp, Artificial Sequence
  Oligonucleotide for detection of SNP TSC0039603
ataaacccacccc

SEQ ID NO: 157093 - DNA, 13 bp, Artificial Sequence
  Oligonucleotide for detection of SNP TSC0039604
tattttataagga

SEQ ID NO: 157094 - DNA, 13 bp, Artificial Sequence
  Oligonucleotide for detection of SNP TSC0039604
tccttataaaata

SEQ ID NO: 157095 - DNA, 13 bp, Artificial Sequence
  Oligonucleotide for detection of SNP TSC0039604
tattttgtaagga

SEQ ID NO: 157096 - DNA, 13 bp, Artificial Sequence
  Oligonucleotide for detection of SNP TSC0039604
tccttacaaaata

SEQ ID NO: 157097 - DNA, 13 bp, Artificial Sequence
  Oligonucleotide for detection of SNP TSC0039604
tatttcgtaagga

SEQ ID NO: 157098 - DNA, 13 bp, Artificial Sequence
  Oligonucleotide for detection of SNP TSC0039604
tccttacgaaata

SEQ ID NO: 157099 - DNA, 13 bp, Artificial Sequence
  Oligonucleotide for detection of SNP TSC0039605
atagatggaaaat

SEQ ID NO: 157100 - DNA, 13 bp, Artificial Sequence
  Oligonucleotide for detection of SNP TSC0039605
attttccatctat

SEQ ID NO: 157101 - DNA, 13 bp, Artificial Sequence
  Oligonucleotide for detection of SNP TSC0039605
atagatagaaaat

SEQ ID NO: 157102 - DNA, 13 bp, Artificial Sequence
  Oligonucleotide for detection of SNP TSC0039605
attttctatctat

SEQ ID NO: 157103 - DNA, 13 bp, Artificial Sequence
  Oligonucleotide for detection of SNP TSC0039606
gattaattataaa

SEQ ID NO: 157104 - DNA, 13 bp, Artificial Sequence
  Oligonucleotide for detection of SNP TSC0039606
tttataattaatc

SEQ ID NO: 157105 - DNA, 13 bp, Artificial Sequence
  Oligonucleotide for detection of SNP TSC0039606
gattaagtataaa

SEQ ID NO: 157106 - DNA, 13 bp, Artificial Sequence
  Oligonucleotide for detection of SNP TSC0039606
tttatacttaatc

SEQ ID NO: 157107 - DNA, 13 bp, Artificial Sequence
  Oligonucleotide for detection of SNP TSC0039606
tttgtgattagty

SEQ ID NO: 157108 - DNA, 13 bp, Artificial Sequence
  Oligonucleotide for detection of SNP TSC0039606
ractaatcacaaa

SEQ ID NO: 157109 - DNA, 13 bp, Artificial Sequence
  Oligonucleotide for detection of SNP TSC0039606
tttgtgtttagty

SEQ ID NO: 157110 - DNA, 13 bp, Artificial Sequence
  Oligonucleotide for detection of SNP TSC0039606
ractaaacacaaa

SEQ ID NO: 157111 - DNA, 13 bp, Artificial Sequence
  Oligonucleotide for detection of SNP TSC0039607
gagaatgaaatta

SEQ ID NO: 157112 - DNA, 13 bp, Artificial Sequence
  Oligonucleotide for detection of SNP TSC0039607
taatttcattctc

SEQ ID NO: 157113 - DNA, 13 bp, Artificial Sequence
  Oligonucleotide for detection of SNP TSC0039607
gagaataaaatta

SEQ ID NO: 157114 - DNA, 13 bp, Artificial Sequence
  Oligonucleotide for detection of SNP TSC0039607
taattttattctc

SEQ ID NO: 157115 - DNA, 13 bp, Artificial Sequence
  Oligonucleotide for detection of SNP TSC0039608
atggttataaatt

SEQ ID NO: 157116 - DNA, 13 bp, Artificial Sequence
  Oligonucleotide for detection of SNP TSC0039608
aatttataaccat

SEQ ID NO: 157117 - DNA, 13 bp, Artificial Sequence
  Oligonucleotide for detection of SNP TSC0039608
atggttgtaaatt

SEQ ID NO: 157118 - DNA, 13 bp, Artificial Sequence
  Oligonucleotide for detection of SNP TSC0039608
aatttacaaccat

SEQ ID NO: 157119 - DNA, 13 bp, Artificial Sequence
  Oligonucleotide for detection of SNP TSC0039608
atggtcgtaaatt

SEQ ID NO: 157120 - DNA, 13 bp, Artificial Sequence
  Oligonucleotide for detection of SNP TSC0039608
aatttacgaccat

SEQ ID NO: 157121 - DNA, 13 bp, Artificial Sequence
  Oligonucleotide for detection of SNP TSC0039608
aatttgtggttat

SEQ ID NO: 157122 - DNA, 13 bp, Artificial Sequence
  Oligonucleotide for detection of SNP TSC0039608
ataaccacaaatt

SEQ ID NO: 157123 - DNA, 13 bp, Artificial Sequence
  Oligonucleotide for detection of SNP TSC0039608
aatttgcggttat

SEQ ID NO: 157124 - DNA, 13 bp, Artificial Sequence
  Oligonucleotide for detection of SNP TSC0039608
ataaccgcaaatt

SEQ ID NO: 157125 - DNA, 13 bp, Artificial Sequence
  Oligonucleotide for detection of SNP TSC0039610
ttgtgtagtgaay

SEQ ID NO: 157126 - DNA, 13 bp, Artificial Sequence
  Oligonucleotide for detection of SNP TSC0039610
rttcactacacaa

SEQ ID NO: 157127 - DNA, 13 bp, Artificial Sequence
  Oligonucleotide for detection of SNP TSC0039610
ttgtgtggtgaay

SEQ ID NO: 157128 - DNA, 13 bp, Artificial Sequence
  Oligonucleotide for detection of SNP TSC0039610
rttcaccacacaa

SEQ ID NO: 157129 - DNA, 13 bp, Artificial Sequence
  Oligonucleotide for detection of SNP TSC0039611
taaggtatataty

SEQ ID NO: 157130 - DNA, 13 bp, Artificial Sequence
  Oligonucleotide for detection of SNP TSC0039611
ratatatacctta

SEQ ID NO: 157131 - DNA, 13 bp, Artificial Sequence
  Oligonucleotide for detection of SNP TSC0039611
taaggtgtataty

SEQ ID NO: 157132 - DNA, 13 bp, Artificial Sequence
  Oligonucleotide for detection of SNP TSC0039611
ratatacacctta

SEQ ID NO: 157133 - DNA, 13 bp, Artificial Sequence
  Oligonucleotide for detection of SNP TSC0039612
ttgtttatttggt

SEQ ID NO: 157134 - DNA, 13 bp, Artificial Sequence
  Oligonucleotide for detection of SNP TSC0039612
accaaataaacaa

SEQ ID NO: 157135 - DNA, 13 bp, Artificial Sequence
  Oligonucleotide for detection of SNP TSC0039612
ttgtttttttggt

SEQ ID NO: 157136 - DNA, 13 bp, Artificial Sequence
  Oligonucleotide for detection of SNP TSC0039612
accaaaaaaacaa

SEQ ID NO: 157137 - DNA, 13 bp, Artificial Sequence
  Oligonucleotide for detection of SNP TSC0039612
attaggtgggtag

SEQ ID NO: 157138 - DNA, 13 bp, Artificial Sequence
  Oligonucleotide for detection of SNP TSC0039612
ctacccacctaat

SEQ ID NO: 157139 - DNA, 13 bp, Artificial Sequence
  Oligonucleotide for detection of SNP TSC0039612
attaggggggtag

SEQ ID NO: 157140 - DNA, 13 bp, Artificial Sequence
  Oligonucleotide for detection of SNP TSC0039612
ctacccccctaat

SEQ ID NO: 157141 - DNA, 13 bp, Artificial Sequence
  Oligonucleotide for detection of SNP TSC0039613
gttgtatgttata

SEQ ID NO: 157142 - DNA, 13 bp, Artificial Sequence
  Oligonucleotide for detection of SNP TSC0039613
tataacatacaac

SEQ ID NO: 157143 - DNA, 13 bp, Artificial Sequence
  Oligonucleotide for detection of SNP TSC0039613
gttgtacgttata

SEQ ID NO: 157144 - DNA, 13 bp, Artificial Sequence
  Oligonucleotide for detection of SNP TSC0039613
tataacgtacaac

SEQ ID NO: 157145 - DNA, 13 bp, Artificial Sequence
  Oligonucleotide for detection of SNP TSC0039613
tgtggtgtgtagy

SEQ ID NO: 157146 - DNA, 13 bp, Artificial Sequence
  Oligonucleotide for detection of SNP TSC0039613
rctacacaccaca

SEQ ID NO: 157147 - DNA, 13 bp, Artificial Sequence
  Oligonucleotide for detection of SNP TSC0039613
tgtggtatgtagy

SEQ ID NO: 157148 - DNA, 13 bp, Artificial Sequence
  Oligonucleotide for detection of SNP TSC0039613
rctacataccaca

SEQ ID NO: 157149 - DNA, 13 bp, Artificial Sequence
  Oligonucleotide for detection of SNP TSC0039613
tgtggcgtgtagy

SEQ ID NO: 157150 - DNA, 13 bp, Artificial Sequence
  Oligonucleotide for detection of SNP TSC0039613
rctacacgccaca

SEQ ID NO: 157151 - DNA, 13 bp, Artificial Sequence
  Oligonucleotide for detection of SNP TSC0039614
ggttggtgttaay

SEQ ID NO: 157152 - DNA, 13 bp, Artificial Sequence
  Oligonucleotide for detection of SNP TSC0039614
rttaacaccaacc

SEQ ID NO: 157153 - DNA, 13 bp, Artificial Sequence
  Oligonucleotide for detection of SNP TSC0039614
ggttggggttaay

SEQ ID NO: 157154 - DNA, 13 bp, Artificial Sequence
  Oligonucleotide for detection of SNP TSC0039614
rttaaccccaacc

SEQ ID NO: 157155 - DNA, 13 bp, Artificial Sequence
  Oligonucleotide for detection of SNP TSC0039614
gttaatattagty

SEQ ID NO: 157156 - DNA, 13 bp, Artificial Sequence
  Oligonucleotide for detection of SNP TSC0039614
ractaatattaac

SEQ ID NO: 157157 - DNA, 13 bp, Artificial Sequence
  Oligonucleotide for detection of SNP TSC0039614
gttaattttagty

SEQ ID NO: 157158 - DNA, 13 bp, Artificial Sequence
  Oligonucleotide for detection of SNP TSC0039614
ractaaaattaac

SEQ ID NO: 157159 - DNA, 13 bp, Artificial Sequence
  Oligonucleotide for detection of SNP TSC0039616
ttttgggtgaggt

SEQ ID NO: 157160 - DNA, 13 bp, Artificial Sequence
  Oligonucleotide for detection of SNP TSC0039616
acctcacccaaaa

SEQ ID NO: 157161 - DNA, 13 bp, Artificial Sequence
  Oligonucleotide for detection of SNP TSC0039616
attttaattaagg

SEQ ID NO: 157162 - DNA, 13 bp, Artificial Sequence
  Oligonucleotide for detection of SNP TSC0039616
ccttaattaaaat

SEQ ID NO: 157163 - DNA, 13 bp, Artificial Sequence
  Oligonucleotide for detection of SNP TSC0039616
attttatttaagg

SEQ ID NO: 157164 - DNA, 13 bp, Artificial Sequence
  Oligonucleotide for detection of SNP TSC0039616
ccttaaataaaat

SEQ ID NO: 157165 - DNA, 13 bp, Artificial Sequence
  Oligonucleotide for detection of SNP TSC0006660
gtaaaaaaaataa

SEQ ID NO: 157166 - DNA, 13 bp, Artificial Sequence
  Oligonucleotide for detection of SNP TSC0006660
ttattttttttac

SEQ ID NO: 157167 - DNA, 13 bp, Artificial Sequence
  Oligonucleotide for detection of SNP TSC0006660
gtaaaataaataa

SEQ ID NO: 157168 - DNA, 13 bp, Artificial Sequence
  Oligonucleotide for detection of SNP TSC0006660
ttatttattttac

SEQ ID NO: 157169 - DNA, 13 bp, Artificial Sequence
  Oligonucleotide for detection of SNP TSC0039617
tttgttggtgttt

SEQ ID NO: 157170 - DNA, 13 bp, Artificial Sequence
  Oligonucleotide for detection of SNP TSC0039617
aaacaccaacaaa

SEQ ID NO: 157171 - DNA, 13 bp, Artificial Sequence
  Oligonucleotide for detection of SNP TSC0039617
tttgttagtgttt

SEQ ID NO: 157172 - DNA, 13 bp, Artificial Sequence
  Oligonucleotide for detection of SNP TSC0039617
aaacactaacaaa

SEQ ID NO: 157173 - DNA, 13 bp, Artificial Sequence
  Oligonucleotide for detection of SNP TSC0039618
ttagtatgtaagt

SEQ ID NO: 157174 - DNA, 13 bp, Artificial Sequence
  Oligonucleotide for detection of SNP TSC0039618
acttacatactaa

SEQ ID NO: 157175 - DNA, 13 bp, Artificial Sequence
  Oligonucleotide for detection of SNP TSC0039618
ttagtacgtaagt

SEQ ID NO: 157176 - DNA, 13 bp, Artificial Sequence
  Oligonucleotide for detection of SNP TSC0039618
acttacgtactaa

SEQ ID NO: 157177 - DNA, 13 bp, Artificial Sequence
  Oligonucleotide for detection of SNP TSC0039618
atttgtgtgttag

SEQ ID NO: 157178 - DNA, 13 bp, Artificial Sequence
  Oligonucleotide for detection of SNP TSC0039618
ctaacacacaaat

SEQ ID NO: 157179 - DNA, 13 bp, Artificial Sequence
  Oligonucleotide for detection of SNP TSC0039618
atttgtatgttag

SEQ ID NO: 157180 - DNA, 13 bp, Artificial Sequence
  Oligonucleotide for detection of SNP TSC0039618
ctaacatacaaat

SEQ ID NO: 157181 - DNA, 13 bp, Artificial Sequence
  Oligonucleotide for detection of SNP TSC0039618
atttgcgtgttag

SEQ ID NO: 157182 - DNA, 13 bp, Artificial Sequence
  Oligonucleotide for detection of SNP TSC0039618
ctaacacgcaaat

SEQ ID NO: 157183 - DNA, 13 bp, Artificial Sequence
  Oligonucleotide for detection of SNP TSC0039619
tgagtattgtgag

SEQ ID NO: 157184 - DNA, 13 bp, Artificial Sequence
  Oligonucleotide for detection of SNP TSC0039619
ctcacaatactca

SEQ ID NO: 157185 - DNA, 13 bp, Artificial Sequence
  Oligonucleotide for detection of SNP TSC0039619
tgagtagtgtgag

SEQ ID NO: 157186 - DNA, 13 bp, Artificial Sequence
  Oligonucleotide for detection of SNP TSC0039619
ctcacactactca

SEQ ID NO: 157187 - DNA, 13 bp, Artificial Sequence
  Oligonucleotide for detection of SNP TSC0039619
cgagtattgtgag

SEQ ID NO: 157188 - DNA, 13 bp, Artificial Sequence
  Oligonucleotide for detection of SNP TSC0039619
ctcacaatactcg

SEQ ID NO: 157189 - DNA, 13 bp, Artificial Sequence
  Oligonucleotide for detection of SNP TSC0039619
cgagtagtgtgag

SEQ ID NO: 157190 - DNA, 13 bp, Artificial Sequence
  Oligonucleotide for detection of SNP TSC0039619
ctcacactactcg

SEQ ID NO: 157191 - DNA, 13 bp, Artificial Sequence
  Oligonucleotide for detection of SNP TSC0039619
tttatagtatttg

SEQ ID NO: 157192 - DNA, 13 bp, Artificial Sequence
  Oligonucleotide for detection of SNP TSC0039619
caaatactataaa

SEQ ID NO: 157193 - DNA, 13 bp, Artificial Sequence
  Oligonucleotide for detection of SNP TSC0039619
tttatattatttg

SEQ ID NO: 157194 - DNA, 13 bp, Artificial Sequence
  Oligonucleotide for detection of SNP TSC0039619
caaataatataaa

SEQ ID NO: 157195 - DNA, 13 bp, Artificial Sequence
  Oligonucleotide for detection of SNP TSC0039619
tttatagtattcg

SEQ ID NO: 157196 - DNA, 13 bp, Artificial Sequence
  Oligonucleotide for detection of SNP TSC0039619
cgaatactataaa

SEQ ID NO: 157197 - DNA, 13 bp, Artificial Sequence
  Oligonucleotide for detection of SNP TSC0039619
tttatattattcg

SEQ ID NO: 157198 - DNA, 13 bp, Artificial Sequence
  Oligonucleotide for detection of SNP TSC0039619
cgaataatataaa

SEQ ID NO: 157199 - DNA, 13 bp, Artificial Sequence
  Oligonucleotide for detection of SNP TSC0039620
ataggaggaggty

SEQ ID NO: 157200 - DNA, 13 bp, Artificial Sequence
  Oligonucleotide for detection of SNP TSC0039620
racctcctcctat

SEQ ID NO: 157201 - DNA, 13 bp, Artificial Sequence
  Oligonucleotide for detection of SNP TSC0039620
ataggaagaggty

SEQ ID NO: 157202 - DNA, 13 bp, Artificial Sequence
  Oligonucleotide for detection of SNP TSC0039620
racctcttcctat

SEQ ID NO: 157203 - DNA, 13 bp, Artificial Sequence
  Oligonucleotide for detection of SNP TSC0039621
ttatatttaaggg

SEQ ID NO: 157204 - DNA, 13 bp, Artificial Sequence
  Oligonucleotide for detection of SNP TSC0039621
cccttaaatataa

SEQ ID NO: 157205 - DNA, 13 bp, Artificial Sequence
  Oligonucleotide for detection of SNP TSC0039621
ttatatgtaaggg

SEQ ID NO: 157206 - DNA, 13 bp, Artificial Sequence
  Oligonucleotide for detection of SNP TSC0039621
cccttacatataa

SEQ ID NO: 157207 - DNA, 13 bp, Artificial Sequence
  Oligonucleotide for detection of SNP TSC0039621
tttttggatataa

SEQ ID NO: 157208 - DNA, 13 bp, Artificial Sequence
  Oligonucleotide for detection of SNP TSC0039621
ttatatccaaaaa

SEQ ID NO: 157209 - DNA, 13 bp, Artificial Sequence
  Oligonucleotide for detection of SNP TSC0039621
tttttgtatataa

SEQ ID NO: 157210 - DNA, 13 bp, Artificial Sequence
  Oligonucleotide for detection of SNP TSC0039621
ttatatacaaaaa

SEQ ID NO: 157211 - DNA, 13 bp, Artificial Sequence
  Oligonucleotide for detection of SNP TSC0039622
gtttttgtaaaaa

SEQ ID NO: 157212 - DNA, 13 bp, Artificial Sequence
  Oligonucleotide for detection of SNP TSC0039622
tttttacaaaaac

SEQ ID NO: 157213 - DNA, 13 bp, Artificial Sequence
  Oligonucleotide for detection of SNP TSC0006845
aaggttattttta

SEQ ID NO: 157214 - DNA, 13 bp, Artificial Sequence
  Oligonucleotide for detection of SNP TSC0006845
taaaaataacctt

SEQ ID NO: 157215 - DNA, 13 bp, Artificial Sequence
  Oligonucleotide for detection of SNP TSC0006845
aaggttgttttta

SEQ ID NO: 157216 - DNA, 13 bp, Artificial Sequence
  Oligonucleotide for detection of SNP TSC0006845
taaaaacaacctt

SEQ ID NO: 157217 - DNA, 13 bp, Artificial Sequence
  Oligonucleotide for detection of SNP TSC0006846
atttatatatttt

SEQ ID NO: 157218 - DNA, 13 bp, Artificial Sequence
  Oligonucleotide for detection of SNP TSC0006846
aaaatatataaat

SEQ ID NO: 157219 - DNA, 13 bp, Artificial Sequence
  Oligonucleotide for detection of SNP TSC0006846
atttatttatttt

SEQ ID NO: 157220 - DNA, 13 bp, Artificial Sequence
  Oligonucleotide for detection of SNP TSC0006846
aaaataaataaat

SEQ ID NO: 157221 - DNA, 13 bp, Artificial Sequence
  Oligonucleotide for detection of SNP TSC0006846
aaaatatgtaaat

SEQ ID NO: 157222 - DNA, 13 bp, Artificial Sequence
  Oligonucleotide for detection of SNP TSC0006846
atttacatatttt

SEQ ID NO: 157223 - DNA, 13 bp, Artificial Sequence
  Oligonucleotide for detection of SNP TSC0006846
aaaataggtaaat

SEQ ID NO: 157224 - DNA, 13 bp, Artificial Sequence
  Oligonucleotide for detection of SNP TSC0006846
atttacctatttt

SEQ ID NO: 157225 - DNA, 13 bp, Artificial Sequence
  Oligonucleotide for detection of SNP TSC0006847
aaatttattgttt

SEQ ID NO: 157226 - DNA, 13 bp, Artificial Sequence
  Oligonucleotide for detection of SNP TSC0006847
aaacaataaattt

SEQ ID NO: 157227 - DNA, 13 bp, Artificial Sequence
  Oligonucleotide for detection of SNP TSC0006847
aaatttgttgttt

SEQ ID NO: 157228 - DNA, 13 bp, Artificial Sequence
  Oligonucleotide for detection of SNP TSC0006847
aaacaacaaattt

SEQ ID NO: 157229 - DNA, 13 bp, Artificial Sequence
  Oligonucleotide for detection of SNP TSC0006847
aaattcgttgttt

SEQ ID NO: 157230 - DNA, 13 bp, Artificial Sequence
  Oligonucleotide for detection of SNP TSC0006847
aaacaacgaattt

SEQ ID NO: 157231 - DNA, 13 bp, Artificial Sequence
  Oligonucleotide for detection of SNP TSC0006847
agatagtggattt

SEQ ID NO: 157232 - DNA, 13 bp, Artificial Sequence
  Oligonucleotide for detection of SNP TSC0006847
aaatccactatct

SEQ ID NO: 157233 - DNA, 13 bp, Artificial Sequence
  Oligonucleotide for detection of SNP TSC0006847
agatagcggattt

SEQ ID NO: 157234 - DNA, 13 bp, Artificial Sequence
  Oligonucleotide for detection of SNP TSC0006847
aaatccgctatct

SEQ ID NO: 157235 - DNA, 13 bp, Artificial Sequence
  Oligonucleotide for detection of SNP TSC0039630
atgaggtgtgggy

SEQ ID NO: 157236 - DNA, 13 bp, Artificial Sequence
  Oligonucleotide for detection of SNP TSC0039630
rcccacacctcat

SEQ ID NO: 157237 - DNA, 13 bp, Artificial Sequence
  Oligonucleotide for detection of SNP TSC0039630
atgaggcgtgggy

SEQ ID NO: 157238 - DNA, 13 bp, Artificial Sequence
  Oligonucleotide for detection of SNP TSC0039630
rcccacgcctcat

SEQ ID NO: 157239 - DNA, 13 bp, Artificial Sequence
  Oligonucleotide for detection of SNP TSC0039630
gtttatgttttat

SEQ ID NO: 157240 - DNA, 13 bp, Artificial Sequence
  Oligonucleotide for detection of SNP TSC0039630
ataaaacataaac

SEQ ID NO: 157241 - DNA, 13 bp, Artificial Sequence
  Oligonucleotide for detection of SNP TSC0039630
gtttatattttat

SEQ ID NO: 157242 - DNA, 13 bp, Artificial Sequence
  Oligonucleotide for detection of SNP TSC0039630
ataaaatataaac

SEQ ID NO: 157243 - DNA, 13 bp, Artificial Sequence
  Oligonucleotide for detection of SNP TSC0039630
gtttacgttttat

SEQ ID NO: 157244 - DNA, 13 bp, Artificial Sequence
  Oligonucleotide for detection of SNP TSC0039630
ataaaacgtaaac

SEQ ID NO: 157245 - DNA, 13 bp, Artificial Sequence
  Oligonucleotide for detection of SNP TSC0039631
gatttggtttggy

SEQ ID NO: 157246 - DNA, 13 bp, Artificial Sequence
  Oligonucleotide for detection of SNP TSC0039631
rccaaaccaaatc

SEQ ID NO: 157247 - DNA, 13 bp, Artificial Sequence
  Oligonucleotide for detection of SNP TSC0039631
gatttgatttggy

SEQ ID NO: 157248 - DNA, 13 bp, Artificial Sequence
  Oligonucleotide for detection of SNP TSC0039631
rccaaatcaaatc

SEQ ID NO: 157249 - DNA, 13 bp, Artificial Sequence
  Oligonucleotide for detection of SNP TSC0039632
gtttgagttttty

SEQ ID NO: 157250 - DNA, 13 bp, Artificial Sequence
  Oligonucleotide for detection of SNP TSC0039632
raaaaactcaaac

SEQ ID NO: 157251 - DNA, 13 bp, Artificial Sequence
  Oligonucleotide for detection of SNP TSC0039633
ggaaataaatatg

SEQ ID NO: 157252 - DNA, 13 bp, Artificial Sequence
  Oligonucleotide for detection of SNP TSC0039633
catatttatttcc

SEQ ID NO: 157253 - DNA, 13 bp, Artificial Sequence
  Oligonucleotide for detection of SNP TSC0039633
ggaaatgaatatg

SEQ ID NO: 157254 - DNA, 13 bp, Artificial Sequence
  Oligonucleotide for detection of SNP TSC0039633
catattcatttcc

SEQ ID NO: 157255 - DNA, 13 bp, Artificial Sequence
  Oligonucleotide for detection of SNP TSC0039634
ttgtattggagtt

SEQ ID NO: 157256 - DNA, 13 bp, Artificial Sequence
  Oligonucleotide for detection of SNP TSC0039634
aactccaatacaa

SEQ ID NO: 157257 - DNA, 13 bp, Artificial Sequence
  Oligonucleotide for detection of SNP TSC0039634
ttgtatcggagtt

SEQ ID NO: 157258 - DNA, 13 bp, Artificial Sequence
  Oligonucleotide for detection of SNP TSC0039634
aactccgatacaa

SEQ ID NO: 157259 - DNA, 13 bp, Artificial Sequence
  Oligonucleotide for detection of SNP TSC0039634
aattttgatatag

SEQ ID NO: 157260 - DNA, 13 bp, Artificial Sequence
  Oligonucleotide for detection of SNP TSC0039634
ctatatcaaaatt

SEQ ID NO: 157261 - DNA, 13 bp, Artificial Sequence
  Oligonucleotide for detection of SNP TSC0039634
aattttaatatag

SEQ ID NO: 157262 - DNA, 13 bp, Artificial Sequence
  Oligonucleotide for detection of SNP TSC0039634
ctatattaaaatt

SEQ ID NO: 157263 - DNA, 13 bp, Artificial Sequence
  Oligonucleotide for detection of SNP TSC0039634
aatttcgatatag

SEQ ID NO: 157264 - DNA, 13 bp, Artificial Sequence
  Oligonucleotide for detection of SNP TSC0039634
ctatatcgaaatt

SEQ ID NO: 157265 - DNA, 13 bp, Artificial Sequence
  Oligonucleotide for detection of SNP TSC0039635
tttagatggaaaa

SEQ ID NO: 157266 - DNA, 13 bp, Artificial Sequence
  Oligonucleotide for detection of SNP TSC0039635
ttttccatctaaa

SEQ ID NO: 157267 - DNA, 13 bp, Artificial Sequence
  Oligonucleotide for detection of SNP TSC0039635
tttagacggaaaa

SEQ ID NO: 157268 - DNA, 13 bp, Artificial Sequence
  Oligonucleotide for detection of SNP TSC0039635
ttttccgtctaaa

SEQ ID NO: 157269 - DNA, 13 bp, Artificial Sequence
  Oligonucleotide for detection of SNP TSC0007727
gaaatagtagtga

SEQ ID NO: 157270 - DNA, 13 bp, Artificial Sequence
  Oligonucleotide for detection of SNP TSC0007727
tcactactatttc

SEQ ID NO: 157271 - DNA, 13 bp, Artificial Sequence
  Oligonucleotide for detection of SNP TSC0007727
gaaataatagtga

SEQ ID NO: 157272 - DNA, 13 bp, Artificial Sequence
  Oligonucleotide for detection of SNP TSC0007727
tcactattatttc

SEQ ID NO: 157273 - DNA, 13 bp, Artificial Sequence
  Oligonucleotide for detection of SNP TSC0039636
aggggtttggtga

SEQ ID NO: 157274 - DNA, 13 bp, Artificial Sequence
  Oligonucleotide for detection of SNP TSC0039636
tcaccaaacccct

SEQ ID NO: 157275 - DNA, 13 bp, Artificial Sequence
  Oligonucleotide for detection of SNP TSC0039636
aggggtgtggtga

SEQ ID NO: 157276 - DNA, 13 bp, Artificial Sequence
  Oligonucleotide for detection of SNP TSC0039636
tcaccacacccct

SEQ ID NO: 157277 - DNA, 13 bp, Artificial Sequence
  Oligonucleotide for detection of SNP TSC0039636
aggggtttggcga

SEQ ID NO: 157278 - DNA, 13 bp, Artificial Sequence
  Oligonucleotide for detection of SNP TSC0039636
tcgccaaacccct

SEQ ID NO: 157279 - DNA, 13 bp, Artificial Sequence
  Oligonucleotide for detection of SNP TSC0039636
aggggtgtggcga

SEQ ID NO: 157280 - DNA, 13 bp, Artificial Sequence
  Oligonucleotide for detection of SNP TSC0039636
tcgccacacccct

SEQ ID NO: 157281 - DNA, 13 bp, Artificial Sequence
  Oligonucleotide for detection of SNP TSC0039636
ttgttagattttt

SEQ ID NO: 157282 - DNA, 13 bp, Artificial Sequence
  Oligonucleotide for detection of SNP TSC0039636
aaaaatctaacaa

SEQ ID NO: 157283 - DNA, 13 bp, Artificial Sequence
  Oligonucleotide for detection of SNP TSC0039636
ttgttatattttt

SEQ ID NO: 157284 - DNA, 13 bp, Artificial Sequence
  Oligonucleotide for detection of SNP TSC0039636
aaaaatataacaa

SEQ ID NO: 157285 - DNA, 13 bp, Artificial Sequence
  Oligonucleotide for detection of SNP TSC0039636
tcgttagattttt

SEQ ID NO: 157286 - DNA, 13 bp, Artificial Sequence
  Oligonucleotide for detection of SNP TSC0039636
aaaaatctaacga

SEQ ID NO: 157287 - DNA, 13 bp, Artificial Sequence
  Oligonucleotide for detection of SNP TSC0039636
tcgttatattttt

SEQ ID NO: 157288 - DNA, 13 bp, Artificial Sequence
  Oligonucleotide for detection of SNP TSC0039636
aaaaatataacga

SEQ ID NO: 157289 - DNA, 13 bp, Artificial Sequence
  Oligonucleotide for detection of SNP TSC0039640
tttttataggttg

SEQ ID NO: 157290 - DNA, 13 bp, Artificial Sequence
  Oligonucleotide for detection of SNP TSC0039640
caacctataaaaa

SEQ ID NO: 157291 - DNA, 13 bp, Artificial Sequence
  Oligonucleotide for detection of SNP TSC0039640
tttttagaggttg

SEQ ID NO: 157292 - DNA, 13 bp, Artificial Sequence
  Oligonucleotide for detection of SNP TSC0039640
caacctctaaaaa

SEQ ID NO: 157293 - DNA, 13 bp, Artificial Sequence
  Oligonucleotide for detection of SNP TSC0039640
tagtttttgagag

SEQ ID NO: 157294 - DNA, 13 bp, Artificial Sequence
  Oligonucleotide for detection of SNP TSC0039640
ctctcaaaaacta

SEQ ID NO: 157295 - DNA, 13 bp, Artificial Sequence
  Oligonucleotide for detection of SNP TSC0039641
gtaaaatgagggy

SEQ ID NO: 157296 - DNA, 13 bp, Artificial Sequence
  Oligonucleotide for detection of SNP TSC0039641
rccctcattttac

SEQ ID NO: 157297 - DNA, 13 bp, Artificial Sequence
  Oligonucleotide for detection of SNP TSC0039641
gtaaaaggagggy

SEQ ID NO: 157298 - DNA, 13 bp, Artificial Sequence
  Oligonucleotide for detection of SNP TSC0039641
rccctccttttac

SEQ ID NO: 157299 - DNA, 13 bp, Artificial Sequence
  Oligonucleotide for detection of SNP TSC0039641
gtaaaacgagggy

SEQ ID NO: 157300 - DNA, 13 bp, Artificial Sequence
  Oligonucleotide for detection of SNP TSC0039641
rccctcgttttac

SEQ ID NO: 157301 - DNA, 13 bp, Artificial Sequence
  Oligonucleotide for detection of SNP TSC0039642
tggtataaagtgg

SEQ ID NO: 157302 - DNA, 13 bp, Artificial Sequence
  Oligonucleotide for detection of SNP TSC0039642
ccactttatacca

SEQ ID NO: 157303 - DNA, 13 bp, Artificial Sequence
  Oligonucleotide for detection of SNP TSC0039642
tggtatgaagtgg

SEQ ID NO: 157304 - DNA, 13 bp, Artificial Sequence
  Oligonucleotide for detection of SNP TSC0039642
ccacttcatacca

SEQ ID NO: 157305 - DNA, 13 bp, Artificial Sequence
  Oligonucleotide for detection of SNP TSC0039643
ttttaaataatgt

SEQ ID NO: 157306 - DNA, 13 bp, Artificial Sequence
  Oligonucleotide for detection of SNP TSC0039643
acattatttaaaa

SEQ ID NO: 157307 - DNA, 13 bp, Artificial Sequence
  Oligonucleotide for detection of SNP TSC0039643
ttttaagtaatgt

SEQ ID NO: 157308 - DNA, 13 bp, Artificial Sequence
  Oligonucleotide for detection of SNP TSC0039643
acattacttaaaa

SEQ ID NO: 157309 - DNA, 13 bp, Artificial Sequence
  Oligonucleotide for detection of SNP TSC0039644
ttttattgtgttg

SEQ ID NO: 157310 - DNA, 13 bp, Artificial Sequence
  Oligonucleotide for detection of SNP TSC0039644
caacacaataaaa

SEQ ID NO: 157311 - DNA, 13 bp, Artificial Sequence
  Oligonucleotide for detection of SNP TSC0039644
ttttatcgtgttg

SEQ ID NO: 157312 - DNA, 13 bp, Artificial Sequence
  Oligonucleotide for detection of SNP TSC0039644
caacacgataaaa

SEQ ID NO: 157313 - DNA, 13 bp, Artificial Sequence
  Oligonucleotide for detection of SNP TSC0039644
tagtatgatgaaa

SEQ ID NO: 157314 - DNA, 13 bp, Artificial Sequence
  Oligonucleotide for detection of SNP TSC0039644
tttcatcatacta

SEQ ID NO: 157315 - DNA, 13 bp, Artificial Sequence
  Oligonucleotide for detection of SNP TSC0039644
tagtataatgaaa

SEQ ID NO: 157316 - DNA, 13 bp, Artificial Sequence
  Oligonucleotide for detection of SNP TSC0039644
tttcattatacta

SEQ ID NO: 157317 - DNA, 13 bp, Artificial Sequence
  Oligonucleotide for detection of SNP TSC0039644
tagtacgatgaaa

SEQ ID NO: 157318 - DNA, 13 bp, Artificial Sequence
  Oligonucleotide for detection of SNP TSC0039644
tttcatcgtacta

SEQ ID NO: 157319 - DNA, 13 bp, Artificial Sequence
  Oligonucleotide for detection of SNP TSC0039646
gtatttttagaaa

SEQ ID NO: 157320 - DNA, 13 bp, Artificial Sequence
  Oligonucleotide for detection of SNP TSC0039646
tttctaaaaatac

SEQ ID NO: 157321 - DNA, 13 bp, Artificial Sequence
  Oligonucleotide for detection of SNP TSC0039646
gtatttgtagaaa

SEQ ID NO: 157322 - DNA, 13 bp, Artificial Sequence
  Oligonucleotide for detection of SNP TSC0039646
tttctacaaatac

SEQ ID NO: 157323 - DNA, 13 bp, Artificial Sequence
  Oligonucleotide for detection of SNP TSC0039646
tttttgaagatgy

SEQ ID NO: 157324 - DNA, 13 bp, Artificial Sequence
  Oligonucleotide for detection of SNP TSC0039646
rcatcttcaaaaa

SEQ ID NO: 157325 - DNA, 13 bp, Artificial Sequence
  Oligonucleotide for detection of SNP TSC0039646
tttttgtagatgy

SEQ ID NO: 157326 - DNA, 13 bp, Artificial Sequence
  Oligonucleotide for detection of SNP TSC0039646
rcatctacaaaaa

SEQ ID NO: 157327 - DNA, 13 bp, Artificial Sequence
  Oligonucleotide for detection of SNP TSC0039647
tggaaatggagaa

SEQ ID NO: 157328 - DNA, 13 bp, Artificial Sequence
  Oligonucleotide for detection of SNP TSC0039647
ttctccatttcca

SEQ ID NO: 157329 - DNA, 13 bp, Artificial Sequence
  Oligonucleotide for detection of SNP TSC0039647
tggaaacggagaa

SEQ ID NO: 157330 - DNA, 13 bp, Artificial Sequence
  Oligonucleotide for detection of SNP TSC0039647
ttctccgtttcca

SEQ ID NO: 157331 - DNA, 13 bp, Artificial Sequence
  Oligonucleotide for detection of SNP TSC0039648
agggggtgttatt

SEQ ID NO: 157332 - DNA, 13 bp, Artificial Sequence
  Oligonucleotide for detection of SNP TSC0039648
aataacaccccct

SEQ ID NO: 157333 - DNA, 13 bp, Artificial Sequence
  Oligonucleotide for detection of SNP TSC0039648
agggggggttatt

SEQ ID NO: 157334 - DNA, 13 bp, Artificial Sequence
  Oligonucleotide for detection of SNP TSC0039648
aataaccccccct

SEQ ID NO: 157335 - DNA, 13 bp, Artificial Sequence
  Oligonucleotide for detection of SNP TSC0039648
aataatttttttt

SEQ ID NO: 157336 - DNA, 13 bp, Artificial Sequence
  Oligonucleotide for detection of SNP TSC0039648
aaaaaaaattatt

SEQ ID NO: 157337 - DNA, 13 bp, Artificial Sequence
  Oligonucleotide for detection of SNP TSC0007700
tagtgaaagaata

SEQ ID NO: 157338 - DNA, 13 bp, Artificial Sequence
  Oligonucleotide for detection of SNP TSC0007700
tattctttcacta

SEQ ID NO: 157339 - DNA, 13 bp, Artificial Sequence
  Oligonucleotide for detection of SNP TSC0007700
tagtgagagaata

SEQ ID NO: 157340 - DNA, 13 bp, Artificial Sequence
  Oligonucleotide for detection of SNP TSC0007700
tattctctcacta

SEQ ID NO: 157341 - DNA, 13 bp, Artificial Sequence
  Oligonucleotide for detection of SNP TSC0039650
tgtattaataaay

SEQ ID NO: 157342 - DNA, 13 bp, Artificial Sequence
  Oligonucleotide for detection of SNP TSC0039650
rtttattaataca

SEQ ID NO: 157343 - DNA, 13 bp, Artificial Sequence
  Oligonucleotide for detection of SNP TSC0039650
tgtattgataaay

SEQ ID NO: 157344 - DNA, 13 bp, Artificial Sequence
  Oligonucleotide for detection of SNP TSC0039650
rtttatcaataca

SEQ ID NO: 157345 - DNA, 13 bp, Artificial Sequence
  Oligonucleotide for detection of SNP TSC0039651
agatttatttgga

SEQ ID NO: 157346 - DNA, 13 bp, Artificial Sequence
  Oligonucleotide for detection of SNP TSC0039651
tccaaataaatct

SEQ ID NO: 157347 - DNA, 13 bp, Artificial Sequence
  Oligonucleotide for detection of SNP TSC0039651
agatttttttgga

SEQ ID NO: 157348 - DNA, 13 bp, Artificial Sequence
  Oligonucleotide for detection of SNP TSC0039651
tccaaaaaaatct

SEQ ID NO: 157349 - DNA, 13 bp, Artificial Sequence
  Oligonucleotide for detection of SNP TSC0039651
tttaagtgggttt

SEQ ID NO: 157350 - DNA, 13 bp, Artificial Sequence
  Oligonucleotide for detection of SNP TSC0039651
aaacccacttaaa

SEQ ID NO: 157351 - DNA, 13 bp, Artificial Sequence
  Oligonucleotide for detection of SNP TSC0039651
tttaagggggttt

SEQ ID NO: 157352 - DNA, 13 bp, Artificial Sequence
  Oligonucleotide for detection of SNP TSC0039651
aaacccccttaaa

SEQ ID NO: 157353 - DNA, 13 bp, Artificial Sequence
  Oligonucleotide for detection of SNP TSC0039654
ggtgatgttatty

SEQ ID NO: 157354 - DNA, 13 bp, Artificial Sequence
  Oligonucleotide for detection of SNP TSC0039654
raataacatcacc

SEQ ID NO: 157355 - DNA, 13 bp, Artificial Sequence
  Oligonucleotide for detection of SNP TSC0039654
ggtgatattatty

SEQ ID NO: 157356 - DNA, 13 bp, Artificial Sequence
  Oligonucleotide for detection of SNP TSC0039654
raataatatcacc

SEQ ID NO: 157357 - DNA, 13 bp, Artificial Sequence
  Oligonucleotide for detection of SNP TSC0039655
tttaaagaaattt

SEQ ID NO: 157358 - DNA, 13 bp, Artificial Sequence
  Oligonucleotide for detection of SNP TSC0039655
aaatttctttaaa

SEQ ID NO: 157359 - DNA, 13 bp, Artificial Sequence
  Oligonucleotide for detection of SNP TSC0039655
tttaaaaaaattt

SEQ ID NO: 157360 - DNA, 13 bp, Artificial Sequence
  Oligonucleotide for detection of SNP TSC0039655
aaatttttttaaa

SEQ ID NO: 157361 - DNA, 13 bp, Artificial Sequence
  Oligonucleotide for detection of SNP TSC0039656
gattttgtaaaag

SEQ ID NO: 157362 - DNA, 13 bp, Artificial Sequence
  Oligonucleotide for detection of SNP TSC0039656
cttttacaaaatc

SEQ ID NO: 157363 - DNA, 13 bp, Artificial Sequence
  Oligonucleotide for detection of SNP TSC0039656
gattttataaaag

SEQ ID NO: 157364 - DNA, 13 bp, Artificial Sequence
  Oligonucleotide for detection of SNP TSC0039656
cttttataaaatc

SEQ ID NO: 157365 - DNA, 13 bp, Artificial Sequence
  Oligonucleotide for detection of SNP TSC0039657
gaaataatttgta

SEQ ID NO: 157366 - DNA, 13 bp, Artificial Sequence
  Oligonucleotide for detection of SNP TSC0039657
tacaaattatttc

SEQ ID NO: 157367 - DNA, 13 bp, Artificial Sequence
  Oligonucleotide for detection of SNP TSC0039657
gaaatattttgta

SEQ ID NO: 157368 - DNA, 13 bp, Artificial Sequence
  Oligonucleotide for detection of SNP TSC0039657
tacaaaatatttc

SEQ ID NO: 157369 - DNA, 13 bp, Artificial Sequence
  Oligonucleotide for detection of SNP TSC0039657
tatagattattty

SEQ ID NO: 157370 - DNA, 13 bp, Artificial Sequence
  Oligonucleotide for detection of SNP TSC0039657
raaataatctata

SEQ ID NO: 157371 - DNA, 13 bp, Artificial Sequence
  Oligonucleotide for detection of SNP TSC0039657
tatagagtattty

SEQ ID NO: 157372 - DNA, 13 bp, Artificial Sequence
  Oligonucleotide for detection of SNP TSC0039657
raaatactctata

SEQ ID NO: 157373 - DNA, 13 bp, Artificial Sequence
  Oligonucleotide for detection of SNP TSC0039658
aatagatttttga

SEQ ID NO: 157374 - DNA, 13 bp, Artificial Sequence
  Oligonucleotide for detection of SNP TSC0039658
tcaaaaatctatt

SEQ ID NO: 157375 - DNA, 13 bp, Artificial Sequence
  Oligonucleotide for detection of SNP TSC0039658
aatagagttttga

SEQ ID NO: 157376 - DNA, 13 bp, Artificial Sequence
  Oligonucleotide for detection of SNP TSC0039658
tcaaaactctatt

SEQ ID NO: 157377 - DNA, 13 bp, Artificial Sequence
  Oligonucleotide for detection of SNP TSC0039658
ttaaggttttatt

SEQ ID NO: 157378 - DNA, 13 bp, Artificial Sequence
  Oligonucleotide for detection of SNP TSC0039658
aataaaaccttaa

SEQ ID NO: 157379 - DNA, 13 bp, Artificial Sequence
  Oligonucleotide for detection of SNP TSC0039659
agtaataaaaatt

SEQ ID NO: 157380 - DNA, 13 bp, Artificial Sequence
  Oligonucleotide for detection of SNP TSC0039659
aatttttattact

SEQ ID NO: 157381 - DNA, 13 bp, Artificial Sequence
  Oligonucleotide for detection of SNP TSC0039659
agtaatgaaaatt

SEQ ID NO: 157382 - DNA, 13 bp, Artificial Sequence
  Oligonucleotide for detection of SNP TSC0039659
aattttcattact

SEQ ID NO: 157383 - DNA, 13 bp, Artificial Sequence
  Oligonucleotide for detection of SNP TSC0006653
aataatagataaa

SEQ ID NO: 157384 - DNA, 13 bp, Artificial Sequence
  Oligonucleotide for detection of SNP TSC0006653
tttatctattatt

SEQ ID NO: 157385 - DNA, 13 bp, Artificial Sequence
  Oligonucleotide for detection of SNP TSC0006653
aataatggataaa

SEQ ID NO: 157386 - DNA, 13 bp, Artificial Sequence
  Oligonucleotide for detection of SNP TSC0006653
tttatccattatt

SEQ ID NO: 157387 - DNA, 13 bp, Artificial Sequence
  Oligonucleotide for detection of SNP TSC0006653
aataacggataaa

SEQ ID NO: 157388 - DNA, 13 bp, Artificial Sequence
  Oligonucleotide for detection of SNP TSC0006653
tttatccgttatt

SEQ ID NO: 157389 - DNA, 13 bp, Artificial Sequence
  Oligonucleotide for detection of SNP TSC0006653
tttgttcgttgtt

SEQ ID NO: 157390 - DNA, 13 bp, Artificial Sequence
  Oligonucleotide for detection of SNP TSC0006653
aacaacgaacaaa

SEQ ID NO: 157391 - DNA, 13 bp, Artificial Sequence
  Oligonucleotide for detection of SNP TSC0039660
tattgtgttggtt

SEQ ID NO: 157392 - DNA, 13 bp, Artificial Sequence
  Oligonucleotide for detection of SNP TSC0039660
aaccaacacaata

SEQ ID NO: 157393 - DNA, 13 bp, Artificial Sequence
  Oligonucleotide for detection of SNP TSC0039660
tattgtattggtt

SEQ ID NO: 157394 - DNA, 13 bp, Artificial Sequence
  Oligonucleotide for detection of SNP TSC0039660
aaccaatacaata

SEQ ID NO: 157395 - DNA, 13 bp, Artificial Sequence
  Oligonucleotide for detection of SNP TSC0008761
gaggaagtatgat

SEQ ID NO: 157396 - DNA, 13 bp, Artificial Sequence
  Oligonucleotide for detection of SNP TSC0008761
atcatacttcctc

SEQ ID NO: 157397 - DNA, 13 bp, Artificial Sequence
  Oligonucleotide for detection of SNP TSC0008761
gaggaaatatgat

SEQ ID NO: 157398 - DNA, 13 bp, Artificial Sequence
  Oligonucleotide for detection of SNP TSC0008761
atcatatttcctc

SEQ ID NO: 157399 - DNA, 13 bp, Artificial Sequence
  Oligonucleotide for detection of SNP TSC0039661
tttttgcgttagy

SEQ ID NO: 157400 - DNA, 13 bp, Artificial Sequence
  Oligonucleotide for detection of SNP TSC0039661
rctaacgcaaaaa

SEQ ID NO: 157401 - DNA, 13 bp, Artificial Sequence
  Oligonucleotide for detection of SNP TSC0039661
gttaatgtaaaag

SEQ ID NO: 157402 - DNA, 13 bp, Artificial Sequence
  Oligonucleotide for detection of SNP TSC0039661
cttttacattaac

SEQ ID NO: 157403 - DNA, 13 bp, Artificial Sequence
  Oligonucleotide for detection of SNP TSC0039661
gttaatataaaag

SEQ ID NO: 157404 - DNA, 13 bp, Artificial Sequence
  Oligonucleotide for detection of SNP TSC0039661
cttttatattaac

SEQ ID NO: 157405 - DNA, 13 bp, Artificial Sequence
  Oligonucleotide for detection of SNP TSC0039661
gttaacgtaaaag

SEQ ID NO: 157406 - DNA, 13 bp, Artificial Sequence
  Oligonucleotide for detection of SNP TSC0039661
cttttacgttaac

SEQ ID NO: 157407 - DNA, 13 bp, Artificial Sequence
  Oligonucleotide for detection of SNP TSC0039667
ataataattataa

SEQ ID NO: 157408 - DNA, 13 bp, Artificial Sequence
  Oligonucleotide for detection of SNP TSC0039667
ttataattattat

SEQ ID NO: 157409 - DNA, 13 bp, Artificial Sequence
  Oligonucleotide for detection of SNP TSC0039667
ataatagttataa

SEQ ID NO: 157410 - DNA, 13 bp, Artificial Sequence
  Oligonucleotide for detection of SNP TSC0039667
ttataactattat

SEQ ID NO: 157411 - DNA, 13 bp, Artificial Sequence
  Oligonucleotide for detection of SNP TSC0039668
ttatagagattga

SEQ ID NO: 157412 - DNA, 13 bp, Artificial Sequence
  Oligonucleotide for detection of SNP TSC0039668
tcaatctctataa

SEQ ID NO: 157413 - DNA, 13 bp, Artificial Sequence
  Oligonucleotide for detection of SNP TSC0039668
ttatagtgattga

SEQ ID NO: 157414 - DNA, 13 bp, Artificial Sequence
  Oligonucleotide for detection of SNP TSC0039668
tcaatcactataa

SEQ ID NO: 157415 - DNA, 13 bp, Artificial Sequence
  Oligonucleotide for detection of SNP TSC0039668
ttatagcgattga

SEQ ID NO: 157416 - DNA, 13 bp, Artificial Sequence
  Oligonucleotide for detection of SNP TSC0039668
tcaatcgctataa

SEQ ID NO: 157417 - DNA, 13 bp, Artificial Sequence
  Oligonucleotide for detection of SNP TSC0007056
tgggtgttttgta

SEQ ID NO: 157418 - DNA, 13 bp, Artificial Sequence
  Oligonucleotide for detection of SNP TSC0007056
tacaaaacaccca

SEQ ID NO: 157419 - DNA, 13 bp, Artificial Sequence
  Oligonucleotide for detection of SNP TSC0007056
tgggtggtttgta

SEQ ID NO: 157420 - DNA, 13 bp, Artificial Sequence
  Oligonucleotide for detection of SNP TSC0007056
tacaaaccaccca

SEQ ID NO: 157421 - DNA, 13 bp, Artificial Sequence
  Oligonucleotide for detection of SNP TSC0007056
tataggatattta

SEQ ID NO: 157422 - DNA, 13 bp, Artificial Sequence
  Oligonucleotide for detection of SNP TSC0007056
taaatatcctata

SEQ ID NO: 157423 - DNA, 13 bp, Artificial Sequence
  Oligonucleotide for detection of SNP TSC0007056
tataggttattta

SEQ ID NO: 157424 - DNA, 13 bp, Artificial Sequence
  Oligonucleotide for detection of SNP TSC0007056
taaataacctata

SEQ ID NO: 157425 - DNA, 13 bp, Artificial Sequence
  Oligonucleotide for detection of SNP TSC0007057
aaataatgtaagt

SEQ ID NO: 157426 - DNA, 13 bp, Artificial Sequence
  Oligonucleotide for detection of SNP TSC0007057
acttacattattt

SEQ ID NO: 157427 - DNA, 13 bp, Artificial Sequence
  Oligonucleotide for detection of SNP TSC0007057
aaataacgtaagt

SEQ ID NO: 157428 - DNA, 13 bp, Artificial Sequence
  Oligonucleotide for detection of SNP TSC0007057
acttacgttattt

SEQ ID NO: 157429 - DNA, 13 bp, Artificial Sequence
  Oligonucleotide for detection of SNP TSC0007057
atttatgttgttt

SEQ ID NO: 157430 - DNA, 13 bp, Artificial Sequence
  Oligonucleotide for detection of SNP TSC0007057
aaacaacataaat

SEQ ID NO: 157431 - DNA, 13 bp, Artificial Sequence
  Oligonucleotide for detection of SNP TSC0007057
atttatattgttt

SEQ ID NO: 157432 - DNA, 13 bp, Artificial Sequence
  Oligonucleotide for detection of SNP TSC0007057
aaacaatataaat

SEQ ID NO: 157433 - DNA, 13 bp, Artificial Sequence
  Oligonucleotide for detection of SNP TSC0007057
atttacgttgttt

SEQ ID NO: 157434 - DNA, 13 bp, Artificial Sequence
  Oligonucleotide for detection of SNP TSC0007057
aaacaacgtaaat

SEQ ID NO: 157435 - DNA, 13 bp, Artificial Sequence
  Oligonucleotide for detection of SNP TSC0039669
taaattattggta

SEQ ID NO: 157436 - DNA, 13 bp, Artificial Sequence
  Oligonucleotide for detection of SNP TSC0039669
taccaataattta

SEQ ID NO: 157437 - DNA, 13 bp, Artificial Sequence
  Oligonucleotide for detection of SNP TSC0039669
taaattgttggta

SEQ ID NO: 157438 - DNA, 13 bp, Artificial Sequence
  Oligonucleotide for detection of SNP TSC0039669
taccaacaattta

SEQ ID NO: 157439 - DNA, 13 bp, Artificial Sequence
  Oligonucleotide for detection of SNP TSC0007219
taaatagtattay

SEQ ID NO: 157440 - DNA, 13 bp, Artificial Sequence
  Oligonucleotide for detection of SNP TSC0007219
rtaatactattta

SEQ ID NO: 157441 - DNA, 13 bp, Artificial Sequence
  Oligonucleotide for detection of SNP TSC0007219
taaataatattay

SEQ ID NO: 157442 - DNA, 13 bp, Artificial Sequence
  Oligonucleotide for detection of SNP TSC0007219
rtaatattattta

SEQ ID NO: 157443 - DNA, 13 bp, Artificial Sequence
  Oligonucleotide for detection of SNP TSC0007220
taatatagtaaty

SEQ ID NO: 157444 - DNA, 13 bp, Artificial Sequence
  Oligonucleotide for detection of SNP TSC0007220
rattactatatta

SEQ ID NO: 157445 - DNA, 13 bp, Artificial Sequence
  Oligonucleotide for detection of SNP TSC0007220
taatattgtaaty

SEQ ID NO: 157446 - DNA, 13 bp, Artificial Sequence
  Oligonucleotide for detection of SNP TSC0007220
rattacaatatta

SEQ ID NO: 157447 - DNA, 13 bp, Artificial Sequence
  Oligonucleotide for detection of SNP TSC0007220
taatatcgtaaty

SEQ ID NO: 157448 - DNA, 13 bp, Artificial Sequence
  Oligonucleotide for detection of SNP TSC0007220
rattacgatatta

SEQ ID NO: 157449 - DNA, 13 bp, Artificial Sequence
  Oligonucleotide for detection of SNP TSC0007220
ggttgttatgttg

SEQ ID NO: 157450 - DNA, 13 bp, Artificial Sequence
  Oligonucleotide for detection of SNP TSC0007220
caacataacaacc

SEQ ID NO: 157451 - DNA, 13 bp, Artificial Sequence
  Oligonucleotide for detection of SNP TSC0007220
ggttgtgatgttg

SEQ ID NO: 157452 - DNA, 13 bp, Artificial Sequence
  Oligonucleotide for detection of SNP TSC0007220
caacatcacaacc

SEQ ID NO: 157453 - DNA, 13 bp, Artificial Sequence
  Oligonucleotide for detection of SNP TSC0007220
ggttgcgatgttg

SEQ ID NO: 157454 - DNA, 13 bp, Artificial Sequence
  Oligonucleotide for detection of SNP TSC0007220
caacatcgcaacc

SEQ ID NO: 157455 - DNA, 13 bp, Artificial Sequence
  Oligonucleotide for detection of SNP TSC0039670
gatattgttttty

SEQ ID NO: 157456 - DNA, 13 bp, Artificial Sequence
  Oligonucleotide for detection of SNP TSC0039670
raaaaacaatatc

SEQ ID NO: 157457 - DNA, 13 bp, Artificial Sequence
  Oligonucleotide for detection of SNP TSC0039670
gatattattttty

SEQ ID NO: 157458 - DNA, 13 bp, Artificial Sequence
  Oligonucleotide for detection of SNP TSC0039670
raaaaataatatc

SEQ ID NO: 157459 - DNA, 13 bp, Artificial Sequence
  Oligonucleotide for detection of SNP TSC0039672
tatttaaatggta

SEQ ID NO: 157460 - DNA, 13 bp, Artificial Sequence
  Oligonucleotide for detection of SNP TSC0039672
taccatttaaata

SEQ ID NO: 157461 - DNA, 13 bp, Artificial Sequence
  Oligonucleotide for detection of SNP TSC0039672
tatttagatggta

SEQ ID NO: 157462 - DNA, 13 bp, Artificial Sequence
  Oligonucleotide for detection of SNP TSC0039672
taccatctaaata

SEQ ID NO: 157463 - DNA, 13 bp, Artificial Sequence
  Oligonucleotide for detection of SNP TSC0039673
atatatatgaaaa

SEQ ID NO: 157464 - DNA, 13 bp, Artificial Sequence
  Oligonucleotide for detection of SNP TSC0039673
ttttcatatatat

SEQ ID NO: 157465 - DNA, 13 bp, Artificial Sequence
  Oligonucleotide for detection of SNP TSC0039673
atatatttgaaaa

SEQ ID NO: 157466 - DNA, 13 bp, Artificial Sequence
  Oligonucleotide for detection of SNP TSC0039673
ttttcaaatatat

SEQ ID NO: 157467 - DNA, 13 bp, Artificial Sequence
  Oligonucleotide for detection of SNP TSC0039673
tttttatatgtat

SEQ ID NO: 157468 - DNA, 13 bp, Artificial Sequence
  Oligonucleotide for detection of SNP TSC0039673
atacatataaaaa

SEQ ID NO: 157469 - DNA, 13 bp, Artificial Sequence
  Oligonucleotide for detection of SNP TSC0039673
tttttaaatgtat

SEQ ID NO: 157470 - DNA, 13 bp, Artificial Sequence
  Oligonucleotide for detection of SNP TSC0039673
atacatttaaaaa

SEQ ID NO: 157471 - DNA, 13 bp, Artificial Sequence
  Oligonucleotide for detection of SNP TSC0039675
agaagatggatta

SEQ ID NO: 157472 - DNA, 13 bp, Artificial Sequence
  Oligonucleotide for detection of SNP TSC0039675
taatccatcttct

SEQ ID NO: 157473 - DNA, 13 bp, Artificial Sequence
  Oligonucleotide for detection of SNP TSC0039675
agaagacggatta

SEQ ID NO: 157474 - DNA, 13 bp, Artificial Sequence
  Oligonucleotide for detection of SNP TSC0039675
taatccgtcttct

SEQ ID NO: 157475 - DNA, 13 bp, Artificial Sequence
  Oligonucleotide for detection of SNP TSC0039677
tttatgagaatat

SEQ ID NO: 157476 - DNA, 13 bp, Artificial Sequence
  Oligonucleotide for detection of SNP TSC0039677
atattctcataaa

SEQ ID NO: 157477 - DNA, 13 bp, Artificial Sequence
  Oligonucleotide for detection of SNP TSC0039677
tttatgtgaatat

SEQ ID NO: 157478 - DNA, 13 bp, Artificial Sequence
  Oligonucleotide for detection of SNP TSC0039677
atattcacataaa

SEQ ID NO: 157479 - DNA, 13 bp, Artificial Sequence
  Oligonucleotide for detection of SNP TSC0039677
tttatgcgaatat

SEQ ID NO: 157480 - DNA, 13 bp, Artificial Sequence
  Oligonucleotide for detection of SNP TSC0039677
atattcgcataaa

SEQ ID NO: 157481 - DNA, 13 bp, Artificial Sequence
  Oligonucleotide for detection of SNP TSC0039677
atgtttttataaa

SEQ ID NO: 157482 - DNA, 13 bp, Artificial Sequence
  Oligonucleotide for detection of SNP TSC0039677
tttataaaaacat

SEQ ID NO: 157483 - DNA, 13 bp, Artificial Sequence
  Oligonucleotide for detection of SNP TSC0039677
atgtttgtataaa

SEQ ID NO: 157484 - DNA, 13 bp, Artificial Sequence
  Oligonucleotide for detection of SNP TSC0039677
tttatacaaacat

SEQ ID NO: 157485 - DNA, 13 bp, Artificial Sequence
  Oligonucleotide for detection of SNP TSC0039677
atgttcgtataaa

SEQ ID NO: 157486 - DNA, 13 bp, Artificial Sequence
  Oligonucleotide for detection of SNP TSC0039677
tttatacgaacat

SEQ ID NO: 157487 - DNA, 13 bp, Artificial Sequence
  Oligonucleotide for detection of SNP TSC0039678
tgatatgaaatga

SEQ ID NO: 157488 - DNA, 13 bp, Artificial Sequence
  Oligonucleotide for detection of SNP TSC0039678
tcatttcatatca

SEQ ID NO: 157489 - DNA, 13 bp, Artificial Sequence
  Oligonucleotide for detection of SNP TSC0039678
tgatataaaatga

SEQ ID NO: 157490 - DNA, 13 bp, Artificial Sequence
  Oligonucleotide for detection of SNP TSC0039678
tcattttatatca

SEQ ID NO: 157491 - DNA, 13 bp, Artificial Sequence
  Oligonucleotide for detection of SNP TSC0039678
tgatacgaaatga

SEQ ID NO: 157492 - DNA, 13 bp, Artificial Sequence
  Oligonucleotide for detection of SNP TSC0039678
tcatttcgtatca

SEQ ID NO: 157493 - DNA, 13 bp, Artificial Sequence
  Oligonucleotide for detection of SNP TSC0039679
tggtatgaattgt

SEQ ID NO: 157494 - DNA, 13 bp, Artificial Sequence
  Oligonucleotide for detection of SNP TSC0039679
acaattcatacca

SEQ ID NO: 157495 - DNA, 13 bp, Artificial Sequence
  Oligonucleotide for detection of SNP TSC0039679
tggtataaattgt

SEQ ID NO: 157496 - DNA, 13 bp, Artificial Sequence
  Oligonucleotide for detection of SNP TSC0039679
acaatttatacca

SEQ ID NO: 157497 - DNA, 13 bp, Artificial Sequence
  Oligonucleotide for detection of SNP TSC0039680
tattataatttgg

SEQ ID NO: 157498 - DNA, 13 bp, Artificial Sequence
  Oligonucleotide for detection of SNP TSC0039680
ccaaattataata

SEQ ID NO: 157499 - DNA, 13 bp, Artificial Sequence
  Oligonucleotide for detection of SNP TSC0039680
tattattatttgg

SEQ ID NO: 157500 - DNA, 13 bp, Artificial Sequence
  Oligonucleotide for detection of SNP TSC0039680
ccaaataataata

SEQ ID NO: 157501 - DNA, 13 bp, Artificial Sequence
  Oligonucleotide for detection of SNP TSC0039680
ttaggttgtaata

SEQ ID NO: 157502 - DNA, 13 bp, Artificial Sequence
  Oligonucleotide for detection of SNP TSC0039680
tattacaacctaa

SEQ ID NO: 157503 - DNA, 13 bp, Artificial Sequence
  Oligonucleotide for detection of SNP TSC0039680
ttaggtggtaata

SEQ ID NO: 157504 - DNA, 13 bp, Artificial Sequence
  Oligonucleotide for detection of SNP TSC0039680
tattaccacctaa

SEQ ID NO: 157505 - DNA, 13 bp, Artificial Sequence
  Oligonucleotide for detection of SNP TSC0039681
taataagtattga

SEQ ID NO: 157506 - DNA, 13 bp, Artificial Sequence
  Oligonucleotide for detection of SNP TSC0039681
tcaatacttatta

SEQ ID NO: 157507 - DNA, 13 bp, Artificial Sequence
  Oligonucleotide for detection of SNP TSC0039681
taataaatattga

SEQ ID NO: 157508 - DNA, 13 bp, Artificial Sequence
  Oligonucleotide for detection of SNP TSC0039681
tcaatatttatta

SEQ ID NO: 157509 - DNA, 13 bp, Artificial Sequence
  Oligonucleotide for detection of SNP TSC0039683
atattaagattga

SEQ ID NO: 157510 - DNA, 13 bp, Artificial Sequence
  Oligonucleotide for detection of SNP TSC0039683
tcaatcttaatat

SEQ ID NO: 157511 - DNA, 13 bp, Artificial Sequence
  Oligonucleotide for detection of SNP TSC0039683
atattaggattga

SEQ ID NO: 157512 - DNA, 13 bp, Artificial Sequence
  Oligonucleotide for detection of SNP TSC0039683
tcaatcctaatat

SEQ ID NO: 157513 - DNA, 13 bp, Artificial Sequence
  Oligonucleotide for detection of SNP TSC0039684
agagaatgttggt

SEQ ID NO: 157514 - DNA, 13 bp, Artificial Sequence
  Oligonucleotide for detection of SNP TSC0039684
accaacattctct

SEQ ID NO: 157515 - DNA, 13 bp, Artificial Sequence
  Oligonucleotide for detection of SNP TSC0039684
agagaaggttggt

SEQ ID NO: 157516 - DNA, 13 bp, Artificial Sequence
  Oligonucleotide for detection of SNP TSC0039684
accaaccttctct

SEQ ID NO: 157517 - DNA, 13 bp, Artificial Sequence
  Oligonucleotide for detection of SNP TSC0039689
tattaatgtttty

SEQ ID NO: 157518 - DNA, 13 bp, Artificial Sequence
  Oligonucleotide for detection of SNP TSC0039689
raaaacattaata

SEQ ID NO: 157519 - DNA, 13 bp, Artificial Sequence
  Oligonucleotide for detection of SNP TSC0039689
tattaacgtttty

SEQ ID NO: 157520 - DNA, 13 bp, Artificial Sequence
  Oligonucleotide for detection of SNP TSC0039689
raaaacgttaata

SEQ ID NO: 157521 - DNA, 13 bp, Artificial Sequence
  Oligonucleotide for detection of SNP TSC0039689
ggagatgttagta

SEQ ID NO: 157522 - DNA, 13 bp, Artificial Sequence
  Oligonucleotide for detection of SNP TSC0039689
tactaacatctcc

SEQ ID NO: 157523 - DNA, 13 bp, Artificial Sequence
  Oligonucleotide for detection of SNP TSC0039689
ggagatattagta

SEQ ID NO: 157524 - DNA, 13 bp, Artificial Sequence
  Oligonucleotide for detection of SNP TSC0039689
tactaatatctcc

SEQ ID NO: 157525 - DNA, 13 bp, Artificial Sequence
  Oligonucleotide for detection of SNP TSC0039689
ggagacgttagta

SEQ ID NO: 157526 - DNA, 13 bp, Artificial Sequence
  Oligonucleotide for detection of SNP TSC0039689
tactaacgtctcc

SEQ ID NO: 157527 - DNA, 13 bp, Artificial Sequence
  Oligonucleotide for detection of SNP TSC0039690
agtggaattgtta

SEQ ID NO: 157528 - DNA, 13 bp, Artificial Sequence
  Oligonucleotide for detection of SNP TSC0039690
taacaattccact

SEQ ID NO: 157529 - DNA, 13 bp, Artificial Sequence
  Oligonucleotide for detection of SNP TSC0039690
agtggatttgtta

SEQ ID NO: 157530 - DNA, 13 bp, Artificial Sequence
  Oligonucleotide for detection of SNP TSC0039690
taacaaatccact

SEQ ID NO: 157531 - DNA, 13 bp, Artificial Sequence
  Oligonucleotide for detection of SNP TSC0039690
agtggaatcgtta

SEQ ID NO: 157532 - DNA, 13 bp, Artificial Sequence
  Oligonucleotide for detection of SNP TSC0039690
taacgattccact

SEQ ID NO: 157533 - DNA, 13 bp, Artificial Sequence
  Oligonucleotide for detection of SNP TSC0039690
agtggattcgtta

SEQ ID NO: 157534 - DNA, 13 bp, Artificial Sequence
  Oligonucleotide for detection of SNP TSC0039690
taacgaatccact

SEQ ID NO: 157535 - DNA, 13 bp, Artificial Sequence
  Oligonucleotide for detection of SNP TSC0039690
taatggttttatt

SEQ ID NO: 157536 - DNA, 13 bp, Artificial Sequence
  Oligonucleotide for detection of SNP TSC0039690
aataaaaccatta

SEQ ID NO: 157537 - DNA, 13 bp, Artificial Sequence
  Oligonucleotide for detection of SNP TSC0039690
taatggatttatt

SEQ ID NO: 157538 - DNA, 13 bp, Artificial Sequence
  Oligonucleotide for detection of SNP TSC0039690
aataaatccatta

SEQ ID NO: 157539 - DNA, 13 bp, Artificial Sequence
  Oligonucleotide for detection of SNP TSC0039690
taacggttttatt

SEQ ID NO: 157540 - DNA, 13 bp, Artificial Sequence
  Oligonucleotide for detection of SNP TSC0039690
aataaaaccgtta

SEQ ID NO: 157541 - DNA, 13 bp, Artificial Sequence
  Oligonucleotide for detection of SNP TSC0039690
taacggatttatt

SEQ ID NO: 157542 - DNA, 13 bp, Artificial Sequence
  Oligonucleotide for detection of SNP TSC0039690
aataaatccgtta

SEQ ID NO: 157543 - DNA, 13 bp, Artificial Sequence
  Oligonucleotide for detection of SNP TSC0039691
ggagatatatgta

SEQ ID NO: 157544 - DNA, 13 bp, Artificial Sequence
  Oligonucleotide for detection of SNP TSC0039691
tacatatatctcc

SEQ ID NO: 157545 - DNA, 13 bp, Artificial Sequence
  Oligonucleotide for detection of SNP TSC0039691
ggagatgtatgta

SEQ ID NO: 157546 - DNA, 13 bp, Artificial Sequence
  Oligonucleotide for detection of SNP TSC0039691
tacatacatctcc

SEQ ID NO: 157547 - DNA, 13 bp, Artificial Sequence
  Oligonucleotide for detection of SNP TSC0039691
ggagacgtatgta

SEQ ID NO: 157548 - DNA, 13 bp, Artificial Sequence
  Oligonucleotide for detection of SNP TSC0039691
tacatacgtctcc

SEQ ID NO: 157549 - DNA, 13 bp, Artificial Sequence
  Oligonucleotide for detection of SNP TSC0039691
tgtatatgtttty

SEQ ID NO: 157550 - DNA, 13 bp, Artificial Sequence
  Oligonucleotide for detection of SNP TSC0039691
raaaacatataca

SEQ ID NO: 157551 - DNA, 13 bp, Artificial Sequence
  Oligonucleotide for detection of SNP TSC0039691
tgtatacgtttty

SEQ ID NO: 157552 - DNA, 13 bp, Artificial Sequence
  Oligonucleotide for detection of SNP TSC0039691
raaaacgtataca

SEQ ID NO: 157553 - DNA, 13 bp, Artificial Sequence
  Oligonucleotide for detection of SNP TSC0039692
aatagtattatga

SEQ ID NO: 157554 - DNA, 13 bp, Artificial Sequence
  Oligonucleotide for detection of SNP TSC0039692
tcataatactatt

SEQ ID NO: 157555 - DNA, 13 bp, Artificial Sequence
  Oligonucleotide for detection of SNP TSC0039692
aatagtgttatga

SEQ ID NO: 157556 - DNA, 13 bp, Artificial Sequence
  Oligonucleotide for detection of SNP TSC0039692
tcataacactatt

SEQ ID NO: 157557 - DNA, 13 bp, Artificial Sequence
  Oligonucleotide for detection of SNP TSC0039692
aatagtattacga

SEQ ID NO: 157558 - DNA, 13 bp, Artificial Sequence
  Oligonucleotide for detection of SNP TSC0039692
tcgtaatactatt

SEQ ID NO: 157559 - DNA, 13 bp, Artificial Sequence
  Oligonucleotide for detection of SNP TSC0039692
aatagcgttatga

SEQ ID NO: 157560 - DNA, 13 bp, Artificial Sequence
  Oligonucleotide for detection of SNP TSC0039692
tcataacgctatt

SEQ ID NO: 157561 - DNA, 13 bp, Artificial Sequence
  Oligonucleotide for detection of SNP TSC0039692
aatagtgttacga

SEQ ID NO: 157562 - DNA, 13 bp, Artificial Sequence
  Oligonucleotide for detection of SNP TSC0039692
tcgtaacactatt

SEQ ID NO: 157563 - DNA, 13 bp, Artificial Sequence
  Oligonucleotide for detection of SNP TSC0039692
aatagcgttacga

SEQ ID NO: 157564 - DNA, 13 bp, Artificial Sequence
  Oligonucleotide for detection of SNP TSC0039692
tcgtaacgctatt

SEQ ID NO: 157565 - DNA, 13 bp, Artificial Sequence
  Oligonucleotide for detection of SNP TSC0039692
ttgtaatgttatt

SEQ ID NO: 157566 - DNA, 13 bp, Artificial Sequence
  Oligonucleotide for detection of SNP TSC0039692
aataacattacaa

SEQ ID NO: 157567 - DNA, 13 bp, Artificial Sequence
  Oligonucleotide for detection of SNP TSC0039692
tcgtaatgttatt

SEQ ID NO: 157568 - DNA, 13 bp, Artificial Sequence
  Oligonucleotide for detection of SNP TSC0039692
aataacattacga

SEQ ID NO: 157569 - DNA, 13 bp, Artificial Sequence
  Oligonucleotide for detection of SNP TSC0039692
ttgtaacgttatt

SEQ ID NO: 157570 - DNA, 13 bp, Artificial Sequence
  Oligonucleotide for detection of SNP TSC0039692
aataacgttacaa

SEQ ID NO: 157571 - DNA, 13 bp, Artificial Sequence
  Oligonucleotide for detection of SNP TSC0039692
tcgtaacgttatt

SEQ ID NO: 157572 - DNA, 13 bp, Artificial Sequence
  Oligonucleotide for detection of SNP TSC0039692
aataacgttacga

SEQ ID NO: 157573 - DNA, 13 bp, Artificial Sequence
  Oligonucleotide for detection of SNP TSC0039693
ataaatagatgty

SEQ ID NO: 157574 - DNA, 13 bp, Artificial Sequence
  Oligonucleotide for detection of SNP TSC0039693
racatctatttat

SEQ ID NO: 157575 - DNA, 13 bp, Artificial Sequence
  Oligonucleotide for detection of SNP TSC0039693
ataaatggatgty

SEQ ID NO: 157576 - DNA, 13 bp, Artificial Sequence
  Oligonucleotide for detection of SNP TSC0039693
racatccatttat

SEQ ID NO: 157577 - DNA, 13 bp, Artificial Sequence
  Oligonucleotide for detection of SNP TSC0039693
ataaacggatgty

SEQ ID NO: 157578 - DNA, 13 bp, Artificial Sequence
  Oligonucleotide for detection of SNP TSC0039693
racatccgtttat

SEQ ID NO: 157579 - DNA, 13 bp, Artificial Sequence
  Oligonucleotide for detection of SNP TSC0039693
gatatttgtttat

SEQ ID NO: 157580 - DNA, 13 bp, Artificial Sequence
  Oligonucleotide for detection of SNP TSC0039693
ataaacaaatatc

SEQ ID NO: 157581 - DNA, 13 bp, Artificial Sequence
  Oligonucleotide for detection of SNP TSC0039693
gatattcgtttat

SEQ ID NO: 157582 - DNA, 13 bp, Artificial Sequence
  Oligonucleotide for detection of SNP TSC0039693
ataaacgaatatc

SEQ ID NO: 157583 - DNA, 13 bp, Artificial Sequence
  Oligonucleotide for detection of SNP TSC0039694
tgttatttagaty

SEQ ID NO: 157584 - DNA, 13 bp, Artificial Sequence
  Oligonucleotide for detection of SNP TSC0039694
ratctaaataaca

SEQ ID NO: 157585 - DNA, 13 bp, Artificial Sequence
  Oligonucleotide for detection of SNP TSC0039694
ggtttgtatgata

SEQ ID NO: 157586 - DNA, 13 bp, Artificial Sequence
  Oligonucleotide for detection of SNP TSC0039694
tatcatacaaacc

SEQ ID NO: 157587 - DNA, 13 bp, Artificial Sequence
  Oligonucleotide for detection of SNP TSC0039694
ggtttggatgata

SEQ ID NO: 157588 - DNA, 13 bp, Artificial Sequence
  Oligonucleotide for detection of SNP TSC0039694
tatcatccaaacc

SEQ ID NO: 157589 - DNA, 13 bp, Artificial Sequence
  Oligonucleotide for detection of SNP TSC0039695
tataaaaagtttt

SEQ ID NO: 157590 - DNA, 13 bp, Artificial Sequence
  Oligonucleotide for detection of SNP TSC0039695
aaaactttttata

SEQ ID NO: 157591 - DNA, 13 bp, Artificial Sequence
  Oligonucleotide for detection of SNP TSC0039695
tataaagagtttt

SEQ ID NO: 157592 - DNA, 13 bp, Artificial Sequence
  Oligonucleotide for detection of SNP TSC0039695
aaaactctttata

SEQ ID NO: 157593 - DNA, 13 bp, Artificial Sequence
  Oligonucleotide for detection of SNP TSC0039696
tgttggattgttt

SEQ ID NO: 157594 - DNA, 13 bp, Artificial Sequence
  Oligonucleotide for detection of SNP TSC0039696
aaacaatccaaca

SEQ ID NO: 157595 - DNA, 13 bp, Artificial Sequence
  Oligonucleotide for detection of SNP TSC0039696
tgttgggttgttt

SEQ ID NO: 157596 - DNA, 13 bp, Artificial Sequence
  Oligonucleotide for detection of SNP TSC0039696
aaacaacccaaca

SEQ ID NO: 157597 - DNA, 13 bp, Artificial Sequence
  Oligonucleotide for detection of SNP TSC0039696
tgttggatcgttt

SEQ ID NO: 157598 - DNA, 13 bp, Artificial Sequence
  Oligonucleotide for detection of SNP TSC0039696
aaacgatccaaca

SEQ ID NO: 157599 - DNA, 13 bp, Artificial Sequence
  Oligonucleotide for detection of SNP TSC0039696
tgttgggtcgttt

SEQ ID NO: 157600 - DNA, 13 bp, Artificial Sequence
  Oligonucleotide for detection of SNP TSC0039696
aaacgacccaaca

SEQ ID NO: 157601 - DNA, 13 bp, Artificial Sequence
  Oligonucleotide for detection of SNP TSC0039698
attggtataattt

SEQ ID NO: 157602 - DNA, 13 bp, Artificial Sequence
  Oligonucleotide for detection of SNP TSC0039698
aaattataccaat

SEQ ID NO: 157603 - DNA, 13 bp, Artificial Sequence
  Oligonucleotide for detection of SNP TSC0039698
attggtgtaattt

SEQ ID NO: 157604 - DNA, 13 bp, Artificial Sequence
  Oligonucleotide for detection of SNP TSC0039698
aaattacaccaat

SEQ ID NO: 157605 - DNA, 13 bp, Artificial Sequence
  Oligonucleotide for detection of SNP TSC0039698
attggcgtaattt

SEQ ID NO: 157606 - DNA, 13 bp, Artificial Sequence
  Oligonucleotide for detection of SNP TSC0039698
aaattacgccaat

SEQ ID NO: 157607 - DNA, 13 bp, Artificial Sequence
  Oligonucleotide for detection of SNP TSC0039698
agattatgttagt

SEQ ID NO: 157608 - DNA, 13 bp, Artificial Sequence
  Oligonucleotide for detection of SNP TSC0039698
actaacataatct

SEQ ID NO: 157609 - DNA, 13 bp, Artificial Sequence
  Oligonucleotide for detection of SNP TSC0039698
agattacgttagt

SEQ ID NO: 157610 - DNA, 13 bp, Artificial Sequence
  Oligonucleotide for detection of SNP TSC0039698
actaacgtaatct

SEQ ID NO: 157611 - DNA, 13 bp, Artificial Sequence
  Oligonucleotide for detection of SNP TSC0039699
gtcggatgtggtg

SEQ ID NO: 157612 - DNA, 13 bp, Artificial Sequence
  Oligonucleotide for detection of SNP TSC0039699
caccacatccgac

SEQ ID NO: 157613 - DNA, 13 bp, Artificial Sequence
  Oligonucleotide for detection of SNP TSC0039699
gtcggacgtggtg

SEQ ID NO: 157614 - DNA, 13 bp, Artificial Sequence
  Oligonucleotide for detection of SNP TSC0039699
caccacgtccgac

SEQ ID NO: 157615 - DNA, 13 bp, Artificial Sequence
  Oligonucleotide for detection of SNP TSC0039700
ttatatattatay

SEQ ID NO: 157616 - DNA, 13 bp, Artificial Sequence
  Oligonucleotide for detection of SNP TSC0039700
rtataatatataa

SEQ ID NO: 157617 - DNA, 13 bp, Artificial Sequence
  Oligonucleotide for detection of SNP TSC0039700
ttatatgttatay

SEQ ID NO: 157618 - DNA, 13 bp, Artificial Sequence
  Oligonucleotide for detection of SNP TSC0039700
rtataacatataa

SEQ ID NO: 157619 - DNA, 13 bp, Artificial Sequence
  Oligonucleotide for detection of SNP TSC0039700
ttatacgttatay

SEQ ID NO: 157620 - DNA, 13 bp, Artificial Sequence
  Oligonucleotide for detection of SNP TSC0039700
rtataacgtataa

SEQ ID NO: 157621 - DNA, 13 bp, Artificial Sequence
  Oligonucleotide for detection of SNP TSC0039700
gtgtaatgtgtgg

SEQ ID NO: 157622 - DNA, 13 bp, Artificial Sequence
  Oligonucleotide for detection of SNP TSC0039700
ccacacattacac

SEQ ID NO: 157623 - DNA, 13 bp, Artificial Sequence
  Oligonucleotide for detection of SNP TSC0039700
gtgtaacgtgtgg

SEQ ID NO: 157624 - DNA, 13 bp, Artificial Sequence
  Oligonucleotide for detection of SNP TSC0039700
ccacacgttacac

SEQ ID NO: 157625 - DNA, 13 bp, Artificial Sequence
  Oligonucleotide for detection of SNP TSC0039701
aaaaaaggtaata

SEQ ID NO: 157626 - DNA, 13 bp, Artificial Sequence
  Oligonucleotide for detection of SNP TSC0039701
tattacctttttt

SEQ ID NO: 157627 - DNA, 13 bp, Artificial Sequence
  Oligonucleotide for detection of SNP TSC0039701
aaaaaaagtaata

SEQ ID NO: 157628 - DNA, 13 bp, Artificial Sequence
  Oligonucleotide for detection of SNP TSC0039701
tattacttttttt

SEQ ID NO: 157629 - DNA, 13 bp, Artificial Sequence
  Oligonucleotide for detection of SNP TSC0039702
ttttaataataaa

SEQ ID NO: 157630 - DNA, 13 bp, Artificial Sequence
  Oligonucleotide for detection of SNP TSC0039702
tttattattaaaa

SEQ ID NO: 157631 - DNA, 13 bp, Artificial Sequence
  Oligonucleotide for detection of SNP TSC0039702
ttttaagaataaa

SEQ ID NO: 157632 - DNA, 13 bp, Artificial Sequence
  Oligonucleotide for detection of SNP TSC0039702
tttattcttaaaa

SEQ ID NO: 157633 - DNA, 13 bp, Artificial Sequence
  Oligonucleotide for detection of SNP TSC0039702
tttattgttaaaa

SEQ ID NO: 157634 - DNA, 13 bp, Artificial Sequence
  Oligonucleotide for detection of SNP TSC0039702
ttttaacaataaa

SEQ ID NO: 157635 - DNA, 13 bp, Artificial Sequence
  Oligonucleotide for detection of SNP TSC0039702
tttatttttaaaa

SEQ ID NO: 157636 - DNA, 13 bp, Artificial Sequence
  Oligonucleotide for detection of SNP TSC0039702
ttttaaaaataaa

SEQ ID NO: 157637 - DNA, 13 bp, Artificial Sequence
  Oligonucleotide for detection of SNP TSC0039705
atggttttttttt

SEQ ID NO: 157638 - DNA, 13 bp, Artificial Sequence
  Oligonucleotide for detection of SNP TSC0039705
aaaaaaaaaccat

SEQ ID NO: 157639 - DNA, 13 bp, Artificial Sequence
  Oligonucleotide for detection of SNP TSC0039705
atggttgtttttt

SEQ ID NO: 157640 - DNA, 13 bp, Artificial Sequence
  Oligonucleotide for detection of SNP TSC0039705
aaaaaacaaccat

SEQ ID NO: 157641 - DNA, 13 bp, Artificial Sequence
  Oligonucleotide for detection of SNP TSC0039705
atggtcgtttttt

SEQ ID NO: 157642 - DNA, 13 bp, Artificial Sequence
  Oligonucleotide for detection of SNP TSC0039705
aaaaaacgaccat

SEQ ID NO: 157643 - DNA, 13 bp, Artificial Sequence
  Oligonucleotide for detection of SNP TSC0039705
aaaaaagggttat

SEQ ID NO: 157644 - DNA, 13 bp, Artificial Sequence
  Oligonucleotide for detection of SNP TSC0039705
ataaccctttttt

SEQ ID NO: 157645 - DNA, 13 bp, Artificial Sequence
  Oligonucleotide for detection of SNP TSC0039705
aaaaaatggttat

SEQ ID NO: 157646 - DNA, 13 bp, Artificial Sequence
  Oligonucleotide for detection of SNP TSC0039705
ataaccatttttt

SEQ ID NO: 157647 - DNA, 13 bp, Artificial Sequence
  Oligonucleotide for detection of SNP TSC0039705
aaaaaacggttat

SEQ ID NO: 157648 - DNA, 13 bp, Artificial Sequence
  Oligonucleotide for detection of SNP TSC0039705
ataaccgtttttt

SEQ ID NO: 157649 - DNA, 13 bp, Artificial Sequence
  Oligonucleotide for detection of SNP TSC0039708
tgtttatttgata

SEQ ID NO: 157650 - DNA, 13 bp, Artificial Sequence
  Oligonucleotide for detection of SNP TSC0039708
tatcaaataaaca

SEQ ID NO: 157651 - DNA, 13 bp, Artificial Sequence
  Oligonucleotide for detection of SNP TSC0039708
tgtttagttgata

SEQ ID NO: 157652 - DNA, 13 bp, Artificial Sequence
  Oligonucleotide for detection of SNP TSC0039708
tatcaactaaaca

SEQ ID NO: 157653 - DNA, 13 bp, Artificial Sequence
  Oligonucleotide for detection of SNP TSC0039708
tattaaatgaata

SEQ ID NO: 157654 - DNA, 13 bp, Artificial Sequence
  Oligonucleotide for detection of SNP TSC0039708
tattcatttaata

SEQ ID NO: 157655 - DNA, 13 bp, Artificial Sequence
  Oligonucleotide for detection of SNP TSC0039708
tattaattgaata

SEQ ID NO: 157656 - DNA, 13 bp, Artificial Sequence
  Oligonucleotide for detection of SNP TSC0039708
tattcaattaata

SEQ ID NO: 157657 - DNA, 13 bp, Artificial Sequence
  Oligonucleotide for detection of SNP TSC0039709
gtatatatattta

SEQ ID NO: 157658 - DNA, 13 bp, Artificial Sequence
  Oligonucleotide for detection of SNP TSC0039709
taaatatatatac

SEQ ID NO: 157659 - DNA, 13 bp, Artificial Sequence
  Oligonucleotide for detection of SNP TSC0039709
gtatatgtattta

SEQ ID NO: 157660 - DNA, 13 bp, Artificial Sequence
  Oligonucleotide for detection of SNP TSC0039709
taaatacatatac

SEQ ID NO: 157661 - DNA, 13 bp, Artificial Sequence
  Oligonucleotide for detection of SNP TSC0039710
gtttagtttggta

SEQ ID NO: 157662 - DNA, 13 bp, Artificial Sequence
  Oligonucleotide for detection of SNP TSC0039710
taccaaactaaac

SEQ ID NO: 157663 - DNA, 13 bp, Artificial Sequence
  Oligonucleotide for detection of SNP TSC0039710
gtttaggttggta

SEQ ID NO: 157664 - DNA, 13 bp, Artificial Sequence
  Oligonucleotide for detection of SNP TSC0039710
taccaacctaaac

SEQ ID NO: 157665 - DNA, 13 bp, Artificial Sequence
  Oligonucleotide for detection of SNP TSC0039710
tattaagttgggy

SEQ ID NO: 157666 - DNA, 13 bp, Artificial Sequence
  Oligonucleotide for detection of SNP TSC0039710
rcccaacttaata

SEQ ID NO: 157667 - DNA, 13 bp, Artificial Sequence
  Oligonucleotide for detection of SNP TSC0039710
tattaatttgggy

SEQ ID NO: 157668 - DNA, 13 bp, Artificial Sequence
  Oligonucleotide for detection of SNP TSC0039710
rcccaaattaata

SEQ ID NO: 157669 - DNA, 13 bp, Artificial Sequence
  Oligonucleotide for detection of SNP TSC0039711
atttttttatagy

SEQ ID NO: 157670 - DNA, 13 bp, Artificial Sequence
  Oligonucleotide for detection of SNP TSC0039711
rctataaaaaaat

SEQ ID NO: 157671 - DNA, 13 bp, Artificial Sequence
  Oligonucleotide for detection of SNP TSC0039711
gttgtataaaagt

SEQ ID NO: 157672 - DNA, 13 bp, Artificial Sequence
  Oligonucleotide for detection of SNP TSC0039711
acttttatacaac

SEQ ID NO: 157673 - DNA, 13 bp, Artificial Sequence
  Oligonucleotide for detection of SNP TSC0039711
gttgtagaaaagt

SEQ ID NO: 157674 - DNA, 13 bp, Artificial Sequence
  Oligonucleotide for detection of SNP TSC0039711
acttttctacaac

SEQ ID NO: 157675 - DNA, 13 bp, Artificial Sequence
  Oligonucleotide for detection of SNP TSC0039712
agttgttaaaaaa

SEQ ID NO: 157676 - DNA, 13 bp, Artificial Sequence
  Oligonucleotide for detection of SNP TSC0039712
ttttttaacaact

SEQ ID NO: 157677 - DNA, 13 bp, Artificial Sequence
  Oligonucleotide for detection of SNP TSC0039712
agttgtgaaaaaa

SEQ ID NO: 157678 - DNA, 13 bp, Artificial Sequence
  Oligonucleotide for detection of SNP TSC0039712
ttttttcacaact

SEQ ID NO: 157679 - DNA, 13 bp, Artificial Sequence
  Oligonucleotide for detection of SNP TSC0039713
tttaatatgtatt

SEQ ID NO: 157680 - DNA, 13 bp, Artificial Sequence
  Oligonucleotide for detection of SNP TSC0039713
aatacatattaaa

SEQ ID NO: 157681 - DNA, 13 bp, Artificial Sequence
  Oligonucleotide for detection of SNP TSC0039713
tttaatgtgtatt

SEQ ID NO: 157682 - DNA, 13 bp, Artificial Sequence
  Oligonucleotide for detection of SNP TSC0039713
aatacacattaaa

SEQ ID NO: 157683 - DNA, 13 bp, Artificial Sequence
  Oligonucleotide for detection of SNP TSC0039714
tataatattttat

SEQ ID NO: 157684 - DNA, 13 bp, Artificial Sequence
  Oligonucleotide for detection of SNP TSC0039714
ataaaatattata

SEQ ID NO: 157685 - DNA, 13 bp, Artificial Sequence
  Oligonucleotide for detection of SNP TSC0039714
tataatgttttat

SEQ ID NO: 157686 - DNA, 13 bp, Artificial Sequence
  Oligonucleotide for detection of SNP TSC0039714
ataaaacattata

SEQ ID NO: 157687 - DNA, 13 bp, Artificial Sequence
  Oligonucleotide for detection of SNP TSC0039715
tagtttgtttata

SEQ ID NO: 157688 - DNA, 13 bp, Artificial Sequence
  Oligonucleotide for detection of SNP TSC0039715
tataaacaaacta

SEQ ID NO: 157689 - DNA, 13 bp, Artificial Sequence
  Oligonucleotide for detection of SNP TSC0039715
tagttcgtttata

SEQ ID NO: 157690 - DNA, 13 bp, Artificial Sequence
  Oligonucleotide for detection of SNP TSC0039715
tataaacgaacta

SEQ ID NO: 157691 - DNA, 13 bp, Artificial Sequence
  Oligonucleotide for detection of SNP TSC0039715
tgtggatgaatta

SEQ ID NO: 157692 - DNA, 13 bp, Artificial Sequence
  Oligonucleotide for detection of SNP TSC0039715
taattcatccaca

SEQ ID NO: 157693 - DNA, 13 bp, Artificial Sequence
  Oligonucleotide for detection of SNP TSC0039715
tgtggacgaatta

SEQ ID NO: 157694 - DNA, 13 bp, Artificial Sequence
  Oligonucleotide for detection of SNP TSC0039715
taattcgtccaca

SEQ ID NO: 157695 - DNA, 13 bp, Artificial Sequence
  Oligonucleotide for detection of SNP TSC0039716
ttgttatgtgggy

SEQ ID NO: 157696 - DNA, 13 bp, Artificial Sequence
  Oligonucleotide for detection of SNP TSC0039716
rcccacataacaa

SEQ ID NO: 157697 - DNA, 13 bp, Artificial Sequence
  Oligonucleotide for detection of SNP TSC0039716
ttgttacgtgggy

SEQ ID NO: 157698 - DNA, 13 bp, Artificial Sequence
  Oligonucleotide for detection of SNP TSC0039716
rcccacgtaacaa

SEQ ID NO: 157699 - DNA, 13 bp, Artificial Sequence
  Oligonucleotide for detection of SNP TSC0039722
agatttaatttaa

SEQ ID NO: 157700 - DNA, 13 bp, Artificial Sequence
  Oligonucleotide for detection of SNP TSC0039722
ttaaattaaatct

SEQ ID NO: 157701 - DNA, 13 bp, Artificial Sequence
  Oligonucleotide for detection of SNP TSC0039722
agatttgatttaa

SEQ ID NO: 157702 - DNA, 13 bp, Artificial Sequence
  Oligonucleotide for detection of SNP TSC0039722
ttaaatcaaatct

SEQ ID NO: 157703 - DNA, 13 bp, Artificial Sequence
  Oligonucleotide for detection of SNP TSC0039723
atagtggaattta

SEQ ID NO: 157704 - DNA, 13 bp, Artificial Sequence
  Oligonucleotide for detection of SNP TSC0039723
taaattccactat

SEQ ID NO: 157705 - DNA, 13 bp, Artificial Sequence
  Oligonucleotide for detection of SNP TSC0039723
atagtgaaattta

SEQ ID NO: 157706 - DNA, 13 bp, Artificial Sequence
  Oligonucleotide for detection of SNP TSC0039723
taaatttcactat

SEQ ID NO: 157707 - DNA, 13 bp, Artificial Sequence
  Oligonucleotide for detection of SNP TSC0039726
gggtagtatggty

SEQ ID NO: 157708 - DNA, 13 bp, Artificial Sequence
  Oligonucleotide for detection of SNP TSC0039726
raccatactaccc

SEQ ID NO: 157709 - DNA, 13 bp, Artificial Sequence
  Oligonucleotide for detection of SNP TSC0039726
gggtaggatggty

SEQ ID NO: 157710 - DNA, 13 bp, Artificial Sequence
  Oligonucleotide for detection of SNP TSC0039726
raccatcctaccc

SEQ ID NO: 157711 - DNA, 13 bp, Artificial Sequence
  Oligonucleotide for detection of SNP TSC0039726
gattatattgtty

SEQ ID NO: 157712 - DNA, 13 bp, Artificial Sequence
  Oligonucleotide for detection of SNP TSC0039726
raacaatataatc

SEQ ID NO: 157713 - DNA, 13 bp, Artificial Sequence
  Oligonucleotide for detection of SNP TSC0039726
gattattttgtty

SEQ ID NO: 157714 - DNA, 13 bp, Artificial Sequence
  Oligonucleotide for detection of SNP TSC0039726
raacaaaataatc

SEQ ID NO: 157715 - DNA, 13 bp, Artificial Sequence
  Oligonucleotide for detection of SNP TSC0039727
gttgtagtgatgt

SEQ ID NO: 157716 - DNA, 13 bp, Artificial Sequence
  Oligonucleotide for detection of SNP TSC0039727
acatcactacaac

SEQ ID NO: 157717 - DNA, 13 bp, Artificial Sequence
  Oligonucleotide for detection of SNP TSC0039727
gttgtaatgatgt

SEQ ID NO: 157718 - DNA, 13 bp, Artificial Sequence
  Oligonucleotide for detection of SNP TSC0039727
acatcattacaac

SEQ ID NO: 157719 - DNA, 13 bp, Artificial Sequence
  Oligonucleotide for detection of SNP TSC0039728
gttattggtagga

SEQ ID NO: 157720 - DNA, 13 bp, Artificial Sequence
  Oligonucleotide for detection of SNP TSC0039728
tcctaccaataac

SEQ ID NO: 157721 - DNA, 13 bp, Artificial Sequence
  Oligonucleotide for detection of SNP TSC0039728
gttattagtagga

SEQ ID NO: 157722 - DNA, 13 bp, Artificial Sequence
  Oligonucleotide for detection of SNP TSC0039728
tcctactaataac

SEQ ID NO: 157723 - DNA, 13 bp, Artificial Sequence
  Oligonucleotide for detection of SNP TSC0039728
gttatcggtagga

SEQ ID NO: 157724 - DNA, 13 bp, Artificial Sequence
  Oligonucleotide for detection of SNP TSC0039728
tcctaccgataac

SEQ ID NO: 157725 - DNA, 13 bp, Artificial Sequence
  Oligonucleotide for detection of SNP TSC0039729
aaattagaagtty

SEQ ID NO: 157726 - DNA, 13 bp, Artificial Sequence
  Oligonucleotide for detection of SNP TSC0039729
raacttctaattt

SEQ ID NO: 157727 - DNA, 13 bp, Artificial Sequence
  Oligonucleotide for detection of SNP TSC0039729
aaattaaaagtty

SEQ ID NO: 157728 - DNA, 13 bp, Artificial Sequence
  Oligonucleotide for detection of SNP TSC0039729
raacttttaattt

SEQ ID NO: 157729 - DNA, 13 bp, Artificial Sequence
  Oligonucleotide for detection of SNP TSC0039730
tttttatgggtta

SEQ ID NO: 157730 - DNA, 13 bp, Artificial Sequence
  Oligonucleotide for detection of SNP TSC0039730
taacccataaaaa

SEQ ID NO: 157731 - DNA, 13 bp, Artificial Sequence
  Oligonucleotide for detection of SNP TSC0039730
tttttacgggtta

SEQ ID NO: 157732 - DNA, 13 bp, Artificial Sequence
  Oligonucleotide for detection of SNP TSC0039730
taacccgtaaaaa

SEQ ID NO: 157733 - DNA, 13 bp, Artificial Sequence
  Oligonucleotide for detection of SNP TSC0039730
tagtttgtgaaga

SEQ ID NO: 157734 - DNA, 13 bp, Artificial Sequence
  Oligonucleotide for detection of SNP TSC0039730
tcttcacaaacta

SEQ ID NO: 157735 - DNA, 13 bp, Artificial Sequence
  Oligonucleotide for detection of SNP TSC0039730
tagtttatgaaga

SEQ ID NO: 157736 - DNA, 13 bp, Artificial Sequence
  Oligonucleotide for detection of SNP TSC0039730
tcttcataaacta

SEQ ID NO: 157737 - DNA, 13 bp, Artificial Sequence
  Oligonucleotide for detection of SNP TSC0039730
tagttcgtgaaga

SEQ ID NO: 157738 - DNA, 13 bp, Artificial Sequence
  Oligonucleotide for detection of SNP TSC0039730
tcttcacgaacta

SEQ ID NO: 157739 - DNA, 13 bp, Artificial Sequence
  Oligonucleotide for detection of SNP TSC0039731
atgtgtattttgt

SEQ ID NO: 157740 - DNA, 13 bp, Artificial Sequence
  Oligonucleotide for detection of SNP TSC0039731
acaaaatacacat

SEQ ID NO: 157741 - DNA, 13 bp, Artificial Sequence
  Oligonucleotide for detection of SNP TSC0039731
atgtgtgttttgt

SEQ ID NO: 157742 - DNA, 13 bp, Artificial Sequence
  Oligonucleotide for detection of SNP TSC0039731
acaaaacacacat

SEQ ID NO: 157743 - DNA, 13 bp, Artificial Sequence
  Oligonucleotide for detection of SNP TSC0039732
tataaaggtatty

SEQ ID NO: 157744 - DNA, 13 bp, Artificial Sequence
  Oligonucleotide for detection of SNP TSC0039732
raatacctttata

SEQ ID NO: 157745 - DNA, 13 bp, Artificial Sequence
  Oligonucleotide for detection of SNP TSC0039732
tataaaagtatty

SEQ ID NO: 157746 - DNA, 13 bp, Artificial Sequence
  Oligonucleotide for detection of SNP TSC0039732
raatacttttata

SEQ ID NO: 157747 - DNA, 13 bp, Artificial Sequence
  Oligonucleotide for detection of SNP TSC0039734
tgtggtaaaatag

SEQ ID NO: 157748 - DNA, 13 bp, Artificial Sequence
  Oligonucleotide for detection of SNP TSC0039734
ctattttaccaca

SEQ ID NO: 157749 - DNA, 13 bp, Artificial Sequence
  Oligonucleotide for detection of SNP TSC0039734
tgtggtgaaatag

SEQ ID NO: 157750 - DNA, 13 bp, Artificial Sequence
  Oligonucleotide for detection of SNP TSC0039734
ctatttcaccaca

SEQ ID NO: 157751 - DNA, 13 bp, Artificial Sequence
  Oligonucleotide for detection of SNP TSC0039734
tgtggcgaaatag

SEQ ID NO: 157752 - DNA, 13 bp, Artificial Sequence
  Oligonucleotide for detection of SNP TSC0039734
ctatttcgccaca

SEQ ID NO: 157753 - DNA, 13 bp, Artificial Sequence
  Oligonucleotide for detection of SNP TSC0039734
ttattttgttata

SEQ ID NO: 157754 - DNA, 13 bp, Artificial Sequence
  Oligonucleotide for detection of SNP TSC0039734
tataacaaaataa

SEQ ID NO: 157755 - DNA, 13 bp, Artificial Sequence
  Oligonucleotide for detection of SNP TSC0039734
ttatttcgttata

SEQ ID NO: 157756 - DNA, 13 bp, Artificial Sequence
  Oligonucleotide for detection of SNP TSC0039734
tataacgaaataa

SEQ ID NO: 157757 - DNA, 13 bp, Artificial Sequence
  Oligonucleotide for detection of SNP TSC0039735
tgtataatatagg

SEQ ID NO: 157758 - DNA, 13 bp, Artificial Sequence
  Oligonucleotide for detection of SNP TSC0039735
cctatattataca

SEQ ID NO: 157759 - DNA, 13 bp, Artificial Sequence
  Oligonucleotide for detection of SNP TSC0039735
tgtatagtatagg

SEQ ID NO: 157760 - DNA, 13 bp, Artificial Sequence
  Oligonucleotide for detection of SNP TSC0039735
cctatactataca

SEQ ID NO: 157761 - DNA, 13 bp, Artificial Sequence
  Oligonucleotide for detection of SNP TSC0039736
gttttggatgaga

SEQ ID NO: 157762 - DNA, 13 bp, Artificial Sequence
  Oligonucleotide for detection of SNP TSC0039736
tctcatccaaaac

SEQ ID NO: 157763 - DNA, 13 bp, Artificial Sequence
  Oligonucleotide for detection of SNP TSC0039736
gttttgaatgaga

SEQ ID NO: 157764 - DNA, 13 bp, Artificial Sequence
  Oligonucleotide for detection of SNP TSC0039736
tctcattcaaaac

SEQ ID NO: 157765 - DNA, 13 bp, Artificial Sequence
  Oligonucleotide for detection of SNP TSC0039739
tttttgtgggtag

SEQ ID NO: 157766 - DNA, 13 bp, Artificial Sequence
  Oligonucleotide for detection of SNP TSC0039739
ctacccacaaaaa

SEQ ID NO: 157767 - DNA, 13 bp, Artificial Sequence
  Oligonucleotide for detection of SNP TSC0039739
ttttcgtgggtag

SEQ ID NO: 157768 - DNA, 13 bp, Artificial Sequence
  Oligonucleotide for detection of SNP TSC0039739
ctacccacgaaaa

SEQ ID NO: 157769 - DNA, 13 bp, Artificial Sequence
  Oligonucleotide for detection of SNP TSC0039739
tttttgcgggtag

SEQ ID NO: 157770 - DNA, 13 bp, Artificial Sequence
  Oligonucleotide for detection of SNP TSC0039739
ctacccgcaaaaa

SEQ ID NO: 157771 - DNA, 13 bp, Artificial Sequence
  Oligonucleotide for detection of SNP TSC0039739
ttttcgcgggtag

SEQ ID NO: 157772 - DNA, 13 bp, Artificial Sequence
  Oligonucleotide for detection of SNP TSC0039739
ctacccgcgaaaa

SEQ ID NO: 157773 - DNA, 13 bp, Artificial Sequence
  Oligonucleotide for detection of SNP TSC0039739
ttgtttgtgggag

SEQ ID NO: 157774 - DNA, 13 bp, Artificial Sequence
  Oligonucleotide for detection of SNP TSC0039739
ctcccacaaacaa

SEQ ID NO: 157775 - DNA, 13 bp, Artificial Sequence
  Oligonucleotide for detection of SNP TSC0039739
ttgtttatgggag

SEQ ID NO: 157776 - DNA, 13 bp, Artificial Sequence
  Oligonucleotide for detection of SNP TSC0039739
ctcccataaacaa

SEQ ID NO: 157777 - DNA, 13 bp, Artificial Sequence
  Oligonucleotide for detection of SNP TSC0039739
ttgttcgtgggag

SEQ ID NO: 157778 - DNA, 13 bp, Artificial Sequence
  Oligonucleotide for detection of SNP TSC0039739
ctcccacgaacaa

SEQ ID NO: 157779 - DNA, 13 bp, Artificial Sequence
  Oligonucleotide for detection of SNP TSC0039739
ttgtttacgggag

SEQ ID NO: 157780 - DNA, 13 bp, Artificial Sequence
  Oligonucleotide for detection of SNP TSC0039739
ctcccgtaaacaa

SEQ ID NO: 157781 - DNA, 13 bp, Artificial Sequence
  Oligonucleotide for detection of SNP TSC0039739
ttgtttgcgggag

SEQ ID NO: 157782 - DNA, 13 bp, Artificial Sequence
  Oligonucleotide for detection of SNP TSC0039739
ctcccgcaaacaa

SEQ ID NO: 157783 - DNA, 13 bp, Artificial Sequence
  Oligonucleotide for detection of SNP TSC0039739
ttgttcgcgggag

SEQ ID NO: 157784 - DNA, 13 bp, Artificial Sequence
  Oligonucleotide for detection of SNP TSC0039739
ctcccgcgaacaa

SEQ ID NO: 157785 - DNA, 13 bp, Artificial Sequence
  Oligonucleotide for detection of SNP TSC0039740
gagaagattgtty

SEQ ID NO: 157786 - DNA, 13 bp, Artificial Sequence
  Oligonucleotide for detection of SNP TSC0039740
raacaatcttctc

SEQ ID NO: 157787 - DNA, 13 bp, Artificial Sequence
  Oligonucleotide for detection of SNP TSC0039740
gagaagtttgtty

SEQ ID NO: 157788 - DNA, 13 bp, Artificial Sequence
  Oligonucleotide for detection of SNP TSC0039740
raacaaacttctc

SEQ ID NO: 157789 - DNA, 13 bp, Artificial Sequence
  Oligonucleotide for detection of SNP TSC0039740
gaatagtttttty

SEQ ID NO: 157790 - DNA, 13 bp, Artificial Sequence
  Oligonucleotide for detection of SNP TSC0039740
raaaaaactattc

SEQ ID NO: 157791 - DNA, 13 bp, Artificial Sequence
  Oligonucleotide for detection of SNP TSC0039740
gaataggttttty

SEQ ID NO: 157792 - DNA, 13 bp, Artificial Sequence
  Oligonucleotide for detection of SNP TSC0039740
raaaaacctattc

SEQ ID NO: 157793 - DNA, 13 bp, Artificial Sequence
  Oligonucleotide for detection of SNP TSC0039743
tttatgtttttty

SEQ ID NO: 157794 - DNA, 13 bp, Artificial Sequence
  Oligonucleotide for detection of SNP TSC0039743
raaaaaacataaa

SEQ ID NO: 157795 - DNA, 13 bp, Artificial Sequence
  Oligonucleotide for detection of SNP TSC0039743
gaaagaatatgag

SEQ ID NO: 157796 - DNA, 13 bp, Artificial Sequence
  Oligonucleotide for detection of SNP TSC0039743
ctcatattctttc

SEQ ID NO: 157797 - DNA, 13 bp, Artificial Sequence
  Oligonucleotide for detection of SNP TSC0039743
gaaagattatgag

SEQ ID NO: 157798 - DNA, 13 bp, Artificial Sequence
  Oligonucleotide for detection of SNP TSC0039743
ctcataatctttc

SEQ ID NO: 157799 - DNA, 13 bp, Artificial Sequence
  Oligonucleotide for detection of SNP TSC0039744
ttgagagtttaag

SEQ ID NO: 157800 - DNA, 13 bp, Artificial Sequence
  Oligonucleotide for detection of SNP TSC0039744
cttaaactctcaa

SEQ ID NO: 157801 - DNA, 13 bp, Artificial Sequence
  Oligonucleotide for detection of SNP TSC0039744
ttgagaatttaag

SEQ ID NO: 157802 - DNA, 13 bp, Artificial Sequence
  Oligonucleotide for detection of SNP TSC0039744
cttaaattctcaa

SEQ ID NO: 157803 - DNA, 13 bp, Artificial Sequence
  Oligonucleotide for detection of SNP TSC0039745
aatttgaggggga

SEQ ID NO: 157804 - DNA, 13 bp, Artificial Sequence
  Oligonucleotide for detection of SNP TSC0039745
tccccctcaaatt

SEQ ID NO: 157805 - DNA, 13 bp, Artificial Sequence
  Oligonucleotide for detection of SNP TSC0039745
aatttggggggga

SEQ ID NO: 157806 - DNA, 13 bp, Artificial Sequence
  Oligonucleotide for detection of SNP TSC0039745
tcccccccaaatt

SEQ ID NO: 157807 - DNA, 13 bp, Artificial Sequence
  Oligonucleotide for detection of SNP TSC0039746
ttgtgatggagta

SEQ ID NO: 157808 - DNA, 13 bp, Artificial Sequence
  Oligonucleotide for detection of SNP TSC0039746
tactccatcacaa

SEQ ID NO: 157809 - DNA, 13 bp, Artificial Sequence
  Oligonucleotide for detection of SNP TSC0039746
ttgtgaaggagta

SEQ ID NO: 157810 - DNA, 13 bp, Artificial Sequence
  Oligonucleotide for detection of SNP TSC0039746
tactccttcacaa

SEQ ID NO: 157811 - DNA, 13 bp, Artificial Sequence
  Oligonucleotide for detection of SNP TSC0039747
taatatagtatty

SEQ ID NO: 157812 - DNA, 13 bp, Artificial Sequence
  Oligonucleotide for detection of SNP TSC0039747
raatactatatta

SEQ ID NO: 157813 - DNA, 13 bp, Artificial Sequence
  Oligonucleotide for detection of SNP TSC0039747
taatatggtatty

SEQ ID NO: 157814 - DNA, 13 bp, Artificial Sequence
  Oligonucleotide for detection of SNP TSC0039747
raataccatatta

SEQ ID NO: 157815 - DNA, 13 bp, Artificial Sequence
  Oligonucleotide for detection of SNP TSC0039748
tagtaatgagaaa

SEQ ID NO: 157816 - DNA, 13 bp, Artificial Sequence
  Oligonucleotide for detection of SNP TSC0039748
tttctcattacta

SEQ ID NO: 157817 - DNA, 13 bp, Artificial Sequence
  Oligonucleotide for detection of SNP TSC0039748
tagtaacgagaaa

SEQ ID NO: 157818 - DNA, 13 bp, Artificial Sequence
  Oligonucleotide for detection of SNP TSC0039748
tttctcgttacta

SEQ ID NO: 157819 - DNA, 13 bp, Artificial Sequence
  Oligonucleotide for detection of SNP TSC0039748
tttttcgttattg

SEQ ID NO: 157820 - DNA, 13 bp, Artificial Sequence
  Oligonucleotide for detection of SNP TSC0039748
caataacgaaaaa

SEQ ID NO: 157821 - DNA, 13 bp, Artificial Sequence
  Oligonucleotide for detection of SNP TSC0039749
tgggttttatttt

SEQ ID NO: 157822 - DNA, 13 bp, Artificial Sequence
  Oligonucleotide for detection of SNP TSC0039749
aaaataaaaccca

SEQ ID NO: 157823 - DNA, 13 bp, Artificial Sequence
  Oligonucleotide for detection of SNP TSC0039749
cgggttttatttt

SEQ ID NO: 157824 - DNA, 13 bp, Artificial Sequence
  Oligonucleotide for detection of SNP TSC0039749
aaaataaaacccg

SEQ ID NO: 157825 - DNA, 13 bp, Artificial Sequence
  Oligonucleotide for detection of SNP TSC0039749
cgggttgtatttt

SEQ ID NO: 157826 - DNA, 13 bp, Artificial Sequence
  Oligonucleotide for detection of SNP TSC0039749
aaaatacaacccg

SEQ ID NO: 157827 - DNA, 13 bp, Artificial Sequence
  Oligonucleotide for detection of SNP TSC0039749
aaaatgaagtttg

SEQ ID NO: 157828 - DNA, 13 bp, Artificial Sequence
  Oligonucleotide for detection of SNP TSC0039749
caaacttcatttt

SEQ ID NO: 157829 - DNA, 13 bp, Artificial Sequence
  Oligonucleotide for detection of SNP TSC0039749
aaaatgtagtttg

SEQ ID NO: 157830 - DNA, 13 bp, Artificial Sequence
  Oligonucleotide for detection of SNP TSC0039749
caaactacatttt

SEQ ID NO: 157831 - DNA, 13 bp, Artificial Sequence
  Oligonucleotide for detection of SNP TSC0039749
aaaatgaagttcg

SEQ ID NO: 157832 - DNA, 13 bp, Artificial Sequence
  Oligonucleotide for detection of SNP TSC0039749
cgaacttcatttt

SEQ ID NO: 157833 - DNA, 13 bp, Artificial Sequence
  Oligonucleotide for detection of SNP TSC0039749
aaaatgtagttcg

SEQ ID NO: 157834 - DNA, 13 bp, Artificial Sequence
  Oligonucleotide for detection of SNP TSC0039749
cgaactacatttt

SEQ ID NO: 157835 - DNA, 13 bp, Artificial Sequence
  Oligonucleotide for detection of SNP TSC0039750
tatttatgtaaat

SEQ ID NO: 157836 - DNA, 13 bp, Artificial Sequence
  Oligonucleotide for detection of SNP TSC0039750
atttacataaata

SEQ ID NO: 157837 - DNA, 13 bp, Artificial Sequence
  Oligonucleotide for detection of SNP TSC0039750
tatttaggtaaat

SEQ ID NO: 157838 - DNA, 13 bp, Artificial Sequence
  Oligonucleotide for detection of SNP TSC0039750
atttacctaaata

SEQ ID NO: 157839 - DNA, 13 bp, Artificial Sequence
  Oligonucleotide for detection of SNP TSC0039750
atttgtataaata

SEQ ID NO: 157840 - DNA, 13 bp, Artificial Sequence
  Oligonucleotide for detection of SNP TSC0039750
tatttatacaaat

SEQ ID NO: 157841 - DNA, 13 bp, Artificial Sequence
  Oligonucleotide for detection of SNP TSC0039750
atttgtttaaata

SEQ ID NO: 157842 - DNA, 13 bp, Artificial Sequence
  Oligonucleotide for detection of SNP TSC0039750
tatttaaacaaat

SEQ ID NO: 157843 - DNA, 13 bp, Artificial Sequence
  Oligonucleotide for detection of SNP TSC0039751
agaaaatgtggta

SEQ ID NO: 157844 - DNA, 13 bp, Artificial Sequence
  Oligonucleotide for detection of SNP TSC0039751
taccacattttct

SEQ ID NO: 157845 - DNA, 13 bp, Artificial Sequence
  Oligonucleotide for detection of SNP TSC0039751
agaaaacgtggta

SEQ ID NO: 157846 - DNA, 13 bp, Artificial Sequence
  Oligonucleotide for detection of SNP TSC0039751
taccacgttttct

SEQ ID NO: 157847 - DNA, 13 bp, Artificial Sequence
  Oligonucleotide for detection of SNP TSC0039751
tattatgtttttt

SEQ ID NO: 157848 - DNA, 13 bp, Artificial Sequence
  Oligonucleotide for detection of SNP TSC0039751
aaaaaacataata

SEQ ID NO: 157849 - DNA, 13 bp, Artificial Sequence
  Oligonucleotide for detection of SNP TSC0039751
tattatatttttt

SEQ ID NO: 157850 - DNA, 13 bp, Artificial Sequence
  Oligonucleotide for detection of SNP TSC0039751
aaaaaatataata

SEQ ID NO: 157851 - DNA, 13 bp, Artificial Sequence
  Oligonucleotide for detection of SNP TSC0039751
tattacgtttttt

SEQ ID NO: 157852 - DNA, 13 bp, Artificial Sequence
  Oligonucleotide for detection of SNP TSC0039751
aaaaaacgtaata

SEQ ID NO: 157853 - DNA, 13 bp, Artificial Sequence
  Oligonucleotide for detection of SNP TSC0039752
atgtttgtgagtt

SEQ ID NO: 157854 - DNA, 13 bp, Artificial Sequence
  Oligonucleotide for detection of SNP TSC0039752
aactcacaaacat

SEQ ID NO: 157855 - DNA, 13 bp, Artificial Sequence
  Oligonucleotide for detection of SNP TSC0039752
atgtttatgagtt

SEQ ID NO: 157856 - DNA, 13 bp, Artificial Sequence
  Oligonucleotide for detection of SNP TSC0039752
aactcataaacat

SEQ ID NO: 157857 - DNA, 13 bp, Artificial Sequence
  Oligonucleotide for detection of SNP TSC0039753
attggtatattta

SEQ ID NO: 157858 - DNA, 13 bp, Artificial Sequence
  Oligonucleotide for detection of SNP TSC0039753
taaatataccaat

SEQ ID NO: 157859 - DNA, 13 bp, Artificial Sequence
  Oligonucleotide for detection of SNP TSC0039753
attggtgtattta

SEQ ID NO: 157860 - DNA, 13 bp, Artificial Sequence
  Oligonucleotide for detection of SNP TSC0039753
taaatacaccaat

SEQ ID NO: 157861 - DNA, 13 bp, Artificial Sequence
  Oligonucleotide for detection of SNP TSC0039754
taatataattttt

SEQ ID NO: 157862 - DNA, 13 bp, Artificial Sequence
  Oligonucleotide for detection of SNP TSC0039754
aaaaattatatta

SEQ ID NO: 157863 - DNA, 13 bp, Artificial Sequence
  Oligonucleotide for detection of SNP TSC0039754
taatatgattttt

SEQ ID NO: 157864 - DNA, 13 bp, Artificial Sequence
  Oligonucleotide for detection of SNP TSC0039754
aaaaatcatatta

SEQ ID NO: 157865 - DNA, 13 bp, Artificial Sequence
  Oligonucleotide for detection of SNP TSC0039755
tgtttaatgtgay

SEQ ID NO: 157866 - DNA, 13 bp, Artificial Sequence
  Oligonucleotide for detection of SNP TSC0039755
rtcacattaaaca

SEQ ID NO: 157867 - DNA, 13 bp, Artificial Sequence
  Oligonucleotide for detection of SNP TSC0039755
tgtttattgtgay

SEQ ID NO: 157868 - DNA, 13 bp, Artificial Sequence
  Oligonucleotide for detection of SNP TSC0039755
rtcacaataaaca

SEQ ID NO: 157869 - DNA, 13 bp, Artificial Sequence
  Oligonucleotide for detection of SNP TSC0039755
tgtttaacgtgay

SEQ ID NO: 157870 - DNA, 13 bp, Artificial Sequence
  Oligonucleotide for detection of SNP TSC0039755
rtcacgttaaaca

SEQ ID NO: 157871 - DNA, 13 bp, Artificial Sequence
  Oligonucleotide for detection of SNP TSC0039755
tgtttatcgtgay

SEQ ID NO: 157872 - DNA, 13 bp, Artificial Sequence
  Oligonucleotide for detection of SNP TSC0039755
rtcacgataaaca

SEQ ID NO: 157873 - DNA, 13 bp, Artificial Sequence
  Oligonucleotide for detection of SNP TSC0039755
gttatgttgaata

SEQ ID NO: 157874 - DNA, 13 bp, Artificial Sequence
  Oligonucleotide for detection of SNP TSC0039755
tattcaacataac

SEQ ID NO: 157875 - DNA, 13 bp, Artificial Sequence
  Oligonucleotide for detection of SNP TSC0039755
gttatgatgaata

SEQ ID NO: 157876 - DNA, 13 bp, Artificial Sequence
  Oligonucleotide for detection of SNP TSC0039755
tattcatcataac

SEQ ID NO: 157877 - DNA, 13 bp, Artificial Sequence
  Oligonucleotide for detection of SNP TSC0039755
gttacgttgaata

SEQ ID NO: 157878 - DNA, 13 bp, Artificial Sequence
  Oligonucleotide for detection of SNP TSC0039755
tattcaacgtaac

SEQ ID NO: 157879 - DNA, 13 bp, Artificial Sequence
  Oligonucleotide for detection of SNP TSC0039755
gttacgatgaata

SEQ ID NO: 157880 - DNA, 13 bp, Artificial Sequence
  Oligonucleotide for detection of SNP TSC0039755
tattcatcgtaac

SEQ ID NO: 157881 - DNA, 13 bp, Artificial Sequence
  Oligonucleotide for detection of SNP TSC0006138
tttataaaaagag

SEQ ID NO: 157882 - DNA, 13 bp, Artificial Sequence
  Oligonucleotide for detection of SNP TSC0006138
ctctttttataaa

SEQ ID NO: 157883 - DNA, 13 bp, Artificial Sequence
  Oligonucleotide for detection of SNP TSC0006138
tttatataaagag

SEQ ID NO: 157884 - DNA, 13 bp, Artificial Sequence
  Oligonucleotide for detection of SNP TSC0006138
ctctttatataaa

SEQ ID NO: 157885 - DNA, 13 bp, Artificial Sequence
  Oligonucleotide for detection of SNP TSC0006138
ttttttttatgga

SEQ ID NO: 157886 - DNA, 13 bp, Artificial Sequence
  Oligonucleotide for detection of SNP TSC0006138
tccataaaaaaaa

SEQ ID NO: 157887 - DNA, 13 bp, Artificial Sequence
  Oligonucleotide for detection of SNP TSC0006138
ttttttatatgga

SEQ ID NO: 157888 - DNA, 13 bp, Artificial Sequence
  Oligonucleotide for detection of SNP TSC0006138
tccatataaaaaa

SEQ ID NO: 157889 - DNA, 13 bp, Artificial Sequence
  Oligonucleotide for detection of SNP TSC0006139
aaatatgagtaaa

SEQ ID NO: 157890 - DNA, 13 bp, Artificial Sequence
  Oligonucleotide for detection of SNP TSC0006139
tttactcatattt

SEQ ID NO: 157891 - DNA, 13 bp, Artificial Sequence
  Oligonucleotide for detection of SNP TSC0006139
aaatataagtaaa

SEQ ID NO: 157892 - DNA, 13 bp, Artificial Sequence
  Oligonucleotide for detection of SNP TSC0006139
tttacttatattt

SEQ ID NO: 157893 - DNA, 13 bp, Artificial Sequence
  Oligonucleotide for detection of SNP TSC0039756
ttttttaaagttt

SEQ ID NO: 157894 - DNA, 13 bp, Artificial Sequence
  Oligonucleotide for detection of SNP TSC0039756
aaactttaaaaaa

SEQ ID NO: 157895 - DNA, 13 bp, Artificial Sequence
  Oligonucleotide for detection of SNP TSC0039756
ttttttgaagttt

SEQ ID NO: 157896 - DNA, 13 bp, Artificial Sequence
  Oligonucleotide for detection of SNP TSC0039756
aaacttcaaaaaa

SEQ ID NO: 157897 - DNA, 13 bp, Artificial Sequence
  Oligonucleotide for detection of SNP TSC0039757
agatagtagttgg

SEQ ID NO: 157898 - DNA, 13 bp, Artificial Sequence
  Oligonucleotide for detection of SNP TSC0039757
ccaactactatct

SEQ ID NO: 157899 - DNA, 13 bp, Artificial Sequence
  Oligonucleotide for detection of SNP TSC0039757
agataggagttgg

SEQ ID NO: 157900 - DNA, 13 bp, Artificial Sequence
  Oligonucleotide for detection of SNP TSC0039757
ccaactcctatct

SEQ ID NO: 157901 - DNA, 13 bp, Artificial Sequence
  Oligonucleotide for detection of SNP TSC0039757
ttaatttttgttt

SEQ ID NO: 157902 - DNA, 13 bp, Artificial Sequence
  Oligonucleotide for detection of SNP TSC0039757
aaacaaaaattaa

SEQ ID NO: 157903 - DNA, 13 bp, Artificial Sequence
  Oligonucleotide for detection of SNP TSC0039758
tattgaaattgty

SEQ ID NO: 157904 - DNA, 13 bp, Artificial Sequence
  Oligonucleotide for detection of SNP TSC0039758
racaatttcaata

SEQ ID NO: 157905 - DNA, 13 bp, Artificial Sequence
  Oligonucleotide for detection of SNP TSC0039758
tattgagattgty

SEQ ID NO: 157906 - DNA, 13 bp, Artificial Sequence
  Oligonucleotide for detection of SNP TSC0039758
racaatctcaata

SEQ ID NO: 157907 - DNA, 13 bp, Artificial Sequence
  Oligonucleotide for detection of SNP TSC0039759
gaaaatgtttagt

SEQ ID NO: 157908 - DNA, 13 bp, Artificial Sequence
  Oligonucleotide for detection of SNP TSC0039759
actaaacattttc

SEQ ID NO: 157909 - DNA, 13 bp, Artificial Sequence
  Oligonucleotide for detection of SNP TSC0039759
gaaaatatttagt

SEQ ID NO: 157910 - DNA, 13 bp, Artificial Sequence
  Oligonucleotide for detection of SNP TSC0039759
actaaatattttc

SEQ ID NO: 157911 - DNA, 13 bp, Artificial Sequence
  Oligonucleotide for detection of SNP TSC0039760
atgttaatattaa

SEQ ID NO: 157912 - DNA, 13 bp, Artificial Sequence
  Oligonucleotide for detection of SNP TSC0039760
ttaatattaacat

SEQ ID NO: 157913 - DNA, 13 bp, Artificial Sequence
  Oligonucleotide for detection of SNP TSC0039760
atgttagtattaa

SEQ ID NO: 157914 - DNA, 13 bp, Artificial Sequence
  Oligonucleotide for detection of SNP TSC0039760
ttaatactaacat

SEQ ID NO: 157915 - DNA, 13 bp, Artificial Sequence
  Oligonucleotide for detection of SNP TSC0039766
tattgtgtgtttt

SEQ ID NO: 157916 - DNA, 13 bp, Artificial Sequence
  Oligonucleotide for detection of SNP TSC0039766
aaaacacacaata

SEQ ID NO: 157917 - DNA, 13 bp, Artificial Sequence
  Oligonucleotide for detection of SNP TSC0039766
tattgtatgtttt

SEQ ID NO: 157918 - DNA, 13 bp, Artificial Sequence
  Oligonucleotide for detection of SNP TSC0039766
aaaacatacaata

SEQ ID NO: 157919 - DNA, 13 bp, Artificial Sequence
  Oligonucleotide for detection of SNP TSC0039772
tgtagtaagtaty

SEQ ID NO: 157920 - DNA, 13 bp, Artificial Sequence
  Oligonucleotide for detection of SNP TSC0039772
ratacttactaca

SEQ ID NO: 157921 - DNA, 13 bp, Artificial Sequence
  Oligonucleotide for detection of SNP TSC0039772
tgtagtgagtaty

SEQ ID NO: 157922 - DNA, 13 bp, Artificial Sequence
  Oligonucleotide for detection of SNP TSC0039772
ratactcactaca

SEQ ID NO: 157923 - DNA, 13 bp, Artificial Sequence
  Oligonucleotide for detection of SNP TSC0039772
tgtagcgagtaty

SEQ ID NO: 157924 - DNA, 13 bp, Artificial Sequence
  Oligonucleotide for detection of SNP TSC0039772
ratactcgctaca

SEQ ID NO: 157925 - DNA, 13 bp, Artificial Sequence
  Oligonucleotide for detection of SNP TSC0039772
gatgtttgttgta

SEQ ID NO: 157926 - DNA, 13 bp, Artificial Sequence
  Oligonucleotide for detection of SNP TSC0039772
tacaacaaacatc

SEQ ID NO: 157927 - DNA, 13 bp, Artificial Sequence
  Oligonucleotide for detection of SNP TSC0039772
gatgttcgttgta

SEQ ID NO: 157928 - DNA, 13 bp, Artificial Sequence
  Oligonucleotide for detection of SNP TSC0039772
tacaacgaacatc

SEQ ID NO: 157929 - DNA, 13 bp, Artificial Sequence
  Oligonucleotide for detection of SNP TSC0039773
ggtttgatttttt

SEQ ID NO: 157930 - DNA, 13 bp, Artificial Sequence
  Oligonucleotide for detection of SNP TSC0039773
aaaaaatcaaacc

SEQ ID NO: 157931 - DNA, 13 bp, Artificial Sequence
  Oligonucleotide for detection of SNP TSC0039773
ggtttggtttttt

SEQ ID NO: 157932 - DNA, 13 bp, Artificial Sequence
  Oligonucleotide for detection of SNP TSC0039773
aaaaaaccaaacc

SEQ ID NO: 157933 - DNA, 13 bp, Artificial Sequence
  Oligonucleotide for detection of SNP TSC0004745
gtttattgttgty

SEQ ID NO: 157934 - DNA, 13 bp, Artificial Sequence
  Oligonucleotide for detection of SNP TSC0004745
racaacaataaac

SEQ ID NO: 157935 - DNA, 13 bp, Artificial Sequence
  Oligonucleotide for detection of SNP TSC0004745
gtttatcgttgty

SEQ ID NO: 157936 - DNA, 13 bp, Artificial Sequence
  Oligonucleotide for detection of SNP TSC0004745
racaacgataaac

SEQ ID NO: 157937 - DNA, 13 bp, Artificial Sequence
  Oligonucleotide for detection of SNP TSC0004745
ggtagtggtggay

SEQ ID NO: 157938 - DNA, 13 bp, Artificial Sequence
  Oligonucleotide for detection of SNP TSC0004745
rtccaccactacc

SEQ ID NO: 157939 - DNA, 13 bp, Artificial Sequence
  Oligonucleotide for detection of SNP TSC0004745
ggtagtagtggay

SEQ ID NO: 157940 - DNA, 13 bp, Artificial Sequence
  Oligonucleotide for detection of SNP TSC0004745
rtccactactacc

SEQ ID NO: 157941 - DNA, 13 bp, Artificial Sequence
  Oligonucleotide for detection of SNP TSC0004745
ggtagcggtggay

SEQ ID NO: 157942 - DNA, 13 bp, Artificial Sequence
  Oligonucleotide for detection of SNP TSC0004745
rtccaccgctacc

SEQ ID NO: 157943 - DNA, 13 bp, Artificial Sequence
  Oligonucleotide for detection of SNP TSC0039777
tagtgtatattta

SEQ ID NO: 157944 - DNA, 13 bp, Artificial Sequence
  Oligonucleotide for detection of SNP TSC0039777
taaatatacacta

SEQ ID NO: 157945 - DNA, 13 bp, Artificial Sequence
  Oligonucleotide for detection of SNP TSC0039777
tagtgtgtattta

SEQ ID NO: 157946 - DNA, 13 bp, Artificial Sequence
  Oligonucleotide for detection of SNP TSC0039777
taaatacacacta

SEQ ID NO: 157947 - DNA, 13 bp, Artificial Sequence
  Oligonucleotide for detection of SNP TSC0039777
tagtgcgtattta

SEQ ID NO: 157948 - DNA, 13 bp, Artificial Sequence
  Oligonucleotide for detection of SNP TSC0039777
taaatacgcacta

SEQ ID NO: 157949 - DNA, 13 bp, Artificial Sequence
  Oligonucleotide for detection of SNP TSC0039777
tgggtatgtattg

SEQ ID NO: 157950 - DNA, 13 bp, Artificial Sequence
  Oligonucleotide for detection of SNP TSC0039777
caatacataccca

SEQ ID NO: 157951 - DNA, 13 bp, Artificial Sequence
  Oligonucleotide for detection of SNP TSC0039777
tgggtacgtattg

SEQ ID NO: 157952 - DNA, 13 bp, Artificial Sequence
  Oligonucleotide for detection of SNP TSC0039777
caatacgtaccca

SEQ ID NO: 157953 - DNA, 13 bp, Artificial Sequence
  Oligonucleotide for detection of SNP TSC0039778
gggagatgataty

SEQ ID NO: 157954 - DNA, 13 bp, Artificial Sequence
  Oligonucleotide for detection of SNP TSC0039778
ratatcatctccc

SEQ ID NO: 157955 - DNA, 13 bp, Artificial Sequence
  Oligonucleotide for detection of SNP TSC0039778
gggagacgataty

SEQ ID NO: 157956 - DNA, 13 bp, Artificial Sequence
  Oligonucleotide for detection of SNP TSC0039778
ratatcgtctccc

SEQ ID NO: 157957 - DNA, 13 bp, Artificial Sequence
  Oligonucleotide for detection of SNP TSC0039778
gatgttattttty

SEQ ID NO: 157958 - DNA, 13 bp, Artificial Sequence
  Oligonucleotide for detection of SNP TSC0039778
raaaaataacatc

SEQ ID NO: 157959 - DNA, 13 bp, Artificial Sequence
  Oligonucleotide for detection of SNP TSC0039778
gatgtcgttttty

SEQ ID NO: 157960 - DNA, 13 bp, Artificial Sequence
  Oligonucleotide for detection of SNP TSC0039778
raaaaacgacatc

SEQ ID NO: 157961 - DNA, 13 bp, Artificial Sequence
  Oligonucleotide for detection of SNP TSC0039782
tttaggttataty

SEQ ID NO: 157962 - DNA, 13 bp, Artificial Sequence
  Oligonucleotide for detection of SNP TSC0039782
ratataacctaaa

SEQ ID NO: 157963 - DNA, 13 bp, Artificial Sequence
  Oligonucleotide for detection of SNP TSC0039782
tttagggtataty

SEQ ID NO: 157964 - DNA, 13 bp, Artificial Sequence
  Oligonucleotide for detection of SNP TSC0039782
ratataccctaaa

SEQ ID NO: 157965 - DNA, 13 bp, Artificial Sequence
  Oligonucleotide for detection of SNP TSC0039782
ggtatggtttgga

SEQ ID NO: 157966 - DNA, 13 bp, Artificial Sequence
  Oligonucleotide for detection of SNP TSC0039782
tccaaaccatacc

SEQ ID NO: 157967 - DNA, 13 bp, Artificial Sequence
  Oligonucleotide for detection of SNP TSC0039782
ggtatgttttgga

SEQ ID NO: 157968 - DNA, 13 bp, Artificial Sequence
  Oligonucleotide for detection of SNP TSC0039782
tccaaaacatacc

SEQ ID NO: 157969 - DNA, 13 bp, Artificial Sequence
  Oligonucleotide for detection of SNP TSC0039783
attgttatttata

SEQ ID NO: 157970 - DNA, 13 bp, Artificial Sequence
  Oligonucleotide for detection of SNP TSC0039783
tataaataacaat

SEQ ID NO: 157971 - DNA, 13 bp, Artificial Sequence
  Oligonucleotide for detection of SNP TSC0039783
attgttttttata

SEQ ID NO: 157972 - DNA, 13 bp, Artificial Sequence
  Oligonucleotide for detection of SNP TSC0039783
tataaaaaacaat

SEQ ID NO: 157973 - DNA, 13 bp, Artificial Sequence
  Oligonucleotide for detection of SNP TSC0039783
atcgttatttata

SEQ ID NO: 157974 - DNA, 13 bp, Artificial Sequence
  Oligonucleotide for detection of SNP TSC0039783
tataaataacgat

SEQ ID NO: 157975 - DNA, 13 bp, Artificial Sequence
  Oligonucleotide for detection of SNP TSC0039783
atcgttttttata

SEQ ID NO: 157976 - DNA, 13 bp, Artificial Sequence
  Oligonucleotide for detection of SNP TSC0039783
tataaaaaacgat

SEQ ID NO: 157977 - DNA, 13 bp, Artificial Sequence
  Oligonucleotide for detection of SNP TSC0039783
tataggtaatgat

SEQ ID NO: 157978 - DNA, 13 bp, Artificial Sequence
  Oligonucleotide for detection of SNP TSC0039783
atcattacctata

SEQ ID NO: 157979 - DNA, 13 bp, Artificial Sequence
  Oligonucleotide for detection of SNP TSC0039783
tatagggaatgat

SEQ ID NO: 157980 - DNA, 13 bp, Artificial Sequence
  Oligonucleotide for detection of SNP TSC0039783
atcattccctata

SEQ ID NO: 157981 - DNA, 13 bp, Artificial Sequence
  Oligonucleotide for detection of SNP TSC0039783
tataggtaacgat

SEQ ID NO: 157982 - DNA, 13 bp, Artificial Sequence
  Oligonucleotide for detection of SNP TSC0039783
atcgttacctata

SEQ ID NO: 157983 - DNA, 13 bp, Artificial Sequence
  Oligonucleotide for detection of SNP TSC0039783
tatagggaacgat

SEQ ID NO: 157984 - DNA, 13 bp, Artificial Sequence
  Oligonucleotide for detection of SNP TSC0039783
atcgttccctata

SEQ ID NO: 157985 - DNA, 13 bp, Artificial Sequence
  Oligonucleotide for detection of SNP TSC0039784
tttaagtgattgy

SEQ ID NO: 157986 - DNA, 13 bp, Artificial Sequence
  Oligonucleotide for detection of SNP TSC0039784
rcaatcacttaaa

SEQ ID NO: 157987 - DNA, 13 bp, Artificial Sequence
  Oligonucleotide for detection of SNP TSC0039784
tttaagggattgy

SEQ ID NO: 157988 - DNA, 13 bp, Artificial Sequence
  Oligonucleotide for detection of SNP TSC0039784
rcaatcccttaaa

SEQ ID NO: 157989 - DNA, 13 bp, Artificial Sequence
  Oligonucleotide for detection of SNP TSC0039784
gtaattatttaaa

SEQ ID NO: 157990 - DNA, 13 bp, Artificial Sequence
  Oligonucleotide for detection of SNP TSC0039784
tttaaataattac

SEQ ID NO: 157991 - DNA, 13 bp, Artificial Sequence
  Oligonucleotide for detection of SNP TSC0039784
gtaattttttaaa

SEQ ID NO: 157992 - DNA, 13 bp, Artificial Sequence
  Oligonucleotide for detection of SNP TSC0039784
tttaaaaaattac

SEQ ID NO: 157993 - DNA, 13 bp, Artificial Sequence
  Oligonucleotide for detection of SNP TSC0039785
atttttttggaag

SEQ ID NO: 157994 - DNA, 13 bp, Artificial Sequence
  Oligonucleotide for detection of SNP TSC0039785
cttccaaaaaaat

SEQ ID NO: 157995 - DNA, 13 bp, Artificial Sequence
  Oligonucleotide for detection of SNP TSC0039785
atttttgtggaag

SEQ ID NO: 157996 - DNA, 13 bp, Artificial Sequence
  Oligonucleotide for detection of SNP TSC0039785
cttccacaaaaat

SEQ ID NO: 157997 - DNA, 13 bp, Artificial Sequence
  Oligonucleotide for detection of SNP TSC0039785
attttttcggaag

SEQ ID NO: 157998 - DNA, 13 bp, Artificial Sequence
  Oligonucleotide for detection of SNP TSC0039785
cttccgaaaaaat

SEQ ID NO: 157999 - DNA, 13 bp, Artificial Sequence
  Oligonucleotide for detection of SNP TSC0039785
atttttgcggaag

SEQ ID NO: 158000 - DNA, 13 bp, Artificial Sequence
  Oligonucleotide for detection of SNP TSC0039785
cttccgcaaaaat

SEQ ID NO: 158001 - DNA, 13 bp, Artificial Sequence
  Oligonucleotide for detection of SNP TSC0039785
tttttgaaaggat

SEQ ID NO: 158002 - DNA, 13 bp, Artificial Sequence
  Oligonucleotide for detection of SNP TSC0039785
atcctttcaaaaa

SEQ ID NO: 158003 - DNA, 13 bp, Artificial Sequence
  Oligonucleotide for detection of SNP TSC0039785
tttttgtaaggat

SEQ ID NO: 158004 - DNA, 13 bp, Artificial Sequence
  Oligonucleotide for detection of SNP TSC0039785
atccttacaaaaa

SEQ ID NO: 158005 - DNA, 13 bp, Artificial Sequence
  Oligonucleotide for detection of SNP TSC0039785
ttttcgaaaggat

SEQ ID NO: 158006 - DNA, 13 bp, Artificial Sequence
  Oligonucleotide for detection of SNP TSC0039785
atcctttcgaaaa

SEQ ID NO: 158007 - DNA, 13 bp, Artificial Sequence
  Oligonucleotide for detection of SNP TSC0039785
ttttcgtaaggat

SEQ ID NO: 158008 - DNA, 13 bp, Artificial Sequence
  Oligonucleotide for detection of SNP TSC0039785
atccttacgaaaa

SEQ ID NO: 158009 - DNA, 13 bp, Artificial Sequence
  Oligonucleotide for detection of SNP TSC0039786
gggataatatagt

SEQ ID NO: 158010 - DNA, 13 bp, Artificial Sequence
  Oligonucleotide for detection of SNP TSC0039786
actatattatccc

SEQ ID NO: 158011 - DNA, 13 bp, Artificial Sequence
  Oligonucleotide for detection of SNP TSC0039786
gggatagtatagt

SEQ ID NO: 158012 - DNA, 13 bp, Artificial Sequence
  Oligonucleotide for detection of SNP TSC0039786
actatactatccc

SEQ ID NO: 158013 - DNA, 13 bp, Artificial Sequence
  Oligonucleotide for detection of SNP TSC0000839
atgggggtataty

SEQ ID NO: 158014 - DNA, 13 bp, Artificial Sequence
  Oligonucleotide for detection of SNP TSC0000839
ratatacccccat

SEQ ID NO: 158015 - DNA, 13 bp, Artificial Sequence
  Oligonucleotide for detection of SNP TSC0000839
atggggatataty

SEQ ID NO: 158016 - DNA, 13 bp, Artificial Sequence
  Oligonucleotide for detection of SNP TSC0000839
ratatatccccat

SEQ ID NO: 158017 - DNA, 13 bp, Artificial Sequence
  Oligonucleotide for detection of SNP TSC0039790
gtaattttttttt

SEQ ID NO: 158018 - DNA, 13 bp, Artificial Sequence
  Oligonucleotide for detection of SNP TSC0039790
aaaaaaaaattac

SEQ ID NO: 158019 - DNA, 13 bp, Artificial Sequence
  Oligonucleotide for detection of SNP TSC0039790
aaaggagagttay

SEQ ID NO: 158020 - DNA, 13 bp, Artificial Sequence
  Oligonucleotide for detection of SNP TSC0039790
rtaactctccttt

SEQ ID NO: 158021 - DNA, 13 bp, Artificial Sequence
  Oligonucleotide for detection of SNP TSC0039790
aaaggatagttay

SEQ ID NO: 158022 - DNA, 13 bp, Artificial Sequence
  Oligonucleotide for detection of SNP TSC0039790
rtaactatccttt

SEQ ID NO: 158023 - DNA, 13 bp, Artificial Sequence
  Oligonucleotide for detection of SNP TSC0039796
tttttagtatgta

SEQ ID NO: 158024 - DNA, 13 bp, Artificial Sequence
  Oligonucleotide for detection of SNP TSC0039796
tacatactaaaaa

SEQ ID NO: 158025 - DNA, 13 bp, Artificial Sequence
  Oligonucleotide for detection of SNP TSC0039796
tttttaatatgta

SEQ ID NO: 158026 - DNA, 13 bp, Artificial Sequence
  Oligonucleotide for detection of SNP TSC0039796
tacatattaaaaa

SEQ ID NO: 158027 - DNA, 13 bp, Artificial Sequence
  Oligonucleotide for detection of SNP TSC0039798
ttgtggatttttt

SEQ ID NO: 158028 - DNA, 13 bp, Artificial Sequence
  Oligonucleotide for detection of SNP TSC0039798
aaaaaatccacaa

SEQ ID NO: 158029 - DNA, 13 bp, Artificial Sequence
  Oligonucleotide for detection of SNP TSC0039798
ttgtgggtttttt

SEQ ID NO: 158030 - DNA, 13 bp, Artificial Sequence
  Oligonucleotide for detection of SNP TSC0039798
aaaaaacccacaa

SEQ ID NO: 158031 - DNA, 13 bp, Artificial Sequence
  Oligonucleotide for detection of SNP TSC0039802
aaaattatgtgta

SEQ ID NO: 158032 - DNA, 13 bp, Artificial Sequence
  Oligonucleotide for detection of SNP TSC0039802
tacacataatttt

SEQ ID NO: 158033 - DNA, 13 bp, Artificial Sequence
  Oligonucleotide for detection of SNP TSC0039802
aaaattttgtgta

SEQ ID NO: 158034 - DNA, 13 bp, Artificial Sequence
  Oligonucleotide for detection of SNP TSC0039802
tacacaaaatttt

SEQ ID NO: 158035 - DNA, 13 bp, Artificial Sequence
  Oligonucleotide for detection of SNP TSC0039802
tgtatatggtttt

SEQ ID NO: 158036 - DNA, 13 bp, Artificial Sequence
  Oligonucleotide for detection of SNP TSC0039802
aaaaccatataca

SEQ ID NO: 158037 - DNA, 13 bp, Artificial Sequence
  Oligonucleotide for detection of SNP TSC0039802
tgtatagggtttt

SEQ ID NO: 158038 - DNA, 13 bp, Artificial Sequence
  Oligonucleotide for detection of SNP TSC0039802
aaaaccctataca

SEQ ID NO: 158039 - DNA, 13 bp, Artificial Sequence
  Oligonucleotide for detection of SNP TSC0039803
gttagataaaaty

SEQ ID NO: 158040 - DNA, 13 bp, Artificial Sequence
  Oligonucleotide for detection of SNP TSC0039803
rattttatctaac

SEQ ID NO: 158041 - DNA, 13 bp, Artificial Sequence
  Oligonucleotide for detection of SNP TSC0039803
gttagagaaaaty

SEQ ID NO: 158042 - DNA, 13 bp, Artificial Sequence
  Oligonucleotide for detection of SNP TSC0039803
rattttctctaac

SEQ ID NO: 158043 - DNA, 13 bp, Artificial Sequence
  Oligonucleotide for detection of SNP TSC0039803
ggttttgtttaay

SEQ ID NO: 158044 - DNA, 13 bp, Artificial Sequence
  Oligonucleotide for detection of SNP TSC0039803
rttaaacaaaacc

SEQ ID NO: 158045 - DNA, 13 bp, Artificial Sequence
  Oligonucleotide for detection of SNP TSC0039803
ggttttttttaay

SEQ ID NO: 158046 - DNA, 13 bp, Artificial Sequence
  Oligonucleotide for detection of SNP TSC0039803
rttaaaaaaaacc

SEQ ID NO: 158047 - DNA, 13 bp, Artificial Sequence
  Oligonucleotide for detection of SNP TSC0039804
atggttataggag

SEQ ID NO: 158048 - DNA, 13 bp, Artificial Sequence
  Oligonucleotide for detection of SNP TSC0039804
ctcctataaccat

SEQ ID NO: 158049 - DNA, 13 bp, Artificial Sequence
  Oligonucleotide for detection of SNP TSC0039804
atggttgtaggag

SEQ ID NO: 158050 - DNA, 13 bp, Artificial Sequence
  Oligonucleotide for detection of SNP TSC0039804
ctcctacaaccat

SEQ ID NO: 158051 - DNA, 13 bp, Artificial Sequence
  Oligonucleotide for detection of SNP TSC0039804
atggtcgtaggag

SEQ ID NO: 158052 - DNA, 13 bp, Artificial Sequence
  Oligonucleotide for detection of SNP TSC0039804
ctcctacgaccat

SEQ ID NO: 158053 - DNA, 13 bp, Artificial Sequence
  Oligonucleotide for detection of SNP TSC0039804
tttttacgattat

SEQ ID NO: 158054 - DNA, 13 bp, Artificial Sequence
  Oligonucleotide for detection of SNP TSC0039804
ataatcgtaaaaa

SEQ ID NO: 158055 - DNA, 13 bp, Artificial Sequence
  Oligonucleotide for detection of SNP TSC0039812
ttgggtatttttt

SEQ ID NO: 158056 - DNA, 13 bp, Artificial Sequence
  Oligonucleotide for detection of SNP TSC0039812
aaaaaatacccaa

SEQ ID NO: 158057 - DNA, 13 bp, Artificial Sequence
  Oligonucleotide for detection of SNP TSC0039812
ttgggtttttttt

SEQ ID NO: 158058 - DNA, 13 bp, Artificial Sequence
  Oligonucleotide for detection of SNP TSC0039812
aaaaaaaacccaa

SEQ ID NO: 158059 - DNA, 13 bp, Artificial Sequence
  Oligonucleotide for detection of SNP TSC0039812
aagaaatatttaa

SEQ ID NO: 158060 - DNA, 13 bp, Artificial Sequence
  Oligonucleotide for detection of SNP TSC0039812
ttaaatatttctt

SEQ ID NO: 158061 - DNA, 13 bp, Artificial Sequence
  Oligonucleotide for detection of SNP TSC0039812
aagaaagatttaa

SEQ ID NO: 158062 - DNA, 13 bp, Artificial Sequence
  Oligonucleotide for detection of SNP TSC0039812
ttaaatctttctt

SEQ ID NO: 158063 - DNA, 13 bp, Artificial Sequence
  Oligonucleotide for detection of SNP TSC0039813
gagtttatgtaag

SEQ ID NO: 158064 - DNA, 13 bp, Artificial Sequence
  Oligonucleotide for detection of SNP TSC0039813
cttacataaactc

SEQ ID NO: 158065 - DNA, 13 bp, Artificial Sequence
  Oligonucleotide for detection of SNP TSC0039813
gagtttttgtaag

SEQ ID NO: 158066 - DNA, 13 bp, Artificial Sequence
  Oligonucleotide for detection of SNP TSC0039813
cttacaaaaactc

SEQ ID NO: 158067 - DNA, 13 bp, Artificial Sequence
  Oligonucleotide for detection of SNP TSC0039813
tttatataagtty

SEQ ID NO: 158068 - DNA, 13 bp, Artificial Sequence
  Oligonucleotide for detection of SNP TSC0039813
raacttatataaa

SEQ ID NO: 158069 - DNA, 13 bp, Artificial Sequence
  Oligonucleotide for detection of SNP TSC0039813
tttataaaagtty

SEQ ID NO: 158070 - DNA, 13 bp, Artificial Sequence
  Oligonucleotide for detection of SNP TSC0039813
raacttttataaa

SEQ ID NO: 158071 - DNA, 13 bp, Artificial Sequence
  Oligonucleotide for detection of SNP TSC0006037
ttattaaattgaa

SEQ ID NO: 158072 - DNA, 13 bp, Artificial Sequence
  Oligonucleotide for detection of SNP TSC0006037
ttcaatttaataa

SEQ ID NO: 158073 - DNA, 13 bp, Artificial Sequence
  Oligonucleotide for detection of SNP TSC0006037
ttattagattgaa

SEQ ID NO: 158074 - DNA, 13 bp, Artificial Sequence
  Oligonucleotide for detection of SNP TSC0006037
ttcaatctaataa

SEQ ID NO: 158075 - DNA, 13 bp, Artificial Sequence
  Oligonucleotide for detection of SNP TSC0006038
gagtgttgatttg

SEQ ID NO: 158076 - DNA, 13 bp, Artificial Sequence
  Oligonucleotide for detection of SNP TSC0006038
caaatcaacactc

SEQ ID NO: 158077 - DNA, 13 bp, Artificial Sequence
  Oligonucleotide for detection of SNP TSC0006038
gagtgtggatttg

SEQ ID NO: 158078 - DNA, 13 bp, Artificial Sequence
  Oligonucleotide for detection of SNP TSC0006038
caaatccacactc

SEQ ID NO: 158079 - DNA, 13 bp, Artificial Sequence
  Oligonucleotide for detection of SNP TSC0006685
tggtatgattttg

SEQ ID NO: 158080 - DNA, 13 bp, Artificial Sequence
  Oligonucleotide for detection of SNP TSC0006685
caaaatcatacca

SEQ ID NO: 158081 - DNA, 13 bp, Artificial Sequence
  Oligonucleotide for detection of SNP TSC0006685
tggtataattttg

SEQ ID NO: 158082 - DNA, 13 bp, Artificial Sequence
  Oligonucleotide for detection of SNP TSC0006685
caaaattatacca

SEQ ID NO: 158083 - DNA, 13 bp, Artificial Sequence
  Oligonucleotide for detection of SNP TSC0039821
gatagatgaagat

SEQ ID NO: 158084 - DNA, 13 bp, Artificial Sequence
  Oligonucleotide for detection of SNP TSC0039821
atcttcatctatc

SEQ ID NO: 158085 - DNA, 13 bp, Artificial Sequence
  Oligonucleotide for detection of SNP TSC0039821
gatagaggaagat

SEQ ID NO: 158086 - DNA, 13 bp, Artificial Sequence
  Oligonucleotide for detection of SNP TSC0039821
atcttcctctatc

SEQ ID NO: 158087 - DNA, 13 bp, Artificial Sequence
  Oligonucleotide for detection of SNP TSC0039821
gatagacgaagat

SEQ ID NO: 158088 - DNA, 13 bp, Artificial Sequence
  Oligonucleotide for detection of SNP TSC0039821
atcttcgtctatc

SEQ ID NO: 158089 - DNA, 13 bp, Artificial Sequence
  Oligonucleotide for detection of SNP TSC0039821
attttcgtttgty

SEQ ID NO: 158090 - DNA, 13 bp, Artificial Sequence
  Oligonucleotide for detection of SNP TSC0039821
racaaacgaaaat

SEQ ID NO: 158091 - DNA, 13 bp, Artificial Sequence
  Oligonucleotide for detection of SNP TSC0039822
tttatggttaagy

SEQ ID NO: 158092 - DNA, 13 bp, Artificial Sequence
  Oligonucleotide for detection of SNP TSC0039822
rcttaaccataaa

SEQ ID NO: 158093 - DNA, 13 bp, Artificial Sequence
  Oligonucleotide for detection of SNP TSC0039822
tttatgattaagy

SEQ ID NO: 158094 - DNA, 13 bp, Artificial Sequence
  Oligonucleotide for detection of SNP TSC0039822
rcttaatcataaa

SEQ ID NO: 158095 - DNA, 13 bp, Artificial Sequence
  Oligonucleotide for detection of SNP TSC0039823
agggtattaaaga

SEQ ID NO: 158096 - DNA, 13 bp, Artificial Sequence
  Oligonucleotide for detection of SNP TSC0039823
tctttaataccct

SEQ ID NO: 158097 - DNA, 13 bp, Artificial Sequence
  Oligonucleotide for detection of SNP TSC0039823
agggtagtaaaga

SEQ ID NO: 158098 - DNA, 13 bp, Artificial Sequence
  Oligonucleotide for detection of SNP TSC0039823
tctttactaccct

SEQ ID NO: 158099 - DNA, 13 bp, Artificial Sequence
  Oligonucleotide for detection of SNP TSC0039823
tttttgatgtttt

SEQ ID NO: 158100 - DNA, 13 bp, Artificial Sequence
  Oligonucleotide for detection of SNP TSC0039823
aaaacatcaaaaa

SEQ ID NO: 158101 - DNA, 13 bp, Artificial Sequence
  Oligonucleotide for detection of SNP TSC0039823
tttttgttgtttt

SEQ ID NO: 158102 - DNA, 13 bp, Artificial Sequence
  Oligonucleotide for detection of SNP TSC0039823
aaaacaacaaaaa

SEQ ID NO: 158103 - DNA, 13 bp, Artificial Sequence
  Oligonucleotide for detection of SNP TSC0039824
ggttttgtttgtt

SEQ ID NO: 158104 - DNA, 13 bp, Artificial Sequence
  Oligonucleotide for detection of SNP TSC0039824
aacaaacaaaacc

SEQ ID NO: 158105 - DNA, 13 bp, Artificial Sequence
  Oligonucleotide for detection of SNP TSC0039824
ggttttatttgtt

SEQ ID NO: 158106 - DNA, 13 bp, Artificial Sequence
  Oligonucleotide for detection of SNP TSC0039824
aacaaataaaacc

SEQ ID NO: 158107 - DNA, 13 bp, Artificial Sequence
  Oligonucleotide for detection of SNP TSC0039825
aaatttatgttta

SEQ ID NO: 158108 - DNA, 13 bp, Artificial Sequence
  Oligonucleotide for detection of SNP TSC0039825
taaacataaattt

SEQ ID NO: 158109 - DNA, 13 bp, Artificial Sequence
  Oligonucleotide for detection of SNP TSC0039825
aaatttttgttta

SEQ ID NO: 158110 - DNA, 13 bp, Artificial Sequence
  Oligonucleotide for detection of SNP TSC0039825
taaacaaaaattt

SEQ ID NO: 158111 - DNA, 13 bp, Artificial Sequence
  Oligonucleotide for detection of SNP TSC0039825
tgggtatgggttt

SEQ ID NO: 158112 - DNA, 13 bp, Artificial Sequence
  Oligonucleotide for detection of SNP TSC0039825
aaacccataccca

SEQ ID NO: 158113 - DNA, 13 bp, Artificial Sequence
  Oligonucleotide for detection of SNP TSC0039825
tgggtaagggttt

SEQ ID NO: 158114 - DNA, 13 bp, Artificial Sequence
  Oligonucleotide for detection of SNP TSC0039825
aaacccttaccca

SEQ ID NO: 158115 - DNA, 13 bp, Artificial Sequence
  Oligonucleotide for detection of SNP TSC0039830
agattaattatta

SEQ ID NO: 158116 - DNA, 13 bp, Artificial Sequence
  Oligonucleotide for detection of SNP TSC0039830
taataattaatct

SEQ ID NO: 158117 - DNA, 13 bp, Artificial Sequence
  Oligonucleotide for detection of SNP TSC0039830
agattatttatta

SEQ ID NO: 158118 - DNA, 13 bp, Artificial Sequence
  Oligonucleotide for detection of SNP TSC0039830
taataaataatct

SEQ ID NO: 158119 - DNA, 13 bp, Artificial Sequence
  Oligonucleotide for detection of SNP TSC0039830
tgatgattagttt

SEQ ID NO: 158120 - DNA, 13 bp, Artificial Sequence
  Oligonucleotide for detection of SNP TSC0039830
aaactaatcatca

SEQ ID NO: 158121 - DNA, 13 bp, Artificial Sequence
  Oligonucleotide for detection of SNP TSC0039830
tgatgaatagttt

SEQ ID NO: 158122 - DNA, 13 bp, Artificial Sequence
  Oligonucleotide for detection of SNP TSC0039830
aaactattcatca

SEQ ID NO: 158123 - DNA, 13 bp, Artificial Sequence
  Oligonucleotide for detection of SNP TSC0004552
ttggaatgtttay

SEQ ID NO: 158124 - DNA, 13 bp, Artificial Sequence
  Oligonucleotide for detection of SNP TSC0004552
rtaaacattccaa

SEQ ID NO: 158125 - DNA, 13 bp, Artificial Sequence
  Oligonucleotide for detection of SNP TSC0004552
ttggaacgtttay

SEQ ID NO: 158126 - DNA, 13 bp, Artificial Sequence
  Oligonucleotide for detection of SNP TSC0004552
rtaaacgttccaa

SEQ ID NO: 158127 - DNA, 13 bp, Artificial Sequence
  Oligonucleotide for detection of SNP TSC0004552
gtgggtgttttag

SEQ ID NO: 158128 - DNA, 13 bp, Artificial Sequence
  Oligonucleotide for detection of SNP TSC0004552
ctaaaacacccac

SEQ ID NO: 158129 - DNA, 13 bp, Artificial Sequence
  Oligonucleotide for detection of SNP TSC0004552
gtgggtattttag

SEQ ID NO: 158130 - DNA, 13 bp, Artificial Sequence
  Oligonucleotide for detection of SNP TSC0004552
ctaaaatacccac

SEQ ID NO: 158131 - DNA, 13 bp, Artificial Sequence
  Oligonucleotide for detection of SNP TSC0004552
gtgggcgttttag

SEQ ID NO: 158132 - DNA, 13 bp, Artificial Sequence
  Oligonucleotide for detection of SNP TSC0004552
ctaaaacgcccac

SEQ ID NO: 158133 - DNA, 13 bp, Artificial Sequence
  Oligonucleotide for detection of SNP TSC0039831
aagaaagaaagay

SEQ ID NO: 158134 - DNA, 13 bp, Artificial Sequence
  Oligonucleotide for detection of SNP TSC0039831
rtctttctttctt

SEQ ID NO: 158135 - DNA, 13 bp, Artificial Sequence
  Oligonucleotide for detection of SNP TSC0039831
aagaaaaaaagay

SEQ ID NO: 158136 - DNA, 13 bp, Artificial Sequence
  Oligonucleotide for detection of SNP TSC0039831
rtctttttttctt

SEQ ID NO: 158137 - DNA, 13 bp, Artificial Sequence
  Oligonucleotide for detection of SNP TSC0005649
tataatgtaataa

SEQ ID NO: 158138 - DNA, 13 bp, Artificial Sequence
  Oligonucleotide for detection of SNP TSC0005649
ttattacattata

SEQ ID NO: 158139 - DNA, 13 bp, Artificial Sequence
  Oligonucleotide for detection of SNP TSC0005650
atattgatggtta

SEQ ID NO: 158140 - DNA, 13 bp, Artificial Sequence
  Oligonucleotide for detection of SNP TSC0005650
taaccatcaatat

SEQ ID NO: 158141 - DNA, 13 bp, Artificial Sequence
  Oligonucleotide for detection of SNP TSC0005650
atattggtggtta

SEQ ID NO: 158142 - DNA, 13 bp, Artificial Sequence
  Oligonucleotide for detection of SNP TSC0005650
taaccaccaatat

SEQ ID NO: 158143 - DNA, 13 bp, Artificial Sequence
  Oligonucleotide for detection of SNP TSC0039836
agtaaggatatga

SEQ ID NO: 158144 - DNA, 13 bp, Artificial Sequence
  Oligonucleotide for detection of SNP TSC0039836
tcatatccttact

SEQ ID NO: 158145 - DNA, 13 bp, Artificial Sequence
  Oligonucleotide for detection of SNP TSC0039836
agtaagaatatga

SEQ ID NO: 158146 - DNA, 13 bp, Artificial Sequence
  Oligonucleotide for detection of SNP TSC0039836
tcatattcttact

SEQ ID NO: 158147 - DNA, 13 bp, Artificial Sequence
  Oligonucleotide for detection of SNP TSC0039836
agtaaggatacga

SEQ ID NO: 158148 - DNA, 13 bp, Artificial Sequence
  Oligonucleotide for detection of SNP TSC0039836
tcgtatccttact

SEQ ID NO: 158149 - DNA, 13 bp, Artificial Sequence
  Oligonucleotide for detection of SNP TSC0039836
agtaagaatacga

SEQ ID NO: 158150 - DNA, 13 bp, Artificial Sequence
  Oligonucleotide for detection of SNP TSC0039836
tcgtattcttact

SEQ ID NO: 158151 - DNA, 13 bp, Artificial Sequence
  Oligonucleotide for detection of SNP TSC0039837
ttttatttagtat

SEQ ID NO: 158152 - DNA, 13 bp, Artificial Sequence
  Oligonucleotide for detection of SNP TSC0039837
atactaaataaaa

SEQ ID NO: 158153 - DNA, 13 bp, Artificial Sequence
  Oligonucleotide for detection of SNP TSC0039837
ttttatgtagtat

SEQ ID NO: 158154 - DNA, 13 bp, Artificial Sequence
  Oligonucleotide for detection of SNP TSC0039837
atactacataaaa

SEQ ID NO: 158155 - DNA, 13 bp, Artificial Sequence
  Oligonucleotide for detection of SNP TSC0039837
atattggatagaa

SEQ ID NO: 158156 - DNA, 13 bp, Artificial Sequence
  Oligonucleotide for detection of SNP TSC0039837
ttctatccaatat

SEQ ID NO: 158157 - DNA, 13 bp, Artificial Sequence
  Oligonucleotide for detection of SNP TSC0039837
atattgtatagaa

SEQ ID NO: 158158 - DNA, 13 bp, Artificial Sequence
  Oligonucleotide for detection of SNP TSC0039837
ttctatacaatat

SEQ ID NO: 158159 - DNA, 13 bp, Artificial Sequence
  Oligonucleotide for detection of SNP TSC0039839
gttatagtttaaa

SEQ ID NO: 158160 - DNA, 13 bp, Artificial Sequence
  Oligonucleotide for detection of SNP TSC0039839
tttaaactataac

SEQ ID NO: 158161 - DNA, 13 bp, Artificial Sequence
  Oligonucleotide for detection of SNP TSC0039839
gttataatttaaa

SEQ ID NO: 158162 - DNA, 13 bp, Artificial Sequence
  Oligonucleotide for detection of SNP TSC0039839
tttaaattataac

SEQ ID NO: 158163 - DNA, 13 bp, Artificial Sequence
  Oligonucleotide for detection of SNP TSC0039840
tttgtagaaaggy

SEQ ID NO: 158164 - DNA, 13 bp, Artificial Sequence
  Oligonucleotide for detection of SNP TSC0039840
rcctttctacaaa

SEQ ID NO: 158165 - DNA, 13 bp, Artificial Sequence
  Oligonucleotide for detection of SNP TSC0039840
tttgtaaaaaggy

SEQ ID NO: 158166 - DNA, 13 bp, Artificial Sequence
  Oligonucleotide for detection of SNP TSC0039840
rcctttttacaaa

SEQ ID NO: 158167 - DNA, 13 bp, Artificial Sequence
  Oligonucleotide for detection of SNP TSC0039841
atattagaaaaat

SEQ ID NO: 158168 - DNA, 13 bp, Artificial Sequence
  Oligonucleotide for detection of SNP TSC0039841
atttttctaatat

SEQ ID NO: 158169 - DNA, 13 bp, Artificial Sequence
  Oligonucleotide for detection of SNP TSC0039842
tttttagtaatag

SEQ ID NO: 158170 - DNA, 13 bp, Artificial Sequence
  Oligonucleotide for detection of SNP TSC0039842
ctattactaaaaa

SEQ ID NO: 158171 - DNA, 13 bp, Artificial Sequence
  Oligonucleotide for detection of SNP TSC0039842
tttttaataatag

SEQ ID NO: 158172 - DNA, 13 bp, Artificial Sequence
  Oligonucleotide for detection of SNP TSC0039842
ctattattaaaaa

SEQ ID NO: 158173 - DNA, 13 bp, Artificial Sequence
  Oligonucleotide for detection of SNP TSC0039843
tatattttgtgta

SEQ ID NO: 158174 - DNA, 13 bp, Artificial Sequence
  Oligonucleotide for detection of SNP TSC0039843
tacacaaaatata

SEQ ID NO: 158175 - DNA, 13 bp, Artificial Sequence
  Oligonucleotide for detection of SNP TSC0039843
tatattgtgtgta

SEQ ID NO: 158176 - DNA, 13 bp, Artificial Sequence
  Oligonucleotide for detection of SNP TSC0039843
tacacacaatata

SEQ ID NO: 158177 - DNA, 13 bp, Artificial Sequence
  Oligonucleotide for detection of SNP TSC0039843
tgtatagaatgtg

SEQ ID NO: 158178 - DNA, 13 bp, Artificial Sequence
  Oligonucleotide for detection of SNP TSC0039843
cacattctataca

SEQ ID NO: 158179 - DNA, 13 bp, Artificial Sequence
  Oligonucleotide for detection of SNP TSC0039843
tgtatataatgtg

SEQ ID NO: 158180 - DNA, 13 bp, Artificial Sequence
  Oligonucleotide for detection of SNP TSC0039843
cacattatataca

SEQ ID NO: 158181 - DNA, 13 bp, Artificial Sequence
  Oligonucleotide for detection of SNP TSC0039844
aaaattaaagatg

SEQ ID NO: 158182 - DNA, 13 bp, Artificial Sequence
  Oligonucleotide for detection of SNP TSC0039844
catctttaatttt

SEQ ID NO: 158183 - DNA, 13 bp, Artificial Sequence
  Oligonucleotide for detection of SNP TSC0039844
aaaatttaagatg

SEQ ID NO: 158184 - DNA, 13 bp, Artificial Sequence
  Oligonucleotide for detection of SNP TSC0039844
catcttaaatttt

SEQ ID NO: 158185 - DNA, 13 bp, Artificial Sequence
  Oligonucleotide for detection of SNP TSC0009465
attttagaaagtt

SEQ ID NO: 158186 - DNA, 13 bp, Artificial Sequence
  Oligonucleotide for detection of SNP TSC0009465
aactttctaaaat

SEQ ID NO: 158187 - DNA, 13 bp, Artificial Sequence
  Oligonucleotide for detection of SNP TSC0009465
attttaaaaagtt

SEQ ID NO: 158188 - DNA, 13 bp, Artificial Sequence
  Oligonucleotide for detection of SNP TSC0009465
aactttttaaaat

SEQ ID NO: 158189 - DNA, 13 bp, Artificial Sequence
  Oligonucleotide for detection of SNP TSC0039845
aggagagaagtag

SEQ ID NO: 158190 - DNA, 13 bp, Artificial Sequence
  Oligonucleotide for detection of SNP TSC0039845
ctacttctctcct

SEQ ID NO: 158191 - DNA, 13 bp, Artificial Sequence
  Oligonucleotide for detection of SNP TSC0039845
aggagaaaagtag

SEQ ID NO: 158192 - DNA, 13 bp, Artificial Sequence
  Oligonucleotide for detection of SNP TSC0039845
ctacttttctcct

SEQ ID NO: 158193 - DNA, 13 bp, Artificial Sequence
  Oligonucleotide for detection of SNP TSC0039846
atttgaggtttat

SEQ ID NO: 158194 - DNA, 13 bp, Artificial Sequence
  Oligonucleotide for detection of SNP TSC0039846
ataaacctcaaat

SEQ ID NO: 158195 - DNA, 13 bp, Artificial Sequence
  Oligonucleotide for detection of SNP TSC0039846
atttgaagtttat

SEQ ID NO: 158196 - DNA, 13 bp, Artificial Sequence
  Oligonucleotide for detection of SNP TSC0039846
ataaacttcaaat

SEQ ID NO: 158197 - DNA, 13 bp, Artificial Sequence
  Oligonucleotide for detection of SNP TSC0039848
gttggtatttagy

SEQ ID NO: 158198 - DNA, 13 bp, Artificial Sequence
  Oligonucleotide for detection of SNP TSC0039848
rctaaataccaac

SEQ ID NO: 158199 - DNA, 13 bp, Artificial Sequence
  Oligonucleotide for detection of SNP TSC0039848
gttggtgtttagy

SEQ ID NO: 158200 - DNA, 13 bp, Artificial Sequence
  Oligonucleotide for detection of SNP TSC0039848
rctaaacaccaac

SEQ ID NO: 158201 - DNA, 13 bp, Artificial Sequence
  Oligonucleotide for detection of SNP TSC0039848
gtcggtatttagy

SEQ ID NO: 158202 - DNA, 13 bp, Artificial Sequence
  Oligonucleotide for detection of SNP TSC0039848
rctaaataccgac

SEQ ID NO: 158203 - DNA, 13 bp, Artificial Sequence
  Oligonucleotide for detection of SNP TSC0039848
gtcggtgtttagy

SEQ ID NO: 158204 - DNA, 13 bp, Artificial Sequence
  Oligonucleotide for detection of SNP TSC0039848
rctaaacaccgac

SEQ ID NO: 158205 - DNA, 13 bp, Artificial Sequence
  Oligonucleotide for detection of SNP TSC0039848
gttggcgtttagy

SEQ ID NO: 158206 - DNA, 13 bp, Artificial Sequence
  Oligonucleotide for detection of SNP TSC0039848
rctaaacgccaac

SEQ ID NO: 158207 - DNA, 13 bp, Artificial Sequence
  Oligonucleotide for detection of SNP TSC0039848
gtcggcgtttagy

SEQ ID NO: 158208 - DNA, 13 bp, Artificial Sequence
  Oligonucleotide for detection of SNP TSC0039848
rctaaacgccgac

SEQ ID NO: 158209 - DNA, 13 bp, Artificial Sequence
  Oligonucleotide for detection of SNP TSC0039848
gttgaatgttggy

SEQ ID NO: 158210 - DNA, 13 bp, Artificial Sequence
  Oligonucleotide for detection of SNP TSC0039848
rccaacattcaac

SEQ ID NO: 158211 - DNA, 13 bp, Artificial Sequence
  Oligonucleotide for detection of SNP TSC0039848
gttgaatgtcggy

SEQ ID NO: 158212 - DNA, 13 bp, Artificial Sequence
  Oligonucleotide for detection of SNP TSC0039848
rccgacattcaac

SEQ ID NO: 158213 - DNA, 13 bp, Artificial Sequence
  Oligonucleotide for detection of SNP TSC0039848
gttgaacgttggy

SEQ ID NO: 158214 - DNA, 13 bp, Artificial Sequence
  Oligonucleotide for detection of SNP TSC0039848
rccaacgttcaac

SEQ ID NO: 158215 - DNA, 13 bp, Artificial Sequence
  Oligonucleotide for detection of SNP TSC0039848
gttgaacgtcggy

SEQ ID NO: 158216 - DNA, 13 bp, Artificial Sequence
  Oligonucleotide for detection of SNP TSC0039848
rccgacgttcaac

SEQ ID NO: 158217 - DNA, 13 bp, Artificial Sequence
  Oligonucleotide for detection of SNP TSC0039850
atagtaggaaata

SEQ ID NO: 158218 - DNA, 13 bp, Artificial Sequence
  Oligonucleotide for detection of SNP TSC0039850
tatttcctactat

SEQ ID NO: 158219 - DNA, 13 bp, Artificial Sequence
  Oligonucleotide for detection of SNP TSC0039850
atagtaagaaata

SEQ ID NO: 158220 - DNA, 13 bp, Artificial Sequence
  Oligonucleotide for detection of SNP TSC0039850
tatttcttactat

SEQ ID NO: 158221 - DNA, 13 bp, Artificial Sequence
  Oligonucleotide for detection of SNP TSC0039851
tgttatatgggay

SEQ ID NO: 158222 - DNA, 13 bp, Artificial Sequence
  Oligonucleotide for detection of SNP TSC0039851
rtcccatataaca

SEQ ID NO: 158223 - DNA, 13 bp, Artificial Sequence
  Oligonucleotide for detection of SNP TSC0039851
tgttatgtgggay

SEQ ID NO: 158224 - DNA, 13 bp, Artificial Sequence
  Oligonucleotide for detection of SNP TSC0039851
rtcccacataaca

SEQ ID NO: 158225 - DNA, 13 bp, Artificial Sequence
  Oligonucleotide for detection of SNP TSC0039851
cgttatatgggay

SEQ ID NO: 158226 - DNA, 13 bp, Artificial Sequence
  Oligonucleotide for detection of SNP TSC0039851
rtcccatataacg

SEQ ID NO: 158227 - DNA, 13 bp, Artificial Sequence
  Oligonucleotide for detection of SNP TSC0039851
cgttatgtgggay

SEQ ID NO: 158228 - DNA, 13 bp, Artificial Sequence
  Oligonucleotide for detection of SNP TSC0039851
rtcccacataacg

SEQ ID NO: 158229 - DNA, 13 bp, Artificial Sequence
  Oligonucleotide for detection of SNP TSC0039851
tgttacgtgggay

SEQ ID NO: 158230 - DNA, 13 bp, Artificial Sequence
  Oligonucleotide for detection of SNP TSC0039851
rtcccacgtaaca

SEQ ID NO: 158231 - DNA, 13 bp, Artificial Sequence
  Oligonucleotide for detection of SNP TSC0039851
cgttacgtgggay

SEQ ID NO: 158232 - DNA, 13 bp, Artificial Sequence
  Oligonucleotide for detection of SNP TSC0039851
rtcccacgtaacg

SEQ ID NO: 158233 - DNA, 13 bp, Artificial Sequence
  Oligonucleotide for detection of SNP TSC0039851
gttttatgtggtg

SEQ ID NO: 158234 - DNA, 13 bp, Artificial Sequence
  Oligonucleotide for detection of SNP TSC0039851
caccacataaaac

SEQ ID NO: 158235 - DNA, 13 bp, Artificial Sequence
  Oligonucleotide for detection of SNP TSC0039851
gttttatgtggcg

SEQ ID NO: 158236 - DNA, 13 bp, Artificial Sequence
  Oligonucleotide for detection of SNP TSC0039851
cgccacataaaac

SEQ ID NO: 158237 - DNA, 13 bp, Artificial Sequence
  Oligonucleotide for detection of SNP TSC0039851
gttttacgtggtg

SEQ ID NO: 158238 - DNA, 13 bp, Artificial Sequence
  Oligonucleotide for detection of SNP TSC0039851
caccacgtaaaac

SEQ ID NO: 158239 - DNA, 13 bp, Artificial Sequence
  Oligonucleotide for detection of SNP TSC0039851
gttttacgtggcg

SEQ ID NO: 158240 - DNA, 13 bp, Artificial Sequence
  Oligonucleotide for detection of SNP TSC0039851
cgccacgtaaaac

SEQ ID NO: 158241 - DNA, 13 bp, Artificial Sequence
  Oligonucleotide for detection of SNP TSC0039852
tatatggatttat

SEQ ID NO: 158242 - DNA, 13 bp, Artificial Sequence
  Oligonucleotide for detection of SNP TSC0039852
ataaatccatata

SEQ ID NO: 158243 - DNA, 13 bp, Artificial Sequence
  Oligonucleotide for detection of SNP TSC0039852
tatatgaatttat

SEQ ID NO: 158244 - DNA, 13 bp, Artificial Sequence
  Oligonucleotide for detection of SNP TSC0039852
ataaattcatata

SEQ ID NO: 158245 - DNA, 13 bp, Artificial Sequence
  Oligonucleotide for detection of SNP TSC0039853
gaaattgaaattt

SEQ ID NO: 158246 - DNA, 13 bp, Artificial Sequence
  Oligonucleotide for detection of SNP TSC0039853
aaatttcaatttc

SEQ ID NO: 158247 - DNA, 13 bp, Artificial Sequence
  Oligonucleotide for detection of SNP TSC0039853
gaaattaaaattt

SEQ ID NO: 158248 - DNA, 13 bp, Artificial Sequence
  Oligonucleotide for detection of SNP TSC0039853
aaattttaatttc

SEQ ID NO: 158249 - DNA, 13 bp, Artificial Sequence
  Oligonucleotide for detection of SNP TSC0039854
tggtattgtattg

SEQ ID NO: 158250 - DNA, 13 bp, Artificial Sequence
  Oligonucleotide for detection of SNP TSC0039854
caatacaatacca

SEQ ID NO: 158251 - DNA, 13 bp, Artificial Sequence
  Oligonucleotide for detection of SNP TSC0039854
tggtatcgtattg

SEQ ID NO: 158252 - DNA, 13 bp, Artificial Sequence
  Oligonucleotide for detection of SNP TSC0039854
caatacgatacca

SEQ ID NO: 158253 - DNA, 13 bp, Artificial Sequence
  Oligonucleotide for detection of SNP TSC0039854
tagtgtgatatta

SEQ ID NO: 158254 - DNA, 13 bp, Artificial Sequence
  Oligonucleotide for detection of SNP TSC0039854
taatatcacacta

SEQ ID NO: 158255 - DNA, 13 bp, Artificial Sequence
  Oligonucleotide for detection of SNP TSC0039854
tagtgtaatatta

SEQ ID NO: 158256 - DNA, 13 bp, Artificial Sequence
  Oligonucleotide for detection of SNP TSC0039854
taatattacacta

SEQ ID NO: 158257 - DNA, 13 bp, Artificial Sequence
  Oligonucleotide for detection of SNP TSC0039854
tagtgcgatatta

SEQ ID NO: 158258 - DNA, 13 bp, Artificial Sequence
  Oligonucleotide for detection of SNP TSC0039854
taatatcgcacta

SEQ ID NO: 158259 - DNA, 13 bp, Artificial Sequence
  Oligonucleotide for detection of SNP TSC0008142
agtagtataattt

SEQ ID NO: 158260 - DNA, 13 bp, Artificial Sequence
  Oligonucleotide for detection of SNP TSC0008142
aaattatactact

SEQ ID NO: 158261 - DNA, 13 bp, Artificial Sequence
  Oligonucleotide for detection of SNP TSC0008142
agtagtgtaattt

SEQ ID NO: 158262 - DNA, 13 bp, Artificial Sequence
  Oligonucleotide for detection of SNP TSC0008142
aaattacactact

SEQ ID NO: 158263 - DNA, 13 bp, Artificial Sequence
  Oligonucleotide for detection of SNP TSC0008142
agtagcgtaattt

SEQ ID NO: 158264 - DNA, 13 bp, Artificial Sequence
  Oligonucleotide for detection of SNP TSC0008142
aaattacgctact

SEQ ID NO: 158265 - DNA, 13 bp, Artificial Sequence
  Oligonucleotide for detection of SNP TSC0008142
agattgtgttgtt

SEQ ID NO: 158266 - DNA, 13 bp, Artificial Sequence
  Oligonucleotide for detection of SNP TSC0008142
aacaacacaatct

SEQ ID NO: 158267 - DNA, 13 bp, Artificial Sequence
  Oligonucleotide for detection of SNP TSC0008142
agattgcgttgtt

SEQ ID NO: 158268 - DNA, 13 bp, Artificial Sequence
  Oligonucleotide for detection of SNP TSC0008142
aacaacgcaatct

SEQ ID NO: 158269 - DNA, 13 bp, Artificial Sequence
  Oligonucleotide for detection of SNP TSC0039855
gtgttatataata

SEQ ID NO: 158270 - DNA, 13 bp, Artificial Sequence
  Oligonucleotide for detection of SNP TSC0039855
tattatataacac

SEQ ID NO: 158271 - DNA, 13 bp, Artificial Sequence
  Oligonucleotide for detection of SNP TSC0039855
gtgttagataata

SEQ ID NO: 158272 - DNA, 13 bp, Artificial Sequence
  Oligonucleotide for detection of SNP TSC0039855
tattatctaacac

SEQ ID NO: 158273 - DNA, 13 bp, Artificial Sequence
  Oligonucleotide for detection of SNP TSC0039855
tattatatggtay

SEQ ID NO: 158274 - DNA, 13 bp, Artificial Sequence
  Oligonucleotide for detection of SNP TSC0039855
rtaccatataata

SEQ ID NO: 158275 - DNA, 13 bp, Artificial Sequence
  Oligonucleotide for detection of SNP TSC0039855
tattatttggtay

SEQ ID NO: 158276 - DNA, 13 bp, Artificial Sequence
  Oligonucleotide for detection of SNP TSC0039855
rtaccaaataata

SEQ ID NO: 158277 - DNA, 13 bp, Artificial Sequence
  Oligonucleotide for detection of SNP TSC0039859
atataggtaaata

SEQ ID NO: 158278 - DNA, 13 bp, Artificial Sequence
  Oligonucleotide for detection of SNP TSC0039859
tatttacctatat

SEQ ID NO: 158279 - DNA, 13 bp, Artificial Sequence
  Oligonucleotide for detection of SNP TSC0039859
atatagataaata

SEQ ID NO: 158280 - DNA, 13 bp, Artificial Sequence
  Oligonucleotide for detection of SNP TSC0039859
tatttatctatat

SEQ ID NO: 158281 - DNA, 13 bp, Artificial Sequence
  Oligonucleotide for detection of SNP TSC0039860
tggaaggtagtta

SEQ ID NO: 158282 - DNA, 13 bp, Artificial Sequence
  Oligonucleotide for detection of SNP TSC0039860
taactaccttcca

SEQ ID NO: 158283 - DNA, 13 bp, Artificial Sequence
  Oligonucleotide for detection of SNP TSC0039860
tggaagatagtta

SEQ ID NO: 158284 - DNA, 13 bp, Artificial Sequence
  Oligonucleotide for detection of SNP TSC0039860
taactatcttcca

SEQ ID NO: 158285 - DNA, 13 bp, Artificial Sequence
  Oligonucleotide for detection of SNP TSC0039865
tgttagataatta

SEQ ID NO: 158286 - DNA, 13 bp, Artificial Sequence
  Oligonucleotide for detection of SNP TSC0039865
taattatctaaca

SEQ ID NO: 158287 - DNA, 13 bp, Artificial Sequence
  Oligonucleotide for detection of SNP TSC0039865
tgttaggtaatta

SEQ ID NO: 158288 - DNA, 13 bp, Artificial Sequence
  Oligonucleotide for detection of SNP TSC0039865
taattacctaaca

SEQ ID NO: 158289 - DNA, 13 bp, Artificial Sequence
  Oligonucleotide for detection of SNP TSC0039866
ttttatagtagga

SEQ ID NO: 158290 - DNA, 13 bp, Artificial Sequence
  Oligonucleotide for detection of SNP TSC0039866
tcctactataaaa

SEQ ID NO: 158291 - DNA, 13 bp, Artificial Sequence
  Oligonucleotide for detection of SNP TSC0039866
ttttatggtagga

SEQ ID NO: 158292 - DNA, 13 bp, Artificial Sequence
  Oligonucleotide for detection of SNP TSC0039866
tcctaccataaaa

SEQ ID NO: 158293 - DNA, 13 bp, Artificial Sequence
  Oligonucleotide for detection of SNP TSC0039866
ttttacggtagga

SEQ ID NO: 158294 - DNA, 13 bp, Artificial Sequence
  Oligonucleotide for detection of SNP TSC0039866
tcctaccgtaaaa

SEQ ID NO: 158295 - DNA, 13 bp, Artificial Sequence
  Oligonucleotide for detection of SNP TSC0039866
ttttgttgtggaa

SEQ ID NO: 158296 - DNA, 13 bp, Artificial Sequence
  Oligonucleotide for detection of SNP TSC0039866
ttccacaacaaaa

SEQ ID NO: 158297 - DNA, 13 bp, Artificial Sequence
  Oligonucleotide for detection of SNP TSC0039866
ttttgtcgtggaa

SEQ ID NO: 158298 - DNA, 13 bp, Artificial Sequence
  Oligonucleotide for detection of SNP TSC0039866
ttccacgacaaaa

SEQ ID NO: 158299 - DNA, 13 bp, Artificial Sequence
  Oligonucleotide for detection of SNP TSC0039867
tgaatatggaagg

SEQ ID NO: 158300 - DNA, 13 bp, Artificial Sequence
  Oligonucleotide for detection of SNP TSC0039867
ccttccatattca

SEQ ID NO: 158301 - DNA, 13 bp, Artificial Sequence
  Oligonucleotide for detection of SNP TSC0039867
tgaatacggaagg

SEQ ID NO: 158302 - DNA, 13 bp, Artificial Sequence
  Oligonucleotide for detection of SNP TSC0039867
ccttccgtattca

SEQ ID NO: 158303 - DNA, 13 bp, Artificial Sequence
  Oligonucleotide for detection of SNP TSC0039868
taatataattaat

SEQ ID NO: 158304 - DNA, 13 bp, Artificial Sequence
  Oligonucleotide for detection of SNP TSC0039868
attaattatatta

SEQ ID NO: 158305 - DNA, 13 bp, Artificial Sequence
  Oligonucleotide for detection of SNP TSC0039868
taatattattaat

SEQ ID NO: 158306 - DNA, 13 bp, Artificial Sequence
  Oligonucleotide for detection of SNP TSC0039868
attaataatatta

SEQ ID NO: 158307 - DNA, 13 bp, Artificial Sequence
  Oligonucleotide for detection of SNP TSC0039868
attgattatatta

SEQ ID NO: 158308 - DNA, 13 bp, Artificial Sequence
  Oligonucleotide for detection of SNP TSC0039868
taatataatcaat

SEQ ID NO: 158309 - DNA, 13 bp, Artificial Sequence
  Oligonucleotide for detection of SNP TSC0039868
attgataatatta

SEQ ID NO: 158310 - DNA, 13 bp, Artificial Sequence
  Oligonucleotide for detection of SNP TSC0039868
taatattatcaat

SEQ ID NO: 158311 - DNA, 13 bp, Artificial Sequence
  Oligonucleotide for detection of SNP TSC0039869
tgtagatttggty

SEQ ID NO: 158312 - DNA, 13 bp, Artificial Sequence
  Oligonucleotide for detection of SNP TSC0039869
raccaaatctaca

SEQ ID NO: 158313 - DNA, 13 bp, Artificial Sequence
  Oligonucleotide for detection of SNP TSC0039869
tgtagagttggty

SEQ ID NO: 158314 - DNA, 13 bp, Artificial Sequence
  Oligonucleotide for detection of SNP TSC0039869
raccaactctaca

SEQ ID NO: 158315 - DNA, 13 bp, Artificial Sequence
  Oligonucleotide for detection of SNP TSC0039869
ggttaaatttata

SEQ ID NO: 158316 - DNA, 13 bp, Artificial Sequence
  Oligonucleotide for detection of SNP TSC0039869
tataaatttaacc

SEQ ID NO: 158317 - DNA, 13 bp, Artificial Sequence
  Oligonucleotide for detection of SNP TSC0039869
ggttaattttata

SEQ ID NO: 158318 - DNA, 13 bp, Artificial Sequence
  Oligonucleotide for detection of SNP TSC0039869
tataaaattaacc

SEQ ID NO: 158319 - DNA, 13 bp, Artificial Sequence
  Oligonucleotide for detection of SNP TSC0039870
aggagtataatat

SEQ ID NO: 158320 - DNA, 13 bp, Artificial Sequence
  Oligonucleotide for detection of SNP TSC0039870
atattatactcct

SEQ ID NO: 158321 - DNA, 13 bp, Artificial Sequence
  Oligonucleotide for detection of SNP TSC0039870
aggagtttaatat

SEQ ID NO: 158322 - DNA, 13 bp, Artificial Sequence
  Oligonucleotide for detection of SNP TSC0039870
atattaaactcct

SEQ ID NO: 158323 - DNA, 13 bp, Artificial Sequence
  Oligonucleotide for detection of SNP TSC0039870
atattagattttt

SEQ ID NO: 158324 - DNA, 13 bp, Artificial Sequence
  Oligonucleotide for detection of SNP TSC0039870
aaaaatctaatat

SEQ ID NO: 158325 - DNA, 13 bp, Artificial Sequence
  Oligonucleotide for detection of SNP TSC0039872
gtacgtattatta

SEQ ID NO: 158326 - DNA, 13 bp, Artificial Sequence
  Oligonucleotide for detection of SNP TSC0039872
taataatacgtac

SEQ ID NO: 158327 - DNA, 13 bp, Artificial Sequence
  Oligonucleotide for detection of SNP TSC0039872
gtacgtgttatta

SEQ ID NO: 158328 - DNA, 13 bp, Artificial Sequence
  Oligonucleotide for detection of SNP TSC0039872
taataacacgtac

SEQ ID NO: 158329 - DNA, 13 bp, Artificial Sequence
  Oligonucleotide for detection of SNP TSC0039873
aattataagttat

SEQ ID NO: 158330 - DNA, 13 bp, Artificial Sequence
  Oligonucleotide for detection of SNP TSC0039873
ataacttataatt

SEQ ID NO: 158331 - DNA, 13 bp, Artificial Sequence
  Oligonucleotide for detection of SNP TSC0039873
aattattagttat

SEQ ID NO: 158332 - DNA, 13 bp, Artificial Sequence
  Oligonucleotide for detection of SNP TSC0039873
ataactaataatt

SEQ ID NO: 158333 - DNA, 13 bp, Artificial Sequence
  Oligonucleotide for detection of SNP TSC0039873
atggtttgtagtt

SEQ ID NO: 158334 - DNA, 13 bp, Artificial Sequence
  Oligonucleotide for detection of SNP TSC0039873
aactacaaaccat

SEQ ID NO: 158335 - DNA, 13 bp, Artificial Sequence
  Oligonucleotide for detection of SNP TSC0039873
atggttggtagtt

SEQ ID NO: 158336 - DNA, 13 bp, Artificial Sequence
  Oligonucleotide for detection of SNP TSC0039873
aactaccaaccat

SEQ ID NO: 158337 - DNA, 13 bp, Artificial Sequence
  Oligonucleotide for detection of SNP TSC0005721
gatattattgagt

SEQ ID NO: 158338 - DNA, 13 bp, Artificial Sequence
  Oligonucleotide for detection of SNP TSC0005721
actcaataatatc

SEQ ID NO: 158339 - DNA, 13 bp, Artificial Sequence
  Oligonucleotide for detection of SNP TSC0005721
gatattgttgagt

SEQ ID NO: 158340 - DNA, 13 bp, Artificial Sequence
  Oligonucleotide for detection of SNP TSC0005721
actcaacaatatc

SEQ ID NO: 158341 - DNA, 13 bp, Artificial Sequence
  Oligonucleotide for detection of SNP TSC0005722
agggtttgtgagt

SEQ ID NO: 158342 - DNA, 13 bp, Artificial Sequence
  Oligonucleotide for detection of SNP TSC0005722
actcacaaaccct

SEQ ID NO: 158343 - DNA, 13 bp, Artificial Sequence
  Oligonucleotide for detection of SNP TSC0005722
agggttggtgagt

SEQ ID NO: 158344 - DNA, 13 bp, Artificial Sequence
  Oligonucleotide for detection of SNP TSC0005722
actcaccaaccct

SEQ ID NO: 158345 - DNA, 13 bp, Artificial Sequence
  Oligonucleotide for detection of SNP TSC0005722
atttataagtttt

SEQ ID NO: 158346 - DNA, 13 bp, Artificial Sequence
  Oligonucleotide for detection of SNP TSC0005722
aaaacttataaat

SEQ ID NO: 158347 - DNA, 13 bp, Artificial Sequence
  Oligonucleotide for detection of SNP TSC0005722
atttattagtttt

SEQ ID NO: 158348 - DNA, 13 bp, Artificial Sequence
  Oligonucleotide for detection of SNP TSC0005722
aaaactaataaat

SEQ ID NO: 158349 - DNA, 13 bp, Artificial Sequence
  Oligonucleotide for detection of SNP TSC0039874
gtatacgttatta

SEQ ID NO: 158350 - DNA, 13 bp, Artificial Sequence
  Oligonucleotide for detection of SNP TSC0039874
taataacgtatac

SEQ ID NO: 158351 - DNA, 13 bp, Artificial Sequence
  Oligonucleotide for detection of SNP TSC0039874
tggtggtgtgtgy

SEQ ID NO: 158352 - DNA, 13 bp, Artificial Sequence
  Oligonucleotide for detection of SNP TSC0039874
rcacacaccacca

SEQ ID NO: 158353 - DNA, 13 bp, Artificial Sequence
  Oligonucleotide for detection of SNP TSC0039874
tggtggcgtgtgy

SEQ ID NO: 158354 - DNA, 13 bp, Artificial Sequence
  Oligonucleotide for detection of SNP TSC0039874
rcacacgccacca

SEQ ID NO: 158355 - DNA, 13 bp, Artificial Sequence
  Oligonucleotide for detection of SNP TSC0039875
tgtttttgaatty

SEQ ID NO: 158356 - DNA, 13 bp, Artificial Sequence
  Oligonucleotide for detection of SNP TSC0039875
raattcaaaaaca

SEQ ID NO: 158357 - DNA, 13 bp, Artificial Sequence
  Oligonucleotide for detection of SNP TSC0039875
tgttttcgaatty

SEQ ID NO: 158358 - DNA, 13 bp, Artificial Sequence
  Oligonucleotide for detection of SNP TSC0039875
raattcgaaaaca

SEQ ID NO: 158359 - DNA, 13 bp, Artificial Sequence
  Oligonucleotide for detection of SNP TSC0039875
gaatttgagaata

SEQ ID NO: 158360 - DNA, 13 bp, Artificial Sequence
  Oligonucleotide for detection of SNP TSC0039875
tattctcaaattc

SEQ ID NO: 158361 - DNA, 13 bp, Artificial Sequence
  Oligonucleotide for detection of SNP TSC0039875
gaatttaagaata

SEQ ID NO: 158362 - DNA, 13 bp, Artificial Sequence
  Oligonucleotide for detection of SNP TSC0039875
tattcttaaattc

SEQ ID NO: 158363 - DNA, 13 bp, Artificial Sequence
  Oligonucleotide for detection of SNP TSC0039875
gaattcgagaata

SEQ ID NO: 158364 - DNA, 13 bp, Artificial Sequence
  Oligonucleotide for detection of SNP TSC0039875
tattctcgaattc

SEQ ID NO: 158365 - DNA, 13 bp, Artificial Sequence
  Oligonucleotide for detection of SNP TSC0039877
tttaattgtttaa

SEQ ID NO: 158366 - DNA, 13 bp, Artificial Sequence
  Oligonucleotide for detection of SNP TSC0039877
ttaaacaattaaa

SEQ ID NO: 158367 - DNA, 13 bp, Artificial Sequence
  Oligonucleotide for detection of SNP TSC0039877
tttaatcgtttaa

SEQ ID NO: 158368 - DNA, 13 bp, Artificial Sequence
  Oligonucleotide for detection of SNP TSC0039877
ttaaacgattaaa

SEQ ID NO: 158369 - DNA, 13 bp, Artificial Sequence
  Oligonucleotide for detection of SNP TSC0039877
ttaagtgattggg

SEQ ID NO: 158370 - DNA, 13 bp, Artificial Sequence
  Oligonucleotide for detection of SNP TSC0039877
cccaatcacttaa

SEQ ID NO: 158371 - DNA, 13 bp, Artificial Sequence
  Oligonucleotide for detection of SNP TSC0039877
ttaagtaattggg

SEQ ID NO: 158372 - DNA, 13 bp, Artificial Sequence
  Oligonucleotide for detection of SNP TSC0039877
cccaattacttaa

SEQ ID NO: 158373 - DNA, 13 bp, Artificial Sequence
  Oligonucleotide for detection of SNP TSC0039877
ttaagcgattggg

SEQ ID NO: 158374 - DNA, 13 bp, Artificial Sequence
  Oligonucleotide for detection of SNP TSC0039877
cccaatcgcttaa

SEQ ID NO: 158375 - DNA, 13 bp, Artificial Sequence
  Oligonucleotide for detection of SNP TSC0039880
gtgagtgtttgta

SEQ ID NO: 158376 - DNA, 13 bp, Artificial Sequence
  Oligonucleotide for detection of SNP TSC0039880
tacaaacactcac

SEQ ID NO: 158377 - DNA, 13 bp, Artificial Sequence
  Oligonucleotide for detection of SNP TSC0039880
gtgagtatttgta

SEQ ID NO: 158378 - DNA, 13 bp, Artificial Sequence
  Oligonucleotide for detection of SNP TSC0039880
tacaaatactcac

SEQ ID NO: 158379 - DNA, 13 bp, Artificial Sequence
  Oligonucleotide for detection of SNP TSC0039880
gcgagtgtttgta

SEQ ID NO: 158380 - DNA, 13 bp, Artificial Sequence
  Oligonucleotide for detection of SNP TSC0039880
tacaaacactcgc

SEQ ID NO: 158381 - DNA, 13 bp, Artificial Sequence
  Oligonucleotide for detection of SNP TSC0039880
gcgagtatttgta

SEQ ID NO: 158382 - DNA, 13 bp, Artificial Sequence
  Oligonucleotide for detection of SNP TSC0039880
tacaaatactcgc

SEQ ID NO: 158383 - DNA, 13 bp, Artificial Sequence
  Oligonucleotide for detection of SNP TSC0039880
gtgagcgtttgta

SEQ ID NO: 158384 - DNA, 13 bp, Artificial Sequence
  Oligonucleotide for detection of SNP TSC0039880
tacaaacgctcac

SEQ ID NO: 158385 - DNA, 13 bp, Artificial Sequence
  Oligonucleotide for detection of SNP TSC0039880
gcgagcgtttgta

SEQ ID NO: 158386 - DNA, 13 bp, Artificial Sequence
  Oligonucleotide for detection of SNP TSC0039880
tacaaacgctcgc

SEQ ID NO: 158387 - DNA, 13 bp, Artificial Sequence
  Oligonucleotide for detection of SNP TSC0039882
atttaaagtttag

SEQ ID NO: 158388 - DNA, 13 bp, Artificial Sequence
  Oligonucleotide for detection of SNP TSC0039882
ctaaactttaaat

SEQ ID NO: 158389 - DNA, 13 bp, Artificial Sequence
  Oligonucleotide for detection of SNP TSC0039882
atttaatgtttag

SEQ ID NO: 158390 - DNA, 13 bp, Artificial Sequence
  Oligonucleotide for detection of SNP TSC0039882
ctaaacattaaat

SEQ ID NO: 158391 - DNA, 13 bp, Artificial Sequence
  Oligonucleotide for detection of SNP TSC0039882
ttgagttttgaat

SEQ ID NO: 158392 - DNA, 13 bp, Artificial Sequence
  Oligonucleotide for detection of SNP TSC0039882
attcaaaactcaa

SEQ ID NO: 158393 - DNA, 13 bp, Artificial Sequence
  Oligonucleotide for detection of SNP TSC0039882
ttgagtattgaat

SEQ ID NO: 158394 - DNA, 13 bp, Artificial Sequence
  Oligonucleotide for detection of SNP TSC0039882
attcaatactcaa

SEQ ID NO: 158395 - DNA, 13 bp, Artificial Sequence
  Oligonucleotide for detection of SNP TSC0039883
aggtattggggay

SEQ ID NO: 158396 - DNA, 13 bp, Artificial Sequence
  Oligonucleotide for detection of SNP TSC0039883
rtccccaatacct

SEQ ID NO: 158397 - DNA, 13 bp, Artificial Sequence
  Oligonucleotide for detection of SNP TSC0039883
aggtatcggggay

SEQ ID NO: 158398 - DNA, 13 bp, Artificial Sequence
  Oligonucleotide for detection of SNP TSC0039883
rtccccgatacct

SEQ ID NO: 158399 - DNA, 13 bp, Artificial Sequence
  Oligonucleotide for detection of SNP TSC0007315
tatatatatgttt

SEQ ID NO: 158400 - DNA, 13 bp, Artificial Sequence
  Oligonucleotide for detection of SNP TSC0007315
aaacatatatata

SEQ ID NO: 158401 - DNA, 13 bp, Artificial Sequence
  Oligonucleotide for detection of SNP TSC0007315
tatatagatgttt

SEQ ID NO: 158402 - DNA, 13 bp, Artificial Sequence
  Oligonucleotide for detection of SNP TSC0007315
aaacatctatata

SEQ ID NO: 158403 - DNA, 13 bp, Artificial Sequence
  Oligonucleotide for detection of SNP TSC0007315
agatatgtgtgtg

SEQ ID NO: 158404 - DNA, 13 bp, Artificial Sequence
  Oligonucleotide for detection of SNP TSC0007315
cacacacatatct

SEQ ID NO: 158405 - DNA, 13 bp, Artificial Sequence
  Oligonucleotide for detection of SNP TSC0007315
agatatttgtgtg

SEQ ID NO: 158406 - DNA, 13 bp, Artificial Sequence
  Oligonucleotide for detection of SNP TSC0007315
cacacaaatatct

SEQ ID NO: 158407 - DNA, 13 bp, Artificial Sequence
  Oligonucleotide for detection of SNP TSC0039884
ttaaatttaagag

SEQ ID NO: 158408 - DNA, 13 bp, Artificial Sequence
  Oligonucleotide for detection of SNP TSC0039884
ctcttaaatttaa

SEQ ID NO: 158409 - DNA, 13 bp, Artificial Sequence
  Oligonucleotide for detection of SNP TSC0039884
ttaaatgtaagag

SEQ ID NO: 158410 - DNA, 13 bp, Artificial Sequence
  Oligonucleotide for detection of SNP TSC0039884
ctcttacatttaa

SEQ ID NO: 158411 - DNA, 13 bp, Artificial Sequence
  Oligonucleotide for detection of SNP TSC0039884
ttaaacgtaagag

SEQ ID NO: 158412 - DNA, 13 bp, Artificial Sequence
  Oligonucleotide for detection of SNP TSC0039884
ctcttacgtttaa

SEQ ID NO: 158413 - DNA, 13 bp, Artificial Sequence
  Oligonucleotide for detection of SNP TSC0039884
tttttacgtttaa

SEQ ID NO: 158414 - DNA, 13 bp, Artificial Sequence
  Oligonucleotide for detection of SNP TSC0039884
ttaaacgtaaaaa

SEQ ID NO: 158415 - DNA, 13 bp, Artificial Sequence
  Oligonucleotide for detection of SNP TSC0039886
ttttttattaaat

SEQ ID NO: 158416 - DNA, 13 bp, Artificial Sequence
  Oligonucleotide for detection of SNP TSC0039886
atttaataaaaaa

SEQ ID NO: 158417 - DNA, 13 bp, Artificial Sequence
  Oligonucleotide for detection of SNP TSC0039886
atttagtaaaaaa

SEQ ID NO: 158418 - DNA, 13 bp, Artificial Sequence
  Oligonucleotide for detection of SNP TSC0039886
ttttttactaaat

SEQ ID NO: 158419 - DNA, 13 bp, Artificial Sequence
  Oligonucleotide for detection of SNP TSC0039886
atttaggaaaaaa

SEQ ID NO: 158420 - DNA, 13 bp, Artificial Sequence
  Oligonucleotide for detection of SNP TSC0039886
ttttttcctaaat

SEQ ID NO: 158421 - DNA, 13 bp, Artificial Sequence
  Oligonucleotide for detection of SNP TSC0039886
atttagaaaaaaa

SEQ ID NO: 158422 - DNA, 13 bp, Artificial Sequence
  Oligonucleotide for detection of SNP TSC0039886
tttttttctaaat

SEQ ID NO: 158423 - DNA, 13 bp, Artificial Sequence
  Oligonucleotide for detection of SNP TSC0039887
gtttttttttggy

SEQ ID NO: 158424 - DNA, 13 bp, Artificial Sequence
  Oligonucleotide for detection of SNP TSC0039887
rccaaaaaaaaac

SEQ ID NO: 158425 - DNA, 13 bp, Artificial Sequence
  Oligonucleotide for detection of SNP TSC0039887
gttaaatagaagy

SEQ ID NO: 158426 - DNA, 13 bp, Artificial Sequence
  Oligonucleotide for detection of SNP TSC0039887
rcttctatttaac

SEQ ID NO: 158427 - DNA, 13 bp, Artificial Sequence
  Oligonucleotide for detection of SNP TSC0039887
gttaaagagaagy

SEQ ID NO: 158428 - DNA, 13 bp, Artificial Sequence
  Oligonucleotide for detection of SNP TSC0039887
rcttctctttaac

SEQ ID NO: 158429 - DNA, 13 bp, Artificial Sequence
  Oligonucleotide for detection of SNP TSC0039887
gttaaaaagaagy

SEQ ID NO: 158430 - DNA, 13 bp, Artificial Sequence
  Oligonucleotide for detection of SNP TSC0039887
rcttctttttaac

SEQ ID NO: 158431 - DNA, 13 bp, Artificial Sequence
  Oligonucleotide for detection of SNP TSC0039888
ttttgagtaagtt

SEQ ID NO: 158432 - DNA, 13 bp, Artificial Sequence
  Oligonucleotide for detection of SNP TSC0039888
aacttactcaaaa

SEQ ID NO: 158433 - DNA, 13 bp, Artificial Sequence
  Oligonucleotide for detection of SNP TSC0039888
ttttgaataagtt

SEQ ID NO: 158434 - DNA, 13 bp, Artificial Sequence
  Oligonucleotide for detection of SNP TSC0039888
aacttattcaaaa

SEQ ID NO: 158435 - DNA, 13 bp, Artificial Sequence
  Oligonucleotide for detection of SNP TSC0039889
ttttatataaaty

SEQ ID NO: 158436 - DNA, 13 bp, Artificial Sequence
  Oligonucleotide for detection of SNP TSC0039889
ratttatataaaa

SEQ ID NO: 158437 - DNA, 13 bp, Artificial Sequence
  Oligonucleotide for detection of SNP TSC0039889
ttttatgtaaaty

SEQ ID NO: 158438 - DNA, 13 bp, Artificial Sequence
  Oligonucleotide for detection of SNP TSC0039889
ratttacataaaa

SEQ ID NO: 158439 - DNA, 13 bp, Artificial Sequence
  Oligonucleotide for detection of SNP TSC0039889
ttttacgtaaaty

SEQ ID NO: 158440 - DNA, 13 bp, Artificial Sequence
  Oligonucleotide for detection of SNP TSC0039889
ratttacgtaaaa

SEQ ID NO: 158441 - DNA, 13 bp, Artificial Sequence
  Oligonucleotide for detection of SNP TSC0039889
ggtttatgtagaa

SEQ ID NO: 158442 - DNA, 13 bp, Artificial Sequence
  Oligonucleotide for detection of SNP TSC0039889
ttctacataaacc

SEQ ID NO: 158443 - DNA, 13 bp, Artificial Sequence
  Oligonucleotide for detection of SNP TSC0039889
ggtttacgtagaa

SEQ ID NO: 158444 - DNA, 13 bp, Artificial Sequence
  Oligonucleotide for detection of SNP TSC0039889
ttctacgtaaacc

SEQ ID NO: 158445 - DNA, 13 bp, Artificial Sequence
  Oligonucleotide for detection of SNP TSC0039892
gggttaaaagttt

SEQ ID NO: 158446 - DNA, 13 bp, Artificial Sequence
  Oligonucleotide for detection of SNP TSC0039892
aaacttttaaccc

SEQ ID NO: 158447 - DNA, 13 bp, Artificial Sequence
  Oligonucleotide for detection of SNP TSC0039892
gggttagaagttt

SEQ ID NO: 158448 - DNA, 13 bp, Artificial Sequence
  Oligonucleotide for detection of SNP TSC0039892
aaacttctaaccc

SEQ ID NO: 158449 - DNA, 13 bp, Artificial Sequence
  Oligonucleotide for detection of SNP TSC0039893
tagaagagtaaaa

SEQ ID NO: 158450 - DNA, 13 bp, Artificial Sequence
  Oligonucleotide for detection of SNP TSC0039893
ttttactcttcta

SEQ ID NO: 158451 - DNA, 13 bp, Artificial Sequence
  Oligonucleotide for detection of SNP TSC0039893
tagaagggtaaaa

SEQ ID NO: 158452 - DNA, 13 bp, Artificial Sequence
  Oligonucleotide for detection of SNP TSC0039893
ttttacccttcta

SEQ ID NO: 158453 - DNA, 13 bp, Artificial Sequence
  Oligonucleotide for detection of SNP TSC0039894
ttttattgttatt

SEQ ID NO: 158454 - DNA, 13 bp, Artificial Sequence
  Oligonucleotide for detection of SNP TSC0039894
aataacaataaaa

SEQ ID NO: 158455 - DNA, 13 bp, Artificial Sequence
  Oligonucleotide for detection of SNP TSC0039894
ttttatcgttatt

SEQ ID NO: 158456 - DNA, 13 bp, Artificial Sequence
  Oligonucleotide for detection of SNP TSC0039894
aataacgataaaa

SEQ ID NO: 158457 - DNA, 13 bp, Artificial Sequence
  Oligonucleotide for detection of SNP TSC0039894
agtggtgataaag

SEQ ID NO: 158458 - DNA, 13 bp, Artificial Sequence
  Oligonucleotide for detection of SNP TSC0039894
ctttatcaccact

SEQ ID NO: 158459 - DNA, 13 bp, Artificial Sequence
  Oligonucleotide for detection of SNP TSC0039894
agtggtaataaag

SEQ ID NO: 158460 - DNA, 13 bp, Artificial Sequence
  Oligonucleotide for detection of SNP TSC0039894
ctttattaccact

SEQ ID NO: 158461 - DNA, 13 bp, Artificial Sequence
  Oligonucleotide for detection of SNP TSC0039894
agtggcgataaag

SEQ ID NO: 158462 - DNA, 13 bp, Artificial Sequence
  Oligonucleotide for detection of SNP TSC0039894
ctttatcgccact

SEQ ID NO: 158463 - DNA, 13 bp, Artificial Sequence
  Oligonucleotide for detection of SNP TSC0039895
attgtaattttat

SEQ ID NO: 158464 - DNA, 13 bp, Artificial Sequence
  Oligonucleotide for detection of SNP TSC0039895
ataaaattacaat

SEQ ID NO: 158465 - DNA, 13 bp, Artificial Sequence
  Oligonucleotide for detection of SNP TSC0039895
attgtatttttat

SEQ ID NO: 158466 - DNA, 13 bp, Artificial Sequence
  Oligonucleotide for detection of SNP TSC0039895
ataaaaatacaat

SEQ ID NO: 158467 - DNA, 13 bp, Artificial Sequence
  Oligonucleotide for detection of SNP TSC0039895
ataaaattataat

SEQ ID NO: 158468 - DNA, 13 bp, Artificial Sequence
  Oligonucleotide for detection of SNP TSC0039895
attataattttat

SEQ ID NO: 158469 - DNA, 13 bp, Artificial Sequence
  Oligonucleotide for detection of SNP TSC0039895
ataaaagtataat

SEQ ID NO: 158470 - DNA, 13 bp, Artificial Sequence
  Oligonucleotide for detection of SNP TSC0039895
attatacttttat

SEQ ID NO: 158471 - DNA, 13 bp, Artificial Sequence
  Oligonucleotide for detection of SNP TSC0039896
tattaggaaggta

SEQ ID NO: 158472 - DNA, 13 bp, Artificial Sequence
  Oligonucleotide for detection of SNP TSC0039896
taccttcctaata

SEQ ID NO: 158473 - DNA, 13 bp, Artificial Sequence
  Oligonucleotide for detection of SNP TSC0039896
tattagaaaggta

SEQ ID NO: 158474 - DNA, 13 bp, Artificial Sequence
  Oligonucleotide for detection of SNP TSC0039896
tacctttctaata

SEQ ID NO: 158475 - DNA, 13 bp, Artificial Sequence
  Oligonucleotide for detection of SNP TSC0039897
attgttattgtta

SEQ ID NO: 158476 - DNA, 13 bp, Artificial Sequence
  Oligonucleotide for detection of SNP TSC0039897
taacaataacaat

SEQ ID NO: 158477 - DNA, 13 bp, Artificial Sequence
  Oligonucleotide for detection of SNP TSC0039897
attgtttttgtta

SEQ ID NO: 158478 - DNA, 13 bp, Artificial Sequence
  Oligonucleotide for detection of SNP TSC0039897
taacaaaaacaat

SEQ ID NO: 158479 - DNA, 13 bp, Artificial Sequence
  Oligonucleotide for detection of SNP TSC0039897
atcgttattgtta

SEQ ID NO: 158480 - DNA, 13 bp, Artificial Sequence
  Oligonucleotide for detection of SNP TSC0039897
taacaataacgat

SEQ ID NO: 158481 - DNA, 13 bp, Artificial Sequence
  Oligonucleotide for detection of SNP TSC0039897
atcgtttttgtta

SEQ ID NO: 158482 - DNA, 13 bp, Artificial Sequence
  Oligonucleotide for detection of SNP TSC0039897
taacaaaaacgat

SEQ ID NO: 158483 - DNA, 13 bp, Artificial Sequence
  Oligonucleotide for detection of SNP TSC0039897
tgatagtggtgat

SEQ ID NO: 158484 - DNA, 13 bp, Artificial Sequence
  Oligonucleotide for detection of SNP TSC0039897
atcaccactatca

SEQ ID NO: 158485 - DNA, 13 bp, Artificial Sequence
  Oligonucleotide for detection of SNP TSC0039897
tgatagaggtgat

SEQ ID NO: 158486 - DNA, 13 bp, Artificial Sequence
  Oligonucleotide for detection of SNP TSC0039897
atcacctctatca

SEQ ID NO: 158487 - DNA, 13 bp, Artificial Sequence
  Oligonucleotide for detection of SNP TSC0039897
tgatagtggcgat

SEQ ID NO: 158488 - DNA, 13 bp, Artificial Sequence
  Oligonucleotide for detection of SNP TSC0039897
atcgccactatca

SEQ ID NO: 158489 - DNA, 13 bp, Artificial Sequence
  Oligonucleotide for detection of SNP TSC0039897
tgatagaggcgat

SEQ ID NO: 158490 - DNA, 13 bp, Artificial Sequence
  Oligonucleotide for detection of SNP TSC0039897
atcgcctctatca

SEQ ID NO: 158491 - DNA, 13 bp, Artificial Sequence
  Oligonucleotide for detection of SNP TSC0039901
tttatgagggtag

SEQ ID NO: 158492 - DNA, 13 bp, Artificial Sequence
  Oligonucleotide for detection of SNP TSC0039901
ctaccctcataaa

SEQ ID NO: 158493 - DNA, 13 bp, Artificial Sequence
  Oligonucleotide for detection of SNP TSC0039901
tttatgtgggtag

SEQ ID NO: 158494 - DNA, 13 bp, Artificial Sequence
  Oligonucleotide for detection of SNP TSC0039901
ctacccacataaa

SEQ ID NO: 158495 - DNA, 13 bp, Artificial Sequence
  Oligonucleotide for detection of SNP TSC0039901
ttgtttttatgaa

SEQ ID NO: 158496 - DNA, 13 bp, Artificial Sequence
  Oligonucleotide for detection of SNP TSC0039901
ttcataaaaacaa

SEQ ID NO: 158497 - DNA, 13 bp, Artificial Sequence
  Oligonucleotide for detection of SNP TSC0039901
ttgtttatatgaa

SEQ ID NO: 158498 - DNA, 13 bp, Artificial Sequence
  Oligonucleotide for detection of SNP TSC0039901
ttcatataaacaa

SEQ ID NO: 158499 - DNA, 13 bp, Artificial Sequence
  Oligonucleotide for detection of SNP TSC0039902
taaaagaaatatt

SEQ ID NO: 158500 - DNA, 13 bp, Artificial Sequence
  Oligonucleotide for detection of SNP TSC0039902
aatatttctttta

SEQ ID NO: 158501 - DNA, 13 bp, Artificial Sequence
  Oligonucleotide for detection of SNP TSC0039902
taaaaggaatatt

SEQ ID NO: 158502 - DNA, 13 bp, Artificial Sequence
  Oligonucleotide for detection of SNP TSC0039902
aatattcctttta

SEQ ID NO: 158503 - DNA, 13 bp, Artificial Sequence
  Oligonucleotide for detection of SNP TSC0039903
aatttagttaagy

SEQ ID NO: 158504 - DNA, 13 bp, Artificial Sequence
  Oligonucleotide for detection of SNP TSC0039903
rcttaactaaatt

SEQ ID NO: 158505 - DNA, 13 bp, Artificial Sequence
  Oligonucleotide for detection of SNP TSC0039903
aatttaattaagy

SEQ ID NO: 158506 - DNA, 13 bp, Artificial Sequence
  Oligonucleotide for detection of SNP TSC0039903
rcttaattaaatt

SEQ ID NO: 158507 - DNA, 13 bp, Artificial Sequence
  Oligonucleotide for detection of SNP TSC0039904
aggaatatttaat

SEQ ID NO: 158508 - DNA, 13 bp, Artificial Sequence
  Oligonucleotide for detection of SNP TSC0039904
attaaatattcct

SEQ ID NO: 158509 - DNA, 13 bp, Artificial Sequence
  Oligonucleotide for detection of SNP TSC0039904
aggaatgtttaat

SEQ ID NO: 158510 - DNA, 13 bp, Artificial Sequence
  Oligonucleotide for detection of SNP TSC0039904
attaaacattcct

SEQ ID NO: 158511 - DNA, 13 bp, Artificial Sequence
  Oligonucleotide for detection of SNP TSC0039904
aggaacgtttaat

SEQ ID NO: 158512 - DNA, 13 bp, Artificial Sequence
  Oligonucleotide for detection of SNP TSC0039904
attaaacgttcct

SEQ ID NO: 158513 - DNA, 13 bp, Artificial Sequence
  Oligonucleotide for detection of SNP TSC0039904
attgagtgttttt

SEQ ID NO: 158514 - DNA, 13 bp, Artificial Sequence
  Oligonucleotide for detection of SNP TSC0039904
aaaaacactcaat

SEQ ID NO: 158515 - DNA, 13 bp, Artificial Sequence
  Oligonucleotide for detection of SNP TSC0039904
attgagcgttttt

SEQ ID NO: 158516 - DNA, 13 bp, Artificial Sequence
  Oligonucleotide for detection of SNP TSC0039904
aaaaacgctcaat

SEQ ID NO: 158517 - DNA, 13 bp, Artificial Sequence
  Oligonucleotide for detection of SNP TSC0039905
atatatatttaty

SEQ ID NO: 158518 - DNA, 13 bp, Artificial Sequence
  Oligonucleotide for detection of SNP TSC0039905
rataaatatatat

SEQ ID NO: 158519 - DNA, 13 bp, Artificial Sequence
  Oligonucleotide for detection of SNP TSC0039905
atatatgtttaty

SEQ ID NO: 158520 - DNA, 13 bp, Artificial Sequence
  Oligonucleotide for detection of SNP TSC0039905
rataaacatatat

SEQ ID NO: 158521 - DNA, 13 bp, Artificial Sequence
  Oligonucleotide for detection of SNP TSC0039905
atatacgtttaty

SEQ ID NO: 158522 - DNA, 13 bp, Artificial Sequence
  Oligonucleotide for detection of SNP TSC0039905
rataaacgtatat

SEQ ID NO: 158523 - DNA, 13 bp, Artificial Sequence
  Oligonucleotide for detection of SNP TSC0039905
gatgggtgtgtgt

SEQ ID NO: 158524 - DNA, 13 bp, Artificial Sequence
  Oligonucleotide for detection of SNP TSC0039905
acacacacccatc

SEQ ID NO: 158525 - DNA, 13 bp, Artificial Sequence
  Oligonucleotide for detection of SNP TSC0039905
gatgggcgtgtgt

SEQ ID NO: 158526 - DNA, 13 bp, Artificial Sequence
  Oligonucleotide for detection of SNP TSC0039905
acacacgcccatc

SEQ ID NO: 158527 - DNA, 13 bp, Artificial Sequence
  Oligonucleotide for detection of SNP TSC0039906
aattaaatttaga

SEQ ID NO: 158528 - DNA, 13 bp, Artificial Sequence
  Oligonucleotide for detection of SNP TSC0039906
tctaaatttaatt

SEQ ID NO: 158529 - DNA, 13 bp, Artificial Sequence
  Oligonucleotide for detection of SNP TSC0039906
aattaagtttaga

SEQ ID NO: 158530 - DNA, 13 bp, Artificial Sequence
  Oligonucleotide for detection of SNP TSC0039906
tctaaacttaatt

SEQ ID NO: 158531 - DNA, 13 bp, Artificial Sequence
  Oligonucleotide for detection of SNP TSC0039907
gattgattggttt

SEQ ID NO: 158532 - DNA, 13 bp, Artificial Sequence
  Oligonucleotide for detection of SNP TSC0039907
aaaccaatcaatc

SEQ ID NO: 158533 - DNA, 13 bp, Artificial Sequence
  Oligonucleotide for detection of SNP TSC0039907
gattgagtggttt

SEQ ID NO: 158534 - DNA, 13 bp, Artificial Sequence
  Oligonucleotide for detection of SNP TSC0039907
aaaccactcaatc

SEQ ID NO: 158535 - DNA, 13 bp, Artificial Sequence
  Oligonucleotide for detection of SNP TSC0039907
aagttagttagty

SEQ ID NO: 158536 - DNA, 13 bp, Artificial Sequence
  Oligonucleotide for detection of SNP TSC0039907
ractaactaactt

SEQ ID NO: 158537 - DNA, 13 bp, Artificial Sequence
  Oligonucleotide for detection of SNP TSC0039907
aagttatttagty

SEQ ID NO: 158538 - DNA, 13 bp, Artificial Sequence
  Oligonucleotide for detection of SNP TSC0039907
ractaaataactt

SEQ ID NO: 158539 - DNA, 13 bp, Artificial Sequence
  Oligonucleotide for detection of SNP TSC0039908
ggttagaaggaga

SEQ ID NO: 158540 - DNA, 13 bp, Artificial Sequence
  Oligonucleotide for detection of SNP TSC0039908
tctccttctaacc

SEQ ID NO: 158541 - DNA, 13 bp, Artificial Sequence
  Oligonucleotide for detection of SNP TSC0039908
ggttaggaggaga

SEQ ID NO: 158542 - DNA, 13 bp, Artificial Sequence
  Oligonucleotide for detection of SNP TSC0039908
tctcctcctaacc

SEQ ID NO: 158543 - DNA, 13 bp, Artificial Sequence
  Oligonucleotide for detection of SNP TSC0039909
atatagtggaata

SEQ ID NO: 158544 - DNA, 13 bp, Artificial Sequence
  Oligonucleotide for detection of SNP TSC0039909
tattccactatat

SEQ ID NO: 158545 - DNA, 13 bp, Artificial Sequence
  Oligonucleotide for detection of SNP TSC0039909
atataggggaata

SEQ ID NO: 158546 - DNA, 13 bp, Artificial Sequence
  Oligonucleotide for detection of SNP TSC0039909
tattcccctatat

SEQ ID NO: 158547 - DNA, 13 bp, Artificial Sequence
  Oligonucleotide for detection of SNP TSC0039909
tattttattgtgt

SEQ ID NO: 158548 - DNA, 13 bp, Artificial Sequence
  Oligonucleotide for detection of SNP TSC0039909
acacaataaaata

SEQ ID NO: 158549 - DNA, 13 bp, Artificial Sequence
  Oligonucleotide for detection of SNP TSC0039909
tatttttttgtgt

SEQ ID NO: 158550 - DNA, 13 bp, Artificial Sequence
  Oligonucleotide for detection of SNP TSC0039909
acacaaaaaaata

SEQ ID NO: 158551 - DNA, 13 bp, Artificial Sequence
  Oligonucleotide for detection of SNP TSC0039910
aatttaaaataga

SEQ ID NO: 158552 - DNA, 13 bp, Artificial Sequence
  Oligonucleotide for detection of SNP TSC0039910
tctattttaaatt

SEQ ID NO: 158553 - DNA, 13 bp, Artificial Sequence
  Oligonucleotide for detection of SNP TSC0039910
aatttagaataga

SEQ ID NO: 158554 - DNA, 13 bp, Artificial Sequence
  Oligonucleotide for detection of SNP TSC0039910
tctattctaaatt

SEQ ID NO: 158555 - DNA, 13 bp, Artificial Sequence
  Oligonucleotide for detection of SNP TSC0039913
atatataaagaag

SEQ ID NO: 158556 - DNA, 13 bp, Artificial Sequence
  Oligonucleotide for detection of SNP TSC0039913
cttctttatatat

SEQ ID NO: 158557 - DNA, 13 bp, Artificial Sequence
  Oligonucleotide for detection of SNP TSC0039913
atatatgaagaag

SEQ ID NO: 158558 - DNA, 13 bp, Artificial Sequence
  Oligonucleotide for detection of SNP TSC0039913
cttcttcatatat

SEQ ID NO: 158559 - DNA, 13 bp, Artificial Sequence
  Oligonucleotide for detection of SNP TSC0039913
atatacgaagaag

SEQ ID NO: 158560 - DNA, 13 bp, Artificial Sequence
  Oligonucleotide for detection of SNP TSC0039913
cttcttcgtatat

SEQ ID NO: 158561 - DNA, 13 bp, Artificial Sequence
  Oligonucleotide for detection of SNP TSC0039913
tttttttgtgtgt

SEQ ID NO: 158562 - DNA, 13 bp, Artificial Sequence
  Oligonucleotide for detection of SNP TSC0039913
acacacaaaaaaa

SEQ ID NO: 158563 - DNA, 13 bp, Artificial Sequence
  Oligonucleotide for detection of SNP TSC0039913
ttttttcgtgtgt

SEQ ID NO: 158564 - DNA, 13 bp, Artificial Sequence
  Oligonucleotide for detection of SNP TSC0039913
acacacgaaaaaa

SEQ ID NO: 158565 - DNA, 13 bp, Artificial Sequence
  Oligonucleotide for detection of SNP TSC0039914
tagattggattty

SEQ ID NO: 158566 - DNA, 13 bp, Artificial Sequence
  Oligonucleotide for detection of SNP TSC0039914
raaatccaatcta

SEQ ID NO: 158567 - DNA, 13 bp, Artificial Sequence
  Oligonucleotide for detection of SNP TSC0039915
tttgattatttta

SEQ ID NO: 158568 - DNA, 13 bp, Artificial Sequence
  Oligonucleotide for detection of SNP TSC0039915
taaaataatcaaa

SEQ ID NO: 158569 - DNA, 13 bp, Artificial Sequence
  Oligonucleotide for detection of SNP TSC0039915
tttgatgatttta

SEQ ID NO: 158570 - DNA, 13 bp, Artificial Sequence
  Oligonucleotide for detection of SNP TSC0039915
taaaatcatcaaa

SEQ ID NO: 158571 - DNA, 13 bp, Artificial Sequence
  Oligonucleotide for detection of SNP TSC0039915
tttgacgatttta

SEQ ID NO: 158572 - DNA, 13 bp, Artificial Sequence
  Oligonucleotide for detection of SNP TSC0039915
taaaatcgtcaaa

SEQ ID NO: 158573 - DNA, 13 bp, Artificial Sequence
  Oligonucleotide for detection of SNP TSC0039915
taaaatggttaaa

SEQ ID NO: 158574 - DNA, 13 bp, Artificial Sequence
  Oligonucleotide for detection of SNP TSC0039915
tttaaccatttta

SEQ ID NO: 158575 - DNA, 13 bp, Artificial Sequence
  Oligonucleotide for detection of SNP TSC0039915
taaaattgttaaa

SEQ ID NO: 158576 - DNA, 13 bp, Artificial Sequence
  Oligonucleotide for detection of SNP TSC0039915
tttaacaatttta

SEQ ID NO: 158577 - DNA, 13 bp, Artificial Sequence
  Oligonucleotide for detection of SNP TSC0039915
taaaatcgttaaa

SEQ ID NO: 158578 - DNA, 13 bp, Artificial Sequence
  Oligonucleotide for detection of SNP TSC0039915
tttaacgatttta

SEQ ID NO: 158579 - DNA, 13 bp, Artificial Sequence
  Oligonucleotide for detection of SNP TSC0039916
atttattataaaa

SEQ ID NO: 158580 - DNA, 13 bp, Artificial Sequence
  Oligonucleotide for detection of SNP TSC0039916
ttttataataaat

SEQ ID NO: 158581 - DNA, 13 bp, Artificial Sequence
  Oligonucleotide for detection of SNP TSC0039917
attattttaagty

SEQ ID NO: 158582 - DNA, 13 bp, Artificial Sequence
  Oligonucleotide for detection of SNP TSC0039917
racttaaaataat

SEQ ID NO: 158583 - DNA, 13 bp, Artificial Sequence
  Oligonucleotide for detection of SNP TSC0039917
attattgtaagty

SEQ ID NO: 158584 - DNA, 13 bp, Artificial Sequence
  Oligonucleotide for detection of SNP TSC0039917
racttacaataat

SEQ ID NO: 158585 - DNA, 13 bp, Artificial Sequence
  Oligonucleotide for detection of SNP TSC0039917
gatttagaatggt

SEQ ID NO: 158586 - DNA, 13 bp, Artificial Sequence
  Oligonucleotide for detection of SNP TSC0039917
accattctaaatc

SEQ ID NO: 158587 - DNA, 13 bp, Artificial Sequence
  Oligonucleotide for detection of SNP TSC0039917
gatttataatggt

SEQ ID NO: 158588 - DNA, 13 bp, Artificial Sequence
  Oligonucleotide for detection of SNP TSC0039917
accattataaatc

SEQ ID NO: 158589 - DNA, 13 bp, Artificial Sequence
  Oligonucleotide for detection of SNP TSC0039918
aaatgtatgttta

SEQ ID NO: 158590 - DNA, 13 bp, Artificial Sequence
  Oligonucleotide for detection of SNP TSC0039918
taaacatacattt

SEQ ID NO: 158591 - DNA, 13 bp, Artificial Sequence
  Oligonucleotide for detection of SNP TSC0039918
tagatatatattt

SEQ ID NO: 158592 - DNA, 13 bp, Artificial Sequence
  Oligonucleotide for detection of SNP TSC0039918
aaatatatatcta

SEQ ID NO: 158593 - DNA, 13 bp, Artificial Sequence
  Oligonucleotide for detection of SNP TSC0039918
tagatagatattt

SEQ ID NO: 158594 - DNA, 13 bp, Artificial Sequence
  Oligonucleotide for detection of SNP TSC0039918
aaatatctatcta

SEQ ID NO: 158595 - DNA, 13 bp, Artificial Sequence
  Oligonucleotide for detection of SNP TSC0039922
gtgattaatgtga

SEQ ID NO: 158596 - DNA, 13 bp, Artificial Sequence
  Oligonucleotide for detection of SNP TSC0039922
tcacattaatcac

SEQ ID NO: 158597 - DNA, 13 bp, Artificial Sequence
  Oligonucleotide for detection of SNP TSC0039922
gtgattgatgtga

SEQ ID NO: 158598 - DNA, 13 bp, Artificial Sequence
  Oligonucleotide for detection of SNP TSC0039922
tcacatcaatcac

SEQ ID NO: 158599 - DNA, 13 bp, Artificial Sequence
  Oligonucleotide for detection of SNP TSC0039922
gtgatcgatgtga

SEQ ID NO: 158600 - DNA, 13 bp, Artificial Sequence
  Oligonucleotide for detection of SNP TSC0039922
tcacatcgatcac

SEQ ID NO: 158601 - DNA, 13 bp, Artificial Sequence
  Oligonucleotide for detection of SNP TSC0039922
ttatattggttay

SEQ ID NO: 158602 - DNA, 13 bp, Artificial Sequence
  Oligonucleotide for detection of SNP TSC0039922
rtaaccaatataa

SEQ ID NO: 158603 - DNA, 13 bp, Artificial Sequence
  Oligonucleotide for detection of SNP TSC0039922
ttatatcggttay

SEQ ID NO: 158604 - DNA, 13 bp, Artificial Sequence
  Oligonucleotide for detection of SNP TSC0039922
rtaaccgatataa

SEQ ID NO: 158605 - DNA, 13 bp, Artificial Sequence
  Oligonucleotide for detection of SNP TSC0039923
tgatgtggaaata

SEQ ID NO: 158606 - DNA, 13 bp, Artificial Sequence
  Oligonucleotide for detection of SNP TSC0039923
tatttccacatca

SEQ ID NO: 158607 - DNA, 13 bp, Artificial Sequence
  Oligonucleotide for detection of SNP TSC0039923
tgatgtagaaata

SEQ ID NO: 158608 - DNA, 13 bp, Artificial Sequence
  Oligonucleotide for detection of SNP TSC0039923
tatttctacatca

SEQ ID NO: 158609 - DNA, 13 bp, Artificial Sequence
  Oligonucleotide for detection of SNP TSC0039924
gtgtaggggaggg

SEQ ID NO: 158610 - DNA, 13 bp, Artificial Sequence
  Oligonucleotide for detection of SNP TSC0039924
ccctcccctacac

SEQ ID NO: 158611 - DNA, 13 bp, Artificial Sequence
  Oligonucleotide for detection of SNP TSC0039924
gtgtagaggaggg

SEQ ID NO: 158612 - DNA, 13 bp, Artificial Sequence
  Oligonucleotide for detection of SNP TSC0039924
ccctcctctacac

SEQ ID NO: 158613 - DNA, 13 bp, Artificial Sequence
  Oligonucleotide for detection of SNP TSC0039927
tgtttttgttgat

SEQ ID NO: 158614 - DNA, 13 bp, Artificial Sequence
  Oligonucleotide for detection of SNP TSC0039927
atcaacaaaaaca

SEQ ID NO: 158615 - DNA, 13 bp, Artificial Sequence
  Oligonucleotide for detection of SNP TSC0039927
tgttttcgttgat

SEQ ID NO: 158616 - DNA, 13 bp, Artificial Sequence
  Oligonucleotide for detection of SNP TSC0039927
atcaacgaaaaca

SEQ ID NO: 158617 - DNA, 13 bp, Artificial Sequence
  Oligonucleotide for detection of SNP TSC0039927
attaatggaaata

SEQ ID NO: 158618 - DNA, 13 bp, Artificial Sequence
  Oligonucleotide for detection of SNP TSC0039927
tatttccattaat

SEQ ID NO: 158619 - DNA, 13 bp, Artificial Sequence
  Oligonucleotide for detection of SNP TSC0039927
attaatagaaata

SEQ ID NO: 158620 - DNA, 13 bp, Artificial Sequence
  Oligonucleotide for detection of SNP TSC0039927
tatttctattaat

SEQ ID NO: 158621 - DNA, 13 bp, Artificial Sequence
  Oligonucleotide for detection of SNP TSC0039927
attaacggaaata

SEQ ID NO: 158622 - DNA, 13 bp, Artificial Sequence
  Oligonucleotide for detection of SNP TSC0039927
tatttccgttaat

SEQ ID NO: 158623 - DNA, 13 bp, Artificial Sequence
  Oligonucleotide for detection of SNP TSC0039929
taatgaataagat

SEQ ID NO: 158624 - DNA, 13 bp, Artificial Sequence
  Oligonucleotide for detection of SNP TSC0039929
atcttattcatta

SEQ ID NO: 158625 - DNA, 13 bp, Artificial Sequence
  Oligonucleotide for detection of SNP TSC0039929
taatgagtaagat

SEQ ID NO: 158626 - DNA, 13 bp, Artificial Sequence
  Oligonucleotide for detection of SNP TSC0039929
atcttactcatta

SEQ ID NO: 158627 - DNA, 13 bp, Artificial Sequence
  Oligonucleotide for detection of SNP TSC0039930
ttggttgttaaay

SEQ ID NO: 158628 - DNA, 13 bp, Artificial Sequence
  Oligonucleotide for detection of SNP TSC0039930
rtttaacaaccaa

SEQ ID NO: 158629 - DNA, 13 bp, Artificial Sequence
  Oligonucleotide for detection of SNP TSC0039930
ttggttattaaay

SEQ ID NO: 158630 - DNA, 13 bp, Artificial Sequence
  Oligonucleotide for detection of SNP TSC0039930
rtttaataaccaa

SEQ ID NO: 158631 - DNA, 13 bp, Artificial Sequence
  Oligonucleotide for detection of SNP TSC0039931
ttggttaattttt

SEQ ID NO: 158632 - DNA, 13 bp, Artificial Sequence
  Oligonucleotide for detection of SNP TSC0039931
aaaaattaaccaa

SEQ ID NO: 158633 - DNA, 13 bp, Artificial Sequence
  Oligonucleotide for detection of SNP TSC0039931
ttggttgattttt

SEQ ID NO: 158634 - DNA, 13 bp, Artificial Sequence
  Oligonucleotide for detection of SNP TSC0039931
aaaaatcaaccaa

SEQ ID NO: 158635 - DNA, 13 bp, Artificial Sequence
  Oligonucleotide for detection of SNP TSC0039932
aatgttgtaggag

SEQ ID NO: 158636 - DNA, 13 bp, Artificial Sequence
  Oligonucleotide for detection of SNP TSC0039932
ctcctacaacatt

SEQ ID NO: 158637 - DNA, 13 bp, Artificial Sequence
  Oligonucleotide for detection of SNP TSC0039932
aatgttttaggag

SEQ ID NO: 158638 - DNA, 13 bp, Artificial Sequence
  Oligonucleotide for detection of SNP TSC0039932
ctcctaaaacatt

SEQ ID NO: 158639 - DNA, 13 bp, Artificial Sequence
  Oligonucleotide for detection of SNP TSC0039933
attaatatataaa

SEQ ID NO: 158640 - DNA, 13 bp, Artificial Sequence
  Oligonucleotide for detection of SNP TSC0039933
tttatatattaat

SEQ ID NO: 158641 - DNA, 13 bp, Artificial Sequence
  Oligonucleotide for detection of SNP TSC0039933
attaatttataaa

SEQ ID NO: 158642 - DNA, 13 bp, Artificial Sequence
  Oligonucleotide for detection of SNP TSC0039933
tttataaattaat

SEQ ID NO: 158643 - DNA, 13 bp, Artificial Sequence
  Oligonucleotide for detection of SNP TSC0039933
tttatatgttgat

SEQ ID NO: 158644 - DNA, 13 bp, Artificial Sequence
  Oligonucleotide for detection of SNP TSC0039933
atcaacatataaa

SEQ ID NO: 158645 - DNA, 13 bp, Artificial Sequence
  Oligonucleotide for detection of SNP TSC0039933
tttataagttgat

SEQ ID NO: 158646 - DNA, 13 bp, Artificial Sequence
  Oligonucleotide for detection of SNP TSC0039933
atcaacttataaa

SEQ ID NO: 158647 - DNA, 13 bp, Artificial Sequence
  Oligonucleotide for detection of SNP TSC0039934
taaattgagaggt

SEQ ID NO: 158648 - DNA, 13 bp, Artificial Sequence
  Oligonucleotide for detection of SNP TSC0039934
acctctcaattta

SEQ ID NO: 158649 - DNA, 13 bp, Artificial Sequence
  Oligonucleotide for detection of SNP TSC0039934
taaattaagaggt

SEQ ID NO: 158650 - DNA, 13 bp, Artificial Sequence
  Oligonucleotide for detection of SNP TSC0039934
acctcttaattta

SEQ ID NO: 158651 - DNA, 13 bp, Artificial Sequence
  Oligonucleotide for detection of SNP TSC0039934
taaatcgagaggt

SEQ ID NO: 158652 - DNA, 13 bp, Artificial Sequence
  Oligonucleotide for detection of SNP TSC0039934
acctctcgattta

SEQ ID NO: 158653 - DNA, 13 bp, Artificial Sequence
  Oligonucleotide for detection of SNP TSC0039935
agtatgtgtataa

SEQ ID NO: 158654 - DNA, 13 bp, Artificial Sequence
  Oligonucleotide for detection of SNP TSC0039935
ttatacacatact

SEQ ID NO: 158655 - DNA, 13 bp, Artificial Sequence
  Oligonucleotide for detection of SNP TSC0039935
agtatgcgtataa

SEQ ID NO: 158656 - DNA, 13 bp, Artificial Sequence
  Oligonucleotide for detection of SNP TSC0039935
ttatacgcatact

SEQ ID NO: 158657 - DNA, 13 bp, Artificial Sequence
  Oligonucleotide for detection of SNP TSC0039935
ttgtatgtatgtt

SEQ ID NO: 158658 - DNA, 13 bp, Artificial Sequence
  Oligonucleotide for detection of SNP TSC0039935
aacatacatacaa

SEQ ID NO: 158659 - DNA, 13 bp, Artificial Sequence
  Oligonucleotide for detection of SNP TSC0039935
ttgtatatatgtt

SEQ ID NO: 158660 - DNA, 13 bp, Artificial Sequence
  Oligonucleotide for detection of SNP TSC0039935
aacatatatacaa

SEQ ID NO: 158661 - DNA, 13 bp, Artificial Sequence
  Oligonucleotide for detection of SNP TSC0039935
ttgtacgtatgtt

SEQ ID NO: 158662 - DNA, 13 bp, Artificial Sequence
  Oligonucleotide for detection of SNP TSC0039935
aacatacgtacaa

SEQ ID NO: 158663 - DNA, 13 bp, Artificial Sequence
  Oligonucleotide for detection of SNP TSC0039936
gaggtgttgggay

SEQ ID NO: 158664 - DNA, 13 bp, Artificial Sequence
  Oligonucleotide for detection of SNP TSC0039936
rtcccaacacctc

SEQ ID NO: 158665 - DNA, 13 bp, Artificial Sequence
  Oligonucleotide for detection of SNP TSC0039936
gaggtggtgggay

SEQ ID NO: 158666 - DNA, 13 bp, Artificial Sequence
  Oligonucleotide for detection of SNP TSC0039936
rtcccaccacctc

SEQ ID NO: 158667 - DNA, 13 bp, Artificial Sequence
  Oligonucleotide for detection of SNP TSC0039936
gttttagtattty

SEQ ID NO: 158668 - DNA, 13 bp, Artificial Sequence
  Oligonucleotide for detection of SNP TSC0039936
raaatactaaaac

SEQ ID NO: 158669 - DNA, 13 bp, Artificial Sequence
  Oligonucleotide for detection of SNP TSC0039936
gttttattattty

SEQ ID NO: 158670 - DNA, 13 bp, Artificial Sequence
  Oligonucleotide for detection of SNP TSC0039936
raaataataaaac

SEQ ID NO: 158671 - DNA, 13 bp, Artificial Sequence
  Oligonucleotide for detection of SNP TSC0039938
tttaagtttaaty

SEQ ID NO: 158672 - DNA, 13 bp, Artificial Sequence
  Oligonucleotide for detection of SNP TSC0039938
rattaaacttaaa

SEQ ID NO: 158673 - DNA, 13 bp, Artificial Sequence
  Oligonucleotide for detection of SNP TSC0039938
tttaaggttaaty

SEQ ID NO: 158674 - DNA, 13 bp, Artificial Sequence
  Oligonucleotide for detection of SNP TSC0039938
rattaaccttaaa

SEQ ID NO: 158675 - DNA, 13 bp, Artificial Sequence
  Oligonucleotide for detection of SNP TSC0039938
gattagatttaaa

SEQ ID NO: 158676 - DNA, 13 bp, Artificial Sequence
  Oligonucleotide for detection of SNP TSC0039938
tttaaatctaatc

SEQ ID NO: 158677 - DNA, 13 bp, Artificial Sequence
  Oligonucleotide for detection of SNP TSC0039938
gattagttttaaa

SEQ ID NO: 158678 - DNA, 13 bp, Artificial Sequence
  Oligonucleotide for detection of SNP TSC0039938
tttaaaactaatc

SEQ ID NO: 158679 - DNA, 13 bp, Artificial Sequence
  Oligonucleotide for detection of SNP TSC0039939
ttggaaattagag

SEQ ID NO: 158680 - DNA, 13 bp, Artificial Sequence
  Oligonucleotide for detection of SNP TSC0039939
ctctaatttccaa

SEQ ID NO: 158681 - DNA, 13 bp, Artificial Sequence
  Oligonucleotide for detection of SNP TSC0039939
ttggaagttagag

SEQ ID NO: 158682 - DNA, 13 bp, Artificial Sequence
  Oligonucleotide for detection of SNP TSC0039939
ctctaacttccaa

SEQ ID NO: 158683 - DNA, 13 bp, Artificial Sequence
  Oligonucleotide for detection of SNP TSC0005340
gttaaatgtagta

SEQ ID NO: 158684 - DNA, 13 bp, Artificial Sequence
  Oligonucleotide for detection of SNP TSC0005340
tactacatttaac

SEQ ID NO: 158685 - DNA, 13 bp, Artificial Sequence
  Oligonucleotide for detection of SNP TSC0005340
gttaaacgtagta

SEQ ID NO: 158686 - DNA, 13 bp, Artificial Sequence
  Oligonucleotide for detection of SNP TSC0005340
tactacgtttaac

SEQ ID NO: 158687 - DNA, 13 bp, Artificial Sequence
  Oligonucleotide for detection of SNP TSC0005340
tgttatgtttgay

SEQ ID NO: 158688 - DNA, 13 bp, Artificial Sequence
  Oligonucleotide for detection of SNP TSC0005340
rtcaaacataaca

SEQ ID NO: 158689 - DNA, 13 bp, Artificial Sequence
  Oligonucleotide for detection of SNP TSC0005340
tgttatatttgay

SEQ ID NO: 158690 - DNA, 13 bp, Artificial Sequence
  Oligonucleotide for detection of SNP TSC0005340
rtcaaatataaca

SEQ ID NO: 158691 - DNA, 13 bp, Artificial Sequence
  Oligonucleotide for detection of SNP TSC0005340
tgttacgtttgay

SEQ ID NO: 158692 - DNA, 13 bp, Artificial Sequence
  Oligonucleotide for detection of SNP TSC0005340
rtcaaacgtaaca

SEQ ID NO: 158693 - DNA, 13 bp, Artificial Sequence
  Oligonucleotide for detection of SNP TSC0039940
aagtaggtgtatt

SEQ ID NO: 158694 - DNA, 13 bp, Artificial Sequence
  Oligonucleotide for detection of SNP TSC0039940
aatacacctactt

SEQ ID NO: 158695 - DNA, 13 bp, Artificial Sequence
  Oligonucleotide for detection of SNP TSC0039940
aagtagatgtatt

SEQ ID NO: 158696 - DNA, 13 bp, Artificial Sequence
  Oligonucleotide for detection of SNP TSC0039940
aatacatctactt

SEQ ID NO: 158697 - DNA, 13 bp, Artificial Sequence
  Oligonucleotide for detection of SNP TSC0039941
aggtattgtggta

SEQ ID NO: 158698 - DNA, 13 bp, Artificial Sequence
  Oligonucleotide for detection of SNP TSC0039941
taccacaatacct

SEQ ID NO: 158699 - DNA, 13 bp, Artificial Sequence
  Oligonucleotide for detection of SNP TSC0039941
tgttatagtattt

SEQ ID NO: 158700 - DNA, 13 bp, Artificial Sequence
  Oligonucleotide for detection of SNP TSC0039941
aaatactataaca

SEQ ID NO: 158701 - DNA, 13 bp, Artificial Sequence
  Oligonucleotide for detection of SNP TSC0039942
aagggtatataag

SEQ ID NO: 158702 - DNA, 13 bp, Artificial Sequence
  Oligonucleotide for detection of SNP TSC0039942
cttatataccctt

SEQ ID NO: 158703 - DNA, 13 bp, Artificial Sequence
  Oligonucleotide for detection of SNP TSC0039942
aagggtgtataag

SEQ ID NO: 158704 - DNA, 13 bp, Artificial Sequence
  Oligonucleotide for detection of SNP TSC0039942
cttatacaccctt

SEQ ID NO: 158705 - DNA, 13 bp, Artificial Sequence
  Oligonucleotide for detection of SNP TSC0039942
aagggcgtataag

SEQ ID NO: 158706 - DNA, 13 bp, Artificial Sequence
  Oligonucleotide for detection of SNP TSC0039942
cttatacgccctt

SEQ ID NO: 158707 - DNA, 13 bp, Artificial Sequence
  Oligonucleotide for detection of SNP TSC0039943
tgaatatgttttt

SEQ ID NO: 158708 - DNA, 13 bp, Artificial Sequence
  Oligonucleotide for detection of SNP TSC0039943
aaaaacatattca

SEQ ID NO: 158709 - DNA, 13 bp, Artificial Sequence
  Oligonucleotide for detection of SNP TSC0039943
tgaatacgttttt

SEQ ID NO: 158710 - DNA, 13 bp, Artificial Sequence
  Oligonucleotide for detection of SNP TSC0039943
aaaaacgtattca

SEQ ID NO: 158711 - DNA, 13 bp, Artificial Sequence
  Oligonucleotide for detection of SNP TSC0039943
agaaatgtgttta

SEQ ID NO: 158712 - DNA, 13 bp, Artificial Sequence
  Oligonucleotide for detection of SNP TSC0039943
taaacacatttct

SEQ ID NO: 158713 - DNA, 13 bp, Artificial Sequence
  Oligonucleotide for detection of SNP TSC0039943
agaaatatgttta

SEQ ID NO: 158714 - DNA, 13 bp, Artificial Sequence
  Oligonucleotide for detection of SNP TSC0039943
taaacatatttct

SEQ ID NO: 158715 - DNA, 13 bp, Artificial Sequence
  Oligonucleotide for detection of SNP TSC0039943
agaaacgtgttta

SEQ ID NO: 158716 - DNA, 13 bp, Artificial Sequence
  Oligonucleotide for detection of SNP TSC0039943
taaacacgtttct

SEQ ID NO: 158717 - DNA, 13 bp, Artificial Sequence
  Oligonucleotide for detection of SNP TSC0039944
aaaaattgagtgg

SEQ ID NO: 158718 - DNA, 13 bp, Artificial Sequence
  Oligonucleotide for detection of SNP TSC0039944
ccactcaattttt

SEQ ID NO: 158719 - DNA, 13 bp, Artificial Sequence
  Oligonucleotide for detection of SNP TSC0039944
aaaaatcgagtgg

SEQ ID NO: 158720 - DNA, 13 bp, Artificial Sequence
  Oligonucleotide for detection of SNP TSC0039944
ccactcgattttt

SEQ ID NO: 158721 - DNA, 13 bp, Artificial Sequence
  Oligonucleotide for detection of SNP TSC0005196
gggtttatagaag

SEQ ID NO: 158722 - DNA, 13 bp, Artificial Sequence
  Oligonucleotide for detection of SNP TSC0005196
cttctataaaccc

SEQ ID NO: 158723 - DNA, 13 bp, Artificial Sequence
  Oligonucleotide for detection of SNP TSC0005196
gggtttgtagaag

SEQ ID NO: 158724 - DNA, 13 bp, Artificial Sequence
  Oligonucleotide for detection of SNP TSC0005196
cttctacaaaccc

SEQ ID NO: 158725 - DNA, 13 bp, Artificial Sequence
  Oligonucleotide for detection of SNP TSC0005197
agtttgatatgty

SEQ ID NO: 158726 - DNA, 13 bp, Artificial Sequence
  Oligonucleotide for detection of SNP TSC0005197
racatatcaaact

SEQ ID NO: 158727 - DNA, 13 bp, Artificial Sequence
  Oligonucleotide for detection of SNP TSC0005197
agtttggtatgty

SEQ ID NO: 158728 - DNA, 13 bp, Artificial Sequence
  Oligonucleotide for detection of SNP TSC0005197
racataccaaact

SEQ ID NO: 158729 - DNA, 13 bp, Artificial Sequence
  Oligonucleotide for detection of SNP TSC0005198
tatatagatttay

SEQ ID NO: 158730 - DNA, 13 bp, Artificial Sequence
  Oligonucleotide for detection of SNP TSC0005198
rtaaatctatata

SEQ ID NO: 158731 - DNA, 13 bp, Artificial Sequence
  Oligonucleotide for detection of SNP TSC0005198
tatataaatttay

SEQ ID NO: 158732 - DNA, 13 bp, Artificial Sequence
  Oligonucleotide for detection of SNP TSC0005198
rtaaatttatata

SEQ ID NO: 158733 - DNA, 13 bp, Artificial Sequence
  Oligonucleotide for detection of SNP TSC0039945
attgaatgaatga

SEQ ID NO: 158734 - DNA, 13 bp, Artificial Sequence
  Oligonucleotide for detection of SNP TSC0039945
tcattcattcaat

SEQ ID NO: 158735 - DNA, 13 bp, Artificial Sequence
  Oligonucleotide for detection of SNP TSC0039945
attgaacgaatga

SEQ ID NO: 158736 - DNA, 13 bp, Artificial Sequence
  Oligonucleotide for detection of SNP TSC0039945
tcattcgttcaat

SEQ ID NO: 158737 - DNA, 13 bp, Artificial Sequence
  Oligonucleotide for detection of SNP TSC0039948
taaattgttttga

SEQ ID NO: 158738 - DNA, 13 bp, Artificial Sequence
  Oligonucleotide for detection of SNP TSC0039948
tcaaaacaattta

SEQ ID NO: 158739 - DNA, 13 bp, Artificial Sequence
  Oligonucleotide for detection of SNP TSC0039949
aaattatgagtga

SEQ ID NO: 158740 - DNA, 13 bp, Artificial Sequence
  Oligonucleotide for detection of SNP TSC0039949
tcactcataattt

SEQ ID NO: 158741 - DNA, 13 bp, Artificial Sequence
  Oligonucleotide for detection of SNP TSC0039949
aaattacgagtga

SEQ ID NO: 158742 - DNA, 13 bp, Artificial Sequence
  Oligonucleotide for detection of SNP TSC0039949
tcactcgtaattt

SEQ ID NO: 158743 - DNA, 13 bp, Artificial Sequence
  Oligonucleotide for detection of SNP TSC0039949
ttattcgtgattt

SEQ ID NO: 158744 - DNA, 13 bp, Artificial Sequence
  Oligonucleotide for detection of SNP TSC0039949
aaatcacgaataa

SEQ ID NO: 158745 - DNA, 13 bp, Artificial Sequence
  Oligonucleotide for detection of SNP TSC0039950
agttatattgtat

SEQ ID NO: 158746 - DNA, 13 bp, Artificial Sequence
  Oligonucleotide for detection of SNP TSC0039950
atacaatataact

SEQ ID NO: 158747 - DNA, 13 bp, Artificial Sequence
  Oligonucleotide for detection of SNP TSC0039950
agttatgttgtat

SEQ ID NO: 158748 - DNA, 13 bp, Artificial Sequence
  Oligonucleotide for detection of SNP TSC0039950
atacaacataact

SEQ ID NO: 158749 - DNA, 13 bp, Artificial Sequence
  Oligonucleotide for detection of SNP TSC0039950
agttacgttgtat

SEQ ID NO: 158750 - DNA, 13 bp, Artificial Sequence
  Oligonucleotide for detection of SNP TSC0039950
atacaacgtaact

SEQ ID NO: 158751 - DNA, 13 bp, Artificial Sequence
  Oligonucleotide for detection of SNP TSC0039950
atgtaatgtggtt

SEQ ID NO: 158752 - DNA, 13 bp, Artificial Sequence
  Oligonucleotide for detection of SNP TSC0039950
aaccacattacat

SEQ ID NO: 158753 - DNA, 13 bp, Artificial Sequence
  Oligonucleotide for detection of SNP TSC0039950
atgtaacgtggtt

SEQ ID NO: 158754 - DNA, 13 bp, Artificial Sequence
  Oligonucleotide for detection of SNP TSC0039950
aaccacgttacat

SEQ ID NO: 158755 - DNA, 13 bp, Artificial Sequence
  Oligonucleotide for detection of SNP TSC0039951
gagatagtttatg

SEQ ID NO: 158756 - DNA, 13 bp, Artificial Sequence
  Oligonucleotide for detection of SNP TSC0039951
cataaactatctc

SEQ ID NO: 158757 - DNA, 13 bp, Artificial Sequence
  Oligonucleotide for detection of SNP TSC0039951
gagataatttatg

SEQ ID NO: 158758 - DNA, 13 bp, Artificial Sequence
  Oligonucleotide for detection of SNP TSC0039951
cataaattatctc

SEQ ID NO: 158759 - DNA, 13 bp, Artificial Sequence
  Oligonucleotide for detection of SNP TSC0039953
ttattaatgtggt

SEQ ID NO: 158760 - DNA, 13 bp, Artificial Sequence
  Oligonucleotide for detection of SNP TSC0039953
accacattaataa

SEQ ID NO: 158761 - DNA, 13 bp, Artificial Sequence
  Oligonucleotide for detection of SNP TSC0039953
ttattagtgtggt

SEQ ID NO: 158762 - DNA, 13 bp, Artificial Sequence
  Oligonucleotide for detection of SNP TSC0039953
accacactaataa

SEQ ID NO: 158763 - DNA, 13 bp, Artificial Sequence
  Oligonucleotide for detection of SNP TSC0039956
tgtataaatttag

SEQ ID NO: 158764 - DNA, 13 bp, Artificial Sequence
  Oligonucleotide for detection of SNP TSC0039956
ctaaatttataca

SEQ ID NO: 158765 - DNA, 13 bp, Artificial Sequence
  Oligonucleotide for detection of SNP TSC0039956
tgtatagatttag

SEQ ID NO: 158766 - DNA, 13 bp, Artificial Sequence
  Oligonucleotide for detection of SNP TSC0039956
ctaaatctataca

SEQ ID NO: 158767 - DNA, 13 bp, Artificial Sequence
  Oligonucleotide for detection of SNP TSC0039959
tatatagaggtay

SEQ ID NO: 158768 - DNA, 13 bp, Artificial Sequence
  Oligonucleotide for detection of SNP TSC0039959
rtacctctatata

SEQ ID NO: 158769 - DNA, 13 bp, Artificial Sequence
  Oligonucleotide for detection of SNP TSC0039959
tatataaaggtay

SEQ ID NO: 158770 - DNA, 13 bp, Artificial Sequence
  Oligonucleotide for detection of SNP TSC0039959
rtacctttatata

SEQ ID NO: 158771 - DNA, 13 bp, Artificial Sequence
  Oligonucleotide for detection of SNP TSC0039960
agatatatgagty

SEQ ID NO: 158772 - DNA, 13 bp, Artificial Sequence
  Oligonucleotide for detection of SNP TSC0039960
ractcatatatct

SEQ ID NO: 158773 - DNA, 13 bp, Artificial Sequence
  Oligonucleotide for detection of SNP TSC0039960
agatatgtgagty

SEQ ID NO: 158774 - DNA, 13 bp, Artificial Sequence
  Oligonucleotide for detection of SNP TSC0039960
ractcacatatct

SEQ ID NO: 158775 - DNA, 13 bp, Artificial Sequence
  Oligonucleotide for detection of SNP TSC0039961
ggttatatgattt

SEQ ID NO: 158776 - DNA, 13 bp, Artificial Sequence
  Oligonucleotide for detection of SNP TSC0039961
aaatcatataacc

SEQ ID NO: 158777 - DNA, 13 bp, Artificial Sequence
  Oligonucleotide for detection of SNP TSC0039961
ggttatgtgattt

SEQ ID NO: 158778 - DNA, 13 bp, Artificial Sequence
  Oligonucleotide for detection of SNP TSC0039961
aaatcacataacc

SEQ ID NO: 158779 - DNA, 13 bp, Artificial Sequence
  Oligonucleotide for detection of SNP TSC0039968
tagttttgaattt

SEQ ID NO: 158780 - DNA, 13 bp, Artificial Sequence
  Oligonucleotide for detection of SNP TSC0039968
aaattcaaaacta

SEQ ID NO: 158781 - DNA, 13 bp, Artificial Sequence
  Oligonucleotide for detection of SNP TSC0039968
tagtttcgaattt

SEQ ID NO: 158782 - DNA, 13 bp, Artificial Sequence
  Oligonucleotide for detection of SNP TSC0039968
aaattcgaaacta

SEQ ID NO: 158783 - DNA, 13 bp, Artificial Sequence
  Oligonucleotide for detection of SNP TSC0039968
aaatttggagttg

SEQ ID NO: 158784 - DNA, 13 bp, Artificial Sequence
  Oligonucleotide for detection of SNP TSC0039968
caactccaaattt

SEQ ID NO: 158785 - DNA, 13 bp, Artificial Sequence
  Oligonucleotide for detection of SNP TSC0039968
aaatttagagttg

SEQ ID NO: 158786 - DNA, 13 bp, Artificial Sequence
  Oligonucleotide for detection of SNP TSC0039968
caactctaaattt

SEQ ID NO: 158787 - DNA, 13 bp, Artificial Sequence
  Oligonucleotide for detection of SNP TSC0039968
aaattcggagttg

SEQ ID NO: 158788 - DNA, 13 bp, Artificial Sequence
  Oligonucleotide for detection of SNP TSC0039968
caactccgaattt

SEQ ID NO: 158789 - DNA, 13 bp, Artificial Sequence
  Oligonucleotide for detection of SNP TSC0039969
gtgtagtggtgtg

SEQ ID NO: 158790 - DNA, 13 bp, Artificial Sequence
  Oligonucleotide for detection of SNP TSC0039969
cacaccactacac

SEQ ID NO: 158791 - DNA, 13 bp, Artificial Sequence
  Oligonucleotide for detection of SNP TSC0039969
gtgtaggggtgtg

SEQ ID NO: 158792 - DNA, 13 bp, Artificial Sequence
  Oligonucleotide for detection of SNP TSC0039969
cacacccctacac

SEQ ID NO: 158793 - DNA, 13 bp, Artificial Sequence
  Oligonucleotide for detection of SNP TSC0039969
tatattattgtay

SEQ ID NO: 158794 - DNA, 13 bp, Artificial Sequence
  Oligonucleotide for detection of SNP TSC0039969
rtacaataatata

SEQ ID NO: 158795 - DNA, 13 bp, Artificial Sequence
  Oligonucleotide for detection of SNP TSC0039969
tatatttttgtay

SEQ ID NO: 158796 - DNA, 13 bp, Artificial Sequence
  Oligonucleotide for detection of SNP TSC0039969
rtacaaaaatata

SEQ ID NO: 158797 - DNA, 13 bp, Artificial Sequence
  Oligonucleotide for detection of SNP TSC0039970
tagtgagttgaga

SEQ ID NO: 158798 - DNA, 13 bp, Artificial Sequence
  Oligonucleotide for detection of SNP TSC0039970
tctcaactcacta

SEQ ID NO: 158799 - DNA, 13 bp, Artificial Sequence
  Oligonucleotide for detection of SNP TSC0039970
tagtgaattgaga

SEQ ID NO: 158800 - DNA, 13 bp, Artificial Sequence
  Oligonucleotide for detection of SNP TSC0039970
tctcaattcacta

SEQ ID NO: 158801 - DNA, 13 bp, Artificial Sequence
  Oligonucleotide for detection of SNP TSC0039970
tagtgagtcgaga

SEQ ID NO: 158802 - DNA, 13 bp, Artificial Sequence
  Oligonucleotide for detection of SNP TSC0039970
tctcgactcacta

SEQ ID NO: 158803 - DNA, 13 bp, Artificial Sequence
  Oligonucleotide for detection of SNP TSC0039970
tagtgaatcgaga

SEQ ID NO: 158804 - DNA, 13 bp, Artificial Sequence
  Oligonucleotide for detection of SNP TSC0039970
tctcgattcacta

SEQ ID NO: 158805 - DNA, 13 bp, Artificial Sequence
  Oligonucleotide for detection of SNP TSC0039971
atttgaattgaga

SEQ ID NO: 158806 - DNA, 13 bp, Artificial Sequence
  Oligonucleotide for detection of SNP TSC0039971
tctcaattcaaat

SEQ ID NO: 158807 - DNA, 13 bp, Artificial Sequence
  Oligonucleotide for detection of SNP TSC0039971
atttgagttgaga

SEQ ID NO: 158808 - DNA, 13 bp, Artificial Sequence
  Oligonucleotide for detection of SNP TSC0039971
tctcaactcaaat

SEQ ID NO: 158809 - DNA, 13 bp, Artificial Sequence
  Oligonucleotide for detection of SNP TSC0039975
tataagtgtaata

SEQ ID NO: 158810 - DNA, 13 bp, Artificial Sequence
  Oligonucleotide for detection of SNP TSC0039975
tattacacttata

SEQ ID NO: 158811 - DNA, 13 bp, Artificial Sequence
  Oligonucleotide for detection of SNP TSC0039975
tataagcgtaata

SEQ ID NO: 158812 - DNA, 13 bp, Artificial Sequence
  Oligonucleotide for detection of SNP TSC0039975
tattacgcttata

SEQ ID NO: 158813 - DNA, 13 bp, Artificial Sequence
  Oligonucleotide for detection of SNP TSC0039975
tattgtatttgtg

SEQ ID NO: 158814 - DNA, 13 bp, Artificial Sequence
  Oligonucleotide for detection of SNP TSC0039975
cacaaatacaata

SEQ ID NO: 158815 - DNA, 13 bp, Artificial Sequence
  Oligonucleotide for detection of SNP TSC0039975
tattgcgtttgtg

SEQ ID NO: 158816 - DNA, 13 bp, Artificial Sequence
  Oligonucleotide for detection of SNP TSC0039975
cacaaacgcaata

SEQ ID NO: 158817 - DNA, 13 bp, Artificial Sequence
  Oligonucleotide for detection of SNP TSC0039978
aatgtaaaaagty

SEQ ID NO: 158818 - DNA, 13 bp, Artificial Sequence
  Oligonucleotide for detection of SNP TSC0039978
ractttttacatt

SEQ ID NO: 158819 - DNA, 13 bp, Artificial Sequence
  Oligonucleotide for detection of SNP TSC0039978
aatgtagaaagty

SEQ ID NO: 158820 - DNA, 13 bp, Artificial Sequence
  Oligonucleotide for detection of SNP TSC0039978
ractttctacatt

SEQ ID NO: 158821 - DNA, 13 bp, Artificial Sequence
  Oligonucleotide for detection of SNP TSC0039979
tttttaagtagta

SEQ ID NO: 158822 - DNA, 13 bp, Artificial Sequence
  Oligonucleotide for detection of SNP TSC0039979
tactacttaaaaa

SEQ ID NO: 158823 - DNA, 13 bp, Artificial Sequence
  Oligonucleotide for detection of SNP TSC0039979
tttttaggtagta

SEQ ID NO: 158824 - DNA, 13 bp, Artificial Sequence
  Oligonucleotide for detection of SNP TSC0039979
tactacctaaaaa

SEQ ID NO: 158825 - DNA, 13 bp, Artificial Sequence
  Oligonucleotide for detection of SNP TSC0039981
tgagttgtgaaat

SEQ ID NO: 158826 - DNA, 13 bp, Artificial Sequence
  Oligonucleotide for detection of SNP TSC0039981
atttcacaactca

SEQ ID NO: 158827 - DNA, 13 bp, Artificial Sequence
  Oligonucleotide for detection of SNP TSC0039981
tgagttatgaaat

SEQ ID NO: 158828 - DNA, 13 bp, Artificial Sequence
  Oligonucleotide for detection of SNP TSC0039981
atttcataactca

SEQ ID NO: 158829 - DNA, 13 bp, Artificial Sequence
  Oligonucleotide for detection of SNP TSC0039982
taatgagataaga

SEQ ID NO: 158830 - DNA, 13 bp, Artificial Sequence
  Oligonucleotide for detection of SNP TSC0039982
tcttatctcatta

SEQ ID NO: 158831 - DNA, 13 bp, Artificial Sequence
  Oligonucleotide for detection of SNP TSC0039982
taatgaaataaga

SEQ ID NO: 158832 - DNA, 13 bp, Artificial Sequence
  Oligonucleotide for detection of SNP TSC0039982
tcttatttcatta

SEQ ID NO: 158833 - DNA, 13 bp, Artificial Sequence
  Oligonucleotide for detection of SNP TSC0039983
gggtttaataagg

SEQ ID NO: 158834 - DNA, 13 bp, Artificial Sequence
  Oligonucleotide for detection of SNP TSC0039983
ccttattaaaccc

SEQ ID NO: 158835 - DNA, 13 bp, Artificial Sequence
  Oligonucleotide for detection of SNP TSC0039983
gggtttgataagg

SEQ ID NO: 158836 - DNA, 13 bp, Artificial Sequence
  Oligonucleotide for detection of SNP TSC0039983
ccttatcaaaccc

SEQ ID NO: 158837 - DNA, 13 bp, Artificial Sequence
  Oligonucleotide for detection of SNP TSC0039984
tgaggtgtatggg

SEQ ID NO: 158838 - DNA, 13 bp, Artificial Sequence
  Oligonucleotide for detection of SNP TSC0039984
cccatacacctca

SEQ ID NO: 158839 - DNA, 13 bp, Artificial Sequence
  Oligonucleotide for detection of SNP TSC0039984
tgaggtatatggg

SEQ ID NO: 158840 - DNA, 13 bp, Artificial Sequence
  Oligonucleotide for detection of SNP TSC0039984
cccatatacctca

SEQ ID NO: 158841 - DNA, 13 bp, Artificial Sequence
  Oligonucleotide for detection of SNP TSC0039984
tgaggcgtatggg

SEQ ID NO: 158842 - DNA, 13 bp, Artificial Sequence
  Oligonucleotide for detection of SNP TSC0039984
cccatacgcctca

SEQ ID NO: 158843 - DNA, 13 bp, Artificial Sequence
  Oligonucleotide for detection of SNP TSC0039985
gatgttagtgtgt

SEQ ID NO: 158844 - DNA, 13 bp, Artificial Sequence
  Oligonucleotide for detection of SNP TSC0039985
acacactaacatc

SEQ ID NO: 158845 - DNA, 13 bp, Artificial Sequence
  Oligonucleotide for detection of SNP TSC0039985
gatgttggtgtgt

SEQ ID NO: 158846 - DNA, 13 bp, Artificial Sequence
  Oligonucleotide for detection of SNP TSC0039985
acacaccaacatc

SEQ ID NO: 158847 - DNA, 13 bp, Artificial Sequence
  Oligonucleotide for detection of SNP TSC0039985
gatgtcggtgtgt

SEQ ID NO: 158848 - DNA, 13 bp, Artificial Sequence
  Oligonucleotide for detection of SNP TSC0039985
acacaccgacatc

SEQ ID NO: 158849 - DNA, 13 bp, Artificial Sequence
  Oligonucleotide for detection of SNP TSC0039985
atatattggtaty

SEQ ID NO: 158850 - DNA, 13 bp, Artificial Sequence
  Oligonucleotide for detection of SNP TSC0039985
rataccaatatat

SEQ ID NO: 158851 - DNA, 13 bp, Artificial Sequence
  Oligonucleotide for detection of SNP TSC0039985
atatatcggtaty

SEQ ID NO: 158852 - DNA, 13 bp, Artificial Sequence
  Oligonucleotide for detection of SNP TSC0039985
rataccgatatat

SEQ ID NO: 158853 - DNA, 13 bp, Artificial Sequence
  Oligonucleotide for detection of SNP TSC0039986
taggtagtagaat

SEQ ID NO: 158854 - DNA, 13 bp, Artificial Sequence
  Oligonucleotide for detection of SNP TSC0039986
attctactaccta

SEQ ID NO: 158855 - DNA, 13 bp, Artificial Sequence
  Oligonucleotide for detection of SNP TSC0039986
taggtaatagaat

SEQ ID NO: 158856 - DNA, 13 bp, Artificial Sequence
  Oligonucleotide for detection of SNP TSC0039986
attctattaccta

SEQ ID NO: 158857 - DNA, 13 bp, Artificial Sequence
  Oligonucleotide for detection of SNP TSC0039987
tttataatatggy

SEQ ID NO: 158858 - DNA, 13 bp, Artificial Sequence
  Oligonucleotide for detection of SNP TSC0039987
rccatattataaa

SEQ ID NO: 158859 - DNA, 13 bp, Artificial Sequence
  Oligonucleotide for detection of SNP TSC0039987
tttatagtatggy

SEQ ID NO: 158860 - DNA, 13 bp, Artificial Sequence
  Oligonucleotide for detection of SNP TSC0039987
rccatactataaa

SEQ ID NO: 158861 - DNA, 13 bp, Artificial Sequence
  Oligonucleotide for detection of SNP TSC0039988
tattataaaaaga

SEQ ID NO: 158862 - DNA, 13 bp, Artificial Sequence
  Oligonucleotide for detection of SNP TSC0039988
tctttttataata

SEQ ID NO: 158863 - DNA, 13 bp, Artificial Sequence
  Oligonucleotide for detection of SNP TSC0039988
tattatgaaaaga

SEQ ID NO: 158864 - DNA, 13 bp, Artificial Sequence
  Oligonucleotide for detection of SNP TSC0039988
tcttttcataata

SEQ ID NO: 158865 - DNA, 13 bp, Artificial Sequence
  Oligonucleotide for detection of SNP TSC0039990
ataaagggaagay

SEQ ID NO: 158866 - DNA, 13 bp, Artificial Sequence
  Oligonucleotide for detection of SNP TSC0039990
rtcttccctttat

SEQ ID NO: 158867 - DNA, 13 bp, Artificial Sequence
  Oligonucleotide for detection of SNP TSC0039990
ataaagagaagay

SEQ ID NO: 158868 - DNA, 13 bp, Artificial Sequence
  Oligonucleotide for detection of SNP TSC0039990
rtcttctctttat

SEQ ID NO: 158869 - DNA, 13 bp, Artificial Sequence
  Oligonucleotide for detection of SNP TSC0039993
tattttgtagagg

SEQ ID NO: 158870 - DNA, 13 bp, Artificial Sequence
  Oligonucleotide for detection of SNP TSC0039993
cctctacaaaata

SEQ ID NO: 158871 - DNA, 13 bp, Artificial Sequence
  Oligonucleotide for detection of SNP TSC0039993
tattttatagagg

SEQ ID NO: 158872 - DNA, 13 bp, Artificial Sequence
  Oligonucleotide for detection of SNP TSC0039993
cctctataaaata

SEQ ID NO: 158873 - DNA, 13 bp, Artificial Sequence
  Oligonucleotide for detection of SNP TSC0039994
ttgagtgatttat

SEQ ID NO: 158874 - DNA, 13 bp, Artificial Sequence
  Oligonucleotide for detection of SNP TSC0039994
ataaatcactcaa

SEQ ID NO: 158875 - DNA, 13 bp, Artificial Sequence
  Oligonucleotide for detection of SNP TSC0039994
ttgagtaatttat

SEQ ID NO: 158876 - DNA, 13 bp, Artificial Sequence
  Oligonucleotide for detection of SNP TSC0039994
ataaattactcaa

SEQ ID NO: 158877 - DNA, 13 bp, Artificial Sequence
  Oligonucleotide for detection of SNP TSC0039996
gagaaaaattatg

SEQ ID NO: 158878 - DNA, 13 bp, Artificial Sequence
  Oligonucleotide for detection of SNP TSC0039996
cataatttttctc

SEQ ID NO: 158879 - DNA, 13 bp, Artificial Sequence
  Oligonucleotide for detection of SNP TSC0039996
gagaaatattatg

SEQ ID NO: 158880 - DNA, 13 bp, Artificial Sequence
  Oligonucleotide for detection of SNP TSC0039996
cataatatttctc

SEQ ID NO: 158881 - DNA, 13 bp, Artificial Sequence
  Oligonucleotide for detection of SNP TSC0039996
tataattttttty

SEQ ID NO: 158882 - DNA, 13 bp, Artificial Sequence
  Oligonucleotide for detection of SNP TSC0039996
raaaaaaattata

SEQ ID NO: 158883 - DNA, 13 bp, Artificial Sequence
  Oligonucleotide for detection of SNP TSC0039996
tataatattttty

SEQ ID NO: 158884 - DNA, 13 bp, Artificial Sequence
  Oligonucleotide for detection of SNP TSC0039996
raaaaatattata

SEQ ID NO: 158885 - DNA, 13 bp, Artificial Sequence
  Oligonucleotide for detection of SNP TSC0039997
ttatgtgtataaa

SEQ ID NO: 158886 - DNA, 13 bp, Artificial Sequence
  Oligonucleotide for detection of SNP TSC0039997
tttatacacataa

SEQ ID NO: 158887 - DNA, 13 bp, Artificial Sequence
  Oligonucleotide for detection of SNP TSC0039997
ttatgtatataaa

SEQ ID NO: 158888 - DNA, 13 bp, Artificial Sequence
  Oligonucleotide for detection of SNP TSC0039997
tttatatacataa

SEQ ID NO: 158889 - DNA, 13 bp, Artificial Sequence
  Oligonucleotide for detection of SNP TSC0039999
ttatatagttaga

SEQ ID NO: 158890 - DNA, 13 bp, Artificial Sequence
  Oligonucleotide for detection of SNP TSC0039999
tctaactatataa

SEQ ID NO: 158891 - DNA, 13 bp, Artificial Sequence
  Oligonucleotide for detection of SNP TSC0039999
tttaattgtgtag

SEQ ID NO: 158892 - DNA, 13 bp, Artificial Sequence
  Oligonucleotide for detection of SNP TSC0039999
ctacacaattaaa

SEQ ID NO: 158893 - DNA, 13 bp, Artificial Sequence
  Oligonucleotide for detection of SNP TSC0039999
tttaatcgtgtag

SEQ ID NO: 158894 - DNA, 13 bp, Artificial Sequence
  Oligonucleotide for detection of SNP TSC0039999
ctacacgattaaa

SEQ ID NO: 158895 - DNA, 13 bp, Artificial Sequence
  Oligonucleotide for detection of SNP TSC0040000
gaatgagtaatgt

SEQ ID NO: 158896 - DNA, 13 bp, Artificial Sequence
  Oligonucleotide for detection of SNP TSC0040000
acattactcattc

SEQ ID NO: 158897 - DNA, 13 bp, Artificial Sequence
  Oligonucleotide for detection of SNP TSC0040000
gaatgaataatgt

SEQ ID NO: 158898 - DNA, 13 bp, Artificial Sequence
  Oligonucleotide for detection of SNP TSC0040000
acattattcattc

SEQ ID NO: 158899 - DNA, 13 bp, Artificial Sequence
  Oligonucleotide for detection of SNP TSC0040001
aagatttggaaty

SEQ ID NO: 158900 - DNA, 13 bp, Artificial Sequence
  Oligonucleotide for detection of SNP TSC0040001
rattccaaatctt

SEQ ID NO: 158901 - DNA, 13 bp, Artificial Sequence
  Oligonucleotide for detection of SNP TSC0040001
aagattcggaaty

SEQ ID NO: 158902 - DNA, 13 bp, Artificial Sequence
  Oligonucleotide for detection of SNP TSC0040001
rattccgaatctt

SEQ ID NO: 158903 - DNA, 13 bp, Artificial Sequence
  Oligonucleotide for detection of SNP TSC0040001
ggttttgagtttt

SEQ ID NO: 158904 - DNA, 13 bp, Artificial Sequence
  Oligonucleotide for detection of SNP TSC0040001
aaaactcaaaacc

SEQ ID NO: 158905 - DNA, 13 bp, Artificial Sequence
  Oligonucleotide for detection of SNP TSC0040001
ggttttaagtttt

SEQ ID NO: 158906 - DNA, 13 bp, Artificial Sequence
  Oligonucleotide for detection of SNP TSC0040001
aaaacttaaaacc

SEQ ID NO: 158907 - DNA, 13 bp, Artificial Sequence
  Oligonucleotide for detection of SNP TSC0040001
ggtttcgagtttt

SEQ ID NO: 158908 - DNA, 13 bp, Artificial Sequence
  Oligonucleotide for detection of SNP TSC0040001
aaaactcgaaacc

SEQ ID NO: 158909 - DNA, 13 bp, Artificial Sequence
  Oligonucleotide for detection of SNP TSC0040002
agatgtaagatay

SEQ ID NO: 158910 - DNA, 13 bp, Artificial Sequence
  Oligonucleotide for detection of SNP TSC0040002
rtatcttacatct

SEQ ID NO: 158911 - DNA, 13 bp, Artificial Sequence
  Oligonucleotide for detection of SNP TSC0040002
agatgtgagatay

SEQ ID NO: 158912 - DNA, 13 bp, Artificial Sequence
  Oligonucleotide for detection of SNP TSC0040002
rtatctcacatct

SEQ ID NO: 158913 - DNA, 13 bp, Artificial Sequence
  Oligonucleotide for detection of SNP TSC0040003
tagtaaattgaga

SEQ ID NO: 158914 - DNA, 13 bp, Artificial Sequence
  Oligonucleotide for detection of SNP TSC0040003
tctcaatttacta

SEQ ID NO: 158915 - DNA, 13 bp, Artificial Sequence
  Oligonucleotide for detection of SNP TSC0040003
tagtaatttgaga

SEQ ID NO: 158916 - DNA, 13 bp, Artificial Sequence
  Oligonucleotide for detection of SNP TSC0040003
tctcaaattacta

SEQ ID NO: 158917 - DNA, 13 bp, Artificial Sequence
  Oligonucleotide for detection of SNP TSC0040003
ttttaatttattg

SEQ ID NO: 158918 - DNA, 13 bp, Artificial Sequence
  Oligonucleotide for detection of SNP TSC0040003
caataaattaaaa

SEQ ID NO: 158919 - DNA, 13 bp, Artificial Sequence
  Oligonucleotide for detection of SNP TSC0040003
ttttaaattattg

SEQ ID NO: 158920 - DNA, 13 bp, Artificial Sequence
  Oligonucleotide for detection of SNP TSC0040003
caataatttaaaa

SEQ ID NO: 158921 - DNA, 13 bp, Artificial Sequence
  Oligonucleotide for detection of SNP TSC0040004
gggttggatagaa

SEQ ID NO: 158922 - DNA, 13 bp, Artificial Sequence
  Oligonucleotide for detection of SNP TSC0040004
ttctatccaaccc

SEQ ID NO: 158923 - DNA, 13 bp, Artificial Sequence
  Oligonucleotide for detection of SNP TSC0040004
gggttgaatagaa

SEQ ID NO: 158924 - DNA, 13 bp, Artificial Sequence
  Oligonucleotide for detection of SNP TSC0040004
ttctattcaaccc

SEQ ID NO: 158925 - DNA, 13 bp, Artificial Sequence
  Oligonucleotide for detection of SNP TSC0040005
gttttatgaaaga

SEQ ID NO: 158926 - DNA, 13 bp, Artificial Sequence
  Oligonucleotide for detection of SNP TSC0040005
tctttcataaaac

SEQ ID NO: 158927 - DNA, 13 bp, Artificial Sequence
  Oligonucleotide for detection of SNP TSC0040005
gttttacgaaaga

SEQ ID NO: 158928 - DNA, 13 bp, Artificial Sequence
  Oligonucleotide for detection of SNP TSC0040005
tctttcgtaaaac

SEQ ID NO: 158929 - DNA, 13 bp, Artificial Sequence
  Oligonucleotide for detection of SNP TSC0040005
ttttttgtaagay

SEQ ID NO: 158930 - DNA, 13 bp, Artificial Sequence
  Oligonucleotide for detection of SNP TSC0040005
rtcttacaaaaaa

SEQ ID NO: 158931 - DNA, 13 bp, Artificial Sequence
  Oligonucleotide for detection of SNP TSC0040005
ttttttataagay

SEQ ID NO: 158932 - DNA, 13 bp, Artificial Sequence
  Oligonucleotide for detection of SNP TSC0040005
rtcttataaaaaa

SEQ ID NO: 158933 - DNA, 13 bp, Artificial Sequence
  Oligonucleotide for detection of SNP TSC0040005
tttttcgtaagay

SEQ ID NO: 158934 - DNA, 13 bp, Artificial Sequence
  Oligonucleotide for detection of SNP TSC0040005
rtcttacgaaaaa

SEQ ID NO: 158935 - DNA, 13 bp, Artificial Sequence
  Oligonucleotide for detection of SNP TSC0040008
tagaggataagtg

SEQ ID NO: 158936 - DNA, 13 bp, Artificial Sequence
  Oligonucleotide for detection of SNP TSC0040008
cacttatcctcta

SEQ ID NO: 158937 - DNA, 13 bp, Artificial Sequence
  Oligonucleotide for detection of SNP TSC0040008
tagaggttaagtg

SEQ ID NO: 158938 - DNA, 13 bp, Artificial Sequence
  Oligonucleotide for detection of SNP TSC0040008
cacttaacctcta

SEQ ID NO: 158939 - DNA, 13 bp, Artificial Sequence
  Oligonucleotide for detection of SNP TSC0040013
taattaataatga

SEQ ID NO: 158940 - DNA, 13 bp, Artificial Sequence
  Oligonucleotide for detection of SNP TSC0040013
tcattattaatta

SEQ ID NO: 158941 - DNA, 13 bp, Artificial Sequence
  Oligonucleotide for detection of SNP TSC0040013
taattagtaatga

SEQ ID NO: 158942 - DNA, 13 bp, Artificial Sequence
  Oligonucleotide for detection of SNP TSC0040013
tcattactaatta

SEQ ID NO: 158943 - DNA, 13 bp, Artificial Sequence
  Oligonucleotide for detection of SNP TSC0040015
ttatatgattggy

SEQ ID NO: 158944 - DNA, 13 bp, Artificial Sequence
  Oligonucleotide for detection of SNP TSC0040015
rccaatcatataa

SEQ ID NO: 158945 - DNA, 13 bp, Artificial Sequence
  Oligonucleotide for detection of SNP TSC0040015
ttatataattggy

SEQ ID NO: 158946 - DNA, 13 bp, Artificial Sequence
  Oligonucleotide for detection of SNP TSC0040015
rccaattatataa

SEQ ID NO: 158947 - DNA, 13 bp, Artificial Sequence
  Oligonucleotide for detection of SNP TSC0040022
attataattattt

SEQ ID NO: 158948 - DNA, 13 bp, Artificial Sequence
  Oligonucleotide for detection of SNP TSC0040022
aaataattataat

SEQ ID NO: 158949 - DNA, 13 bp, Artificial Sequence
  Oligonucleotide for detection of SNP TSC0040022
attatagttattt

SEQ ID NO: 158950 - DNA, 13 bp, Artificial Sequence
  Oligonucleotide for detection of SNP TSC0040022
aaataactataat

SEQ ID NO: 158951 - DNA, 13 bp, Artificial Sequence
  Oligonucleotide for detection of SNP TSC0040023
taaaggtgttaag

SEQ ID NO: 158952 - DNA, 13 bp, Artificial Sequence
  Oligonucleotide for detection of SNP TSC0040023
cttaacaccttta

SEQ ID NO: 158953 - DNA, 13 bp, Artificial Sequence
  Oligonucleotide for detection of SNP TSC0040023
taaaggcgttaag

SEQ ID NO: 158954 - DNA, 13 bp, Artificial Sequence
  Oligonucleotide for detection of SNP TSC0040023
cttaacgccttta

SEQ ID NO: 158955 - DNA, 13 bp, Artificial Sequence
  Oligonucleotide for detection of SNP TSC0040023
tttggtgttttta

SEQ ID NO: 158956 - DNA, 13 bp, Artificial Sequence
  Oligonucleotide for detection of SNP TSC0040023
taaaaacaccaaa

SEQ ID NO: 158957 - DNA, 13 bp, Artificial Sequence
  Oligonucleotide for detection of SNP TSC0040023
tttggcgttttta

SEQ ID NO: 158958 - DNA, 13 bp, Artificial Sequence
  Oligonucleotide for detection of SNP TSC0040023
taaaaacgccaaa

SEQ ID NO: 158959 - DNA, 13 bp, Artificial Sequence
  Oligonucleotide for detection of SNP TSC0040025
ttagaaaaataat

SEQ ID NO: 158960 - DNA, 13 bp, Artificial Sequence
  Oligonucleotide for detection of SNP TSC0040025
attatttttctaa

SEQ ID NO: 158961 - DNA, 13 bp, Artificial Sequence
  Oligonucleotide for detection of SNP TSC0040025
ttagaataataat

SEQ ID NO: 158962 - DNA, 13 bp, Artificial Sequence
  Oligonucleotide for detection of SNP TSC0040025
attattattctaa

SEQ ID NO: 158963 - DNA, 13 bp, Artificial Sequence
  Oligonucleotide for detection of SNP TSC0040025
attgtttttttag

SEQ ID NO: 158964 - DNA, 13 bp, Artificial Sequence
  Oligonucleotide for detection of SNP TSC0040025
ctaaaaaaacaat

SEQ ID NO: 158965 - DNA, 13 bp, Artificial Sequence
  Oligonucleotide for detection of SNP TSC0040025
attgttgttttag

SEQ ID NO: 158966 - DNA, 13 bp, Artificial Sequence
  Oligonucleotide for detection of SNP TSC0040025
ctaaaacaacaat

SEQ ID NO: 158967 - DNA, 13 bp, Artificial Sequence
  Oligonucleotide for detection of SNP TSC0040026
aattgattttaat

SEQ ID NO: 158968 - DNA, 13 bp, Artificial Sequence
  Oligonucleotide for detection of SNP TSC0040026
attaaaatcaatt

SEQ ID NO: 158969 - DNA, 13 bp, Artificial Sequence
  Oligonucleotide for detection of SNP TSC0040026
aattgagtttaat

SEQ ID NO: 158970 - DNA, 13 bp, Artificial Sequence
  Oligonucleotide for detection of SNP TSC0040026
attaaactcaatt

SEQ ID NO: 158971 - DNA, 13 bp, Artificial Sequence
  Oligonucleotide for detection of SNP TSC0040026
attgggattagtt

SEQ ID NO: 158972 - DNA, 13 bp, Artificial Sequence
  Oligonucleotide for detection of SNP TSC0040026
aactaatcccaat

SEQ ID NO: 158973 - DNA, 13 bp, Artificial Sequence
  Oligonucleotide for detection of SNP TSC0040026
attgggtttagtt

SEQ ID NO: 158974 - DNA, 13 bp, Artificial Sequence
  Oligonucleotide for detection of SNP TSC0040026
aactaaacccaat

SEQ ID NO: 158975 - DNA, 13 bp, Artificial Sequence
  Oligonucleotide for detection of SNP TSC0040027
ttaaagggttttg

SEQ ID NO: 158976 - DNA, 13 bp, Artificial Sequence
  Oligonucleotide for detection of SNP TSC0040027
caaaaccctttaa

SEQ ID NO: 158977 - DNA, 13 bp, Artificial Sequence
  Oligonucleotide for detection of SNP TSC0040030
gtaagaggagaga

SEQ ID NO: 158978 - DNA, 13 bp, Artificial Sequence
  Oligonucleotide for detection of SNP TSC0040030
tctctcctcttac

SEQ ID NO: 158979 - DNA, 13 bp, Artificial Sequence
  Oligonucleotide for detection of SNP TSC0040030
gtaagaagagaga

SEQ ID NO: 158980 - DNA, 13 bp, Artificial Sequence
  Oligonucleotide for detection of SNP TSC0040030
tctctcttcttac

SEQ ID NO: 158981 - DNA, 13 bp, Artificial Sequence
  Oligonucleotide for detection of SNP TSC0040031
aatgatttgtata

SEQ ID NO: 158982 - DNA, 13 bp, Artificial Sequence
  Oligonucleotide for detection of SNP TSC0040031
tatacaaatcatt

SEQ ID NO: 158983 - DNA, 13 bp, Artificial Sequence
  Oligonucleotide for detection of SNP TSC0040031
aatgatgtgtata

SEQ ID NO: 158984 - DNA, 13 bp, Artificial Sequence
  Oligonucleotide for detection of SNP TSC0040031
tatacacatcatt

SEQ ID NO: 158985 - DNA, 13 bp, Artificial Sequence
  Oligonucleotide for detection of SNP TSC0040031
aatgacgtgtata

SEQ ID NO: 158986 - DNA, 13 bp, Artificial Sequence
  Oligonucleotide for detection of SNP TSC0040031
tatacacgtcatt

SEQ ID NO: 158987 - DNA, 13 bp, Artificial Sequence
  Oligonucleotide for detection of SNP TSC0040031
tatgtaggttatt

SEQ ID NO: 158988 - DNA, 13 bp, Artificial Sequence
  Oligonucleotide for detection of SNP TSC0040031
aataacctacata

SEQ ID NO: 158989 - DNA, 13 bp, Artificial Sequence
  Oligonucleotide for detection of SNP TSC0040032
gttataagaatty

SEQ ID NO: 158990 - DNA, 13 bp, Artificial Sequence
  Oligonucleotide for detection of SNP TSC0040032
raattcttataac

SEQ ID NO: 158991 - DNA, 13 bp, Artificial Sequence
  Oligonucleotide for detection of SNP TSC0040032
gttataggaatty

SEQ ID NO: 158992 - DNA, 13 bp, Artificial Sequence
  Oligonucleotide for detection of SNP TSC0040032
raattcctataac

SEQ ID NO: 158993 - DNA, 13 bp, Artificial Sequence
  Oligonucleotide for detection of SNP TSC0040033
ttttattgatata

SEQ ID NO: 158994 - DNA, 13 bp, Artificial Sequence
  Oligonucleotide for detection of SNP TSC0040033
tatatcaataaaa

SEQ ID NO: 158995 - DNA, 13 bp, Artificial Sequence
  Oligonucleotide for detection of SNP TSC0040033
ttttatcgatata

SEQ ID NO: 158996 - DNA, 13 bp, Artificial Sequence
  Oligonucleotide for detection of SNP TSC0040033
tatatcgataaaa

SEQ ID NO: 158997 - DNA, 13 bp, Artificial Sequence
  Oligonucleotide for detection of SNP TSC0040033
tgtattggtgaaa

SEQ ID NO: 158998 - DNA, 13 bp, Artificial Sequence
  Oligonucleotide for detection of SNP TSC0040033
tttcaccaataca

SEQ ID NO: 158999 - DNA, 13 bp, Artificial Sequence
  Oligonucleotide for detection of SNP TSC0040033
tgtattagtgaaa

SEQ ID NO: 159000 - DNA, 13 bp, Artificial Sequence
  Oligonucleotide for detection of SNP TSC0040033
tttcactaataca

SEQ ID NO: 159001 - DNA, 13 bp, Artificial Sequence
  Oligonucleotide for detection of SNP TSC0040033
tgtatcggtgaaa

SEQ ID NO: 159002 - DNA, 13 bp, Artificial Sequence
  Oligonucleotide for detection of SNP TSC0040033
tttcaccgataca

SEQ ID NO: 159003 - DNA, 13 bp, Artificial Sequence
  Oligonucleotide for detection of SNP TSC0040037
atgttcggttttt

SEQ ID NO: 159004 - DNA, 13 bp, Artificial Sequence
  Oligonucleotide for detection of SNP TSC0040037
aaaaaccgaacat

SEQ ID NO: 159005 - DNA, 13 bp, Artificial Sequence
  Oligonucleotide for detection of SNP TSC0040037
aaaagttgggtat

SEQ ID NO: 159006 - DNA, 13 bp, Artificial Sequence
  Oligonucleotide for detection of SNP TSC0040037
atacccaactttt

SEQ ID NO: 159007 - DNA, 13 bp, Artificial Sequence
  Oligonucleotide for detection of SNP TSC0040037
aaaagtcgggtat

SEQ ID NO: 159008 - DNA, 13 bp, Artificial Sequence
  Oligonucleotide for detection of SNP TSC0040037
atacccgactttt

SEQ ID NO: 159009 - DNA, 13 bp, Artificial Sequence
  Oligonucleotide for detection of SNP TSC0040038
ataattaaaagat

SEQ ID NO: 159010 - DNA, 13 bp, Artificial Sequence
  Oligonucleotide for detection of SNP TSC0040038
atcttttaattat

SEQ ID NO: 159011 - DNA, 13 bp, Artificial Sequence
  Oligonucleotide for detection of SNP TSC0040038
ataattgaaagat

SEQ ID NO: 159012 - DNA, 13 bp, Artificial Sequence
  Oligonucleotide for detection of SNP TSC0040038
atctttcaattat

SEQ ID NO: 159013 - DNA, 13 bp, Artificial Sequence
  Oligonucleotide for detection of SNP TSC0040043
aatatatgaaatt

SEQ ID NO: 159014 - DNA, 13 bp, Artificial Sequence
  Oligonucleotide for detection of SNP TSC0040043
aatttcatatatt

SEQ ID NO: 159015 - DNA, 13 bp, Artificial Sequence
  Oligonucleotide for detection of SNP TSC0040045
atttaaatattag

SEQ ID NO: 159016 - DNA, 13 bp, Artificial Sequence
  Oligonucleotide for detection of SNP TSC0040045
ctaatatttaaat

SEQ ID NO: 159017 - DNA, 13 bp, Artificial Sequence
  Oligonucleotide for detection of SNP TSC0040045
atttaagtattag

SEQ ID NO: 159018 - DNA, 13 bp, Artificial Sequence
  Oligonucleotide for detection of SNP TSC0040045
ctaatacttaaat

SEQ ID NO: 159019 - DNA, 13 bp, Artificial Sequence
  Oligonucleotide for detection of SNP TSC0040046
aaattgtgtttty

SEQ ID NO: 159020 - DNA, 13 bp, Artificial Sequence
  Oligonucleotide for detection of SNP TSC0040046
raaaacacaattt

SEQ ID NO: 159021 - DNA, 13 bp, Artificial Sequence
  Oligonucleotide for detection of SNP TSC0040046
aaattgcgtttty

SEQ ID NO: 159022 - DNA, 13 bp, Artificial Sequence
  Oligonucleotide for detection of SNP TSC0040046
raaaacgcaattt

SEQ ID NO: 159023 - DNA, 13 bp, Artificial Sequence
  Oligonucleotide for detection of SNP TSC0040046
ggagatgtaattt

SEQ ID NO: 159024 - DNA, 13 bp, Artificial Sequence
  Oligonucleotide for detection of SNP TSC0040046
aaattacatctcc

SEQ ID NO: 159025 - DNA, 13 bp, Artificial Sequence
  Oligonucleotide for detection of SNP TSC0040046
ggagatataattt

SEQ ID NO: 159026 - DNA, 13 bp, Artificial Sequence
  Oligonucleotide for detection of SNP TSC0040046
aaattatatctcc

SEQ ID NO: 159027 - DNA, 13 bp, Artificial Sequence
  Oligonucleotide for detection of SNP TSC0040046
ggagacgtaattt

SEQ ID NO: 159028 - DNA, 13 bp, Artificial Sequence
  Oligonucleotide for detection of SNP TSC0040046
aaattacgtctcc

SEQ ID NO: 159029 - DNA, 13 bp, Artificial Sequence
  Oligonucleotide for detection of SNP TSC0040050
gtaaaaatttgay

SEQ ID NO: 159030 - DNA, 13 bp, Artificial Sequence
  Oligonucleotide for detection of SNP TSC0040050
rtcaaatttttac

SEQ ID NO: 159031 - DNA, 13 bp, Artificial Sequence
  Oligonucleotide for detection of SNP TSC0040050
gtaaaattttgay

SEQ ID NO: 159032 - DNA, 13 bp, Artificial Sequence
  Oligonucleotide for detection of SNP TSC0040050
rtcaaaattttac

SEQ ID NO: 159033 - DNA, 13 bp, Artificial Sequence
  Oligonucleotide for detection of SNP TSC0040050
gttagatttttgy

SEQ ID NO: 159034 - DNA, 13 bp, Artificial Sequence
  Oligonucleotide for detection of SNP TSC0040050
rcaaaaatctaac

SEQ ID NO: 159035 - DNA, 13 bp, Artificial Sequence
  Oligonucleotide for detection of SNP TSC0040050
gttagagttttgy

SEQ ID NO: 159036 - DNA, 13 bp, Artificial Sequence
  Oligonucleotide for detection of SNP TSC0040050
rcaaaactctaac

SEQ ID NO: 159037 - DNA, 13 bp, Artificial Sequence
  Oligonucleotide for detection of SNP TSC0040052
ttttattgttagy

SEQ ID NO: 159038 - DNA, 13 bp, Artificial Sequence
  Oligonucleotide for detection of SNP TSC0040052
rctaacaataaaa

SEQ ID NO: 159039 - DNA, 13 bp, Artificial Sequence
  Oligonucleotide for detection of SNP TSC0040052
ttttatcgttagy

SEQ ID NO: 159040 - DNA, 13 bp, Artificial Sequence
  Oligonucleotide for detection of SNP TSC0040052
rctaacgataaaa

SEQ ID NO: 159041 - DNA, 13 bp, Artificial Sequence
  Oligonucleotide for detection of SNP TSC0040052
gttggtggtggga

SEQ ID NO: 159042 - DNA, 13 bp, Artificial Sequence
  Oligonucleotide for detection of SNP TSC0040052
tcccaccaccaac

SEQ ID NO: 159043 - DNA, 13 bp, Artificial Sequence
  Oligonucleotide for detection of SNP TSC0040052
gttggtagtggga

SEQ ID NO: 159044 - DNA, 13 bp, Artificial Sequence
  Oligonucleotide for detection of SNP TSC0040052
tcccactaccaac

SEQ ID NO: 159045 - DNA, 13 bp, Artificial Sequence
  Oligonucleotide for detection of SNP TSC0040052
gttggcggtggga

SEQ ID NO: 159046 - DNA, 13 bp, Artificial Sequence
  Oligonucleotide for detection of SNP TSC0040052
tcccaccgccaac

SEQ ID NO: 159047 - DNA, 13 bp, Artificial Sequence
  Oligonucleotide for detection of SNP TSC0040053
gtagttagggaaa

SEQ ID NO: 159048 - DNA, 13 bp, Artificial Sequence
  Oligonucleotide for detection of SNP TSC0040053
tttccctaactac

SEQ ID NO: 159049 - DNA, 13 bp, Artificial Sequence
  Oligonucleotide for detection of SNP TSC0040053
gtagttggggaaa

SEQ ID NO: 159050 - DNA, 13 bp, Artificial Sequence
  Oligonucleotide for detection of SNP TSC0040053
tttccccaactac

SEQ ID NO: 159051 - DNA, 13 bp, Artificial Sequence
  Oligonucleotide for detection of SNP TSC0040053
gtagtcggggaaa

SEQ ID NO: 159052 - DNA, 13 bp, Artificial Sequence
  Oligonucleotide for detection of SNP TSC0040053
tttccccgactac

SEQ ID NO: 159053 - DNA, 13 bp, Artificial Sequence
  Oligonucleotide for detection of SNP TSC0040054
tgtgttttgaatt

SEQ ID NO: 159054 - DNA, 13 bp, Artificial Sequence
  Oligonucleotide for detection of SNP TSC0040054
aattcaaaacaca

SEQ ID NO: 159055 - DNA, 13 bp, Artificial Sequence
  Oligonucleotide for detection of SNP TSC0040054
tgtgttgtgaatt

SEQ ID NO: 159056 - DNA, 13 bp, Artificial Sequence
  Oligonucleotide for detection of SNP TSC0040054
aattcacaacaca

SEQ ID NO: 159057 - DNA, 13 bp, Artificial Sequence
  Oligonucleotide for detection of SNP TSC0040054
cgtgttttgaatt

SEQ ID NO: 159058 - DNA, 13 bp, Artificial Sequence
  Oligonucleotide for detection of SNP TSC0040054
aattcaaaacacg

SEQ ID NO: 159059 - DNA, 13 bp, Artificial Sequence
  Oligonucleotide for detection of SNP TSC0040054
cgtgttgtgaatt

SEQ ID NO: 159060 - DNA, 13 bp, Artificial Sequence
  Oligonucleotide for detection of SNP TSC0040054
aattcacaacacg

SEQ ID NO: 159061 - DNA, 13 bp, Artificial Sequence
  Oligonucleotide for detection of SNP TSC0040054
tgtgtcgtgaatt

SEQ ID NO: 159062 - DNA, 13 bp, Artificial Sequence
  Oligonucleotide for detection of SNP TSC0040054
aattcacgacaca

SEQ ID NO: 159063 - DNA, 13 bp, Artificial Sequence
  Oligonucleotide for detection of SNP TSC0040054
cgtgtcgtgaatt

SEQ ID NO: 159064 - DNA, 13 bp, Artificial Sequence
  Oligonucleotide for detection of SNP TSC0040054
aattcacgacacg

SEQ ID NO: 159065 - DNA, 13 bp, Artificial Sequence
  Oligonucleotide for detection of SNP TSC0040054
aatttaggatatg

SEQ ID NO: 159066 - DNA, 13 bp, Artificial Sequence
  Oligonucleotide for detection of SNP TSC0040054
catatcctaaatt

SEQ ID NO: 159067 - DNA, 13 bp, Artificial Sequence
  Oligonucleotide for detection of SNP TSC0040054
aatttatgatatg

SEQ ID NO: 159068 - DNA, 13 bp, Artificial Sequence
  Oligonucleotide for detection of SNP TSC0040054
catatcataaatt

SEQ ID NO: 159069 - DNA, 13 bp, Artificial Sequence
  Oligonucleotide for detection of SNP TSC0040054
aatttaggatacg

SEQ ID NO: 159070 - DNA, 13 bp, Artificial Sequence
  Oligonucleotide for detection of SNP TSC0040054
cgtatcctaaatt

SEQ ID NO: 159071 - DNA, 13 bp, Artificial Sequence
  Oligonucleotide for detection of SNP TSC0040054
aatttacgatatg

SEQ ID NO: 159072 - DNA, 13 bp, Artificial Sequence
  Oligonucleotide for detection of SNP TSC0040054
catatcgtaaatt

SEQ ID NO: 159073 - DNA, 13 bp, Artificial Sequence
  Oligonucleotide for detection of SNP TSC0040054
aatttatgatacg

SEQ ID NO: 159074 - DNA, 13 bp, Artificial Sequence
  Oligonucleotide for detection of SNP TSC0040054
cgtatcataaatt

SEQ ID NO: 159075 - DNA, 13 bp, Artificial Sequence
  Oligonucleotide for detection of SNP TSC0040054
aatttacgatacg

SEQ ID NO: 159076 - DNA, 13 bp, Artificial Sequence
  Oligonucleotide for detection of SNP TSC0040054
cgtatcgtaaatt

SEQ ID NO: 159077 - DNA, 13 bp, Artificial Sequence
  Oligonucleotide for detection of SNP TSC0004732
agttggtaaggga

SEQ ID NO: 159078 - DNA, 13 bp, Artificial Sequence
  Oligonucleotide for detection of SNP TSC0004732
tcccttaccaact

SEQ ID NO: 159079 - DNA, 13 bp, Artificial Sequence
  Oligonucleotide for detection of SNP TSC0004732
agttgggaaggga

SEQ ID NO: 159080 - DNA, 13 bp, Artificial Sequence
  Oligonucleotide for detection of SNP TSC0004732
tcccttcccaact

SEQ ID NO: 159081 - DNA, 13 bp, Artificial Sequence
  Oligonucleotide for detection of SNP TSC0004732
ttttttgttagtt

SEQ ID NO: 159082 - DNA, 13 bp, Artificial Sequence
  Oligonucleotide for detection of SNP TSC0004732
aactaacaaaaaa

SEQ ID NO: 159083 - DNA, 13 bp, Artificial Sequence
  Oligonucleotide for detection of SNP TSC0004732
tttttttttagtt

SEQ ID NO: 159084 - DNA, 13 bp, Artificial Sequence
  Oligonucleotide for detection of SNP TSC0004732
aactaaaaaaaaa

SEQ ID NO: 159085 - DNA, 13 bp, Artificial Sequence
  Oligonucleotide for detection of SNP TSC0040058
taatattgtgtgg

SEQ ID NO: 159086 - DNA, 13 bp, Artificial Sequence
  Oligonucleotide for detection of SNP TSC0040058
ccacacaatatta

SEQ ID NO: 159087 - DNA, 13 bp, Artificial Sequence
  Oligonucleotide for detection of SNP TSC0040058
taatatcgtgtgg

SEQ ID NO: 159088 - DNA, 13 bp, Artificial Sequence
  Oligonucleotide for detection of SNP TSC0040058
ccacacgatatta

SEQ ID NO: 159089 - DNA, 13 bp, Artificial Sequence
  Oligonucleotide for detection of SNP TSC0040058
ttatatgatattg

SEQ ID NO: 159090 - DNA, 13 bp, Artificial Sequence
  Oligonucleotide for detection of SNP TSC0040058
caatatcatataa

SEQ ID NO: 159091 - DNA, 13 bp, Artificial Sequence
  Oligonucleotide for detection of SNP TSC0040058
ttatataatattg

SEQ ID NO: 159092 - DNA, 13 bp, Artificial Sequence
  Oligonucleotide for detection of SNP TSC0040058
caatattatataa

SEQ ID NO: 159093 - DNA, 13 bp, Artificial Sequence
  Oligonucleotide for detection of SNP TSC0040058
ttatacgatattg

SEQ ID NO: 159094 - DNA, 13 bp, Artificial Sequence
  Oligonucleotide for detection of SNP TSC0040058
caatatcgtataa

SEQ ID NO: 159095 - DNA, 13 bp, Artificial Sequence
  Oligonucleotide for detection of SNP TSC0040059
ttttaagtttata

SEQ ID NO: 159096 - DNA, 13 bp, Artificial Sequence
  Oligonucleotide for detection of SNP TSC0040059
tataaacttaaaa

SEQ ID NO: 159097 - DNA, 13 bp, Artificial Sequence
  Oligonucleotide for detection of SNP TSC0040059
ttttaaatttata

SEQ ID NO: 159098 - DNA, 13 bp, Artificial Sequence
  Oligonucleotide for detection of SNP TSC0040059
tataaatttaaaa

SEQ ID NO: 159099 - DNA, 13 bp, Artificial Sequence
  Oligonucleotide for detection of SNP TSC0040060
gattaaattaaaa

SEQ ID NO: 159100 - DNA, 13 bp, Artificial Sequence
  Oligonucleotide for detection of SNP TSC0040060
ttttaatttaatc

SEQ ID NO: 159101 - DNA, 13 bp, Artificial Sequence
  Oligonucleotide for detection of SNP TSC0040060
gattaagttaaaa

SEQ ID NO: 159102 - DNA, 13 bp, Artificial Sequence
  Oligonucleotide for detection of SNP TSC0040060
ttttaacttaatc

SEQ ID NO: 159103 - DNA, 13 bp, Artificial Sequence
  Oligonucleotide for detection of SNP TSC0040061
tgtgagagtttty

SEQ ID NO: 159104 - DNA, 13 bp, Artificial Sequence
  Oligonucleotide for detection of SNP TSC0040061
raaaactctcaca

SEQ ID NO: 159105 - DNA, 13 bp, Artificial Sequence
  Oligonucleotide for detection of SNP TSC0040061
tgtgagtgtttty

SEQ ID NO: 159106 - DNA, 13 bp, Artificial Sequence
  Oligonucleotide for detection of SNP TSC0040061
raaaacactcaca

SEQ ID NO: 159107 - DNA, 13 bp, Artificial Sequence
  Oligonucleotide for detection of SNP TSC0040061
tgtgagcgtttty

SEQ ID NO: 159108 - DNA, 13 bp, Artificial Sequence
  Oligonucleotide for detection of SNP TSC0040061
raaaacgctcaca

SEQ ID NO: 159109 - DNA, 13 bp, Artificial Sequence
  Oligonucleotide for detection of SNP TSC0040061
gaaagtttttata

SEQ ID NO: 159110 - DNA, 13 bp, Artificial Sequence
  Oligonucleotide for detection of SNP TSC0040061
tataaaaactttc

SEQ ID NO: 159111 - DNA, 13 bp, Artificial Sequence
  Oligonucleotide for detection of SNP TSC0040061
gaaagtgtttata

SEQ ID NO: 159112 - DNA, 13 bp, Artificial Sequence
  Oligonucleotide for detection of SNP TSC0040061
tataaacactttc

SEQ ID NO: 159113 - DNA, 13 bp, Artificial Sequence
  Oligonucleotide for detection of SNP TSC0040061
gaaagcgtttata

SEQ ID NO: 159114 - DNA, 13 bp, Artificial Sequence
  Oligonucleotide for detection of SNP TSC0040061
tataaacgctttc

SEQ ID NO: 159115 - DNA, 13 bp, Artificial Sequence
  Oligonucleotide for detection of SNP TSC0040062
aatatagtatata

SEQ ID NO: 159116 - DNA, 13 bp, Artificial Sequence
  Oligonucleotide for detection of SNP TSC0040062
tatatactatatt

SEQ ID NO: 159117 - DNA, 13 bp, Artificial Sequence
  Oligonucleotide for detection of SNP TSC0040062
aatataatatata

SEQ ID NO: 159118 - DNA, 13 bp, Artificial Sequence
  Oligonucleotide for detection of SNP TSC0040062
tatatattatatt

SEQ ID NO: 159119 - DNA, 13 bp, Artificial Sequence
  Oligonucleotide for detection of SNP TSC0040063
tgggataagattt

SEQ ID NO: 159120 - DNA, 13 bp, Artificial Sequence
  Oligonucleotide for detection of SNP TSC0040063
aaatcttatccca

SEQ ID NO: 159121 - DNA, 13 bp, Artificial Sequence
  Oligonucleotide for detection of SNP TSC0040063
tgggatgagattt

SEQ ID NO: 159122 - DNA, 13 bp, Artificial Sequence
  Oligonucleotide for detection of SNP TSC0040063
aaatctcatccca

SEQ ID NO: 159123 - DNA, 13 bp, Artificial Sequence
  Oligonucleotide for detection of SNP TSC0040064
taggtgattttgy

SEQ ID NO: 159124 - DNA, 13 bp, Artificial Sequence
  Oligonucleotide for detection of SNP TSC0040064
rcaaaatcaccta

SEQ ID NO: 159125 - DNA, 13 bp, Artificial Sequence
  Oligonucleotide for detection of SNP TSC0040064
taggtggttttgy

SEQ ID NO: 159126 - DNA, 13 bp, Artificial Sequence
  Oligonucleotide for detection of SNP TSC0040064
rcaaaaccaccta

SEQ ID NO: 159127 - DNA, 13 bp, Artificial Sequence
  Oligonucleotide for detection of SNP TSC0040065
ggtggtcggtgty

SEQ ID NO: 159128 - DNA, 13 bp, Artificial Sequence
  Oligonucleotide for detection of SNP TSC0040065
racaccgaccacc

SEQ ID NO: 159129 - DNA, 13 bp, Artificial Sequence
  Oligonucleotide for detection of SNP TSC0040065
ggtattggttaty

SEQ ID NO: 159130 - DNA, 13 bp, Artificial Sequence
  Oligonucleotide for detection of SNP TSC0040065
rataaccaatacc

SEQ ID NO: 159131 - DNA, 13 bp, Artificial Sequence
  Oligonucleotide for detection of SNP TSC0040065
ggtatcggttaty

SEQ ID NO: 159132 - DNA, 13 bp, Artificial Sequence
  Oligonucleotide for detection of SNP TSC0040065
rataaccgatacc

SEQ ID NO: 159133 - DNA, 13 bp, Artificial Sequence
  Oligonucleotide for detection of SNP TSC0040070
ttagttaaaaatg

SEQ ID NO: 159134 - DNA, 13 bp, Artificial Sequence
  Oligonucleotide for detection of SNP TSC0040070
catttttaactaa

SEQ ID NO: 159135 - DNA, 13 bp, Artificial Sequence
  Oligonucleotide for detection of SNP TSC0040070
ttagttgaaaatg

SEQ ID NO: 159136 - DNA, 13 bp, Artificial Sequence
  Oligonucleotide for detection of SNP TSC0040070
cattttcaactaa

SEQ ID NO: 159137 - DNA, 13 bp, Artificial Sequence
  Oligonucleotide for detection of SNP TSC0040071
taatagatttttg

SEQ ID NO: 159138 - DNA, 13 bp, Artificial Sequence
  Oligonucleotide for detection of SNP TSC0040071
caaaaatctatta

SEQ ID NO: 159139 - DNA, 13 bp, Artificial Sequence
  Oligonucleotide for detection of SNP TSC0040071
taataggtttttg

SEQ ID NO: 159140 - DNA, 13 bp, Artificial Sequence
  Oligonucleotide for detection of SNP TSC0040071
caaaaacctatta

SEQ ID NO: 159141 - DNA, 13 bp, Artificial Sequence
  Oligonucleotide for detection of SNP TSC0040072
ataagagatatag

SEQ ID NO: 159142 - DNA, 13 bp, Artificial Sequence
  Oligonucleotide for detection of SNP TSC0040072
ctatatctcttat

SEQ ID NO: 159143 - DNA, 13 bp, Artificial Sequence
  Oligonucleotide for detection of SNP TSC0040072
ataagaaatatag

SEQ ID NO: 159144 - DNA, 13 bp, Artificial Sequence
  Oligonucleotide for detection of SNP TSC0040072
ctatatttcttat

SEQ ID NO: 159145 - DNA, 13 bp, Artificial Sequence
  Oligonucleotide for detection of SNP TSC0040072
ataagatatatag

SEQ ID NO: 159146 - DNA, 13 bp, Artificial Sequence
  Oligonucleotide for detection of SNP TSC0040072
ctatatatcttat

SEQ ID NO: 159147 - DNA, 13 bp, Artificial Sequence
  Oligonucleotide for detection of SNP TSC0040073
tatataaatagay

SEQ ID NO: 159148 - DNA, 13 bp, Artificial Sequence
  Oligonucleotide for detection of SNP TSC0040073
rtctatttatata

SEQ ID NO: 159149 - DNA, 13 bp, Artificial Sequence
  Oligonucleotide for detection of SNP TSC0040073
tatatatatagay

SEQ ID NO: 159150 - DNA, 13 bp, Artificial Sequence
  Oligonucleotide for detection of SNP TSC0040073
rtctatatatata

SEQ ID NO: 159151 - DNA, 13 bp, Artificial Sequence
  Oligonucleotide for detection of SNP TSC0040073
gtttgtgtgtgtg

SEQ ID NO: 159152 - DNA, 13 bp, Artificial Sequence
  Oligonucleotide for detection of SNP TSC0040073
cacacacacaaac

SEQ ID NO: 159153 - DNA, 13 bp, Artificial Sequence
  Oligonucleotide for detection of SNP TSC0040074
taagatatattag

SEQ ID NO: 159154 - DNA, 13 bp, Artificial Sequence
  Oligonucleotide for detection of SNP TSC0040074
ctaatatatctta

SEQ ID NO: 159155 - DNA, 13 bp, Artificial Sequence
  Oligonucleotide for detection of SNP TSC0040074
taagatgtattag

SEQ ID NO: 159156 - DNA, 13 bp, Artificial Sequence
  Oligonucleotide for detection of SNP TSC0040074
ctaatacatctta

SEQ ID NO: 159157 - DNA, 13 bp, Artificial Sequence
  Oligonucleotide for detection of SNP TSC0040074
taagacgtattag

SEQ ID NO: 159158 - DNA, 13 bp, Artificial Sequence
  Oligonucleotide for detection of SNP TSC0040074
ctaatacgtctta

SEQ ID NO: 159159 - DNA, 13 bp, Artificial Sequence
  Oligonucleotide for detection of SNP TSC0040074
ttagtatgtttta

SEQ ID NO: 159160 - DNA, 13 bp, Artificial Sequence
  Oligonucleotide for detection of SNP TSC0040074
taaaacatactaa

SEQ ID NO: 159161 - DNA, 13 bp, Artificial Sequence
  Oligonucleotide for detection of SNP TSC0040074
ttagtacgtttta

SEQ ID NO: 159162 - DNA, 13 bp, Artificial Sequence
  Oligonucleotide for detection of SNP TSC0040074
taaaacgtactaa

SEQ ID NO: 159163 - DNA, 13 bp, Artificial Sequence
  Oligonucleotide for detection of SNP TSC0040075
ttggatgtgtgtt

SEQ ID NO: 159164 - DNA, 13 bp, Artificial Sequence
  Oligonucleotide for detection of SNP TSC0040075
aacacacatccaa

SEQ ID NO: 159165 - DNA, 13 bp, Artificial Sequence
  Oligonucleotide for detection of SNP TSC0040075
ttggatatgtgtt

SEQ ID NO: 159166 - DNA, 13 bp, Artificial Sequence
  Oligonucleotide for detection of SNP TSC0040075
aacacatatccaa

SEQ ID NO: 159167 - DNA, 13 bp, Artificial Sequence
  Oligonucleotide for detection of SNP TSC0040076
gaaaagttttaaa

SEQ ID NO: 159168 - DNA, 13 bp, Artificial Sequence
  Oligonucleotide for detection of SNP TSC0040076
tttaaaacttttc

SEQ ID NO: 159169 - DNA, 13 bp, Artificial Sequence
  Oligonucleotide for detection of SNP TSC0040076
gaaaaggtttaaa

SEQ ID NO: 159170 - DNA, 13 bp, Artificial Sequence
  Oligonucleotide for detection of SNP TSC0040076
tttaaaccttttc

SEQ ID NO: 159171 - DNA, 13 bp, Artificial Sequence
  Oligonucleotide for detection of SNP TSC0040076
tttaagattttty

SEQ ID NO: 159172 - DNA, 13 bp, Artificial Sequence
  Oligonucleotide for detection of SNP TSC0040076
raaaaatcttaaa

SEQ ID NO: 159173 - DNA, 13 bp, Artificial Sequence
  Oligonucleotide for detection of SNP TSC0040076
tttaagtttttty

SEQ ID NO: 159174 - DNA, 13 bp, Artificial Sequence
  Oligonucleotide for detection of SNP TSC0040076
raaaaaacttaaa

SEQ ID NO: 159175 - DNA, 13 bp, Artificial Sequence
  Oligonucleotide for detection of SNP TSC0006295
gaaaagaggttta

SEQ ID NO: 159176 - DNA, 13 bp, Artificial Sequence
  Oligonucleotide for detection of SNP TSC0006295
taaacctcttttc

SEQ ID NO: 159177 - DNA, 13 bp, Artificial Sequence
  Oligonucleotide for detection of SNP TSC0006295
gaaaagtggttta

SEQ ID NO: 159178 - DNA, 13 bp, Artificial Sequence
  Oligonucleotide for detection of SNP TSC0006295
taaaccacttttc

SEQ ID NO: 159179 - DNA, 13 bp, Artificial Sequence
  Oligonucleotide for detection of SNP TSC0006295
gaaaagcggttta

SEQ ID NO: 159180 - DNA, 13 bp, Artificial Sequence
  Oligonucleotide for detection of SNP TSC0006295
taaaccgcttttc

SEQ ID NO: 159181 - DNA, 13 bp, Artificial Sequence
  Oligonucleotide for detection of SNP TSC0006295
taaatttttttty

SEQ ID NO: 159182 - DNA, 13 bp, Artificial Sequence
  Oligonucleotide for detection of SNP TSC0006295
raaaaaaaattta

SEQ ID NO: 159183 - DNA, 13 bp, Artificial Sequence
  Oligonucleotide for detection of SNP TSC0006295
taaatcgttttty

SEQ ID NO: 159184 - DNA, 13 bp, Artificial Sequence
  Oligonucleotide for detection of SNP TSC0006295
raaaaacgattta

SEQ ID NO: 159185 - DNA, 13 bp, Artificial Sequence
  Oligonucleotide for detection of SNP TSC0040077
agggtttttttay

SEQ ID NO: 159186 - DNA, 13 bp, Artificial Sequence
  Oligonucleotide for detection of SNP TSC0040077
rtaaaaaaaccct

SEQ ID NO: 159187 - DNA, 13 bp, Artificial Sequence
  Oligonucleotide for detection of SNP TSC0040077
agggttgttttay

SEQ ID NO: 159188 - DNA, 13 bp, Artificial Sequence
  Oligonucleotide for detection of SNP TSC0040077
rtaaaacaaccct

SEQ ID NO: 159189 - DNA, 13 bp, Artificial Sequence
  Oligonucleotide for detection of SNP TSC0040077
agggtcgttttay

SEQ ID NO: 159190 - DNA, 13 bp, Artificial Sequence
  Oligonucleotide for detection of SNP TSC0040077
rtaaaacgaccct

SEQ ID NO: 159191 - DNA, 13 bp, Artificial Sequence
  Oligonucleotide for detection of SNP TSC0040077
gtaaagggatttt

SEQ ID NO: 159192 - DNA, 13 bp, Artificial Sequence
  Oligonucleotide for detection of SNP TSC0040077
aaaatccctttac

SEQ ID NO: 159193 - DNA, 13 bp, Artificial Sequence
  Oligonucleotide for detection of SNP TSC0040077
gtaaagtgatttt

SEQ ID NO: 159194 - DNA, 13 bp, Artificial Sequence
  Oligonucleotide for detection of SNP TSC0040077
aaaatcactttac

SEQ ID NO: 159195 - DNA, 13 bp, Artificial Sequence
  Oligonucleotide for detection of SNP TSC0040077
gtaaagcgatttt

SEQ ID NO: 159196 - DNA, 13 bp, Artificial Sequence
  Oligonucleotide for detection of SNP TSC0040077
aaaatcgctttac

SEQ ID NO: 159197 - DNA, 13 bp, Artificial Sequence
  Oligonucleotide for detection of SNP TSC0040079
tttgttatcgttt

SEQ ID NO: 159198 - DNA, 13 bp, Artificial Sequence
  Oligonucleotide for detection of SNP TSC0040079
aaacgataacaaa

SEQ ID NO: 159199 - DNA, 13 bp, Artificial Sequence
  Oligonucleotide for detection of SNP TSC0040079
tttgttttcgttt

SEQ ID NO: 159200 - DNA, 13 bp, Artificial Sequence
  Oligonucleotide for detection of SNP TSC0040079
aaacgaaaacaaa

SEQ ID NO: 159201 - DNA, 13 bp, Artificial Sequence
  Oligonucleotide for detection of SNP TSC0040079
agatgatggtaga

SEQ ID NO: 159202 - DNA, 13 bp, Artificial Sequence
  Oligonucleotide for detection of SNP TSC0040079
tctaccatcatct

SEQ ID NO: 159203 - DNA, 13 bp, Artificial Sequence
  Oligonucleotide for detection of SNP TSC0040079
agatgagggtaga

SEQ ID NO: 159204 - DNA, 13 bp, Artificial Sequence
  Oligonucleotide for detection of SNP TSC0040079
tctaccctcatct

SEQ ID NO: 159205 - DNA, 13 bp, Artificial Sequence
  Oligonucleotide for detection of SNP TSC0040079
agacgatggtaga

SEQ ID NO: 159206 - DNA, 13 bp, Artificial Sequence
  Oligonucleotide for detection of SNP TSC0040079
tctaccatcgtct

SEQ ID NO: 159207 - DNA, 13 bp, Artificial Sequence
  Oligonucleotide for detection of SNP TSC0040079
agacgagggtaga

SEQ ID NO: 159208 - DNA, 13 bp, Artificial Sequence
  Oligonucleotide for detection of SNP TSC0040079
tctaccctcgtct

SEQ ID NO: 159209 - DNA, 13 bp, Artificial Sequence
  Oligonucleotide for detection of SNP TSC0040080
tttgtttttatty

SEQ ID NO: 159210 - DNA, 13 bp, Artificial Sequence
  Oligonucleotide for detection of SNP TSC0040080
raataaaaacaaa

SEQ ID NO: 159211 - DNA, 13 bp, Artificial Sequence
  Oligonucleotide for detection of SNP TSC0040080
ggatgatggtaga

SEQ ID NO: 159212 - DNA, 13 bp, Artificial Sequence
  Oligonucleotide for detection of SNP TSC0040080
tctaccatcatcc

SEQ ID NO: 159213 - DNA, 13 bp, Artificial Sequence
  Oligonucleotide for detection of SNP TSC0040080
ggatgagggtaga

SEQ ID NO: 159214 - DNA, 13 bp, Artificial Sequence
  Oligonucleotide for detection of SNP TSC0040080
tctaccctcatcc

SEQ ID NO: 159215 - DNA, 13 bp, Artificial Sequence
  Oligonucleotide for detection of SNP TSC0040081
tttatttgagttt

SEQ ID NO: 159216 - DNA, 13 bp, Artificial Sequence
  Oligonucleotide for detection of SNP TSC0040081
aaactcaaataaa

SEQ ID NO: 159217 - DNA, 13 bp, Artificial Sequence
  Oligonucleotide for detection of SNP TSC0040081
tttattcgagttt

SEQ ID NO: 159218 - DNA, 13 bp, Artificial Sequence
  Oligonucleotide for detection of SNP TSC0040081
aaactcgaataaa

SEQ ID NO: 159219 - DNA, 13 bp, Artificial Sequence
  Oligonucleotide for detection of SNP TSC0040081
agatttgggtgga

SEQ ID NO: 159220 - DNA, 13 bp, Artificial Sequence
  Oligonucleotide for detection of SNP TSC0040081
tccacccaaatct

SEQ ID NO: 159221 - DNA, 13 bp, Artificial Sequence
  Oligonucleotide for detection of SNP TSC0040081
agatttaggtgga

SEQ ID NO: 159222 - DNA, 13 bp, Artificial Sequence
  Oligonucleotide for detection of SNP TSC0040081
tccacctaaatct

SEQ ID NO: 159223 - DNA, 13 bp, Artificial Sequence
  Oligonucleotide for detection of SNP TSC0040081
agattcgggtgga

SEQ ID NO: 159224 - DNA, 13 bp, Artificial Sequence
  Oligonucleotide for detection of SNP TSC0040081
tccacccgaatct

SEQ ID NO: 159225 - DNA, 13 bp, Artificial Sequence
  Oligonucleotide for detection of SNP TSC0040082
atttgaataatta

SEQ ID NO: 159226 - DNA, 13 bp, Artificial Sequence
  Oligonucleotide for detection of SNP TSC0040082
taattattcaaat

SEQ ID NO: 159227 - DNA, 13 bp, Artificial Sequence
  Oligonucleotide for detection of SNP TSC0040082
atttgagtaatta

SEQ ID NO: 159228 - DNA, 13 bp, Artificial Sequence
  Oligonucleotide for detection of SNP TSC0040082
taattactcaaat

SEQ ID NO: 159229 - DNA, 13 bp, Artificial Sequence
  Oligonucleotide for detection of SNP TSC0040083
gtagtatgtatta

SEQ ID NO: 159230 - DNA, 13 bp, Artificial Sequence
  Oligonucleotide for detection of SNP TSC0040083
taatacatactac

SEQ ID NO: 159231 - DNA, 13 bp, Artificial Sequence
  Oligonucleotide for detection of SNP TSC0040083
gtagtaggtatta

SEQ ID NO: 159232 - DNA, 13 bp, Artificial Sequence
  Oligonucleotide for detection of SNP TSC0040083
taatacctactac

SEQ ID NO: 159233 - DNA, 13 bp, Artificial Sequence
  Oligonucleotide for detection of SNP TSC0040083
gtagtacgtatta

SEQ ID NO: 159234 - DNA, 13 bp, Artificial Sequence
  Oligonucleotide for detection of SNP TSC0040083
taatacgtactac

SEQ ID NO: 159235 - DNA, 13 bp, Artificial Sequence
  Oligonucleotide for detection of SNP TSC0040083
tgatatgtgttay

SEQ ID NO: 159236 - DNA, 13 bp, Artificial Sequence
  Oligonucleotide for detection of SNP TSC0040083
rtaacacatatca

SEQ ID NO: 159237 - DNA, 13 bp, Artificial Sequence
  Oligonucleotide for detection of SNP TSC0040083
tgatatttgttay

SEQ ID NO: 159238 - DNA, 13 bp, Artificial Sequence
  Oligonucleotide for detection of SNP TSC0040083
rtaacaaatatca

SEQ ID NO: 159239 - DNA, 13 bp, Artificial Sequence
  Oligonucleotide for detection of SNP TSC0040083
tgatacgtgttay

SEQ ID NO: 159240 - DNA, 13 bp, Artificial Sequence
  Oligonucleotide for detection of SNP TSC0040083
rtaacacgtatca

SEQ ID NO: 159241 - DNA, 13 bp, Artificial Sequence
  Oligonucleotide for detection of SNP TSC0040084
aagtatagttaag

SEQ ID NO: 159242 - DNA, 13 bp, Artificial Sequence
  Oligonucleotide for detection of SNP TSC0040084
cttaactatactt

SEQ ID NO: 159243 - DNA, 13 bp, Artificial Sequence
  Oligonucleotide for detection of SNP TSC0040084
tttagttgtgttt

SEQ ID NO: 159244 - DNA, 13 bp, Artificial Sequence
  Oligonucleotide for detection of SNP TSC0040084
aaacacaactaaa

SEQ ID NO: 159245 - DNA, 13 bp, Artificial Sequence
  Oligonucleotide for detection of SNP TSC0040084
tttagtggtgttt

SEQ ID NO: 159246 - DNA, 13 bp, Artificial Sequence
  Oligonucleotide for detection of SNP TSC0040084
aaacaccactaaa

SEQ ID NO: 159247 - DNA, 13 bp, Artificial Sequence
  Oligonucleotide for detection of SNP TSC0040084
tttagcggtgttt

SEQ ID NO: 159248 - DNA, 13 bp, Artificial Sequence
  Oligonucleotide for detection of SNP TSC0040084
aaacaccgctaaa

SEQ ID NO: 159249 - DNA, 13 bp, Artificial Sequence
  Oligonucleotide for detection of SNP TSC0040085
gtttttatattta

SEQ ID NO: 159250 - DNA, 13 bp, Artificial Sequence
  Oligonucleotide for detection of SNP TSC0040085
taaatataaaaac

SEQ ID NO: 159251 - DNA, 13 bp, Artificial Sequence
  Oligonucleotide for detection of SNP TSC0040085
gtttttgtattta

SEQ ID NO: 159252 - DNA, 13 bp, Artificial Sequence
  Oligonucleotide for detection of SNP TSC0040085
taaatacaaaaac

SEQ ID NO: 159253 - DNA, 13 bp, Artificial Sequence
  Oligonucleotide for detection of SNP TSC0040085
gttttcgtattta

SEQ ID NO: 159254 - DNA, 13 bp, Artificial Sequence
  Oligonucleotide for detection of SNP TSC0040085
taaatacgaaaac

SEQ ID NO: 159255 - DNA, 13 bp, Artificial Sequence
  Oligonucleotide for detection of SNP TSC0040085
taaatgtggaaay

SEQ ID NO: 159256 - DNA, 13 bp, Artificial Sequence
  Oligonucleotide for detection of SNP TSC0040085
rtttccacattta

SEQ ID NO: 159257 - DNA, 13 bp, Artificial Sequence
  Oligonucleotide for detection of SNP TSC0040085
taaatgcggaaay

SEQ ID NO: 159258 - DNA, 13 bp, Artificial Sequence
  Oligonucleotide for detection of SNP TSC0040085
rtttccgcattta

SEQ ID NO: 159259 - DNA, 13 bp, Artificial Sequence
  Oligonucleotide for detection of SNP TSC0040086
aagtatattaagg

SEQ ID NO: 159260 - DNA, 13 bp, Artificial Sequence
  Oligonucleotide for detection of SNP TSC0040086
ccttaatatactt

SEQ ID NO: 159261 - DNA, 13 bp, Artificial Sequence
  Oligonucleotide for detection of SNP TSC0040086
aagtatgttaagg

SEQ ID NO: 159262 - DNA, 13 bp, Artificial Sequence
  Oligonucleotide for detection of SNP TSC0040086
ccttaacatactt

SEQ ID NO: 159263 - DNA, 13 bp, Artificial Sequence
  Oligonucleotide for detection of SNP TSC0040086
aagtacgttaagg

SEQ ID NO: 159264 - DNA, 13 bp, Artificial Sequence
  Oligonucleotide for detection of SNP TSC0040086
ccttaacgtactt

SEQ ID NO: 159265 - DNA, 13 bp, Artificial Sequence
  Oligonucleotide for detection of SNP TSC0040086
ttttggtgtgttt

SEQ ID NO: 159266 - DNA, 13 bp, Artificial Sequence
  Oligonucleotide for detection of SNP TSC0040086
aaacacaccaaaa

SEQ ID NO: 159267 - DNA, 13 bp, Artificial Sequence
  Oligonucleotide for detection of SNP TSC0040086
ttttggcgtgttt

SEQ ID NO: 159268 - DNA, 13 bp, Artificial Sequence
  Oligonucleotide for detection of SNP TSC0040086
aaacacgccaaaa

SEQ ID NO: 159269 - DNA, 13 bp, Artificial Sequence
  Oligonucleotide for detection of SNP TSC0040087
aaaaacgtgtata

SEQ ID NO: 159270 - DNA, 13 bp, Artificial Sequence
  Oligonucleotide for detection of SNP TSC0040087
tatacacgttttt

SEQ ID NO: 159271 - DNA, 13 bp, Artificial Sequence
  Oligonucleotide for detection of SNP TSC0040087
tgtatatgttttt

SEQ ID NO: 159272 - DNA, 13 bp, Artificial Sequence
  Oligonucleotide for detection of SNP TSC0040087
aaaaacatataca

SEQ ID NO: 159273 - DNA, 13 bp, Artificial Sequence
  Oligonucleotide for detection of SNP TSC0040087
tgtatacgttttt

SEQ ID NO: 159274 - DNA, 13 bp, Artificial Sequence
  Oligonucleotide for detection of SNP TSC0040087
aaaaacgtataca

SEQ ID NO: 159275 - DNA, 13 bp, Artificial Sequence
  Oligonucleotide for detection of SNP TSC0040093
agggtaatgagat

SEQ ID NO: 159276 - DNA, 13 bp, Artificial Sequence
  Oligonucleotide for detection of SNP TSC0040093
atctcattaccct

SEQ ID NO: 159277 - DNA, 13 bp, Artificial Sequence
  Oligonucleotide for detection of SNP TSC0040093
agggtagtgagat

SEQ ID NO: 159278 - DNA, 13 bp, Artificial Sequence
  Oligonucleotide for detection of SNP TSC0040093
atctcactaccct

SEQ ID NO: 159279 - DNA, 13 bp, Artificial Sequence
  Oligonucleotide for detection of SNP TSC0040098
aaatgtgtttttt

SEQ ID NO: 159280 - DNA, 13 bp, Artificial Sequence
  Oligonucleotide for detection of SNP TSC0040098
aaaaaacacattt

SEQ ID NO: 159281 - DNA, 13 bp, Artificial Sequence
  Oligonucleotide for detection of SNP TSC0040099
aggttatggtgag

SEQ ID NO: 159282 - DNA, 13 bp, Artificial Sequence
  Oligonucleotide for detection of SNP TSC0040099
ctcaccataacct

SEQ ID NO: 159283 - DNA, 13 bp, Artificial Sequence
  Oligonucleotide for detection of SNP TSC0040099
aggttagggtgag

SEQ ID NO: 159284 - DNA, 13 bp, Artificial Sequence
  Oligonucleotide for detection of SNP TSC0040099
ctcaccctaacct

SEQ ID NO: 159285 - DNA, 13 bp, Artificial Sequence
  Oligonucleotide for detection of SNP TSC0040100
aaggatttgggaa

SEQ ID NO: 159286 - DNA, 13 bp, Artificial Sequence
  Oligonucleotide for detection of SNP TSC0040100
ttcccaaatcctt

SEQ ID NO: 159287 - DNA, 13 bp, Artificial Sequence
  Oligonucleotide for detection of SNP TSC0040100
aaggatgtgggaa

SEQ ID NO: 159288 - DNA, 13 bp, Artificial Sequence
  Oligonucleotide for detection of SNP TSC0040100
ttcccacatcctt

SEQ ID NO: 159289 - DNA, 13 bp, Artificial Sequence
  Oligonucleotide for detection of SNP TSC0040101
taaatataaattt

SEQ ID NO: 159290 - DNA, 13 bp, Artificial Sequence
  Oligonucleotide for detection of SNP TSC0040101
aaatttatattta

SEQ ID NO: 159291 - DNA, 13 bp, Artificial Sequence
  Oligonucleotide for detection of SNP TSC0040101
aagtttgtgtttg

SEQ ID NO: 159292 - DNA, 13 bp, Artificial Sequence
  Oligonucleotide for detection of SNP TSC0040101
caaacacaaactt

SEQ ID NO: 159293 - DNA, 13 bp, Artificial Sequence
  Oligonucleotide for detection of SNP TSC0040101
aagtttttgtttg

SEQ ID NO: 159294 - DNA, 13 bp, Artificial Sequence
  Oligonucleotide for detection of SNP TSC0040101
caaacaaaaactt

SEQ ID NO: 159295 - DNA, 13 bp, Artificial Sequence
  Oligonucleotide for detection of SNP TSC0040102
tgtaaataagagy

SEQ ID NO: 159296 - DNA, 13 bp, Artificial Sequence
  Oligonucleotide for detection of SNP TSC0040102
rctcttatttaca

SEQ ID NO: 159297 - DNA, 13 bp, Artificial Sequence
  Oligonucleotide for detection of SNP TSC0040102
tgtaaagaagagy

SEQ ID NO: 159298 - DNA, 13 bp, Artificial Sequence
  Oligonucleotide for detection of SNP TSC0040102
rctcttctttaca

SEQ ID NO: 159299 - DNA, 13 bp, Artificial Sequence
  Oligonucleotide for detection of SNP TSC0040102
gtttttttttata

SEQ ID NO: 159300 - DNA, 13 bp, Artificial Sequence
  Oligonucleotide for detection of SNP TSC0040102
tataaaaaaaaac

SEQ ID NO: 159301 - DNA, 13 bp, Artificial Sequence
  Oligonucleotide for detection of SNP TSC0040103
ataaaagttgtay

SEQ ID NO: 159302 - DNA, 13 bp, Artificial Sequence
  Oligonucleotide for detection of SNP TSC0040103
rtacaacttttat

SEQ ID NO: 159303 - DNA, 13 bp, Artificial Sequence
  Oligonucleotide for detection of SNP TSC0040103
ataaaaattgtay

SEQ ID NO: 159304 - DNA, 13 bp, Artificial Sequence
  Oligonucleotide for detection of SNP TSC0040103
rtacaatttttat

SEQ ID NO: 159305 - DNA, 13 bp, Artificial Sequence
  Oligonucleotide for detection of SNP TSC0040106
gtaagagagttty

SEQ ID NO: 159306 - DNA, 13 bp, Artificial Sequence
  Oligonucleotide for detection of SNP TSC0040106
raaactctcttac

SEQ ID NO: 159307 - DNA, 13 bp, Artificial Sequence
  Oligonucleotide for detection of SNP TSC0040106
gtaagaaagttty

SEQ ID NO: 159308 - DNA, 13 bp, Artificial Sequence
  Oligonucleotide for detection of SNP TSC0040106
raaactttcttac

SEQ ID NO: 159309 - DNA, 13 bp, Artificial Sequence
  Oligonucleotide for detection of SNP TSC0040107
aagttttaattgt

SEQ ID NO: 159310 - DNA, 13 bp, Artificial Sequence
  Oligonucleotide for detection of SNP TSC0040107
acaattaaaactt

SEQ ID NO: 159311 - DNA, 13 bp, Artificial Sequence
  Oligonucleotide for detection of SNP TSC0040107
aagtttgaattgt

SEQ ID NO: 159312 - DNA, 13 bp, Artificial Sequence
  Oligonucleotide for detection of SNP TSC0040107
acaattcaaactt

SEQ ID NO: 159313 - DNA, 13 bp, Artificial Sequence
  Oligonucleotide for detection of SNP TSC0040108
ttggtaggagtaa

SEQ ID NO: 159314 - DNA, 13 bp, Artificial Sequence
  Oligonucleotide for detection of SNP TSC0040108
ttactcctaccaa

SEQ ID NO: 159315 - DNA, 13 bp, Artificial Sequence
  Oligonucleotide for detection of SNP TSC0040108
ttggtaagagtaa

SEQ ID NO: 159316 - DNA, 13 bp, Artificial Sequence
  Oligonucleotide for detection of SNP TSC0040108
ttactcttaccaa

SEQ ID NO: 159317 - DNA, 13 bp, Artificial Sequence
  Oligonucleotide for detection of SNP TSC0040109
tttatatggagtg

SEQ ID NO: 159318 - DNA, 13 bp, Artificial Sequence
  Oligonucleotide for detection of SNP TSC0040109
cactccatataaa

SEQ ID NO: 159319 - DNA, 13 bp, Artificial Sequence
  Oligonucleotide for detection of SNP TSC0040109
tttatagggagtg

SEQ ID NO: 159320 - DNA, 13 bp, Artificial Sequence
  Oligonucleotide for detection of SNP TSC0040109
cactccctataaa

SEQ ID NO: 159321 - DNA, 13 bp, Artificial Sequence
  Oligonucleotide for detection of SNP TSC0040109
tttatacggagtg

SEQ ID NO: 159322 - DNA, 13 bp, Artificial Sequence
  Oligonucleotide for detection of SNP TSC0040109
cactccgtataaa

SEQ ID NO: 159323 - DNA, 13 bp, Artificial Sequence
  Oligonucleotide for detection of SNP TSC0040109
tattttgtgtgaa

SEQ ID NO: 159324 - DNA, 13 bp, Artificial Sequence
  Oligonucleotide for detection of SNP TSC0040109
ttcacacaaaata

SEQ ID NO: 159325 - DNA, 13 bp, Artificial Sequence
  Oligonucleotide for detection of SNP TSC0040109
tattttttgtgaa

SEQ ID NO: 159326 - DNA, 13 bp, Artificial Sequence
  Oligonucleotide for detection of SNP TSC0040109
ttcacaaaaaata

SEQ ID NO: 159327 - DNA, 13 bp, Artificial Sequence
  Oligonucleotide for detection of SNP TSC0040109
tatttcgtgtgaa

SEQ ID NO: 159328 - DNA, 13 bp, Artificial Sequence
  Oligonucleotide for detection of SNP TSC0040109
ttcacacgaaata

SEQ ID NO: 159329 - DNA, 13 bp, Artificial Sequence
  Oligonucleotide for detection of SNP TSC0040110
ttataatgtttag

SEQ ID NO: 159330 - DNA, 13 bp, Artificial Sequence
  Oligonucleotide for detection of SNP TSC0040110
ctaaacattataa

SEQ ID NO: 159331 - DNA, 13 bp, Artificial Sequence
  Oligonucleotide for detection of SNP TSC0040110
ttataacgtttag

SEQ ID NO: 159332 - DNA, 13 bp, Artificial Sequence
  Oligonucleotide for detection of SNP TSC0040110
ctaaacgttataa

SEQ ID NO: 159333 - DNA, 13 bp, Artificial Sequence
  Oligonucleotide for detection of SNP TSC0040110
ttaggtgttgtaa

SEQ ID NO: 159334 - DNA, 13 bp, Artificial Sequence
  Oligonucleotide for detection of SNP TSC0040110
ttacaacacctaa

SEQ ID NO: 159335 - DNA, 13 bp, Artificial Sequence
  Oligonucleotide for detection of SNP TSC0040110
ttaggtattgtaa

SEQ ID NO: 159336 - DNA, 13 bp, Artificial Sequence
  Oligonucleotide for detection of SNP TSC0040110
ttacaatacctaa

SEQ ID NO: 159337 - DNA, 13 bp, Artificial Sequence
  Oligonucleotide for detection of SNP TSC0040110
ttaggcgttgtaa

SEQ ID NO: 159338 - DNA, 13 bp, Artificial Sequence
  Oligonucleotide for detection of SNP TSC0040110
ttacaacgcctaa

SEQ ID NO: 159339 - DNA, 13 bp, Artificial Sequence
  Oligonucleotide for detection of SNP TSC0040112
gtattgtggtagt

SEQ ID NO: 159340 - DNA, 13 bp, Artificial Sequence
  Oligonucleotide for detection of SNP TSC0040112
actaccacaatac

SEQ ID NO: 159341 - DNA, 13 bp, Artificial Sequence
  Oligonucleotide for detection of SNP TSC0040112
gtattggggtagt

SEQ ID NO: 159342 - DNA, 13 bp, Artificial Sequence
  Oligonucleotide for detection of SNP TSC0040112
actaccccaatac

SEQ ID NO: 159343 - DNA, 13 bp, Artificial Sequence
  Oligonucleotide for detection of SNP TSC0040112
attgttatagtay

SEQ ID NO: 159344 - DNA, 13 bp, Artificial Sequence
  Oligonucleotide for detection of SNP TSC0040112
rtactataacaat

SEQ ID NO: 159345 - DNA, 13 bp, Artificial Sequence
  Oligonucleotide for detection of SNP TSC0040112
attgttttagtay

SEQ ID NO: 159346 - DNA, 13 bp, Artificial Sequence
  Oligonucleotide for detection of SNP TSC0040112
rtactaaaacaat

SEQ ID NO: 159347 - DNA, 13 bp, Artificial Sequence
  Oligonucleotide for detection of SNP TSC0040113
ttaattatttttg

SEQ ID NO: 159348 - DNA, 13 bp, Artificial Sequence
  Oligonucleotide for detection of SNP TSC0040113
caaaaataattaa

SEQ ID NO: 159349 - DNA, 13 bp, Artificial Sequence
  Oligonucleotide for detection of SNP TSC0040113
ttaattgtttttg

SEQ ID NO: 159350 - DNA, 13 bp, Artificial Sequence
  Oligonucleotide for detection of SNP TSC0040113
caaaaacaattaa

SEQ ID NO: 159351 - DNA, 13 bp, Artificial Sequence
  Oligonucleotide for detection of SNP TSC0040115
ttagaagaagata

SEQ ID NO: 159352 - DNA, 13 bp, Artificial Sequence
  Oligonucleotide for detection of SNP TSC0040115
tatcttcttctaa

SEQ ID NO: 159353 - DNA, 13 bp, Artificial Sequence
  Oligonucleotide for detection of SNP TSC0040115
ttagaaaaagata

SEQ ID NO: 159354 - DNA, 13 bp, Artificial Sequence
  Oligonucleotide for detection of SNP TSC0040115
tatctttttctaa

SEQ ID NO: 159355 - DNA, 13 bp, Artificial Sequence
  Oligonucleotide for detection of SNP TSC0040116
ttgtgtaatttat

SEQ ID NO: 159356 - DNA, 13 bp, Artificial Sequence
  Oligonucleotide for detection of SNP TSC0040116
ataaattacacaa

SEQ ID NO: 159357 - DNA, 13 bp, Artificial Sequence
  Oligonucleotide for detection of SNP TSC0040116
ttgtgttatttat

SEQ ID NO: 159358 - DNA, 13 bp, Artificial Sequence
  Oligonucleotide for detection of SNP TSC0040116
ataaataacacaa

SEQ ID NO: 159359 - DNA, 13 bp, Artificial Sequence
  Oligonucleotide for detection of SNP TSC0040116
atgaattatatag

SEQ ID NO: 159360 - DNA, 13 bp, Artificial Sequence
  Oligonucleotide for detection of SNP TSC0040116
ctatataattcat

SEQ ID NO: 159361 - DNA, 13 bp, Artificial Sequence
  Oligonucleotide for detection of SNP TSC0040116
atgaatgatatag

SEQ ID NO: 159362 - DNA, 13 bp, Artificial Sequence
  Oligonucleotide for detection of SNP TSC0040116
ctatatcattcat

SEQ ID NO: 159363 - DNA, 13 bp, Artificial Sequence
  Oligonucleotide for detection of SNP TSC0040117
gggggagttttty

SEQ ID NO: 159364 - DNA, 13 bp, Artificial Sequence
  Oligonucleotide for detection of SNP TSC0040117
raaaaactccccc

SEQ ID NO: 159365 - DNA, 13 bp, Artificial Sequence
  Oligonucleotide for detection of SNP TSC0040118
gagttagttaaat

SEQ ID NO: 159366 - DNA, 13 bp, Artificial Sequence
  Oligonucleotide for detection of SNP TSC0040118
atttaactaactc

SEQ ID NO: 159367 - DNA, 13 bp, Artificial Sequence
  Oligonucleotide for detection of SNP TSC0040118
gagttaattaaat

SEQ ID NO: 159368 - DNA, 13 bp, Artificial Sequence
  Oligonucleotide for detection of SNP TSC0040118
atttaattaactc

SEQ ID NO: 159369 - DNA, 13 bp, Artificial Sequence
  Oligonucleotide for detection of SNP TSC0040119
aggtttgtaataa

SEQ ID NO: 159370 - DNA, 13 bp, Artificial Sequence
  Oligonucleotide for detection of SNP TSC0040119
ttattacaaacct

SEQ ID NO: 159371 - DNA, 13 bp, Artificial Sequence
  Oligonucleotide for detection of SNP TSC0040119
aggtttataataa

SEQ ID NO: 159372 - DNA, 13 bp, Artificial Sequence
  Oligonucleotide for detection of SNP TSC0040119
ttattataaacct

SEQ ID NO: 159373 - DNA, 13 bp, Artificial Sequence
  Oligonucleotide for detection of SNP TSC0040120
ggggggatagggt

SEQ ID NO: 159374 - DNA, 13 bp, Artificial Sequence
  Oligonucleotide for detection of SNP TSC0040120
accctatcccccc

SEQ ID NO: 159375 - DNA, 13 bp, Artificial Sequence
  Oligonucleotide for detection of SNP TSC0040120
ggggggttagggt

SEQ ID NO: 159376 - DNA, 13 bp, Artificial Sequence
  Oligonucleotide for detection of SNP TSC0040120
accctaacccccc

SEQ ID NO: 159377 - DNA, 13 bp, Artificial Sequence
  Oligonucleotide for detection of SNP TSC0040121
ttaggttgggtta

SEQ ID NO: 159378 - DNA, 13 bp, Artificial Sequence
  Oligonucleotide for detection of SNP TSC0040121
taacccaacctaa

SEQ ID NO: 159379 - DNA, 13 bp, Artificial Sequence
  Oligonucleotide for detection of SNP TSC0040121
ttaggtcgggtta

SEQ ID NO: 159380 - DNA, 13 bp, Artificial Sequence
  Oligonucleotide for detection of SNP TSC0040121
taacccgacctaa

SEQ ID NO: 159381 - DNA, 13 bp, Artificial Sequence
  Oligonucleotide for detection of SNP TSC0040121
tggtttggtttgg

SEQ ID NO: 159382 - DNA, 13 bp, Artificial Sequence
  Oligonucleotide for detection of SNP TSC0040121
ccaaaccaaacca

SEQ ID NO: 159383 - DNA, 13 bp, Artificial Sequence
  Oligonucleotide for detection of SNP TSC0040121
tggtttagtttgg

SEQ ID NO: 159384 - DNA, 13 bp, Artificial Sequence
  Oligonucleotide for detection of SNP TSC0040121
ccaaactaaacca

SEQ ID NO: 159385 - DNA, 13 bp, Artificial Sequence
  Oligonucleotide for detection of SNP TSC0040121
tggttcggtttgg

SEQ ID NO: 159386 - DNA, 13 bp, Artificial Sequence
  Oligonucleotide for detection of SNP TSC0040121
ccaaaccgaacca

SEQ ID NO: 159387 - DNA, 13 bp, Artificial Sequence
  Oligonucleotide for detection of SNP TSC0040125
aattacgtttttt

SEQ ID NO: 159388 - DNA, 13 bp, Artificial Sequence
  Oligonucleotide for detection of SNP TSC0040125
aaaaaacgtaatt

SEQ ID NO: 159389 - DNA, 13 bp, Artificial Sequence
  Oligonucleotide for detection of SNP TSC0040125
agaaaatgtgatt

SEQ ID NO: 159390 - DNA, 13 bp, Artificial Sequence
  Oligonucleotide for detection of SNP TSC0040125
aatcacattttct

SEQ ID NO: 159391 - DNA, 13 bp, Artificial Sequence
  Oligonucleotide for detection of SNP TSC0040125
agaaaacgtgatt

SEQ ID NO: 159392 - DNA, 13 bp, Artificial Sequence
  Oligonucleotide for detection of SNP TSC0040125
aatcacgttttct

SEQ ID NO: 159393 - DNA, 13 bp, Artificial Sequence
  Oligonucleotide for detection of SNP TSC0005563
tattacgtgtttt

SEQ ID NO: 159394 - DNA, 13 bp, Artificial Sequence
  Oligonucleotide for detection of SNP TSC0005563
aaaacacgtaata

SEQ ID NO: 159395 - DNA, 13 bp, Artificial Sequence
  Oligonucleotide for detection of SNP TSC0005563
aaaataagtagtg

SEQ ID NO: 159396 - DNA, 13 bp, Artificial Sequence
  Oligonucleotide for detection of SNP TSC0005563
cactacttatttt

SEQ ID NO: 159397 - DNA, 13 bp, Artificial Sequence
  Oligonucleotide for detection of SNP TSC0005563
aaaatatgtagtg

SEQ ID NO: 159398 - DNA, 13 bp, Artificial Sequence
  Oligonucleotide for detection of SNP TSC0005563
cactacatatttt

SEQ ID NO: 159399 - DNA, 13 bp, Artificial Sequence
  Oligonucleotide for detection of SNP TSC0005563
aaaatacgtagtg

SEQ ID NO: 159400 - DNA, 13 bp, Artificial Sequence
  Oligonucleotide for detection of SNP TSC0005563
cactacgtatttt

SEQ ID NO: 159401 - DNA, 13 bp, Artificial Sequence
  Oligonucleotide for detection of SNP TSC0040130
gttgatagaattt

SEQ ID NO: 159402 - DNA, 13 bp, Artificial Sequence
  Oligonucleotide for detection of SNP TSC0040130
aaattctatcaac

SEQ ID NO: 159403 - DNA, 13 bp, Artificial Sequence
  Oligonucleotide for detection of SNP TSC0040130
gttgattgaattt

SEQ ID NO: 159404 - DNA, 13 bp, Artificial Sequence
  Oligonucleotide for detection of SNP TSC0040130
aaattcaatcaac

SEQ ID NO: 159405 - DNA, 13 bp, Artificial Sequence
  Oligonucleotide for detection of SNP TSC0040130
gttgatcgaattt

SEQ ID NO: 159406 - DNA, 13 bp, Artificial Sequence
  Oligonucleotide for detection of SNP TSC0040130
aaattcgatcaac

SEQ ID NO: 159407 - DNA, 13 bp, Artificial Sequence
  Oligonucleotide for detection of SNP TSC0040130
aaattttgttaay

SEQ ID NO: 159408 - DNA, 13 bp, Artificial Sequence
  Oligonucleotide for detection of SNP TSC0040130
rttaacaaaattt

SEQ ID NO: 159409 - DNA, 13 bp, Artificial Sequence
  Oligonucleotide for detection of SNP TSC0040130
aaatttggttaay

SEQ ID NO: 159410 - DNA, 13 bp, Artificial Sequence
  Oligonucleotide for detection of SNP TSC0040130
rttaaccaaattt

SEQ ID NO: 159411 - DNA, 13 bp, Artificial Sequence
  Oligonucleotide for detection of SNP TSC0040130
aaattcggttaay

SEQ ID NO: 159412 - DNA, 13 bp, Artificial Sequence
  Oligonucleotide for detection of SNP TSC0040130
rttaaccgaattt

SEQ ID NO: 159413 - DNA, 13 bp, Artificial Sequence
  Oligonucleotide for detection of SNP TSC0040131
gtttgttgatttg

SEQ ID NO: 159414 - DNA, 13 bp, Artificial Sequence
  Oligonucleotide for detection of SNP TSC0040131
caaatcaacaaac

SEQ ID NO: 159415 - DNA, 13 bp, Artificial Sequence
  Oligonucleotide for detection of SNP TSC0040131
gtttgtggatttg

SEQ ID NO: 159416 - DNA, 13 bp, Artificial Sequence
  Oligonucleotide for detection of SNP TSC0040131
caaatccacaaac

SEQ ID NO: 159417 - DNA, 13 bp, Artificial Sequence
  Oligonucleotide for detection of SNP TSC0040131
gtttgtcgatttg

SEQ ID NO: 159418 - DNA, 13 bp, Artificial Sequence
  Oligonucleotide for detection of SNP TSC0040131
caaatcgacaaac

SEQ ID NO: 159419 - DNA, 13 bp, Artificial Sequence
  Oligonucleotide for detection of SNP TSC0040131
taggttgatagay

SEQ ID NO: 159420 - DNA, 13 bp, Artificial Sequence
  Oligonucleotide for detection of SNP TSC0040131
rtctatcaaccta

SEQ ID NO: 159421 - DNA, 13 bp, Artificial Sequence
  Oligonucleotide for detection of SNP TSC0040131
taggtttatagay

SEQ ID NO: 159422 - DNA, 13 bp, Artificial Sequence
  Oligonucleotide for detection of SNP TSC0040131
rtctataaaccta

SEQ ID NO: 159423 - DNA, 13 bp, Artificial Sequence
  Oligonucleotide for detection of SNP TSC0040131
taggtcgatagay

SEQ ID NO: 159424 - DNA, 13 bp, Artificial Sequence
  Oligonucleotide for detection of SNP TSC0040131
rtctatcgaccta

SEQ ID NO: 159425 - DNA, 13 bp, Artificial Sequence
  Oligonucleotide for detection of SNP TSC0040132
tatattatggtag

SEQ ID NO: 159426 - DNA, 13 bp, Artificial Sequence
  Oligonucleotide for detection of SNP TSC0040132
ctaccataatata

SEQ ID NO: 159427 - DNA, 13 bp, Artificial Sequence
  Oligonucleotide for detection of SNP TSC0040132
tatattgtggtag

SEQ ID NO: 159428 - DNA, 13 bp, Artificial Sequence
  Oligonucleotide for detection of SNP TSC0040132
ctaccacaatata

SEQ ID NO: 159429 - DNA, 13 bp, Artificial Sequence
  Oligonucleotide for detection of SNP TSC0040132
tatatcgtggtag

SEQ ID NO: 159430 - DNA, 13 bp, Artificial Sequence
  Oligonucleotide for detection of SNP TSC0040132
ctaccacgatata

SEQ ID NO: 159431 - DNA, 13 bp, Artificial Sequence
  Oligonucleotide for detection of SNP TSC0040132
ttgttatggtatg

SEQ ID NO: 159432 - DNA, 13 bp, Artificial Sequence
  Oligonucleotide for detection of SNP TSC0040132
cataccataacaa

SEQ ID NO: 159433 - DNA, 13 bp, Artificial Sequence
  Oligonucleotide for detection of SNP TSC0040132
ttgttacggtatg

SEQ ID NO: 159434 - DNA, 13 bp, Artificial Sequence
  Oligonucleotide for detection of SNP TSC0040132
cataccgtaacaa

SEQ ID NO: 159435 - DNA, 13 bp, Artificial Sequence
  Oligonucleotide for detection of SNP TSC0040133
gtgggtatattaa

SEQ ID NO: 159436 - DNA, 13 bp, Artificial Sequence
  Oligonucleotide for detection of SNP TSC0040133
ttaatatacccac

SEQ ID NO: 159437 - DNA, 13 bp, Artificial Sequence
  Oligonucleotide for detection of SNP TSC0040133
gtgggtgtattaa

SEQ ID NO: 159438 - DNA, 13 bp, Artificial Sequence
  Oligonucleotide for detection of SNP TSC0040133
ttaatacacccac

SEQ ID NO: 159439 - DNA, 13 bp, Artificial Sequence
  Oligonucleotide for detection of SNP TSC0040135
ttttggtggttaa

SEQ ID NO: 159440 - DNA, 13 bp, Artificial Sequence
  Oligonucleotide for detection of SNP TSC0040135
ttaaccaccaaaa

SEQ ID NO: 159441 - DNA, 13 bp, Artificial Sequence
  Oligonucleotide for detection of SNP TSC0040135
ttttggcggttaa

SEQ ID NO: 159442 - DNA, 13 bp, Artificial Sequence
  Oligonucleotide for detection of SNP TSC0040135
ttaaccgccaaaa

SEQ ID NO: 159443 - DNA, 13 bp, Artificial Sequence
  Oligonucleotide for detection of SNP TSC0040135
ttaattgttaagg

SEQ ID NO: 159444 - DNA, 13 bp, Artificial Sequence
  Oligonucleotide for detection of SNP TSC0040135
ccttaacaattaa

SEQ ID NO: 159445 - DNA, 13 bp, Artificial Sequence
  Oligonucleotide for detection of SNP TSC0040135
ttaattattaagg

SEQ ID NO: 159446 - DNA, 13 bp, Artificial Sequence
  Oligonucleotide for detection of SNP TSC0040135
ccttaataattaa

SEQ ID NO: 159447 - DNA, 13 bp, Artificial Sequence
  Oligonucleotide for detection of SNP TSC0040135
ttaatcgttaagg

SEQ ID NO: 159448 - DNA, 13 bp, Artificial Sequence
  Oligonucleotide for detection of SNP TSC0040135
ccttaacgattaa

SEQ ID NO: 159449 - DNA, 13 bp, Artificial Sequence
  Oligonucleotide for detection of SNP TSC0040137
agattttgaaggy

SEQ ID NO: 159450 - DNA, 13 bp, Artificial Sequence
  Oligonucleotide for detection of SNP TSC0040137
rccttcaaaatct

SEQ ID NO: 159451 - DNA, 13 bp, Artificial Sequence
  Oligonucleotide for detection of SNP TSC0040137
agatttggaaggy

SEQ ID NO: 159452 - DNA, 13 bp, Artificial Sequence
  Oligonucleotide for detection of SNP TSC0040137
rccttccaaatct

SEQ ID NO: 159453 - DNA, 13 bp, Artificial Sequence
  Oligonucleotide for detection of SNP TSC0040137
agatttcgaaggy

SEQ ID NO: 159454 - DNA, 13 bp, Artificial Sequence
  Oligonucleotide for detection of SNP TSC0040137
rccttcgaaatct

SEQ ID NO: 159455 - DNA, 13 bp, Artificial Sequence
  Oligonucleotide for detection of SNP TSC0040137
agattcggaaggy

SEQ ID NO: 159456 - DNA, 13 bp, Artificial Sequence
  Oligonucleotide for detection of SNP TSC0040137
rccttccgaatct

SEQ ID NO: 159457 - DNA, 13 bp, Artificial Sequence
  Oligonucleotide for detection of SNP TSC0040137
gtttttggaattt

SEQ ID NO: 159458 - DNA, 13 bp, Artificial Sequence
  Oligonucleotide for detection of SNP TSC0040137
aaattccaaaaac

SEQ ID NO: 159459 - DNA, 13 bp, Artificial Sequence
  Oligonucleotide for detection of SNP TSC0040137
gttttttgaattt

SEQ ID NO: 159460 - DNA, 13 bp, Artificial Sequence
  Oligonucleotide for detection of SNP TSC0040137
aaattcaaaaaac

SEQ ID NO: 159461 - DNA, 13 bp, Artificial Sequence
  Oligonucleotide for detection of SNP TSC0040137
gttttcggaattt

SEQ ID NO: 159462 - DNA, 13 bp, Artificial Sequence
  Oligonucleotide for detection of SNP TSC0040137
aaattccgaaaac

SEQ ID NO: 159463 - DNA, 13 bp, Artificial Sequence
  Oligonucleotide for detection of SNP TSC0040137
gtttttcgaattt

SEQ ID NO: 159464 - DNA, 13 bp, Artificial Sequence
  Oligonucleotide for detection of SNP TSC0040137
aaattcgaaaaac

SEQ ID NO: 159465 - DNA, 13 bp, Artificial Sequence
  Oligonucleotide for detection of SNP TSC0040138
atatgtataattt

SEQ ID NO: 159466 - DNA, 13 bp, Artificial Sequence
  Oligonucleotide for detection of SNP TSC0040138
aaattatacatat

SEQ ID NO: 159467 - DNA, 13 bp, Artificial Sequence
  Oligonucleotide for detection of SNP TSC0040138
atatgtgtaattt

SEQ ID NO: 159468 - DNA, 13 bp, Artificial Sequence
  Oligonucleotide for detection of SNP TSC0040138
aaattacacatat

SEQ ID NO: 159469 - DNA, 13 bp, Artificial Sequence
  Oligonucleotide for detection of SNP TSC0040138
atatgcgtaattt

SEQ ID NO: 159470 - DNA, 13 bp, Artificial Sequence
  Oligonucleotide for detection of SNP TSC0040138
aaattacgcatat

SEQ ID NO: 159471 - DNA, 13 bp, Artificial Sequence
  Oligonucleotide for detection of SNP TSC0040138
aaattatgtatat

SEQ ID NO: 159472 - DNA, 13 bp, Artificial Sequence
  Oligonucleotide for detection of SNP TSC0040138
atatacataattt

SEQ ID NO: 159473 - DNA, 13 bp, Artificial Sequence
  Oligonucleotide for detection of SNP TSC0040138
aaattacgtatat

SEQ ID NO: 159474 - DNA, 13 bp, Artificial Sequence
  Oligonucleotide for detection of SNP TSC0040138
atatacgtaattt

SEQ ID NO: 159475 - DNA, 13 bp, Artificial Sequence
  Oligonucleotide for detection of SNP TSC0040140
gaaataatgagtt

SEQ ID NO: 159476 - DNA, 13 bp, Artificial Sequence
  Oligonucleotide for detection of SNP TSC0040140
aactcattatttc

SEQ ID NO: 159477 - DNA, 13 bp, Artificial Sequence
  Oligonucleotide for detection of SNP TSC0040140
gaaatattgagtt

SEQ ID NO: 159478 - DNA, 13 bp, Artificial Sequence
  Oligonucleotide for detection of SNP TSC0040140
aactcaatatttc

SEQ ID NO: 159479 - DNA, 13 bp, Artificial Sequence
  Oligonucleotide for detection of SNP TSC0040140
agtttattattty

SEQ ID NO: 159480 - DNA, 13 bp, Artificial Sequence
  Oligonucleotide for detection of SNP TSC0040140
raaataataaact

SEQ ID NO: 159481 - DNA, 13 bp, Artificial Sequence
  Oligonucleotide for detection of SNP TSC0040140
agtttagtattty

SEQ ID NO: 159482 - DNA, 13 bp, Artificial Sequence
  Oligonucleotide for detection of SNP TSC0040140
raaatactaaact

SEQ ID NO: 159483 - DNA, 13 bp, Artificial Sequence
  Oligonucleotide for detection of SNP TSC0040141
aattgggtagaat

SEQ ID NO: 159484 - DNA, 13 bp, Artificial Sequence
  Oligonucleotide for detection of SNP TSC0040141
attctacccaatt

SEQ ID NO: 159485 - DNA, 13 bp, Artificial Sequence
  Oligonucleotide for detection of SNP TSC0040141
aattggatagaat

SEQ ID NO: 159486 - DNA, 13 bp, Artificial Sequence
  Oligonucleotide for detection of SNP TSC0040141
attctatccaatt

SEQ ID NO: 159487 - DNA, 13 bp, Artificial Sequence
  Oligonucleotide for detection of SNP TSC0040142
attataatgaagg

SEQ ID NO: 159488 - DNA, 13 bp, Artificial Sequence
  Oligonucleotide for detection of SNP TSC0040142
ccttcattataat

SEQ ID NO: 159489 - DNA, 13 bp, Artificial Sequence
  Oligonucleotide for detection of SNP TSC0040142
attatagtgaagg

SEQ ID NO: 159490 - DNA, 13 bp, Artificial Sequence
  Oligonucleotide for detection of SNP TSC0040142
ccttcactataat

SEQ ID NO: 159491 - DNA, 13 bp, Artificial Sequence
  Oligonucleotide for detection of SNP TSC0040147
ggattaaaaatgg

SEQ ID NO: 159492 - DNA, 13 bp, Artificial Sequence
  Oligonucleotide for detection of SNP TSC0040147
ccatttttaatcc

SEQ ID NO: 159493 - DNA, 13 bp, Artificial Sequence
  Oligonucleotide for detection of SNP TSC0040147
ggattagaaatgg

SEQ ID NO: 159494 - DNA, 13 bp, Artificial Sequence
  Oligonucleotide for detection of SNP TSC0040147
ccatttctaatcc

SEQ ID NO: 159495 - DNA, 13 bp, Artificial Sequence
  Oligonucleotide for detection of SNP TSC0040148
gttttaggttttt

SEQ ID NO: 159496 - DNA, 13 bp, Artificial Sequence
  Oligonucleotide for detection of SNP TSC0040148
aaaaacctaaaac

SEQ ID NO: 159497 - DNA, 13 bp, Artificial Sequence
  Oligonucleotide for detection of SNP TSC0040149
tgaataggattty

SEQ ID NO: 159498 - DNA, 13 bp, Artificial Sequence
  Oligonucleotide for detection of SNP TSC0040149
raaatcctattca

SEQ ID NO: 159499 - DNA, 13 bp, Artificial Sequence
  Oligonucleotide for detection of SNP TSC0040149
ggagttatattta

SEQ ID NO: 159500 - DNA, 13 bp, Artificial Sequence
  Oligonucleotide for detection of SNP TSC0040149
taaatataactcc

SEQ ID NO: 159501 - DNA, 13 bp, Artificial Sequence
  Oligonucleotide for detection of SNP TSC0040149
ggagttttattta

SEQ ID NO: 159502 - DNA, 13 bp, Artificial Sequence
  Oligonucleotide for detection of SNP TSC0040149
taaataaaactcc

SEQ ID NO: 159503 - DNA, 13 bp, Artificial Sequence
  Oligonucleotide for detection of SNP TSC0040150
ttttttataggat

SEQ ID NO: 159504 - DNA, 13 bp, Artificial Sequence
  Oligonucleotide for detection of SNP TSC0040150
atcctataaaaaa

SEQ ID NO: 159505 - DNA, 13 bp, Artificial Sequence
  Oligonucleotide for detection of SNP TSC0040150
ttttttgtaggat

SEQ ID NO: 159506 - DNA, 13 bp, Artificial Sequence
  Oligonucleotide for detection of SNP TSC0040150
atcctacaaaaaa

SEQ ID NO: 159507 - DNA, 13 bp, Artificial Sequence
  Oligonucleotide for detection of SNP TSC0040151
agatggaagaggy

SEQ ID NO: 159508 - DNA, 13 bp, Artificial Sequence
  Oligonucleotide for detection of SNP TSC0040151
rcctcttccatct

SEQ ID NO: 159509 - DNA, 13 bp, Artificial Sequence
  Oligonucleotide for detection of SNP TSC0040151
agatggtagaggy

SEQ ID NO: 159510 - DNA, 13 bp, Artificial Sequence
  Oligonucleotide for detection of SNP TSC0040151
rcctctaccatct

SEQ ID NO: 159511 - DNA, 13 bp, Artificial Sequence
  Oligonucleotide for detection of SNP TSC0040151
gttttttttattt

SEQ ID NO: 159512 - DNA, 13 bp, Artificial Sequence
  Oligonucleotide for detection of SNP TSC0040151
aaataaaaaaaac

SEQ ID NO: 159513 - DNA, 13 bp, Artificial Sequence
  Oligonucleotide for detection of SNP TSC0040152
atagttaaattta

SEQ ID NO: 159514 - DNA, 13 bp, Artificial Sequence
  Oligonucleotide for detection of SNP TSC0040152
taaatttaactat

SEQ ID NO: 159515 - DNA, 13 bp, Artificial Sequence
  Oligonucleotide for detection of SNP TSC0040152
atagttgaattta

SEQ ID NO: 159516 - DNA, 13 bp, Artificial Sequence
  Oligonucleotide for detection of SNP TSC0040152
taaattcaactat

SEQ ID NO: 159517 - DNA, 13 bp, Artificial Sequence
  Oligonucleotide for detection of SNP TSC0040152
atagtcgaattta

SEQ ID NO: 159518 - DNA, 13 bp, Artificial Sequence
  Oligonucleotide for detection of SNP TSC0040152
taaattcgactat

SEQ ID NO: 159519 - DNA, 13 bp, Artificial Sequence
  Oligonucleotide for detection of SNP TSC0040152
taaatttggttat

SEQ ID NO: 159520 - DNA, 13 bp, Artificial Sequence
  Oligonucleotide for detection of SNP TSC0040152
ataaccaaattta

SEQ ID NO: 159521 - DNA, 13 bp, Artificial Sequence
  Oligonucleotide for detection of SNP TSC0040152
taaattcggttat

SEQ ID NO: 159522 - DNA, 13 bp, Artificial Sequence
  Oligonucleotide for detection of SNP TSC0040152
ataaccgaattta

SEQ ID NO: 159523 - DNA, 13 bp, Artificial Sequence
  Oligonucleotide for detection of SNP TSC0040154
tttgaggagtatt

SEQ ID NO: 159524 - DNA, 13 bp, Artificial Sequence
  Oligonucleotide for detection of SNP TSC0040154
aatactcctcaaa

SEQ ID NO: 159525 - DNA, 13 bp, Artificial Sequence
  Oligonucleotide for detection of SNP TSC0040154
tttgagaagtatt

SEQ ID NO: 159526 - DNA, 13 bp, Artificial Sequence
  Oligonucleotide for detection of SNP TSC0040154
aatacttctcaaa

SEQ ID NO: 159527 - DNA, 13 bp, Artificial Sequence
  Oligonucleotide for detection of SNP TSC0040157
gagagagtaggag

SEQ ID NO: 159528 - DNA, 13 bp, Artificial Sequence
  Oligonucleotide for detection of SNP TSC0040157
ctcctactctctc

SEQ ID NO: 159529 - DNA, 13 bp, Artificial Sequence
  Oligonucleotide for detection of SNP TSC0040157
gagagattaggag

SEQ ID NO: 159530 - DNA, 13 bp, Artificial Sequence
  Oligonucleotide for detection of SNP TSC0040157
ctcctaatctctc

SEQ ID NO: 159531 - DNA, 13 bp, Artificial Sequence
  Oligonucleotide for detection of SNP TSC0040158
gatgatatttatt

SEQ ID NO: 159532 - DNA, 13 bp, Artificial Sequence
  Oligonucleotide for detection of SNP TSC0040158
aataaatatcatc

SEQ ID NO: 159533 - DNA, 13 bp, Artificial Sequence
  Oligonucleotide for detection of SNP TSC0040158
gatgatgtttatt

SEQ ID NO: 159534 - DNA, 13 bp, Artificial Sequence
  Oligonucleotide for detection of SNP TSC0040158
aataaacatcatc

SEQ ID NO: 159535 - DNA, 13 bp, Artificial Sequence
  Oligonucleotide for detection of SNP TSC0040159
tattttattttgt

SEQ ID NO: 159536 - DNA, 13 bp, Artificial Sequence
  Oligonucleotide for detection of SNP TSC0040159
acaaaataaaata

SEQ ID NO: 159537 - DNA, 13 bp, Artificial Sequence
  Oligonucleotide for detection of SNP TSC0040159
tattttgttttgt

SEQ ID NO: 159538 - DNA, 13 bp, Artificial Sequence
  Oligonucleotide for detection of SNP TSC0040159
acaaaacaaaata

SEQ ID NO: 159539 - DNA, 13 bp, Artificial Sequence
  Oligonucleotide for detection of SNP TSC0040159
tatttcgttttgt

SEQ ID NO: 159540 - DNA, 13 bp, Artificial Sequence
  Oligonucleotide for detection of SNP TSC0040159
acaaaacgaaata

SEQ ID NO: 159541 - DNA, 13 bp, Artificial Sequence
  Oligonucleotide for detection of SNP TSC0040159
ataaggtggggta

SEQ ID NO: 159542 - DNA, 13 bp, Artificial Sequence
  Oligonucleotide for detection of SNP TSC0040159
taccccaccttat

SEQ ID NO: 159543 - DNA, 13 bp, Artificial Sequence
  Oligonucleotide for detection of SNP TSC0040159
ataaggcggggta

SEQ ID NO: 159544 - DNA, 13 bp, Artificial Sequence
  Oligonucleotide for detection of SNP TSC0040159
taccccgccttat

SEQ ID NO: 159545 - DNA, 13 bp, Artificial Sequence
  Oligonucleotide for detection of SNP TSC0040160
ttagtgttaatat

SEQ ID NO: 159546 - DNA, 13 bp, Artificial Sequence
  Oligonucleotide for detection of SNP TSC0040160
atattaacactaa

SEQ ID NO: 159547 - DNA, 13 bp, Artificial Sequence
  Oligonucleotide for detection of SNP TSC0040160
ttagtggtaatat

SEQ ID NO: 159548 - DNA, 13 bp, Artificial Sequence
  Oligonucleotide for detection of SNP TSC0040160
atattaccactaa

SEQ ID NO: 159549 - DNA, 13 bp, Artificial Sequence
  Oligonucleotide for detection of SNP TSC0040160
atattaatattga

SEQ ID NO: 159550 - DNA, 13 bp, Artificial Sequence
  Oligonucleotide for detection of SNP TSC0040160
tcaatattaatat

SEQ ID NO: 159551 - DNA, 13 bp, Artificial Sequence
  Oligonucleotide for detection of SNP TSC0040160
atattattattga

SEQ ID NO: 159552 - DNA, 13 bp, Artificial Sequence
  Oligonucleotide for detection of SNP TSC0040160
tcaataataatat

SEQ ID NO: 159553 - DNA, 13 bp, Artificial Sequence
  Oligonucleotide for detection of SNP TSC0040161
aaaaatagattaa

SEQ ID NO: 159554 - DNA, 13 bp, Artificial Sequence
  Oligonucleotide for detection of SNP TSC0040161
ttaatctattttt

SEQ ID NO: 159555 - DNA, 13 bp, Artificial Sequence
  Oligonucleotide for detection of SNP TSC0040161
aaaaatggattaa

SEQ ID NO: 159556 - DNA, 13 bp, Artificial Sequence
  Oligonucleotide for detection of SNP TSC0040161
ttaatccattttt

SEQ ID NO: 159557 - DNA, 13 bp, Artificial Sequence
  Oligonucleotide for detection of SNP TSC0040161
aaaaacggattaa

SEQ ID NO: 159558 - DNA, 13 bp, Artificial Sequence
  Oligonucleotide for detection of SNP TSC0040161
ttaatccgttttt

SEQ ID NO: 159559 - DNA, 13 bp, Artificial Sequence
  Oligonucleotide for detection of SNP TSC0040161
ttagttcgttttt

SEQ ID NO: 159560 - DNA, 13 bp, Artificial Sequence
  Oligonucleotide for detection of SNP TSC0040161
aaaaacgaactaa

SEQ ID NO: 159561 - DNA, 13 bp, Artificial Sequence
  Oligonucleotide for detection of SNP TSC0040162
ggggttattttag

SEQ ID NO: 159562 - DNA, 13 bp, Artificial Sequence
  Oligonucleotide for detection of SNP TSC0040162
ctaaaataacccc

SEQ ID NO: 159563 - DNA, 13 bp, Artificial Sequence
  Oligonucleotide for detection of SNP TSC0040162
ggggtttttttag

SEQ ID NO: 159564 - DNA, 13 bp, Artificial Sequence
  Oligonucleotide for detection of SNP TSC0040162
ctaaaaaaacccc

SEQ ID NO: 159565 - DNA, 13 bp, Artificial Sequence
  Oligonucleotide for detection of SNP TSC0040162
ttggaatgattty

SEQ ID NO: 159566 - DNA, 13 bp, Artificial Sequence
  Oligonucleotide for detection of SNP TSC0040162
raaatcattccaa

SEQ ID NO: 159567 - DNA, 13 bp, Artificial Sequence
  Oligonucleotide for detection of SNP TSC0040162
ttggaaagattty

SEQ ID NO: 159568 - DNA, 13 bp, Artificial Sequence
  Oligonucleotide for detection of SNP TSC0040162
raaatctttccaa

SEQ ID NO: 159569 - DNA, 13 bp, Artificial Sequence
  Oligonucleotide for detection of SNP TSC0040165
agtgagagggagg

SEQ ID NO: 159570 - DNA, 13 bp, Artificial Sequence
  Oligonucleotide for detection of SNP TSC0040165
cctccctctcact

SEQ ID NO: 159571 - DNA, 13 bp, Artificial Sequence
  Oligonucleotide for detection of SNP TSC0040165
agtgagggggagg

SEQ ID NO: 159572 - DNA, 13 bp, Artificial Sequence
  Oligonucleotide for detection of SNP TSC0040165
cctccccctcact

SEQ ID NO: 159573 - DNA, 13 bp, Artificial Sequence
  Oligonucleotide for detection of SNP TSC0040165
agcgagagggagg

SEQ ID NO: 159574 - DNA, 13 bp, Artificial Sequence
  Oligonucleotide for detection of SNP TSC0040165
cctccctctcgct

SEQ ID NO: 159575 - DNA, 13 bp, Artificial Sequence
  Oligonucleotide for detection of SNP TSC0040165
agcgagggggagg

SEQ ID NO: 159576 - DNA, 13 bp, Artificial Sequence
  Oligonucleotide for detection of SNP TSC0040165
cctccccctcgct

SEQ ID NO: 159577 - DNA, 13 bp, Artificial Sequence
  Oligonucleotide for detection of SNP TSC0040166
taggatgttatag

SEQ ID NO: 159578 - DNA, 13 bp, Artificial Sequence
  Oligonucleotide for detection of SNP TSC0040166
ctataacatccta

SEQ ID NO: 159579 - DNA, 13 bp, Artificial Sequence
  Oligonucleotide for detection of SNP TSC0040166
taggatattatag

SEQ ID NO: 159580 - DNA, 13 bp, Artificial Sequence
  Oligonucleotide for detection of SNP TSC0040166
ctataatatccta

SEQ ID NO: 159581 - DNA, 13 bp, Artificial Sequence
  Oligonucleotide for detection of SNP TSC0040167
ttttgtgaaatgt

SEQ ID NO: 159582 - DNA, 13 bp, Artificial Sequence
  Oligonucleotide for detection of SNP TSC0040167
acatttcacaaaa

SEQ ID NO: 159583 - DNA, 13 bp, Artificial Sequence
  Oligonucleotide for detection of SNP TSC0040167
ttttgtaaaatgt

SEQ ID NO: 159584 - DNA, 13 bp, Artificial Sequence
  Oligonucleotide for detection of SNP TSC0040167
acattttacaaaa

SEQ ID NO: 159585 - DNA, 13 bp, Artificial Sequence
  Oligonucleotide for detection of SNP TSC0040168
tttttaaaaaatt

SEQ ID NO: 159586 - DNA, 13 bp, Artificial Sequence
  Oligonucleotide for detection of SNP TSC0040168
aattttttaaaaa

SEQ ID NO: 159587 - DNA, 13 bp, Artificial Sequence
  Oligonucleotide for detection of SNP TSC0040168
tttttagaaaatt

SEQ ID NO: 159588 - DNA, 13 bp, Artificial Sequence
  Oligonucleotide for detection of SNP TSC0040168
aattttctaaaaa

SEQ ID NO: 159589 - DNA, 13 bp, Artificial Sequence
  Oligonucleotide for detection of SNP TSC0040169
aagattatattay

SEQ ID NO: 159590 - DNA, 13 bp, Artificial Sequence
  Oligonucleotide for detection of SNP TSC0040169
rtaatataatctt

SEQ ID NO: 159591 - DNA, 13 bp, Artificial Sequence
  Oligonucleotide for detection of SNP TSC0040169
aagattgtattay

SEQ ID NO: 159592 - DNA, 13 bp, Artificial Sequence
  Oligonucleotide for detection of SNP TSC0040169
rtaatacaatctt

SEQ ID NO: 159593 - DNA, 13 bp, Artificial Sequence
  Oligonucleotide for detection of SNP TSC0040169
aagatcgtattay

SEQ ID NO: 159594 - DNA, 13 bp, Artificial Sequence
  Oligonucleotide for detection of SNP TSC0040169
rtaatacgatctt

SEQ ID NO: 159595 - DNA, 13 bp, Artificial Sequence
  Oligonucleotide for detection of SNP TSC0040170
atatttaggttgg

SEQ ID NO: 159596 - DNA, 13 bp, Artificial Sequence
  Oligonucleotide for detection of SNP TSC0040170
ccaacctaaatat

SEQ ID NO: 159597 - DNA, 13 bp, Artificial Sequence
  Oligonucleotide for detection of SNP TSC0040170
atatttgggttgg

SEQ ID NO: 159598 - DNA, 13 bp, Artificial Sequence
  Oligonucleotide for detection of SNP TSC0040170
ccaacccaaatat

SEQ ID NO: 159599 - DNA, 13 bp, Artificial Sequence
  Oligonucleotide for detection of SNP TSC0040170
atattcgggttgg

SEQ ID NO: 159600 - DNA, 13 bp, Artificial Sequence
  Oligonucleotide for detection of SNP TSC0040170
ccaacccgaatat

SEQ ID NO: 159601 - DNA, 13 bp, Artificial Sequence
  Oligonucleotide for detection of SNP TSC0040170
ttagtttgggtgt

SEQ ID NO: 159602 - DNA, 13 bp, Artificial Sequence
  Oligonucleotide for detection of SNP TSC0040170
acacccaaactaa

SEQ ID NO: 159603 - DNA, 13 bp, Artificial Sequence
  Oligonucleotide for detection of SNP TSC0040170
ttagttcgggtgt

SEQ ID NO: 159604 - DNA, 13 bp, Artificial Sequence
  Oligonucleotide for detection of SNP TSC0040170
acacccgaactaa

SEQ ID NO: 159605 - DNA, 13 bp, Artificial Sequence
  Oligonucleotide for detection of SNP TSC0040173
ttttaatgttaty

SEQ ID NO: 159606 - DNA, 13 bp, Artificial Sequence
  Oligonucleotide for detection of SNP TSC0040173
rataacattaaaa

SEQ ID NO: 159607 - DNA, 13 bp, Artificial Sequence
  Oligonucleotide for detection of SNP TSC0040173
ttttaacgttaty

SEQ ID NO: 159608 - DNA, 13 bp, Artificial Sequence
  Oligonucleotide for detection of SNP TSC0040173
rataacgttaaaa

SEQ ID NO: 159609 - DNA, 13 bp, Artificial Sequence
  Oligonucleotide for detection of SNP TSC0040173
gataatgttgaaa

SEQ ID NO: 159610 - DNA, 13 bp, Artificial Sequence
  Oligonucleotide for detection of SNP TSC0040173
tttcaacattatc

SEQ ID NO: 159611 - DNA, 13 bp, Artificial Sequence
  Oligonucleotide for detection of SNP TSC0040173
gataatattgaaa

SEQ ID NO: 159612 - DNA, 13 bp, Artificial Sequence
  Oligonucleotide for detection of SNP TSC0040173
tttcaatattatc

SEQ ID NO: 159613 - DNA, 13 bp, Artificial Sequence
  Oligonucleotide for detection of SNP TSC0040173
gataacgttgaaa

SEQ ID NO: 159614 - DNA, 13 bp, Artificial Sequence
  Oligonucleotide for detection of SNP TSC0040173
tttcaacgttatc

SEQ ID NO: 159615 - DNA, 13 bp, Artificial Sequence
  Oligonucleotide for detection of SNP TSC0040184
tggaattttttty

SEQ ID NO: 159616 - DNA, 13 bp, Artificial Sequence
  Oligonucleotide for detection of SNP TSC0040184
raaaaaaattcca

SEQ ID NO: 159617 - DNA, 13 bp, Artificial Sequence
  Oligonucleotide for detection of SNP TSC0040184
tggaatgttttty

SEQ ID NO: 159618 - DNA, 13 bp, Artificial Sequence
  Oligonucleotide for detection of SNP TSC0040184
raaaaacattcca

SEQ ID NO: 159619 - DNA, 13 bp, Artificial Sequence
  Oligonucleotide for detection of SNP TSC0040184
tggaacgttttty

SEQ ID NO: 159620 - DNA, 13 bp, Artificial Sequence
  Oligonucleotide for detection of SNP TSC0040184
raaaaacgttcca

SEQ ID NO: 159621 - DNA, 13 bp, Artificial Sequence
  Oligonucleotide for detection of SNP TSC0040184
gggggaagtttta

SEQ ID NO: 159622 - DNA, 13 bp, Artificial Sequence
  Oligonucleotide for detection of SNP TSC0040184
taaaacttccccc

SEQ ID NO: 159623 - DNA, 13 bp, Artificial Sequence
  Oligonucleotide for detection of SNP TSC0040184
gggggatgtttta

SEQ ID NO: 159624 - DNA, 13 bp, Artificial Sequence
  Oligonucleotide for detection of SNP TSC0040184
taaaacatccccc

SEQ ID NO: 159625 - DNA, 13 bp, Artificial Sequence
  Oligonucleotide for detection of SNP TSC0040184
gggggacgtttta

SEQ ID NO: 159626 - DNA, 13 bp, Artificial Sequence
  Oligonucleotide for detection of SNP TSC0040184
taaaacgtccccc

SEQ ID NO: 159627 - DNA, 13 bp, Artificial Sequence
  Oligonucleotide for detection of SNP TSC0040185
tttttcgttagta

SEQ ID NO: 159628 - DNA, 13 bp, Artificial Sequence
  Oligonucleotide for detection of SNP TSC0040185
tactaacgaaaaa

SEQ ID NO: 159629 - DNA, 13 bp, Artificial Sequence
  Oligonucleotide for detection of SNP TSC0040185
tattggtggaggg

SEQ ID NO: 159630 - DNA, 13 bp, Artificial Sequence
  Oligonucleotide for detection of SNP TSC0040185
ccctccaccaata

SEQ ID NO: 159631 - DNA, 13 bp, Artificial Sequence
  Oligonucleotide for detection of SNP TSC0040185
tattggaggaggg

SEQ ID NO: 159632 - DNA, 13 bp, Artificial Sequence
  Oligonucleotide for detection of SNP TSC0040185
ccctcctccaata

SEQ ID NO: 159633 - DNA, 13 bp, Artificial Sequence
  Oligonucleotide for detection of SNP TSC0040185
tattggcggaggg

SEQ ID NO: 159634 - DNA, 13 bp, Artificial Sequence
  Oligonucleotide for detection of SNP TSC0040185
ccctccgccaata

SEQ ID NO: 159635 - DNA, 13 bp, Artificial Sequence
  Oligonucleotide for detection of SNP TSC0040186
aaaaaatggaagg

SEQ ID NO: 159636 - DNA, 13 bp, Artificial Sequence
  Oligonucleotide for detection of SNP TSC0040186
ccttccatttttt

SEQ ID NO: 159637 - DNA, 13 bp, Artificial Sequence
  Oligonucleotide for detection of SNP TSC0040186
aaaaaacggaagg

SEQ ID NO: 159638 - DNA, 13 bp, Artificial Sequence
  Oligonucleotide for detection of SNP TSC0040186
ccttccgtttttt

SEQ ID NO: 159639 - DNA, 13 bp, Artificial Sequence
  Oligonucleotide for detection of SNP TSC0040189
gaaaatgaaattt

SEQ ID NO: 159640 - DNA, 13 bp, Artificial Sequence
  Oligonucleotide for detection of SNP TSC0040189
aaatttcattttc

SEQ ID NO: 159641 - DNA, 13 bp, Artificial Sequence
  Oligonucleotide for detection of SNP TSC0040189
gaaaataaaattt

SEQ ID NO: 159642 - DNA, 13 bp, Artificial Sequence
  Oligonucleotide for detection of SNP TSC0040189
aaattttattttc

SEQ ID NO: 159643 - DNA, 13 bp, Artificial Sequence
  Oligonucleotide for detection of SNP TSC0040190
tttgtatttgtay

SEQ ID NO: 159644 - DNA, 13 bp, Artificial Sequence
  Oligonucleotide for detection of SNP TSC0040190
rtacaaatacaaa

SEQ ID NO: 159645 - DNA, 13 bp, Artificial Sequence
  Oligonucleotide for detection of SNP TSC0040190
tttgtagttgtay

SEQ ID NO: 159646 - DNA, 13 bp, Artificial Sequence
  Oligonucleotide for detection of SNP TSC0040190
rtacaactacaaa

SEQ ID NO: 159647 - DNA, 13 bp, Artificial Sequence
  Oligonucleotide for detection of SNP TSC0040190
gtataggtatagg

SEQ ID NO: 159648 - DNA, 13 bp, Artificial Sequence
  Oligonucleotide for detection of SNP TSC0040190
cctatacctatac

SEQ ID NO: 159649 - DNA, 13 bp, Artificial Sequence
  Oligonucleotide for detection of SNP TSC0040190
gtatagttatagg

SEQ ID NO: 159650 - DNA, 13 bp, Artificial Sequence
  Oligonucleotide for detection of SNP TSC0040190
cctataactatac

SEQ ID NO: 159651 - DNA, 13 bp, Artificial Sequence
  Oligonucleotide for detection of SNP TSC0040191
gtagaataggttt

SEQ ID NO: 159652 - DNA, 13 bp, Artificial Sequence
  Oligonucleotide for detection of SNP TSC0040191
aaacctattctac

SEQ ID NO: 159653 - DNA, 13 bp, Artificial Sequence
  Oligonucleotide for detection of SNP TSC0040191
gtagaagaggttt

SEQ ID NO: 159654 - DNA, 13 bp, Artificial Sequence
  Oligonucleotide for detection of SNP TSC0040191
aaacctcttctac

SEQ ID NO: 159655 - DNA, 13 bp, Artificial Sequence
  Oligonucleotide for detection of SNP TSC0040191
agatttattttay

SEQ ID NO: 159656 - DNA, 13 bp, Artificial Sequence
  Oligonucleotide for detection of SNP TSC0040191
rtaaaataaatct

SEQ ID NO: 159657 - DNA, 13 bp, Artificial Sequence
  Oligonucleotide for detection of SNP TSC0040191
agattttttttay

SEQ ID NO: 159658 - DNA, 13 bp, Artificial Sequence
  Oligonucleotide for detection of SNP TSC0040191
rtaaaaaaaatct

SEQ ID NO: 159659 - DNA, 13 bp, Artificial Sequence
  Oligonucleotide for detection of SNP TSC0040192
aaggtgggaggat

SEQ ID NO: 159660 - DNA, 13 bp, Artificial Sequence
  Oligonucleotide for detection of SNP TSC0040192
atcctcccacctt

SEQ ID NO: 159661 - DNA, 13 bp, Artificial Sequence
  Oligonucleotide for detection of SNP TSC0040192
aaggtgagaggat

SEQ ID NO: 159662 - DNA, 13 bp, Artificial Sequence
  Oligonucleotide for detection of SNP TSC0040192
atcctctcacctt

SEQ ID NO: 159663 - DNA, 13 bp, Artificial Sequence
  Oligonucleotide for detection of SNP TSC0040193
tttttaataagga

SEQ ID NO: 159664 - DNA, 13 bp, Artificial Sequence
  Oligonucleotide for detection of SNP TSC0040193
tccttattaaaaa

SEQ ID NO: 159665 - DNA, 13 bp, Artificial Sequence
  Oligonucleotide for detection of SNP TSC0040193
tttttattaagga

SEQ ID NO: 159666 - DNA, 13 bp, Artificial Sequence
  Oligonucleotide for detection of SNP TSC0040193
tccttaataaaaa

SEQ ID NO: 159667 - DNA, 13 bp, Artificial Sequence
  Oligonucleotide for detection of SNP TSC0040193
tttttattggaaa

SEQ ID NO: 159668 - DNA, 13 bp, Artificial Sequence
  Oligonucleotide for detection of SNP TSC0040193
tttccaataaaaa

SEQ ID NO: 159669 - DNA, 13 bp, Artificial Sequence
  Oligonucleotide for detection of SNP TSC0040193
tttttaatggaaa

SEQ ID NO: 159670 - DNA, 13 bp, Artificial Sequence
  Oligonucleotide for detection of SNP TSC0040193
tttccattaaaaa

SEQ ID NO: 159671 - DNA, 13 bp, Artificial Sequence
  Oligonucleotide for detection of SNP TSC0040194
tattggattttta

SEQ ID NO: 159672 - DNA, 13 bp, Artificial Sequence
  Oligonucleotide for detection of SNP TSC0040194
taaaaatccaata

SEQ ID NO: 159673 - DNA, 13 bp, Artificial Sequence
  Oligonucleotide for detection of SNP TSC0040194
tattgggttttta

SEQ ID NO: 159674 - DNA, 13 bp, Artificial Sequence
  Oligonucleotide for detection of SNP TSC0040194
taaaaacccaata

SEQ ID NO: 159675 - DNA, 13 bp, Artificial Sequence
  Oligonucleotide for detection of SNP TSC0040195
ttttttataagty

SEQ ID NO: 159676 - DNA, 13 bp, Artificial Sequence
  Oligonucleotide for detection of SNP TSC0040195
racttataaaaaa

SEQ ID NO: 159677 - DNA, 13 bp, Artificial Sequence
  Oligonucleotide for detection of SNP TSC0040195
ttttttttaagty

SEQ ID NO: 159678 - DNA, 13 bp, Artificial Sequence
  Oligonucleotide for detection of SNP TSC0040195
racttaaaaaaaa

SEQ ID NO: 159679 - DNA, 13 bp, Artificial Sequence
  Oligonucleotide for detection of SNP TSC0040195
gatttatgaaaag

SEQ ID NO: 159680 - DNA, 13 bp, Artificial Sequence
  Oligonucleotide for detection of SNP TSC0040195
cttttcataaatc

SEQ ID NO: 159681 - DNA, 13 bp, Artificial Sequence
  Oligonucleotide for detection of SNP TSC0040195
gatttaggaaaag

SEQ ID NO: 159682 - DNA, 13 bp, Artificial Sequence
  Oligonucleotide for detection of SNP TSC0040195
cttttcctaaatc

SEQ ID NO: 159683 - DNA, 13 bp, Artificial Sequence
  Oligonucleotide for detection of SNP TSC0040199
attttagtttatt

SEQ ID NO: 159684 - DNA, 13 bp, Artificial Sequence
  Oligonucleotide for detection of SNP TSC0040199
aataaactaaaat

SEQ ID NO: 159685 - DNA, 13 bp, Artificial Sequence
  Oligonucleotide for detection of SNP TSC0040199
attttaatttatt

SEQ ID NO: 159686 - DNA, 13 bp, Artificial Sequence
  Oligonucleotide for detection of SNP TSC0040199
aataaattaaaat

SEQ ID NO: 159687 - DNA, 13 bp, Artificial Sequence
  Oligonucleotide for detection of SNP TSC0040200
gtgttgaagtgtt

SEQ ID NO: 159688 - DNA, 13 bp, Artificial Sequence
  Oligonucleotide for detection of SNP TSC0040200
aacacttcaacac

SEQ ID NO: 159689 - DNA, 13 bp, Artificial Sequence
  Oligonucleotide for detection of SNP TSC0040200
gtgttggagtgtt

SEQ ID NO: 159690 - DNA, 13 bp, Artificial Sequence
  Oligonucleotide for detection of SNP TSC0040200
aacactccaacac

SEQ ID NO: 159691 - DNA, 13 bp, Artificial Sequence
  Oligonucleotide for detection of SNP TSC0040201
tagagaagagtga

SEQ ID NO: 159692 - DNA, 13 bp, Artificial Sequence
  Oligonucleotide for detection of SNP TSC0040201
tcactcttctcta

SEQ ID NO: 159693 - DNA, 13 bp, Artificial Sequence
  Oligonucleotide for detection of SNP TSC0040201
tagagatgagtga

SEQ ID NO: 159694 - DNA, 13 bp, Artificial Sequence
  Oligonucleotide for detection of SNP TSC0040201
tcactcatctcta

SEQ ID NO: 159695 - DNA, 13 bp, Artificial Sequence
  Oligonucleotide for detection of SNP TSC0040201
tagagacgagtga

SEQ ID NO: 159696 - DNA, 13 bp, Artificial Sequence
  Oligonucleotide for detection of SNP TSC0040201
tcactcgtctcta

SEQ ID NO: 159697 - DNA, 13 bp, Artificial Sequence
  Oligonucleotide for detection of SNP TSC0040202
gaatatgtgaaat

SEQ ID NO: 159698 - DNA, 13 bp, Artificial Sequence
  Oligonucleotide for detection of SNP TSC0040202
atttcacatattc

SEQ ID NO: 159699 - DNA, 13 bp, Artificial Sequence
  Oligonucleotide for detection of SNP TSC0040202
gaatatatgaaat

SEQ ID NO: 159700 - DNA, 13 bp, Artificial Sequence
  Oligonucleotide for detection of SNP TSC0040202
atttcatatattc

SEQ ID NO: 159701 - DNA, 13 bp, Artificial Sequence
  Oligonucleotide for detection of SNP TSC0040203
taatagattttty

SEQ ID NO: 159702 - DNA, 13 bp, Artificial Sequence
  Oligonucleotide for detection of SNP TSC0040203
raaaaatctatta

SEQ ID NO: 159703 - DNA, 13 bp, Artificial Sequence
  Oligonucleotide for detection of SNP TSC0040204
agtaaatggaaag

SEQ ID NO: 159704 - DNA, 13 bp, Artificial Sequence
  Oligonucleotide for detection of SNP TSC0040204
ctttccatttact

SEQ ID NO: 159705 - DNA, 13 bp, Artificial Sequence
  Oligonucleotide for detection of SNP TSC0040204
agtaaagggaaag

SEQ ID NO: 159706 - DNA, 13 bp, Artificial Sequence
  Oligonucleotide for detection of SNP TSC0040204
ctttccctttact

SEQ ID NO: 159707 - DNA, 13 bp, Artificial Sequence
  Oligonucleotide for detection of SNP TSC0040204
agtaaacggaaag

SEQ ID NO: 159708 - DNA, 13 bp, Artificial Sequence
  Oligonucleotide for detection of SNP TSC0040204
ctttccgtttact

SEQ ID NO: 159709 - DNA, 13 bp, Artificial Sequence
  Oligonucleotide for detection of SNP TSC0040205
gtgggaaagtgta

SEQ ID NO: 159710 - DNA, 13 bp, Artificial Sequence
  Oligonucleotide for detection of SNP TSC0040205
tacactttcccac

SEQ ID NO: 159711 - DNA, 13 bp, Artificial Sequence
  Oligonucleotide for detection of SNP TSC0040205
gtgggatagtgta

SEQ ID NO: 159712 - DNA, 13 bp, Artificial Sequence
  Oligonucleotide for detection of SNP TSC0040205
tacactatcccac

SEQ ID NO: 159713 - DNA, 13 bp, Artificial Sequence
  Oligonucleotide for detection of SNP TSC0040205
gtgggagagtgta

SEQ ID NO: 159714 - DNA, 13 bp, Artificial Sequence
  Oligonucleotide for detection of SNP TSC0040205
tacactctcccac

SEQ ID NO: 159715 - DNA, 13 bp, Artificial Sequence
  Oligonucleotide for detection of SNP TSC0040205
tatatttttttay

SEQ ID NO: 159716 - DNA, 13 bp, Artificial Sequence
  Oligonucleotide for detection of SNP TSC0040205
rtaaaaaaatata

SEQ ID NO: 159717 - DNA, 13 bp, Artificial Sequence
  Oligonucleotide for detection of SNP TSC0040205
tatattattttay

SEQ ID NO: 159718 - DNA, 13 bp, Artificial Sequence
  Oligonucleotide for detection of SNP TSC0040205
rtaaaataatata

SEQ ID NO: 159719 - DNA, 13 bp, Artificial Sequence
  Oligonucleotide for detection of SNP TSC0040206
tgtaaaatgggag

SEQ ID NO: 159720 - DNA, 13 bp, Artificial Sequence
  Oligonucleotide for detection of SNP TSC0040206
ctcccattttaca

SEQ ID NO: 159721 - DNA, 13 bp, Artificial Sequence
  Oligonucleotide for detection of SNP TSC0040206
tgtaaattgggag

SEQ ID NO: 159722 - DNA, 13 bp, Artificial Sequence
  Oligonucleotide for detection of SNP TSC0040206
ctcccaatttaca

SEQ ID NO: 159723 - DNA, 13 bp, Artificial Sequence
  Oligonucleotide for detection of SNP TSC0040206
tgtaaagtgggag

SEQ ID NO: 159724 - DNA, 13 bp, Artificial Sequence
  Oligonucleotide for detection of SNP TSC0040206
ctcccactttaca

SEQ ID NO: 159725 - DNA, 13 bp, Artificial Sequence
  Oligonucleotide for detection of SNP TSC0040207
tagaatagaagtt

SEQ ID NO: 159726 - DNA, 13 bp, Artificial Sequence
  Oligonucleotide for detection of SNP TSC0040207
aacttctattcta

SEQ ID NO: 159727 - DNA, 13 bp, Artificial Sequence
  Oligonucleotide for detection of SNP TSC0040207
tagaattgaagtt

SEQ ID NO: 159728 - DNA, 13 bp, Artificial Sequence
  Oligonucleotide for detection of SNP TSC0040207
aacttcaattcta

SEQ ID NO: 159729 - DNA, 13 bp, Artificial Sequence
  Oligonucleotide for detection of SNP TSC0040207
tagaatggaagtt

SEQ ID NO: 159730 - DNA, 13 bp, Artificial Sequence
  Oligonucleotide for detection of SNP TSC0040207
aacttccattcta

SEQ ID NO: 159731 - DNA, 13 bp, Artificial Sequence
  Oligonucleotide for detection of SNP TSC0040207
tagaatcgaagtt

SEQ ID NO: 159732 - DNA, 13 bp, Artificial Sequence
  Oligonucleotide for detection of SNP TSC0040207
aacttcgattcta

SEQ ID NO: 159733 - DNA, 13 bp, Artificial Sequence
  Oligonucleotide for detection of SNP TSC0040207
tagaacggaagtt

SEQ ID NO: 159734 - DNA, 13 bp, Artificial Sequence
  Oligonucleotide for detection of SNP TSC0040207
aacttccgttcta

SEQ ID NO: 159735 - DNA, 13 bp, Artificial Sequence
  Oligonucleotide for detection of SNP TSC0040207
agttttcgttttg

SEQ ID NO: 159736 - DNA, 13 bp, Artificial Sequence
  Oligonucleotide for detection of SNP TSC0040207
caaaacgaaaact

SEQ ID NO: 159737 - DNA, 13 bp, Artificial Sequence
  Oligonucleotide for detection of SNP TSC0040212
aaattttgtttta

SEQ ID NO: 159738 - DNA, 13 bp, Artificial Sequence
  Oligonucleotide for detection of SNP TSC0040212
taaaacaaaattt

SEQ ID NO: 159739 - DNA, 13 bp, Artificial Sequence
  Oligonucleotide for detection of SNP TSC0040212
aaatttcgtttta

SEQ ID NO: 159740 - DNA, 13 bp, Artificial Sequence
  Oligonucleotide for detection of SNP TSC0040212
taaaacgaaattt

SEQ ID NO: 159741 - DNA, 13 bp, Artificial Sequence
  Oligonucleotide for detection of SNP TSC0040212
tgaggtgaaattt

SEQ ID NO: 159742 - DNA, 13 bp, Artificial Sequence
  Oligonucleotide for detection of SNP TSC0040212
aaatttcacctca

SEQ ID NO: 159743 - DNA, 13 bp, Artificial Sequence
  Oligonucleotide for detection of SNP TSC0040212
tgaggtaaaattt

SEQ ID NO: 159744 - DNA, 13 bp, Artificial Sequence
  Oligonucleotide for detection of SNP TSC0040212
aaattttacctca

SEQ ID NO: 159745 - DNA, 13 bp, Artificial Sequence
  Oligonucleotide for detection of SNP TSC0040212
tgaggcgaaattt

SEQ ID NO: 159746 - DNA, 13 bp, Artificial Sequence
  Oligonucleotide for detection of SNP TSC0040212
aaatttcgcctca

SEQ ID NO: 159747 - DNA, 13 bp, Artificial Sequence
  Oligonucleotide for detection of SNP TSC0040213
aaattttgatgga

SEQ ID NO: 159748 - DNA, 13 bp, Artificial Sequence
  Oligonucleotide for detection of SNP TSC0040213
tccatcaaaattt

SEQ ID NO: 159749 - DNA, 13 bp, Artificial Sequence
  Oligonucleotide for detection of SNP TSC0040213
aaatttcgatgga

SEQ ID NO: 159750 - DNA, 13 bp, Artificial Sequence
  Oligonucleotide for detection of SNP TSC0040213
tccatcgaaattt

SEQ ID NO: 159751 - DNA, 13 bp, Artificial Sequence
  Oligonucleotide for detection of SNP TSC0040214
tattatgagagaa

SEQ ID NO: 159752 - DNA, 13 bp, Artificial Sequence
  Oligonucleotide for detection of SNP TSC0040214
ttctctcataata

SEQ ID NO: 159753 - DNA, 13 bp, Artificial Sequence
  Oligonucleotide for detection of SNP TSC0040214
tattataagagaa

SEQ ID NO: 159754 - DNA, 13 bp, Artificial Sequence
  Oligonucleotide for detection of SNP TSC0040214
ttctcttataata

SEQ ID NO: 159755 - DNA, 13 bp, Artificial Sequence
  Oligonucleotide for detection of SNP TSC0040215
ataagagggtaga

SEQ ID NO: 159756 - DNA, 13 bp, Artificial Sequence
  Oligonucleotide for detection of SNP TSC0040215
tctaccctcttat

SEQ ID NO: 159757 - DNA, 13 bp, Artificial Sequence
  Oligonucleotide for detection of SNP TSC0040215
ataagaaggtaga

SEQ ID NO: 159758 - DNA, 13 bp, Artificial Sequence
  Oligonucleotide for detection of SNP TSC0040215
tctaccttcttat

SEQ ID NO: 159759 - DNA, 13 bp, Artificial Sequence
  Oligonucleotide for detection of SNP TSC0040216
aaataaataaaga

SEQ ID NO: 159760 - DNA, 13 bp, Artificial Sequence
  Oligonucleotide for detection of SNP TSC0040216
tctttatttattt

SEQ ID NO: 159761 - DNA, 13 bp, Artificial Sequence
  Oligonucleotide for detection of SNP TSC0040216
aaataagtaaaga

SEQ ID NO: 159762 - DNA, 13 bp, Artificial Sequence
  Oligonucleotide for detection of SNP TSC0040216
tctttacttattt

SEQ ID NO: 159763 - DNA, 13 bp, Artificial Sequence
  Oligonucleotide for detection of SNP TSC0040217
ggttaagtaagga

SEQ ID NO: 159764 - DNA, 13 bp, Artificial Sequence
  Oligonucleotide for detection of SNP TSC0040217
tccttacttaacc

SEQ ID NO: 159765 - DNA, 13 bp, Artificial Sequence
  Oligonucleotide for detection of SNP TSC0040217
ggttaaataagga

SEQ ID NO: 159766 - DNA, 13 bp, Artificial Sequence
  Oligonucleotide for detection of SNP TSC0040217
tccttatttaacc

SEQ ID NO: 159767 - DNA, 13 bp, Artificial Sequence
  Oligonucleotide for detection of SNP TSC0040218
atttattagaaag

SEQ ID NO: 159768 - DNA, 13 bp, Artificial Sequence
  Oligonucleotide for detection of SNP TSC0040218
ctttctaataaat

SEQ ID NO: 159769 - DNA, 13 bp, Artificial Sequence
  Oligonucleotide for detection of SNP TSC0040218
atttatgagaaag

SEQ ID NO: 159770 - DNA, 13 bp, Artificial Sequence
  Oligonucleotide for detection of SNP TSC0040218
ctttctcataaat

SEQ ID NO: 159771 - DNA, 13 bp, Artificial Sequence
  Oligonucleotide for detection of SNP TSC0040218
atttacgagaaag

SEQ ID NO: 159772 - DNA, 13 bp, Artificial Sequence
  Oligonucleotide for detection of SNP TSC0040218
ctttctcgtaaat

SEQ ID NO: 159773 - DNA, 13 bp, Artificial Sequence
  Oligonucleotide for detection of SNP TSC0040218
ttttttggtgggt

SEQ ID NO: 159774 - DNA, 13 bp, Artificial Sequence
  Oligonucleotide for detection of SNP TSC0040218
acccaccaaaaaa

SEQ ID NO: 159775 - DNA, 13 bp, Artificial Sequence
  Oligonucleotide for detection of SNP TSC0040219
tttcgaaaattty

SEQ ID NO: 159776 - DNA, 13 bp, Artificial Sequence
  Oligonucleotide for detection of SNP TSC0040219
raaattttcgaaa

SEQ ID NO: 159777 - DNA, 13 bp, Artificial Sequence
  Oligonucleotide for detection of SNP TSC0040219
tttcgagaattty

SEQ ID NO: 159778 - DNA, 13 bp, Artificial Sequence
  Oligonucleotide for detection of SNP TSC0040219
raaattctcgaaa

SEQ ID NO: 159779 - DNA, 13 bp, Artificial Sequence
  Oligonucleotide for detection of SNP TSC0040220
tatatataaagag

SEQ ID NO: 159780 - DNA, 13 bp, Artificial Sequence
  Oligonucleotide for detection of SNP TSC0040220
ctctttatatata

SEQ ID NO: 159781 - DNA, 13 bp, Artificial Sequence
  Oligonucleotide for detection of SNP TSC0040220
tatatagaaagag

SEQ ID NO: 159782 - DNA, 13 bp, Artificial Sequence
  Oligonucleotide for detection of SNP TSC0040220
ctctttctatata

SEQ ID NO: 159783 - DNA, 13 bp, Artificial Sequence
  Oligonucleotide for detection of SNP TSC0040220
ttttttgtgtata

SEQ ID NO: 159784 - DNA, 13 bp, Artificial Sequence
  Oligonucleotide for detection of SNP TSC0040220
tatacacaaaaaa

SEQ ID NO: 159785 - DNA, 13 bp, Artificial Sequence
  Oligonucleotide for detection of SNP TSC0040220
ttttttttgtata

SEQ ID NO: 159786 - DNA, 13 bp, Artificial Sequence
  Oligonucleotide for detection of SNP TSC0040220
tatacaaaaaaaa

SEQ ID NO: 159787 - DNA, 13 bp, Artificial Sequence
  Oligonucleotide for detection of SNP TSC0040221
ggatggatgaggg

SEQ ID NO: 159788 - DNA, 13 bp, Artificial Sequence
  Oligonucleotide for detection of SNP TSC0040221
ccctcatccatcc

SEQ ID NO: 159789 - DNA, 13 bp, Artificial Sequence
  Oligonucleotide for detection of SNP TSC0040221
ggatgggtgaggg

SEQ ID NO: 159790 - DNA, 13 bp, Artificial Sequence
  Oligonucleotide for detection of SNP TSC0040221
ccctcacccatcc

SEQ ID NO: 159791 - DNA, 13 bp, Artificial Sequence
  Oligonucleotide for detection of SNP TSC0040222
aataggaagtggg

SEQ ID NO: 159792 - DNA, 13 bp, Artificial Sequence
  Oligonucleotide for detection of SNP TSC0040222
cccacttcctatt

SEQ ID NO: 159793 - DNA, 13 bp, Artificial Sequence
  Oligonucleotide for detection of SNP TSC0040222
aataggtagtggg

SEQ ID NO: 159794 - DNA, 13 bp, Artificial Sequence
  Oligonucleotide for detection of SNP TSC0040222
cccactacctatt

SEQ ID NO: 159795 - DNA, 13 bp, Artificial Sequence
  Oligonucleotide for detection of SNP TSC0040222
tttattgtttatt

SEQ ID NO: 159796 - DNA, 13 bp, Artificial Sequence
  Oligonucleotide for detection of SNP TSC0040222
aataaacaataaa

SEQ ID NO: 159797 - DNA, 13 bp, Artificial Sequence
  Oligonucleotide for detection of SNP TSC0040223
gtaattatgaatt

SEQ ID NO: 159798 - DNA, 13 bp, Artificial Sequence
  Oligonucleotide for detection of SNP TSC0040223
aattcataattac

SEQ ID NO: 159799 - DNA, 13 bp, Artificial Sequence
  Oligonucleotide for detection of SNP TSC0040223
gtaattttgaatt

SEQ ID NO: 159800 - DNA, 13 bp, Artificial Sequence
  Oligonucleotide for detection of SNP TSC0040223
aattcaaaattac

SEQ ID NO: 159801 - DNA, 13 bp, Artificial Sequence
  Oligonucleotide for detection of SNP TSC0040223
agtttatagttay

SEQ ID NO: 159802 - DNA, 13 bp, Artificial Sequence
  Oligonucleotide for detection of SNP TSC0040223
rtaactataaact

SEQ ID NO: 159803 - DNA, 13 bp, Artificial Sequence
  Oligonucleotide for detection of SNP TSC0040223
agtttagagttay

SEQ ID NO: 159804 - DNA, 13 bp, Artificial Sequence
  Oligonucleotide for detection of SNP TSC0040223
rtaactctaaact

SEQ ID NO: 159805 - DNA, 13 bp, Artificial Sequence
  Oligonucleotide for detection of SNP TSC0040224
tagatgattatat

SEQ ID NO: 159806 - DNA, 13 bp, Artificial Sequence
  Oligonucleotide for detection of SNP TSC0040224
atataatcatcta

SEQ ID NO: 159807 - DNA, 13 bp, Artificial Sequence
  Oligonucleotide for detection of SNP TSC0040224
tagatggttatat

SEQ ID NO: 159808 - DNA, 13 bp, Artificial Sequence
  Oligonucleotide for detection of SNP TSC0040224
atataaccatcta

SEQ ID NO: 159809 - DNA, 13 bp, Artificial Sequence
  Oligonucleotide for detection of SNP TSC0040225
gtagtattattty

SEQ ID NO: 159810 - DNA, 13 bp, Artificial Sequence
  Oligonucleotide for detection of SNP TSC0040225
raaataatactac

SEQ ID NO: 159811 - DNA, 13 bp, Artificial Sequence
  Oligonucleotide for detection of SNP TSC0040225
ggagtgttgttgy

SEQ ID NO: 159812 - DNA, 13 bp, Artificial Sequence
  Oligonucleotide for detection of SNP TSC0040225
rcaacaacactcc

SEQ ID NO: 159813 - DNA, 13 bp, Artificial Sequence
  Oligonucleotide for detection of SNP TSC0040225
ggagtggtgttgy

SEQ ID NO: 159814 - DNA, 13 bp, Artificial Sequence
  Oligonucleotide for detection of SNP TSC0040225
rcaacaccactcc

SEQ ID NO: 159815 - DNA, 13 bp, Artificial Sequence
  Oligonucleotide for detection of SNP TSC0040226
agtaagtttttgt

SEQ ID NO: 159816 - DNA, 13 bp, Artificial Sequence
  Oligonucleotide for detection of SNP TSC0040226
acaaaaacttact

SEQ ID NO: 159817 - DNA, 13 bp, Artificial Sequence
  Oligonucleotide for detection of SNP TSC0040226
atagaggtttgtt

SEQ ID NO: 159818 - DNA, 13 bp, Artificial Sequence
  Oligonucleotide for detection of SNP TSC0040226
aacaaacctctat

SEQ ID NO: 159819 - DNA, 13 bp, Artificial Sequence
  Oligonucleotide for detection of SNP TSC0040226
atagagttttgtt

SEQ ID NO: 159820 - DNA, 13 bp, Artificial Sequence
  Oligonucleotide for detection of SNP TSC0040226
aacaaaactctat

SEQ ID NO: 159821 - DNA, 13 bp, Artificial Sequence
  Oligonucleotide for detection of SNP TSC0040229
agttgtgttaaga

SEQ ID NO: 159822 - DNA, 13 bp, Artificial Sequence
  Oligonucleotide for detection of SNP TSC0040229
tcttaacacaact

SEQ ID NO: 159823 - DNA, 13 bp, Artificial Sequence
  Oligonucleotide for detection of SNP TSC0040229
agttgtattaaga

SEQ ID NO: 159824 - DNA, 13 bp, Artificial Sequence
  Oligonucleotide for detection of SNP TSC0040229
tcttaatacaact

SEQ ID NO: 159825 - DNA, 13 bp, Artificial Sequence
  Oligonucleotide for detection of SNP TSC0040232
ggtaaggttatgt

SEQ ID NO: 159826 - DNA, 13 bp, Artificial Sequence
  Oligonucleotide for detection of SNP TSC0040232
acataaccttacc

SEQ ID NO: 159827 - DNA, 13 bp, Artificial Sequence
  Oligonucleotide for detection of SNP TSC0040232
ggtaagattatgt

SEQ ID NO: 159828 - DNA, 13 bp, Artificial Sequence
  Oligonucleotide for detection of SNP TSC0040232
acataatcttacc

SEQ ID NO: 159829 - DNA, 13 bp, Artificial Sequence
  Oligonucleotide for detection of SNP TSC0040237
taataaatgatay

SEQ ID NO: 159830 - DNA, 13 bp, Artificial Sequence
  Oligonucleotide for detection of SNP TSC0040237
rtatcatttatta

SEQ ID NO: 159831 - DNA, 13 bp, Artificial Sequence
  Oligonucleotide for detection of SNP TSC0040237
taataattgatay

SEQ ID NO: 159832 - DNA, 13 bp, Artificial Sequence
  Oligonucleotide for detection of SNP TSC0040237
rtatcaattatta

SEQ ID NO: 159833 - DNA, 13 bp, Artificial Sequence
  Oligonucleotide for detection of SNP TSC0040237
taataaacgatay

SEQ ID NO: 159834 - DNA, 13 bp, Artificial Sequence
  Oligonucleotide for detection of SNP TSC0040237
rtatcgtttatta

SEQ ID NO: 159835 - DNA, 13 bp, Artificial Sequence
  Oligonucleotide for detection of SNP TSC0040237
taataatcgatay

SEQ ID NO: 159836 - DNA, 13 bp, Artificial Sequence
  Oligonucleotide for detection of SNP TSC0040237
rtatcgattatta

SEQ ID NO: 159837 - DNA, 13 bp, Artificial Sequence
  Oligonucleotide for detection of SNP TSC0040237
gtgttgtttatta

SEQ ID NO: 159838 - DNA, 13 bp, Artificial Sequence
  Oligonucleotide for detection of SNP TSC0040237
taataaacaacac

SEQ ID NO: 159839 - DNA, 13 bp, Artificial Sequence
  Oligonucleotide for detection of SNP TSC0040237
gtgttggttatta

SEQ ID NO: 159840 - DNA, 13 bp, Artificial Sequence
  Oligonucleotide for detection of SNP TSC0040237
taataaccaacac

SEQ ID NO: 159841 - DNA, 13 bp, Artificial Sequence
  Oligonucleotide for detection of SNP TSC0040237
gtgtcgtttatta

SEQ ID NO: 159842 - DNA, 13 bp, Artificial Sequence
  Oligonucleotide for detection of SNP TSC0040237
taataaacgacac

SEQ ID NO: 159843 - DNA, 13 bp, Artificial Sequence
  Oligonucleotide for detection of SNP TSC0040237
gtgtcggttatta

SEQ ID NO: 159844 - DNA, 13 bp, Artificial Sequence
  Oligonucleotide for detection of SNP TSC0040237
taataaccgacac

SEQ ID NO: 159845 - DNA, 13 bp, Artificial Sequence
  Oligonucleotide for detection of SNP TSC0040239
aattatagttgtg

SEQ ID NO: 159846 - DNA, 13 bp, Artificial Sequence
  Oligonucleotide for detection of SNP TSC0040239
cacaactataatt

SEQ ID NO: 159847 - DNA, 13 bp, Artificial Sequence
  Oligonucleotide for detection of SNP TSC0040239
aattatggttgtg

SEQ ID NO: 159848 - DNA, 13 bp, Artificial Sequence
  Oligonucleotide for detection of SNP TSC0040239
cacaaccataatt

SEQ ID NO: 159849 - DNA, 13 bp, Artificial Sequence
  Oligonucleotide for detection of SNP TSC0040239
aattacggttgtg

SEQ ID NO: 159850 - DNA, 13 bp, Artificial Sequence
  Oligonucleotide for detection of SNP TSC0040239
cacaaccgtaatt

SEQ ID NO: 159851 - DNA, 13 bp, Artificial Sequence
  Oligonucleotide for detection of SNP TSC0040239
tataattgtggtt

SEQ ID NO: 159852 - DNA, 13 bp, Artificial Sequence
  Oligonucleotide for detection of SNP TSC0040239
aaccacaattata

SEQ ID NO: 159853 - DNA, 13 bp, Artificial Sequence
  Oligonucleotide for detection of SNP TSC0040239
tataatcgtggtt

SEQ ID NO: 159854 - DNA, 13 bp, Artificial Sequence
  Oligonucleotide for detection of SNP TSC0040239
aaccacgattata

SEQ ID NO: 159855 - DNA, 13 bp, Artificial Sequence
  Oligonucleotide for detection of SNP TSC0008884
atttggtttgttt

SEQ ID NO: 159856 - DNA, 13 bp, Artificial Sequence
  Oligonucleotide for detection of SNP TSC0008884
aaacaaaccaaat

SEQ ID NO: 159857 - DNA, 13 bp, Artificial Sequence
  Oligonucleotide for detection of SNP TSC0008884
atttggattgttt

SEQ ID NO: 159858 - DNA, 13 bp, Artificial Sequence
  Oligonucleotide for detection of SNP TSC0008884
aaacaatccaaat

SEQ ID NO: 159859 - DNA, 13 bp, Artificial Sequence
  Oligonucleotide for detection of SNP TSC0009408
gtgtgtattaaty

SEQ ID NO: 159860 - DNA, 13 bp, Artificial Sequence
  Oligonucleotide for detection of SNP TSC0009408
rattaatacacac

SEQ ID NO: 159861 - DNA, 13 bp, Artificial Sequence
  Oligonucleotide for detection of SNP TSC0009408
gtgtgttttaaty

SEQ ID NO: 159862 - DNA, 13 bp, Artificial Sequence
  Oligonucleotide for detection of SNP TSC0009408
rattaaaacacac

SEQ ID NO: 159863 - DNA, 13 bp, Artificial Sequence
  Oligonucleotide for detection of SNP TSC0009408
gattaatatatay

SEQ ID NO: 159864 - DNA, 13 bp, Artificial Sequence
  Oligonucleotide for detection of SNP TSC0009408
rtatatattaatc

SEQ ID NO: 159865 - DNA, 13 bp, Artificial Sequence
  Oligonucleotide for detection of SNP TSC0009408
gattaagatatay

SEQ ID NO: 159866 - DNA, 13 bp, Artificial Sequence
  Oligonucleotide for detection of SNP TSC0009408
rtatatcttaatc

SEQ ID NO: 159867 - DNA, 13 bp, Artificial Sequence
  Oligonucleotide for detection of SNP TSC0040240
tatataagtaaay

SEQ ID NO: 159868 - DNA, 13 bp, Artificial Sequence
  Oligonucleotide for detection of SNP TSC0040240
rtttacttatata

SEQ ID NO: 159869 - DNA, 13 bp, Artificial Sequence
  Oligonucleotide for detection of SNP TSC0040240
tatataggtaaay

SEQ ID NO: 159870 - DNA, 13 bp, Artificial Sequence
  Oligonucleotide for detection of SNP TSC0040240
rtttacctatata

SEQ ID NO: 159871 - DNA, 13 bp, Artificial Sequence
  Oligonucleotide for detection of SNP TSC0040241
gtttttatgaaat

SEQ ID NO: 159872 - DNA, 13 bp, Artificial Sequence
  Oligonucleotide for detection of SNP TSC0040241
atttcataaaaac

SEQ ID NO: 159873 - DNA, 13 bp, Artificial Sequence
  Oligonucleotide for detection of SNP TSC0040241
gtttttgtgaaat

SEQ ID NO: 159874 - DNA, 13 bp, Artificial Sequence
  Oligonucleotide for detection of SNP TSC0040241
atttcacaaaaac

SEQ ID NO: 159875 - DNA, 13 bp, Artificial Sequence
  Oligonucleotide for detection of SNP TSC0040243
gttttaagtttaa

SEQ ID NO: 159876 - DNA, 13 bp, Artificial Sequence
  Oligonucleotide for detection of SNP TSC0040243
ttaaacttaaaac

SEQ ID NO: 159877 - DNA, 13 bp, Artificial Sequence
  Oligonucleotide for detection of SNP TSC0040244
ttttgtatgttta

SEQ ID NO: 159878 - DNA, 13 bp, Artificial Sequence
  Oligonucleotide for detection of SNP TSC0040244
taaacatacaaaa

SEQ ID NO: 159879 - DNA, 13 bp, Artificial Sequence
  Oligonucleotide for detection of SNP TSC0040244
ttttgtgtgttta

SEQ ID NO: 159880 - DNA, 13 bp, Artificial Sequence
  Oligonucleotide for detection of SNP TSC0040244
taaacacacaaaa

SEQ ID NO: 159881 - DNA, 13 bp, Artificial Sequence
  Oligonucleotide for detection of SNP TSC0040245
attttagaaatga

SEQ ID NO: 159882 - DNA, 13 bp, Artificial Sequence
  Oligonucleotide for detection of SNP TSC0040245
tcatttctaaaat

SEQ ID NO: 159883 - DNA, 13 bp, Artificial Sequence
  Oligonucleotide for detection of SNP TSC0040245
attttaaaaatga

SEQ ID NO: 159884 - DNA, 13 bp, Artificial Sequence
  Oligonucleotide for detection of SNP TSC0040245
tcatttttaaaat

SEQ ID NO: 159885 - DNA, 13 bp, Artificial Sequence
  Oligonucleotide for detection of SNP TSC0007635
atatgatgagggg

SEQ ID NO: 159886 - DNA, 13 bp, Artificial Sequence
  Oligonucleotide for detection of SNP TSC0007635
cccctcatcatat

SEQ ID NO: 159887 - DNA, 13 bp, Artificial Sequence
  Oligonucleotide for detection of SNP TSC0007635
atatgacgagggg

SEQ ID NO: 159888 - DNA, 13 bp, Artificial Sequence
  Oligonucleotide for detection of SNP TSC0007635
cccctcgtcatat

SEQ ID NO: 159889 - DNA, 13 bp, Artificial Sequence
  Oligonucleotide for detection of SNP TSC0040246
tttatttgtgtat

SEQ ID NO: 159890 - DNA, 13 bp, Artificial Sequence
  Oligonucleotide for detection of SNP TSC0040246
atacacaaataaa

SEQ ID NO: 159891 - DNA, 13 bp, Artificial Sequence
  Oligonucleotide for detection of SNP TSC0040246
tttattcgtgtat

SEQ ID NO: 159892 - DNA, 13 bp, Artificial Sequence
  Oligonucleotide for detection of SNP TSC0040246
atacacgaataaa

SEQ ID NO: 159893 - DNA, 13 bp, Artificial Sequence
  Oligonucleotide for detection of SNP TSC0040246
atatatgaatgga

SEQ ID NO: 159894 - DNA, 13 bp, Artificial Sequence
  Oligonucleotide for detection of SNP TSC0040246
tccattcatatat

SEQ ID NO: 159895 - DNA, 13 bp, Artificial Sequence
  Oligonucleotide for detection of SNP TSC0040246
atatataaatgga

SEQ ID NO: 159896 - DNA, 13 bp, Artificial Sequence
  Oligonucleotide for detection of SNP TSC0040246
tccatttatatat

SEQ ID NO: 159897 - DNA, 13 bp, Artificial Sequence
  Oligonucleotide for detection of SNP TSC0040246
atatacgaatgga

SEQ ID NO: 159898 - DNA, 13 bp, Artificial Sequence
  Oligonucleotide for detection of SNP TSC0040246
tccattcgtatat

SEQ ID NO: 159899 - DNA, 13 bp, Artificial Sequence
  Oligonucleotide for detection of SNP TSC0040249
gagttaagtaagg

SEQ ID NO: 159900 - DNA, 13 bp, Artificial Sequence
  Oligonucleotide for detection of SNP TSC0040249
ccttacttaactc

SEQ ID NO: 159901 - DNA, 13 bp, Artificial Sequence
  Oligonucleotide for detection of SNP TSC0040249
gagttatgtaagg

SEQ ID NO: 159902 - DNA, 13 bp, Artificial Sequence
  Oligonucleotide for detection of SNP TSC0040249
ccttacataactc

SEQ ID NO: 159903 - DNA, 13 bp, Artificial Sequence
  Oligonucleotide for detection of SNP TSC0040249
ttttgtttaatty

SEQ ID NO: 159904 - DNA, 13 bp, Artificial Sequence
  Oligonucleotide for detection of SNP TSC0040249
raattaaacaaaa

SEQ ID NO: 159905 - DNA, 13 bp, Artificial Sequence
  Oligonucleotide for detection of SNP TSC0040249
ttttgtataatty

SEQ ID NO: 159906 - DNA, 13 bp, Artificial Sequence
  Oligonucleotide for detection of SNP TSC0040249
raattatacaaaa

SEQ ID NO: 159907 - DNA, 13 bp, Artificial Sequence
  Oligonucleotide for detection of SNP TSC0040250
atatgtaaggaaa

SEQ ID NO: 159908 - DNA, 13 bp, Artificial Sequence
  Oligonucleotide for detection of SNP TSC0040250
tttccttacatat

SEQ ID NO: 159909 - DNA, 13 bp, Artificial Sequence
  Oligonucleotide for detection of SNP TSC0040250
atatgtgaggaaa

SEQ ID NO: 159910 - DNA, 13 bp, Artificial Sequence
  Oligonucleotide for detection of SNP TSC0040250
tttcctcacatat

SEQ ID NO: 159911 - DNA, 13 bp, Artificial Sequence
  Oligonucleotide for detection of SNP TSC0040250
atacgtaaggaaa

SEQ ID NO: 159912 - DNA, 13 bp, Artificial Sequence
  Oligonucleotide for detection of SNP TSC0040250
tttccttacgtat

SEQ ID NO: 159913 - DNA, 13 bp, Artificial Sequence
  Oligonucleotide for detection of SNP TSC0040250
atacgtgaggaaa

SEQ ID NO: 159914 - DNA, 13 bp, Artificial Sequence
  Oligonucleotide for detection of SNP TSC0040250
tttcctcacgtat

SEQ ID NO: 159915 - DNA, 13 bp, Artificial Sequence
  Oligonucleotide for detection of SNP TSC0040250
atatgcgaggaaa

SEQ ID NO: 159916 - DNA, 13 bp, Artificial Sequence
  Oligonucleotide for detection of SNP TSC0040250
tttcctcgcatat

SEQ ID NO: 159917 - DNA, 13 bp, Artificial Sequence
  Oligonucleotide for detection of SNP TSC0040250
atacgcgaggaaa

SEQ ID NO: 159918 - DNA, 13 bp, Artificial Sequence
  Oligonucleotide for detection of SNP TSC0040250
tttcctcgcgtat

SEQ ID NO: 159919 - DNA, 13 bp, Artificial Sequence
  Oligonucleotide for detection of SNP TSC0040250
tttttttgcgtgt

SEQ ID NO: 159920 - DNA, 13 bp, Artificial Sequence
  Oligonucleotide for detection of SNP TSC0040250
acacgcaaaaaaa

SEQ ID NO: 159921 - DNA, 13 bp, Artificial Sequence
  Oligonucleotide for detection of SNP TSC0040250
ttttttcgcgtgt

SEQ ID NO: 159922 - DNA, 13 bp, Artificial Sequence
  Oligonucleotide for detection of SNP TSC0040250
acacgcgaaaaaa

SEQ ID NO: 159923 - DNA, 13 bp, Artificial Sequence
  Oligonucleotide for detection of SNP TSC0040251
tttttgaggttta

SEQ ID NO: 159924 - DNA, 13 bp, Artificial Sequence
  Oligonucleotide for detection of SNP TSC0040251
taaacctcaaaaa

SEQ ID NO: 159925 - DNA, 13 bp, Artificial Sequence
  Oligonucleotide for detection of SNP TSC0040251
tttttggggttta

SEQ ID NO: 159926 - DNA, 13 bp, Artificial Sequence
  Oligonucleotide for detection of SNP TSC0040251
taaaccccaaaaa

SEQ ID NO: 159927 - DNA, 13 bp, Artificial Sequence
  Oligonucleotide for detection of SNP TSC0040252
tattttatggata

SEQ ID NO: 159928 - DNA, 13 bp, Artificial Sequence
  Oligonucleotide for detection of SNP TSC0040252
tatccataaaata

SEQ ID NO: 159929 - DNA, 13 bp, Artificial Sequence
  Oligonucleotide for detection of SNP TSC0040252
tattttttggata

SEQ ID NO: 159930 - DNA, 13 bp, Artificial Sequence
  Oligonucleotide for detection of SNP TSC0040252
tatccaaaaaata

SEQ ID NO: 159931 - DNA, 13 bp, Artificial Sequence
  Oligonucleotide for detection of SNP TSC0040252
tatttatggagta

SEQ ID NO: 159932 - DNA, 13 bp, Artificial Sequence
  Oligonucleotide for detection of SNP TSC0040252
tactccataaata

SEQ ID NO: 159933 - DNA, 13 bp, Artificial Sequence
  Oligonucleotide for detection of SNP TSC0040252
tatttagggagta

SEQ ID NO: 159934 - DNA, 13 bp, Artificial Sequence
  Oligonucleotide for detection of SNP TSC0040252
tactccctaaata

SEQ ID NO: 159935 - DNA, 13 bp, Artificial Sequence
  Oligonucleotide for detection of SNP TSC0040254
atatttatgatty

SEQ ID NO: 159936 - DNA, 13 bp, Artificial Sequence
  Oligonucleotide for detection of SNP TSC0040254
raatcataaatat

SEQ ID NO: 159937 - DNA, 13 bp, Artificial Sequence
  Oligonucleotide for detection of SNP TSC0040254
atatttgtgatty

SEQ ID NO: 159938 - DNA, 13 bp, Artificial Sequence
  Oligonucleotide for detection of SNP TSC0040254
raatcacaaatat

SEQ ID NO: 159939 - DNA, 13 bp, Artificial Sequence
  Oligonucleotide for detection of SNP TSC0040255
ttaattttgtaga

SEQ ID NO: 159940 - DNA, 13 bp, Artificial Sequence
  Oligonucleotide for detection of SNP TSC0040255
tctacaaaattaa

SEQ ID NO: 159941 - DNA, 13 bp, Artificial Sequence
  Oligonucleotide for detection of SNP TSC0040255
ttaattgtgtaga

SEQ ID NO: 159942 - DNA, 13 bp, Artificial Sequence
  Oligonucleotide for detection of SNP TSC0040255
tctacacaattaa

SEQ ID NO: 159943 - DNA, 13 bp, Artificial Sequence
  Oligonucleotide for detection of SNP TSC0040255
tttgtagaattag

SEQ ID NO: 159944 - DNA, 13 bp, Artificial Sequence
  Oligonucleotide for detection of SNP TSC0040255
ctaattctacaaa

SEQ ID NO: 159945 - DNA, 13 bp, Artificial Sequence
  Oligonucleotide for detection of SNP TSC0040255
tttgtataattag

SEQ ID NO: 159946 - DNA, 13 bp, Artificial Sequence
  Oligonucleotide for detection of SNP TSC0040255
ctaattatacaaa

SEQ ID NO: 159947 - DNA, 13 bp, Artificial Sequence
  Oligonucleotide for detection of SNP TSC0040256
tggtatatagtta

SEQ ID NO: 159948 - DNA, 13 bp, Artificial Sequence
  Oligonucleotide for detection of SNP TSC0040256
taactatatacca

SEQ ID NO: 159949 - DNA, 13 bp, Artificial Sequence
  Oligonucleotide for detection of SNP TSC0040256
tggtatgtagtta

SEQ ID NO: 159950 - DNA, 13 bp, Artificial Sequence
  Oligonucleotide for detection of SNP TSC0040256
taactacatacca

SEQ ID NO: 159951 - DNA, 13 bp, Artificial Sequence
  Oligonucleotide for detection of SNP TSC0040259
gttagaatttgtg

SEQ ID NO: 159952 - DNA, 13 bp, Artificial Sequence
  Oligonucleotide for detection of SNP TSC0040259
cacaaattctaac

SEQ ID NO: 159953 - DNA, 13 bp, Artificial Sequence
  Oligonucleotide for detection of SNP TSC0040259
gttagagtttgtg

SEQ ID NO: 159954 - DNA, 13 bp, Artificial Sequence
  Oligonucleotide for detection of SNP TSC0040259
cacaaactctaac

SEQ ID NO: 159955 - DNA, 13 bp, Artificial Sequence
  Oligonucleotide for detection of SNP TSC0040263
tgggagggttagg

SEQ ID NO: 159956 - DNA, 13 bp, Artificial Sequence
  Oligonucleotide for detection of SNP TSC0040263
cctaaccctccca

SEQ ID NO: 159957 - DNA, 13 bp, Artificial Sequence
  Oligonucleotide for detection of SNP TSC0040263
tgggagagttagg

SEQ ID NO: 159958 - DNA, 13 bp, Artificial Sequence
  Oligonucleotide for detection of SNP TSC0040263
cctaactctccca

SEQ ID NO: 159959 - DNA, 13 bp, Artificial Sequence
  Oligonucleotide for detection of SNP TSC0040266
agtaatattatta

SEQ ID NO: 159960 - DNA, 13 bp, Artificial Sequence
  Oligonucleotide for detection of SNP TSC0040266
taataatattact

SEQ ID NO: 159961 - DNA, 13 bp, Artificial Sequence
  Oligonucleotide for detection of SNP TSC0040266
agtaatgttatta

SEQ ID NO: 159962 - DNA, 13 bp, Artificial Sequence
  Oligonucleotide for detection of SNP TSC0040266
taataacattact

SEQ ID NO: 159963 - DNA, 13 bp, Artificial Sequence
  Oligonucleotide for detection of SNP TSC0040266
agtaacgttatta

SEQ ID NO: 159964 - DNA, 13 bp, Artificial Sequence
  Oligonucleotide for detection of SNP TSC0040266
taataacgttact

SEQ ID NO: 159965 - DNA, 13 bp, Artificial Sequence
  Oligonucleotide for detection of SNP TSC0040266
tggtgatgttgtt

SEQ ID NO: 159966 - DNA, 13 bp, Artificial Sequence
  Oligonucleotide for detection of SNP TSC0040266
aacaacatcacca

SEQ ID NO: 159967 - DNA, 13 bp, Artificial Sequence
  Oligonucleotide for detection of SNP TSC0040266
tggtgacgttgtt

SEQ ID NO: 159968 - DNA, 13 bp, Artificial Sequence
  Oligonucleotide for detection of SNP TSC0040266
aacaacgtcacca

SEQ ID NO: 159969 - DNA, 13 bp, Artificial Sequence
  Oligonucleotide for detection of SNP TSC0040267
agaattatagtat

SEQ ID NO: 159970 - DNA, 13 bp, Artificial Sequence
  Oligonucleotide for detection of SNP TSC0040267
atactataattct

SEQ ID NO: 159971 - DNA, 13 bp, Artificial Sequence
  Oligonucleotide for detection of SNP TSC0040267
agaattgtagtat

SEQ ID NO: 159972 - DNA, 13 bp, Artificial Sequence
  Oligonucleotide for detection of SNP TSC0040267
atactacaattct

SEQ ID NO: 159973 - DNA, 13 bp, Artificial Sequence
  Oligonucleotide for detection of SNP TSC0009630
tggtgtatagtay

SEQ ID NO: 159974 - DNA, 13 bp, Artificial Sequence
  Oligonucleotide for detection of SNP TSC0009630
rtactatacacca

SEQ ID NO: 159975 - DNA, 13 bp, Artificial Sequence
  Oligonucleotide for detection of SNP TSC0009630
tggtgtgtagtay

SEQ ID NO: 159976 - DNA, 13 bp, Artificial Sequence
  Oligonucleotide for detection of SNP TSC0009630
rtactacacacca

SEQ ID NO: 159977 - DNA, 13 bp, Artificial Sequence
  Oligonucleotide for detection of SNP TSC0040270
tagtggagtgtty

SEQ ID NO: 159978 - DNA, 13 bp, Artificial Sequence
  Oligonucleotide for detection of SNP TSC0040270
raacactccacta

SEQ ID NO: 159979 - DNA, 13 bp, Artificial Sequence
  Oligonucleotide for detection of SNP TSC0040270
tagtggtgtgtty

SEQ ID NO: 159980 - DNA, 13 bp, Artificial Sequence
  Oligonucleotide for detection of SNP TSC0040270
raacacaccacta

SEQ ID NO: 159981 - DNA, 13 bp, Artificial Sequence
  Oligonucleotide for detection of SNP TSC0040270
tagtggcgtgtty

SEQ ID NO: 159982 - DNA, 13 bp, Artificial Sequence
  Oligonucleotide for detection of SNP TSC0040270
raacacgccacta

SEQ ID NO: 159983 - DNA, 13 bp, Artificial Sequence
  Oligonucleotide for detection of SNP TSC0040270
gagtattttatta

SEQ ID NO: 159984 - DNA, 13 bp, Artificial Sequence
  Oligonucleotide for detection of SNP TSC0040270
taataaaatactc

SEQ ID NO: 159985 - DNA, 13 bp, Artificial Sequence
  Oligonucleotide for detection of SNP TSC0040270
gagtatgttatta

SEQ ID NO: 159986 - DNA, 13 bp, Artificial Sequence
  Oligonucleotide for detection of SNP TSC0040270
taataacatactc

SEQ ID NO: 159987 - DNA, 13 bp, Artificial Sequence
  Oligonucleotide for detection of SNP TSC0040270
gagtacgttatta

SEQ ID NO: 159988 - DNA, 13 bp, Artificial Sequence
  Oligonucleotide for detection of SNP TSC0040270
taataacgtactc

SEQ ID NO: 159989 - DNA, 13 bp, Artificial Sequence
  Oligonucleotide for detection of SNP TSC0040271
gtggtaataggag

SEQ ID NO: 159990 - DNA, 13 bp, Artificial Sequence
  Oligonucleotide for detection of SNP TSC0040271
ctcctattaccac

SEQ ID NO: 159991 - DNA, 13 bp, Artificial Sequence
  Oligonucleotide for detection of SNP TSC0040271
gtggtattaggag

SEQ ID NO: 159992 - DNA, 13 bp, Artificial Sequence
  Oligonucleotide for detection of SNP TSC0040271
ctcctaataccac

SEQ ID NO: 159993 - DNA, 13 bp, Artificial Sequence
  Oligonucleotide for detection of SNP TSC0040271
tttttgttgttay

SEQ ID NO: 159994 - DNA, 13 bp, Artificial Sequence
  Oligonucleotide for detection of SNP TSC0040271
rtaacaacaaaaa

SEQ ID NO: 159995 - DNA, 13 bp, Artificial Sequence
  Oligonucleotide for detection of SNP TSC0040271
tttttgatgttay

SEQ ID NO: 159996 - DNA, 13 bp, Artificial Sequence
  Oligonucleotide for detection of SNP TSC0040271
rtaacatcaaaaa

SEQ ID NO: 159997 - DNA, 13 bp, Artificial Sequence
  Oligonucleotide for detection of SNP TSC0040272
gtatttgtgttta

SEQ ID NO: 159998 - DNA, 13 bp, Artificial Sequence
  Oligonucleotide for detection of SNP TSC0040272
taaacacaaatac

SEQ ID NO: 159999 - DNA, 13 bp, Artificial Sequence
  Oligonucleotide for detection of SNP TSC0040272
gtatttatgttta

SEQ ID NO: 160000 - DNA, 13 bp, Artificial Sequence
  Oligonucleotide for detection of SNP TSC0040272
taaacataaatac

SEQ ID NO: 160001 - DNA, 13 bp, Artificial Sequence
  Oligonucleotide for detection of SNP TSC0040273
ttgagagttttty

SEQ ID NO: 160002 - DNA, 13 bp, Artificial Sequence
  Oligonucleotide for detection of SNP TSC0040273
raaaaactctcaa

SEQ ID NO: 160003 - DNA, 13 bp, Artificial Sequence
  Oligonucleotide for detection of SNP TSC0040273
ttgagaattttty

SEQ ID NO: 160004 - DNA, 13 bp, Artificial Sequence
  Oligonucleotide for detection of SNP TSC0040273
raaaaattctcaa

SEQ ID NO: 160005 - DNA, 13 bp, Artificial Sequence
  Oligonucleotide for detection of SNP TSC0040274
ttaaattgaaaay

SEQ ID NO: 160006 - DNA, 13 bp, Artificial Sequence
  Oligonucleotide for detection of SNP TSC0040274
rttttcaatttaa

SEQ ID NO: 160007 - DNA, 13 bp, Artificial Sequence
  Oligonucleotide for detection of SNP TSC0040274
ttaaatggaaaay

SEQ ID NO: 160008 - DNA, 13 bp, Artificial Sequence
  Oligonucleotide for detection of SNP TSC0040274
rttttccatttaa

SEQ ID NO: 160009 - DNA, 13 bp, Artificial Sequence
  Oligonucleotide for detection of SNP TSC0040274
ttaaacggaaaay

SEQ ID NO: 160010 - DNA, 13 bp, Artificial Sequence
  Oligonucleotide for detection of SNP TSC0040274
rttttccgtttaa

SEQ ID NO: 160011 - DNA, 13 bp, Artificial Sequence
  Oligonucleotide for detection of SNP TSC0040274
gtttttagtttga

SEQ ID NO: 160012 - DNA, 13 bp, Artificial Sequence
  Oligonucleotide for detection of SNP TSC0040274
tcaaactaaaaac

SEQ ID NO: 160013 - DNA, 13 bp, Artificial Sequence
  Oligonucleotide for detection of SNP TSC0040274
gttttttgtttga

SEQ ID NO: 160014 - DNA, 13 bp, Artificial Sequence
  Oligonucleotide for detection of SNP TSC0040274
tcaaacaaaaaac

SEQ ID NO: 160015 - DNA, 13 bp, Artificial Sequence
  Oligonucleotide for detection of SNP TSC0040274
gtttttcgtttga

SEQ ID NO: 160016 - DNA, 13 bp, Artificial Sequence
  Oligonucleotide for detection of SNP TSC0040274
tcaaacgaaaaac

SEQ ID NO: 160017 - DNA, 13 bp, Artificial Sequence
  Oligonucleotide for detection of SNP TSC0040276
aattatgtggcga

SEQ ID NO: 160018 - DNA, 13 bp, Artificial Sequence
  Oligonucleotide for detection of SNP TSC0040276
tcgccacataatt

SEQ ID NO: 160019 - DNA, 13 bp, Artificial Sequence
  Oligonucleotide for detection of SNP TSC0040276
aattatatggcga

SEQ ID NO: 160020 - DNA, 13 bp, Artificial Sequence
  Oligonucleotide for detection of SNP TSC0040276
tcgccatataatt

SEQ ID NO: 160021 - DNA, 13 bp, Artificial Sequence
  Oligonucleotide for detection of SNP TSC0040277
agtataattgtty

SEQ ID NO: 160022 - DNA, 13 bp, Artificial Sequence
  Oligonucleotide for detection of SNP TSC0040277
raacaattatact

SEQ ID NO: 160023 - DNA, 13 bp, Artificial Sequence
  Oligonucleotide for detection of SNP TSC0040277
agtatagttgtty

SEQ ID NO: 160024 - DNA, 13 bp, Artificial Sequence
  Oligonucleotide for detection of SNP TSC0040277
raacaactatact

SEQ ID NO: 160025 - DNA, 13 bp, Artificial Sequence
  Oligonucleotide for detection of SNP TSC0040279
gaaggatgatatt

SEQ ID NO: 160026 - DNA, 13 bp, Artificial Sequence
  Oligonucleotide for detection of SNP TSC0040279
aatatcatccttc

SEQ ID NO: 160027 - DNA, 13 bp, Artificial Sequence
  Oligonucleotide for detection of SNP TSC0040279
gaaggacgatatt

SEQ ID NO: 160028 - DNA, 13 bp, Artificial Sequence
  Oligonucleotide for detection of SNP TSC0040279
aatatcgtccttc

SEQ ID NO: 160029 - DNA, 13 bp, Artificial Sequence
  Oligonucleotide for detection of SNP TSC0040279
agtatcgttttty

SEQ ID NO: 160030 - DNA, 13 bp, Artificial Sequence
  Oligonucleotide for detection of SNP TSC0040279
raaaaacgatact

SEQ ID NO: 160031 - DNA, 13 bp, Artificial Sequence
  Oligonucleotide for detection of SNP TSC0040280
ttattatgtaaty

SEQ ID NO: 160032 - DNA, 13 bp, Artificial Sequence
  Oligonucleotide for detection of SNP TSC0040280
rattacataataa

SEQ ID NO: 160033 - DNA, 13 bp, Artificial Sequence
  Oligonucleotide for detection of SNP TSC0040280
ttattacgtaaty

SEQ ID NO: 160034 - DNA, 13 bp, Artificial Sequence
  Oligonucleotide for detection of SNP TSC0040280
rattacgtaataa

SEQ ID NO: 160035 - DNA, 13 bp, Artificial Sequence
  Oligonucleotide for detection of SNP TSC0040284
ttttaaataagtt

SEQ ID NO: 160036 - DNA, 13 bp, Artificial Sequence
  Oligonucleotide for detection of SNP TSC0040284
aacttatttaaaa

SEQ ID NO: 160037 - DNA, 13 bp, Artificial Sequence
  Oligonucleotide for detection of SNP TSC0040284
ttttaagtaagtt

SEQ ID NO: 160038 - DNA, 13 bp, Artificial Sequence
  Oligonucleotide for detection of SNP TSC0040284
aacttacttaaaa

SEQ ID NO: 160039 - DNA, 13 bp, Artificial Sequence
  Oligonucleotide for detection of SNP TSC0040291
tatttaggtgttt

SEQ ID NO: 160040 - DNA, 13 bp, Artificial Sequence
  Oligonucleotide for detection of SNP TSC0040291
aaacacctaaata

SEQ ID NO: 160041 - DNA, 13 bp, Artificial Sequence
  Oligonucleotide for detection of SNP TSC0040292
tattatgtttatt

SEQ ID NO: 160042 - DNA, 13 bp, Artificial Sequence
  Oligonucleotide for detection of SNP TSC0040292
aataaacataata

SEQ ID NO: 160043 - DNA, 13 bp, Artificial Sequence
  Oligonucleotide for detection of SNP TSC0040292
tattatatttatt

SEQ ID NO: 160044 - DNA, 13 bp, Artificial Sequence
  Oligonucleotide for detection of SNP TSC0040292
aataaatataata

SEQ ID NO: 160045 - DNA, 13 bp, Artificial Sequence
  Oligonucleotide for detection of SNP TSC0040293
ggggatatataga

SEQ ID NO: 160046 - DNA, 13 bp, Artificial Sequence
  Oligonucleotide for detection of SNP TSC0040293
tctatatatcccc

SEQ ID NO: 160047 - DNA, 13 bp, Artificial Sequence
  Oligonucleotide for detection of SNP TSC0040293
ggggatgtataga

SEQ ID NO: 160048 - DNA, 13 bp, Artificial Sequence
  Oligonucleotide for detection of SNP TSC0040293
tctatacatcccc

SEQ ID NO: 160049 - DNA, 13 bp, Artificial Sequence
  Oligonucleotide for detection of SNP TSC0040294
aatatcgtattay

SEQ ID NO: 160050 - DNA, 13 bp, Artificial Sequence
  Oligonucleotide for detection of SNP TSC0040294
rtaatacgatatt

SEQ ID NO: 160051 - DNA, 13 bp, Artificial Sequence
  Oligonucleotide for detection of SNP TSC0040294
gtgatatggtgtt

SEQ ID NO: 160052 - DNA, 13 bp, Artificial Sequence
  Oligonucleotide for detection of SNP TSC0040294
aacaccatatcac

SEQ ID NO: 160053 - DNA, 13 bp, Artificial Sequence
  Oligonucleotide for detection of SNP TSC0040294
gtgatacggtgtt

SEQ ID NO: 160054 - DNA, 13 bp, Artificial Sequence
  Oligonucleotide for detection of SNP TSC0040294
aacaccgtatcac

SEQ ID NO: 160055 - DNA, 13 bp, Artificial Sequence
  Oligonucleotide for detection of SNP TSC0040295
tgaggttggtagy

SEQ ID NO: 160056 - DNA, 13 bp, Artificial Sequence
  Oligonucleotide for detection of SNP TSC0040295
rctaccaacctca

SEQ ID NO: 160057 - DNA, 13 bp, Artificial Sequence
  Oligonucleotide for detection of SNP TSC0040295
tgaggtgggtagy

SEQ ID NO: 160058 - DNA, 13 bp, Artificial Sequence
  Oligonucleotide for detection of SNP TSC0040295
rctacccacctca

SEQ ID NO: 160059 - DNA, 13 bp, Artificial Sequence
  Oligonucleotide for detection of SNP TSC0040295
cgaggttggtagy

SEQ ID NO: 160060 - DNA, 13 bp, Artificial Sequence
  Oligonucleotide for detection of SNP TSC0040295
rctaccaacctcg

SEQ ID NO: 160061 - DNA, 13 bp, Artificial Sequence
  Oligonucleotide for detection of SNP TSC0040295
cgaggtgggtagy

SEQ ID NO: 160062 - DNA, 13 bp, Artificial Sequence
  Oligonucleotide for detection of SNP TSC0040295
rctacccacctcg

SEQ ID NO: 160063 - DNA, 13 bp, Artificial Sequence
  Oligonucleotide for detection of SNP TSC0040295
tgaggtcggtagy

SEQ ID NO: 160064 - DNA, 13 bp, Artificial Sequence
  Oligonucleotide for detection of SNP TSC0040295
rctaccgacctca

SEQ ID NO: 160065 - DNA, 13 bp, Artificial Sequence
  Oligonucleotide for detection of SNP TSC0040295
tgaggcgggtagy

SEQ ID NO: 160066 - DNA, 13 bp, Artificial Sequence
  Oligonucleotide for detection of SNP TSC0040295
rctacccgcctca

SEQ ID NO: 160067 - DNA, 13 bp, Artificial Sequence
  Oligonucleotide for detection of SNP TSC0040295
cgaggtcggtagy

SEQ ID NO: 160068 - DNA, 13 bp, Artificial Sequence
  Oligonucleotide for detection of SNP TSC0040295
rctaccgacctcg

SEQ ID NO: 160069 - DNA, 13 bp, Artificial Sequence
  Oligonucleotide for detection of SNP TSC0040295
cgaggcgggtagy

SEQ ID NO: 160070 - DNA, 13 bp, Artificial Sequence
  Oligonucleotide for detection of SNP TSC0040295
rctacccgcctcg

SEQ ID NO: 160071 - DNA, 13 bp, Artificial Sequence
  Oligonucleotide for detection of SNP TSC0040295
gttgttggttttg

SEQ ID NO: 160072 - DNA, 13 bp, Artificial Sequence
  Oligonucleotide for detection of SNP TSC0040295
caaaaccaacaac

SEQ ID NO: 160073 - DNA, 13 bp, Artificial Sequence
  Oligonucleotide for detection of SNP TSC0040295
gttgtttgttttg

SEQ ID NO: 160074 - DNA, 13 bp, Artificial Sequence
  Oligonucleotide for detection of SNP TSC0040295
caaaacaaacaac

SEQ ID NO: 160075 - DNA, 13 bp, Artificial Sequence
  Oligonucleotide for detection of SNP TSC0040295
gttgtcggttttg

SEQ ID NO: 160076 - DNA, 13 bp, Artificial Sequence
  Oligonucleotide for detection of SNP TSC0040295
caaaaccgacaac

SEQ ID NO: 160077 - DNA, 13 bp, Artificial Sequence
  Oligonucleotide for detection of SNP TSC0040295
gttgttcgttttg

SEQ ID NO: 160078 - DNA, 13 bp, Artificial Sequence
  Oligonucleotide for detection of SNP TSC0040295
caaaacgaacaac

SEQ ID NO: 160079 - DNA, 13 bp, Artificial Sequence
  Oligonucleotide for detection of SNP TSC0040295
gttgttggtttcg

SEQ ID NO: 160080 - DNA, 13 bp, Artificial Sequence
  Oligonucleotide for detection of SNP TSC0040295
cgaaaccaacaac

SEQ ID NO: 160081 - DNA, 13 bp, Artificial Sequence
  Oligonucleotide for detection of SNP TSC0040295
gttgtttgtttcg

SEQ ID NO: 160082 - DNA, 13 bp, Artificial Sequence
  Oligonucleotide for detection of SNP TSC0040295
cgaaacaaacaac

SEQ ID NO: 160083 - DNA, 13 bp, Artificial Sequence
  Oligonucleotide for detection of SNP TSC0040295
gttgtcggtttcg

SEQ ID NO: 160084 - DNA, 13 bp, Artificial Sequence
  Oligonucleotide for detection of SNP TSC0040295
cgaaaccgacaac

SEQ ID NO: 160085 - DNA, 13 bp, Artificial Sequence
  Oligonucleotide for detection of SNP TSC0040295
gttgttcgtttcg

SEQ ID NO: 160086 - DNA, 13 bp, Artificial Sequence
  Oligonucleotide for detection of SNP TSC0040295
cgaaacgaacaac

SEQ ID NO: 160087 - DNA, 13 bp, Artificial Sequence
  Oligonucleotide for detection of SNP TSC0040300
atgttaattaata

SEQ ID NO: 160088 - DNA, 13 bp, Artificial Sequence
  Oligonucleotide for detection of SNP TSC0040300
tattaattaacat

SEQ ID NO: 160089 - DNA, 13 bp, Artificial Sequence
  Oligonucleotide for detection of SNP TSC0040300
atgttagttaata

SEQ ID NO: 160090 - DNA, 13 bp, Artificial Sequence
  Oligonucleotide for detection of SNP TSC0040300
tattaactaacat

SEQ ID NO: 160091 - DNA, 13 bp, Artificial Sequence
  Oligonucleotide for detection of SNP TSC0040301
agtgtaaagaaty

SEQ ID NO: 160092 - DNA, 13 bp, Artificial Sequence
  Oligonucleotide for detection of SNP TSC0040301
rattctttacact

SEQ ID NO: 160093 - DNA, 13 bp, Artificial Sequence
  Oligonucleotide for detection of SNP TSC0040301
agtgtagagaaty

SEQ ID NO: 160094 - DNA, 13 bp, Artificial Sequence
  Oligonucleotide for detection of SNP TSC0040301
rattctctacact

SEQ ID NO: 160095 - DNA, 13 bp, Artificial Sequence
  Oligonucleotide for detection of SNP TSC0040302
aaaagataaagaa

SEQ ID NO: 160096 - DNA, 13 bp, Artificial Sequence
  Oligonucleotide for detection of SNP TSC0040302
ttctttatctttt

SEQ ID NO: 160097 - DNA, 13 bp, Artificial Sequence
  Oligonucleotide for detection of SNP TSC0040305
tttttatggaaaa

SEQ ID NO: 160098 - DNA, 13 bp, Artificial Sequence
  Oligonucleotide for detection of SNP TSC0040305
ttttccataaaaa

SEQ ID NO: 160099 - DNA, 13 bp, Artificial Sequence
  Oligonucleotide for detection of SNP TSC0040305
tttttacggaaaa

SEQ ID NO: 160100 - DNA, 13 bp, Artificial Sequence
  Oligonucleotide for detection of SNP TSC0040305
ttttccgtaaaaa

SEQ ID NO: 160101 - DNA, 13 bp, Artificial Sequence
  Oligonucleotide for detection of SNP TSC0040306
tggagaataagta

SEQ ID NO: 160102 - DNA, 13 bp, Artificial Sequence
  Oligonucleotide for detection of SNP TSC0040306
tacttattctcca

SEQ ID NO: 160103 - DNA, 13 bp, Artificial Sequence
  Oligonucleotide for detection of SNP TSC0040306
tggagattaagta

SEQ ID NO: 160104 - DNA, 13 bp, Artificial Sequence
  Oligonucleotide for detection of SNP TSC0040306
tacttaatctcca

SEQ ID NO: 160105 - DNA, 13 bp, Artificial Sequence
  Oligonucleotide for detection of SNP TSC0040306
tgtttagttttta

SEQ ID NO: 160106 - DNA, 13 bp, Artificial Sequence
  Oligonucleotide for detection of SNP TSC0040306
taaaaactaaaca

SEQ ID NO: 160107 - DNA, 13 bp, Artificial Sequence
  Oligonucleotide for detection of SNP TSC0040312
atagttatatttg

SEQ ID NO: 160108 - DNA, 13 bp, Artificial Sequence
  Oligonucleotide for detection of SNP TSC0040312
caaatataactat

SEQ ID NO: 160109 - DNA, 13 bp, Artificial Sequence
  Oligonucleotide for detection of SNP TSC0040312
atagttttatttg

SEQ ID NO: 160110 - DNA, 13 bp, Artificial Sequence
  Oligonucleotide for detection of SNP TSC0040312
caaataaaactat

SEQ ID NO: 160111 - DNA, 13 bp, Artificial Sequence
  Oligonucleotide for detection of SNP TSC0040312
taaatataattgt

SEQ ID NO: 160112 - DNA, 13 bp, Artificial Sequence
  Oligonucleotide for detection of SNP TSC0040312
acaattatattta

SEQ ID NO: 160113 - DNA, 13 bp, Artificial Sequence
  Oligonucleotide for detection of SNP TSC0040312
taaataaaattgt

SEQ ID NO: 160114 - DNA, 13 bp, Artificial Sequence
  Oligonucleotide for detection of SNP TSC0040312
acaattttattta

SEQ ID NO: 160115 - DNA, 13 bp, Artificial Sequence
  Oligonucleotide for detection of SNP TSC0040313
aagaaatgagatt

SEQ ID NO: 160116 - DNA, 13 bp, Artificial Sequence
  Oligonucleotide for detection of SNP TSC0040313
aatctcatttctt

SEQ ID NO: 160117 - DNA, 13 bp, Artificial Sequence
  Oligonucleotide for detection of SNP TSC0040313
aagaaacgagatt

SEQ ID NO: 160118 - DNA, 13 bp, Artificial Sequence
  Oligonucleotide for detection of SNP TSC0040313
aatctcgtttctt

SEQ ID NO: 160119 - DNA, 13 bp, Artificial Sequence
  Oligonucleotide for detection of SNP TSC0040316
ggtatttaggaay

SEQ ID NO: 160120 - DNA, 13 bp, Artificial Sequence
  Oligonucleotide for detection of SNP TSC0040316
rttcctaaatacc

SEQ ID NO: 160121 - DNA, 13 bp, Artificial Sequence
  Oligonucleotide for detection of SNP TSC0040316
ggtattgaggaay

SEQ ID NO: 160122 - DNA, 13 bp, Artificial Sequence
  Oligonucleotide for detection of SNP TSC0040316
rttcctcaatacc

SEQ ID NO: 160123 - DNA, 13 bp, Artificial Sequence
  Oligonucleotide for detection of SNP TSC0040316
gtttttgaatgty

SEQ ID NO: 160124 - DNA, 13 bp, Artificial Sequence
  Oligonucleotide for detection of SNP TSC0040316
racattcaaaaac

SEQ ID NO: 160125 - DNA, 13 bp, Artificial Sequence
  Oligonucleotide for detection of SNP TSC0040316
gttttttaatgty

SEQ ID NO: 160126 - DNA, 13 bp, Artificial Sequence
  Oligonucleotide for detection of SNP TSC0040316
racattaaaaaac

SEQ ID NO: 160127 - DNA, 13 bp, Artificial Sequence
  Oligonucleotide for detection of SNP TSC0040321
gtggtaatttaat

SEQ ID NO: 160128 - DNA, 13 bp, Artificial Sequence
  Oligonucleotide for detection of SNP TSC0040321
attaaattaccac

SEQ ID NO: 160129 - DNA, 13 bp, Artificial Sequence
  Oligonucleotide for detection of SNP TSC0040321
gtggtagtttaat

SEQ ID NO: 160130 - DNA, 13 bp, Artificial Sequence
  Oligonucleotide for detection of SNP TSC0040321
attaaactaccac

SEQ ID NO: 160131 - DNA, 13 bp, Artificial Sequence
  Oligonucleotide for detection of SNP TSC0040322
ataatttggatty

SEQ ID NO: 160132 - DNA, 13 bp, Artificial Sequence
  Oligonucleotide for detection of SNP TSC0040322
raatccaaattat

SEQ ID NO: 160133 - DNA, 13 bp, Artificial Sequence
  Oligonucleotide for detection of SNP TSC0040322
ataattgggatty

SEQ ID NO: 160134 - DNA, 13 bp, Artificial Sequence
  Oligonucleotide for detection of SNP TSC0040322
raatcccaattat

SEQ ID NO: 160135 - DNA, 13 bp, Artificial Sequence
  Oligonucleotide for detection of SNP TSC0040322
gagtttaaattgt

SEQ ID NO: 160136 - DNA, 13 bp, Artificial Sequence
  Oligonucleotide for detection of SNP TSC0040322
acaatttaaactc

SEQ ID NO: 160137 - DNA, 13 bp, Artificial Sequence
  Oligonucleotide for detection of SNP TSC0040322
gagttttaattgt

SEQ ID NO: 160138 - DNA, 13 bp, Artificial Sequence
  Oligonucleotide for detection of SNP TSC0040322
acaattaaaactc

SEQ ID NO: 160139 - DNA, 13 bp, Artificial Sequence
  Oligonucleotide for detection of SNP TSC0040323
tggtttggttaag

SEQ ID NO: 160140 - DNA, 13 bp, Artificial Sequence
  Oligonucleotide for detection of SNP TSC0040323
cttaaccaaacca

SEQ ID NO: 160141 - DNA, 13 bp, Artificial Sequence
  Oligonucleotide for detection of SNP TSC0040323
tggttcggttaag

SEQ ID NO: 160142 - DNA, 13 bp, Artificial Sequence
  Oligonucleotide for detection of SNP TSC0040323
cttaaccgaacca

SEQ ID NO: 160143 - DNA, 13 bp, Artificial Sequence
  Oligonucleotide for detection of SNP TSC0040323
tttgatcgggtta

SEQ ID NO: 160144 - DNA, 13 bp, Artificial Sequence
  Oligonucleotide for detection of SNP TSC0040323
taacccgatcaaa

SEQ ID NO: 160145 - DNA, 13 bp, Artificial Sequence
  Oligonucleotide for detection of SNP TSC0040324
tgtttagtagttt

SEQ ID NO: 160146 - DNA, 13 bp, Artificial Sequence
  Oligonucleotide for detection of SNP TSC0040324
aaactactaaaca

SEQ ID NO: 160147 - DNA, 13 bp, Artificial Sequence
  Oligonucleotide for detection of SNP TSC0040324
tgtttaatagttt

SEQ ID NO: 160148 - DNA, 13 bp, Artificial Sequence
  Oligonucleotide for detection of SNP TSC0040324
aaactattaaaca

SEQ ID NO: 160149 - DNA, 13 bp, Artificial Sequence
  Oligonucleotide for detection of SNP TSC0040327
aaagtaattttty

SEQ ID NO: 160150 - DNA, 13 bp, Artificial Sequence
  Oligonucleotide for detection of SNP TSC0040327
raaaaattacttt

SEQ ID NO: 160151 - DNA, 13 bp, Artificial Sequence
  Oligonucleotide for detection of SNP TSC0040327
aaagtagttttty

SEQ ID NO: 160152 - DNA, 13 bp, Artificial Sequence
  Oligonucleotide for detection of SNP TSC0040327
raaaaactacttt

SEQ ID NO: 160153 - DNA, 13 bp, Artificial Sequence
  Oligonucleotide for detection of SNP TSC0040328
gattatgtagttt

SEQ ID NO: 160154 - DNA, 13 bp, Artificial Sequence
  Oligonucleotide for detection of SNP TSC0040328
aaactacataatc

SEQ ID NO: 160155 - DNA, 13 bp, Artificial Sequence
  Oligonucleotide for detection of SNP TSC0040328
gattatatagttt

SEQ ID NO: 160156 - DNA, 13 bp, Artificial Sequence
  Oligonucleotide for detection of SNP TSC0040328
aaactatataatc

SEQ ID NO: 160157 - DNA, 13 bp, Artificial Sequence
  Oligonucleotide for detection of SNP TSC0040330
taaataaaaagtg

SEQ ID NO: 160158 - DNA, 13 bp, Artificial Sequence
  Oligonucleotide for detection of SNP TSC0040330
cactttttattta

SEQ ID NO: 160159 - DNA, 13 bp, Artificial Sequence
  Oligonucleotide for detection of SNP TSC0040330
taaatataaagtg

SEQ ID NO: 160160 - DNA, 13 bp, Artificial Sequence
  Oligonucleotide for detection of SNP TSC0040330
cactttatattta

SEQ ID NO: 160161 - DNA, 13 bp, Artificial Sequence
  Oligonucleotide for detection of SNP TSC0040331
attaaatggttty

SEQ ID NO: 160162 - DNA, 13 bp, Artificial Sequence
  Oligonucleotide for detection of SNP TSC0040331
raaaccatttaat

SEQ ID NO: 160163 - DNA, 13 bp, Artificial Sequence
  Oligonucleotide for detection of SNP TSC0040331
attaaacggttty

SEQ ID NO: 160164 - DNA, 13 bp, Artificial Sequence
  Oligonucleotide for detection of SNP TSC0040331
raaaccgtttaat

SEQ ID NO: 160165 - DNA, 13 bp, Artificial Sequence
  Oligonucleotide for detection of SNP TSC0040331
gagattgtttagt

SEQ ID NO: 160166 - DNA, 13 bp, Artificial Sequence
  Oligonucleotide for detection of SNP TSC0040331
actaaacaatctc

SEQ ID NO: 160167 - DNA, 13 bp, Artificial Sequence
  Oligonucleotide for detection of SNP TSC0040331
gagattatttagt

SEQ ID NO: 160168 - DNA, 13 bp, Artificial Sequence
  Oligonucleotide for detection of SNP TSC0040331
actaaataatctc

SEQ ID NO: 160169 - DNA, 13 bp, Artificial Sequence
  Oligonucleotide for detection of SNP TSC0040331
gagatcgtttagt

SEQ ID NO: 160170 - DNA, 13 bp, Artificial Sequence
  Oligonucleotide for detection of SNP TSC0040331
actaaacgatctc

SEQ ID NO: 160171 - DNA, 13 bp, Artificial Sequence
  Oligonucleotide for detection of SNP TSC0040332
ttttatttttgty

SEQ ID NO: 160172 - DNA, 13 bp, Artificial Sequence
  Oligonucleotide for detection of SNP TSC0040332
racaaaaataaaa

SEQ ID NO: 160173 - DNA, 13 bp, Artificial Sequence
  Oligonucleotide for detection of SNP TSC0040332
gataaatatagag

SEQ ID NO: 160174 - DNA, 13 bp, Artificial Sequence
  Oligonucleotide for detection of SNP TSC0040332
ctctatatttatc

SEQ ID NO: 160175 - DNA, 13 bp, Artificial Sequence
  Oligonucleotide for detection of SNP TSC0040332
gataaagatagag

SEQ ID NO: 160176 - DNA, 13 bp, Artificial Sequence
  Oligonucleotide for detection of SNP TSC0040332
ctctatctttatc

SEQ ID NO: 160177 - DNA, 13 bp, Artificial Sequence
  Oligonucleotide for detection of SNP TSC0040333
gtgatgaggtgty

SEQ ID NO: 160178 - DNA, 13 bp, Artificial Sequence
  Oligonucleotide for detection of SNP TSC0040333
racacctcatcac

SEQ ID NO: 160179 - DNA, 13 bp, Artificial Sequence
  Oligonucleotide for detection of SNP TSC0040333
gtgatggggtgty

SEQ ID NO: 160180 - DNA, 13 bp, Artificial Sequence
  Oligonucleotide for detection of SNP TSC0040333
racaccccatcac

SEQ ID NO: 160181 - DNA, 13 bp, Artificial Sequence
  Oligonucleotide for detection of SNP TSC0040333
gtgatgaggcgty

SEQ ID NO: 160182 - DNA, 13 bp, Artificial Sequence
  Oligonucleotide for detection of SNP TSC0040333
racgcctcatcac

SEQ ID NO: 160183 - DNA, 13 bp, Artificial Sequence
  Oligonucleotide for detection of SNP TSC0040333
gtgatggggcgty

SEQ ID NO: 160184 - DNA, 13 bp, Artificial Sequence
  Oligonucleotide for detection of SNP TSC0040333
racgccccatcac

SEQ ID NO: 160185 - DNA, 13 bp, Artificial Sequence
  Oligonucleotide for detection of SNP TSC0040337
ttgagtattggta

SEQ ID NO: 160186 - DNA, 13 bp, Artificial Sequence
  Oligonucleotide for detection of SNP TSC0040337
taccaatactcaa

SEQ ID NO: 160187 - DNA, 13 bp, Artificial Sequence
  Oligonucleotide for detection of SNP TSC0040337
ttgagtgttggta

SEQ ID NO: 160188 - DNA, 13 bp, Artificial Sequence
  Oligonucleotide for detection of SNP TSC0040337
taccaacactcaa

SEQ ID NO: 160189 - DNA, 13 bp, Artificial Sequence
  Oligonucleotide for detection of SNP TSC0040343
tttataaaatgty

SEQ ID NO: 160190 - DNA, 13 bp, Artificial Sequence
  Oligonucleotide for detection of SNP TSC0040343
racattttataaa

SEQ ID NO: 160191 - DNA, 13 bp, Artificial Sequence
  Oligonucleotide for detection of SNP TSC0040343
tttatataatgty

SEQ ID NO: 160192 - DNA, 13 bp, Artificial Sequence
  Oligonucleotide for detection of SNP TSC0040343
racattatataaa

SEQ ID NO: 160193 - DNA, 13 bp, Artificial Sequence
  Oligonucleotide for detection of SNP TSC0040343
ggtattttgtgag

SEQ ID NO: 160194 - DNA, 13 bp, Artificial Sequence
  Oligonucleotide for detection of SNP TSC0040343
ctcacaaaatacc

SEQ ID NO: 160195 - DNA, 13 bp, Artificial Sequence
  Oligonucleotide for detection of SNP TSC0040343
ggtattgtgtgag

SEQ ID NO: 160196 - DNA, 13 bp, Artificial Sequence
  Oligonucleotide for detection of SNP TSC0040343
ctcacacaatacc

SEQ ID NO: 160197 - DNA, 13 bp, Artificial Sequence
  Oligonucleotide for detection of SNP TSC0040346
ttgattagttgga

SEQ ID NO: 160198 - DNA, 13 bp, Artificial Sequence
  Oligonucleotide for detection of SNP TSC0040346
tccaactaatcaa

SEQ ID NO: 160199 - DNA, 13 bp, Artificial Sequence
  Oligonucleotide for detection of SNP TSC0040346
ttgattggttgga

SEQ ID NO: 160200 - DNA, 13 bp, Artificial Sequence
  Oligonucleotide for detection of SNP TSC0040346
tccaaccaatcaa

SEQ ID NO: 160201 - DNA, 13 bp, Artificial Sequence
  Oligonucleotide for detection of SNP TSC0040346
ttgatcggttgga

SEQ ID NO: 160202 - DNA, 13 bp, Artificial Sequence
  Oligonucleotide for detection of SNP TSC0040346
tccaaccgatcaa

SEQ ID NO: 160203 - DNA, 13 bp, Artificial Sequence
  Oligonucleotide for detection of SNP TSC0040346
tttaattggttaa

SEQ ID NO: 160204 - DNA, 13 bp, Artificial Sequence
  Oligonucleotide for detection of SNP TSC0040346
ttaaccaattaaa

SEQ ID NO: 160205 - DNA, 13 bp, Artificial Sequence
  Oligonucleotide for detection of SNP TSC0040346
tttaatcggttaa

SEQ ID NO: 160206 - DNA, 13 bp, Artificial Sequence
  Oligonucleotide for detection of SNP TSC0040346
ttaaccgattaaa

SEQ ID NO: 160207 - DNA, 13 bp, Artificial Sequence
  Oligonucleotide for detection of SNP TSC0040347
agtttgtgtattt

SEQ ID NO: 160208 - DNA, 13 bp, Artificial Sequence
  Oligonucleotide for detection of SNP TSC0040347
aaatacacaaact

SEQ ID NO: 160209 - DNA, 13 bp, Artificial Sequence
  Oligonucleotide for detection of SNP TSC0040347
agtttgcgtattt

SEQ ID NO: 160210 - DNA, 13 bp, Artificial Sequence
  Oligonucleotide for detection of SNP TSC0040347
aaatacgcaaact

SEQ ID NO: 160211 - DNA, 13 bp, Artificial Sequence
  Oligonucleotide for detection of SNP TSC0040347
aaatatgtaggtt

SEQ ID NO: 160212 - DNA, 13 bp, Artificial Sequence
  Oligonucleotide for detection of SNP TSC0040347
aacctacatattt

SEQ ID NO: 160213 - DNA, 13 bp, Artificial Sequence
  Oligonucleotide for detection of SNP TSC0040347
aaatatataggtt

SEQ ID NO: 160214 - DNA, 13 bp, Artificial Sequence
  Oligonucleotide for detection of SNP TSC0040347
aacctatatattt

SEQ ID NO: 160215 - DNA, 13 bp, Artificial Sequence
  Oligonucleotide for detection of SNP TSC0040347
aaatacgtaggtt

SEQ ID NO: 160216 - DNA, 13 bp, Artificial Sequence
  Oligonucleotide for detection of SNP TSC0040347
aacctacgtattt

SEQ ID NO: 160217 - DNA, 13 bp, Artificial Sequence
  Oligonucleotide for detection of SNP TSC0040348
ttaggaaggagtg

SEQ ID NO: 160218 - DNA, 13 bp, Artificial Sequence
  Oligonucleotide for detection of SNP TSC0040348
cactccttcctaa

SEQ ID NO: 160219 - DNA, 13 bp, Artificial Sequence
  Oligonucleotide for detection of SNP TSC0040348
ttaggagggagtg

SEQ ID NO: 160220 - DNA, 13 bp, Artificial Sequence
  Oligonucleotide for detection of SNP TSC0040348
cactccctcctaa

SEQ ID NO: 160221 - DNA, 13 bp, Artificial Sequence
  Oligonucleotide for detection of SNP TSC0040349
tataaaagtttaa

SEQ ID NO: 160222 - DNA, 13 bp, Artificial Sequence
  Oligonucleotide for detection of SNP TSC0040349
ttaaacttttata

SEQ ID NO: 160223 - DNA, 13 bp, Artificial Sequence
  Oligonucleotide for detection of SNP TSC0040349
tataaaggtttaa

SEQ ID NO: 160224 - DNA, 13 bp, Artificial Sequence
  Oligonucleotide for detection of SNP TSC0040349
ttaaacctttata

SEQ ID NO: 160225 - DNA, 13 bp, Artificial Sequence
  Oligonucleotide for detection of SNP TSC0040350
atttatatatata

SEQ ID NO: 160226 - DNA, 13 bp, Artificial Sequence
  Oligonucleotide for detection of SNP TSC0040350
tatatatataaat

SEQ ID NO: 160227 - DNA, 13 bp, Artificial Sequence
  Oligonucleotide for detection of SNP TSC0040350
atttatttatata

SEQ ID NO: 160228 - DNA, 13 bp, Artificial Sequence
  Oligonucleotide for detection of SNP TSC0040350
tatataaataaat

SEQ ID NO: 160229 - DNA, 13 bp, Artificial Sequence
  Oligonucleotide for detection of SNP TSC0040350
tatataagtaaat

SEQ ID NO: 160230 - DNA, 13 bp, Artificial Sequence
  Oligonucleotide for detection of SNP TSC0040350
atttacttatata

SEQ ID NO: 160231 - DNA, 13 bp, Artificial Sequence
  Oligonucleotide for detection of SNP TSC0040351
ttgagaatagatt

SEQ ID NO: 160232 - DNA, 13 bp, Artificial Sequence
  Oligonucleotide for detection of SNP TSC0040351
aatctattctcaa

SEQ ID NO: 160233 - DNA, 13 bp, Artificial Sequence
  Oligonucleotide for detection of SNP TSC0040351
ttgagagtagatt

SEQ ID NO: 160234 - DNA, 13 bp, Artificial Sequence
  Oligonucleotide for detection of SNP TSC0040351
aatctactctcaa

SEQ ID NO: 160235 - DNA, 13 bp, Artificial Sequence
  Oligonucleotide for detection of SNP TSC0040352
tatgtttgtgtat

SEQ ID NO: 160236 - DNA, 13 bp, Artificial Sequence
  Oligonucleotide for detection of SNP TSC0040352
atacacaaacata

SEQ ID NO: 160237 - DNA, 13 bp, Artificial Sequence
  Oligonucleotide for detection of SNP TSC0040352
tatgttggtgtat

SEQ ID NO: 160238 - DNA, 13 bp, Artificial Sequence
  Oligonucleotide for detection of SNP TSC0040352
atacaccaacata

SEQ ID NO: 160239 - DNA, 13 bp, Artificial Sequence
  Oligonucleotide for detection of SNP TSC0040352
atatataagtatg

SEQ ID NO: 160240 - DNA, 13 bp, Artificial Sequence
  Oligonucleotide for detection of SNP TSC0040352
catacttatatat

SEQ ID NO: 160241 - DNA, 13 bp, Artificial Sequence
  Oligonucleotide for detection of SNP TSC0040352
atatattagtatg

SEQ ID NO: 160242 - DNA, 13 bp, Artificial Sequence
  Oligonucleotide for detection of SNP TSC0040352
catactaatatat

SEQ ID NO: 160243 - DNA, 13 bp, Artificial Sequence
  Oligonucleotide for detection of SNP TSC0040354
atgagaatatatt

SEQ ID NO: 160244 - DNA, 13 bp, Artificial Sequence
  Oligonucleotide for detection of SNP TSC0040354
aatatattctcat

SEQ ID NO: 160245 - DNA, 13 bp, Artificial Sequence
  Oligonucleotide for detection of SNP TSC0040354
atgagattatatt

SEQ ID NO: 160246 - DNA, 13 bp, Artificial Sequence
  Oligonucleotide for detection of SNP TSC0040354
aatataatctcat

SEQ ID NO: 160247 - DNA, 13 bp, Artificial Sequence
  Oligonucleotide for detection of SNP TSC0040354
aatgtgtttttat

SEQ ID NO: 160248 - DNA, 13 bp, Artificial Sequence
  Oligonucleotide for detection of SNP TSC0040354
ataaaaacacatt

SEQ ID NO: 160249 - DNA, 13 bp, Artificial Sequence
  Oligonucleotide for detection of SNP TSC0040354
aatgtggttttat

SEQ ID NO: 160250 - DNA, 13 bp, Artificial Sequence
  Oligonucleotide for detection of SNP TSC0040354
ataaaaccacatt

SEQ ID NO: 160251 - DNA, 13 bp, Artificial Sequence
  Oligonucleotide for detection of SNP TSC0040355
agtttatgattgy

SEQ ID NO: 160252 - DNA, 13 bp, Artificial Sequence
  Oligonucleotide for detection of SNP TSC0040355
rcaatcataaact

SEQ ID NO: 160253 - DNA, 13 bp, Artificial Sequence
  Oligonucleotide for detection of SNP TSC0040355
agtttacgattgy

SEQ ID NO: 160254 - DNA, 13 bp, Artificial Sequence
  Oligonucleotide for detection of SNP TSC0040355
rcaatcgtaaact

SEQ ID NO: 160255 - DNA, 13 bp, Artificial Sequence
  Oligonucleotide for detection of SNP TSC0040355
agtttatgatcgy

SEQ ID NO: 160256 - DNA, 13 bp, Artificial Sequence
  Oligonucleotide for detection of SNP TSC0040355
rcgatcataaact

SEQ ID NO: 160257 - DNA, 13 bp, Artificial Sequence
  Oligonucleotide for detection of SNP TSC0040355
agtttacgatcgy

SEQ ID NO: 160258 - DNA, 13 bp, Artificial Sequence
  Oligonucleotide for detection of SNP TSC0040355
rcgatcgtaaact

SEQ ID NO: 160259 - DNA, 13 bp, Artificial Sequence
  Oligonucleotide for detection of SNP TSC0040355
gtggttgtgagtt

SEQ ID NO: 160260 - DNA, 13 bp, Artificial Sequence
  Oligonucleotide for detection of SNP TSC0040355
aactcacaaccac

SEQ ID NO: 160261 - DNA, 13 bp, Artificial Sequence
  Oligonucleotide for detection of SNP TSC0040355
gtggttatgagtt

SEQ ID NO: 160262 - DNA, 13 bp, Artificial Sequence
  Oligonucleotide for detection of SNP TSC0040355
aactcataaccac

SEQ ID NO: 160263 - DNA, 13 bp, Artificial Sequence
  Oligonucleotide for detection of SNP TSC0040355
gcggttgtgagtt

SEQ ID NO: 160264 - DNA, 13 bp, Artificial Sequence
  Oligonucleotide for detection of SNP TSC0040355
aactcacaaccgc

SEQ ID NO: 160265 - DNA, 13 bp, Artificial Sequence
  Oligonucleotide for detection of SNP TSC0040355
gcggttatgagtt

SEQ ID NO: 160266 - DNA, 13 bp, Artificial Sequence
  Oligonucleotide for detection of SNP TSC0040355
aactcataaccgc

SEQ ID NO: 160267 - DNA, 13 bp, Artificial Sequence
  Oligonucleotide for detection of SNP TSC0040355
gtggtcgtgagtt

SEQ ID NO: 160268 - DNA, 13 bp, Artificial Sequence
  Oligonucleotide for detection of SNP TSC0040355
aactcacgaccac

SEQ ID NO: 160269 - DNA, 13 bp, Artificial Sequence
  Oligonucleotide for detection of SNP TSC0040355
gcggtcgtgagtt

SEQ ID NO: 160270 - DNA, 13 bp, Artificial Sequence
  Oligonucleotide for detection of SNP TSC0040355
aactcacgaccgc

SEQ ID NO: 160271 - DNA, 13 bp, Artificial Sequence
  Oligonucleotide for detection of SNP TSC0040358
ttgtttgttatty

SEQ ID NO: 160272 - DNA, 13 bp, Artificial Sequence
  Oligonucleotide for detection of SNP TSC0040358
raataacaaacaa

SEQ ID NO: 160273 - DNA, 13 bp, Artificial Sequence
  Oligonucleotide for detection of SNP TSC0040359
ataaaaattatat

SEQ ID NO: 160274 - DNA, 13 bp, Artificial Sequence
  Oligonucleotide for detection of SNP TSC0040359
atataatttttat

SEQ ID NO: 160275 - DNA, 13 bp, Artificial Sequence
  Oligonucleotide for detection of SNP TSC0040359
ataaaagttatat

SEQ ID NO: 160276 - DNA, 13 bp, Artificial Sequence
  Oligonucleotide for detection of SNP TSC0040359
atataacttttat

SEQ ID NO: 160277 - DNA, 13 bp, Artificial Sequence
  Oligonucleotide for detection of SNP TSC0040360
ttatttgtattta

SEQ ID NO: 160278 - DNA, 13 bp, Artificial Sequence
  Oligonucleotide for detection of SNP TSC0040360
taaatacaaataa

SEQ ID NO: 160279 - DNA, 13 bp, Artificial Sequence
  Oligonucleotide for detection of SNP TSC0040360
ttattcgtattta

SEQ ID NO: 160280 - DNA, 13 bp, Artificial Sequence
  Oligonucleotide for detection of SNP TSC0040360
taaatacgaataa

SEQ ID NO: 160281 - DNA, 13 bp, Artificial Sequence
  Oligonucleotide for detection of SNP TSC0040360
taaataggagtgg

SEQ ID NO: 160282 - DNA, 13 bp, Artificial Sequence
  Oligonucleotide for detection of SNP TSC0040360
ccactcctattta

SEQ ID NO: 160283 - DNA, 13 bp, Artificial Sequence
  Oligonucleotide for detection of SNP TSC0040360
taaatatgagtgg

SEQ ID NO: 160284 - DNA, 13 bp, Artificial Sequence
  Oligonucleotide for detection of SNP TSC0040360
ccactcatattta

SEQ ID NO: 160285 - DNA, 13 bp, Artificial Sequence
  Oligonucleotide for detection of SNP TSC0040360
taaatacgagtgg

SEQ ID NO: 160286 - DNA, 13 bp, Artificial Sequence
  Oligonucleotide for detection of SNP TSC0040360
ccactcgtattta

SEQ ID NO: 160287 - DNA, 13 bp, Artificial Sequence
  Oligonucleotide for detection of SNP TSC0040361
aatttaatgttty

SEQ ID NO: 160288 - DNA, 13 bp, Artificial Sequence
  Oligonucleotide for detection of SNP TSC0040361
raaacattaaatt

SEQ ID NO: 160289 - DNA, 13 bp, Artificial Sequence
  Oligonucleotide for detection of SNP TSC0040361
aatttattgttty

SEQ ID NO: 160290 - DNA, 13 bp, Artificial Sequence
  Oligonucleotide for detection of SNP TSC0040361
raaacaataaatt

SEQ ID NO: 160291 - DNA, 13 bp, Artificial Sequence
  Oligonucleotide for detection of SNP TSC0040361
gaagtattaaatt

SEQ ID NO: 160292 - DNA, 13 bp, Artificial Sequence
  Oligonucleotide for detection of SNP TSC0040361
aatttaatacttc

SEQ ID NO: 160293 - DNA, 13 bp, Artificial Sequence
  Oligonucleotide for detection of SNP TSC0040361
gaagtagtaaatt

SEQ ID NO: 160294 - DNA, 13 bp, Artificial Sequence
  Oligonucleotide for detection of SNP TSC0040361
aatttactacttc

SEQ ID NO: 160295 - DNA, 13 bp, Artificial Sequence
  Oligonucleotide for detection of SNP TSC0040364
ttgtttttttatt

SEQ ID NO: 160296 - DNA, 13 bp, Artificial Sequence
  Oligonucleotide for detection of SNP TSC0040364
aataaaaaaacaa

SEQ ID NO: 160297 - DNA, 13 bp, Artificial Sequence
  Oligonucleotide for detection of SNP TSC0040364
tcgtttatttatt

SEQ ID NO: 160298 - DNA, 13 bp, Artificial Sequence
  Oligonucleotide for detection of SNP TSC0040364
aataaataaacga

SEQ ID NO: 160299 - DNA, 13 bp, Artificial Sequence
  Oligonucleotide for detection of SNP TSC0040364
tcgtttttttatt

SEQ ID NO: 160300 - DNA, 13 bp, Artificial Sequence
  Oligonucleotide for detection of SNP TSC0040364
aataaaaaaacga

SEQ ID NO: 160301 - DNA, 13 bp, Artificial Sequence
  Oligonucleotide for detection of SNP TSC0040364
agtgaataggtga

SEQ ID NO: 160302 - DNA, 13 bp, Artificial Sequence
  Oligonucleotide for detection of SNP TSC0040364
tcacctattcact

SEQ ID NO: 160303 - DNA, 13 bp, Artificial Sequence
  Oligonucleotide for detection of SNP TSC0040364
agtgaaaaggtga

SEQ ID NO: 160304 - DNA, 13 bp, Artificial Sequence
  Oligonucleotide for detection of SNP TSC0040364
tcaccttttcact

SEQ ID NO: 160305 - DNA, 13 bp, Artificial Sequence
  Oligonucleotide for detection of SNP TSC0040364
agtgaataggcga

SEQ ID NO: 160306 - DNA, 13 bp, Artificial Sequence
  Oligonucleotide for detection of SNP TSC0040364
tcgcctattcact

SEQ ID NO: 160307 - DNA, 13 bp, Artificial Sequence
  Oligonucleotide for detection of SNP TSC0040364
agtgaaaaggcga

SEQ ID NO: 160308 - DNA, 13 bp, Artificial Sequence
  Oligonucleotide for detection of SNP TSC0040364
tcgccttttcact

SEQ ID NO: 160309 - DNA, 13 bp, Artificial Sequence
  Oligonucleotide for detection of SNP TSC0040365
agggttggggggg

SEQ ID NO: 160310 - DNA, 13 bp, Artificial Sequence
  Oligonucleotide for detection of SNP TSC0040365
cccccccaaccct

SEQ ID NO: 160311 - DNA, 13 bp, Artificial Sequence
  Oligonucleotide for detection of SNP TSC0040365
agggtttgggggg

SEQ ID NO: 160312 - DNA, 13 bp, Artificial Sequence
  Oligonucleotide for detection of SNP TSC0040365
ccccccaaaccct

SEQ ID NO: 160313 - DNA, 13 bp, Artificial Sequence
  Oligonucleotide for detection of SNP TSC0040365
agggttcgggggg

SEQ ID NO: 160314 - DNA, 13 bp, Artificial Sequence
  Oligonucleotide for detection of SNP TSC0040365
ccccccgaaccct

SEQ ID NO: 160315 - DNA, 13 bp, Artificial Sequence
  Oligonucleotide for detection of SNP TSC0040366
tttagtagatatt

SEQ ID NO: 160316 - DNA, 13 bp, Artificial Sequence
  Oligonucleotide for detection of SNP TSC0040366
aatatctactaaa

SEQ ID NO: 160317 - DNA, 13 bp, Artificial Sequence
  Oligonucleotide for detection of SNP TSC0040366
tttagtggatatt

SEQ ID NO: 160318 - DNA, 13 bp, Artificial Sequence
  Oligonucleotide for detection of SNP TSC0040366
aatatccactaaa

SEQ ID NO: 160319 - DNA, 13 bp, Artificial Sequence
  Oligonucleotide for detection of SNP TSC0040368
tattggttttagt

SEQ ID NO: 160320 - DNA, 13 bp, Artificial Sequence
  Oligonucleotide for detection of SNP TSC0040368
actaaaaccaata

SEQ ID NO: 160321 - DNA, 13 bp, Artificial Sequence
  Oligonucleotide for detection of SNP TSC0040368
tattgggtttagt

SEQ ID NO: 160322 - DNA, 13 bp, Artificial Sequence
  Oligonucleotide for detection of SNP TSC0040368
actaaacccaata

SEQ ID NO: 160323 - DNA, 13 bp, Artificial Sequence
  Oligonucleotide for detection of SNP TSC0040368
attaaaattagtg

SEQ ID NO: 160324 - DNA, 13 bp, Artificial Sequence
  Oligonucleotide for detection of SNP TSC0040368
cactaattttaat

SEQ ID NO: 160325 - DNA, 13 bp, Artificial Sequence
  Oligonucleotide for detection of SNP TSC0040368
attaaatttagtg

SEQ ID NO: 160326 - DNA, 13 bp, Artificial Sequence
  Oligonucleotide for detection of SNP TSC0040368
cactaaatttaat

SEQ ID NO: 160327 - DNA, 13 bp, Artificial Sequence
  Oligonucleotide for detection of SNP TSC0040371
tttgtatattggg

SEQ ID NO: 160328 - DNA, 13 bp, Artificial Sequence
  Oligonucleotide for detection of SNP TSC0040371
cccaatatacaaa

SEQ ID NO: 160329 - DNA, 13 bp, Artificial Sequence
  Oligonucleotide for detection of SNP TSC0040371
tttgtagattggg

SEQ ID NO: 160330 - DNA, 13 bp, Artificial Sequence
  Oligonucleotide for detection of SNP TSC0040371
cccaatctacaaa

SEQ ID NO: 160331 - DNA, 13 bp, Artificial Sequence
  Oligonucleotide for detection of SNP TSC0040371
tttagtgtataaa

SEQ ID NO: 160332 - DNA, 13 bp, Artificial Sequence
  Oligonucleotide for detection of SNP TSC0040371
tttatacactaaa

SEQ ID NO: 160333 - DNA, 13 bp, Artificial Sequence
  Oligonucleotide for detection of SNP TSC0040371
tttagtttataaa

SEQ ID NO: 160334 - DNA, 13 bp, Artificial Sequence
  Oligonucleotide for detection of SNP TSC0040371
tttataaactaaa

SEQ ID NO: 160335 - DNA, 13 bp, Artificial Sequence
  Oligonucleotide for detection of SNP TSC0040372
gttttttgatgta

SEQ ID NO: 160336 - DNA, 13 bp, Artificial Sequence
  Oligonucleotide for detection of SNP TSC0040372
tacatcaaaaaac

SEQ ID NO: 160337 - DNA, 13 bp, Artificial Sequence
  Oligonucleotide for detection of SNP TSC0040372
gtttttcgatgta

SEQ ID NO: 160338 - DNA, 13 bp, Artificial Sequence
  Oligonucleotide for detection of SNP TSC0040372
tacatcgaaaaac

SEQ ID NO: 160339 - DNA, 13 bp, Artificial Sequence
  Oligonucleotide for detection of SNP TSC0040372
gttttttgacgta

SEQ ID NO: 160340 - DNA, 13 bp, Artificial Sequence
  Oligonucleotide for detection of SNP TSC0040372
tacgtcaaaaaac

SEQ ID NO: 160341 - DNA, 13 bp, Artificial Sequence
  Oligonucleotide for detection of SNP TSC0040372
gtttttcgacgta

SEQ ID NO: 160342 - DNA, 13 bp, Artificial Sequence
  Oligonucleotide for detection of SNP TSC0040372
tacgtcgaaaaac

SEQ ID NO: 160343 - DNA, 13 bp, Artificial Sequence
  Oligonucleotide for detection of SNP TSC0040372
tgtgttgaagaay

SEQ ID NO: 160344 - DNA, 13 bp, Artificial Sequence
  Oligonucleotide for detection of SNP TSC0040372
rttcttcaacaca

SEQ ID NO: 160345 - DNA, 13 bp, Artificial Sequence
  Oligonucleotide for detection of SNP TSC0040372
tgtgttaaagaay

SEQ ID NO: 160346 - DNA, 13 bp, Artificial Sequence
  Oligonucleotide for detection of SNP TSC0040372
rttctttaacaca

SEQ ID NO: 160347 - DNA, 13 bp, Artificial Sequence
  Oligonucleotide for detection of SNP TSC0040372
tgcgttgaagaay

SEQ ID NO: 160348 - DNA, 13 bp, Artificial Sequence
  Oligonucleotide for detection of SNP TSC0040372
rttcttcaacgca

SEQ ID NO: 160349 - DNA, 13 bp, Artificial Sequence
  Oligonucleotide for detection of SNP TSC0040372
tgcgttaaagaay

SEQ ID NO: 160350 - DNA, 13 bp, Artificial Sequence
  Oligonucleotide for detection of SNP TSC0040372
rttctttaacgca

SEQ ID NO: 160351 - DNA, 13 bp, Artificial Sequence
  Oligonucleotide for detection of SNP TSC0040372
tgtgtcgaagaay

SEQ ID NO: 160352 - DNA, 13 bp, Artificial Sequence
  Oligonucleotide for detection of SNP TSC0040372
rttcttcgacaca

SEQ ID NO: 160353 - DNA, 13 bp, Artificial Sequence
  Oligonucleotide for detection of SNP TSC0040372
tgcgtcgaagaay

SEQ ID NO: 160354 - DNA, 13 bp, Artificial Sequence
  Oligonucleotide for detection of SNP TSC0040372
rttcttcgacgca

SEQ ID NO: 160355 - DNA, 13 bp, Artificial Sequence
  Oligonucleotide for detection of SNP TSC0040376
aaaaaaatagata

SEQ ID NO: 160356 - DNA, 13 bp, Artificial Sequence
  Oligonucleotide for detection of SNP TSC0040376
tatctattttttt

SEQ ID NO: 160357 - DNA, 13 bp, Artificial Sequence
  Oligonucleotide for detection of SNP TSC0040376
aaaaaagtagata

SEQ ID NO: 160358 - DNA, 13 bp, Artificial Sequence
  Oligonucleotide for detection of SNP TSC0040376
tatctactttttt

SEQ ID NO: 160359 - DNA, 13 bp, Artificial Sequence
  Oligonucleotide for detection of SNP TSC0040377
tattattgtggtt

SEQ ID NO: 160360 - DNA, 13 bp, Artificial Sequence
  Oligonucleotide for detection of SNP TSC0040377
aaccacaataata

SEQ ID NO: 160361 - DNA, 13 bp, Artificial Sequence
  Oligonucleotide for detection of SNP TSC0040377
tattatcgtggtt

SEQ ID NO: 160362 - DNA, 13 bp, Artificial Sequence
  Oligonucleotide for detection of SNP TSC0040377
aaccacgataata

SEQ ID NO: 160363 - DNA, 13 bp, Artificial Sequence
  Oligonucleotide for detection of SNP TSC0040377
aattatgatggta

SEQ ID NO: 160364 - DNA, 13 bp, Artificial Sequence
  Oligonucleotide for detection of SNP TSC0040377
taccatcataatt

SEQ ID NO: 160365 - DNA, 13 bp, Artificial Sequence
  Oligonucleotide for detection of SNP TSC0040377
aattataatggta

SEQ ID NO: 160366 - DNA, 13 bp, Artificial Sequence
  Oligonucleotide for detection of SNP TSC0040377
taccattataatt

SEQ ID NO: 160367 - DNA, 13 bp, Artificial Sequence
  Oligonucleotide for detection of SNP TSC0040377
aattacgatggta

SEQ ID NO: 160368 - DNA, 13 bp, Artificial Sequence
  Oligonucleotide for detection of SNP TSC0040377
taccatcgtaatt

SEQ ID NO: 160369 - DNA, 13 bp, Artificial Sequence
  Oligonucleotide for detection of SNP TSC0040378
tgttgttggatgy

SEQ ID NO: 160370 - DNA, 13 bp, Artificial Sequence
  Oligonucleotide for detection of SNP TSC0040378
rcatccaacaaca

SEQ ID NO: 160371 - DNA, 13 bp, Artificial Sequence
  Oligonucleotide for detection of SNP TSC0040378
tgttgtcggatgy

SEQ ID NO: 160372 - DNA, 13 bp, Artificial Sequence
  Oligonucleotide for detection of SNP TSC0040378
rcatccgacaaca

SEQ ID NO: 160373 - DNA, 13 bp, Artificial Sequence
  Oligonucleotide for detection of SNP TSC0040378
gtattcggtagta

SEQ ID NO: 160374 - DNA, 13 bp, Artificial Sequence
  Oligonucleotide for detection of SNP TSC0040378
tactaccgaatac

SEQ ID NO: 160375 - DNA, 13 bp, Artificial Sequence
  Oligonucleotide for detection of SNP TSC0040379
tggaataaagatt

SEQ ID NO: 160376 - DNA, 13 bp, Artificial Sequence
  Oligonucleotide for detection of SNP TSC0040379
aatctttattcca

SEQ ID NO: 160377 - DNA, 13 bp, Artificial Sequence
  Oligonucleotide for detection of SNP TSC0040379
tggaatgaagatt

SEQ ID NO: 160378 - DNA, 13 bp, Artificial Sequence
  Oligonucleotide for detection of SNP TSC0040379
aatcttcattcca

SEQ ID NO: 160379 - DNA, 13 bp, Artificial Sequence
  Oligonucleotide for detection of SNP TSC0040379
tggaacgaagatt

SEQ ID NO: 160380 - DNA, 13 bp, Artificial Sequence
  Oligonucleotide for detection of SNP TSC0040379
aatcttcgttcca

SEQ ID NO: 160381 - DNA, 13 bp, Artificial Sequence
  Oligonucleotide for detection of SNP TSC0040380
agataaaaataga

SEQ ID NO: 160382 - DNA, 13 bp, Artificial Sequence
  Oligonucleotide for detection of SNP TSC0040380
tctatttttatct

SEQ ID NO: 160383 - DNA, 13 bp, Artificial Sequence
  Oligonucleotide for detection of SNP TSC0040380
agataataataga

SEQ ID NO: 160384 - DNA, 13 bp, Artificial Sequence
  Oligonucleotide for detection of SNP TSC0040380
tctattattatct

SEQ ID NO: 160385 - DNA, 13 bp, Artificial Sequence
  Oligonucleotide for detection of SNP TSC0040381
attttgtgttgtt

SEQ ID NO: 160386 - DNA, 13 bp, Artificial Sequence
  Oligonucleotide for detection of SNP TSC0040381
aacaacacaaaat

SEQ ID NO: 160387 - DNA, 13 bp, Artificial Sequence
  Oligonucleotide for detection of SNP TSC0040381
atttcgtgttgtt

SEQ ID NO: 160388 - DNA, 13 bp, Artificial Sequence
  Oligonucleotide for detection of SNP TSC0040381
aacaacacgaaat

SEQ ID NO: 160389 - DNA, 13 bp, Artificial Sequence
  Oligonucleotide for detection of SNP TSC0040381
attttgcgttgtt

SEQ ID NO: 160390 - DNA, 13 bp, Artificial Sequence
  Oligonucleotide for detection of SNP TSC0040381
aacaacgcaaaat

SEQ ID NO: 160391 - DNA, 13 bp, Artificial Sequence
  Oligonucleotide for detection of SNP TSC0040381
atttcgcgttgtt

SEQ ID NO: 160392 - DNA, 13 bp, Artificial Sequence
  Oligonucleotide for detection of SNP TSC0040381
aacaacgcgaaat

SEQ ID NO: 160393 - DNA, 13 bp, Artificial Sequence
  Oligonucleotide for detection of SNP TSC0040381
aataatgtgaagt

SEQ ID NO: 160394 - DNA, 13 bp, Artificial Sequence
  Oligonucleotide for detection of SNP TSC0040381
acttcacattatt

SEQ ID NO: 160395 - DNA, 13 bp, Artificial Sequence
  Oligonucleotide for detection of SNP TSC0040381
aataatatgaagt

SEQ ID NO: 160396 - DNA, 13 bp, Artificial Sequence
  Oligonucleotide for detection of SNP TSC0040381
acttcatattatt

SEQ ID NO: 160397 - DNA, 13 bp, Artificial Sequence
  Oligonucleotide for detection of SNP TSC0040381
aataacgtgaagt

SEQ ID NO: 160398 - DNA, 13 bp, Artificial Sequence
  Oligonucleotide for detection of SNP TSC0040381
acttcacgttatt

SEQ ID NO: 160399 - DNA, 13 bp, Artificial Sequence
  Oligonucleotide for detection of SNP TSC0040381
aataatacgaagt

SEQ ID NO: 160400 - DNA, 13 bp, Artificial Sequence
  Oligonucleotide for detection of SNP TSC0040381
acttcgtattatt

SEQ ID NO: 160401 - DNA, 13 bp, Artificial Sequence
  Oligonucleotide for detection of SNP TSC0040381
aataatgcgaagt

SEQ ID NO: 160402 - DNA, 13 bp, Artificial Sequence
  Oligonucleotide for detection of SNP TSC0040381
acttcgcattatt

SEQ ID NO: 160403 - DNA, 13 bp, Artificial Sequence
  Oligonucleotide for detection of SNP TSC0040381
aataacgcgaagt

SEQ ID NO: 160404 - DNA, 13 bp, Artificial Sequence
  Oligonucleotide for detection of SNP TSC0040381
acttcgcgttatt

SEQ ID NO: 160405 - DNA, 13 bp, Artificial Sequence
  Oligonucleotide for detection of SNP TSC0040382
tttgtttgttaaa

SEQ ID NO: 160406 - DNA, 13 bp, Artificial Sequence
  Oligonucleotide for detection of SNP TSC0040382
tttaacaaacaaa

SEQ ID NO: 160407 - DNA, 13 bp, Artificial Sequence
  Oligonucleotide for detection of SNP TSC0040382
tttgttcgttaaa

SEQ ID NO: 160408 - DNA, 13 bp, Artificial Sequence
  Oligonucleotide for detection of SNP TSC0040382
tttaacgaacaaa

SEQ ID NO: 160409 - DNA, 13 bp, Artificial Sequence
  Oligonucleotide for detection of SNP TSC0040382
tttaatgaataga

SEQ ID NO: 160410 - DNA, 13 bp, Artificial Sequence
  Oligonucleotide for detection of SNP TSC0040382
tctattcattaaa

SEQ ID NO: 160411 - DNA, 13 bp, Artificial Sequence
  Oligonucleotide for detection of SNP TSC0040382
tttaataaataga

SEQ ID NO: 160412 - DNA, 13 bp, Artificial Sequence
  Oligonucleotide for detection of SNP TSC0040382
tctatttattaaa

SEQ ID NO: 160413 - DNA, 13 bp, Artificial Sequence
  Oligonucleotide for detection of SNP TSC0040382
tttaacgaataga

SEQ ID NO: 160414 - DNA, 13 bp, Artificial Sequence
  Oligonucleotide for detection of SNP TSC0040382
tctattcgttaaa

SEQ ID NO: 160415 - DNA, 13 bp, Artificial Sequence
  Oligonucleotide for detection of SNP TSC0040384
atttaagtgatay

SEQ ID NO: 160416 - DNA, 13 bp, Artificial Sequence
  Oligonucleotide for detection of SNP TSC0040384
rtatcacttaaat

SEQ ID NO: 160417 - DNA, 13 bp, Artificial Sequence
  Oligonucleotide for detection of SNP TSC0040384
atttaaatgatay

SEQ ID NO: 160418 - DNA, 13 bp, Artificial Sequence
  Oligonucleotide for detection of SNP TSC0040384
rtatcatttaaat

SEQ ID NO: 160419 - DNA, 13 bp, Artificial Sequence
  Oligonucleotide for detection of SNP TSC0040385
tgggggatggttg

SEQ ID NO: 160420 - DNA, 13 bp, Artificial Sequence
  Oligonucleotide for detection of SNP TSC0040385
caaccatccccca

SEQ ID NO: 160421 - DNA, 13 bp, Artificial Sequence
  Oligonucleotide for detection of SNP TSC0040385
tggggggtggttg

SEQ ID NO: 160422 - DNA, 13 bp, Artificial Sequence
  Oligonucleotide for detection of SNP TSC0040385
caaccacccccca

SEQ ID NO: 160423 - DNA, 13 bp, Artificial Sequence
  Oligonucleotide for detection of SNP TSC0040386
aaataagaaaata

SEQ ID NO: 160424 - DNA, 13 bp, Artificial Sequence
  Oligonucleotide for detection of SNP TSC0040386
tattttcttattt

SEQ ID NO: 160425 - DNA, 13 bp, Artificial Sequence
  Oligonucleotide for detection of SNP TSC0040387
atttggaagtatt

SEQ ID NO: 160426 - DNA, 13 bp, Artificial Sequence
  Oligonucleotide for detection of SNP TSC0040387
aatacttccaaat

SEQ ID NO: 160427 - DNA, 13 bp, Artificial Sequence
  Oligonucleotide for detection of SNP TSC0040387
atttgggagtatt

SEQ ID NO: 160428 - DNA, 13 bp, Artificial Sequence
  Oligonucleotide for detection of SNP TSC0040387
aatactcccaaat

SEQ ID NO: 160429 - DNA, 13 bp, Artificial Sequence
  Oligonucleotide for detection of SNP TSC0040388
gttaagttttaga

SEQ ID NO: 160430 - DNA, 13 bp, Artificial Sequence
  Oligonucleotide for detection of SNP TSC0040388
tctaaaacttaac

SEQ ID NO: 160431 - DNA, 13 bp, Artificial Sequence
  Oligonucleotide for detection of SNP TSC0040388
gttaaggtttaga

SEQ ID NO: 160432 - DNA, 13 bp, Artificial Sequence
  Oligonucleotide for detection of SNP TSC0040388
tctaaaccttaac

SEQ ID NO: 160433 - DNA, 13 bp, Artificial Sequence
  Oligonucleotide for detection of SNP TSC0040388
tttagggtttggy

SEQ ID NO: 160434 - DNA, 13 bp, Artificial Sequence
  Oligonucleotide for detection of SNP TSC0040388
rccaaaccctaaa

SEQ ID NO: 160435 - DNA, 13 bp, Artificial Sequence
  Oligonucleotide for detection of SNP TSC0040388
tttaggttttggy

SEQ ID NO: 160436 - DNA, 13 bp, Artificial Sequence
  Oligonucleotide for detection of SNP TSC0040388
rccaaaacctaaa

SEQ ID NO: 160437 - DNA, 13 bp, Artificial Sequence
  Oligonucleotide for detection of SNP TSC0040394
ttgtttaattggg

SEQ ID NO: 160438 - DNA, 13 bp, Artificial Sequence
  Oligonucleotide for detection of SNP TSC0040394
cccaattaaacaa

SEQ ID NO: 160439 - DNA, 13 bp, Artificial Sequence
  Oligonucleotide for detection of SNP TSC0040394
ttgtttgattggg

SEQ ID NO: 160440 - DNA, 13 bp, Artificial Sequence
  Oligonucleotide for detection of SNP TSC0040394
cccaatcaaacaa

SEQ ID NO: 160441 - DNA, 13 bp, Artificial Sequence
  Oligonucleotide for detection of SNP TSC0008393
tttgttattatgg

SEQ ID NO: 160442 - DNA, 13 bp, Artificial Sequence
  Oligonucleotide for detection of SNP TSC0008393
ccataataacaaa

SEQ ID NO: 160443 - DNA, 13 bp, Artificial Sequence
  Oligonucleotide for detection of SNP TSC0008393
tttgttgttatgg

SEQ ID NO: 160444 - DNA, 13 bp, Artificial Sequence
  Oligonucleotide for detection of SNP TSC0008393
ccataacaacaaa

SEQ ID NO: 160445 - DNA, 13 bp, Artificial Sequence
  Oligonucleotide for detection of SNP TSC0008393
tttgttattacgg

SEQ ID NO: 160446 - DNA, 13 bp, Artificial Sequence
  Oligonucleotide for detection of SNP TSC0008393
ccgtaataacaaa

SEQ ID NO: 160447 - DNA, 13 bp, Artificial Sequence
  Oligonucleotide for detection of SNP TSC0008393
tttgtcgttatgg

SEQ ID NO: 160448 - DNA, 13 bp, Artificial Sequence
  Oligonucleotide for detection of SNP TSC0008393
ccataacgacaaa

SEQ ID NO: 160449 - DNA, 13 bp, Artificial Sequence
  Oligonucleotide for detection of SNP TSC0008393
tttgttgttacgg

SEQ ID NO: 160450 - DNA, 13 bp, Artificial Sequence
  Oligonucleotide for detection of SNP TSC0008393
ccgtaacaacaaa

SEQ ID NO: 160451 - DNA, 13 bp, Artificial Sequence
  Oligonucleotide for detection of SNP TSC0008393
tttgtcgttacgg

SEQ ID NO: 160452 - DNA, 13 bp, Artificial Sequence
  Oligonucleotide for detection of SNP TSC0008393
ccgtaacgacaaa

SEQ ID NO: 160453 - DNA, 13 bp, Artificial Sequence
  Oligonucleotide for detection of SNP TSC0008393
ttgtagtggtaga

SEQ ID NO: 160454 - DNA, 13 bp, Artificial Sequence
  Oligonucleotide for detection of SNP TSC0008393
tctaccactacaa

SEQ ID NO: 160455 - DNA, 13 bp, Artificial Sequence
  Oligonucleotide for detection of SNP TSC0008393
tcgtagtggtaga

SEQ ID NO: 160456 - DNA, 13 bp, Artificial Sequence
  Oligonucleotide for detection of SNP TSC0008393
tctaccactacga

SEQ ID NO: 160457 - DNA, 13 bp, Artificial Sequence
  Oligonucleotide for detection of SNP TSC0008393
ttgtagcggtaga

SEQ ID NO: 160458 - DNA, 13 bp, Artificial Sequence
  Oligonucleotide for detection of SNP TSC0008393
tctaccgctacaa

SEQ ID NO: 160459 - DNA, 13 bp, Artificial Sequence
  Oligonucleotide for detection of SNP TSC0008393
tcgtagcggtaga

SEQ ID NO: 160460 - DNA, 13 bp, Artificial Sequence
  Oligonucleotide for detection of SNP TSC0008393
tctaccgctacga

SEQ ID NO: 160461 - DNA, 13 bp, Artificial Sequence
  Oligonucleotide for detection of SNP TSC0040396
gattgttataggt

SEQ ID NO: 160462 - DNA, 13 bp, Artificial Sequence
  Oligonucleotide for detection of SNP TSC0040396
acctataacaatc

SEQ ID NO: 160463 - DNA, 13 bp, Artificial Sequence
  Oligonucleotide for detection of SNP TSC0040396
gattgtgataggt

SEQ ID NO: 160464 - DNA, 13 bp, Artificial Sequence
  Oligonucleotide for detection of SNP TSC0040396
acctatcacaatc

SEQ ID NO: 160465 - DNA, 13 bp, Artificial Sequence
  Oligonucleotide for detection of SNP TSC0040396
atttgtaatagty

SEQ ID NO: 160466 - DNA, 13 bp, Artificial Sequence
  Oligonucleotide for detection of SNP TSC0040396
ractattacaaat

SEQ ID NO: 160467 - DNA, 13 bp, Artificial Sequence
  Oligonucleotide for detection of SNP TSC0040396
atttgttatagty

SEQ ID NO: 160468 - DNA, 13 bp, Artificial Sequence
  Oligonucleotide for detection of SNP TSC0040396
ractataacaaat

SEQ ID NO: 160469 - DNA, 13 bp, Artificial Sequence
  Oligonucleotide for detection of SNP TSC0040397
tttggtttagaat

SEQ ID NO: 160470 - DNA, 13 bp, Artificial Sequence
  Oligonucleotide for detection of SNP TSC0040397
attctaaaccaaa

SEQ ID NO: 160471 - DNA, 13 bp, Artificial Sequence
  Oligonucleotide for detection of SNP TSC0040397
tttggtgtagaat

SEQ ID NO: 160472 - DNA, 13 bp, Artificial Sequence
  Oligonucleotide for detection of SNP TSC0040397
attctacaccaaa

SEQ ID NO: 160473 - DNA, 13 bp, Artificial Sequence
  Oligonucleotide for detection of SNP TSC0040397
tttggcgtagaat

SEQ ID NO: 160474 - DNA, 13 bp, Artificial Sequence
  Oligonucleotide for detection of SNP TSC0040397
attctacgccaaa

SEQ ID NO: 160475 - DNA, 13 bp, Artificial Sequence
  Oligonucleotide for detection of SNP TSC0040397
attttgagttaga

SEQ ID NO: 160476 - DNA, 13 bp, Artificial Sequence
  Oligonucleotide for detection of SNP TSC0040397
tctaactcaaaat

SEQ ID NO: 160477 - DNA, 13 bp, Artificial Sequence
  Oligonucleotide for detection of SNP TSC0040397
attttgtgttaga

SEQ ID NO: 160478 - DNA, 13 bp, Artificial Sequence
  Oligonucleotide for detection of SNP TSC0040397
tctaacacaaaat

SEQ ID NO: 160479 - DNA, 13 bp, Artificial Sequence
  Oligonucleotide for detection of SNP TSC0040397
attttgcgttaga

SEQ ID NO: 160480 - DNA, 13 bp, Artificial Sequence
  Oligonucleotide for detection of SNP TSC0040397
tctaacgcaaaat

SEQ ID NO: 160481 - DNA, 13 bp, Artificial Sequence
  Oligonucleotide for detection of SNP TSC0040398
atagttgttaaag

SEQ ID NO: 160482 - DNA, 13 bp, Artificial Sequence
  Oligonucleotide for detection of SNP TSC0040398
ctttaacaactat

SEQ ID NO: 160483 - DNA, 13 bp, Artificial Sequence
  Oligonucleotide for detection of SNP TSC0040398
atagttattaaag

SEQ ID NO: 160484 - DNA, 13 bp, Artificial Sequence
  Oligonucleotide for detection of SNP TSC0040398
ctttaataactat

SEQ ID NO: 160485 - DNA, 13 bp, Artificial Sequence
  Oligonucleotide for detection of SNP TSC0040403
ttagtgtttaagy

SEQ ID NO: 160486 - DNA, 13 bp, Artificial Sequence
  Oligonucleotide for detection of SNP TSC0040403
rcttaaacactaa

SEQ ID NO: 160487 - DNA, 13 bp, Artificial Sequence
  Oligonucleotide for detection of SNP TSC0040403
ttagtggttaagy

SEQ ID NO: 160488 - DNA, 13 bp, Artificial Sequence
  Oligonucleotide for detection of SNP TSC0040403
rcttaaccactaa

SEQ ID NO: 160489 - DNA, 13 bp, Artificial Sequence
  Oligonucleotide for detection of SNP TSC0000439
tggggaatagtag

SEQ ID NO: 160490 - DNA, 13 bp, Artificial Sequence
  Oligonucleotide for detection of SNP TSC0000439
ctactattcccca

SEQ ID NO: 160491 - DNA, 13 bp, Artificial Sequence
  Oligonucleotide for detection of SNP TSC0000439
tggggagtagtag

SEQ ID NO: 160492 - DNA, 13 bp, Artificial Sequence
  Oligonucleotide for detection of SNP TSC0000439
ctactactcccca

SEQ ID NO: 160493 - DNA, 13 bp, Artificial Sequence
  Oligonucleotide for detection of SNP TSC0040405
agggaaaggggga

SEQ ID NO: 160494 - DNA, 13 bp, Artificial Sequence
  Oligonucleotide for detection of SNP TSC0040405
tccccctttccct

SEQ ID NO: 160495 - DNA, 13 bp, Artificial Sequence
  Oligonucleotide for detection of SNP TSC0040405
agggaagggggga

SEQ ID NO: 160496 - DNA, 13 bp, Artificial Sequence
  Oligonucleotide for detection of SNP TSC0040405
tccccccttccct

SEQ ID NO: 160497 - DNA, 13 bp, Artificial Sequence
  Oligonucleotide for detection of SNP TSC0009106
tgtgggattttty

SEQ ID NO: 160498 - DNA, 13 bp, Artificial Sequence
  Oligonucleotide for detection of SNP TSC0009106
raaaaatcccaca

SEQ ID NO: 160499 - DNA, 13 bp, Artificial Sequence
  Oligonucleotide for detection of SNP TSC0009106
tgtggggttttty

SEQ ID NO: 160500 - DNA, 13 bp, Artificial Sequence
  Oligonucleotide for detection of SNP TSC0009106
raaaaaccccaca

SEQ ID NO: 160501 - DNA, 13 bp, Artificial Sequence
  Oligonucleotide for detection of SNP TSC0009106
cgtgggattttty

SEQ ID NO: 160502 - DNA, 13 bp, Artificial Sequence
  Oligonucleotide for detection of SNP TSC0009106
raaaaatcccacg

SEQ ID NO: 160503 - DNA, 13 bp, Artificial Sequence
  Oligonucleotide for detection of SNP TSC0009106
cgtggggttttty

SEQ ID NO: 160504 - DNA, 13 bp, Artificial Sequence
  Oligonucleotide for detection of SNP TSC0009106
raaaaaccccacg

SEQ ID NO: 160505 - DNA, 13 bp, Artificial Sequence
  Oligonucleotide for detection of SNP TSC0040410
ggggtatgaagay

SEQ ID NO: 160506 - DNA, 13 bp, Artificial Sequence
  Oligonucleotide for detection of SNP TSC0040410
rtcttcatacccc

SEQ ID NO: 160507 - DNA, 13 bp, Artificial Sequence
  Oligonucleotide for detection of SNP TSC0040410
ggggtacgaagay

SEQ ID NO: 160508 - DNA, 13 bp, Artificial Sequence
  Oligonucleotide for detection of SNP TSC0040410
rtcttcgtacccc

SEQ ID NO: 160509 - DNA, 13 bp, Artificial Sequence
  Oligonucleotide for detection of SNP TSC0040411
tttttaagtatat

SEQ ID NO: 160510 - DNA, 13 bp, Artificial Sequence
  Oligonucleotide for detection of SNP TSC0040411
atatacttaaaaa

SEQ ID NO: 160511 - DNA, 13 bp, Artificial Sequence
  Oligonucleotide for detection of SNP TSC0040411
tttttaggtatat

SEQ ID NO: 160512 - DNA, 13 bp, Artificial Sequence
  Oligonucleotide for detection of SNP TSC0040411
atatacctaaaaa

SEQ ID NO: 160513 - DNA, 13 bp, Artificial Sequence
  Oligonucleotide for detection of SNP TSC0040412
tgtgtaaaaggag

SEQ ID NO: 160514 - DNA, 13 bp, Artificial Sequence
  Oligonucleotide for detection of SNP TSC0040412
ctccttttacaca

SEQ ID NO: 160515 - DNA, 13 bp, Artificial Sequence
  Oligonucleotide for detection of SNP TSC0040412
tgtgtagaaggag

SEQ ID NO: 160516 - DNA, 13 bp, Artificial Sequence
  Oligonucleotide for detection of SNP TSC0040412
ctccttctacaca

SEQ ID NO: 160517 - DNA, 13 bp, Artificial Sequence
  Oligonucleotide for detection of SNP TSC0040412
tgcgtaaaaggag

SEQ ID NO: 160518 - DNA, 13 bp, Artificial Sequence
  Oligonucleotide for detection of SNP TSC0040412
ctccttttacgca

SEQ ID NO: 160519 - DNA, 13 bp, Artificial Sequence
  Oligonucleotide for detection of SNP TSC0040412
tgcgtagaaggag

SEQ ID NO: 160520 - DNA, 13 bp, Artificial Sequence
  Oligonucleotide for detection of SNP TSC0040412
ctccttctacgca

SEQ ID NO: 160521 - DNA, 13 bp, Artificial Sequence
  Oligonucleotide for detection of SNP TSC0040413
tatataagggttt

SEQ ID NO: 160522 - DNA, 13 bp, Artificial Sequence
  Oligonucleotide for detection of SNP TSC0040413
aaacccttatata

SEQ ID NO: 160523 - DNA, 13 bp, Artificial Sequence
  Oligonucleotide for detection of SNP TSC0040413
tatataggggttt

SEQ ID NO: 160524 - DNA, 13 bp, Artificial Sequence
  Oligonucleotide for detection of SNP TSC0040413
aaacccctatata

SEQ ID NO: 160525 - DNA, 13 bp, Artificial Sequence
  Oligonucleotide for detection of SNP TSC0040417
aagttggtattaa

SEQ ID NO: 160526 - DNA, 13 bp, Artificial Sequence
  Oligonucleotide for detection of SNP TSC0040417
ttaataccaactt

SEQ ID NO: 160527 - DNA, 13 bp, Artificial Sequence
  Oligonucleotide for detection of SNP TSC0040417
ttgatagtagttt

SEQ ID NO: 160528 - DNA, 13 bp, Artificial Sequence
  Oligonucleotide for detection of SNP TSC0040417
aaactactatcaa

SEQ ID NO: 160529 - DNA, 13 bp, Artificial Sequence
  Oligonucleotide for detection of SNP TSC0040417
ttgataatagttt

SEQ ID NO: 160530 - DNA, 13 bp, Artificial Sequence
  Oligonucleotide for detection of SNP TSC0040417
aaactattatcaa

SEQ ID NO: 160531 - DNA, 13 bp, Artificial Sequence
  Oligonucleotide for detection of SNP TSC0040417
ttgatattagttt

SEQ ID NO: 160532 - DNA, 13 bp, Artificial Sequence
  Oligonucleotide for detection of SNP TSC0040417
aaactaatatcaa

SEQ ID NO: 160533 - DNA, 13 bp, Artificial Sequence
  Oligonucleotide for detection of SNP TSC0040418
aatttgtgttttt

SEQ ID NO: 160534 - DNA, 13 bp, Artificial Sequence
  Oligonucleotide for detection of SNP TSC0040418
aaaaacacaaatt

SEQ ID NO: 160535 - DNA, 13 bp, Artificial Sequence
  Oligonucleotide for detection of SNP TSC0040418
aatttgcgttttt

SEQ ID NO: 160536 - DNA, 13 bp, Artificial Sequence
  Oligonucleotide for detection of SNP TSC0040418
aaaaacgcaaatt

SEQ ID NO: 160537 - DNA, 13 bp, Artificial Sequence
  Oligonucleotide for detection of SNP TSC0040418
agggatgtaaatt

SEQ ID NO: 160538 - DNA, 13 bp, Artificial Sequence
  Oligonucleotide for detection of SNP TSC0040418
aatttacatccct

SEQ ID NO: 160539 - DNA, 13 bp, Artificial Sequence
  Oligonucleotide for detection of SNP TSC0040418
agggatataaatt

SEQ ID NO: 160540 - DNA, 13 bp, Artificial Sequence
  Oligonucleotide for detection of SNP TSC0040418
aatttatatccct

SEQ ID NO: 160541 - DNA, 13 bp, Artificial Sequence
  Oligonucleotide for detection of SNP TSC0040418
agggacgtaaatt

SEQ ID NO: 160542 - DNA, 13 bp, Artificial Sequence
  Oligonucleotide for detection of SNP TSC0040418
aatttacgtccct

SEQ ID NO: 160543 - DNA, 13 bp, Artificial Sequence
  Oligonucleotide for detection of SNP TSC0040421
ggttgtgagatta

SEQ ID NO: 160544 - DNA, 13 bp, Artificial Sequence
  Oligonucleotide for detection of SNP TSC0040421
taatctcacaacc

SEQ ID NO: 160545 - DNA, 13 bp, Artificial Sequence
  Oligonucleotide for detection of SNP TSC0040421
ggttgtaagatta

SEQ ID NO: 160546 - DNA, 13 bp, Artificial Sequence
  Oligonucleotide for detection of SNP TSC0040421
taatcttacaacc

SEQ ID NO: 160547 - DNA, 13 bp, Artificial Sequence
  Oligonucleotide for detection of SNP TSC0010017
taaagagttttgy

SEQ ID NO: 160548 - DNA, 13 bp, Artificial Sequence
  Oligonucleotide for detection of SNP TSC0010017
rcaaaactcttta

SEQ ID NO: 160549 - DNA, 13 bp, Artificial Sequence
  Oligonucleotide for detection of SNP TSC0010017
taaagaattttgy

SEQ ID NO: 160550 - DNA, 13 bp, Artificial Sequence
  Oligonucleotide for detection of SNP TSC0010017
rcaaaattcttta

SEQ ID NO: 160551 - DNA, 13 bp, Artificial Sequence
  Oligonucleotide for detection of SNP TSC0008818
aagttaagtagta

SEQ ID NO: 160552 - DNA, 13 bp, Artificial Sequence
  Oligonucleotide for detection of SNP TSC0008818
tactacttaactt

SEQ ID NO: 160553 - DNA, 13 bp, Artificial Sequence
  Oligonucleotide for detection of SNP TSC0008818
tgttgtttggttt

SEQ ID NO: 160554 - DNA, 13 bp, Artificial Sequence
  Oligonucleotide for detection of SNP TSC0008818
aaaccaaacaaca

SEQ ID NO: 160555 - DNA, 13 bp, Artificial Sequence
  Oligonucleotide for detection of SNP TSC0040422
aagaaggggttty

SEQ ID NO: 160556 - DNA, 13 bp, Artificial Sequence
  Oligonucleotide for detection of SNP TSC0040422
raaaccccttctt

SEQ ID NO: 160557 - DNA, 13 bp, Artificial Sequence
  Oligonucleotide for detection of SNP TSC0040422
aagaagaggttty

SEQ ID NO: 160558 - DNA, 13 bp, Artificial Sequence
  Oligonucleotide for detection of SNP TSC0040422
raaacctcttctt

SEQ ID NO: 160559 - DNA, 13 bp, Artificial Sequence
  Oligonucleotide for detection of SNP TSC0040424
ttattaattgtty

SEQ ID NO: 160560 - DNA, 13 bp, Artificial Sequence
  Oligonucleotide for detection of SNP TSC0040424
raacaattaataa

SEQ ID NO: 160561 - DNA, 13 bp, Artificial Sequence
  Oligonucleotide for detection of SNP TSC0040424
ttattatttgtty

SEQ ID NO: 160562 - DNA, 13 bp, Artificial Sequence
  Oligonucleotide for detection of SNP TSC0040424
raacaaataataa

SEQ ID NO: 160563 - DNA, 13 bp, Artificial Sequence
  Oligonucleotide for detection of SNP TSC0040424
gaatagttggtgg

SEQ ID NO: 160564 - DNA, 13 bp, Artificial Sequence
  Oligonucleotide for detection of SNP TSC0040424
ccaccaactattc

SEQ ID NO: 160565 - DNA, 13 bp, Artificial Sequence
  Oligonucleotide for detection of SNP TSC0040424
gaataggtggtgg

SEQ ID NO: 160566 - DNA, 13 bp, Artificial Sequence
  Oligonucleotide for detection of SNP TSC0040424
ccaccacctattc

SEQ ID NO: 160567 - DNA, 13 bp, Artificial Sequence
  Oligonucleotide for detection of SNP TSC0009587
agtaatagggaat

SEQ ID NO: 160568 - DNA, 13 bp, Artificial Sequence
  Oligonucleotide for detection of SNP TSC0009587
attccctattact

SEQ ID NO: 160569 - DNA, 13 bp, Artificial Sequence
  Oligonucleotide for detection of SNP TSC0009587
agtaatggggaat

SEQ ID NO: 160570 - DNA, 13 bp, Artificial Sequence
  Oligonucleotide for detection of SNP TSC0009587
attccccattact

SEQ ID NO: 160571 - DNA, 13 bp, Artificial Sequence
  Oligonucleotide for detection of SNP TSC0009587
agtaacggggaat

SEQ ID NO: 160572 - DNA, 13 bp, Artificial Sequence
  Oligonucleotide for detection of SNP TSC0009587
attccccgttact

SEQ ID NO: 160573 - DNA, 13 bp, Artificial Sequence
  Oligonucleotide for detection of SNP TSC0009587
attttttgttatt

SEQ ID NO: 160574 - DNA, 13 bp, Artificial Sequence
  Oligonucleotide for detection of SNP TSC0009587
aataacaaaaaat

SEQ ID NO: 160575 - DNA, 13 bp, Artificial Sequence
  Oligonucleotide for detection of SNP TSC0009587
atttttcgttatt

SEQ ID NO: 160576 - DNA, 13 bp, Artificial Sequence
  Oligonucleotide for detection of SNP TSC0009587
aataacgaaaaat

SEQ ID NO: 160577 - DNA, 13 bp, Artificial Sequence
  Oligonucleotide for detection of SNP TSC0040425
ataggatgataga

SEQ ID NO: 160578 - DNA, 13 bp, Artificial Sequence
  Oligonucleotide for detection of SNP TSC0040425
tctatcatcctat

SEQ ID NO: 160579 - DNA, 13 bp, Artificial Sequence
  Oligonucleotide for detection of SNP TSC0040425
ataggacgataga

SEQ ID NO: 160580 - DNA, 13 bp, Artificial Sequence
  Oligonucleotide for detection of SNP TSC0040425
tctatcgtcctat

SEQ ID NO: 160581 - DNA, 13 bp, Artificial Sequence
  Oligonucleotide for detection of SNP TSC0005364
gtatattggtaga

SEQ ID NO: 160582 - DNA, 13 bp, Artificial Sequence
  Oligonucleotide for detection of SNP TSC0005364
tctaccaatatac

SEQ ID NO: 160583 - DNA, 13 bp, Artificial Sequence
  Oligonucleotide for detection of SNP TSC0005364
gtatatcggtaga

SEQ ID NO: 160584 - DNA, 13 bp, Artificial Sequence
  Oligonucleotide for detection of SNP TSC0005364
tctaccgatatac

SEQ ID NO: 160585 - DNA, 13 bp, Artificial Sequence
  Oligonucleotide for detection of SNP TSC0005364
tttgttggtatgy

SEQ ID NO: 160586 - DNA, 13 bp, Artificial Sequence
  Oligonucleotide for detection of SNP TSC0005364
rcataccaacaaa

SEQ ID NO: 160587 - DNA, 13 bp, Artificial Sequence
  Oligonucleotide for detection of SNP TSC0005364
tttgttagtatgy

SEQ ID NO: 160588 - DNA, 13 bp, Artificial Sequence
  Oligonucleotide for detection of SNP TSC0005364
rcatactaacaaa

SEQ ID NO: 160589 - DNA, 13 bp, Artificial Sequence
  Oligonucleotide for detection of SNP TSC0005364
tttgtcggtatgy

SEQ ID NO: 160590 - DNA, 13 bp, Artificial Sequence
  Oligonucleotide for detection of SNP TSC0005364
rcataccgacaaa

SEQ ID NO: 160591 - DNA, 13 bp, Artificial Sequence
  Oligonucleotide for detection of SNP TSC0040430
gggttaaaattag

SEQ ID NO: 160592 - DNA, 13 bp, Artificial Sequence
  Oligonucleotide for detection of SNP TSC0040430
ctaattttaaccc

SEQ ID NO: 160593 - DNA, 13 bp, Artificial Sequence
  Oligonucleotide for detection of SNP TSC0040430
gggttagaattag

SEQ ID NO: 160594 - DNA, 13 bp, Artificial Sequence
  Oligonucleotide for detection of SNP TSC0040430
ctaattctaaccc

SEQ ID NO: 160595 - DNA, 13 bp, Artificial Sequence
  Oligonucleotide for detection of SNP TSC0040432
ttataaagttagg

SEQ ID NO: 160596 - DNA, 13 bp, Artificial Sequence
  Oligonucleotide for detection of SNP TSC0040432
cctaactttataa

SEQ ID NO: 160597 - DNA, 13 bp, Artificial Sequence
  Oligonucleotide for detection of SNP TSC0040432
ttataaggttagg

SEQ ID NO: 160598 - DNA, 13 bp, Artificial Sequence
  Oligonucleotide for detection of SNP TSC0040432
cctaaccttataa

SEQ ID NO: 160599 - DNA, 13 bp, Artificial Sequence
  Oligonucleotide for detection of SNP TSC0040434
tttagtaggtatt

SEQ ID NO: 160600 - DNA, 13 bp, Artificial Sequence
  Oligonucleotide for detection of SNP TSC0040434
aatacctactaaa

SEQ ID NO: 160601 - DNA, 13 bp, Artificial Sequence
  Oligonucleotide for detection of SNP TSC0040434
tttagttggtatt

SEQ ID NO: 160602 - DNA, 13 bp, Artificial Sequence
  Oligonucleotide for detection of SNP TSC0040434
aataccaactaaa

SEQ ID NO: 160603 - DNA, 13 bp, Artificial Sequence
  Oligonucleotide for detection of SNP TSC0040434
tttagtcggtatt

SEQ ID NO: 160604 - DNA, 13 bp, Artificial Sequence
  Oligonucleotide for detection of SNP TSC0040434
aataccgactaaa

SEQ ID NO: 160605 - DNA, 13 bp, Artificial Sequence
  Oligonucleotide for detection of SNP TSC0040434
aatatttgttaag

SEQ ID NO: 160606 - DNA, 13 bp, Artificial Sequence
  Oligonucleotide for detection of SNP TSC0040434
cttaacaaatatt

SEQ ID NO: 160607 - DNA, 13 bp, Artificial Sequence
  Oligonucleotide for detection of SNP TSC0040434
aatattggttaag

SEQ ID NO: 160608 - DNA, 13 bp, Artificial Sequence
  Oligonucleotide for detection of SNP TSC0040434
cttaaccaatatt

SEQ ID NO: 160609 - DNA, 13 bp, Artificial Sequence
  Oligonucleotide for detection of SNP TSC0040434
aatatcggttaag

SEQ ID NO: 160610 - DNA, 13 bp, Artificial Sequence
  Oligonucleotide for detection of SNP TSC0040434
cttaaccgatatt

SEQ ID NO: 160611 - DNA, 13 bp, Artificial Sequence
  Oligonucleotide for detection of SNP TSC0040438
gatgatatttggg

SEQ ID NO: 160612 - DNA, 13 bp, Artificial Sequence
  Oligonucleotide for detection of SNP TSC0040438
cccaaatatcatc

SEQ ID NO: 160613 - DNA, 13 bp, Artificial Sequence
  Oligonucleotide for detection of SNP TSC0040438
gatgatgtttggg

SEQ ID NO: 160614 - DNA, 13 bp, Artificial Sequence
  Oligonucleotide for detection of SNP TSC0040438
cccaaacatcatc

SEQ ID NO: 160615 - DNA, 13 bp, Artificial Sequence
  Oligonucleotide for detection of SNP TSC0040438
gacgatatttggg

SEQ ID NO: 160616 - DNA, 13 bp, Artificial Sequence
  Oligonucleotide for detection of SNP TSC0040438
cccaaatatcgtc

SEQ ID NO: 160617 - DNA, 13 bp, Artificial Sequence
  Oligonucleotide for detection of SNP TSC0040438
gacgatgtttggg

SEQ ID NO: 160618 - DNA, 13 bp, Artificial Sequence
  Oligonucleotide for detection of SNP TSC0040438
cccaaacatcgtc

SEQ ID NO: 160619 - DNA, 13 bp, Artificial Sequence
  Oligonucleotide for detection of SNP TSC0040449
tatttaagttata

SEQ ID NO: 160620 - DNA, 13 bp, Artificial Sequence
  Oligonucleotide for detection of SNP TSC0040449
tataacttaaata

SEQ ID NO: 160621 - DNA, 13 bp, Artificial Sequence
  Oligonucleotide for detection of SNP TSC0040449
tatttaggttata

SEQ ID NO: 160622 - DNA, 13 bp, Artificial Sequence
  Oligonucleotide for detection of SNP TSC0040449
tataacctaaata

SEQ ID NO: 160623 - DNA, 13 bp, Artificial Sequence
  Oligonucleotide for detection of SNP TSC0040450
ggggggtagtatg

SEQ ID NO: 160624 - DNA, 13 bp, Artificial Sequence
  Oligonucleotide for detection of SNP TSC0040450
catactacccccc

SEQ ID NO: 160625 - DNA, 13 bp, Artificial Sequence
  Oligonucleotide for detection of SNP TSC0040450
gggggggagtatg

SEQ ID NO: 160626 - DNA, 13 bp, Artificial Sequence
  Oligonucleotide for detection of SNP TSC0040450
catactccccccc

SEQ ID NO: 160627 - DNA, 13 bp, Artificial Sequence
  Oligonucleotide for detection of SNP TSC0040452
gtaagtattttta

SEQ ID NO: 160628 - DNA, 13 bp, Artificial Sequence
  Oligonucleotide for detection of SNP TSC0040452
taaaaatacttac

SEQ ID NO: 160629 - DNA, 13 bp, Artificial Sequence
  Oligonucleotide for detection of SNP TSC0040452
gtaagtgttttta

SEQ ID NO: 160630 - DNA, 13 bp, Artificial Sequence
  Oligonucleotide for detection of SNP TSC0040452
taaaaacacttac

SEQ ID NO: 160631 - DNA, 13 bp, Artificial Sequence
  Oligonucleotide for detection of SNP TSC0040453
atgataattgagt

SEQ ID NO: 160632 - DNA, 13 bp, Artificial Sequence
  Oligonucleotide for detection of SNP TSC0040453
actcaattatcat

SEQ ID NO: 160633 - DNA, 13 bp, Artificial Sequence
  Oligonucleotide for detection of SNP TSC0040453
atgatagttgagt

SEQ ID NO: 160634 - DNA, 13 bp, Artificial Sequence
  Oligonucleotide for detection of SNP TSC0040453
actcaactatcat

SEQ ID NO: 160635 - DNA, 13 bp, Artificial Sequence
  Oligonucleotide for detection of SNP TSC0006407
gagtaatttaatt

SEQ ID NO: 160636 - DNA, 13 bp, Artificial Sequence
  Oligonucleotide for detection of SNP TSC0006407
aattaaattactc

SEQ ID NO: 160637 - DNA, 13 bp, Artificial Sequence
  Oligonucleotide for detection of SNP TSC0006407
gagtaagttaatt

SEQ ID NO: 160638 - DNA, 13 bp, Artificial Sequence
  Oligonucleotide for detection of SNP TSC0006407
aattaacttactc

SEQ ID NO: 160639 - DNA, 13 bp, Artificial Sequence
  Oligonucleotide for detection of SNP TSC0006407
agttaaattatty

SEQ ID NO: 160640 - DNA, 13 bp, Artificial Sequence
  Oligonucleotide for detection of SNP TSC0006407
raataatttaact

SEQ ID NO: 160641 - DNA, 13 bp, Artificial Sequence
  Oligonucleotide for detection of SNP TSC0006407
agttaatttatty

SEQ ID NO: 160642 - DNA, 13 bp, Artificial Sequence
  Oligonucleotide for detection of SNP TSC0006407
raataaattaact

SEQ ID NO: 160643 - DNA, 13 bp, Artificial Sequence
  Oligonucleotide for detection of SNP TSC0006408
tttttatgaaata

SEQ ID NO: 160644 - DNA, 13 bp, Artificial Sequence
  Oligonucleotide for detection of SNP TSC0006408
tatttcataaaaa

SEQ ID NO: 160645 - DNA, 13 bp, Artificial Sequence
  Oligonucleotide for detection of SNP TSC0006408
tttttaggaaata

SEQ ID NO: 160646 - DNA, 13 bp, Artificial Sequence
  Oligonucleotide for detection of SNP TSC0006408
tatttcctaaaaa

SEQ ID NO: 160647 - DNA, 13 bp, Artificial Sequence
  Oligonucleotide for detection of SNP TSC0006408
tgttttatgaggg

SEQ ID NO: 160648 - DNA, 13 bp, Artificial Sequence
  Oligonucleotide for detection of SNP TSC0006408
ccctcataaaaca

SEQ ID NO: 160649 - DNA, 13 bp, Artificial Sequence
  Oligonucleotide for detection of SNP TSC0006408
tgttttttgaggg

SEQ ID NO: 160650 - DNA, 13 bp, Artificial Sequence
  Oligonucleotide for detection of SNP TSC0006408
ccctcaaaaaaca

SEQ ID NO: 160651 - DNA, 13 bp, Artificial Sequence
  Oligonucleotide for detection of SNP TSC0040454
gggtgagggggaa

SEQ ID NO: 160652 - DNA, 13 bp, Artificial Sequence
  Oligonucleotide for detection of SNP TSC0040454
ttccccctcaccc

SEQ ID NO: 160653 - DNA, 13 bp, Artificial Sequence
  Oligonucleotide for detection of SNP TSC0040454
gggtgaaggggaa

SEQ ID NO: 160654 - DNA, 13 bp, Artificial Sequence
  Oligonucleotide for detection of SNP TSC0040454
ttccccttcaccc

SEQ ID NO: 160655 - DNA, 13 bp, Artificial Sequence
  Oligonucleotide for detection of SNP TSC0040454
gggcgagggggaa

SEQ ID NO: 160656 - DNA, 13 bp, Artificial Sequence
  Oligonucleotide for detection of SNP TSC0040454
ttccccctcgccc

SEQ ID NO: 160657 - DNA, 13 bp, Artificial Sequence
  Oligonucleotide for detection of SNP TSC0040454
gggcgaaggggaa

SEQ ID NO: 160658 - DNA, 13 bp, Artificial Sequence
  Oligonucleotide for detection of SNP TSC0040454
ttccccttcgccc

SEQ ID NO: 160659 - DNA, 13 bp, Artificial Sequence
  Oligonucleotide for detection of SNP TSC0005458
ttgatttatttat

SEQ ID NO: 160660 - DNA, 13 bp, Artificial Sequence
  Oligonucleotide for detection of SNP TSC0005458
ataaataaatcaa

SEQ ID NO: 160661 - DNA, 13 bp, Artificial Sequence
  Oligonucleotide for detection of SNP TSC0005458
ttgattgatttat

SEQ ID NO: 160662 - DNA, 13 bp, Artificial Sequence
  Oligonucleotide for detection of SNP TSC0005458
ataaatcaatcaa

SEQ ID NO: 160663 - DNA, 13 bp, Artificial Sequence
  Oligonucleotide for detection of SNP TSC0005458
ttgatcgatttat

SEQ ID NO: 160664 - DNA, 13 bp, Artificial Sequence
  Oligonucleotide for detection of SNP TSC0005458
ataaatcgatcaa

SEQ ID NO: 160665 - DNA, 13 bp, Artificial Sequence
  Oligonucleotide for detection of SNP TSC0005458
atgaatggattaa

SEQ ID NO: 160666 - DNA, 13 bp, Artificial Sequence
  Oligonucleotide for detection of SNP TSC0005458
ttaatccattcat

SEQ ID NO: 160667 - DNA, 13 bp, Artificial Sequence
  Oligonucleotide for detection of SNP TSC0005458
atgaattgattaa

SEQ ID NO: 160668 - DNA, 13 bp, Artificial Sequence
  Oligonucleotide for detection of SNP TSC0005458
ttaatcaattcat

SEQ ID NO: 160669 - DNA, 13 bp, Artificial Sequence
  Oligonucleotide for detection of SNP TSC0005458
atgaatcgattaa

SEQ ID NO: 160670 - DNA, 13 bp, Artificial Sequence
  Oligonucleotide for detection of SNP TSC0005458
ttaatcgattcat

SEQ ID NO: 160671 - DNA, 13 bp, Artificial Sequence
  Oligonucleotide for detection of SNP TSC0005459
tatgtaattgaat

SEQ ID NO: 160672 - DNA, 13 bp, Artificial Sequence
  Oligonucleotide for detection of SNP TSC0005459
attcaattacata

SEQ ID NO: 160673 - DNA, 13 bp, Artificial Sequence
  Oligonucleotide for detection of SNP TSC0005459
tatgtagttgaat

SEQ ID NO: 160674 - DNA, 13 bp, Artificial Sequence
  Oligonucleotide for detection of SNP TSC0005459
attcaactacata

SEQ ID NO: 160675 - DNA, 13 bp, Artificial Sequence
  Oligonucleotide for detection of SNP TSC0040462
taattgataaaga

SEQ ID NO: 160676 - DNA, 13 bp, Artificial Sequence
  Oligonucleotide for detection of SNP TSC0040462
tctttatcaatta

SEQ ID NO: 160677 - DNA, 13 bp, Artificial Sequence
  Oligonucleotide for detection of SNP TSC0040462
taattgttaaaga

SEQ ID NO: 160678 - DNA, 13 bp, Artificial Sequence
  Oligonucleotide for detection of SNP TSC0040462
tctttaacaatta

SEQ ID NO: 160679 - DNA, 13 bp, Artificial Sequence
  Oligonucleotide for detection of SNP TSC0040463
ttattatgagtat

SEQ ID NO: 160680 - DNA, 13 bp, Artificial Sequence
  Oligonucleotide for detection of SNP TSC0040463
atactcataataa

SEQ ID NO: 160681 - DNA, 13 bp, Artificial Sequence
  Oligonucleotide for detection of SNP TSC0040463
ttattacgagtat

SEQ ID NO: 160682 - DNA, 13 bp, Artificial Sequence
  Oligonucleotide for detection of SNP TSC0040463
atactcgtaataa

SEQ ID NO: 160683 - DNA, 13 bp, Artificial Sequence
  Oligonucleotide for detection of SNP TSC0040463
atgtttgtaataa

SEQ ID NO: 160684 - DNA, 13 bp, Artificial Sequence
  Oligonucleotide for detection of SNP TSC0040463
ttattacaaacat

SEQ ID NO: 160685 - DNA, 13 bp, Artificial Sequence
  Oligonucleotide for detection of SNP TSC0040463
atgtttataataa

SEQ ID NO: 160686 - DNA, 13 bp, Artificial Sequence
  Oligonucleotide for detection of SNP TSC0040463
ttattataaacat

SEQ ID NO: 160687 - DNA, 13 bp, Artificial Sequence
  Oligonucleotide for detection of SNP TSC0040463
atgttcgtaataa

SEQ ID NO: 160688 - DNA, 13 bp, Artificial Sequence
  Oligonucleotide for detection of SNP TSC0040463
ttattacgaacat

SEQ ID NO: 160689 - DNA, 13 bp, Artificial Sequence
  Oligonucleotide for detection of SNP TSC0040465
aatattgtggaga

SEQ ID NO: 160690 - DNA, 13 bp, Artificial Sequence
  Oligonucleotide for detection of SNP TSC0040465
tctccacaatatt

SEQ ID NO: 160691 - DNA, 13 bp, Artificial Sequence
  Oligonucleotide for detection of SNP TSC0040465
aatattatggaga

SEQ ID NO: 160692 - DNA, 13 bp, Artificial Sequence
  Oligonucleotide for detection of SNP TSC0040465
tctccataatatt

SEQ ID NO: 160693 - DNA, 13 bp, Artificial Sequence
  Oligonucleotide for detection of SNP TSC0040466
tgaggaggaagty

SEQ ID NO: 160694 - DNA, 13 bp, Artificial Sequence
  Oligonucleotide for detection of SNP TSC0040466
racttcctcctca

SEQ ID NO: 160695 - DNA, 13 bp, Artificial Sequence
  Oligonucleotide for detection of SNP TSC0040466
tgaggaagaagty

SEQ ID NO: 160696 - DNA, 13 bp, Artificial Sequence
  Oligonucleotide for detection of SNP TSC0040466
racttcttcctca

SEQ ID NO: 160697 - DNA, 13 bp, Artificial Sequence
  Oligonucleotide for detection of SNP TSC0040467
ggttttagttttt

SEQ ID NO: 160698 - DNA, 13 bp, Artificial Sequence
  Oligonucleotide for detection of SNP TSC0040467
aaaaactaaaacc

SEQ ID NO: 160699 - DNA, 13 bp, Artificial Sequence
  Oligonucleotide for detection of SNP TSC0040467
ggtttcggttttt

SEQ ID NO: 160700 - DNA, 13 bp, Artificial Sequence
  Oligonucleotide for detection of SNP TSC0040467
aaaaaccgaaacc

SEQ ID NO: 160701 - DNA, 13 bp, Artificial Sequence
  Oligonucleotide for detection of SNP TSC0040467
aaagattgaagty

SEQ ID NO: 160702 - DNA, 13 bp, Artificial Sequence
  Oligonucleotide for detection of SNP TSC0040467
racttcaatcttt

SEQ ID NO: 160703 - DNA, 13 bp, Artificial Sequence
  Oligonucleotide for detection of SNP TSC0040467
aaagatcgaagty

SEQ ID NO: 160704 - DNA, 13 bp, Artificial Sequence
  Oligonucleotide for detection of SNP TSC0040467
racttcgatcttt

SEQ ID NO: 160705 - DNA, 13 bp, Artificial Sequence
  Oligonucleotide for detection of SNP TSC0040469
ataaaaaatagty

SEQ ID NO: 160706 - DNA, 13 bp, Artificial Sequence
  Oligonucleotide for detection of SNP TSC0040469
ractattttttat

SEQ ID NO: 160707 - DNA, 13 bp, Artificial Sequence
  Oligonucleotide for detection of SNP TSC0040469
ataaaatatagty

SEQ ID NO: 160708 - DNA, 13 bp, Artificial Sequence
  Oligonucleotide for detection of SNP TSC0040469
ractatattttat

SEQ ID NO: 160709 - DNA, 13 bp, Artificial Sequence
  Oligonucleotide for detection of SNP TSC0040469
gattgttttttgt

SEQ ID NO: 160710 - DNA, 13 bp, Artificial Sequence
  Oligonucleotide for detection of SNP TSC0040469
acaaaaaacaatc

SEQ ID NO: 160711 - DNA, 13 bp, Artificial Sequence
  Oligonucleotide for detection of SNP TSC0040469
gattgtgttttgt

SEQ ID NO: 160712 - DNA, 13 bp, Artificial Sequence
  Oligonucleotide for detection of SNP TSC0040469
acaaaacacaatc

SEQ ID NO: 160713 - DNA, 13 bp, Artificial Sequence
  Oligonucleotide for detection of SNP TSC0040470
tataggaatatty

SEQ ID NO: 160714 - DNA, 13 bp, Artificial Sequence
  Oligonucleotide for detection of SNP TSC0040470
raatattcctata

SEQ ID NO: 160715 - DNA, 13 bp, Artificial Sequence
  Oligonucleotide for detection of SNP TSC0040470
tataggtatatty

SEQ ID NO: 160716 - DNA, 13 bp, Artificial Sequence
  Oligonucleotide for detection of SNP TSC0040470
raatatacctata

SEQ ID NO: 160717 - DNA, 13 bp, Artificial Sequence
  Oligonucleotide for detection of SNP TSC0040470
gaatgtttttgtg

SEQ ID NO: 160718 - DNA, 13 bp, Artificial Sequence
  Oligonucleotide for detection of SNP TSC0040470
cacaaaaacattc

SEQ ID NO: 160719 - DNA, 13 bp, Artificial Sequence
  Oligonucleotide for detection of SNP TSC0040470
gaatgtgtttgtg

SEQ ID NO: 160720 - DNA, 13 bp, Artificial Sequence
  Oligonucleotide for detection of SNP TSC0040470
cacaaacacattc

SEQ ID NO: 160721 - DNA, 13 bp, Artificial Sequence
  Oligonucleotide for detection of SNP TSC0040471
agaaattaatgga

SEQ ID NO: 160722 - DNA, 13 bp, Artificial Sequence
  Oligonucleotide for detection of SNP TSC0040471
tccattaatttct

SEQ ID NO: 160723 - DNA, 13 bp, Artificial Sequence
  Oligonucleotide for detection of SNP TSC0040471
agaaatgaatgga

SEQ ID NO: 160724 - DNA, 13 bp, Artificial Sequence
  Oligonucleotide for detection of SNP TSC0040471
tccattcatttct

SEQ ID NO: 160725 - DNA, 13 bp, Artificial Sequence
  Oligonucleotide for detection of SNP TSC0040472
gagttaagttaaa

SEQ ID NO: 160726 - DNA, 13 bp, Artificial Sequence
  Oligonucleotide for detection of SNP TSC0040472
tttaacttaactc

SEQ ID NO: 160727 - DNA, 13 bp, Artificial Sequence
  Oligonucleotide for detection of SNP TSC0040472
gagttaggttaaa

SEQ ID NO: 160728 - DNA, 13 bp, Artificial Sequence
  Oligonucleotide for detection of SNP TSC0040472
tttaacctaactc

SEQ ID NO: 160729 - DNA, 13 bp, Artificial Sequence
  Oligonucleotide for detection of SNP TSC0040477
aaaataggtgtty

SEQ ID NO: 160730 - DNA, 13 bp, Artificial Sequence
  Oligonucleotide for detection of SNP TSC0040477
raacacctatttt

SEQ ID NO: 160731 - DNA, 13 bp, Artificial Sequence
  Oligonucleotide for detection of SNP TSC0040477
aaaataagtgtty

SEQ ID NO: 160732 - DNA, 13 bp, Artificial Sequence
  Oligonucleotide for detection of SNP TSC0040477
raacacttatttt

SEQ ID NO: 160733 - DNA, 13 bp, Artificial Sequence
  Oligonucleotide for detection of SNP TSC0040479
ggatttagggtag

SEQ ID NO: 160734 - DNA, 13 bp, Artificial Sequence
  Oligonucleotide for detection of SNP TSC0040479
ctaccctaaatcc

SEQ ID NO: 160735 - DNA, 13 bp, Artificial Sequence
  Oligonucleotide for detection of SNP TSC0040479
ggatttggggtag

SEQ ID NO: 160736 - DNA, 13 bp, Artificial Sequence
  Oligonucleotide for detection of SNP TSC0040479
ctaccccaaatcc

SEQ ID NO: 160737 - DNA, 13 bp, Artificial Sequence
  Oligonucleotide for detection of SNP TSC0040480
atttaaattgtag

SEQ ID NO: 160738 - DNA, 13 bp, Artificial Sequence
  Oligonucleotide for detection of SNP TSC0040480
ctacaatttaaat

SEQ ID NO: 160739 - DNA, 13 bp, Artificial Sequence
  Oligonucleotide for detection of SNP TSC0040480
atttaatttgtag

SEQ ID NO: 160740 - DNA, 13 bp, Artificial Sequence
  Oligonucleotide for detection of SNP TSC0040480
ctacaaattaaat

SEQ ID NO: 160741 - DNA, 13 bp, Artificial Sequence
  Oligonucleotide for detection of SNP TSC0040480
ttataatttaagt

SEQ ID NO: 160742 - DNA, 13 bp, Artificial Sequence
  Oligonucleotide for detection of SNP TSC0040480
acttaaattataa

SEQ ID NO: 160743 - DNA, 13 bp, Artificial Sequence
  Oligonucleotide for detection of SNP TSC0040480
ttataaattaagt

SEQ ID NO: 160744 - DNA, 13 bp, Artificial Sequence
  Oligonucleotide for detection of SNP TSC0040480
acttaatttataa

SEQ ID NO: 160745 - DNA, 13 bp, Artificial Sequence
  Oligonucleotide for detection of SNP TSC0040483
ataaaatgttaaa

SEQ ID NO: 160746 - DNA, 13 bp, Artificial Sequence
  Oligonucleotide for detection of SNP TSC0040483
tttaacattttat

SEQ ID NO: 160747 - DNA, 13 bp, Artificial Sequence
  Oligonucleotide for detection of SNP TSC0040483
ataaaacgttaaa

SEQ ID NO: 160748 - DNA, 13 bp, Artificial Sequence
  Oligonucleotide for detection of SNP TSC0040483
tttaacgttttat

SEQ ID NO: 160749 - DNA, 13 bp, Artificial Sequence
  Oligonucleotide for detection of SNP TSC0040483
tttagtgttttgt

SEQ ID NO: 160750 - DNA, 13 bp, Artificial Sequence
  Oligonucleotide for detection of SNP TSC0040483
acaaaacactaaa

SEQ ID NO: 160751 - DNA, 13 bp, Artificial Sequence
  Oligonucleotide for detection of SNP TSC0040483
tttagtattttgt

SEQ ID NO: 160752 - DNA, 13 bp, Artificial Sequence
  Oligonucleotide for detection of SNP TSC0040483
acaaaatactaaa

SEQ ID NO: 160753 - DNA, 13 bp, Artificial Sequence
  Oligonucleotide for detection of SNP TSC0040483
tttagcgttttgt

SEQ ID NO: 160754 - DNA, 13 bp, Artificial Sequence
  Oligonucleotide for detection of SNP TSC0040483
acaaaacgctaaa

SEQ ID NO: 160755 - DNA, 13 bp, Artificial Sequence
  Oligonucleotide for detection of SNP TSC0040486
ggtttgttttggg

SEQ ID NO: 160756 - DNA, 13 bp, Artificial Sequence
  Oligonucleotide for detection of SNP TSC0040486
cccaaaacaaacc

SEQ ID NO: 160757 - DNA, 13 bp, Artificial Sequence
  Oligonucleotide for detection of SNP TSC0040486
ggtttggtttggg

SEQ ID NO: 160758 - DNA, 13 bp, Artificial Sequence
  Oligonucleotide for detection of SNP TSC0040486
cccaaaccaaacc

SEQ ID NO: 160759 - DNA, 13 bp, Artificial Sequence
  Oligonucleotide for detection of SNP TSC0040486
ggttcgttttggg

SEQ ID NO: 160760 - DNA, 13 bp, Artificial Sequence
  Oligonucleotide for detection of SNP TSC0040486
cccaaaacgaacc

SEQ ID NO: 160761 - DNA, 13 bp, Artificial Sequence
  Oligonucleotide for detection of SNP TSC0040486
ggttcggtttggg

SEQ ID NO: 160762 - DNA, 13 bp, Artificial Sequence
  Oligonucleotide for detection of SNP TSC0040486
cccaaaccgaacc

SEQ ID NO: 160763 - DNA, 13 bp, Artificial Sequence
  Oligonucleotide for detection of SNP TSC0040486
tttaggatgggty

SEQ ID NO: 160764 - DNA, 13 bp, Artificial Sequence
  Oligonucleotide for detection of SNP TSC0040486
racccatcctaaa

SEQ ID NO: 160765 - DNA, 13 bp, Artificial Sequence
  Oligonucleotide for detection of SNP TSC0040486
tttaggttgggty

SEQ ID NO: 160766 - DNA, 13 bp, Artificial Sequence
  Oligonucleotide for detection of SNP TSC0040486
racccaacctaaa

SEQ ID NO: 160767 - DNA, 13 bp, Artificial Sequence
  Oligonucleotide for detection of SNP TSC0040486
tttaggacgggty

SEQ ID NO: 160768 - DNA, 13 bp, Artificial Sequence
  Oligonucleotide for detection of SNP TSC0040486
racccgtcctaaa

SEQ ID NO: 160769 - DNA, 13 bp, Artificial Sequence
  Oligonucleotide for detection of SNP TSC0040486
tttaggtcgggty

SEQ ID NO: 160770 - DNA, 13 bp, Artificial Sequence
  Oligonucleotide for detection of SNP TSC0040486
racccgacctaaa

SEQ ID NO: 160771 - DNA, 13 bp, Artificial Sequence
  Oligonucleotide for detection of SNP TSC0040487
ggcgtaattttgg

SEQ ID NO: 160772 - DNA, 13 bp, Artificial Sequence
  Oligonucleotide for detection of SNP TSC0040487
ccaaaattacgcc

SEQ ID NO: 160773 - DNA, 13 bp, Artificial Sequence
  Oligonucleotide for detection of SNP TSC0040487
ggcgtagttttgg

SEQ ID NO: 160774 - DNA, 13 bp, Artificial Sequence
  Oligonucleotide for detection of SNP TSC0040487
ccaaaactacgcc

SEQ ID NO: 160775 - DNA, 13 bp, Artificial Sequence
  Oligonucleotide for detection of SNP TSC0040488
agtatgtgttaty

SEQ ID NO: 160776 - DNA, 13 bp, Artificial Sequence
  Oligonucleotide for detection of SNP TSC0040488
rataacacatact

SEQ ID NO: 160777 - DNA, 13 bp, Artificial Sequence
  Oligonucleotide for detection of SNP TSC0040488
agtatgcgttaty

SEQ ID NO: 160778 - DNA, 13 bp, Artificial Sequence
  Oligonucleotide for detection of SNP TSC0040488
rataacgcatact

SEQ ID NO: 160779 - DNA, 13 bp, Artificial Sequence
  Oligonucleotide for detection of SNP TSC0040488
ggtggtgtatgtt

SEQ ID NO: 160780 - DNA, 13 bp, Artificial Sequence
  Oligonucleotide for detection of SNP TSC0040488
aacatacaccacc

SEQ ID NO: 160781 - DNA, 13 bp, Artificial Sequence
  Oligonucleotide for detection of SNP TSC0040488
ggtggtatatgtt

SEQ ID NO: 160782 - DNA, 13 bp, Artificial Sequence
  Oligonucleotide for detection of SNP TSC0040488
aacatataccacc

SEQ ID NO: 160783 - DNA, 13 bp, Artificial Sequence
  Oligonucleotide for detection of SNP TSC0040488
ggtggcgtatgtt

SEQ ID NO: 160784 - DNA, 13 bp, Artificial Sequence
  Oligonucleotide for detection of SNP TSC0040488
aacatacgccacc

SEQ ID NO: 160785 - DNA, 13 bp, Artificial Sequence
  Oligonucleotide for detection of SNP TSC0040490
atatgttgtttat

SEQ ID NO: 160786 - DNA, 13 bp, Artificial Sequence
  Oligonucleotide for detection of SNP TSC0040490
ataaacaacatat

SEQ ID NO: 160787 - DNA, 13 bp, Artificial Sequence
  Oligonucleotide for detection of SNP TSC0040490
atatgtcgtttat

SEQ ID NO: 160788 - DNA, 13 bp, Artificial Sequence
  Oligonucleotide for detection of SNP TSC0040490
ataaacgacatat

SEQ ID NO: 160789 - DNA, 13 bp, Artificial Sequence
  Oligonucleotide for detection of SNP TSC0040490
atggatggtatgt

SEQ ID NO: 160790 - DNA, 13 bp, Artificial Sequence
  Oligonucleotide for detection of SNP TSC0040490
acataccatccat

SEQ ID NO: 160791 - DNA, 13 bp, Artificial Sequence
  Oligonucleotide for detection of SNP TSC0040490
atggatagtatgt

SEQ ID NO: 160792 - DNA, 13 bp, Artificial Sequence
  Oligonucleotide for detection of SNP TSC0040490
acatactatccat

SEQ ID NO: 160793 - DNA, 13 bp, Artificial Sequence
  Oligonucleotide for detection of SNP TSC0040490
atggacggtatgt

SEQ ID NO: 160794 - DNA, 13 bp, Artificial Sequence
  Oligonucleotide for detection of SNP TSC0040490
acataccgtccat

SEQ ID NO: 160795 - DNA, 13 bp, Artificial Sequence
  Oligonucleotide for detection of SNP TSC0040492
ggaaattgatttt

SEQ ID NO: 160796 - DNA, 13 bp, Artificial Sequence
  Oligonucleotide for detection of SNP TSC0040492
aaaatcaatttcc

SEQ ID NO: 160797 - DNA, 13 bp, Artificial Sequence
  Oligonucleotide for detection of SNP TSC0040492
ggaaatggatttt

SEQ ID NO: 160798 - DNA, 13 bp, Artificial Sequence
  Oligonucleotide for detection of SNP TSC0040492
aaaatccatttcc

SEQ ID NO: 160799 - DNA, 13 bp, Artificial Sequence
  Oligonucleotide for detection of SNP TSC0040492
aaaattaatttty

SEQ ID NO: 160800 - DNA, 13 bp, Artificial Sequence
  Oligonucleotide for detection of SNP TSC0040492
raaaattaatttt

SEQ ID NO: 160801 - DNA, 13 bp, Artificial Sequence
  Oligonucleotide for detection of SNP TSC0040492
aaaatttatttty

SEQ ID NO: 160802 - DNA, 13 bp, Artificial Sequence
  Oligonucleotide for detection of SNP TSC0040492
raaaataaatttt

SEQ ID NO: 160803 - DNA, 13 bp, Artificial Sequence
  Oligonucleotide for detection of SNP TSC0040493
agtagaggaaata

SEQ ID NO: 160804 - DNA, 13 bp, Artificial Sequence
  Oligonucleotide for detection of SNP TSC0040493
tatttcctctact

SEQ ID NO: 160805 - DNA, 13 bp, Artificial Sequence
  Oligonucleotide for detection of SNP TSC0040493
agtagaagaaata

SEQ ID NO: 160806 - DNA, 13 bp, Artificial Sequence
  Oligonucleotide for detection of SNP TSC0040493
tatttcttctact

SEQ ID NO: 160807 - DNA, 13 bp, Artificial Sequence
  Oligonucleotide for detection of SNP TSC0040494
gtaaaagtatgtg

SEQ ID NO: 160808 - DNA, 13 bp, Artificial Sequence
  Oligonucleotide for detection of SNP TSC0040494
cacatacttttac

SEQ ID NO: 160809 - DNA, 13 bp, Artificial Sequence
  Oligonucleotide for detection of SNP TSC0040494
gtaaaaatatgtg

SEQ ID NO: 160810 - DNA, 13 bp, Artificial Sequence
  Oligonucleotide for detection of SNP TSC0040494
cacatatttttac

SEQ ID NO: 160811 - DNA, 13 bp, Artificial Sequence
  Oligonucleotide for detection of SNP TSC0040495
tatagatagaata

SEQ ID NO: 160812 - DNA, 13 bp, Artificial Sequence
  Oligonucleotide for detection of SNP TSC0040495
tattctatctata

SEQ ID NO: 160813 - DNA, 13 bp, Artificial Sequence
  Oligonucleotide for detection of SNP TSC0040495
tatagagagaata

SEQ ID NO: 160814 - DNA, 13 bp, Artificial Sequence
  Oligonucleotide for detection of SNP TSC0040495
tattctctctata

SEQ ID NO: 160815 - DNA, 13 bp, Artificial Sequence
  Oligonucleotide for detection of SNP TSC0040496
agtagtaatttaa

SEQ ID NO: 160816 - DNA, 13 bp, Artificial Sequence
  Oligonucleotide for detection of SNP TSC0040496
ttaaattactact

SEQ ID NO: 160817 - DNA, 13 bp, Artificial Sequence
  Oligonucleotide for detection of SNP TSC0040496
agtagtgatttaa

SEQ ID NO: 160818 - DNA, 13 bp, Artificial Sequence
  Oligonucleotide for detection of SNP TSC0040496
ttaaatcactact

SEQ ID NO: 160819 - DNA, 13 bp, Artificial Sequence
  Oligonucleotide for detection of SNP TSC0040496
agtagcgatttaa

SEQ ID NO: 160820 - DNA, 13 bp, Artificial Sequence
  Oligonucleotide for detection of SNP TSC0040496
ttaaatcgctact

SEQ ID NO: 160821 - DNA, 13 bp, Artificial Sequence
  Oligonucleotide for detection of SNP TSC0040496
ttaagttgttatt

SEQ ID NO: 160822 - DNA, 13 bp, Artificial Sequence
  Oligonucleotide for detection of SNP TSC0040496
aataacaacttaa

SEQ ID NO: 160823 - DNA, 13 bp, Artificial Sequence
  Oligonucleotide for detection of SNP TSC0040496
ttaagtcgttatt

SEQ ID NO: 160824 - DNA, 13 bp, Artificial Sequence
  Oligonucleotide for detection of SNP TSC0040496
aataacgacttaa

SEQ ID NO: 160825 - DNA, 13 bp, Artificial Sequence
  Oligonucleotide for detection of SNP TSC0040497
ttatgtagattat

SEQ ID NO: 160826 - DNA, 13 bp, Artificial Sequence
  Oligonucleotide for detection of SNP TSC0040497
ataatctacataa

SEQ ID NO: 160827 - DNA, 13 bp, Artificial Sequence
  Oligonucleotide for detection of SNP TSC0040497
ttatgttgattat

SEQ ID NO: 160828 - DNA, 13 bp, Artificial Sequence
  Oligonucleotide for detection of SNP TSC0040497
ataatcaacataa

SEQ ID NO: 160829 - DNA, 13 bp, Artificial Sequence
  Oligonucleotide for detection of SNP TSC0040497
atgatttgtatga

SEQ ID NO: 160830 - DNA, 13 bp, Artificial Sequence
  Oligonucleotide for detection of SNP TSC0040497
tcatacaaatcat

SEQ ID NO: 160831 - DNA, 13 bp, Artificial Sequence
  Oligonucleotide for detection of SNP TSC0040497
atgattagtatga

SEQ ID NO: 160832 - DNA, 13 bp, Artificial Sequence
  Oligonucleotide for detection of SNP TSC0040497
tcatactaatcat

SEQ ID NO: 160833 - DNA, 13 bp, Artificial Sequence
  Oligonucleotide for detection of SNP TSC0040498
ttataatgaagay

SEQ ID NO: 160834 - DNA, 13 bp, Artificial Sequence
  Oligonucleotide for detection of SNP TSC0040498
rtcttcattataa

SEQ ID NO: 160835 - DNA, 13 bp, Artificial Sequence
  Oligonucleotide for detection of SNP TSC0040498
ttataacgaagay

SEQ ID NO: 160836 - DNA, 13 bp, Artificial Sequence
  Oligonucleotide for detection of SNP TSC0040498
rtcttcgttataa

SEQ ID NO: 160837 - DNA, 13 bp, Artificial Sequence
  Oligonucleotide for detection of SNP TSC0040498
gtttttgttgtgg

SEQ ID NO: 160838 - DNA, 13 bp, Artificial Sequence
  Oligonucleotide for detection of SNP TSC0040498
ccacaacaaaaac

SEQ ID NO: 160839 - DNA, 13 bp, Artificial Sequence
  Oligonucleotide for detection of SNP TSC0040498
gtttttattgtgg

SEQ ID NO: 160840 - DNA, 13 bp, Artificial Sequence
  Oligonucleotide for detection of SNP TSC0040498
ccacaataaaaac

SEQ ID NO: 160841 - DNA, 13 bp, Artificial Sequence
  Oligonucleotide for detection of SNP TSC0040498
gttttcgttgtgg

SEQ ID NO: 160842 - DNA, 13 bp, Artificial Sequence
  Oligonucleotide for detection of SNP TSC0040498
ccacaacgaaaac

SEQ ID NO: 160843 - DNA, 13 bp, Artificial Sequence
  Oligonucleotide for detection of SNP TSC0040502
tatggggattttt

SEQ ID NO: 160844 - DNA, 13 bp, Artificial Sequence
  Oligonucleotide for detection of SNP TSC0040502
aaaaatccccata

SEQ ID NO: 160845 - DNA, 13 bp, Artificial Sequence
  Oligonucleotide for detection of SNP TSC0040502
tatgggaattttt

SEQ ID NO: 160846 - DNA, 13 bp, Artificial Sequence
  Oligonucleotide for detection of SNP TSC0040502
aaaaattcccata

SEQ ID NO: 160847 - DNA, 13 bp, Artificial Sequence
  Oligonucleotide for detection of SNP TSC0040503
aagaagagaattg

SEQ ID NO: 160848 - DNA, 13 bp, Artificial Sequence
  Oligonucleotide for detection of SNP TSC0040503
caattctcttctt

SEQ ID NO: 160849 - DNA, 13 bp, Artificial Sequence
  Oligonucleotide for detection of SNP TSC0040503
aagaagggaattg

SEQ ID NO: 160850 - DNA, 13 bp, Artificial Sequence
  Oligonucleotide for detection of SNP TSC0040503
caattcccttctt

SEQ ID NO: 160851 - DNA, 13 bp, Artificial Sequence
  Oligonucleotide for detection of SNP TSC0040505
gttagtgtagaay

SEQ ID NO: 160852 - DNA, 13 bp, Artificial Sequence
  Oligonucleotide for detection of SNP TSC0040505
rttctacactaac

SEQ ID NO: 160853 - DNA, 13 bp, Artificial Sequence
  Oligonucleotide for detection of SNP TSC0040505
gttagtatagaay

SEQ ID NO: 160854 - DNA, 13 bp, Artificial Sequence
  Oligonucleotide for detection of SNP TSC0040505
rttctatactaac

SEQ ID NO: 160855 - DNA, 13 bp, Artificial Sequence
  Oligonucleotide for detection of SNP TSC0040505
gttagcgtagaay

SEQ ID NO: 160856 - DNA, 13 bp, Artificial Sequence
  Oligonucleotide for detection of SNP TSC0040505
rttctacgctaac

SEQ ID NO: 160857 - DNA, 13 bp, Artificial Sequence
  Oligonucleotide for detection of SNP TSC0040506
tagtgtatgaagt

SEQ ID NO: 160858 - DNA, 13 bp, Artificial Sequence
  Oligonucleotide for detection of SNP TSC0040506
acttcatacacta

SEQ ID NO: 160859 - DNA, 13 bp, Artificial Sequence
  Oligonucleotide for detection of SNP TSC0040506
tagtgtttgaagt

SEQ ID NO: 160860 - DNA, 13 bp, Artificial Sequence
  Oligonucleotide for detection of SNP TSC0040506
acttcaaacacta

SEQ ID NO: 160861 - DNA, 13 bp, Artificial Sequence
  Oligonucleotide for detection of SNP TSC0040506
attttatatatta

SEQ ID NO: 160862 - DNA, 13 bp, Artificial Sequence
  Oligonucleotide for detection of SNP TSC0040506
taatatataaaat

SEQ ID NO: 160863 - DNA, 13 bp, Artificial Sequence
  Oligonucleotide for detection of SNP TSC0040506
attttagatatta

SEQ ID NO: 160864 - DNA, 13 bp, Artificial Sequence
  Oligonucleotide for detection of SNP TSC0040506
taatatctaaaat

SEQ ID NO: 160865 - DNA, 13 bp, Artificial Sequence
  Oligonucleotide for detection of SNP TSC0040509
agataaggaaatt

SEQ ID NO: 160866 - DNA, 13 bp, Artificial Sequence
  Oligonucleotide for detection of SNP TSC0040509
aatttccttatct

SEQ ID NO: 160867 - DNA, 13 bp, Artificial Sequence
  Oligonucleotide for detection of SNP TSC0040509
agataaagaaatt

SEQ ID NO: 160868 - DNA, 13 bp, Artificial Sequence
  Oligonucleotide for detection of SNP TSC0040509
aatttctttatct

SEQ ID NO: 160869 - DNA, 13 bp, Artificial Sequence
  Oligonucleotide for detection of SNP TSC0040513
taaagtatgttgg

SEQ ID NO: 160870 - DNA, 13 bp, Artificial Sequence
  Oligonucleotide for detection of SNP TSC0040513
ccaacatacttta

SEQ ID NO: 160871 - DNA, 13 bp, Artificial Sequence
  Oligonucleotide for detection of SNP TSC0040513
taaagtgtgttgg

SEQ ID NO: 160872 - DNA, 13 bp, Artificial Sequence
  Oligonucleotide for detection of SNP TSC0040513
ccaacacacttta

SEQ ID NO: 160873 - DNA, 13 bp, Artificial Sequence
  Oligonucleotide for detection of SNP TSC0040513
taaagcgtgttgg

SEQ ID NO: 160874 - DNA, 13 bp, Artificial Sequence
  Oligonucleotide for detection of SNP TSC0040513
ccaacacgcttta

SEQ ID NO: 160875 - DNA, 13 bp, Artificial Sequence
  Oligonucleotide for detection of SNP TSC0040513
ttagtatgttttg

SEQ ID NO: 160876 - DNA, 13 bp, Artificial Sequence
  Oligonucleotide for detection of SNP TSC0040513
caaaacatactaa

SEQ ID NO: 160877 - DNA, 13 bp, Artificial Sequence
  Oligonucleotide for detection of SNP TSC0040513
ttagtacgttttg

SEQ ID NO: 160878 - DNA, 13 bp, Artificial Sequence
  Oligonucleotide for detection of SNP TSC0040513
caaaacgtactaa

SEQ ID NO: 160879 - DNA, 13 bp, Artificial Sequence
  Oligonucleotide for detection of SNP TSC0040514
tagaatggaatty

SEQ ID NO: 160880 - DNA, 13 bp, Artificial Sequence
  Oligonucleotide for detection of SNP TSC0040514
raattccattcta

SEQ ID NO: 160881 - DNA, 13 bp, Artificial Sequence
  Oligonucleotide for detection of SNP TSC0040514
tagaatagaatty

SEQ ID NO: 160882 - DNA, 13 bp, Artificial Sequence
  Oligonucleotide for detection of SNP TSC0040514
raattctattcta

SEQ ID NO: 160883 - DNA, 13 bp, Artificial Sequence
  Oligonucleotide for detection of SNP TSC0040515
agttttatatttt

SEQ ID NO: 160884 - DNA, 13 bp, Artificial Sequence
  Oligonucleotide for detection of SNP TSC0040515
aaaatataaaact

SEQ ID NO: 160885 - DNA, 13 bp, Artificial Sequence
  Oligonucleotide for detection of SNP TSC0040515
agttttgtatttt

SEQ ID NO: 160886 - DNA, 13 bp, Artificial Sequence
  Oligonucleotide for detection of SNP TSC0040515
aaaatacaaaact

SEQ ID NO: 160887 - DNA, 13 bp, Artificial Sequence
  Oligonucleotide for detection of SNP TSC0040517
atgagggtagagy

SEQ ID NO: 160888 - DNA, 13 bp, Artificial Sequence
  Oligonucleotide for detection of SNP TSC0040517
rctctaccctcat

SEQ ID NO: 160889 - DNA, 13 bp, Artificial Sequence
  Oligonucleotide for detection of SNP TSC0040517
atgaggatagagy

SEQ ID NO: 160890 - DNA, 13 bp, Artificial Sequence
  Oligonucleotide for detection of SNP TSC0040517
rctctatcctcat

SEQ ID NO: 160891 - DNA, 13 bp, Artificial Sequence
  Oligonucleotide for detection of SNP TSC0040519
aaagtaagagttg

SEQ ID NO: 160892 - DNA, 13 bp, Artificial Sequence
  Oligonucleotide for detection of SNP TSC0040519
caactcttacttt

SEQ ID NO: 160893 - DNA, 13 bp, Artificial Sequence
  Oligonucleotide for detection of SNP TSC0040519
aaagtaggagttg

SEQ ID NO: 160894 - DNA, 13 bp, Artificial Sequence
  Oligonucleotide for detection of SNP TSC0040519
caactcctacttt

SEQ ID NO: 160895 - DNA, 13 bp, Artificial Sequence
  Oligonucleotide for detection of SNP TSC0040520
ttgttagtaatta

SEQ ID NO: 160896 - DNA, 13 bp, Artificial Sequence
  Oligonucleotide for detection of SNP TSC0040520
taattactaacaa

SEQ ID NO: 160897 - DNA, 13 bp, Artificial Sequence
  Oligonucleotide for detection of SNP TSC0040520
ttgttaataatta

SEQ ID NO: 160898 - DNA, 13 bp, Artificial Sequence
  Oligonucleotide for detection of SNP TSC0040520
taattattaacaa

SEQ ID NO: 160899 - DNA, 13 bp, Artificial Sequence
  Oligonucleotide for detection of SNP TSC0040521
gagagtggtagaa

SEQ ID NO: 160900 - DNA, 13 bp, Artificial Sequence
  Oligonucleotide for detection of SNP TSC0040521
ttctaccactctc

SEQ ID NO: 160901 - DNA, 13 bp, Artificial Sequence
  Oligonucleotide for detection of SNP TSC0040521
gagagtagtagaa

SEQ ID NO: 160902 - DNA, 13 bp, Artificial Sequence
  Oligonucleotide for detection of SNP TSC0040521
ttctactactctc

SEQ ID NO: 160903 - DNA, 13 bp, Artificial Sequence
  Oligonucleotide for detection of SNP TSC0040521
gagagcggtagaa

SEQ ID NO: 160904 - DNA, 13 bp, Artificial Sequence
  Oligonucleotide for detection of SNP TSC0040521
ttctaccgctctc

SEQ ID NO: 160905 - DNA, 13 bp, Artificial Sequence
  Oligonucleotide for detection of SNP TSC0040522
agattgatatgag

SEQ ID NO: 160906 - DNA, 13 bp, Artificial Sequence
  Oligonucleotide for detection of SNP TSC0040522
ctcatatcaatct

SEQ ID NO: 160907 - DNA, 13 bp, Artificial Sequence
  Oligonucleotide for detection of SNP TSC0040522
agattggtatgag

SEQ ID NO: 160908 - DNA, 13 bp, Artificial Sequence
  Oligonucleotide for detection of SNP TSC0040522
ctcataccaatct

SEQ ID NO: 160909 - DNA, 13 bp, Artificial Sequence
  Oligonucleotide for detection of SNP TSC0040523
tgtgttgtgtatt

SEQ ID NO: 160910 - DNA, 13 bp, Artificial Sequence
  Oligonucleotide for detection of SNP TSC0040523
aatacacaacaca

SEQ ID NO: 160911 - DNA, 13 bp, Artificial Sequence
  Oligonucleotide for detection of SNP TSC0040523
tgtgttatgtatt

SEQ ID NO: 160912 - DNA, 13 bp, Artificial Sequence
  Oligonucleotide for detection of SNP TSC0040523
aatacataacaca

SEQ ID NO: 160913 - DNA, 13 bp, Artificial Sequence
  Oligonucleotide for detection of SNP TSC0040524
tgtatggtttagg

SEQ ID NO: 160914 - DNA, 13 bp, Artificial Sequence
  Oligonucleotide for detection of SNP TSC0040524
cctaaaccataca

SEQ ID NO: 160915 - DNA, 13 bp, Artificial Sequence
  Oligonucleotide for detection of SNP TSC0040524
tgtatgatttagg

SEQ ID NO: 160916 - DNA, 13 bp, Artificial Sequence
  Oligonucleotide for detection of SNP TSC0040524
cctaaatcataca

SEQ ID NO: 160917 - DNA, 13 bp, Artificial Sequence
  Oligonucleotide for detection of SNP TSC0040525
ttaggttgtatat

SEQ ID NO: 160918 - DNA, 13 bp, Artificial Sequence
  Oligonucleotide for detection of SNP TSC0040525
atatacaacctaa

SEQ ID NO: 160919 - DNA, 13 bp, Artificial Sequence
  Oligonucleotide for detection of SNP TSC0040525
ttaggtcgtatat

SEQ ID NO: 160920 - DNA, 13 bp, Artificial Sequence
  Oligonucleotide for detection of SNP TSC0040525
atatacgacctaa

SEQ ID NO: 160921 - DNA, 13 bp, Artificial Sequence
  Oligonucleotide for detection of SNP TSC0040525
atatgtggtttga

SEQ ID NO: 160922 - DNA, 13 bp, Artificial Sequence
  Oligonucleotide for detection of SNP TSC0040525
tcaaaccacatat

SEQ ID NO: 160923 - DNA, 13 bp, Artificial Sequence
  Oligonucleotide for detection of SNP TSC0040525
atatgtagtttga

SEQ ID NO: 160924 - DNA, 13 bp, Artificial Sequence
  Oligonucleotide for detection of SNP TSC0040525
tcaaactacatat

SEQ ID NO: 160925 - DNA, 13 bp, Artificial Sequence
  Oligonucleotide for detection of SNP TSC0040525
atatgcggtttga

SEQ ID NO: 160926 - DNA, 13 bp, Artificial Sequence
  Oligonucleotide for detection of SNP TSC0040525
tcaaaccgcatat

SEQ ID NO: 160927 - DNA, 13 bp, Artificial Sequence
  Oligonucleotide for detection of SNP TSC0040527
tgtgtatgtttay

SEQ ID NO: 160928 - DNA, 13 bp, Artificial Sequence
  Oligonucleotide for detection of SNP TSC0040527
rtaaacatacaca

SEQ ID NO: 160929 - DNA, 13 bp, Artificial Sequence
  Oligonucleotide for detection of SNP TSC0040527
tgtgtacgtttay

SEQ ID NO: 160930 - DNA, 13 bp, Artificial Sequence
  Oligonucleotide for detection of SNP TSC0040527
rtaaacgtacaca

SEQ ID NO: 160931 - DNA, 13 bp, Artificial Sequence
  Oligonucleotide for detection of SNP TSC0040527
gtgagtgtgtata

SEQ ID NO: 160932 - DNA, 13 bp, Artificial Sequence
  Oligonucleotide for detection of SNP TSC0040527
tatacacactcac

SEQ ID NO: 160933 - DNA, 13 bp, Artificial Sequence
  Oligonucleotide for detection of SNP TSC0040527
gtgagtatgtata

SEQ ID NO: 160934 - DNA, 13 bp, Artificial Sequence
  Oligonucleotide for detection of SNP TSC0040527
tatacatactcac

SEQ ID NO: 160935 - DNA, 13 bp, Artificial Sequence
  Oligonucleotide for detection of SNP TSC0040527
gtgagcgtgtata

SEQ ID NO: 160936 - DNA, 13 bp, Artificial Sequence
  Oligonucleotide for detection of SNP TSC0040527
tatacacgctcac

SEQ ID NO: 160937 - DNA, 13 bp, Artificial Sequence
  Oligonucleotide for detection of SNP TSC0040528
aaagattttatay

SEQ ID NO: 160938 - DNA, 13 bp, Artificial Sequence
  Oligonucleotide for detection of SNP TSC0040528
rtataaaatcttt

SEQ ID NO: 160939 - DNA, 13 bp, Artificial Sequence
  Oligonucleotide for detection of SNP TSC0040528
aaagatgttatay

SEQ ID NO: 160940 - DNA, 13 bp, Artificial Sequence
  Oligonucleotide for detection of SNP TSC0040528
rtataacatcttt

SEQ ID NO: 160941 - DNA, 13 bp, Artificial Sequence
  Oligonucleotide for detection of SNP TSC0040528
gtataggattttt

SEQ ID NO: 160942 - DNA, 13 bp, Artificial Sequence
  Oligonucleotide for detection of SNP TSC0040528
aaaaatcctatac

SEQ ID NO: 160943 - DNA, 13 bp, Artificial Sequence
  Oligonucleotide for detection of SNP TSC0040528
gtatagtattttt

SEQ ID NO: 160944 - DNA, 13 bp, Artificial Sequence
  Oligonucleotide for detection of SNP TSC0040528
aaaaatactatac

SEQ ID NO: 160945 - DNA, 13 bp, Artificial Sequence
  Oligonucleotide for detection of SNP TSC0040530
tatttaagtttat

SEQ ID NO: 160946 - DNA, 13 bp, Artificial Sequence
  Oligonucleotide for detection of SNP TSC0040530
ataaacttaaata

SEQ ID NO: 160947 - DNA, 13 bp, Artificial Sequence
  Oligonucleotide for detection of SNP TSC0040530
tatttatgtttat

SEQ ID NO: 160948 - DNA, 13 bp, Artificial Sequence
  Oligonucleotide for detection of SNP TSC0040530
ataaacataaata

SEQ ID NO: 160949 - DNA, 13 bp, Artificial Sequence
  Oligonucleotide for detection of SNP TSC0040530
tatttacgtttat

SEQ ID NO: 160950 - DNA, 13 bp, Artificial Sequence
  Oligonucleotide for detection of SNP TSC0040530
ataaacgtaaata

SEQ ID NO: 160951 - DNA, 13 bp, Artificial Sequence
  Oligonucleotide for detection of SNP TSC0040530
ataaatttaagtg

SEQ ID NO: 160952 - DNA, 13 bp, Artificial Sequence
  Oligonucleotide for detection of SNP TSC0040530
cacttaaatttat

SEQ ID NO: 160953 - DNA, 13 bp, Artificial Sequence
  Oligonucleotide for detection of SNP TSC0040530
ataaatgtaagtg

SEQ ID NO: 160954 - DNA, 13 bp, Artificial Sequence
  Oligonucleotide for detection of SNP TSC0040530
cacttacatttat

SEQ ID NO: 160955 - DNA, 13 bp, Artificial Sequence
  Oligonucleotide for detection of SNP TSC0040530
ataaacgtaagtg

SEQ ID NO: 160956 - DNA, 13 bp, Artificial Sequence
  Oligonucleotide for detection of SNP TSC0040530
cacttacgtttat

SEQ ID NO: 160957 - DNA, 13 bp, Artificial Sequence
  Oligonucleotide for detection of SNP TSC0040531
aattagaggggaa

SEQ ID NO: 160958 - DNA, 13 bp, Artificial Sequence
  Oligonucleotide for detection of SNP TSC0040531
ttcccctctaatt

SEQ ID NO: 160959 - DNA, 13 bp, Artificial Sequence
  Oligonucleotide for detection of SNP TSC0040531
aattaggggggaa

SEQ ID NO: 160960 - DNA, 13 bp, Artificial Sequence
  Oligonucleotide for detection of SNP TSC0040531
ttcccccctaatt

SEQ ID NO: 160961 - DNA, 13 bp, Artificial Sequence
  Oligonucleotide for detection of SNP TSC0040532
tgggtttggggag

SEQ ID NO: 160962 - DNA, 13 bp, Artificial Sequence
  Oligonucleotide for detection of SNP TSC0040532
ctccccaaaccca

SEQ ID NO: 160963 - DNA, 13 bp, Artificial Sequence
  Oligonucleotide for detection of SNP TSC0040532
tgggttcggggag

SEQ ID NO: 160964 - DNA, 13 bp, Artificial Sequence
  Oligonucleotide for detection of SNP TSC0040532
ctccccgaaccca

SEQ ID NO: 160965 - DNA, 13 bp, Artificial Sequence
  Oligonucleotide for detection of SNP TSC0005250
gtatattttggty

SEQ ID NO: 160966 - DNA, 13 bp, Artificial Sequence
  Oligonucleotide for detection of SNP TSC0005250
raccaaaatatac

SEQ ID NO: 160967 - DNA, 13 bp, Artificial Sequence
  Oligonucleotide for detection of SNP TSC0005250
gtatatgttggty

SEQ ID NO: 160968 - DNA, 13 bp, Artificial Sequence
  Oligonucleotide for detection of SNP TSC0005250
raccaacatatac

SEQ ID NO: 160969 - DNA, 13 bp, Artificial Sequence
  Oligonucleotide for detection of SNP TSC0005250
gtatacgttggty

SEQ ID NO: 160970 - DNA, 13 bp, Artificial Sequence
  Oligonucleotide for detection of SNP TSC0005250
raccaacgtatac

SEQ ID NO: 160971 - DNA, 13 bp, Artificial Sequence
  Oligonucleotide for detection of SNP TSC0005250
ggttaaggtatgy

SEQ ID NO: 160972 - DNA, 13 bp, Artificial Sequence
  Oligonucleotide for detection of SNP TSC0005250
rcataccttaacc

SEQ ID NO: 160973 - DNA, 13 bp, Artificial Sequence
  Oligonucleotide for detection of SNP TSC0005250
ggttaatgtatgy

SEQ ID NO: 160974 - DNA, 13 bp, Artificial Sequence
  Oligonucleotide for detection of SNP TSC0005250
rcatacattaacc

SEQ ID NO: 160975 - DNA, 13 bp, Artificial Sequence
  Oligonucleotide for detection of SNP TSC0005250
ggttaacgtatgy

SEQ ID NO: 160976 - DNA, 13 bp, Artificial Sequence
  Oligonucleotide for detection of SNP TSC0005250
rcatacgttaacc

SEQ ID NO: 160977 - DNA, 13 bp, Artificial Sequence
  Oligonucleotide for detection of SNP TSC0005251
tagttttttgaag

SEQ ID NO: 160978 - DNA, 13 bp, Artificial Sequence
  Oligonucleotide for detection of SNP TSC0005251
cttcaaaaaacta

SEQ ID NO: 160979 - DNA, 13 bp, Artificial Sequence
  Oligonucleotide for detection of SNP TSC0005251
tagtttgttgaag

SEQ ID NO: 160980 - DNA, 13 bp, Artificial Sequence
  Oligonucleotide for detection of SNP TSC0005251
cttcaacaaacta

SEQ ID NO: 160981 - DNA, 13 bp, Artificial Sequence
  Oligonucleotide for detection of SNP TSC0005251
ttttagaaagttg

SEQ ID NO: 160982 - DNA, 13 bp, Artificial Sequence
  Oligonucleotide for detection of SNP TSC0005251
caactttctaaaa

SEQ ID NO: 160983 - DNA, 13 bp, Artificial Sequence
  Oligonucleotide for detection of SNP TSC0005251
ttttagtaagttg

SEQ ID NO: 160984 - DNA, 13 bp, Artificial Sequence
  Oligonucleotide for detection of SNP TSC0005251
caacttactaaaa

SEQ ID NO: 160985 - DNA, 13 bp, Artificial Sequence
  Oligonucleotide for detection of SNP TSC0040537
ttggagtttttta

SEQ ID NO: 160986 - DNA, 13 bp, Artificial Sequence
  Oligonucleotide for detection of SNP TSC0040537
taaaaaactccaa

SEQ ID NO: 160987 - DNA, 13 bp, Artificial Sequence
  Oligonucleotide for detection of SNP TSC0040537
ttggaggttttta

SEQ ID NO: 160988 - DNA, 13 bp, Artificial Sequence
  Oligonucleotide for detection of SNP TSC0040537
taaaaacctccaa

SEQ ID NO: 160989 - DNA, 13 bp, Artificial Sequence
  Oligonucleotide for detection of SNP TSC0040537
taaagaattttag

SEQ ID NO: 160990 - DNA, 13 bp, Artificial Sequence
  Oligonucleotide for detection of SNP TSC0040537
ctaaaattcttta

SEQ ID NO: 160991 - DNA, 13 bp, Artificial Sequence
  Oligonucleotide for detection of SNP TSC0040537
taaagatttttag

SEQ ID NO: 160992 - DNA, 13 bp, Artificial Sequence
  Oligonucleotide for detection of SNP TSC0040537
ctaaaaatcttta

SEQ ID NO: 160993 - DNA, 13 bp, Artificial Sequence
  Oligonucleotide for detection of SNP TSC0040538
attagatgtagty

SEQ ID NO: 160994 - DNA, 13 bp, Artificial Sequence
  Oligonucleotide for detection of SNP TSC0040538
ractacatctaat

SEQ ID NO: 160995 - DNA, 13 bp, Artificial Sequence
  Oligonucleotide for detection of SNP TSC0040538
attagacgtagty

SEQ ID NO: 160996 - DNA, 13 bp, Artificial Sequence
  Oligonucleotide for detection of SNP TSC0040538
ractacgtctaat

SEQ ID NO: 160997 - DNA, 13 bp, Artificial Sequence
  Oligonucleotide for detection of SNP TSC0040538
ggttgtgtttagt

SEQ ID NO: 160998 - DNA, 13 bp, Artificial Sequence
  Oligonucleotide for detection of SNP TSC0040538
actaaacacaacc

SEQ ID NO: 160999 - DNA, 13 bp, Artificial Sequence
  Oligonucleotide for detection of SNP TSC0040538
ggttgtatttagt

SEQ ID NO: 161000 - DNA, 13 bp, Artificial Sequence
  Oligonucleotide for detection of SNP TSC0040538
actaaatacaacc

SEQ ID NO: 161001 - DNA, 13 bp, Artificial Sequence
  Oligonucleotide for detection of SNP TSC0040538
ggttgcgtttagt

SEQ ID NO: 161002 - DNA, 13 bp, Artificial Sequence
  Oligonucleotide for detection of SNP TSC0040538
actaaacgcaacc

SEQ ID NO: 161003 - DNA, 13 bp, Artificial Sequence
  Oligonucleotide for detection of SNP TSC0040539
attatagtaatat

SEQ ID NO: 161004 - DNA, 13 bp, Artificial Sequence
  Oligonucleotide for detection of SNP TSC0040539
atattactataat

SEQ ID NO: 161005 - DNA, 13 bp, Artificial Sequence
  Oligonucleotide for detection of SNP TSC0040539
attataataatat

SEQ ID NO: 161006 - DNA, 13 bp, Artificial Sequence
  Oligonucleotide for detection of SNP TSC0040539
atattattataat

SEQ ID NO: 161007 - DNA, 13 bp, Artificial Sequence
  Oligonucleotide for detection of SNP TSC0040540
gattatataaata

SEQ ID NO: 161008 - DNA, 13 bp, Artificial Sequence
  Oligonucleotide for detection of SNP TSC0040540
tatttatataatc

SEQ ID NO: 161009 - DNA, 13 bp, Artificial Sequence
  Oligonucleotide for detection of SNP TSC0040540
gattatgtaaata

SEQ ID NO: 161010 - DNA, 13 bp, Artificial Sequence
  Oligonucleotide for detection of SNP TSC0040540
tatttacataatc

SEQ ID NO: 161011 - DNA, 13 bp, Artificial Sequence
  Oligonucleotide for detection of SNP TSC0006086
aagttagttgata

SEQ ID NO: 161012 - DNA, 13 bp, Artificial Sequence
  Oligonucleotide for detection of SNP TSC0006086
tatcaactaactt

SEQ ID NO: 161013 - DNA, 13 bp, Artificial Sequence
  Oligonucleotide for detection of SNP TSC0006086
aagttaattgata

SEQ ID NO: 161014 - DNA, 13 bp, Artificial Sequence
  Oligonucleotide for detection of SNP TSC0006086
tatcaattaactt

SEQ ID NO: 161015 - DNA, 13 bp, Artificial Sequence
  Oligonucleotide for detection of SNP TSC0040544
aaaggtatgtata

SEQ ID NO: 161016 - DNA, 13 bp, Artificial Sequence
  Oligonucleotide for detection of SNP TSC0040544
tatacataccttt

SEQ ID NO: 161017 - DNA, 13 bp, Artificial Sequence
  Oligonucleotide for detection of SNP TSC0040544
aaaggtgtgtata

SEQ ID NO: 161018 - DNA, 13 bp, Artificial Sequence
  Oligonucleotide for detection of SNP TSC0040544
tatacacaccttt

SEQ ID NO: 161019 - DNA, 13 bp, Artificial Sequence
  Oligonucleotide for detection of SNP TSC0040544
aaaggcgtgtata

SEQ ID NO: 161020 - DNA, 13 bp, Artificial Sequence
  Oligonucleotide for detection of SNP TSC0040544
tatacacgccttt

SEQ ID NO: 161021 - DNA, 13 bp, Artificial Sequence
  Oligonucleotide for detection of SNP TSC0040544
tatgtatgttttt

SEQ ID NO: 161022 - DNA, 13 bp, Artificial Sequence
  Oligonucleotide for detection of SNP TSC0040544
aaaaacatacata

SEQ ID NO: 161023 - DNA, 13 bp, Artificial Sequence
  Oligonucleotide for detection of SNP TSC0040544
tatgtacgttttt

SEQ ID NO: 161024 - DNA, 13 bp, Artificial Sequence
  Oligonucleotide for detection of SNP TSC0040544
aaaaacgtacata

SEQ ID NO: 161025 - DNA, 13 bp, Artificial Sequence
  Oligonucleotide for detection of SNP TSC0040545
aaaggataatttg

SEQ ID NO: 161026 - DNA, 13 bp, Artificial Sequence
  Oligonucleotide for detection of SNP TSC0040545
caaattatccttt

SEQ ID NO: 161027 - DNA, 13 bp, Artificial Sequence
  Oligonucleotide for detection of SNP TSC0040545
aaaggaaaatttg

SEQ ID NO: 161028 - DNA, 13 bp, Artificial Sequence
  Oligonucleotide for detection of SNP TSC0040545
caaattttccttt

SEQ ID NO: 161029 - DNA, 13 bp, Artificial Sequence
  Oligonucleotide for detection of SNP TSC0009052
taggtaggagagg

SEQ ID NO: 161030 - DNA, 13 bp, Artificial Sequence
  Oligonucleotide for detection of SNP TSC0009052
cctctcctaccta

SEQ ID NO: 161031 - DNA, 13 bp, Artificial Sequence
  Oligonucleotide for detection of SNP TSC0009052
taggtaagagagg

SEQ ID NO: 161032 - DNA, 13 bp, Artificial Sequence
  Oligonucleotide for detection of SNP TSC0009052
cctctcttaccta

SEQ ID NO: 161033 - DNA, 13 bp, Artificial Sequence
  Oligonucleotide for detection of SNP TSC0040546
agatggagtttga

SEQ ID NO: 161034 - DNA, 13 bp, Artificial Sequence
  Oligonucleotide for detection of SNP TSC0040546
tcaaactccatct

SEQ ID NO: 161035 - DNA, 13 bp, Artificial Sequence
  Oligonucleotide for detection of SNP TSC0040546
agatggggtttga

SEQ ID NO: 161036 - DNA, 13 bp, Artificial Sequence
  Oligonucleotide for detection of SNP TSC0040546
tcaaaccccatct

SEQ ID NO: 161037 - DNA, 13 bp, Artificial Sequence
  Oligonucleotide for detection of SNP TSC0040547
ttaaaagaagagg

SEQ ID NO: 161038 - DNA, 13 bp, Artificial Sequence
  Oligonucleotide for detection of SNP TSC0040547
cctcttcttttaa

SEQ ID NO: 161039 - DNA, 13 bp, Artificial Sequence
  Oligonucleotide for detection of SNP TSC0040547
ttaaaaaaagagg

SEQ ID NO: 161040 - DNA, 13 bp, Artificial Sequence
  Oligonucleotide for detection of SNP TSC0040547
cctctttttttaa

SEQ ID NO: 161041 - DNA, 13 bp, Artificial Sequence
  Oligonucleotide for detection of SNP TSC0040548
atagtaaaaattt

SEQ ID NO: 161042 - DNA, 13 bp, Artificial Sequence
  Oligonucleotide for detection of SNP TSC0040548
aaatttttactat

SEQ ID NO: 161043 - DNA, 13 bp, Artificial Sequence
  Oligonucleotide for detection of SNP TSC0040548
atagtataaattt

SEQ ID NO: 161044 - DNA, 13 bp, Artificial Sequence
  Oligonucleotide for detection of SNP TSC0040548
aaatttatactat

SEQ ID NO: 161045 - DNA, 13 bp, Artificial Sequence
  Oligonucleotide for detection of SNP TSC0040548
aaatttatattgt

SEQ ID NO: 161046 - DNA, 13 bp, Artificial Sequence
  Oligonucleotide for detection of SNP TSC0040548
acaatataaattt

SEQ ID NO: 161047 - DNA, 13 bp, Artificial Sequence
  Oligonucleotide for detection of SNP TSC0040549
agaattttttgag

SEQ ID NO: 161048 - DNA, 13 bp, Artificial Sequence
  Oligonucleotide for detection of SNP TSC0040549
ctcaaaaaattct

SEQ ID NO: 161049 - DNA, 13 bp, Artificial Sequence
  Oligonucleotide for detection of SNP TSC0040549
agaattgtttgag

SEQ ID NO: 161050 - DNA, 13 bp, Artificial Sequence
  Oligonucleotide for detection of SNP TSC0040549
ctcaaacaattct

SEQ ID NO: 161051 - DNA, 13 bp, Artificial Sequence
  Oligonucleotide for detection of SNP TSC0040549
agaatcgtttgag

SEQ ID NO: 161052 - DNA, 13 bp, Artificial Sequence
  Oligonucleotide for detection of SNP TSC0040549
ctcaaacgattct

SEQ ID NO: 161053 - DNA, 13 bp, Artificial Sequence
  Oligonucleotide for detection of SNP TSC0040550
aaagataattggy

SEQ ID NO: 161054 - DNA, 13 bp, Artificial Sequence
  Oligonucleotide for detection of SNP TSC0040550
rccaattatcttt

SEQ ID NO: 161055 - DNA, 13 bp, Artificial Sequence
  Oligonucleotide for detection of SNP TSC0040550
aaagatgattggy

SEQ ID NO: 161056 - DNA, 13 bp, Artificial Sequence
  Oligonucleotide for detection of SNP TSC0040550
rccaatcatcttt

SEQ ID NO: 161057 - DNA, 13 bp, Artificial Sequence
  Oligonucleotide for detection of SNP TSC0040550
aaagacgattggy

SEQ ID NO: 161058 - DNA, 13 bp, Artificial Sequence
  Oligonucleotide for detection of SNP TSC0040550
rccaatcgtcttt

SEQ ID NO: 161059 - DNA, 13 bp, Artificial Sequence
  Oligonucleotide for detection of SNP TSC0040550
gttaattgttttt

SEQ ID NO: 161060 - DNA, 13 bp, Artificial Sequence
  Oligonucleotide for detection of SNP TSC0040550
aaaaacaattaac

SEQ ID NO: 161061 - DNA, 13 bp, Artificial Sequence
  Oligonucleotide for detection of SNP TSC0040550
gttaatcgttttt

SEQ ID NO: 161062 - DNA, 13 bp, Artificial Sequence
  Oligonucleotide for detection of SNP TSC0040550
aaaaacgattaac

SEQ ID NO: 161063 - DNA, 13 bp, Artificial Sequence
  Oligonucleotide for detection of SNP TSC0040551
agtgaaaaaaggg

SEQ ID NO: 161064 - DNA, 13 bp, Artificial Sequence
  Oligonucleotide for detection of SNP TSC0040551
cccttttttcact

SEQ ID NO: 161065 - DNA, 13 bp, Artificial Sequence
  Oligonucleotide for detection of SNP TSC0040551
agtgaataaaggg

SEQ ID NO: 161066 - DNA, 13 bp, Artificial Sequence
  Oligonucleotide for detection of SNP TSC0040551
ccctttattcact

SEQ ID NO: 161067 - DNA, 13 bp, Artificial Sequence
  Oligonucleotide for detection of SNP TSC0040552
atagatatgttta

SEQ ID NO: 161068 - DNA, 13 bp, Artificial Sequence
  Oligonucleotide for detection of SNP TSC0040552
taaacatatctat

SEQ ID NO: 161069 - DNA, 13 bp, Artificial Sequence
  Oligonucleotide for detection of SNP TSC0040552
atagatttgttta

SEQ ID NO: 161070 - DNA, 13 bp, Artificial Sequence
  Oligonucleotide for detection of SNP TSC0040552
taaacaaatctat

SEQ ID NO: 161071 - DNA, 13 bp, Artificial Sequence
  Oligonucleotide for detection of SNP TSC0040552
tagatatgtttgt

SEQ ID NO: 161072 - DNA, 13 bp, Artificial Sequence
  Oligonucleotide for detection of SNP TSC0040552
acaaacatatcta

SEQ ID NO: 161073 - DNA, 13 bp, Artificial Sequence
  Oligonucleotide for detection of SNP TSC0040552
tagataggtttgt

SEQ ID NO: 161074 - DNA, 13 bp, Artificial Sequence
  Oligonucleotide for detection of SNP TSC0040552
acaaacctatcta

SEQ ID NO: 161075 - DNA, 13 bp, Artificial Sequence
  Oligonucleotide for detection of SNP TSC0040553
tatataatattga

SEQ ID NO: 161076 - DNA, 13 bp, Artificial Sequence
  Oligonucleotide for detection of SNP TSC0040553
tcaatattatata

SEQ ID NO: 161077 - DNA, 13 bp, Artificial Sequence
  Oligonucleotide for detection of SNP TSC0040553
tatatagtattga

SEQ ID NO: 161078 - DNA, 13 bp, Artificial Sequence
  Oligonucleotide for detection of SNP TSC0040553
tcaatactatata

SEQ ID NO: 161079 - DNA, 13 bp, Artificial Sequence
  Oligonucleotide for detection of SNP TSC0040554
ttaaaggaaaaag

SEQ ID NO: 161080 - DNA, 13 bp, Artificial Sequence
  Oligonucleotide for detection of SNP TSC0040554
ctttttcctttaa

SEQ ID NO: 161081 - DNA, 13 bp, Artificial Sequence
  Oligonucleotide for detection of SNP TSC0040554
ttaaagtaaaaag

SEQ ID NO: 161082 - DNA, 13 bp, Artificial Sequence
  Oligonucleotide for detection of SNP TSC0040554
ctttttactttaa

SEQ ID NO: 161083 - DNA, 13 bp, Artificial Sequence
  Oligonucleotide for detection of SNP TSC0040556
tttttgatattty

SEQ ID NO: 161084 - DNA, 13 bp, Artificial Sequence
  Oligonucleotide for detection of SNP TSC0040556
raaatatcaaaaa

SEQ ID NO: 161085 - DNA, 13 bp, Artificial Sequence
  Oligonucleotide for detection of SNP TSC0040556
tttttggtattty

SEQ ID NO: 161086 - DNA, 13 bp, Artificial Sequence
  Oligonucleotide for detection of SNP TSC0040556
raaataccaaaaa

SEQ ID NO: 161087 - DNA, 13 bp, Artificial Sequence
  Oligonucleotide for detection of SNP TSC0040557
aaaattatttatg

SEQ ID NO: 161088 - DNA, 13 bp, Artificial Sequence
  Oligonucleotide for detection of SNP TSC0040557
cataaataatttt

SEQ ID NO: 161089 - DNA, 13 bp, Artificial Sequence
  Oligonucleotide for detection of SNP TSC0040557
aaaattgtttatg

SEQ ID NO: 161090 - DNA, 13 bp, Artificial Sequence
  Oligonucleotide for detection of SNP TSC0040557
cataaacaatttt

SEQ ID NO: 161091 - DNA, 13 bp, Artificial Sequence
  Oligonucleotide for detection of SNP TSC0040557
aaaatcgtttatg

SEQ ID NO: 161092 - DNA, 13 bp, Artificial Sequence
  Oligonucleotide for detection of SNP TSC0040557
cataaacgatttt

SEQ ID NO: 161093 - DNA, 13 bp, Artificial Sequence
  Oligonucleotide for detection of SNP TSC0040557
tatgaatgatttt

SEQ ID NO: 161094 - DNA, 13 bp, Artificial Sequence
  Oligonucleotide for detection of SNP TSC0040557
aaaatcattcata

SEQ ID NO: 161095 - DNA, 13 bp, Artificial Sequence
  Oligonucleotide for detection of SNP TSC0040557
tatgaacgatttt

SEQ ID NO: 161096 - DNA, 13 bp, Artificial Sequence
  Oligonucleotide for detection of SNP TSC0040557
aaaatcgttcata

SEQ ID NO: 161097 - DNA, 13 bp, Artificial Sequence
  Oligonucleotide for detection of SNP TSC0040558
ttatgtattaata

SEQ ID NO: 161098 - DNA, 13 bp, Artificial Sequence
  Oligonucleotide for detection of SNP TSC0040558
tattaatacataa

SEQ ID NO: 161099 - DNA, 13 bp, Artificial Sequence
  Oligonucleotide for detection of SNP TSC0040558
ttatgtgttaata

SEQ ID NO: 161100 - DNA, 13 bp, Artificial Sequence
  Oligonucleotide for detection of SNP TSC0040558
tattaacacataa

SEQ ID NO: 161101 - DNA, 13 bp, Artificial Sequence
  Oligonucleotide for detection of SNP TSC0040558
ttatgcgttaata

SEQ ID NO: 161102 - DNA, 13 bp, Artificial Sequence
  Oligonucleotide for detection of SNP TSC0040558
tattaacgcataa

SEQ ID NO: 161103 - DNA, 13 bp, Artificial Sequence
  Oligonucleotide for detection of SNP TSC0040558
tattgatgtatgg

SEQ ID NO: 161104 - DNA, 13 bp, Artificial Sequence
  Oligonucleotide for detection of SNP TSC0040558
ccatacatcaata

SEQ ID NO: 161105 - DNA, 13 bp, Artificial Sequence
  Oligonucleotide for detection of SNP TSC0040558
tattgacgtatgg

SEQ ID NO: 161106 - DNA, 13 bp, Artificial Sequence
  Oligonucleotide for detection of SNP TSC0040558
ccatacgtcaata

SEQ ID NO: 161107 - DNA, 13 bp, Artificial Sequence
  Oligonucleotide for detection of SNP TSC0040559
gtgttgagaatga

SEQ ID NO: 161108 - DNA, 13 bp, Artificial Sequence
  Oligonucleotide for detection of SNP TSC0040559
tcattctcaacac

SEQ ID NO: 161109 - DNA, 13 bp, Artificial Sequence
  Oligonucleotide for detection of SNP TSC0040559
gtgttgggaatga

SEQ ID NO: 161110 - DNA, 13 bp, Artificial Sequence
  Oligonucleotide for detection of SNP TSC0040559
tcattcccaacac

SEQ ID NO: 161111 - DNA, 13 bp, Artificial Sequence
  Oligonucleotide for detection of SNP TSC0040560
taaataggtttta

SEQ ID NO: 161112 - DNA, 13 bp, Artificial Sequence
  Oligonucleotide for detection of SNP TSC0040560
taaaacctattta

SEQ ID NO: 161113 - DNA, 13 bp, Artificial Sequence
  Oligonucleotide for detection of SNP TSC0040560
taaaatatatttg

SEQ ID NO: 161114 - DNA, 13 bp, Artificial Sequence
  Oligonucleotide for detection of SNP TSC0040560
caaatatatttta

SEQ ID NO: 161115 - DNA, 13 bp, Artificial Sequence
  Oligonucleotide for detection of SNP TSC0040560
taaaatttatttg

SEQ ID NO: 161116 - DNA, 13 bp, Artificial Sequence
  Oligonucleotide for detection of SNP TSC0040560
caaataaatttta

SEQ ID NO: 161117 - DNA, 13 bp, Artificial Sequence
  Oligonucleotide for detection of SNP TSC0040561
aaaaatattaatg

SEQ ID NO: 161118 - DNA, 13 bp, Artificial Sequence
  Oligonucleotide for detection of SNP TSC0040561
cattaatattttt

SEQ ID NO: 161119 - DNA, 13 bp, Artificial Sequence
  Oligonucleotide for detection of SNP TSC0040564
gagggttgatagg

SEQ ID NO: 161120 - DNA, 13 bp, Artificial Sequence
  Oligonucleotide for detection of SNP TSC0040564
cctatcaaccctc

SEQ ID NO: 161121 - DNA, 13 bp, Artificial Sequence
  Oligonucleotide for detection of SNP TSC0040564
gagggtcgatagg

SEQ ID NO: 161122 - DNA, 13 bp, Artificial Sequence
  Oligonucleotide for detection of SNP TSC0040564
cctatcgaccctc

SEQ ID NO: 161123 - DNA, 13 bp, Artificial Sequence
  Oligonucleotide for detection of SNP TSC0040565
tattttgtttgtt

SEQ ID NO: 161124 - DNA, 13 bp, Artificial Sequence
  Oligonucleotide for detection of SNP TSC0040565
aacaaacaaaata

SEQ ID NO: 161125 - DNA, 13 bp, Artificial Sequence
  Oligonucleotide for detection of SNP TSC0040565
tatttcgtttgtt

SEQ ID NO: 161126 - DNA, 13 bp, Artificial Sequence
  Oligonucleotide for detection of SNP TSC0040565
aacaaacgaaata

SEQ ID NO: 161127 - DNA, 13 bp, Artificial Sequence
  Oligonucleotide for detection of SNP TSC0040565
aatagatggaata

SEQ ID NO: 161128 - DNA, 13 bp, Artificial Sequence
  Oligonucleotide for detection of SNP TSC0040565
tattccatctatt

SEQ ID NO: 161129 - DNA, 13 bp, Artificial Sequence
  Oligonucleotide for detection of SNP TSC0040565
aatagacggaata

SEQ ID NO: 161130 - DNA, 13 bp, Artificial Sequence
  Oligonucleotide for detection of SNP TSC0040565
tattccgtctatt

SEQ ID NO: 161131 - DNA, 13 bp, Artificial Sequence
  Oligonucleotide for detection of SNP TSC0040566
ggatttttgagga

SEQ ID NO: 161132 - DNA, 13 bp, Artificial Sequence
  Oligonucleotide for detection of SNP TSC0040566
tcctcaaaaatcc

SEQ ID NO: 161133 - DNA, 13 bp, Artificial Sequence
  Oligonucleotide for detection of SNP TSC0040566
ggatttgtgagga

SEQ ID NO: 161134 - DNA, 13 bp, Artificial Sequence
  Oligonucleotide for detection of SNP TSC0040566
tcctcacaaatcc

SEQ ID NO: 161135 - DNA, 13 bp, Artificial Sequence
  Oligonucleotide for detection of SNP TSC0040567
ttaatataaagta

SEQ ID NO: 161136 - DNA, 13 bp, Artificial Sequence
  Oligonucleotide for detection of SNP TSC0040567
tactttatattaa

SEQ ID NO: 161137 - DNA, 13 bp, Artificial Sequence
  Oligonucleotide for detection of SNP TSC0040567
ttaatagaaagta

SEQ ID NO: 161138 - DNA, 13 bp, Artificial Sequence
  Oligonucleotide for detection of SNP TSC0040567
tactttctattaa

SEQ ID NO: 161139 - DNA, 13 bp, Artificial Sequence
  Oligonucleotide for detection of SNP TSC0040568
agtttaattattt

SEQ ID NO: 161140 - DNA, 13 bp, Artificial Sequence
  Oligonucleotide for detection of SNP TSC0040568
aaataattaaact

SEQ ID NO: 161141 - DNA, 13 bp, Artificial Sequence
  Oligonucleotide for detection of SNP TSC0040568
agtttagttattt

SEQ ID NO: 161142 - DNA, 13 bp, Artificial Sequence
  Oligonucleotide for detection of SNP TSC0040568
aaataactaaact

SEQ ID NO: 161143 - DNA, 13 bp, Artificial Sequence
  Oligonucleotide for detection of SNP TSC0040569
tagaatatggatt

SEQ ID NO: 161144 - DNA, 13 bp, Artificial Sequence
  Oligonucleotide for detection of SNP TSC0040569
aatccatattcta

SEQ ID NO: 161145 - DNA, 13 bp, Artificial Sequence
  Oligonucleotide for detection of SNP TSC0040569
tagaatttggatt

SEQ ID NO: 161146 - DNA, 13 bp, Artificial Sequence
  Oligonucleotide for detection of SNP TSC0040569
aatccaaattcta

SEQ ID NO: 161147 - DNA, 13 bp, Artificial Sequence
  Oligonucleotide for detection of SNP TSC0040569
aatttatattttg

SEQ ID NO: 161148 - DNA, 13 bp, Artificial Sequence
  Oligonucleotide for detection of SNP TSC0040569
caaaatataaatt

SEQ ID NO: 161149 - DNA, 13 bp, Artificial Sequence
  Oligonucleotide for detection of SNP TSC0040569
aatttagattttg

SEQ ID NO: 161150 - DNA, 13 bp, Artificial Sequence
  Oligonucleotide for detection of SNP TSC0040569
caaaatctaaatt

SEQ ID NO: 161151 - DNA, 13 bp, Artificial Sequence
  Oligonucleotide for detection of SNP TSC0040572
aaggagattagag

SEQ ID NO: 161152 - DNA, 13 bp, Artificial Sequence
  Oligonucleotide for detection of SNP TSC0040572
ctctaatctcctt

SEQ ID NO: 161153 - DNA, 13 bp, Artificial Sequence
  Oligonucleotide for detection of SNP TSC0040572
aaggaggttagag

SEQ ID NO: 161154 - DNA, 13 bp, Artificial Sequence
  Oligonucleotide for detection of SNP TSC0040572
ctctaacctcctt

SEQ ID NO: 161155 - DNA, 13 bp, Artificial Sequence
  Oligonucleotide for detection of SNP TSC0040573
taaatgtgaagga

SEQ ID NO: 161156 - DNA, 13 bp, Artificial Sequence
  Oligonucleotide for detection of SNP TSC0040573
tccttcacattta

SEQ ID NO: 161157 - DNA, 13 bp, Artificial Sequence
  Oligonucleotide for detection of SNP TSC0040573
taaatgggaagga

SEQ ID NO: 161158 - DNA, 13 bp, Artificial Sequence
  Oligonucleotide for detection of SNP TSC0040573
tccttcccattta

SEQ ID NO: 161159 - DNA, 13 bp, Artificial Sequence
  Oligonucleotide for detection of SNP TSC0040573
taaatgcgaagga

SEQ ID NO: 161160 - DNA, 13 bp, Artificial Sequence
  Oligonucleotide for detection of SNP TSC0040573
tccttcgcattta

SEQ ID NO: 161161 - DNA, 13 bp, Artificial Sequence
  Oligonucleotide for detection of SNP TSC0040573
ttttttttatttg

SEQ ID NO: 161162 - DNA, 13 bp, Artificial Sequence
  Oligonucleotide for detection of SNP TSC0040573
caaataaaaaaaa

SEQ ID NO: 161163 - DNA, 13 bp, Artificial Sequence
  Oligonucleotide for detection of SNP TSC0040574
tttttatatgaay

SEQ ID NO: 161164 - DNA, 13 bp, Artificial Sequence
  Oligonucleotide for detection of SNP TSC0040574
rttcatataaaaa

SEQ ID NO: 161165 - DNA, 13 bp, Artificial Sequence
  Oligonucleotide for detection of SNP TSC0040574
tttttagatgaay

SEQ ID NO: 161166 - DNA, 13 bp, Artificial Sequence
  Oligonucleotide for detection of SNP TSC0040574
rttcatctaaaaa

SEQ ID NO: 161167 - DNA, 13 bp, Artificial Sequence
  Oligonucleotide for detection of SNP TSC0040574
gtttatgtgggag

SEQ ID NO: 161168 - DNA, 13 bp, Artificial Sequence
  Oligonucleotide for detection of SNP TSC0040574
ctcccacataaac

SEQ ID NO: 161169 - DNA, 13 bp, Artificial Sequence
  Oligonucleotide for detection of SNP TSC0040574
gtttatttgggag

SEQ ID NO: 161170 - DNA, 13 bp, Artificial Sequence
  Oligonucleotide for detection of SNP TSC0040574
ctcccaaataaac

SEQ ID NO: 161171 - DNA, 13 bp, Artificial Sequence
  Oligonucleotide for detection of SNP TSC0040576
tatattaatttat

SEQ ID NO: 161172 - DNA, 13 bp, Artificial Sequence
  Oligonucleotide for detection of SNP TSC0040576
ataaattaatata

SEQ ID NO: 161173 - DNA, 13 bp, Artificial Sequence
  Oligonucleotide for detection of SNP TSC0040576
tatatttatttat

SEQ ID NO: 161174 - DNA, 13 bp, Artificial Sequence
  Oligonucleotide for detection of SNP TSC0040576
ataaataaatata

SEQ ID NO: 161175 - DNA, 13 bp, Artificial Sequence
  Oligonucleotide for detection of SNP TSC0040576
atgaattgatgta

SEQ ID NO: 161176 - DNA, 13 bp, Artificial Sequence
  Oligonucleotide for detection of SNP TSC0040576
tacatcaattcat

SEQ ID NO: 161177 - DNA, 13 bp, Artificial Sequence
  Oligonucleotide for detection of SNP TSC0040576
atgaatagatgta

SEQ ID NO: 161178 - DNA, 13 bp, Artificial Sequence
  Oligonucleotide for detection of SNP TSC0040576
tacatctattcat

SEQ ID NO: 161179 - DNA, 13 bp, Artificial Sequence
  Oligonucleotide for detection of SNP TSC0040577
gttaagataggag

SEQ ID NO: 161180 - DNA, 13 bp, Artificial Sequence
  Oligonucleotide for detection of SNP TSC0040577
ctcctatcttaac

SEQ ID NO: 161181 - DNA, 13 bp, Artificial Sequence
  Oligonucleotide for detection of SNP TSC0040577
gttaagttaggag

SEQ ID NO: 161182 - DNA, 13 bp, Artificial Sequence
  Oligonucleotide for detection of SNP TSC0040577
ctcctaacttaac

SEQ ID NO: 161183 - DNA, 13 bp, Artificial Sequence
  Oligonucleotide for detection of SNP TSC0040579
taagggaatttay

SEQ ID NO: 161184 - DNA, 13 bp, Artificial Sequence
  Oligonucleotide for detection of SNP TSC0040579
rtaaattccctta

SEQ ID NO: 161185 - DNA, 13 bp, Artificial Sequence
  Oligonucleotide for detection of SNP TSC0040579
taagggtatttay

SEQ ID NO: 161186 - DNA, 13 bp, Artificial Sequence
  Oligonucleotide for detection of SNP TSC0040579
rtaaataccctta

SEQ ID NO: 161187 - DNA, 13 bp, Artificial Sequence
  Oligonucleotide for detection of SNP TSC0040579
gtgaattttttta

SEQ ID NO: 161188 - DNA, 13 bp, Artificial Sequence
  Oligonucleotide for detection of SNP TSC0040579
taaaaaaattcac

SEQ ID NO: 161189 - DNA, 13 bp, Artificial Sequence
  Oligonucleotide for detection of SNP TSC0040579
gtgaatattttta

SEQ ID NO: 161190 - DNA, 13 bp, Artificial Sequence
  Oligonucleotide for detection of SNP TSC0040579
taaaaatattcac

SEQ ID NO: 161191 - DNA, 13 bp, Artificial Sequence
  Oligonucleotide for detection of SNP TSC0040580
tttattgatttat

SEQ ID NO: 161192 - DNA, 13 bp, Artificial Sequence
  Oligonucleotide for detection of SNP TSC0040580
ataaatcaataaa

SEQ ID NO: 161193 - DNA, 13 bp, Artificial Sequence
  Oligonucleotide for detection of SNP TSC0040580
ataaatgagtaaa

SEQ ID NO: 161194 - DNA, 13 bp, Artificial Sequence
  Oligonucleotide for detection of SNP TSC0040580
tttactcatttat

SEQ ID NO: 161195 - DNA, 13 bp, Artificial Sequence
  Oligonucleotide for detection of SNP TSC0040580
ataaattagtaaa

SEQ ID NO: 161196 - DNA, 13 bp, Artificial Sequence
  Oligonucleotide for detection of SNP TSC0040580
tttactaatttat

SEQ ID NO: 161197 - DNA, 13 bp, Artificial Sequence
  Oligonucleotide for detection of SNP TSC0040581
gtagaagttttat

SEQ ID NO: 161198 - DNA, 13 bp, Artificial Sequence
  Oligonucleotide for detection of SNP TSC0040581
ataaaacttctac

SEQ ID NO: 161199 - DNA, 13 bp, Artificial Sequence
  Oligonucleotide for detection of SNP TSC0040581
gtagaaattttat

SEQ ID NO: 161200 - DNA, 13 bp, Artificial Sequence
  Oligonucleotide for detection of SNP TSC0040581
ataaaatttctac

SEQ ID NO: 161201 - DNA, 13 bp, Artificial Sequence
  Oligonucleotide for detection of SNP TSC0040584
tgtatatgtgtgt

SEQ ID NO: 161202 - DNA, 13 bp, Artificial Sequence
  Oligonucleotide for detection of SNP TSC0040584
acacacatataca

SEQ ID NO: 161203 - DNA, 13 bp, Artificial Sequence
  Oligonucleotide for detection of SNP TSC0040584
tgtatacgtgtgt

SEQ ID NO: 161204 - DNA, 13 bp, Artificial Sequence
  Oligonucleotide for detection of SNP TSC0040584
acacacgtataca

SEQ ID NO: 161205 - DNA, 13 bp, Artificial Sequence
  Oligonucleotide for detection of SNP TSC0040587
aggaattgaggtt

SEQ ID NO: 161206 - DNA, 13 bp, Artificial Sequence
  Oligonucleotide for detection of SNP TSC0040587
aacctcaattcct

SEQ ID NO: 161207 - DNA, 13 bp, Artificial Sequence
  Oligonucleotide for detection of SNP TSC0040587
aggaatggaggtt

SEQ ID NO: 161208 - DNA, 13 bp, Artificial Sequence
  Oligonucleotide for detection of SNP TSC0040587
aacctccattcct

SEQ ID NO: 161209 - DNA, 13 bp, Artificial Sequence
  Oligonucleotide for detection of SNP TSC0040588
ttgttaagtagag

SEQ ID NO: 161210 - DNA, 13 bp, Artificial Sequence
  Oligonucleotide for detection of SNP TSC0040588
ctctacttaacaa

SEQ ID NO: 161211 - DNA, 13 bp, Artificial Sequence
  Oligonucleotide for detection of SNP TSC0040588
ttgttaggtagag

SEQ ID NO: 161212 - DNA, 13 bp, Artificial Sequence
  Oligonucleotide for detection of SNP TSC0040588
ctctacctaacaa

SEQ ID NO: 161213 - DNA, 13 bp, Artificial Sequence
  Oligonucleotide for detection of SNP TSC0040589
tttttcgtagaaa

SEQ ID NO: 161214 - DNA, 13 bp, Artificial Sequence
  Oligonucleotide for detection of SNP TSC0040589
tttctacgaaaaa

SEQ ID NO: 161215 - DNA, 13 bp, Artificial Sequence
  Oligonucleotide for detection of SNP TSC0040589
tttttgaggggag

SEQ ID NO: 161216 - DNA, 13 bp, Artificial Sequence
  Oligonucleotide for detection of SNP TSC0040589
ctcccctcaaaaa

SEQ ID NO: 161217 - DNA, 13 bp, Artificial Sequence
  Oligonucleotide for detection of SNP TSC0040592
gttgatattttay

SEQ ID NO: 161218 - DNA, 13 bp, Artificial Sequence
  Oligonucleotide for detection of SNP TSC0040592
rtaaaatatcaac

SEQ ID NO: 161219 - DNA, 13 bp, Artificial Sequence
  Oligonucleotide for detection of SNP TSC0040592
gttgattttttay

SEQ ID NO: 161220 - DNA, 13 bp, Artificial Sequence
  Oligonucleotide for detection of SNP TSC0040592
rtaaaaaatcaac

SEQ ID NO: 161221 - DNA, 13 bp, Artificial Sequence
  Oligonucleotide for detection of SNP TSC0040592
gtgaaatgttagy

SEQ ID NO: 161222 - DNA, 13 bp, Artificial Sequence
  Oligonucleotide for detection of SNP TSC0040592
rctaacatttcac

SEQ ID NO: 161223 - DNA, 13 bp, Artificial Sequence
  Oligonucleotide for detection of SNP TSC0040592
gtgaaaggttagy

SEQ ID NO: 161224 - DNA, 13 bp, Artificial Sequence
  Oligonucleotide for detection of SNP TSC0040592
rctaacctttcac

SEQ ID NO: 161225 - DNA, 13 bp, Artificial Sequence
  Oligonucleotide for detection of SNP TSC0040593
tattttataattt

SEQ ID NO: 161226 - DNA, 13 bp, Artificial Sequence
  Oligonucleotide for detection of SNP TSC0040593
aaattataaaata

SEQ ID NO: 161227 - DNA, 13 bp, Artificial Sequence
  Oligonucleotide for detection of SNP TSC0040593
tattttgtaattt

SEQ ID NO: 161228 - DNA, 13 bp, Artificial Sequence
  Oligonucleotide for detection of SNP TSC0040593
aaattacaaaata

SEQ ID NO: 161229 - DNA, 13 bp, Artificial Sequence
  Oligonucleotide for detection of SNP TSC0040593
tatttcgtaattt

SEQ ID NO: 161230 - DNA, 13 bp, Artificial Sequence
  Oligonucleotide for detection of SNP TSC0040593
aaattacgaaata

SEQ ID NO: 161231 - DNA, 13 bp, Artificial Sequence
  Oligonucleotide for detection of SNP TSC0040593
aaattatgaaata

SEQ ID NO: 161232 - DNA, 13 bp, Artificial Sequence
  Oligonucleotide for detection of SNP TSC0040593
tatttcataattt

SEQ ID NO: 161233 - DNA, 13 bp, Artificial Sequence
  Oligonucleotide for detection of SNP TSC0040594
tttttaatatggt

SEQ ID NO: 161234 - DNA, 13 bp, Artificial Sequence
  Oligonucleotide for detection of SNP TSC0040594
accatattaaaaa

SEQ ID NO: 161235 - DNA, 13 bp, Artificial Sequence
  Oligonucleotide for detection of SNP TSC0040594
tttttagtatggt

SEQ ID NO: 161236 - DNA, 13 bp, Artificial Sequence
  Oligonucleotide for detection of SNP TSC0040594
accatactaaaaa

SEQ ID NO: 161237 - DNA, 13 bp, Artificial Sequence
  Oligonucleotide for detection of SNP TSC0040595
ttattaatgattt

SEQ ID NO: 161238 - DNA, 13 bp, Artificial Sequence
  Oligonucleotide for detection of SNP TSC0040595
aaatcattaataa

SEQ ID NO: 161239 - DNA, 13 bp, Artificial Sequence
  Oligonucleotide for detection of SNP TSC0040595
ttattagtgattt

SEQ ID NO: 161240 - DNA, 13 bp, Artificial Sequence
  Oligonucleotide for detection of SNP TSC0040595
aaatcactaataa

SEQ ID NO: 161241 - DNA, 13 bp, Artificial Sequence
  Oligonucleotide for detection of SNP TSC0040603
tataatggggttg

SEQ ID NO: 161242 - DNA, 13 bp, Artificial Sequence
  Oligonucleotide for detection of SNP TSC0040603
caaccccattata

SEQ ID NO: 161243 - DNA, 13 bp, Artificial Sequence
  Oligonucleotide for detection of SNP TSC0040603
tataatagggttg

SEQ ID NO: 161244 - DNA, 13 bp, Artificial Sequence
  Oligonucleotide for detection of SNP TSC0040603
caaccctattata

SEQ ID NO: 161245 - DNA, 13 bp, Artificial Sequence
  Oligonucleotide for detection of SNP TSC0040606
gagaattgaattt

SEQ ID NO: 161246 - DNA, 13 bp, Artificial Sequence
  Oligonucleotide for detection of SNP TSC0040606
aaattcaattctc

SEQ ID NO: 161247 - DNA, 13 bp, Artificial Sequence
  Oligonucleotide for detection of SNP TSC0040606
gagaatcgaattt

SEQ ID NO: 161248 - DNA, 13 bp, Artificial Sequence
  Oligonucleotide for detection of SNP TSC0040606
aaattcgattctc

SEQ ID NO: 161249 - DNA, 13 bp, Artificial Sequence
  Oligonucleotide for detection of SNP TSC0040606
aagtttagtttty

SEQ ID NO: 161250 - DNA, 13 bp, Artificial Sequence
  Oligonucleotide for detection of SNP TSC0040606
raaaactaaactt

SEQ ID NO: 161251 - DNA, 13 bp, Artificial Sequence
  Oligonucleotide for detection of SNP TSC0040606
aagttcggtttty

SEQ ID NO: 161252 - DNA, 13 bp, Artificial Sequence
  Oligonucleotide for detection of SNP TSC0040606
raaaaccgaactt

SEQ ID NO: 161253 - DNA, 13 bp, Artificial Sequence
  Oligonucleotide for detection of SNP TSC0040607
gttggtgtgtagg

SEQ ID NO: 161254 - DNA, 13 bp, Artificial Sequence
  Oligonucleotide for detection of SNP TSC0040607
cctacacaccaac

SEQ ID NO: 161255 - DNA, 13 bp, Artificial Sequence
  Oligonucleotide for detection of SNP TSC0040607
gttggtatgtagg

SEQ ID NO: 161256 - DNA, 13 bp, Artificial Sequence
  Oligonucleotide for detection of SNP TSC0040607
cctacataccaac

SEQ ID NO: 161257 - DNA, 13 bp, Artificial Sequence
  Oligonucleotide for detection of SNP TSC0040608
tgtttaaagaaat

SEQ ID NO: 161258 - DNA, 13 bp, Artificial Sequence
  Oligonucleotide for detection of SNP TSC0040608
atttctttaaaca

SEQ ID NO: 161259 - DNA, 13 bp, Artificial Sequence
  Oligonucleotide for detection of SNP TSC0040608
tgtttatagaaat

SEQ ID NO: 161260 - DNA, 13 bp, Artificial Sequence
  Oligonucleotide for detection of SNP TSC0040608
atttctataaaca

SEQ ID NO: 161261 - DNA, 13 bp, Artificial Sequence
  Oligonucleotide for detection of SNP TSC0040608
atttttttgagta

SEQ ID NO: 161262 - DNA, 13 bp, Artificial Sequence
  Oligonucleotide for detection of SNP TSC0040608
tactcaaaaaaat

SEQ ID NO: 161263 - DNA, 13 bp, Artificial Sequence
  Oligonucleotide for detection of SNP TSC0040608
atttttatgagta

SEQ ID NO: 161264 - DNA, 13 bp, Artificial Sequence
  Oligonucleotide for detection of SNP TSC0040608
tactcataaaaat

SEQ ID NO: 161265 - DNA, 13 bp, Artificial Sequence
  Oligonucleotide for detection of SNP TSC0040609
gtatgcgttatta

SEQ ID NO: 161266 - DNA, 13 bp, Artificial Sequence
  Oligonucleotide for detection of SNP TSC0040609
taataacgcatac

SEQ ID NO: 161267 - DNA, 13 bp, Artificial Sequence
  Oligonucleotide for detection of SNP TSC0040609
tggtggtgtatgy

SEQ ID NO: 161268 - DNA, 13 bp, Artificial Sequence
  Oligonucleotide for detection of SNP TSC0040609
rcatacaccacca

SEQ ID NO: 161269 - DNA, 13 bp, Artificial Sequence
  Oligonucleotide for detection of SNP TSC0040609
tggtggcgtatgy

SEQ ID NO: 161270 - DNA, 13 bp, Artificial Sequence
  Oligonucleotide for detection of SNP TSC0040609
rcatacgccacca

SEQ ID NO: 161271 - DNA, 13 bp, Artificial Sequence
  Oligonucleotide for detection of SNP TSC0040610
gtaataattatgt

SEQ ID NO: 161272 - DNA, 13 bp, Artificial Sequence
  Oligonucleotide for detection of SNP TSC0040610
acataattattac

SEQ ID NO: 161273 - DNA, 13 bp, Artificial Sequence
  Oligonucleotide for detection of SNP TSC0040610
gtaatagttatgt

SEQ ID NO: 161274 - DNA, 13 bp, Artificial Sequence
  Oligonucleotide for detection of SNP TSC0040610
acataactattac

SEQ ID NO: 161275 - DNA, 13 bp, Artificial Sequence
  Oligonucleotide for detection of SNP TSC0040611
taaggttggttat

SEQ ID NO: 161276 - DNA, 13 bp, Artificial Sequence
  Oligonucleotide for detection of SNP TSC0040611
ataaccaacctta

SEQ ID NO: 161277 - DNA, 13 bp, Artificial Sequence
  Oligonucleotide for detection of SNP TSC0040611
taaggtgggttat

SEQ ID NO: 161278 - DNA, 13 bp, Artificial Sequence
  Oligonucleotide for detection of SNP TSC0040611
ataacccacctta

SEQ ID NO: 161279 - DNA, 13 bp, Artificial Sequence
  Oligonucleotide for detection of SNP TSC0040611
ataattaattttg

SEQ ID NO: 161280 - DNA, 13 bp, Artificial Sequence
  Oligonucleotide for detection of SNP TSC0040611
caaaattaattat

SEQ ID NO: 161281 - DNA, 13 bp, Artificial Sequence
  Oligonucleotide for detection of SNP TSC0040611
ataatttattttg

SEQ ID NO: 161282 - DNA, 13 bp, Artificial Sequence
  Oligonucleotide for detection of SNP TSC0040611
caaaataaattat

SEQ ID NO: 161283 - DNA, 13 bp, Artificial Sequence
  Oligonucleotide for detection of SNP TSC0040612
ttatttgagtgay

SEQ ID NO: 161284 - DNA, 13 bp, Artificial Sequence
  Oligonucleotide for detection of SNP TSC0040612
rtcactcaaataa

SEQ ID NO: 161285 - DNA, 13 bp, Artificial Sequence
  Oligonucleotide for detection of SNP TSC0040616
tttggtatattta

SEQ ID NO: 161286 - DNA, 13 bp, Artificial Sequence
  Oligonucleotide for detection of SNP TSC0040616
taaatataccaaa

SEQ ID NO: 161287 - DNA, 13 bp, Artificial Sequence
  Oligonucleotide for detection of SNP TSC0040616
tttggtgtattta

SEQ ID NO: 161288 - DNA, 13 bp, Artificial Sequence
  Oligonucleotide for detection of SNP TSC0040616
taaatacaccaaa

SEQ ID NO: 161289 - DNA, 13 bp, Artificial Sequence
  Oligonucleotide for detection of SNP TSC0040616
tttggcgtattta

SEQ ID NO: 161290 - DNA, 13 bp, Artificial Sequence
  Oligonucleotide for detection of SNP TSC0040616
taaatacgccaaa

SEQ ID NO: 161291 - DNA, 13 bp, Artificial Sequence
  Oligonucleotide for detection of SNP TSC0040616
taaatatgttagg

SEQ ID NO: 161292 - DNA, 13 bp, Artificial Sequence
  Oligonucleotide for detection of SNP TSC0040616
cctaacatattta

SEQ ID NO: 161293 - DNA, 13 bp, Artificial Sequence
  Oligonucleotide for detection of SNP TSC0040616
taaatacgttagg

SEQ ID NO: 161294 - DNA, 13 bp, Artificial Sequence
  Oligonucleotide for detection of SNP TSC0040616
cctaacgtattta

SEQ ID NO: 161295 - DNA, 13 bp, Artificial Sequence
  Oligonucleotide for detection of SNP TSC0040617
gggttaaatttag

SEQ ID NO: 161296 - DNA, 13 bp, Artificial Sequence
  Oligonucleotide for detection of SNP TSC0040617
ctaaatttaaccc

SEQ ID NO: 161297 - DNA, 13 bp, Artificial Sequence
  Oligonucleotide for detection of SNP TSC0040618
tgttttaaaaatt

SEQ ID NO: 161298 - DNA, 13 bp, Artificial Sequence
  Oligonucleotide for detection of SNP TSC0040618
aatttttaaaaca

SEQ ID NO: 161299 - DNA, 13 bp, Artificial Sequence
  Oligonucleotide for detection of SNP TSC0040618
tgttttgaaaatt

SEQ ID NO: 161300 - DNA, 13 bp, Artificial Sequence
  Oligonucleotide for detection of SNP TSC0040618
aattttcaaaaca

SEQ ID NO: 161301 - DNA, 13 bp, Artificial Sequence
  Oligonucleotide for detection of SNP TSC0040618
tgtttcgaaaatt

SEQ ID NO: 161302 - DNA, 13 bp, Artificial Sequence
  Oligonucleotide for detection of SNP TSC0040618
aattttcgaaaca

SEQ ID NO: 161303 - DNA, 13 bp, Artificial Sequence
  Oligonucleotide for detection of SNP TSC0040618
agtttttgaaata

SEQ ID NO: 161304 - DNA, 13 bp, Artificial Sequence
  Oligonucleotide for detection of SNP TSC0040618
tatttcaaaaact

SEQ ID NO: 161305 - DNA, 13 bp, Artificial Sequence
  Oligonucleotide for detection of SNP TSC0040618
agttttcgaaata

SEQ ID NO: 161306 - DNA, 13 bp, Artificial Sequence
  Oligonucleotide for detection of SNP TSC0040618
tatttcgaaaact

SEQ ID NO: 161307 - DNA, 13 bp, Artificial Sequence
  Oligonucleotide for detection of SNP TSC0040619
aaaattaaaaaag

SEQ ID NO: 161308 - DNA, 13 bp, Artificial Sequence
  Oligonucleotide for detection of SNP TSC0040619
cttttttaatttt

SEQ ID NO: 161309 - DNA, 13 bp, Artificial Sequence
  Oligonucleotide for detection of SNP TSC0040619
aaaatttaaaaag

SEQ ID NO: 161310 - DNA, 13 bp, Artificial Sequence
  Oligonucleotide for detection of SNP TSC0040619
ctttttaaatttt

SEQ ID NO: 161311 - DNA, 13 bp, Artificial Sequence
  Oligonucleotide for detection of SNP TSC0040620
tttgaagtattty

SEQ ID NO: 161312 - DNA, 13 bp, Artificial Sequence
  Oligonucleotide for detection of SNP TSC0040620
raaatacttcaaa

SEQ ID NO: 161313 - DNA, 13 bp, Artificial Sequence
  Oligonucleotide for detection of SNP TSC0040621
aatgatagtattt

SEQ ID NO: 161314 - DNA, 13 bp, Artificial Sequence
  Oligonucleotide for detection of SNP TSC0040621
aaatactatcatt

SEQ ID NO: 161315 - DNA, 13 bp, Artificial Sequence
  Oligonucleotide for detection of SNP TSC0040621
aatgatggtattt

SEQ ID NO: 161316 - DNA, 13 bp, Artificial Sequence
  Oligonucleotide for detection of SNP TSC0040621
aaataccatcatt

SEQ ID NO: 161317 - DNA, 13 bp, Artificial Sequence
  Oligonucleotide for detection of SNP TSC0040621
aatgacggtattt

SEQ ID NO: 161318 - DNA, 13 bp, Artificial Sequence
  Oligonucleotide for detection of SNP TSC0040621
aaataccgtcatt

SEQ ID NO: 161319 - DNA, 13 bp, Artificial Sequence
  Oligonucleotide for detection of SNP TSC0040621
aaatgttgttatt

SEQ ID NO: 161320 - DNA, 13 bp, Artificial Sequence
  Oligonucleotide for detection of SNP TSC0040621
aataacaacattt

SEQ ID NO: 161321 - DNA, 13 bp, Artificial Sequence
  Oligonucleotide for detection of SNP TSC0040621
aaatgtcgttatt

SEQ ID NO: 161322 - DNA, 13 bp, Artificial Sequence
  Oligonucleotide for detection of SNP TSC0040621
aataacgacattt

SEQ ID NO: 161323 - DNA, 13 bp, Artificial Sequence
  Oligonucleotide for detection of SNP TSC0040622
ttttgatgaaaty

SEQ ID NO: 161324 - DNA, 13 bp, Artificial Sequence
  Oligonucleotide for detection of SNP TSC0040622
ratttcatcaaaa

SEQ ID NO: 161325 - DNA, 13 bp, Artificial Sequence
  Oligonucleotide for detection of SNP TSC0040622
ttttgacgaaaty

SEQ ID NO: 161326 - DNA, 13 bp, Artificial Sequence
  Oligonucleotide for detection of SNP TSC0040622
ratttcgtcaaaa

SEQ ID NO: 161327 - DNA, 13 bp, Artificial Sequence
  Oligonucleotide for detection of SNP TSC0040622
ggttttgttagaa

SEQ ID NO: 161328 - DNA, 13 bp, Artificial Sequence
  Oligonucleotide for detection of SNP TSC0040622
ttctaacaaaacc

SEQ ID NO: 161329 - DNA, 13 bp, Artificial Sequence
  Oligonucleotide for detection of SNP TSC0040622
ggttttattagaa

SEQ ID NO: 161330 - DNA, 13 bp, Artificial Sequence
  Oligonucleotide for detection of SNP TSC0040622
ttctaataaaacc

SEQ ID NO: 161331 - DNA, 13 bp, Artificial Sequence
  Oligonucleotide for detection of SNP TSC0040622
ggtttcgttagaa

SEQ ID NO: 161332 - DNA, 13 bp, Artificial Sequence
  Oligonucleotide for detection of SNP TSC0040622
ttctaacgaaacc

SEQ ID NO: 161333 - DNA, 13 bp, Artificial Sequence
  Oligonucleotide for detection of SNP TSC0040623
tttgataagttaa

SEQ ID NO: 161334 - DNA, 13 bp, Artificial Sequence
  Oligonucleotide for detection of SNP TSC0040623
ttaacttatcaaa

SEQ ID NO: 161335 - DNA, 13 bp, Artificial Sequence
  Oligonucleotide for detection of SNP TSC0040623
tttgatgagttaa

SEQ ID NO: 161336 - DNA, 13 bp, Artificial Sequence
  Oligonucleotide for detection of SNP TSC0040623
ttaactcatcaaa

SEQ ID NO: 161337 - DNA, 13 bp, Artificial Sequence
  Oligonucleotide for detection of SNP TSC0040627
agaggagttaatt

SEQ ID NO: 161338 - DNA, 13 bp, Artificial Sequence
  Oligonucleotide for detection of SNP TSC0040627
aattaactcctct

SEQ ID NO: 161339 - DNA, 13 bp, Artificial Sequence
  Oligonucleotide for detection of SNP TSC0040627
agaggatttaatt

SEQ ID NO: 161340 - DNA, 13 bp, Artificial Sequence
  Oligonucleotide for detection of SNP TSC0040627
aattaaatcctct

SEQ ID NO: 161341 - DNA, 13 bp, Artificial Sequence
  Oligonucleotide for detection of SNP TSC0040629
tataataatgttg

SEQ ID NO: 161342 - DNA, 13 bp, Artificial Sequence
  Oligonucleotide for detection of SNP TSC0040629
caacattattata

SEQ ID NO: 161343 - DNA, 13 bp, Artificial Sequence
  Oligonucleotide for detection of SNP TSC0040629
tataattatgttg

SEQ ID NO: 161344 - DNA, 13 bp, Artificial Sequence
  Oligonucleotide for detection of SNP TSC0040629
caacataattata

SEQ ID NO: 161345 - DNA, 13 bp, Artificial Sequence
  Oligonucleotide for detection of SNP TSC0040629
tataataatgtcg

SEQ ID NO: 161346 - DNA, 13 bp, Artificial Sequence
  Oligonucleotide for detection of SNP TSC0040629
cgacattattata

SEQ ID NO: 161347 - DNA, 13 bp, Artificial Sequence
  Oligonucleotide for detection of SNP TSC0040629
tataattatgtcg

SEQ ID NO: 161348 - DNA, 13 bp, Artificial Sequence
  Oligonucleotide for detection of SNP TSC0040629
cgacataattata

SEQ ID NO: 161349 - DNA, 13 bp, Artificial Sequence
  Oligonucleotide for detection of SNP TSC0040629
tgatattattgta

SEQ ID NO: 161350 - DNA, 13 bp, Artificial Sequence
  Oligonucleotide for detection of SNP TSC0040629
tacaataatatca

SEQ ID NO: 161351 - DNA, 13 bp, Artificial Sequence
  Oligonucleotide for detection of SNP TSC0040629
tgatataattgta

SEQ ID NO: 161352 - DNA, 13 bp, Artificial Sequence
  Oligonucleotide for detection of SNP TSC0040629
tacaattatatca

SEQ ID NO: 161353 - DNA, 13 bp, Artificial Sequence
  Oligonucleotide for detection of SNP TSC0040629
cgatattattgta

SEQ ID NO: 161354 - DNA, 13 bp, Artificial Sequence
  Oligonucleotide for detection of SNP TSC0040629
tacaataatatcg

SEQ ID NO: 161355 - DNA, 13 bp, Artificial Sequence
  Oligonucleotide for detection of SNP TSC0040629
cgatataattgta

SEQ ID NO: 161356 - DNA, 13 bp, Artificial Sequence
  Oligonucleotide for detection of SNP TSC0040629
tacaattatatcg

SEQ ID NO: 161357 - DNA, 13 bp, Artificial Sequence
  Oligonucleotide for detection of SNP TSC0040630
attgtaatttgay

SEQ ID NO: 161358 - DNA, 13 bp, Artificial Sequence
  Oligonucleotide for detection of SNP TSC0040630
rtcaaattacaat

SEQ ID NO: 161359 - DNA, 13 bp, Artificial Sequence
  Oligonucleotide for detection of SNP TSC0040630
attgtattttgay

SEQ ID NO: 161360 - DNA, 13 bp, Artificial Sequence
  Oligonucleotide for detection of SNP TSC0040630
rtcaaaatacaat

SEQ ID NO: 161361 - DNA, 13 bp, Artificial Sequence
  Oligonucleotide for detection of SNP TSC0040630
gttaggttataat

SEQ ID NO: 161362 - DNA, 13 bp, Artificial Sequence
  Oligonucleotide for detection of SNP TSC0040630
attataacctaac

SEQ ID NO: 161363 - DNA, 13 bp, Artificial Sequence
  Oligonucleotide for detection of SNP TSC0040630
gttagggtataat

SEQ ID NO: 161364 - DNA, 13 bp, Artificial Sequence
  Oligonucleotide for detection of SNP TSC0040630
attataccctaac

SEQ ID NO: 161365 - DNA, 13 bp, Artificial Sequence
  Oligonucleotide for detection of SNP TSC0040631
ggtgaaaaattat

SEQ ID NO: 161366 - DNA, 13 bp, Artificial Sequence
  Oligonucleotide for detection of SNP TSC0040631
ataatttttcacc

SEQ ID NO: 161367 - DNA, 13 bp, Artificial Sequence
  Oligonucleotide for detection of SNP TSC0040631
ggtgaagaattat

SEQ ID NO: 161368 - DNA, 13 bp, Artificial Sequence
  Oligonucleotide for detection of SNP TSC0040631
ataattcttcacc

SEQ ID NO: 161369 - DNA, 13 bp, Artificial Sequence
  Oligonucleotide for detection of SNP TSC0040632
ggttaatttggtg

SEQ ID NO: 161370 - DNA, 13 bp, Artificial Sequence
  Oligonucleotide for detection of SNP TSC0040632
caccaaattaacc

SEQ ID NO: 161371 - DNA, 13 bp, Artificial Sequence
  Oligonucleotide for detection of SNP TSC0040632
ggttaagttggtg

SEQ ID NO: 161372 - DNA, 13 bp, Artificial Sequence
  Oligonucleotide for detection of SNP TSC0040632
caccaacttaacc

SEQ ID NO: 161373 - DNA, 13 bp, Artificial Sequence
  Oligonucleotide for detection of SNP TSC0040632
tattagattagty

SEQ ID NO: 161374 - DNA, 13 bp, Artificial Sequence
  Oligonucleotide for detection of SNP TSC0040632
ractaatctaata

SEQ ID NO: 161375 - DNA, 13 bp, Artificial Sequence
  Oligonucleotide for detection of SNP TSC0040632
tattagtttagty

SEQ ID NO: 161376 - DNA, 13 bp, Artificial Sequence
  Oligonucleotide for detection of SNP TSC0040632
ractaaactaata

SEQ ID NO: 161377 - DNA, 13 bp, Artificial Sequence
  Oligonucleotide for detection of SNP TSC0040633
aaggttatagtga

SEQ ID NO: 161378 - DNA, 13 bp, Artificial Sequence
  Oligonucleotide for detection of SNP TSC0040633
tcactataacctt

SEQ ID NO: 161379 - DNA, 13 bp, Artificial Sequence
  Oligonucleotide for detection of SNP TSC0040634
ggttttttaatgy

SEQ ID NO: 161380 - DNA, 13 bp, Artificial Sequence
  Oligonucleotide for detection of SNP TSC0040634
rcattaaaaaacc

SEQ ID NO: 161381 - DNA, 13 bp, Artificial Sequence
  Oligonucleotide for detection of SNP TSC0040634
ggttttgtaatgy

SEQ ID NO: 161382 - DNA, 13 bp, Artificial Sequence
  Oligonucleotide for detection of SNP TSC0040634
rcattacaaaacc

SEQ ID NO: 161383 - DNA, 13 bp, Artificial Sequence
  Oligonucleotide for detection of SNP TSC0040634
gtattggaaaaty

SEQ ID NO: 161384 - DNA, 13 bp, Artificial Sequence
  Oligonucleotide for detection of SNP TSC0040634
rattttccaatac

SEQ ID NO: 161385 - DNA, 13 bp, Artificial Sequence
  Oligonucleotide for detection of SNP TSC0040634
gtattgtaaaaty

SEQ ID NO: 161386 - DNA, 13 bp, Artificial Sequence
  Oligonucleotide for detection of SNP TSC0040634
rattttacaatac

SEQ ID NO: 161387 - DNA, 13 bp, Artificial Sequence
  Oligonucleotide for detection of SNP TSC0040636
attaataaatttt

SEQ ID NO: 161388 - DNA, 13 bp, Artificial Sequence
  Oligonucleotide for detection of SNP TSC0040636
aaaatttattaat

SEQ ID NO: 161389 - DNA, 13 bp, Artificial Sequence
  Oligonucleotide for detection of SNP TSC0040636
attaattaatttt

SEQ ID NO: 161390 - DNA, 13 bp, Artificial Sequence
  Oligonucleotide for detection of SNP TSC0040636
aaaattaattaat

SEQ ID NO: 161391 - DNA, 13 bp, Artificial Sequence
  Oligonucleotide for detection of SNP TSC0040636
aagatttgttaat

SEQ ID NO: 161392 - DNA, 13 bp, Artificial Sequence
  Oligonucleotide for detection of SNP TSC0040636
attaacaaatctt

SEQ ID NO: 161393 - DNA, 13 bp, Artificial Sequence
  Oligonucleotide for detection of SNP TSC0040636
aagattggttaat

SEQ ID NO: 161394 - DNA, 13 bp, Artificial Sequence
  Oligonucleotide for detection of SNP TSC0040636
attaaccaatctt

SEQ ID NO: 161395 - DNA, 13 bp, Artificial Sequence
  Oligonucleotide for detection of SNP TSC0040637
gttgtaggttaaa

SEQ ID NO: 161396 - DNA, 13 bp, Artificial Sequence
  Oligonucleotide for detection of SNP TSC0040637
tttaacctacaac

SEQ ID NO: 161397 - DNA, 13 bp, Artificial Sequence
  Oligonucleotide for detection of SNP TSC0040637
gttgtaagttaaa

SEQ ID NO: 161398 - DNA, 13 bp, Artificial Sequence
  Oligonucleotide for detection of SNP TSC0040637
tttaacttacaac

SEQ ID NO: 161399 - DNA, 13 bp, Artificial Sequence
  Oligonucleotide for detection of SNP TSC0040638
gttagtatttatt

SEQ ID NO: 161400 - DNA, 13 bp, Artificial Sequence
  Oligonucleotide for detection of SNP TSC0040638
aataaatactaac

SEQ ID NO: 161401 - DNA, 13 bp, Artificial Sequence
  Oligonucleotide for detection of SNP TSC0040638
gttagtgtttatt

SEQ ID NO: 161402 - DNA, 13 bp, Artificial Sequence
  Oligonucleotide for detection of SNP TSC0040638
aataaacactaac

SEQ ID NO: 161403 - DNA, 13 bp, Artificial Sequence
  Oligonucleotide for detection of SNP TSC0040639
aggatcgtttgtg

SEQ ID NO: 161404 - DNA, 13 bp, Artificial Sequence
  Oligonucleotide for detection of SNP TSC0040639
cacaaacgatcct

SEQ ID NO: 161405 - DNA, 13 bp, Artificial Sequence
  Oligonucleotide for detection of SNP TSC0040639
tataaagggtttt

SEQ ID NO: 161406 - DNA, 13 bp, Artificial Sequence
  Oligonucleotide for detection of SNP TSC0040639
aaaaccctttata

SEQ ID NO: 161407 - DNA, 13 bp, Artificial Sequence
  Oligonucleotide for detection of SNP TSC0040639
tataaatggtttt

SEQ ID NO: 161408 - DNA, 13 bp, Artificial Sequence
  Oligonucleotide for detection of SNP TSC0040639
aaaaccatttata

SEQ ID NO: 161409 - DNA, 13 bp, Artificial Sequence
  Oligonucleotide for detection of SNP TSC0040639
tataaacggtttt

SEQ ID NO: 161410 - DNA, 13 bp, Artificial Sequence
  Oligonucleotide for detection of SNP TSC0040639
aaaaccgtttata

SEQ ID NO: 161411 - DNA, 13 bp, Artificial Sequence
  Oligonucleotide for detection of SNP TSC0040641
gaaagaattatty

SEQ ID NO: 161412 - DNA, 13 bp, Artificial Sequence
  Oligonucleotide for detection of SNP TSC0040641
raataattctttc

SEQ ID NO: 161413 - DNA, 13 bp, Artificial Sequence
  Oligonucleotide for detection of SNP TSC0040641
gaaagatttatty

SEQ ID NO: 161414 - DNA, 13 bp, Artificial Sequence
  Oligonucleotide for detection of SNP TSC0040641
raataaatctttc

SEQ ID NO: 161415 - DNA, 13 bp, Artificial Sequence
  Oligonucleotide for detection of SNP TSC0040641
gggtggtttttty

SEQ ID NO: 161416 - DNA, 13 bp, Artificial Sequence
  Oligonucleotide for detection of SNP TSC0040641
raaaaaaccaccc

SEQ ID NO: 161417 - DNA, 13 bp, Artificial Sequence
  Oligonucleotide for detection of SNP TSC0040641
gggtgggttttty

SEQ ID NO: 161418 - DNA, 13 bp, Artificial Sequence
  Oligonucleotide for detection of SNP TSC0040641
raaaaacccaccc

SEQ ID NO: 161419 - DNA, 13 bp, Artificial Sequence
  Oligonucleotide for detection of SNP TSC0040641
gggtggattttty

SEQ ID NO: 161420 - DNA, 13 bp, Artificial Sequence
  Oligonucleotide for detection of SNP TSC0040641
raaaaatccaccc

SEQ ID NO: 161421 - DNA, 13 bp, Artificial Sequence
  Oligonucleotide for detection of SNP TSC0040642
ggtgatttaatty

SEQ ID NO: 161422 - DNA, 13 bp, Artificial Sequence
  Oligonucleotide for detection of SNP TSC0040642
raattaaatcacc

SEQ ID NO: 161423 - DNA, 13 bp, Artificial Sequence
  Oligonucleotide for detection of SNP TSC0040642
ggtgatgtaatty

SEQ ID NO: 161424 - DNA, 13 bp, Artificial Sequence
  Oligonucleotide for detection of SNP TSC0040642
raattacatcacc

SEQ ID NO: 161425 - DNA, 13 bp, Artificial Sequence
  Oligonucleotide for detection of SNP TSC0040642
ggcgatttaatty

SEQ ID NO: 161426 - DNA, 13 bp, Artificial Sequence
  Oligonucleotide for detection of SNP TSC0040642
raattaaatcgcc

SEQ ID NO: 161427 - DNA, 13 bp, Artificial Sequence
  Oligonucleotide for detection of SNP TSC0040642
ggcgatgtaatty

SEQ ID NO: 161428 - DNA, 13 bp, Artificial Sequence
  Oligonucleotide for detection of SNP TSC0040642
raattacatcgcc

SEQ ID NO: 161429 - DNA, 13 bp, Artificial Sequence
  Oligonucleotide for detection of SNP TSC0040642
gggttgaattgty

SEQ ID NO: 161430 - DNA, 13 bp, Artificial Sequence
  Oligonucleotide for detection of SNP TSC0040642
racaattcaaccc

SEQ ID NO: 161431 - DNA, 13 bp, Artificial Sequence
  Oligonucleotide for detection of SNP TSC0040642
gggttgtattgty

SEQ ID NO: 161432 - DNA, 13 bp, Artificial Sequence
  Oligonucleotide for detection of SNP TSC0040642
racaatacaaccc

SEQ ID NO: 161433 - DNA, 13 bp, Artificial Sequence
  Oligonucleotide for detection of SNP TSC0040642
gggttgaatcgty

SEQ ID NO: 161434 - DNA, 13 bp, Artificial Sequence
  Oligonucleotide for detection of SNP TSC0040642
racgattcaaccc

SEQ ID NO: 161435 - DNA, 13 bp, Artificial Sequence
  Oligonucleotide for detection of SNP TSC0040642
gggttgtatcgty

SEQ ID NO: 161436 - DNA, 13 bp, Artificial Sequence
  Oligonucleotide for detection of SNP TSC0040642
racgatacaaccc

SEQ ID NO: 161437 - DNA, 13 bp, Artificial Sequence
  Oligonucleotide for detection of SNP TSC0040643
gtgatttaatttg

SEQ ID NO: 161438 - DNA, 13 bp, Artificial Sequence
  Oligonucleotide for detection of SNP TSC0040643
caaattaaatcac

SEQ ID NO: 161439 - DNA, 13 bp, Artificial Sequence
  Oligonucleotide for detection of SNP TSC0040643
gtgattgaatttg

SEQ ID NO: 161440 - DNA, 13 bp, Artificial Sequence
  Oligonucleotide for detection of SNP TSC0040643
caaattcaatcac

SEQ ID NO: 161441 - DNA, 13 bp, Artificial Sequence
  Oligonucleotide for detection of SNP TSC0040643
gcgatttaatttg

SEQ ID NO: 161442 - DNA, 13 bp, Artificial Sequence
  Oligonucleotide for detection of SNP TSC0040643
caaattaaatcgc

SEQ ID NO: 161443 - DNA, 13 bp, Artificial Sequence
  Oligonucleotide for detection of SNP TSC0040643
gcgattgaatttg

SEQ ID NO: 161444 - DNA, 13 bp, Artificial Sequence
  Oligonucleotide for detection of SNP TSC0040643
caaattcaatcgc

SEQ ID NO: 161445 - DNA, 13 bp, Artificial Sequence
  Oligonucleotide for detection of SNP TSC0040643
gtgatttaattcg

SEQ ID NO: 161446 - DNA, 13 bp, Artificial Sequence
  Oligonucleotide for detection of SNP TSC0040643
cgaattaaatcac

SEQ ID NO: 161447 - DNA, 13 bp, Artificial Sequence
  Oligonucleotide for detection of SNP TSC0040643
gtgattgaattcg

SEQ ID NO: 161448 - DNA, 13 bp, Artificial Sequence
  Oligonucleotide for detection of SNP TSC0040643
cgaattcaatcac

SEQ ID NO: 161449 - DNA, 13 bp, Artificial Sequence
  Oligonucleotide for detection of SNP TSC0040643
gcgatttaattcg

SEQ ID NO: 161450 - DNA, 13 bp, Artificial Sequence
  Oligonucleotide for detection of SNP TSC0040643
cgaattaaatcgc

SEQ ID NO: 161451 - DNA, 13 bp, Artificial Sequence
  Oligonucleotide for detection of SNP TSC0040643
gcgattgaattcg

SEQ ID NO: 161452 - DNA, 13 bp, Artificial Sequence
  Oligonucleotide for detection of SNP TSC0040643
cgaattcaatcgc

SEQ ID NO: 161453 - DNA, 13 bp, Artificial Sequence
  Oligonucleotide for detection of SNP TSC0040643
tgggttgaattgy

SEQ ID NO: 161454 - DNA, 13 bp, Artificial Sequence
  Oligonucleotide for detection of SNP TSC0040643
rcaattcaaccca

SEQ ID NO: 161455 - DNA, 13 bp, Artificial Sequence
  Oligonucleotide for detection of SNP TSC0040643
tgggtttaattgy

SEQ ID NO: 161456 - DNA, 13 bp, Artificial Sequence
  Oligonucleotide for detection of SNP TSC0040643
rcaattaaaccca

SEQ ID NO: 161457 - DNA, 13 bp, Artificial Sequence
  Oligonucleotide for detection of SNP TSC0040643
cgggttgaattgy

SEQ ID NO: 161458 - DNA, 13 bp, Artificial Sequence
  Oligonucleotide for detection of SNP TSC0040643
rcaattcaacccg

SEQ ID NO: 161459 - DNA, 13 bp, Artificial Sequence
  Oligonucleotide for detection of SNP TSC0040643
cgggtttaattgy

SEQ ID NO: 161460 - DNA, 13 bp, Artificial Sequence
  Oligonucleotide for detection of SNP TSC0040643
rcaattaaacccg

SEQ ID NO: 161461 - DNA, 13 bp, Artificial Sequence
  Oligonucleotide for detection of SNP TSC0040643
tgggttgaatcgy

SEQ ID NO: 161462 - DNA, 13 bp, Artificial Sequence
  Oligonucleotide for detection of SNP TSC0040643
rcgattcaaccca

SEQ ID NO: 161463 - DNA, 13 bp, Artificial Sequence
  Oligonucleotide for detection of SNP TSC0040643
tgggtttaatcgy

SEQ ID NO: 161464 - DNA, 13 bp, Artificial Sequence
  Oligonucleotide for detection of SNP TSC0040643
rcgattaaaccca

SEQ ID NO: 161465 - DNA, 13 bp, Artificial Sequence
  Oligonucleotide for detection of SNP TSC0040643
cgggttgaatcgy

SEQ ID NO: 161466 - DNA, 13 bp, Artificial Sequence
  Oligonucleotide for detection of SNP TSC0040643
rcgattcaacccg

SEQ ID NO: 161467 - DNA, 13 bp, Artificial Sequence
  Oligonucleotide for detection of SNP TSC0040643
cgggtttaatcgy

SEQ ID NO: 161468 - DNA, 13 bp, Artificial Sequence
  Oligonucleotide for detection of SNP TSC0040643
rcgattaaacccg

SEQ ID NO: 161469 - DNA, 13 bp, Artificial Sequence
  Oligonucleotide for detection of SNP TSC0040645
tataaaattttta

SEQ ID NO: 161470 - DNA, 13 bp, Artificial Sequence
  Oligonucleotide for detection of SNP TSC0040645
taaaaattttata

SEQ ID NO: 161471 - DNA, 13 bp, Artificial Sequence
  Oligonucleotide for detection of SNP TSC0040645
tataaatttttta

SEQ ID NO: 161472 - DNA, 13 bp, Artificial Sequence
  Oligonucleotide for detection of SNP TSC0040645
taaaaaatttata

SEQ ID NO: 161473 - DNA, 13 bp, Artificial Sequence
  Oligonucleotide for detection of SNP TSC0040645
taggaattttatg

SEQ ID NO: 161474 - DNA, 13 bp, Artificial Sequence
  Oligonucleotide for detection of SNP TSC0040645
cataaaattccta

SEQ ID NO: 161475 - DNA, 13 bp, Artificial Sequence
  Oligonucleotide for detection of SNP TSC0040645
taggaaatttatg

SEQ ID NO: 161476 - DNA, 13 bp, Artificial Sequence
  Oligonucleotide for detection of SNP TSC0040645
cataaatttccta

SEQ ID NO: 161477 - DNA, 13 bp, Artificial Sequence
  Oligonucleotide for detection of SNP TSC0040646
gagatgataggtt

SEQ ID NO: 161478 - DNA, 13 bp, Artificial Sequence
  Oligonucleotide for detection of SNP TSC0040646
aacctatcatctc

SEQ ID NO: 161479 - DNA, 13 bp, Artificial Sequence
  Oligonucleotide for detection of SNP TSC0040646
gagatggtaggtt

SEQ ID NO: 161480 - DNA, 13 bp, Artificial Sequence
  Oligonucleotide for detection of SNP TSC0040646
aacctaccatctc

SEQ ID NO: 161481 - DNA, 13 bp, Artificial Sequence
  Oligonucleotide for detection of SNP TSC0008157
ggtattaattggy

SEQ ID NO: 161482 - DNA, 13 bp, Artificial Sequence
  Oligonucleotide for detection of SNP TSC0008157
rccaattaatacc

SEQ ID NO: 161483 - DNA, 13 bp, Artificial Sequence
  Oligonucleotide for detection of SNP TSC0008157
ggtattgattggy

SEQ ID NO: 161484 - DNA, 13 bp, Artificial Sequence
  Oligonucleotide for detection of SNP TSC0008157
rccaatcaatacc

SEQ ID NO: 161485 - DNA, 13 bp, Artificial Sequence
  Oligonucleotide for detection of SNP TSC0008157
ggtatcgattggy

SEQ ID NO: 161486 - DNA, 13 bp, Artificial Sequence
  Oligonucleotide for detection of SNP TSC0008157
rccaatcgatacc

SEQ ID NO: 161487 - DNA, 13 bp, Artificial Sequence
  Oligonucleotide for detection of SNP TSC0008157
gttagttgataty

SEQ ID NO: 161488 - DNA, 13 bp, Artificial Sequence
  Oligonucleotide for detection of SNP TSC0008157
ratatcaactaac

SEQ ID NO: 161489 - DNA, 13 bp, Artificial Sequence
  Oligonucleotide for detection of SNP TSC0008157
gttagtcgataty

SEQ ID NO: 161490 - DNA, 13 bp, Artificial Sequence
  Oligonucleotide for detection of SNP TSC0008157
ratatcgactaac

SEQ ID NO: 161491 - DNA, 13 bp, Artificial Sequence
  Oligonucleotide for detection of SNP TSC0040647
tttttatttttgt

SEQ ID NO: 161492 - DNA, 13 bp, Artificial Sequence
  Oligonucleotide for detection of SNP TSC0040647
acaaaaataaaaa

SEQ ID NO: 161493 - DNA, 13 bp, Artificial Sequence
  Oligonucleotide for detection of SNP TSC0040647
tttttagttttgt

SEQ ID NO: 161494 - DNA, 13 bp, Artificial Sequence
  Oligonucleotide for detection of SNP TSC0040647
acaaaactaaaaa

SEQ ID NO: 161495 - DNA, 13 bp, Artificial Sequence
  Oligonucleotide for detection of SNP TSC0040647
atagaaatgaagg

SEQ ID NO: 161496 - DNA, 13 bp, Artificial Sequence
  Oligonucleotide for detection of SNP TSC0040647
ccttcatttctat

SEQ ID NO: 161497 - DNA, 13 bp, Artificial Sequence
  Oligonucleotide for detection of SNP TSC0040647
atagaattgaagg

SEQ ID NO: 161498 - DNA, 13 bp, Artificial Sequence
  Oligonucleotide for detection of SNP TSC0040647
ccttcaattctat

SEQ ID NO: 161499 - DNA, 13 bp, Artificial Sequence
  Oligonucleotide for detection of SNP TSC0040650
gaaaagagatagy

SEQ ID NO: 161500 - DNA, 13 bp, Artificial Sequence
  Oligonucleotide for detection of SNP TSC0040650
rctatctcttttc

SEQ ID NO: 161501 - DNA, 13 bp, Artificial Sequence
  Oligonucleotide for detection of SNP TSC0040650
gaaaagtgatagy

SEQ ID NO: 161502 - DNA, 13 bp, Artificial Sequence
  Oligonucleotide for detection of SNP TSC0040650
rctatcacttttc

SEQ ID NO: 161503 - DNA, 13 bp, Artificial Sequence
  Oligonucleotide for detection of SNP TSC0040652
tatatggtgagtt

SEQ ID NO: 161504 - DNA, 13 bp, Artificial Sequence
  Oligonucleotide for detection of SNP TSC0040652
aactcaccatata

SEQ ID NO: 161505 - DNA, 13 bp, Artificial Sequence
  Oligonucleotide for detection of SNP TSC0040652
tatatgatgagtt

SEQ ID NO: 161506 - DNA, 13 bp, Artificial Sequence
  Oligonucleotide for detection of SNP TSC0040652
aactcatcatata

SEQ ID NO: 161507 - DNA, 13 bp, Artificial Sequence
  Oligonucleotide for detection of SNP TSC0040653
tttataataggty

SEQ ID NO: 161508 - DNA, 13 bp, Artificial Sequence
  Oligonucleotide for detection of SNP TSC0040653
racctattataaa

SEQ ID NO: 161509 - DNA, 13 bp, Artificial Sequence
  Oligonucleotide for detection of SNP TSC0040653
tttatattaggty

SEQ ID NO: 161510 - DNA, 13 bp, Artificial Sequence
  Oligonucleotide for detection of SNP TSC0040653
racctaatataaa

SEQ ID NO: 161511 - DNA, 13 bp, Artificial Sequence
  Oligonucleotide for detection of SNP TSC0040653
ggtttattgtggg

SEQ ID NO: 161512 - DNA, 13 bp, Artificial Sequence
  Oligonucleotide for detection of SNP TSC0040653
cccacaataaacc

SEQ ID NO: 161513 - DNA, 13 bp, Artificial Sequence
  Oligonucleotide for detection of SNP TSC0040653
ggtttagtgtggg

SEQ ID NO: 161514 - DNA, 13 bp, Artificial Sequence
  Oligonucleotide for detection of SNP TSC0040653
cccacactaaacc

SEQ ID NO: 161515 - DNA, 13 bp, Artificial Sequence
  Oligonucleotide for detection of SNP TSC0040654
tgaatgaatatgt

SEQ ID NO: 161516 - DNA, 13 bp, Artificial Sequence
  Oligonucleotide for detection of SNP TSC0040654
acatattcattca

SEQ ID NO: 161517 - DNA, 13 bp, Artificial Sequence
  Oligonucleotide for detection of SNP TSC0040654
tgaatggatatgt

SEQ ID NO: 161518 - DNA, 13 bp, Artificial Sequence
  Oligonucleotide for detection of SNP TSC0040654
acatatccattca

SEQ ID NO: 161519 - DNA, 13 bp, Artificial Sequence
  Oligonucleotide for detection of SNP TSC0040655
tattgtttttttt

SEQ ID NO: 161520 - DNA, 13 bp, Artificial Sequence
  Oligonucleotide for detection of SNP TSC0040655
aaaaaaaacaata

SEQ ID NO: 161521 - DNA, 13 bp, Artificial Sequence
  Oligonucleotide for detection of SNP TSC0040655
aggaagaatagtg

SEQ ID NO: 161522 - DNA, 13 bp, Artificial Sequence
  Oligonucleotide for detection of SNP TSC0040655
cactattcttcct

SEQ ID NO: 161523 - DNA, 13 bp, Artificial Sequence
  Oligonucleotide for detection of SNP TSC0040655
aggaagtatagtg

SEQ ID NO: 161524 - DNA, 13 bp, Artificial Sequence
  Oligonucleotide for detection of SNP TSC0040655
cactatacttcct

SEQ ID NO: 161525 - DNA, 13 bp, Artificial Sequence
  Oligonucleotide for detection of SNP TSC0040656
tattgtttttgty

SEQ ID NO: 161526 - DNA, 13 bp, Artificial Sequence
  Oligonucleotide for detection of SNP TSC0040656
racaaaaacaata

SEQ ID NO: 161527 - DNA, 13 bp, Artificial Sequence
  Oligonucleotide for detection of SNP TSC0040656
tattgtgtttgty

SEQ ID NO: 161528 - DNA, 13 bp, Artificial Sequence
  Oligonucleotide for detection of SNP TSC0040656
racaaacacaata

SEQ ID NO: 161529 - DNA, 13 bp, Artificial Sequence
  Oligonucleotide for detection of SNP TSC0040656
ggtagaaatagta

SEQ ID NO: 161530 - DNA, 13 bp, Artificial Sequence
  Oligonucleotide for detection of SNP TSC0040656
tactatttctacc

SEQ ID NO: 161531 - DNA, 13 bp, Artificial Sequence
  Oligonucleotide for detection of SNP TSC0040656
ggtagatatagta

SEQ ID NO: 161532 - DNA, 13 bp, Artificial Sequence
  Oligonucleotide for detection of SNP TSC0040656
tactatatctacc

SEQ ID NO: 161533 - DNA, 13 bp, Artificial Sequence
  Oligonucleotide for detection of SNP TSC0040659
aggatttatatga

SEQ ID NO: 161534 - DNA, 13 bp, Artificial Sequence
  Oligonucleotide for detection of SNP TSC0040659
tcatataaatcct

SEQ ID NO: 161535 - DNA, 13 bp, Artificial Sequence
  Oligonucleotide for detection of SNP TSC0040659
aggattgatatga

SEQ ID NO: 161536 - DNA, 13 bp, Artificial Sequence
  Oligonucleotide for detection of SNP TSC0040659
tcatatcaatcct

SEQ ID NO: 161537 - DNA, 13 bp, Artificial Sequence
  Oligonucleotide for detection of SNP TSC0040659
aggatcgatatga

SEQ ID NO: 161538 - DNA, 13 bp, Artificial Sequence
  Oligonucleotide for detection of SNP TSC0040659
tcatatcgatcct

SEQ ID NO: 161539 - DNA, 13 bp, Artificial Sequence
  Oligonucleotide for detection of SNP TSC0040660
tagtgtagggtgg

SEQ ID NO: 161540 - DNA, 13 bp, Artificial Sequence
  Oligonucleotide for detection of SNP TSC0040660
ccaccctacacta

SEQ ID NO: 161541 - DNA, 13 bp, Artificial Sequence
  Oligonucleotide for detection of SNP TSC0040660
tagtgtggggtgg

SEQ ID NO: 161542 - DNA, 13 bp, Artificial Sequence
  Oligonucleotide for detection of SNP TSC0040660
ccaccccacacta

SEQ ID NO: 161543 - DNA, 13 bp, Artificial Sequence
  Oligonucleotide for detection of SNP TSC0040663
tttttatgtatay

SEQ ID NO: 161544 - DNA, 13 bp, Artificial Sequence
  Oligonucleotide for detection of SNP TSC0040663
rtatacataaaaa

SEQ ID NO: 161545 - DNA, 13 bp, Artificial Sequence
  Oligonucleotide for detection of SNP TSC0040663
tttttaggtatay

SEQ ID NO: 161546 - DNA, 13 bp, Artificial Sequence
  Oligonucleotide for detection of SNP TSC0040663
rtatacctaaaaa

SEQ ID NO: 161547 - DNA, 13 bp, Artificial Sequence
  Oligonucleotide for detection of SNP TSC0040663
gtatatatgaggg

SEQ ID NO: 161548 - DNA, 13 bp, Artificial Sequence
  Oligonucleotide for detection of SNP TSC0040663
ccctcatatatac

SEQ ID NO: 161549 - DNA, 13 bp, Artificial Sequence
  Oligonucleotide for detection of SNP TSC0040663
gtatatttgaggg

SEQ ID NO: 161550 - DNA, 13 bp, Artificial Sequence
  Oligonucleotide for detection of SNP TSC0040663
ccctcaaatatac

SEQ ID NO: 161551 - DNA, 13 bp, Artificial Sequence
  Oligonucleotide for detection of SNP TSC0040664
ggagtatagagag

SEQ ID NO: 161552 - DNA, 13 bp, Artificial Sequence
  Oligonucleotide for detection of SNP TSC0040664
ctctctatactcc

SEQ ID NO: 161553 - DNA, 13 bp, Artificial Sequence
  Oligonucleotide for detection of SNP TSC0040664
ggagtagagagag

SEQ ID NO: 161554 - DNA, 13 bp, Artificial Sequence
  Oligonucleotide for detection of SNP TSC0040664
ctctctctactcc

SEQ ID NO: 161555 - DNA, 13 bp, Artificial Sequence
  Oligonucleotide for detection of SNP TSC0040668
aaatgcgtagtta

SEQ ID NO: 161556 - DNA, 13 bp, Artificial Sequence
  Oligonucleotide for detection of SNP TSC0040668
taactacgcattt

SEQ ID NO: 161557 - DNA, 13 bp, Artificial Sequence
  Oligonucleotide for detection of SNP TSC0040668
tggttatgtattt

SEQ ID NO: 161558 - DNA, 13 bp, Artificial Sequence
  Oligonucleotide for detection of SNP TSC0040668
aaatacataacca

SEQ ID NO: 161559 - DNA, 13 bp, Artificial Sequence
  Oligonucleotide for detection of SNP TSC0040668
tggttacgtattt

SEQ ID NO: 161560 - DNA, 13 bp, Artificial Sequence
  Oligonucleotide for detection of SNP TSC0040668
aaatacgtaacca

SEQ ID NO: 161561 - DNA, 13 bp, Artificial Sequence
  Oligonucleotide for detection of SNP TSC0040670
gttaatgtggtga

SEQ ID NO: 161562 - DNA, 13 bp, Artificial Sequence
  Oligonucleotide for detection of SNP TSC0040670
tcaccacattaac

SEQ ID NO: 161563 - DNA, 13 bp, Artificial Sequence
  Oligonucleotide for detection of SNP TSC0040670
gttaacgtggtga

SEQ ID NO: 161564 - DNA, 13 bp, Artificial Sequence
  Oligonucleotide for detection of SNP TSC0040670
tcaccacgttaac

SEQ ID NO: 161565 - DNA, 13 bp, Artificial Sequence
  Oligonucleotide for detection of SNP TSC0040670
gttaatgtggcga

SEQ ID NO: 161566 - DNA, 13 bp, Artificial Sequence
  Oligonucleotide for detection of SNP TSC0040670
tcgccacattaac

SEQ ID NO: 161567 - DNA, 13 bp, Artificial Sequence
  Oligonucleotide for detection of SNP TSC0040670
gttaacgtggcga

SEQ ID NO: 161568 - DNA, 13 bp, Artificial Sequence
  Oligonucleotide for detection of SNP TSC0040670
tcgccacgttaac

SEQ ID NO: 161569 - DNA, 13 bp, Artificial Sequence
  Oligonucleotide for detection of SNP TSC0040670
ttgttacgttggy

SEQ ID NO: 161570 - DNA, 13 bp, Artificial Sequence
  Oligonucleotide for detection of SNP TSC0040670
rccaacgtaacaa

SEQ ID NO: 161571 - DNA, 13 bp, Artificial Sequence
  Oligonucleotide for detection of SNP TSC0040670
tcgttacgttggy

SEQ ID NO: 161572 - DNA, 13 bp, Artificial Sequence
  Oligonucleotide for detection of SNP TSC0040670
rccaacgtaacga

SEQ ID NO: 161573 - DNA, 13 bp, Artificial Sequence
  Oligonucleotide for detection of SNP TSC0040671
gatttatagtaay

SEQ ID NO: 161574 - DNA, 13 bp, Artificial Sequence
  Oligonucleotide for detection of SNP TSC0040671
rttactataaatc

SEQ ID NO: 161575 - DNA, 13 bp, Artificial Sequence
  Oligonucleotide for detection of SNP TSC0040671
gatttagagtaay

SEQ ID NO: 161576 - DNA, 13 bp, Artificial Sequence
  Oligonucleotide for detection of SNP TSC0040671
rttactctaaatc

SEQ ID NO: 161577 - DNA, 13 bp, Artificial Sequence
  Oligonucleotide for detection of SNP TSC0040671
gttgttataggty

SEQ ID NO: 161578 - DNA, 13 bp, Artificial Sequence
  Oligonucleotide for detection of SNP TSC0040671
racctataacaac

SEQ ID NO: 161579 - DNA, 13 bp, Artificial Sequence
  Oligonucleotide for detection of SNP TSC0040671
gttgttttaggty

SEQ ID NO: 161580 - DNA, 13 bp, Artificial Sequence
  Oligonucleotide for detection of SNP TSC0040671
racctaaaacaac

SEQ ID NO: 161581 - DNA, 13 bp, Artificial Sequence
  Oligonucleotide for detection of SNP TSC0040672
tggttaatgttgg

SEQ ID NO: 161582 - DNA, 13 bp, Artificial Sequence
  Oligonucleotide for detection of SNP TSC0040672
ccaacattaacca

SEQ ID NO: 161583 - DNA, 13 bp, Artificial Sequence
  Oligonucleotide for detection of SNP TSC0040672
tggttagtgttgg

SEQ ID NO: 161584 - DNA, 13 bp, Artificial Sequence
  Oligonucleotide for detection of SNP TSC0040672
ccaacactaacca

SEQ ID NO: 161585 - DNA, 13 bp, Artificial Sequence
  Oligonucleotide for detection of SNP TSC0040672
tggttaacgttgg

SEQ ID NO: 161586 - DNA, 13 bp, Artificial Sequence
  Oligonucleotide for detection of SNP TSC0040672
ccaacgttaacca

SEQ ID NO: 161587 - DNA, 13 bp, Artificial Sequence
  Oligonucleotide for detection of SNP TSC0040672
tggttagcgttgg

SEQ ID NO: 161588 - DNA, 13 bp, Artificial Sequence
  Oligonucleotide for detection of SNP TSC0040672
ccaacgctaacca

SEQ ID NO: 161589 - DNA, 13 bp, Artificial Sequence
  Oligonucleotide for detection of SNP TSC0040673
tagaagaaagtag

SEQ ID NO: 161590 - DNA, 13 bp, Artificial Sequence
  Oligonucleotide for detection of SNP TSC0040673
ctactttcttcta

SEQ ID NO: 161591 - DNA, 13 bp, Artificial Sequence
  Oligonucleotide for detection of SNP TSC0040673
tagaagtaagtag

SEQ ID NO: 161592 - DNA, 13 bp, Artificial Sequence
  Oligonucleotide for detection of SNP TSC0040673
ctacttacttcta

SEQ ID NO: 161593 - DNA, 13 bp, Artificial Sequence
  Oligonucleotide for detection of SNP TSC0040677
gagtgtagataaa

SEQ ID NO: 161594 - DNA, 13 bp, Artificial Sequence
  Oligonucleotide for detection of SNP TSC0040677
tttatctacactc

SEQ ID NO: 161595 - DNA, 13 bp, Artificial Sequence
  Oligonucleotide for detection of SNP TSC0040677
gagtgttgataaa

SEQ ID NO: 161596 - DNA, 13 bp, Artificial Sequence
  Oligonucleotide for detection of SNP TSC0040677
tttatcaacactc

SEQ ID NO: 161597 - DNA, 13 bp, Artificial Sequence
  Oligonucleotide for detection of SNP TSC0040677
gagcgtagataaa

SEQ ID NO: 161598 - DNA, 13 bp, Artificial Sequence
  Oligonucleotide for detection of SNP TSC0040677
tttatctacgctc

SEQ ID NO: 161599 - DNA, 13 bp, Artificial Sequence
  Oligonucleotide for detection of SNP TSC0040677
gagcgttgataaa

SEQ ID NO: 161600 - DNA, 13 bp, Artificial Sequence
  Oligonucleotide for detection of SNP TSC0040677
tttatcaacgctc

SEQ ID NO: 161601 - DNA, 13 bp, Artificial Sequence
  Oligonucleotide for detection of SNP TSC0040677
tttgtttgcgtty

SEQ ID NO: 161602 - DNA, 13 bp, Artificial Sequence
  Oligonucleotide for detection of SNP TSC0040677
raacgcaaacaaa

SEQ ID NO: 161603 - DNA, 13 bp, Artificial Sequence
  Oligonucleotide for detection of SNP TSC0008770
gaaaattaaaagg

SEQ ID NO: 161604 - DNA, 13 bp, Artificial Sequence
  Oligonucleotide for detection of SNP TSC0008770
ccttttaattttc

SEQ ID NO: 161605 - DNA, 13 bp, Artificial Sequence
  Oligonucleotide for detection of SNP TSC0008770
gaaaatgaaaagg

SEQ ID NO: 161606 - DNA, 13 bp, Artificial Sequence
  Oligonucleotide for detection of SNP TSC0008770
ccttttcattttc

SEQ ID NO: 161607 - DNA, 13 bp, Artificial Sequence
  Oligonucleotide for detection of SNP TSC0040678
gtaatttagttaa

SEQ ID NO: 161608 - DNA, 13 bp, Artificial Sequence
  Oligonucleotide for detection of SNP TSC0040678
ttaactaaattac

SEQ ID NO: 161609 - DNA, 13 bp, Artificial Sequence
  Oligonucleotide for detection of SNP TSC0040678
gtaattgagttaa

SEQ ID NO: 161610 - DNA, 13 bp, Artificial Sequence
  Oligonucleotide for detection of SNP TSC0040678
ttaactcaattac

SEQ ID NO: 161611 - DNA, 13 bp, Artificial Sequence
  Oligonucleotide for detection of SNP TSC0040678
gtaatcgagttaa

SEQ ID NO: 161612 - DNA, 13 bp, Artificial Sequence
  Oligonucleotide for detection of SNP TSC0040678
ttaactcgattac

SEQ ID NO: 161613 - DNA, 13 bp, Artificial Sequence
  Oligonucleotide for detection of SNP TSC0040678
ttagttggattgy

SEQ ID NO: 161614 - DNA, 13 bp, Artificial Sequence
  Oligonucleotide for detection of SNP TSC0040678
rcaatccaactaa

SEQ ID NO: 161615 - DNA, 13 bp, Artificial Sequence
  Oligonucleotide for detection of SNP TSC0040678
ttagtttgattgy

SEQ ID NO: 161616 - DNA, 13 bp, Artificial Sequence
  Oligonucleotide for detection of SNP TSC0040678
rcaatcaaactaa

SEQ ID NO: 161617 - DNA, 13 bp, Artificial Sequence
  Oligonucleotide for detection of SNP TSC0040678
ttagttcgattgy

SEQ ID NO: 161618 - DNA, 13 bp, Artificial Sequence
  Oligonucleotide for detection of SNP TSC0040678
rcaatcgaactaa

SEQ ID NO: 161619 - DNA, 13 bp, Artificial Sequence
  Oligonucleotide for detection of SNP TSC0040679
aattagatttatg

SEQ ID NO: 161620 - DNA, 13 bp, Artificial Sequence
  Oligonucleotide for detection of SNP TSC0040679
cataaatctaatt

SEQ ID NO: 161621 - DNA, 13 bp, Artificial Sequence
  Oligonucleotide for detection of SNP TSC0040679
aattagttttatg

SEQ ID NO: 161622 - DNA, 13 bp, Artificial Sequence
  Oligonucleotide for detection of SNP TSC0040679
cataaaactaatt

SEQ ID NO: 161623 - DNA, 13 bp, Artificial Sequence
  Oligonucleotide for detection of SNP TSC0040679
tatgagtttgatt

SEQ ID NO: 161624 - DNA, 13 bp, Artificial Sequence
  Oligonucleotide for detection of SNP TSC0040679
aatcaaactcata

SEQ ID NO: 161625 - DNA, 13 bp, Artificial Sequence
  Oligonucleotide for detection of SNP TSC0040679
tatgagattgatt

SEQ ID NO: 161626 - DNA, 13 bp, Artificial Sequence
  Oligonucleotide for detection of SNP TSC0040679
aatcaatctcata

SEQ ID NO: 161627 - DNA, 13 bp, Artificial Sequence
  Oligonucleotide for detection of SNP TSC0040682
tatttttatgtat

SEQ ID NO: 161628 - DNA, 13 bp, Artificial Sequence
  Oligonucleotide for detection of SNP TSC0040682
atacataaaaata

SEQ ID NO: 161629 - DNA, 13 bp, Artificial Sequence
  Oligonucleotide for detection of SNP TSC0040683
ataaatagtaagt

SEQ ID NO: 161630 - DNA, 13 bp, Artificial Sequence
  Oligonucleotide for detection of SNP TSC0040683
acttactatttat

SEQ ID NO: 161631 - DNA, 13 bp, Artificial Sequence
  Oligonucleotide for detection of SNP TSC0040683
ataaatggtaagt

SEQ ID NO: 161632 - DNA, 13 bp, Artificial Sequence
  Oligonucleotide for detection of SNP TSC0040683
acttaccatttat

SEQ ID NO: 161633 - DNA, 13 bp, Artificial Sequence
  Oligonucleotide for detection of SNP TSC0040687
agtttaatgtaat

SEQ ID NO: 161634 - DNA, 13 bp, Artificial Sequence
  Oligonucleotide for detection of SNP TSC0040687
attacattaaact

SEQ ID NO: 161635 - DNA, 13 bp, Artificial Sequence
  Oligonucleotide for detection of SNP TSC0040687
agtttagtgtaat

SEQ ID NO: 161636 - DNA, 13 bp, Artificial Sequence
  Oligonucleotide for detection of SNP TSC0040687
attacactaaact

SEQ ID NO: 161637 - DNA, 13 bp, Artificial Sequence
  Oligonucleotide for detection of SNP TSC0040688
ataataaaatttg

SEQ ID NO: 161638 - DNA, 13 bp, Artificial Sequence
  Oligonucleotide for detection of SNP TSC0040688
caaattttattat

SEQ ID NO: 161639 - DNA, 13 bp, Artificial Sequence
  Oligonucleotide for detection of SNP TSC0040688
ataatagaatttg

SEQ ID NO: 161640 - DNA, 13 bp, Artificial Sequence
  Oligonucleotide for detection of SNP TSC0040688
caaattctattat

SEQ ID NO: 161641 - DNA, 13 bp, Artificial Sequence
  Oligonucleotide for detection of SNP TSC0006815
gaagggatagttt

SEQ ID NO: 161642 - DNA, 13 bp, Artificial Sequence
  Oligonucleotide for detection of SNP TSC0006815
aaactatcccttc

SEQ ID NO: 161643 - DNA, 13 bp, Artificial Sequence
  Oligonucleotide for detection of SNP TSC0006815
gaagggttagttt

SEQ ID NO: 161644 - DNA, 13 bp, Artificial Sequence
  Oligonucleotide for detection of SNP TSC0006815
aaactaacccttc

SEQ ID NO: 161645 - DNA, 13 bp, Artificial Sequence
  Oligonucleotide for detection of SNP TSC0040691
aggttttgggggg

SEQ ID NO: 161646 - DNA, 13 bp, Artificial Sequence
  Oligonucleotide for detection of SNP TSC0040691
ccccccaaaacct

SEQ ID NO: 161647 - DNA, 13 bp, Artificial Sequence
  Oligonucleotide for detection of SNP TSC0040691
aggtttggggggg

SEQ ID NO: 161648 - DNA, 13 bp, Artificial Sequence
  Oligonucleotide for detection of SNP TSC0040691
cccccccaaacct

SEQ ID NO: 161649 - DNA, 13 bp, Artificial Sequence
  Oligonucleotide for detection of SNP TSC0040693
gtttttgtgagat

SEQ ID NO: 161650 - DNA, 13 bp, Artificial Sequence
  Oligonucleotide for detection of SNP TSC0040693
atctcacaaaaac

SEQ ID NO: 161651 - DNA, 13 bp, Artificial Sequence
  Oligonucleotide for detection of SNP TSC0040693
gtttttatgagat

SEQ ID NO: 161652 - DNA, 13 bp, Artificial Sequence
  Oligonucleotide for detection of SNP TSC0040693
atctcataaaaac

SEQ ID NO: 161653 - DNA, 13 bp, Artificial Sequence
  Oligonucleotide for detection of SNP TSC0040698
ttgggtattaggg

SEQ ID NO: 161654 - DNA, 13 bp, Artificial Sequence
  Oligonucleotide for detection of SNP TSC0040698
ccctaatacccaa

SEQ ID NO: 161655 - DNA, 13 bp, Artificial Sequence
  Oligonucleotide for detection of SNP TSC0040698
ttgggttttaggg

SEQ ID NO: 161656 - DNA, 13 bp, Artificial Sequence
  Oligonucleotide for detection of SNP TSC0040698
ccctaaaacccaa

SEQ ID NO: 161657 - DNA, 13 bp, Artificial Sequence
  Oligonucleotide for detection of SNP TSC0040698
ttttaaagtttaa

SEQ ID NO: 161658 - DNA, 13 bp, Artificial Sequence
  Oligonucleotide for detection of SNP TSC0040698
ttaaactttaaaa

SEQ ID NO: 161659 - DNA, 13 bp, Artificial Sequence
  Oligonucleotide for detection of SNP TSC0040699
gtaggaaaatagy

SEQ ID NO: 161660 - DNA, 13 bp, Artificial Sequence
  Oligonucleotide for detection of SNP TSC0040699
rctattttcctac

SEQ ID NO: 161661 - DNA, 13 bp, Artificial Sequence
  Oligonucleotide for detection of SNP TSC0040699
gtaggagaatagy

SEQ ID NO: 161662 - DNA, 13 bp, Artificial Sequence
  Oligonucleotide for detection of SNP TSC0040699
rctattctcctac

SEQ ID NO: 161663 - DNA, 13 bp, Artificial Sequence
  Oligonucleotide for detection of SNP TSC0040701
tgtatgtggaaat

SEQ ID NO: 161664 - DNA, 13 bp, Artificial Sequence
  Oligonucleotide for detection of SNP TSC0040701
atttccacataca

SEQ ID NO: 161665 - DNA, 13 bp, Artificial Sequence
  Oligonucleotide for detection of SNP TSC0040701
tgtatggggaaat

SEQ ID NO: 161666 - DNA, 13 bp, Artificial Sequence
  Oligonucleotide for detection of SNP TSC0040701
atttccccataca

SEQ ID NO: 161667 - DNA, 13 bp, Artificial Sequence
  Oligonucleotide for detection of SNP TSC0040701
tgtatgcggaaat

SEQ ID NO: 161668 - DNA, 13 bp, Artificial Sequence
  Oligonucleotide for detection of SNP TSC0040701
atttccgcataca

SEQ ID NO: 161669 - DNA, 13 bp, Artificial Sequence
  Oligonucleotide for detection of SNP TSC0040701
atttttgtatgta

SEQ ID NO: 161670 - DNA, 13 bp, Artificial Sequence
  Oligonucleotide for detection of SNP TSC0040701
tacatacaaaaat

SEQ ID NO: 161671 - DNA, 13 bp, Artificial Sequence
  Oligonucleotide for detection of SNP TSC0040701
atttttttatgta

SEQ ID NO: 161672 - DNA, 13 bp, Artificial Sequence
  Oligonucleotide for detection of SNP TSC0040701
tacataaaaaaat

SEQ ID NO: 161673 - DNA, 13 bp, Artificial Sequence
  Oligonucleotide for detection of SNP TSC0040701
attttcgtatgta

SEQ ID NO: 161674 - DNA, 13 bp, Artificial Sequence
  Oligonucleotide for detection of SNP TSC0040701
tacatacgaaaat

SEQ ID NO: 161675 - DNA, 13 bp, Artificial Sequence
  Oligonucleotide for detection of SNP TSC0040702
tggtgaatttaag

SEQ ID NO: 161676 - DNA, 13 bp, Artificial Sequence
  Oligonucleotide for detection of SNP TSC0040702
cttaaattcacca

SEQ ID NO: 161677 - DNA, 13 bp, Artificial Sequence
  Oligonucleotide for detection of SNP TSC0040702
tggtgattttaag

SEQ ID NO: 161678 - DNA, 13 bp, Artificial Sequence
  Oligonucleotide for detection of SNP TSC0040702
cttaaaatcacca

SEQ ID NO: 161679 - DNA, 13 bp, Artificial Sequence
  Oligonucleotide for detection of SNP TSC0040702
tttagatttatta

SEQ ID NO: 161680 - DNA, 13 bp, Artificial Sequence
  Oligonucleotide for detection of SNP TSC0040702
taataaatctaaa

SEQ ID NO: 161681 - DNA, 13 bp, Artificial Sequence
  Oligonucleotide for detection of SNP TSC0040702
tttagagttatta

SEQ ID NO: 161682 - DNA, 13 bp, Artificial Sequence
  Oligonucleotide for detection of SNP TSC0040702
taataactctaaa

SEQ ID NO: 161683 - DNA, 13 bp, Artificial Sequence
  Oligonucleotide for detection of SNP TSC0040703
gtattattattta

SEQ ID NO: 161684 - DNA, 13 bp, Artificial Sequence
  Oligonucleotide for detection of SNP TSC0040703
taaataataatac

SEQ ID NO: 161685 - DNA, 13 bp, Artificial Sequence
  Oligonucleotide for detection of SNP TSC0040703
tagatattgatay

SEQ ID NO: 161686 - DNA, 13 bp, Artificial Sequence
  Oligonucleotide for detection of SNP TSC0040703
rtatcaatatcta

SEQ ID NO: 161687 - DNA, 13 bp, Artificial Sequence
  Oligonucleotide for detection of SNP TSC0040703
tagataatgatay

SEQ ID NO: 161688 - DNA, 13 bp, Artificial Sequence
  Oligonucleotide for detection of SNP TSC0040703
rtatcattatcta

SEQ ID NO: 161689 - DNA, 13 bp, Artificial Sequence
  Oligonucleotide for detection of SNP TSC0040704
taaattgtagtat

SEQ ID NO: 161690 - DNA, 13 bp, Artificial Sequence
  Oligonucleotide for detection of SNP TSC0040704
atactacaattta

SEQ ID NO: 161691 - DNA, 13 bp, Artificial Sequence
  Oligonucleotide for detection of SNP TSC0040704
taaattatagtat

SEQ ID NO: 161692 - DNA, 13 bp, Artificial Sequence
  Oligonucleotide for detection of SNP TSC0040704
atactataattta

SEQ ID NO: 161693 - DNA, 13 bp, Artificial Sequence
  Oligonucleotide for detection of SNP TSC0040705
tttttagaataga

SEQ ID NO: 161694 - DNA, 13 bp, Artificial Sequence
  Oligonucleotide for detection of SNP TSC0040705
tctattctaaaaa

SEQ ID NO: 161695 - DNA, 13 bp, Artificial Sequence
  Oligonucleotide for detection of SNP TSC0040705
tttttaaaataga

SEQ ID NO: 161696 - DNA, 13 bp, Artificial Sequence
  Oligonucleotide for detection of SNP TSC0040705
tctattttaaaaa

SEQ ID NO: 161697 - DNA, 13 bp, Artificial Sequence
  Oligonucleotide for detection of SNP TSC0040708
attataatgagat

SEQ ID NO: 161698 - DNA, 13 bp, Artificial Sequence
  Oligonucleotide for detection of SNP TSC0040708
atctcattataat

SEQ ID NO: 161699 - DNA, 13 bp, Artificial Sequence
  Oligonucleotide for detection of SNP TSC0040708
attatagtgagat

SEQ ID NO: 161700 - DNA, 13 bp, Artificial Sequence
  Oligonucleotide for detection of SNP TSC0040708
atctcactataat

SEQ ID NO: 161701 - DNA, 13 bp, Artificial Sequence
  Oligonucleotide for detection of SNP TSC0005192
tatttaaaaattg

SEQ ID NO: 161702 - DNA, 13 bp, Artificial Sequence
  Oligonucleotide for detection of SNP TSC0005192
caatttttaaata

SEQ ID NO: 161703 - DNA, 13 bp, Artificial Sequence
  Oligonucleotide for detection of SNP TSC0005192
tatttagaaattg

SEQ ID NO: 161704 - DNA, 13 bp, Artificial Sequence
  Oligonucleotide for detection of SNP TSC0005192
caatttctaaata

SEQ ID NO: 161705 - DNA, 13 bp, Artificial Sequence
  Oligonucleotide for detection of SNP TSC0040710
ttgtagagtggay

SEQ ID NO: 161706 - DNA, 13 bp, Artificial Sequence
  Oligonucleotide for detection of SNP TSC0040710
rtccactctacaa

SEQ ID NO: 161707 - DNA, 13 bp, Artificial Sequence
  Oligonucleotide for detection of SNP TSC0040710
ttgtagggtggay

SEQ ID NO: 161708 - DNA, 13 bp, Artificial Sequence
  Oligonucleotide for detection of SNP TSC0040710
rtccaccctacaa

SEQ ID NO: 161709 - DNA, 13 bp, Artificial Sequence
  Oligonucleotide for detection of SNP TSC0040711
gttaatgagtttt

SEQ ID NO: 161710 - DNA, 13 bp, Artificial Sequence
  Oligonucleotide for detection of SNP TSC0040711
aaaactcattaac

SEQ ID NO: 161711 - DNA, 13 bp, Artificial Sequence
  Oligonucleotide for detection of SNP TSC0040711
gttaacgagtttt

SEQ ID NO: 161712 - DNA, 13 bp, Artificial Sequence
  Oligonucleotide for detection of SNP TSC0040711
aaaactcgttaac

SEQ ID NO: 161713 - DNA, 13 bp, Artificial Sequence
  Oligonucleotide for detection of SNP TSC0040711
aagatttgttaay

SEQ ID NO: 161714 - DNA, 13 bp, Artificial Sequence
  Oligonucleotide for detection of SNP TSC0040711
rttaacaaatctt

SEQ ID NO: 161715 - DNA, 13 bp, Artificial Sequence
  Oligonucleotide for detection of SNP TSC0040711
aagattcgttaay

SEQ ID NO: 161716 - DNA, 13 bp, Artificial Sequence
  Oligonucleotide for detection of SNP TSC0040711
rttaacgaatctt

SEQ ID NO: 161717 - DNA, 13 bp, Artificial Sequence
  Oligonucleotide for detection of SNP TSC0005424
taagatattaagt

SEQ ID NO: 161718 - DNA, 13 bp, Artificial Sequence
  Oligonucleotide for detection of SNP TSC0005424
acttaatatctta

SEQ ID NO: 161719 - DNA, 13 bp, Artificial Sequence
  Oligonucleotide for detection of SNP TSC0005424
taagatgttaagt

SEQ ID NO: 161720 - DNA, 13 bp, Artificial Sequence
  Oligonucleotide for detection of SNP TSC0005424
acttaacatctta

SEQ ID NO: 161721 - DNA, 13 bp, Artificial Sequence
  Oligonucleotide for detection of SNP TSC0005424
taagacgttaagt

SEQ ID NO: 161722 - DNA, 13 bp, Artificial Sequence
  Oligonucleotide for detection of SNP TSC0005424
acttaacgtctta

SEQ ID NO: 161723 - DNA, 13 bp, Artificial Sequence
  Oligonucleotide for detection of SNP TSC0040712
tttattttgttgy

SEQ ID NO: 161724 - DNA, 13 bp, Artificial Sequence
  Oligonucleotide for detection of SNP TSC0040712
rcaacaaaataaa

SEQ ID NO: 161725 - DNA, 13 bp, Artificial Sequence
  Oligonucleotide for detection of SNP TSC0040712
tttattgtgttgy

SEQ ID NO: 161726 - DNA, 13 bp, Artificial Sequence
  Oligonucleotide for detection of SNP TSC0040712
rcaacacaataaa

SEQ ID NO: 161727 - DNA, 13 bp, Artificial Sequence
  Oligonucleotide for detection of SNP TSC0040712
tttattttgtcgy

SEQ ID NO: 161728 - DNA, 13 bp, Artificial Sequence
  Oligonucleotide for detection of SNP TSC0040712
rcgacaaaataaa

SEQ ID NO: 161729 - DNA, 13 bp, Artificial Sequence
  Oligonucleotide for detection of SNP TSC0040712
tttattgtgtcgy

SEQ ID NO: 161730 - DNA, 13 bp, Artificial Sequence
  Oligonucleotide for detection of SNP TSC0040712
rcgacacaataaa

SEQ ID NO: 161731 - DNA, 13 bp, Artificial Sequence
  Oligonucleotide for detection of SNP TSC0040712
gtgatagagtgag

SEQ ID NO: 161732 - DNA, 13 bp, Artificial Sequence
  Oligonucleotide for detection of SNP TSC0040712
ctcactctatcac

SEQ ID NO: 161733 - DNA, 13 bp, Artificial Sequence
  Oligonucleotide for detection of SNP TSC0040712
gcgatagagtgag

SEQ ID NO: 161734 - DNA, 13 bp, Artificial Sequence
  Oligonucleotide for detection of SNP TSC0040712
ctcactctatcgc

SEQ ID NO: 161735 - DNA, 13 bp, Artificial Sequence
  Oligonucleotide for detection of SNP TSC0040712
gcgatatagtgag

SEQ ID NO: 161736 - DNA, 13 bp, Artificial Sequence
  Oligonucleotide for detection of SNP TSC0040712
ctcactatatcgc

SEQ ID NO: 161737 - DNA, 13 bp, Artificial Sequence
  Oligonucleotide for detection of SNP TSC0040715
taatttgttaaay

SEQ ID NO: 161738 - DNA, 13 bp, Artificial Sequence
  Oligonucleotide for detection of SNP TSC0040715
rtttaacaaatta

SEQ ID NO: 161739 - DNA, 13 bp, Artificial Sequence
  Oligonucleotide for detection of SNP TSC0040715
taatttattaaay

SEQ ID NO: 161740 - DNA, 13 bp, Artificial Sequence
  Oligonucleotide for detection of SNP TSC0040715
rtttaataaatta

SEQ ID NO: 161741 - DNA, 13 bp, Artificial Sequence
  Oligonucleotide for detection of SNP TSC0040716
agaattttttggt

SEQ ID NO: 161742 - DNA, 13 bp, Artificial Sequence
  Oligonucleotide for detection of SNP TSC0040716
accaaaaaattct

SEQ ID NO: 161743 - DNA, 13 bp, Artificial Sequence
  Oligonucleotide for detection of SNP TSC0040716
agaattgtttggt

SEQ ID NO: 161744 - DNA, 13 bp, Artificial Sequence
  Oligonucleotide for detection of SNP TSC0040716
accaaacaattct

SEQ ID NO: 161745 - DNA, 13 bp, Artificial Sequence
  Oligonucleotide for detection of SNP TSC0040716
attagggaatttt

SEQ ID NO: 161746 - DNA, 13 bp, Artificial Sequence
  Oligonucleotide for detection of SNP TSC0040716
aaaattccctaat

SEQ ID NO: 161747 - DNA, 13 bp, Artificial Sequence
  Oligonucleotide for detection of SNP TSC0040716
attaggtaatttt

SEQ ID NO: 161748 - DNA, 13 bp, Artificial Sequence
  Oligonucleotide for detection of SNP TSC0040716
aaaattacctaat

SEQ ID NO: 161749 - DNA, 13 bp, Artificial Sequence
  Oligonucleotide for detection of SNP TSC0040717
atttggagattta

SEQ ID NO: 161750 - DNA, 13 bp, Artificial Sequence
  Oligonucleotide for detection of SNP TSC0040717
taaatctccaaat

SEQ ID NO: 161751 - DNA, 13 bp, Artificial Sequence
  Oligonucleotide for detection of SNP TSC0040717
atttggggattta

SEQ ID NO: 161752 - DNA, 13 bp, Artificial Sequence
  Oligonucleotide for detection of SNP TSC0040717
taaatccccaaat

SEQ ID NO: 161753 - DNA, 13 bp, Artificial Sequence
  Oligonucleotide for detection of SNP TSC0040718
taataagatataa

SEQ ID NO: 161754 - DNA, 13 bp, Artificial Sequence
  Oligonucleotide for detection of SNP TSC0040718
ttatatcttatta

SEQ ID NO: 161755 - DNA, 13 bp, Artificial Sequence
  Oligonucleotide for detection of SNP TSC0040718
taataaaatataa

SEQ ID NO: 161756 - DNA, 13 bp, Artificial Sequence
  Oligonucleotide for detection of SNP TSC0040718
ttatattttatta

SEQ ID NO: 161757 - DNA, 13 bp, Artificial Sequence
  Oligonucleotide for detection of SNP TSC0040719
gtttattgtatag

SEQ ID NO: 161758 - DNA, 13 bp, Artificial Sequence
  Oligonucleotide for detection of SNP TSC0040719
ctatacaataaac

SEQ ID NO: 161759 - DNA, 13 bp, Artificial Sequence
  Oligonucleotide for detection of SNP TSC0040719
gtttatcgtatag

SEQ ID NO: 161760 - DNA, 13 bp, Artificial Sequence
  Oligonucleotide for detection of SNP TSC0040719
ctatacgataaac

SEQ ID NO: 161761 - DNA, 13 bp, Artificial Sequence
  Oligonucleotide for detection of SNP TSC0040719
ttatatgataggy

SEQ ID NO: 161762 - DNA, 13 bp, Artificial Sequence
  Oligonucleotide for detection of SNP TSC0040719
rcctatcatataa

SEQ ID NO: 161763 - DNA, 13 bp, Artificial Sequence
  Oligonucleotide for detection of SNP TSC0040719
ttatataataggy

SEQ ID NO: 161764 - DNA, 13 bp, Artificial Sequence
  Oligonucleotide for detection of SNP TSC0040719
rcctattatataa

SEQ ID NO: 161765 - DNA, 13 bp, Artificial Sequence
  Oligonucleotide for detection of SNP TSC0040719
ttatacgataggy

SEQ ID NO: 161766 - DNA, 13 bp, Artificial Sequence
  Oligonucleotide for detection of SNP TSC0040719
rcctatcgtataa

SEQ ID NO: 161767 - DNA, 13 bp, Artificial Sequence
  Oligonucleotide for detection of SNP TSC0004941
aaagttgagtggy

SEQ ID NO: 161768 - DNA, 13 bp, Artificial Sequence
  Oligonucleotide for detection of SNP TSC0004941
rccactcaacttt

SEQ ID NO: 161769 - DNA, 13 bp, Artificial Sequence
  Oligonucleotide for detection of SNP TSC0004941
aaagttaagtggy

SEQ ID NO: 161770 - DNA, 13 bp, Artificial Sequence
  Oligonucleotide for detection of SNP TSC0004941
rccacttaacttt

SEQ ID NO: 161771 - DNA, 13 bp, Artificial Sequence
  Oligonucleotide for detection of SNP TSC0040725
attttatttttga

SEQ ID NO: 161772 - DNA, 13 bp, Artificial Sequence
  Oligonucleotide for detection of SNP TSC0040725
tcaaaaataaaat

SEQ ID NO: 161773 - DNA, 13 bp, Artificial Sequence
  Oligonucleotide for detection of SNP TSC0040725
ttagagttaaagt

SEQ ID NO: 161774 - DNA, 13 bp, Artificial Sequence
  Oligonucleotide for detection of SNP TSC0040725
actttaactctaa

SEQ ID NO: 161775 - DNA, 13 bp, Artificial Sequence
  Oligonucleotide for detection of SNP TSC0040725
ttagagataaagt

SEQ ID NO: 161776 - DNA, 13 bp, Artificial Sequence
  Oligonucleotide for detection of SNP TSC0040725
actttatctctaa

SEQ ID NO: 161777 - DNA, 13 bp, Artificial Sequence
  Oligonucleotide for detection of SNP TSC0040726
gtttataagttgg

SEQ ID NO: 161778 - DNA, 13 bp, Artificial Sequence
  Oligonucleotide for detection of SNP TSC0040726
ccaacttataaac

SEQ ID NO: 161779 - DNA, 13 bp, Artificial Sequence
  Oligonucleotide for detection of SNP TSC0040726
gtttatgagttgg

SEQ ID NO: 161780 - DNA, 13 bp, Artificial Sequence
  Oligonucleotide for detection of SNP TSC0040726
ccaactcataaac

SEQ ID NO: 161781 - DNA, 13 bp, Artificial Sequence
  Oligonucleotide for detection of SNP TSC0040726
gtttacgagttgg

SEQ ID NO: 161782 - DNA, 13 bp, Artificial Sequence
  Oligonucleotide for detection of SNP TSC0040726
ccaactcgtaaac

SEQ ID NO: 161783 - DNA, 13 bp, Artificial Sequence
  Oligonucleotide for detection of SNP TSC0040726
ttagtttgtggay

SEQ ID NO: 161784 - DNA, 13 bp, Artificial Sequence
  Oligonucleotide for detection of SNP TSC0040726
rtccacaaactaa

SEQ ID NO: 161785 - DNA, 13 bp, Artificial Sequence
  Oligonucleotide for detection of SNP TSC0040726
ttagttcgtggay

SEQ ID NO: 161786 - DNA, 13 bp, Artificial Sequence
  Oligonucleotide for detection of SNP TSC0040726
rtccacgaactaa

SEQ ID NO: 161787 - DNA, 13 bp, Artificial Sequence
  Oligonucleotide for detection of SNP TSC0040729
ttttagtgttttt

SEQ ID NO: 161788 - DNA, 13 bp, Artificial Sequence
  Oligonucleotide for detection of SNP TSC0040729
aaaaacactaaaa

SEQ ID NO: 161789 - DNA, 13 bp, Artificial Sequence
  Oligonucleotide for detection of SNP TSC0040729
ttttagcgttttt

SEQ ID NO: 161790 - DNA, 13 bp, Artificial Sequence
  Oligonucleotide for detection of SNP TSC0040729
aaaaacgctaaaa

SEQ ID NO: 161791 - DNA, 13 bp, Artificial Sequence
  Oligonucleotide for detection of SNP TSC0040729
aagaacgttgaaa

SEQ ID NO: 161792 - DNA, 13 bp, Artificial Sequence
  Oligonucleotide for detection of SNP TSC0040729
tttcaacgttctt

SEQ ID NO: 161793 - DNA, 13 bp, Artificial Sequence
  Oligonucleotide for detection of SNP TSC0040730
attaatatttatg

SEQ ID NO: 161794 - DNA, 13 bp, Artificial Sequence
  Oligonucleotide for detection of SNP TSC0040730
cataaatattaat

SEQ ID NO: 161795 - DNA, 13 bp, Artificial Sequence
  Oligonucleotide for detection of SNP TSC0040730
attaatttttatg

SEQ ID NO: 161796 - DNA, 13 bp, Artificial Sequence
  Oligonucleotide for detection of SNP TSC0040730
cataaaaattaat

SEQ ID NO: 161797 - DNA, 13 bp, Artificial Sequence
  Oligonucleotide for detection of SNP TSC0040730
tatgggtgttaat

SEQ ID NO: 161798 - DNA, 13 bp, Artificial Sequence
  Oligonucleotide for detection of SNP TSC0040730
attaacacccata

SEQ ID NO: 161799 - DNA, 13 bp, Artificial Sequence
  Oligonucleotide for detection of SNP TSC0040730
tatgggggttaat

SEQ ID NO: 161800 - DNA, 13 bp, Artificial Sequence
  Oligonucleotide for detection of SNP TSC0040730
attaacccccata

SEQ ID NO: 161801 - DNA, 13 bp, Artificial Sequence
  Oligonucleotide for detection of SNP TSC0040731
gttattaataatt

SEQ ID NO: 161802 - DNA, 13 bp, Artificial Sequence
  Oligonucleotide for detection of SNP TSC0040731
aattattaataac

SEQ ID NO: 161803 - DNA, 13 bp, Artificial Sequence
  Oligonucleotide for detection of SNP TSC0040731
gttattgataatt

SEQ ID NO: 161804 - DNA, 13 bp, Artificial Sequence
  Oligonucleotide for detection of SNP TSC0040731
aattatcaataac

SEQ ID NO: 161805 - DNA, 13 bp, Artificial Sequence
  Oligonucleotide for detection of SNP TSC0040731
gttatcgataatt

SEQ ID NO: 161806 - DNA, 13 bp, Artificial Sequence
  Oligonucleotide for detection of SNP TSC0040731
aattatcgataac

SEQ ID NO: 161807 - DNA, 13 bp, Artificial Sequence
  Oligonucleotide for detection of SNP TSC0040731
aattattggtaay

SEQ ID NO: 161808 - DNA, 13 bp, Artificial Sequence
  Oligonucleotide for detection of SNP TSC0040731
rttaccaataatt

SEQ ID NO: 161809 - DNA, 13 bp, Artificial Sequence
  Oligonucleotide for detection of SNP TSC0040731
aattatcggtaay

SEQ ID NO: 161810 - DNA, 13 bp, Artificial Sequence
  Oligonucleotide for detection of SNP TSC0040731
rttaccgataatt

SEQ ID NO: 161811 - DNA, 13 bp, Artificial Sequence
  Oligonucleotide for detection of SNP TSC0040735
gagattgtgttty

SEQ ID NO: 161812 - DNA, 13 bp, Artificial Sequence
  Oligonucleotide for detection of SNP TSC0040735
raaacacaatctc

SEQ ID NO: 161813 - DNA, 13 bp, Artificial Sequence
  Oligonucleotide for detection of SNP TSC0040735
gagatcgtgttty

SEQ ID NO: 161814 - DNA, 13 bp, Artificial Sequence
  Oligonucleotide for detection of SNP TSC0040735
raaacacgatctc

SEQ ID NO: 161815 - DNA, 13 bp, Artificial Sequence
  Oligonucleotide for detection of SNP TSC0040735
ggaatatggttty

SEQ ID NO: 161816 - DNA, 13 bp, Artificial Sequence
  Oligonucleotide for detection of SNP TSC0040735
raaaccatattcc

SEQ ID NO: 161817 - DNA, 13 bp, Artificial Sequence
  Oligonucleotide for detection of SNP TSC0040735
ggaatacggttty

SEQ ID NO: 161818 - DNA, 13 bp, Artificial Sequence
  Oligonucleotide for detection of SNP TSC0040735
raaaccgtattcc

SEQ ID NO: 161819 - DNA, 13 bp, Artificial Sequence
  Oligonucleotide for detection of SNP TSC0005508
aaagatataagta

SEQ ID NO: 161820 - DNA, 13 bp, Artificial Sequence
  Oligonucleotide for detection of SNP TSC0005508
tacttatatcttt

SEQ ID NO: 161821 - DNA, 13 bp, Artificial Sequence
  Oligonucleotide for detection of SNP TSC0005508
aaagatgtaagta

SEQ ID NO: 161822 - DNA, 13 bp, Artificial Sequence
  Oligonucleotide for detection of SNP TSC0005508
tacttacatcttt

SEQ ID NO: 161823 - DNA, 13 bp, Artificial Sequence
  Oligonucleotide for detection of SNP TSC0005509
gaaatgtaagtta

SEQ ID NO: 161824 - DNA, 13 bp, Artificial Sequence
  Oligonucleotide for detection of SNP TSC0005509
taacttacatttc

SEQ ID NO: 161825 - DNA, 13 bp, Artificial Sequence
  Oligonucleotide for detection of SNP TSC0005509
gaaatggaagtta

SEQ ID NO: 161826 - DNA, 13 bp, Artificial Sequence
  Oligonucleotide for detection of SNP TSC0005509
taacttccatttc

SEQ ID NO: 161827 - DNA, 13 bp, Artificial Sequence
  Oligonucleotide for detection of SNP TSC0005509
taatttatattty

SEQ ID NO: 161828 - DNA, 13 bp, Artificial Sequence
  Oligonucleotide for detection of SNP TSC0005509
raaatataaatta

SEQ ID NO: 161829 - DNA, 13 bp, Artificial Sequence
  Oligonucleotide for detection of SNP TSC0005509
taatttttattty

SEQ ID NO: 161830 - DNA, 13 bp, Artificial Sequence
  Oligonucleotide for detection of SNP TSC0005509
raaataaaaatta

SEQ ID NO: 161831 - DNA, 13 bp, Artificial Sequence
  Oligonucleotide for detection of SNP TSC0040738
gagtgagatagaa

SEQ ID NO: 161832 - DNA, 13 bp, Artificial Sequence
  Oligonucleotide for detection of SNP TSC0040738
ttctatctcactc

SEQ ID NO: 161833 - DNA, 13 bp, Artificial Sequence
  Oligonucleotide for detection of SNP TSC0040738
gagtgaaatagaa

SEQ ID NO: 161834 - DNA, 13 bp, Artificial Sequence
  Oligonucleotide for detection of SNP TSC0040738
ttctatttcactc

SEQ ID NO: 161835 - DNA, 13 bp, Artificial Sequence
  Oligonucleotide for detection of SNP TSC0010428
ggttttaagagtt

SEQ ID NO: 161836 - DNA, 13 bp, Artificial Sequence
  Oligonucleotide for detection of SNP TSC0010428
aactcttaaaacc

SEQ ID NO: 161837 - DNA, 13 bp, Artificial Sequence
  Oligonucleotide for detection of SNP TSC0010428
ggtttttagagtt

SEQ ID NO: 161838 - DNA, 13 bp, Artificial Sequence
  Oligonucleotide for detection of SNP TSC0010428
aactctaaaaacc

SEQ ID NO: 161839 - DNA, 13 bp, Artificial Sequence
  Oligonucleotide for detection of SNP TSC0010428
aatttttaaaaty

SEQ ID NO: 161840 - DNA, 13 bp, Artificial Sequence
  Oligonucleotide for detection of SNP TSC0010428
rattttaaaaatt

SEQ ID NO: 161841 - DNA, 13 bp, Artificial Sequence
  Oligonucleotide for detection of SNP TSC0010428
aattttgaaaaty

SEQ ID NO: 161842 - DNA, 13 bp, Artificial Sequence
  Oligonucleotide for detection of SNP TSC0010428
rattttcaaaatt

SEQ ID NO: 161843 - DNA, 13 bp, Artificial Sequence
  Oligonucleotide for detection of SNP TSC0040741
gggtgggtatata

SEQ ID NO: 161844 - DNA, 13 bp, Artificial Sequence
  Oligonucleotide for detection of SNP TSC0040741
tatatacccaccc

SEQ ID NO: 161845 - DNA, 13 bp, Artificial Sequence
  Oligonucleotide for detection of SNP TSC0040741
gggtggatatata

SEQ ID NO: 161846 - DNA, 13 bp, Artificial Sequence
  Oligonucleotide for detection of SNP TSC0040741
tatatatccaccc

SEQ ID NO: 161847 - DNA, 13 bp, Artificial Sequence
  Oligonucleotide for detection of SNP TSC0006673
tttttagtatata

SEQ ID NO: 161848 - DNA, 13 bp, Artificial Sequence
  Oligonucleotide for detection of SNP TSC0006673
tatatactaaaaa

SEQ ID NO: 161849 - DNA, 13 bp, Artificial Sequence
  Oligonucleotide for detection of SNP TSC0006673
tttttaatatata

SEQ ID NO: 161850 - DNA, 13 bp, Artificial Sequence
  Oligonucleotide for detection of SNP TSC0006673
tatatattaaaaa

SEQ ID NO: 161851 - DNA, 13 bp, Artificial Sequence
  Oligonucleotide for detection of SNP TSC0040742
tttattgaaaaaa

SEQ ID NO: 161852 - DNA, 13 bp, Artificial Sequence
  Oligonucleotide for detection of SNP TSC0040742
ttttttcaataaa

SEQ ID NO: 161853 - DNA, 13 bp, Artificial Sequence
  Oligonucleotide for detection of SNP TSC0040742
ttttttaagtgaa

SEQ ID NO: 161854 - DNA, 13 bp, Artificial Sequence
  Oligonucleotide for detection of SNP TSC0040742
ttcacttaaaaaa

SEQ ID NO: 161855 - DNA, 13 bp, Artificial Sequence
  Oligonucleotide for detection of SNP TSC0040742
tttttttagtgaa

SEQ ID NO: 161856 - DNA, 13 bp, Artificial Sequence
  Oligonucleotide for detection of SNP TSC0040742
ttcactaaaaaaa

SEQ ID NO: 161857 - DNA, 13 bp, Artificial Sequence
  Oligonucleotide for detection of SNP TSC0040743
tatatatgttatt

SEQ ID NO: 161858 - DNA, 13 bp, Artificial Sequence
  Oligonucleotide for detection of SNP TSC0040743
aataacatatata

SEQ ID NO: 161859 - DNA, 13 bp, Artificial Sequence
  Oligonucleotide for detection of SNP TSC0040743
tatatacgttatt

SEQ ID NO: 161860 - DNA, 13 bp, Artificial Sequence
  Oligonucleotide for detection of SNP TSC0040743
aataacgtatata

SEQ ID NO: 161861 - DNA, 13 bp, Artificial Sequence
  Oligonucleotide for detection of SNP TSC0040743
aatagtgtatgtg

SEQ ID NO: 161862 - DNA, 13 bp, Artificial Sequence
  Oligonucleotide for detection of SNP TSC0040743
cacatacactatt

SEQ ID NO: 161863 - DNA, 13 bp, Artificial Sequence
  Oligonucleotide for detection of SNP TSC0040743
aatagtatatgtg

SEQ ID NO: 161864 - DNA, 13 bp, Artificial Sequence
  Oligonucleotide for detection of SNP TSC0040743
cacatatactatt

SEQ ID NO: 161865 - DNA, 13 bp, Artificial Sequence
  Oligonucleotide for detection of SNP TSC0040743
aatagcgtatgtg

SEQ ID NO: 161866 - DNA, 13 bp, Artificial Sequence
  Oligonucleotide for detection of SNP TSC0040743
cacatacgctatt

SEQ ID NO: 161867 - DNA, 13 bp, Artificial Sequence
  Oligonucleotide for detection of SNP TSC0040744
taattaagtataa

SEQ ID NO: 161868 - DNA, 13 bp, Artificial Sequence
  Oligonucleotide for detection of SNP TSC0040744
ttatacttaatta

SEQ ID NO: 161869 - DNA, 13 bp, Artificial Sequence
  Oligonucleotide for detection of SNP TSC0040744
taattaggtataa

SEQ ID NO: 161870 - DNA, 13 bp, Artificial Sequence
  Oligonucleotide for detection of SNP TSC0040744
ttatacctaatta

SEQ ID NO: 161871 - DNA, 13 bp, Artificial Sequence
  Oligonucleotide for detection of SNP TSC0040745
gtttgtttattty

SEQ ID NO: 161872 - DNA, 13 bp, Artificial Sequence
  Oligonucleotide for detection of SNP TSC0040745
raaataaacaaac

SEQ ID NO: 161873 - DNA, 13 bp, Artificial Sequence
  Oligonucleotide for detection of SNP TSC0040745
gaagtatatagay

SEQ ID NO: 161874 - DNA, 13 bp, Artificial Sequence
  Oligonucleotide for detection of SNP TSC0040745
rtctatatacttc

SEQ ID NO: 161875 - DNA, 13 bp, Artificial Sequence
  Oligonucleotide for detection of SNP TSC0040745
gaagtaaatagay

SEQ ID NO: 161876 - DNA, 13 bp, Artificial Sequence
  Oligonucleotide for detection of SNP TSC0040745
rtctatttacttc

SEQ ID NO: 161877 - DNA, 13 bp, Artificial Sequence
  Oligonucleotide for detection of SNP TSC0040747
attttaaaatatt

SEQ ID NO: 161878 - DNA, 13 bp, Artificial Sequence
  Oligonucleotide for detection of SNP TSC0040747
aatattttaaaat

SEQ ID NO: 161879 - DNA, 13 bp, Artificial Sequence
  Oligonucleotide for detection of SNP TSC0040747
attttagaatatt

SEQ ID NO: 161880 - DNA, 13 bp, Artificial Sequence
  Oligonucleotide for detection of SNP TSC0040747
aatattctaaaat

SEQ ID NO: 161881 - DNA, 13 bp, Artificial Sequence
  Oligonucleotide for detection of SNP TSC0040748
tgttatatttagt

SEQ ID NO: 161882 - DNA, 13 bp, Artificial Sequence
  Oligonucleotide for detection of SNP TSC0040748
actaaatataaca

SEQ ID NO: 161883 - DNA, 13 bp, Artificial Sequence
  Oligonucleotide for detection of SNP TSC0040748
tgttatgtttagt

SEQ ID NO: 161884 - DNA, 13 bp, Artificial Sequence
  Oligonucleotide for detection of SNP TSC0040748
actaaacataaca

SEQ ID NO: 161885 - DNA, 13 bp, Artificial Sequence
  Oligonucleotide for detection of SNP TSC0040748
cgttatatttagt

SEQ ID NO: 161886 - DNA, 13 bp, Artificial Sequence
  Oligonucleotide for detection of SNP TSC0040748
actaaatataacg

SEQ ID NO: 161887 - DNA, 13 bp, Artificial Sequence
  Oligonucleotide for detection of SNP TSC0040748
cgttatgtttagt

SEQ ID NO: 161888 - DNA, 13 bp, Artificial Sequence
  Oligonucleotide for detection of SNP TSC0040748
actaaacataacg

SEQ ID NO: 161889 - DNA, 13 bp, Artificial Sequence
  Oligonucleotide for detection of SNP TSC0040748
tgttacgtttagt

SEQ ID NO: 161890 - DNA, 13 bp, Artificial Sequence
  Oligonucleotide for detection of SNP TSC0040748
actaaacgtaaca

SEQ ID NO: 161891 - DNA, 13 bp, Artificial Sequence
  Oligonucleotide for detection of SNP TSC0040748
cgttacgtttagt

SEQ ID NO: 161892 - DNA, 13 bp, Artificial Sequence
  Oligonucleotide for detection of SNP TSC0040748
actaaacgtaacg

SEQ ID NO: 161893 - DNA, 13 bp, Artificial Sequence
  Oligonucleotide for detection of SNP TSC0040748
attgggtgtggtg

SEQ ID NO: 161894 - DNA, 13 bp, Artificial Sequence
  Oligonucleotide for detection of SNP TSC0040748
caccacacccaat

SEQ ID NO: 161895 - DNA, 13 bp, Artificial Sequence
  Oligonucleotide for detection of SNP TSC0040748
attgggtgtggcg

SEQ ID NO: 161896 - DNA, 13 bp, Artificial Sequence
  Oligonucleotide for detection of SNP TSC0040748
cgccacacccaat

SEQ ID NO: 161897 - DNA, 13 bp, Artificial Sequence
  Oligonucleotide for detection of SNP TSC0040748
attgggcgtggtg

SEQ ID NO: 161898 - DNA, 13 bp, Artificial Sequence
  Oligonucleotide for detection of SNP TSC0040748
caccacgcccaat

SEQ ID NO: 161899 - DNA, 13 bp, Artificial Sequence
  Oligonucleotide for detection of SNP TSC0040748
attgggcgtggcg

SEQ ID NO: 161900 - DNA, 13 bp, Artificial Sequence
  Oligonucleotide for detection of SNP TSC0040748
cgccacgcccaat

SEQ ID NO: 161901 - DNA, 13 bp, Artificial Sequence
  Oligonucleotide for detection of SNP TSC0040749
gagaggatagaga

SEQ ID NO: 161902 - DNA, 13 bp, Artificial Sequence
  Oligonucleotide for detection of SNP TSC0040749
tctctatcctctc

SEQ ID NO: 161903 - DNA, 13 bp, Artificial Sequence
  Oligonucleotide for detection of SNP TSC0040749
gagaggttagaga

SEQ ID NO: 161904 - DNA, 13 bp, Artificial Sequence
  Oligonucleotide for detection of SNP TSC0040749
tctctaacctctc

SEQ ID NO: 161905 - DNA, 13 bp, Artificial Sequence
  Oligonucleotide for detection of SNP TSC0040751
ttttagttattat

SEQ ID NO: 161906 - DNA, 13 bp, Artificial Sequence
  Oligonucleotide for detection of SNP TSC0040751
ataataactaaaa

SEQ ID NO: 161907 - DNA, 13 bp, Artificial Sequence
  Oligonucleotide for detection of SNP TSC0040751
ataatagttagag

SEQ ID NO: 161908 - DNA, 13 bp, Artificial Sequence
  Oligonucleotide for detection of SNP TSC0040751
ctctaactattat

SEQ ID NO: 161909 - DNA, 13 bp, Artificial Sequence
  Oligonucleotide for detection of SNP TSC0040751
ataatatttagag

SEQ ID NO: 161910 - DNA, 13 bp, Artificial Sequence
  Oligonucleotide for detection of SNP TSC0040751
ctctaaatattat

SEQ ID NO: 161911 - DNA, 13 bp, Artificial Sequence
  Oligonucleotide for detection of SNP TSC0040753
gttgtttgagtat

SEQ ID NO: 161912 - DNA, 13 bp, Artificial Sequence
  Oligonucleotide for detection of SNP TSC0040753
atactcaaacaac

SEQ ID NO: 161913 - DNA, 13 bp, Artificial Sequence
  Oligonucleotide for detection of SNP TSC0040753
gttgttcgagtat

SEQ ID NO: 161914 - DNA, 13 bp, Artificial Sequence
  Oligonucleotide for detection of SNP TSC0040753
atactcgaacaac

SEQ ID NO: 161915 - DNA, 13 bp, Artificial Sequence
  Oligonucleotide for detection of SNP TSC0040753
atatttgagtagy

SEQ ID NO: 161916 - DNA, 13 bp, Artificial Sequence
  Oligonucleotide for detection of SNP TSC0040753
rctactcaaatat

SEQ ID NO: 161917 - DNA, 13 bp, Artificial Sequence
  Oligonucleotide for detection of SNP TSC0040753
atatttaagtagy

SEQ ID NO: 161918 - DNA, 13 bp, Artificial Sequence
  Oligonucleotide for detection of SNP TSC0040753
rctacttaaatat

SEQ ID NO: 161919 - DNA, 13 bp, Artificial Sequence
  Oligonucleotide for detection of SNP TSC0040753
atattcgagtagy

SEQ ID NO: 161920 - DNA, 13 bp, Artificial Sequence
  Oligonucleotide for detection of SNP TSC0040753
rctactcgaatat

SEQ ID NO: 161921 - DNA, 13 bp, Artificial Sequence
  Oligonucleotide for detection of SNP TSC0040754
tatattagttagg

SEQ ID NO: 161922 - DNA, 13 bp, Artificial Sequence
  Oligonucleotide for detection of SNP TSC0040754
cctaactaatata

SEQ ID NO: 161923 - DNA, 13 bp, Artificial Sequence
  Oligonucleotide for detection of SNP TSC0040754
tatattggttagg

SEQ ID NO: 161924 - DNA, 13 bp, Artificial Sequence
  Oligonucleotide for detection of SNP TSC0040754
cctaaccaatata

SEQ ID NO: 161925 - DNA, 13 bp, Artificial Sequence
  Oligonucleotide for detection of SNP TSC0040754
tatatcggttagg

SEQ ID NO: 161926 - DNA, 13 bp, Artificial Sequence
  Oligonucleotide for detection of SNP TSC0040754
cctaaccgatata

SEQ ID NO: 161927 - DNA, 13 bp, Artificial Sequence
  Oligonucleotide for detection of SNP TSC0040754
tttggttggtgtg

SEQ ID NO: 161928 - DNA, 13 bp, Artificial Sequence
  Oligonucleotide for detection of SNP TSC0040754
cacaccaaccaaa

SEQ ID NO: 161929 - DNA, 13 bp, Artificial Sequence
  Oligonucleotide for detection of SNP TSC0040754
tttggtcggtgtg

SEQ ID NO: 161930 - DNA, 13 bp, Artificial Sequence
  Oligonucleotide for detection of SNP TSC0040754
cacaccgaccaaa

SEQ ID NO: 161931 - DNA, 13 bp, Artificial Sequence
  Oligonucleotide for detection of SNP TSC0040755
atttgaagttagt

SEQ ID NO: 161932 - DNA, 13 bp, Artificial Sequence
  Oligonucleotide for detection of SNP TSC0040755
actaacttcaaat

SEQ ID NO: 161933 - DNA, 13 bp, Artificial Sequence
  Oligonucleotide for detection of SNP TSC0040755
atttgaggttagt

SEQ ID NO: 161934 - DNA, 13 bp, Artificial Sequence
  Oligonucleotide for detection of SNP TSC0040755
actaacctcaaat

SEQ ID NO: 161935 - DNA, 13 bp, Artificial Sequence
  Oligonucleotide for detection of SNP TSC0040756
gtaggaaaattty

SEQ ID NO: 161936 - DNA, 13 bp, Artificial Sequence
  Oligonucleotide for detection of SNP TSC0040756
raaattttcctac

SEQ ID NO: 161937 - DNA, 13 bp, Artificial Sequence
  Oligonucleotide for detection of SNP TSC0040756
gtaggagaattty

SEQ ID NO: 161938 - DNA, 13 bp, Artificial Sequence
  Oligonucleotide for detection of SNP TSC0040756
raaattctcctac

SEQ ID NO: 161939 - DNA, 13 bp, Artificial Sequence
  Oligonucleotide for detection of SNP TSC0040757
ttgtttaattagt

SEQ ID NO: 161940 - DNA, 13 bp, Artificial Sequence
  Oligonucleotide for detection of SNP TSC0040757
actaattaaacaa

SEQ ID NO: 161941 - DNA, 13 bp, Artificial Sequence
  Oligonucleotide for detection of SNP TSC0040757
ttgttttattagt

SEQ ID NO: 161942 - DNA, 13 bp, Artificial Sequence
  Oligonucleotide for detection of SNP TSC0040757
actaataaaacaa

SEQ ID NO: 161943 - DNA, 13 bp, Artificial Sequence
  Oligonucleotide for detection of SNP TSC0040757
attgattaaatag

SEQ ID NO: 161944 - DNA, 13 bp, Artificial Sequence
  Oligonucleotide for detection of SNP TSC0040757
ctatttaatcaat

SEQ ID NO: 161945 - DNA, 13 bp, Artificial Sequence
  Oligonucleotide for detection of SNP TSC0040757
attgatgaaatag

SEQ ID NO: 161946 - DNA, 13 bp, Artificial Sequence
  Oligonucleotide for detection of SNP TSC0040757
ctatttcatcaat

SEQ ID NO: 161947 - DNA, 13 bp, Artificial Sequence
  Oligonucleotide for detection of SNP TSC0040758
gataatatatttg

SEQ ID NO: 161948 - DNA, 13 bp, Artificial Sequence
  Oligonucleotide for detection of SNP TSC0040758
caaatatattatc

SEQ ID NO: 161949 - DNA, 13 bp, Artificial Sequence
  Oligonucleotide for detection of SNP TSC0040758
gataatgtatttg

SEQ ID NO: 161950 - DNA, 13 bp, Artificial Sequence
  Oligonucleotide for detection of SNP TSC0040758
caaatacattatc

SEQ ID NO: 161951 - DNA, 13 bp, Artificial Sequence
  Oligonucleotide for detection of SNP TSC0040759
ttagggtgaagaa

SEQ ID NO: 161952 - DNA, 13 bp, Artificial Sequence
  Oligonucleotide for detection of SNP TSC0040759
ttcttcaccctaa

SEQ ID NO: 161953 - DNA, 13 bp, Artificial Sequence
  Oligonucleotide for detection of SNP TSC0040759
ttagggcgaagaa

SEQ ID NO: 161954 - DNA, 13 bp, Artificial Sequence
  Oligonucleotide for detection of SNP TSC0040759
ttcttcgccctaa

SEQ ID NO: 161955 - DNA, 13 bp, Artificial Sequence
  Oligonucleotide for detection of SNP TSC0010891
gagatgtgaatat

SEQ ID NO: 161956 - DNA, 13 bp, Artificial Sequence
  Oligonucleotide for detection of SNP TSC0010891
atattcacatctc

SEQ ID NO: 161957 - DNA, 13 bp, Artificial Sequence
  Oligonucleotide for detection of SNP TSC0010891
gagatgggaatat

SEQ ID NO: 161958 - DNA, 13 bp, Artificial Sequence
  Oligonucleotide for detection of SNP TSC0010891
atattcccatctc

SEQ ID NO: 161959 - DNA, 13 bp, Artificial Sequence
  Oligonucleotide for detection of SNP TSC0010891
gagatgcgaatat

SEQ ID NO: 161960 - DNA, 13 bp, Artificial Sequence
  Oligonucleotide for detection of SNP TSC0010891
atattcgcatctc

SEQ ID NO: 161961 - DNA, 13 bp, Artificial Sequence
  Oligonucleotide for detection of SNP TSC0010891
atatttgtattty

SEQ ID NO: 161962 - DNA, 13 bp, Artificial Sequence
  Oligonucleotide for detection of SNP TSC0010891
raaatacaaatat

SEQ ID NO: 161963 - DNA, 13 bp, Artificial Sequence
  Oligonucleotide for detection of SNP TSC0010891
atattcgtattty

SEQ ID NO: 161964 - DNA, 13 bp, Artificial Sequence
  Oligonucleotide for detection of SNP TSC0010891
raaatacgaatat

SEQ ID NO: 161965 - DNA, 13 bp, Artificial Sequence
  Oligonucleotide for detection of SNP TSC0010885
gtttatgtggaaa

SEQ ID NO: 161966 - DNA, 13 bp, Artificial Sequence
  Oligonucleotide for detection of SNP TSC0010885
tttccacataaac

SEQ ID NO: 161967 - DNA, 13 bp, Artificial Sequence
  Oligonucleotide for detection of SNP TSC0010885
gtttacgtggaaa

SEQ ID NO: 161968 - DNA, 13 bp, Artificial Sequence
  Oligonucleotide for detection of SNP TSC0010885
tttccacgtaaac

SEQ ID NO: 161969 - DNA, 13 bp, Artificial Sequence
  Oligonucleotide for detection of SNP TSC0010886
ggatttattagay

SEQ ID NO: 161970 - DNA, 13 bp, Artificial Sequence
  Oligonucleotide for detection of SNP TSC0010886
rtctaataaatcc

SEQ ID NO: 161971 - DNA, 13 bp, Artificial Sequence
  Oligonucleotide for detection of SNP TSC0010886
ggattttttagay

SEQ ID NO: 161972 - DNA, 13 bp, Artificial Sequence
  Oligonucleotide for detection of SNP TSC0010886
rtctaaaaaatcc

SEQ ID NO: 161973 - DNA, 13 bp, Artificial Sequence
  Oligonucleotide for detection of SNP TSC0010886
gtttggtgagtty

SEQ ID NO: 161974 - DNA, 13 bp, Artificial Sequence
  Oligonucleotide for detection of SNP TSC0010886
raactcaccaaac

SEQ ID NO: 161975 - DNA, 13 bp, Artificial Sequence
  Oligonucleotide for detection of SNP TSC0010886
gtttggagagtty

SEQ ID NO: 161976 - DNA, 13 bp, Artificial Sequence
  Oligonucleotide for detection of SNP TSC0010886
raactctccaaac

SEQ ID NO: 161977 - DNA, 13 bp, Artificial Sequence
  Oligonucleotide for detection of SNP TSC0040760
agaaagtggggta

SEQ ID NO: 161978 - DNA, 13 bp, Artificial Sequence
  Oligonucleotide for detection of SNP TSC0040760
taccccactttct

SEQ ID NO: 161979 - DNA, 13 bp, Artificial Sequence
  Oligonucleotide for detection of SNP TSC0040760
agaaaggggggta

SEQ ID NO: 161980 - DNA, 13 bp, Artificial Sequence
  Oligonucleotide for detection of SNP TSC0040760
tacccccctttct

SEQ ID NO: 161981 - DNA, 13 bp, Artificial Sequence
  Oligonucleotide for detection of SNP TSC0040761
taagttatagggt

SEQ ID NO: 161982 - DNA, 13 bp, Artificial Sequence
  Oligonucleotide for detection of SNP TSC0040761
accctataactta

SEQ ID NO: 161983 - DNA, 13 bp, Artificial Sequence
  Oligonucleotide for detection of SNP TSC0040761
taagttgtagggt

SEQ ID NO: 161984 - DNA, 13 bp, Artificial Sequence
  Oligonucleotide for detection of SNP TSC0040761
accctacaactta

SEQ ID NO: 161985 - DNA, 13 bp, Artificial Sequence
  Oligonucleotide for detection of SNP TSC0040761
taagtcgtagggt

SEQ ID NO: 161986 - DNA, 13 bp, Artificial Sequence
  Oligonucleotide for detection of SNP TSC0040761
accctacgactta

SEQ ID NO: 161987 - DNA, 13 bp, Artificial Sequence
  Oligonucleotide for detection of SNP TSC0040761
attttgtgattta

SEQ ID NO: 161988 - DNA, 13 bp, Artificial Sequence
  Oligonucleotide for detection of SNP TSC0040761
taaatcacaaaat

SEQ ID NO: 161989 - DNA, 13 bp, Artificial Sequence
  Oligonucleotide for detection of SNP TSC0040761
attttgcgattta

SEQ ID NO: 161990 - DNA, 13 bp, Artificial Sequence
  Oligonucleotide for detection of SNP TSC0040761
taaatcgcaaaat

SEQ ID NO: 161991 - DNA, 13 bp, Artificial Sequence
  Oligonucleotide for detection of SNP TSC0040762
gttttaaaaaaag

SEQ ID NO: 161992 - DNA, 13 bp, Artificial Sequence
  Oligonucleotide for detection of SNP TSC0040762
ctttttttaaaac

SEQ ID NO: 161993 - DNA, 13 bp, Artificial Sequence
  Oligonucleotide for detection of SNP TSC0040762
gttttataaaaag

SEQ ID NO: 161994 - DNA, 13 bp, Artificial Sequence
  Oligonucleotide for detection of SNP TSC0040762
ctttttataaaac

SEQ ID NO: 161995 - DNA, 13 bp, Artificial Sequence
  Oligonucleotide for detection of SNP TSC0040762
ttttttttaagay

SEQ ID NO: 161996 - DNA, 13 bp, Artificial Sequence
  Oligonucleotide for detection of SNP TSC0040762
rtcttaaaaaaaa

SEQ ID NO: 161997 - DNA, 13 bp, Artificial Sequence
  Oligonucleotide for detection of SNP TSC0005701
tagaattggagta

SEQ ID NO: 161998 - DNA, 13 bp, Artificial Sequence
  Oligonucleotide for detection of SNP TSC0005701
tactccaattcta

SEQ ID NO: 161999 - DNA, 13 bp, Artificial Sequence
  Oligonucleotide for detection of SNP TSC0005701
tagaatcggagta

SEQ ID NO: 162000 - DNA, 13 bp, Artificial Sequence
  Oligonucleotide for detection of SNP TSC0005701
tactccgattcta

SEQ ID NO: 162001 - DNA, 13 bp, Artificial Sequence
  Oligonucleotide for detection of SNP TSC0005701
tgtttcgatttta

SEQ ID NO: 162002 - DNA, 13 bp, Artificial Sequence
  Oligonucleotide for detection of SNP TSC0005701
taaaatcgaaaca

SEQ ID NO: 162003 - DNA, 13 bp, Artificial Sequence
  Oligonucleotide for detection of SNP TSC0005702
tagtatgtttaga

SEQ ID NO: 162004 - DNA, 13 bp, Artificial Sequence
  Oligonucleotide for detection of SNP TSC0005702
tctaaacatacta

SEQ ID NO: 162005 - DNA, 13 bp, Artificial Sequence
  Oligonucleotide for detection of SNP TSC0005702
tagtatatttaga

SEQ ID NO: 162006 - DNA, 13 bp, Artificial Sequence
  Oligonucleotide for detection of SNP TSC0005702
tctaaatatacta

SEQ ID NO: 162007 - DNA, 13 bp, Artificial Sequence
  Oligonucleotide for detection of SNP TSC0040767
tttgtttttgatt

SEQ ID NO: 162008 - DNA, 13 bp, Artificial Sequence
  Oligonucleotide for detection of SNP TSC0040767
aatcaaaaacaaa

SEQ ID NO: 162009 - DNA, 13 bp, Artificial Sequence
  Oligonucleotide for detection of SNP TSC0040767
tttgttgttgatt

SEQ ID NO: 162010 - DNA, 13 bp, Artificial Sequence
  Oligonucleotide for detection of SNP TSC0040767
aatcaacaacaaa

SEQ ID NO: 162011 - DNA, 13 bp, Artificial Sequence
  Oligonucleotide for detection of SNP TSC0040767
agttaagagtaag

SEQ ID NO: 162012 - DNA, 13 bp, Artificial Sequence
  Oligonucleotide for detection of SNP TSC0040767
cttactcttaact

SEQ ID NO: 162013 - DNA, 13 bp, Artificial Sequence
  Oligonucleotide for detection of SNP TSC0040767
agttaatagtaag

SEQ ID NO: 162014 - DNA, 13 bp, Artificial Sequence
  Oligonucleotide for detection of SNP TSC0040767
cttactattaact

SEQ ID NO: 162015 - DNA, 13 bp, Artificial Sequence
  Oligonucleotide for detection of SNP TSC0040769
agattatgagaaa

SEQ ID NO: 162016 - DNA, 13 bp, Artificial Sequence
  Oligonucleotide for detection of SNP TSC0040769
tttctcataatct

SEQ ID NO: 162017 - DNA, 13 bp, Artificial Sequence
  Oligonucleotide for detection of SNP TSC0040769
agattacgagaaa

SEQ ID NO: 162018 - DNA, 13 bp, Artificial Sequence
  Oligonucleotide for detection of SNP TSC0040769
tttctcgtaatct

SEQ ID NO: 162019 - DNA, 13 bp, Artificial Sequence
  Oligonucleotide for detection of SNP TSC0010274
ggaggttgtatgt

SEQ ID NO: 162020 - DNA, 13 bp, Artificial Sequence
  Oligonucleotide for detection of SNP TSC0010274
acatacaacctcc

SEQ ID NO: 162021 - DNA, 13 bp, Artificial Sequence
  Oligonucleotide for detection of SNP TSC0010274
ggaggtcgtatgt

SEQ ID NO: 162022 - DNA, 13 bp, Artificial Sequence
  Oligonucleotide for detection of SNP TSC0010274
acatacgacctcc

SEQ ID NO: 162023 - DNA, 13 bp, Artificial Sequence
  Oligonucleotide for detection of SNP TSC0010274
atatatgatttty

SEQ ID NO: 162024 - DNA, 13 bp, Artificial Sequence
  Oligonucleotide for detection of SNP TSC0010274
raaaatcatatat

SEQ ID NO: 162025 - DNA, 13 bp, Artificial Sequence
  Oligonucleotide for detection of SNP TSC0010274
atatacgatttty

SEQ ID NO: 162026 - DNA, 13 bp, Artificial Sequence
  Oligonucleotide for detection of SNP TSC0010274
raaaatcgtatat

SEQ ID NO: 162027 - DNA, 13 bp, Artificial Sequence
  Oligonucleotide for detection of SNP TSC0040770
ttgataatggggy

SEQ ID NO: 162028 - DNA, 13 bp, Artificial Sequence
  Oligonucleotide for detection of SNP TSC0040770
rccccattatcaa

SEQ ID NO: 162029 - DNA, 13 bp, Artificial Sequence
  Oligonucleotide for detection of SNP TSC0040770
ttgatattggggy

SEQ ID NO: 162030 - DNA, 13 bp, Artificial Sequence
  Oligonucleotide for detection of SNP TSC0040770
rccccaatatcaa

SEQ ID NO: 162031 - DNA, 13 bp, Artificial Sequence
  Oligonucleotide for detection of SNP TSC0040770
gttttattgttag

SEQ ID NO: 162032 - DNA, 13 bp, Artificial Sequence
  Oligonucleotide for detection of SNP TSC0040770
ctaacaataaaac

SEQ ID NO: 162033 - DNA, 13 bp, Artificial Sequence
  Oligonucleotide for detection of SNP TSC0040770
gttttagtgttag

SEQ ID NO: 162034 - DNA, 13 bp, Artificial Sequence
  Oligonucleotide for detection of SNP TSC0040770
ctaacactaaaac

SEQ ID NO: 162035 - DNA, 13 bp, Artificial Sequence
  Oligonucleotide for detection of SNP TSC0008499
gattttaaaaaaa

SEQ ID NO: 162036 - DNA, 13 bp, Artificial Sequence
  Oligonucleotide for detection of SNP TSC0008499
tttttttaaaatc

SEQ ID NO: 162037 - DNA, 13 bp, Artificial Sequence
  Oligonucleotide for detection of SNP TSC0008499
gatttttaaaaaa

SEQ ID NO: 162038 - DNA, 13 bp, Artificial Sequence
  Oligonucleotide for detection of SNP TSC0008499
ttttttaaaaatc

SEQ ID NO: 162039 - DNA, 13 bp, Artificial Sequence
  Oligonucleotide for detection of SNP TSC0040776
tttaatttaatta

SEQ ID NO: 162040 - DNA, 13 bp, Artificial Sequence
  Oligonucleotide for detection of SNP TSC0040776
taattaaattaaa

SEQ ID NO: 162041 - DNA, 13 bp, Artificial Sequence
  Oligonucleotide for detection of SNP TSC0040776
taattatattgag

SEQ ID NO: 162042 - DNA, 13 bp, Artificial Sequence
  Oligonucleotide for detection of SNP TSC0040776
ctcaatataatta

SEQ ID NO: 162043 - DNA, 13 bp, Artificial Sequence
  Oligonucleotide for detection of SNP TSC0040776
taattaaattgag

SEQ ID NO: 162044 - DNA, 13 bp, Artificial Sequence
  Oligonucleotide for detection of SNP TSC0040776
ctcaatttaatta

SEQ ID NO: 162045 - DNA, 13 bp, Artificial Sequence
  Oligonucleotide for detection of SNP TSC0040777
aatgatatatttg

SEQ ID NO: 162046 - DNA, 13 bp, Artificial Sequence
  Oligonucleotide for detection of SNP TSC0040777
caaatatatcatt

SEQ ID NO: 162047 - DNA, 13 bp, Artificial Sequence
  Oligonucleotide for detection of SNP TSC0040777
aatgatgtatttg

SEQ ID NO: 162048 - DNA, 13 bp, Artificial Sequence
  Oligonucleotide for detection of SNP TSC0040777
caaatacatcatt

SEQ ID NO: 162049 - DNA, 13 bp, Artificial Sequence
  Oligonucleotide for detection of SNP TSC0040777
aacgatatatttg

SEQ ID NO: 162050 - DNA, 13 bp, Artificial Sequence
  Oligonucleotide for detection of SNP TSC0040777
caaatatatcgtt

SEQ ID NO: 162051 - DNA, 13 bp, Artificial Sequence
  Oligonucleotide for detection of SNP TSC0040777
aacgatgtatttg

SEQ ID NO: 162052 - DNA, 13 bp, Artificial Sequence
  Oligonucleotide for detection of SNP TSC0040777
caaatacatcgtt

SEQ ID NO: 162053 - DNA, 13 bp, Artificial Sequence
  Oligonucleotide for detection of SNP TSC0040777
aatgacgtatttg

SEQ ID NO: 162054 - DNA, 13 bp, Artificial Sequence
  Oligonucleotide for detection of SNP TSC0040777
caaatacgtcatt

SEQ ID NO: 162055 - DNA, 13 bp, Artificial Sequence
  Oligonucleotide for detection of SNP TSC0040777
aacgacgtatttg

SEQ ID NO: 162056 - DNA, 13 bp, Artificial Sequence
  Oligonucleotide for detection of SNP TSC0040777
caaatacgtcgtt

SEQ ID NO: 162057 - DNA, 13 bp, Artificial Sequence
  Oligonucleotide for detection of SNP TSC0040777
taaatatgttgtt

SEQ ID NO: 162058 - DNA, 13 bp, Artificial Sequence
  Oligonucleotide for detection of SNP TSC0040777
aacaacatattta

SEQ ID NO: 162059 - DNA, 13 bp, Artificial Sequence
  Oligonucleotide for detection of SNP TSC0040777
taaatatgtcgtt

SEQ ID NO: 162060 - DNA, 13 bp, Artificial Sequence
  Oligonucleotide for detection of SNP TSC0040777
aacgacatattta

SEQ ID NO: 162061 - DNA, 13 bp, Artificial Sequence
  Oligonucleotide for detection of SNP TSC0040777
taaatacgttgtt

SEQ ID NO: 162062 - DNA, 13 bp, Artificial Sequence
  Oligonucleotide for detection of SNP TSC0040777
aacaacgtattta

SEQ ID NO: 162063 - DNA, 13 bp, Artificial Sequence
  Oligonucleotide for detection of SNP TSC0040777
taaatacgtcgtt

SEQ ID NO: 162064 - DNA, 13 bp, Artificial Sequence
  Oligonucleotide for detection of SNP TSC0040777
aacgacgtattta

SEQ ID NO: 162065 - DNA, 13 bp, Artificial Sequence
  Oligonucleotide for detection of SNP TSC0040780
ttgtaataatata

SEQ ID NO: 162066 - DNA, 13 bp, Artificial Sequence
  Oligonucleotide for detection of SNP TSC0040780
tatattattacaa

SEQ ID NO: 162067 - DNA, 13 bp, Artificial Sequence
  Oligonucleotide for detection of SNP TSC0040780
ttgtaagaatata

SEQ ID NO: 162068 - DNA, 13 bp, Artificial Sequence
  Oligonucleotide for detection of SNP TSC0040780
tatattcttacaa

SEQ ID NO: 162069 - DNA, 13 bp, Artificial Sequence
  Oligonucleotide for detection of SNP TSC0040780
tgtgttattataa

SEQ ID NO: 162070 - DNA, 13 bp, Artificial Sequence
  Oligonucleotide for detection of SNP TSC0040780
ttataataacaca

SEQ ID NO: 162071 - DNA, 13 bp, Artificial Sequence
  Oligonucleotide for detection of SNP TSC0040780
tgtgtttttataa

SEQ ID NO: 162072 - DNA, 13 bp, Artificial Sequence
  Oligonucleotide for detection of SNP TSC0040780
ttataaaaacaca

SEQ ID NO: 162073 - DNA, 13 bp, Artificial Sequence
  Oligonucleotide for detection of SNP TSC0040782
attttataagata

SEQ ID NO: 162074 - DNA, 13 bp, Artificial Sequence
  Oligonucleotide for detection of SNP TSC0040782
tatcttataaaat

SEQ ID NO: 162075 - DNA, 13 bp, Artificial Sequence
  Oligonucleotide for detection of SNP TSC0040782
attttagaagata

SEQ ID NO: 162076 - DNA, 13 bp, Artificial Sequence
  Oligonucleotide for detection of SNP TSC0040782
tatcttctaaaat

SEQ ID NO: 162077 - DNA, 13 bp, Artificial Sequence
  Oligonucleotide for detection of SNP TSC0040782
tgttttttaaagt

SEQ ID NO: 162078 - DNA, 13 bp, Artificial Sequence
  Oligonucleotide for detection of SNP TSC0040782
actttaaaaaaca

SEQ ID NO: 162079 - DNA, 13 bp, Artificial Sequence
  Oligonucleotide for detection of SNP TSC0040786
agtatatgtttaa

SEQ ID NO: 162080 - DNA, 13 bp, Artificial Sequence
  Oligonucleotide for detection of SNP TSC0040786
ttaaacatatact

SEQ ID NO: 162081 - DNA, 13 bp, Artificial Sequence
  Oligonucleotide for detection of SNP TSC0040786
agtatacgtttaa

SEQ ID NO: 162082 - DNA, 13 bp, Artificial Sequence
  Oligonucleotide for detection of SNP TSC0040786
ttaaacgtatact

SEQ ID NO: 162083 - DNA, 13 bp, Artificial Sequence
  Oligonucleotide for detection of SNP TSC0040786
ttggacgtgtgtt

SEQ ID NO: 162084 - DNA, 13 bp, Artificial Sequence
  Oligonucleotide for detection of SNP TSC0040786
aacacacgtccaa

SEQ ID NO: 162085 - DNA, 13 bp, Artificial Sequence
  Oligonucleotide for detection of SNP TSC0040787
attattgttggay

SEQ ID NO: 162086 - DNA, 13 bp, Artificial Sequence
  Oligonucleotide for detection of SNP TSC0040787
rtccaacaataat

SEQ ID NO: 162087 - DNA, 13 bp, Artificial Sequence
  Oligonucleotide for detection of SNP TSC0040787
attattattggay

SEQ ID NO: 162088 - DNA, 13 bp, Artificial Sequence
  Oligonucleotide for detection of SNP TSC0040787
rtccaataataat

SEQ ID NO: 162089 - DNA, 13 bp, Artificial Sequence
  Oligonucleotide for detection of SNP TSC0040788
gttgattgtataa

SEQ ID NO: 162090 - DNA, 13 bp, Artificial Sequence
  Oligonucleotide for detection of SNP TSC0040788
ttatacaatcaac

SEQ ID NO: 162091 - DNA, 13 bp, Artificial Sequence
  Oligonucleotide for detection of SNP TSC0040788
gttgatcgtataa

SEQ ID NO: 162092 - DNA, 13 bp, Artificial Sequence
  Oligonucleotide for detection of SNP TSC0040788
ttatacgatcaac

SEQ ID NO: 162093 - DNA, 13 bp, Artificial Sequence
  Oligonucleotide for detection of SNP TSC0040788
ttatatggttagy

SEQ ID NO: 162094 - DNA, 13 bp, Artificial Sequence
  Oligonucleotide for detection of SNP TSC0040788
rctaaccatataa

SEQ ID NO: 162095 - DNA, 13 bp, Artificial Sequence
  Oligonucleotide for detection of SNP TSC0040788
ttatatagttagy

SEQ ID NO: 162096 - DNA, 13 bp, Artificial Sequence
  Oligonucleotide for detection of SNP TSC0040788
rctaactatataa

SEQ ID NO: 162097 - DNA, 13 bp, Artificial Sequence
  Oligonucleotide for detection of SNP TSC0040788
ttatacggttagy

SEQ ID NO: 162098 - DNA, 13 bp, Artificial Sequence
  Oligonucleotide for detection of SNP TSC0040788
rctaaccgtataa

SEQ ID NO: 162099 - DNA, 13 bp, Artificial Sequence
  Oligonucleotide for detection of SNP TSC0040789
ttattggtaggay

SEQ ID NO: 162100 - DNA, 13 bp, Artificial Sequence
  Oligonucleotide for detection of SNP TSC0040789
rtcctaccaataa

SEQ ID NO: 162101 - DNA, 13 bp, Artificial Sequence
  Oligonucleotide for detection of SNP TSC0040789
ttattgataggay

SEQ ID NO: 162102 - DNA, 13 bp, Artificial Sequence
  Oligonucleotide for detection of SNP TSC0040789
rtcctatcaataa

SEQ ID NO: 162103 - DNA, 13 bp, Artificial Sequence
  Oligonucleotide for detection of SNP TSC0040790
ataaatagtataa

SEQ ID NO: 162104 - DNA, 13 bp, Artificial Sequence
  Oligonucleotide for detection of SNP TSC0040790
ttatactatttat

SEQ ID NO: 162105 - DNA, 13 bp, Artificial Sequence
  Oligonucleotide for detection of SNP TSC0040790
ataaatggtataa

SEQ ID NO: 162106 - DNA, 13 bp, Artificial Sequence
  Oligonucleotide for detection of SNP TSC0040790
ttataccatttat

SEQ ID NO: 162107 - DNA, 13 bp, Artificial Sequence
  Oligonucleotide for detection of SNP TSC0040792
tgttgaggatgty

SEQ ID NO: 162108 - DNA, 13 bp, Artificial Sequence
  Oligonucleotide for detection of SNP TSC0040792
racatcctcaaca

SEQ ID NO: 162109 - DNA, 13 bp, Artificial Sequence
  Oligonucleotide for detection of SNP TSC0040792
tgttgaagatgty

SEQ ID NO: 162110 - DNA, 13 bp, Artificial Sequence
  Oligonucleotide for detection of SNP TSC0040792
racatcttcaaca

SEQ ID NO: 162111 - DNA, 13 bp, Artificial Sequence
  Oligonucleotide for detection of SNP TSC0040792
cgttgaggatgty

SEQ ID NO: 162112 - DNA, 13 bp, Artificial Sequence
  Oligonucleotide for detection of SNP TSC0040792
racatcctcaacg

SEQ ID NO: 162113 - DNA, 13 bp, Artificial Sequence
  Oligonucleotide for detection of SNP TSC0040792
cgttgaagatgty

SEQ ID NO: 162114 - DNA, 13 bp, Artificial Sequence
  Oligonucleotide for detection of SNP TSC0040792
racatcttcaacg

SEQ ID NO: 162115 - DNA, 13 bp, Artificial Sequence
  Oligonucleotide for detection of SNP TSC0040793
gatatttattttt

SEQ ID NO: 162116 - DNA, 13 bp, Artificial Sequence
  Oligonucleotide for detection of SNP TSC0040793
aaaaataaatatc

SEQ ID NO: 162117 - DNA, 13 bp, Artificial Sequence
  Oligonucleotide for detection of SNP TSC0040793
aaagattaataty

SEQ ID NO: 162118 - DNA, 13 bp, Artificial Sequence
  Oligonucleotide for detection of SNP TSC0040793
ratattaatcttt

SEQ ID NO: 162119 - DNA, 13 bp, Artificial Sequence
  Oligonucleotide for detection of SNP TSC0040793
aaagatgaataty

SEQ ID NO: 162120 - DNA, 13 bp, Artificial Sequence
  Oligonucleotide for detection of SNP TSC0040793
ratattcatcttt

SEQ ID NO: 162121 - DNA, 13 bp, Artificial Sequence
  Oligonucleotide for detection of SNP TSC0040795
ttttagagttgat

SEQ ID NO: 162122 - DNA, 13 bp, Artificial Sequence
  Oligonucleotide for detection of SNP TSC0040795
atcaactctaaaa

SEQ ID NO: 162123 - DNA, 13 bp, Artificial Sequence
  Oligonucleotide for detection of SNP TSC0040795
ttttagtgttgat

SEQ ID NO: 162124 - DNA, 13 bp, Artificial Sequence
  Oligonucleotide for detection of SNP TSC0040795
atcaacactaaaa

SEQ ID NO: 162125 - DNA, 13 bp, Artificial Sequence
  Oligonucleotide for detection of SNP TSC0040795
ttttagagtcgat

SEQ ID NO: 162126 - DNA, 13 bp, Artificial Sequence
  Oligonucleotide for detection of SNP TSC0040795
atcgactctaaaa

SEQ ID NO: 162127 - DNA, 13 bp, Artificial Sequence
  Oligonucleotide for detection of SNP TSC0040795
ttttagcgttgat

SEQ ID NO: 162128 - DNA, 13 bp, Artificial Sequence
  Oligonucleotide for detection of SNP TSC0040795
atcaacgctaaaa

SEQ ID NO: 162129 - DNA, 13 bp, Artificial Sequence
  Oligonucleotide for detection of SNP TSC0040795
ttttagtgtcgat

SEQ ID NO: 162130 - DNA, 13 bp, Artificial Sequence
  Oligonucleotide for detection of SNP TSC0040795
atcgacactaaaa

SEQ ID NO: 162131 - DNA, 13 bp, Artificial Sequence
  Oligonucleotide for detection of SNP TSC0040795
ttttagcgtcgat

SEQ ID NO: 162132 - DNA, 13 bp, Artificial Sequence
  Oligonucleotide for detection of SNP TSC0040795
atcgacgctaaaa

SEQ ID NO: 162133 - DNA, 13 bp, Artificial Sequence
  Oligonucleotide for detection of SNP TSC0040795
attggttttgaaa

SEQ ID NO: 162134 - DNA, 13 bp, Artificial Sequence
  Oligonucleotide for detection of SNP TSC0040795
tttcaaaaccaat

SEQ ID NO: 162135 - DNA, 13 bp, Artificial Sequence
  Oligonucleotide for detection of SNP TSC0040795
attggtgttgaaa

SEQ ID NO: 162136 - DNA, 13 bp, Artificial Sequence
  Oligonucleotide for detection of SNP TSC0040795
tttcaacaccaat

SEQ ID NO: 162137 - DNA, 13 bp, Artificial Sequence
  Oligonucleotide for detection of SNP TSC0040795
atcggttttgaaa

SEQ ID NO: 162138 - DNA, 13 bp, Artificial Sequence
  Oligonucleotide for detection of SNP TSC0040795
tttcaaaaccgat

SEQ ID NO: 162139 - DNA, 13 bp, Artificial Sequence
  Oligonucleotide for detection of SNP TSC0040795
atcggtgttgaaa

SEQ ID NO: 162140 - DNA, 13 bp, Artificial Sequence
  Oligonucleotide for detection of SNP TSC0040795
tttcaacaccgat

SEQ ID NO: 162141 - DNA, 13 bp, Artificial Sequence
  Oligonucleotide for detection of SNP TSC0040795
attggcgttgaaa

SEQ ID NO: 162142 - DNA, 13 bp, Artificial Sequence
  Oligonucleotide for detection of SNP TSC0040795
tttcaacgccaat

SEQ ID NO: 162143 - DNA, 13 bp, Artificial Sequence
  Oligonucleotide for detection of SNP TSC0040795
atcggcgttgaaa

SEQ ID NO: 162144 - DNA, 13 bp, Artificial Sequence
  Oligonucleotide for detection of SNP TSC0040795
tttcaacgccgat

SEQ ID NO: 162145 - DNA, 13 bp, Artificial Sequence
  Oligonucleotide for detection of SNP TSC0040796
aagtaggaggaaa

SEQ ID NO: 162146 - DNA, 13 bp, Artificial Sequence
  Oligonucleotide for detection of SNP TSC0040796
tttcctcctactt

SEQ ID NO: 162147 - DNA, 13 bp, Artificial Sequence
  Oligonucleotide for detection of SNP TSC0040796
aagtagaaggaaa

SEQ ID NO: 162148 - DNA, 13 bp, Artificial Sequence
  Oligonucleotide for detection of SNP TSC0040796
tttccttctactt

SEQ ID NO: 162149 - DNA, 13 bp, Artificial Sequence
  Oligonucleotide for detection of SNP TSC0040797
tttaattattaty

SEQ ID NO: 162150 - DNA, 13 bp, Artificial Sequence
  Oligonucleotide for detection of SNP TSC0040797
rataataattaaa

SEQ ID NO: 162151 - DNA, 13 bp, Artificial Sequence
  Oligonucleotide for detection of SNP TSC0040797
tttaatgattaty

SEQ ID NO: 162152 - DNA, 13 bp, Artificial Sequence
  Oligonucleotide for detection of SNP TSC0040797
rataatcattaaa

SEQ ID NO: 162153 - DNA, 13 bp, Artificial Sequence
  Oligonucleotide for detection of SNP TSC0040797
tttaacgattaty

SEQ ID NO: 162154 - DNA, 13 bp, Artificial Sequence
  Oligonucleotide for detection of SNP TSC0040797
rataatcgttaaa

SEQ ID NO: 162155 - DNA, 13 bp, Artificial Sequence
  Oligonucleotide for detection of SNP TSC0040797
ggtggtagttggg

SEQ ID NO: 162156 - DNA, 13 bp, Artificial Sequence
  Oligonucleotide for detection of SNP TSC0040797
cccaactaccacc

SEQ ID NO: 162157 - DNA, 13 bp, Artificial Sequence
  Oligonucleotide for detection of SNP TSC0040797
ggtggttgttggg

SEQ ID NO: 162158 - DNA, 13 bp, Artificial Sequence
  Oligonucleotide for detection of SNP TSC0040797
cccaacaaccacc

SEQ ID NO: 162159 - DNA, 13 bp, Artificial Sequence
  Oligonucleotide for detection of SNP TSC0040797
ggtggtcgttggg

SEQ ID NO: 162160 - DNA, 13 bp, Artificial Sequence
  Oligonucleotide for detection of SNP TSC0040797
cccaacgaccacc

SEQ ID NO: 162161 - DNA, 13 bp, Artificial Sequence
  Oligonucleotide for detection of SNP TSC0040798
attggagtttagt

SEQ ID NO: 162162 - DNA, 13 bp, Artificial Sequence
  Oligonucleotide for detection of SNP TSC0040798
actaaactccaat

SEQ ID NO: 162163 - DNA, 13 bp, Artificial Sequence
  Oligonucleotide for detection of SNP TSC0040798
attggaatttagt

SEQ ID NO: 162164 - DNA, 13 bp, Artificial Sequence
  Oligonucleotide for detection of SNP TSC0040798
actaaattccaat

SEQ ID NO: 162165 - DNA, 13 bp, Artificial Sequence
  Oligonucleotide for detection of SNP TSC0040799
gagttatggggty

SEQ ID NO: 162166 - DNA, 13 bp, Artificial Sequence
  Oligonucleotide for detection of SNP TSC0040799
raccccataactc

SEQ ID NO: 162167 - DNA, 13 bp, Artificial Sequence
  Oligonucleotide for detection of SNP TSC0040799
gagttacggggty

SEQ ID NO: 162168 - DNA, 13 bp, Artificial Sequence
  Oligonucleotide for detection of SNP TSC0040799
raccccgtaactc

SEQ ID NO: 162169 - DNA, 13 bp, Artificial Sequence
  Oligonucleotide for detection of SNP TSC0040799
ggttttgtggtty

SEQ ID NO: 162170 - DNA, 13 bp, Artificial Sequence
  Oligonucleotide for detection of SNP TSC0040799
raaccacaaaacc

SEQ ID NO: 162171 - DNA, 13 bp, Artificial Sequence
  Oligonucleotide for detection of SNP TSC0040799
ggttttatggtty

SEQ ID NO: 162172 - DNA, 13 bp, Artificial Sequence
  Oligonucleotide for detection of SNP TSC0040799
raaccataaaacc

SEQ ID NO: 162173 - DNA, 13 bp, Artificial Sequence
  Oligonucleotide for detection of SNP TSC0040799
ggtttcgtggtty

SEQ ID NO: 162174 - DNA, 13 bp, Artificial Sequence
  Oligonucleotide for detection of SNP TSC0040799
raaccacgaaacc

SEQ ID NO: 162175 - DNA, 13 bp, Artificial Sequence
  Oligonucleotide for detection of SNP TSC0040803
tttttaggttgtt

SEQ ID NO: 162176 - DNA, 13 bp, Artificial Sequence
  Oligonucleotide for detection of SNP TSC0040803
aacaacctaaaaa

SEQ ID NO: 162177 - DNA, 13 bp, Artificial Sequence
  Oligonucleotide for detection of SNP TSC0040803
tttttaagttgtt

SEQ ID NO: 162178 - DNA, 13 bp, Artificial Sequence
  Oligonucleotide for detection of SNP TSC0040803
aacaacttaaaaa

SEQ ID NO: 162179 - DNA, 13 bp, Artificial Sequence
  Oligonucleotide for detection of SNP TSC0040804
aaattaaaaatga

SEQ ID NO: 162180 - DNA, 13 bp, Artificial Sequence
  Oligonucleotide for detection of SNP TSC0040804
tcatttttaattt

SEQ ID NO: 162181 - DNA, 13 bp, Artificial Sequence
  Oligonucleotide for detection of SNP TSC0040804
aaattagaaatga

SEQ ID NO: 162182 - DNA, 13 bp, Artificial Sequence
  Oligonucleotide for detection of SNP TSC0040804
tcatttctaattt

SEQ ID NO: 162183 - DNA, 13 bp, Artificial Sequence
  Oligonucleotide for detection of SNP TSC0040805
tatattgtgtttt

SEQ ID NO: 162184 - DNA, 13 bp, Artificial Sequence
  Oligonucleotide for detection of SNP TSC0040805
aaaacacaatata

SEQ ID NO: 162185 - DNA, 13 bp, Artificial Sequence
  Oligonucleotide for detection of SNP TSC0040805
tatattatgtttt

SEQ ID NO: 162186 - DNA, 13 bp, Artificial Sequence
  Oligonucleotide for detection of SNP TSC0040805
aaaacataatata

SEQ ID NO: 162187 - DNA, 13 bp, Artificial Sequence
  Oligonucleotide for detection of SNP TSC0040806
tatgaagtagtta

SEQ ID NO: 162188 - DNA, 13 bp, Artificial Sequence
  Oligonucleotide for detection of SNP TSC0040806
taactacttcata

SEQ ID NO: 162189 - DNA, 13 bp, Artificial Sequence
  Oligonucleotide for detection of SNP TSC0040806
tatgaaatagtta

SEQ ID NO: 162190 - DNA, 13 bp, Artificial Sequence
  Oligonucleotide for detection of SNP TSC0040806
taactatttcata

SEQ ID NO: 162191 - DNA, 13 bp, Artificial Sequence
  Oligonucleotide for detection of SNP TSC0040808
ttatagggaatgy

SEQ ID NO: 162192 - DNA, 13 bp, Artificial Sequence
  Oligonucleotide for detection of SNP TSC0040808
rcattccctataa

SEQ ID NO: 162193 - DNA, 13 bp, Artificial Sequence
  Oligonucleotide for detection of SNP TSC0040808
ttatagagaatgy

SEQ ID NO: 162194 - DNA, 13 bp, Artificial Sequence
  Oligonucleotide for detection of SNP TSC0040808
rcattctctataa

SEQ ID NO: 162195 - DNA, 13 bp, Artificial Sequence
  Oligonucleotide for detection of SNP TSC0040809
aatattatttggt

SEQ ID NO: 162196 - DNA, 13 bp, Artificial Sequence
  Oligonucleotide for detection of SNP TSC0040809
accaaataatatt

SEQ ID NO: 162197 - DNA, 13 bp, Artificial Sequence
  Oligonucleotide for detection of SNP TSC0040809
aatattgtttggt

SEQ ID NO: 162198 - DNA, 13 bp, Artificial Sequence
  Oligonucleotide for detection of SNP TSC0040809
accaaacaatatt

SEQ ID NO: 162199 - DNA, 13 bp, Artificial Sequence
  Oligonucleotide for detection of SNP TSC0040809
aatatcgtttggt

SEQ ID NO: 162200 - DNA, 13 bp, Artificial Sequence
  Oligonucleotide for detection of SNP TSC0040809
accaaacgatatt

SEQ ID NO: 162201 - DNA, 13 bp, Artificial Sequence
  Oligonucleotide for detection of SNP TSC0040809
attaggtggtatt

SEQ ID NO: 162202 - DNA, 13 bp, Artificial Sequence
  Oligonucleotide for detection of SNP TSC0040809
aataccacctaat

SEQ ID NO: 162203 - DNA, 13 bp, Artificial Sequence
  Oligonucleotide for detection of SNP TSC0040809
attaggcggtatt

SEQ ID NO: 162204 - DNA, 13 bp, Artificial Sequence
  Oligonucleotide for detection of SNP TSC0040809
aataccgcctaat

SEQ ID NO: 162205 - DNA, 13 bp, Artificial Sequence
  Oligonucleotide for detection of SNP TSC0040810
taaggtaaaatay

SEQ ID NO: 162206 - DNA, 13 bp, Artificial Sequence
  Oligonucleotide for detection of SNP TSC0040810
rtattttacctta

SEQ ID NO: 162207 - DNA, 13 bp, Artificial Sequence
  Oligonucleotide for detection of SNP TSC0040810
taaggtgaaatay

SEQ ID NO: 162208 - DNA, 13 bp, Artificial Sequence
  Oligonucleotide for detection of SNP TSC0040810
rtatttcacctta

SEQ ID NO: 162209 - DNA, 13 bp, Artificial Sequence
  Oligonucleotide for detection of SNP TSC0040810
taaggcgaaatay

SEQ ID NO: 162210 - DNA, 13 bp, Artificial Sequence
  Oligonucleotide for detection of SNP TSC0040810
rtatttcgcctta

SEQ ID NO: 162211 - DNA, 13 bp, Artificial Sequence
  Oligonucleotide for detection of SNP TSC0040810
gtattttgtttta

SEQ ID NO: 162212 - DNA, 13 bp, Artificial Sequence
  Oligonucleotide for detection of SNP TSC0040810
taaaacaaaatac

SEQ ID NO: 162213 - DNA, 13 bp, Artificial Sequence
  Oligonucleotide for detection of SNP TSC0040810
gtatttcgtttta

SEQ ID NO: 162214 - DNA, 13 bp, Artificial Sequence
  Oligonucleotide for detection of SNP TSC0040810
taaaacgaaatac

SEQ ID NO: 162215 - DNA, 13 bp, Artificial Sequence
  Oligonucleotide for detection of SNP TSC0040811
gttgattgggtaa

SEQ ID NO: 162216 - DNA, 13 bp, Artificial Sequence
  Oligonucleotide for detection of SNP TSC0040811
ttacccaatcaac

SEQ ID NO: 162217 - DNA, 13 bp, Artificial Sequence
  Oligonucleotide for detection of SNP TSC0040811
gttgatcgggtaa

SEQ ID NO: 162218 - DNA, 13 bp, Artificial Sequence
  Oligonucleotide for detection of SNP TSC0040811
ttacccgatcaac

SEQ ID NO: 162219 - DNA, 13 bp, Artificial Sequence
  Oligonucleotide for detection of SNP TSC0040811
ttgtttgattagy

SEQ ID NO: 162220 - DNA, 13 bp, Artificial Sequence
  Oligonucleotide for detection of SNP TSC0040811
rctaatcaaacaa

SEQ ID NO: 162221 - DNA, 13 bp, Artificial Sequence
  Oligonucleotide for detection of SNP TSC0040811
ttgtttaattagy

SEQ ID NO: 162222 - DNA, 13 bp, Artificial Sequence
  Oligonucleotide for detection of SNP TSC0040811
rctaattaaacaa

SEQ ID NO: 162223 - DNA, 13 bp, Artificial Sequence
  Oligonucleotide for detection of SNP TSC0040811
ttgttcgattagy

SEQ ID NO: 162224 - DNA, 13 bp, Artificial Sequence
  Oligonucleotide for detection of SNP TSC0040811
rctaatcgaacaa

SEQ ID NO: 162225 - DNA, 13 bp, Artificial Sequence
  Oligonucleotide for detection of SNP TSC0040812
ttttttgtaagty

SEQ ID NO: 162226 - DNA, 13 bp, Artificial Sequence
  Oligonucleotide for detection of SNP TSC0040812
racttacaaaaaa

SEQ ID NO: 162227 - DNA, 13 bp, Artificial Sequence
  Oligonucleotide for detection of SNP TSC0040813
agggagggaatgg

SEQ ID NO: 162228 - DNA, 13 bp, Artificial Sequence
  Oligonucleotide for detection of SNP TSC0040813
ccattccctccct

SEQ ID NO: 162229 - DNA, 13 bp, Artificial Sequence
  Oligonucleotide for detection of SNP TSC0040813
agggagagaatgg

SEQ ID NO: 162230 - DNA, 13 bp, Artificial Sequence
  Oligonucleotide for detection of SNP TSC0040813
ccattctctccct

SEQ ID NO: 162231 - DNA, 13 bp, Artificial Sequence
  Oligonucleotide for detection of SNP TSC0006714
aattatatatttt

SEQ ID NO: 162232 - DNA, 13 bp, Artificial Sequence
  Oligonucleotide for detection of SNP TSC0006714
aaaatatataatt

SEQ ID NO: 162233 - DNA, 13 bp, Artificial Sequence
  Oligonucleotide for detection of SNP TSC0040814
atgtttatgttta

SEQ ID NO: 162234 - DNA, 13 bp, Artificial Sequence
  Oligonucleotide for detection of SNP TSC0040814
taaacataaacat

SEQ ID NO: 162235 - DNA, 13 bp, Artificial Sequence
  Oligonucleotide for detection of SNP TSC0040814
atgtttgtgttta

SEQ ID NO: 162236 - DNA, 13 bp, Artificial Sequence
  Oligonucleotide for detection of SNP TSC0040814
taaacacaaacat

SEQ ID NO: 162237 - DNA, 13 bp, Artificial Sequence
  Oligonucleotide for detection of SNP TSC0040814
atgttcgtgttta

SEQ ID NO: 162238 - DNA, 13 bp, Artificial Sequence
  Oligonucleotide for detection of SNP TSC0040814
taaacacgaacat

SEQ ID NO: 162239 - DNA, 13 bp, Artificial Sequence
  Oligonucleotide for detection of SNP TSC0040814
tgaatatgaatat

SEQ ID NO: 162240 - DNA, 13 bp, Artificial Sequence
  Oligonucleotide for detection of SNP TSC0040814
atattcatattca

SEQ ID NO: 162241 - DNA, 13 bp, Artificial Sequence
  Oligonucleotide for detection of SNP TSC0040814
tgaatacgaatat

SEQ ID NO: 162242 - DNA, 13 bp, Artificial Sequence
  Oligonucleotide for detection of SNP TSC0040814
atattcgtattca

SEQ ID NO: 162243 - DNA, 13 bp, Artificial Sequence
  Oligonucleotide for detection of SNP TSC0040815
atttaaatagtaa

SEQ ID NO: 162244 - DNA, 13 bp, Artificial Sequence
  Oligonucleotide for detection of SNP TSC0040815
ttactatttaaat

SEQ ID NO: 162245 - DNA, 13 bp, Artificial Sequence
  Oligonucleotide for detection of SNP TSC0040815
atttaattagtaa

SEQ ID NO: 162246 - DNA, 13 bp, Artificial Sequence
  Oligonucleotide for detection of SNP TSC0040815
ttactaattaaat

SEQ ID NO: 162247 - DNA, 13 bp, Artificial Sequence
  Oligonucleotide for detection of SNP TSC0040815
ttgttgtttaaat

SEQ ID NO: 162248 - DNA, 13 bp, Artificial Sequence
  Oligonucleotide for detection of SNP TSC0040815
atttaaacaacaa

SEQ ID NO: 162249 - DNA, 13 bp, Artificial Sequence
  Oligonucleotide for detection of SNP TSC0040815
ttgttggttaaat

SEQ ID NO: 162250 - DNA, 13 bp, Artificial Sequence
  Oligonucleotide for detection of SNP TSC0040815
atttaaccaacaa

SEQ ID NO: 162251 - DNA, 13 bp, Artificial Sequence
  Oligonucleotide for detection of SNP TSC0040816
tttaatattataa

SEQ ID NO: 162252 - DNA, 13 bp, Artificial Sequence
  Oligonucleotide for detection of SNP TSC0040816
ttataatattaaa

SEQ ID NO: 162253 - DNA, 13 bp, Artificial Sequence
  Oligonucleotide for detection of SNP TSC0040816
tttaatgttataa

SEQ ID NO: 162254 - DNA, 13 bp, Artificial Sequence
  Oligonucleotide for detection of SNP TSC0040816
ttataacattaaa

SEQ ID NO: 162255 - DNA, 13 bp, Artificial Sequence
  Oligonucleotide for detection of SNP TSC0040818
tgtttatgtttta

SEQ ID NO: 162256 - DNA, 13 bp, Artificial Sequence
  Oligonucleotide for detection of SNP TSC0040818
taaaacataaaca

SEQ ID NO: 162257 - DNA, 13 bp, Artificial Sequence
  Oligonucleotide for detection of SNP TSC0040818
tgtttacgtttta

SEQ ID NO: 162258 - DNA, 13 bp, Artificial Sequence
  Oligonucleotide for detection of SNP TSC0040818
taaaacgtaaaca

SEQ ID NO: 162259 - DNA, 13 bp, Artificial Sequence
  Oligonucleotide for detection of SNP TSC0040818
taggatgtgagta

SEQ ID NO: 162260 - DNA, 13 bp, Artificial Sequence
  Oligonucleotide for detection of SNP TSC0040818
tactcacatccta

SEQ ID NO: 162261 - DNA, 13 bp, Artificial Sequence
  Oligonucleotide for detection of SNP TSC0040818
taggatatgagta

SEQ ID NO: 162262 - DNA, 13 bp, Artificial Sequence
  Oligonucleotide for detection of SNP TSC0040818
tactcatatccta

SEQ ID NO: 162263 - DNA, 13 bp, Artificial Sequence
  Oligonucleotide for detection of SNP TSC0040818
taggacgtgagta

SEQ ID NO: 162264 - DNA, 13 bp, Artificial Sequence
  Oligonucleotide for detection of SNP TSC0040818
tactcacgtccta

SEQ ID NO: 162265 - DNA, 13 bp, Artificial Sequence
  Oligonucleotide for detection of SNP TSC0040819
gttagaagatatt

SEQ ID NO: 162266 - DNA, 13 bp, Artificial Sequence
  Oligonucleotide for detection of SNP TSC0040819
aatatcttctaac

SEQ ID NO: 162267 - DNA, 13 bp, Artificial Sequence
  Oligonucleotide for detection of SNP TSC0040819
gttagatgatatt

SEQ ID NO: 162268 - DNA, 13 bp, Artificial Sequence
  Oligonucleotide for detection of SNP TSC0040819
aatatcatctaac

SEQ ID NO: 162269 - DNA, 13 bp, Artificial Sequence
  Oligonucleotide for detection of SNP TSC0040819
agtgttttttagy

SEQ ID NO: 162270 - DNA, 13 bp, Artificial Sequence
  Oligonucleotide for detection of SNP TSC0040819
rctaaaaaacact

SEQ ID NO: 162271 - DNA, 13 bp, Artificial Sequence
  Oligonucleotide for detection of SNP TSC0040819
agtgttatttagy

SEQ ID NO: 162272 - DNA, 13 bp, Artificial Sequence
  Oligonucleotide for detection of SNP TSC0040819
rctaaataacact

SEQ ID NO: 162273 - DNA, 13 bp, Artificial Sequence
  Oligonucleotide for detection of SNP TSC0040820
aggggagtaggat

SEQ ID NO: 162274 - DNA, 13 bp, Artificial Sequence
  Oligonucleotide for detection of SNP TSC0040820
atcctactcccct

SEQ ID NO: 162275 - DNA, 13 bp, Artificial Sequence
  Oligonucleotide for detection of SNP TSC0040820
aggggattaggat

SEQ ID NO: 162276 - DNA, 13 bp, Artificial Sequence
  Oligonucleotide for detection of SNP TSC0040820
atcctaatcccct

SEQ ID NO: 162277 - DNA, 13 bp, Artificial Sequence
  Oligonucleotide for detection of SNP TSC0040821
aaagtaaaagtag

SEQ ID NO: 162278 - DNA, 13 bp, Artificial Sequence
  Oligonucleotide for detection of SNP TSC0040821
ctacttttacttt

SEQ ID NO: 162279 - DNA, 13 bp, Artificial Sequence
  Oligonucleotide for detection of SNP TSC0040821
aaagtataagtag

SEQ ID NO: 162280 - DNA, 13 bp, Artificial Sequence
  Oligonucleotide for detection of SNP TSC0040821
ctacttatacttt

SEQ ID NO: 162281 - DNA, 13 bp, Artificial Sequence
  Oligonucleotide for detection of SNP TSC0040821
aaagtagaagtag

SEQ ID NO: 162282 - DNA, 13 bp, Artificial Sequence
  Oligonucleotide for detection of SNP TSC0040821
ctacttctacttt

SEQ ID NO: 162283 - DNA, 13 bp, Artificial Sequence
  Oligonucleotide for detection of SNP TSC0040822
tttttgagaataa

SEQ ID NO: 162284 - DNA, 13 bp, Artificial Sequence
  Oligonucleotide for detection of SNP TSC0040822
ttattctcaaaaa

SEQ ID NO: 162285 - DNA, 13 bp, Artificial Sequence
  Oligonucleotide for detection of SNP TSC0040822
tttttgtgaataa

SEQ ID NO: 162286 - DNA, 13 bp, Artificial Sequence
  Oligonucleotide for detection of SNP TSC0040822
ttattcacaaaaa

SEQ ID NO: 162287 - DNA, 13 bp, Artificial Sequence
  Oligonucleotide for detection of SNP TSC0040822
ttgtttttaaagg

SEQ ID NO: 162288 - DNA, 13 bp, Artificial Sequence
  Oligonucleotide for detection of SNP TSC0040822
cctttaaaaacaa

SEQ ID NO: 162289 - DNA, 13 bp, Artificial Sequence
  Oligonucleotide for detection of SNP TSC0040822
ttgtttataaagg

SEQ ID NO: 162290 - DNA, 13 bp, Artificial Sequence
  Oligonucleotide for detection of SNP TSC0040822
cctttataaacaa

SEQ ID NO: 162291 - DNA, 13 bp, Artificial Sequence
  Oligonucleotide for detection of SNP TSC0007979
attagggataaga

SEQ ID NO: 162292 - DNA, 13 bp, Artificial Sequence
  Oligonucleotide for detection of SNP TSC0007979
tcttatccctaat

SEQ ID NO: 162293 - DNA, 13 bp, Artificial Sequence
  Oligonucleotide for detection of SNP TSC0007979
attaggaataaga

SEQ ID NO: 162294 - DNA, 13 bp, Artificial Sequence
  Oligonucleotide for detection of SNP TSC0007979
tcttattcctaat

SEQ ID NO: 162295 - DNA, 13 bp, Artificial Sequence
  Oligonucleotide for detection of SNP TSC0009377
aaattaatagtgg

SEQ ID NO: 162296 - DNA, 13 bp, Artificial Sequence
  Oligonucleotide for detection of SNP TSC0009377
ccactattaattt

SEQ ID NO: 162297 - DNA, 13 bp, Artificial Sequence
  Oligonucleotide for detection of SNP TSC0009377
aaattagtagtgg

SEQ ID NO: 162298 - DNA, 13 bp, Artificial Sequence
  Oligonucleotide for detection of SNP TSC0009377
ccactactaattt

SEQ ID NO: 162299 - DNA, 13 bp, Artificial Sequence
  Oligonucleotide for detection of SNP TSC0040823
gtttttatgattt

SEQ ID NO: 162300 - DNA, 13 bp, Artificial Sequence
  Oligonucleotide for detection of SNP TSC0040823
aaatcataaaaac

SEQ ID NO: 162301 - DNA, 13 bp, Artificial Sequence
  Oligonucleotide for detection of SNP TSC0040823
gtttttgtgattt

SEQ ID NO: 162302 - DNA, 13 bp, Artificial Sequence
  Oligonucleotide for detection of SNP TSC0040823
aaatcacaaaaac

SEQ ID NO: 162303 - DNA, 13 bp, Artificial Sequence
  Oligonucleotide for detection of SNP TSC0040824
taatttaattaga

SEQ ID NO: 162304 - DNA, 13 bp, Artificial Sequence
  Oligonucleotide for detection of SNP TSC0040824
tctaattaaatta

SEQ ID NO: 162305 - DNA, 13 bp, Artificial Sequence
  Oligonucleotide for detection of SNP TSC0040824
taatttgattaga

SEQ ID NO: 162306 - DNA, 13 bp, Artificial Sequence
  Oligonucleotide for detection of SNP TSC0040824
tctaatcaaatta

SEQ ID NO: 162307 - DNA, 13 bp, Artificial Sequence
  Oligonucleotide for detection of SNP TSC0040824
taattcgattaga

SEQ ID NO: 162308 - DNA, 13 bp, Artificial Sequence
  Oligonucleotide for detection of SNP TSC0040824
tctaatcgaatta

SEQ ID NO: 162309 - DNA, 13 bp, Artificial Sequence
  Oligonucleotide for detection of SNP TSC0040824
tttggttgaattg

SEQ ID NO: 162310 - DNA, 13 bp, Artificial Sequence
  Oligonucleotide for detection of SNP TSC0040824
caattcaaccaaa

SEQ ID NO: 162311 - DNA, 13 bp, Artificial Sequence
  Oligonucleotide for detection of SNP TSC0040824
tttggtcgaattg

SEQ ID NO: 162312 - DNA, 13 bp, Artificial Sequence
  Oligonucleotide for detection of SNP TSC0040824
caattcgaccaaa

SEQ ID NO: 162313 - DNA, 13 bp, Artificial Sequence
  Oligonucleotide for detection of SNP TSC0040825
ttatatagttaay

SEQ ID NO: 162314 - DNA, 13 bp, Artificial Sequence
  Oligonucleotide for detection of SNP TSC0040825
rttaactatataa

SEQ ID NO: 162315 - DNA, 13 bp, Artificial Sequence
  Oligonucleotide for detection of SNP TSC0040825
ttatatggttaay

SEQ ID NO: 162316 - DNA, 13 bp, Artificial Sequence
  Oligonucleotide for detection of SNP TSC0040825
rttaaccatataa

SEQ ID NO: 162317 - DNA, 13 bp, Artificial Sequence
  Oligonucleotide for detection of SNP TSC0040826
attgtgatttttt

SEQ ID NO: 162318 - DNA, 13 bp, Artificial Sequence
  Oligonucleotide for detection of SNP TSC0040826
aaaaaatcacaat

SEQ ID NO: 162319 - DNA, 13 bp, Artificial Sequence
  Oligonucleotide for detection of SNP TSC0040827
aaaaaagtttaga

SEQ ID NO: 162320 - DNA, 13 bp, Artificial Sequence
  Oligonucleotide for detection of SNP TSC0040827
tctaaactttttt

SEQ ID NO: 162321 - DNA, 13 bp, Artificial Sequence
  Oligonucleotide for detection of SNP TSC0040828
atagttatttaaa

SEQ ID NO: 162322 - DNA, 13 bp, Artificial Sequence
  Oligonucleotide for detection of SNP TSC0040828
tttaaataactat

SEQ ID NO: 162323 - DNA, 13 bp, Artificial Sequence
  Oligonucleotide for detection of SNP TSC0040828
atagttgtttaaa

SEQ ID NO: 162324 - DNA, 13 bp, Artificial Sequence
  Oligonucleotide for detection of SNP TSC0040828
tttaaacaactat

SEQ ID NO: 162325 - DNA, 13 bp, Artificial Sequence
  Oligonucleotide for detection of SNP TSC0040829
atggagttttaat

SEQ ID NO: 162326 - DNA, 13 bp, Artificial Sequence
  Oligonucleotide for detection of SNP TSC0040829
attaaaactccat

SEQ ID NO: 162327 - DNA, 13 bp, Artificial Sequence
  Oligonucleotide for detection of SNP TSC0040829
atggaggtttaat

SEQ ID NO: 162328 - DNA, 13 bp, Artificial Sequence
  Oligonucleotide for detection of SNP TSC0040829
attaaacctccat

SEQ ID NO: 162329 - DNA, 13 bp, Artificial Sequence
  Oligonucleotide for detection of SNP TSC0040829
acggagttttaat

SEQ ID NO: 162330 - DNA, 13 bp, Artificial Sequence
  Oligonucleotide for detection of SNP TSC0040829
attaaaactccgt

SEQ ID NO: 162331 - DNA, 13 bp, Artificial Sequence
  Oligonucleotide for detection of SNP TSC0040829
acggaggtttaat

SEQ ID NO: 162332 - DNA, 13 bp, Artificial Sequence
  Oligonucleotide for detection of SNP TSC0040829
attaaacctccgt

SEQ ID NO: 162333 - DNA, 13 bp, Artificial Sequence
  Oligonucleotide for detection of SNP TSC0040829
attgaaattttgt

SEQ ID NO: 162334 - DNA, 13 bp, Artificial Sequence
  Oligonucleotide for detection of SNP TSC0040829
acaaaatttcaat

SEQ ID NO: 162335 - DNA, 13 bp, Artificial Sequence
  Oligonucleotide for detection of SNP TSC0040829
attgaatttttgt

SEQ ID NO: 162336 - DNA, 13 bp, Artificial Sequence
  Oligonucleotide for detection of SNP TSC0040829
acaaaaattcaat

SEQ ID NO: 162337 - DNA, 13 bp, Artificial Sequence
  Oligonucleotide for detection of SNP TSC0040829
attgaaatttcgt

SEQ ID NO: 162338 - DNA, 13 bp, Artificial Sequence
  Oligonucleotide for detection of SNP TSC0040829
acgaaatttcaat

SEQ ID NO: 162339 - DNA, 13 bp, Artificial Sequence
  Oligonucleotide for detection of SNP TSC0040829
attgaattttcgt

SEQ ID NO: 162340 - DNA, 13 bp, Artificial Sequence
  Oligonucleotide for detection of SNP TSC0040829
acgaaaattcaat

SEQ ID NO: 162341 - DNA, 13 bp, Artificial Sequence
  Oligonucleotide for detection of SNP TSC0040831
aagaggaaggtta

SEQ ID NO: 162342 - DNA, 13 bp, Artificial Sequence
  Oligonucleotide for detection of SNP TSC0040831
taaccttcctctt

SEQ ID NO: 162343 - DNA, 13 bp, Artificial Sequence
  Oligonucleotide for detection of SNP TSC0040831
aagagggaggtta

SEQ ID NO: 162344 - DNA, 13 bp, Artificial Sequence
  Oligonucleotide for detection of SNP TSC0040831
taacctccctctt

SEQ ID NO: 162345 - DNA, 13 bp, Artificial Sequence
  Oligonucleotide for detection of SNP TSC0040832
ttagttttagggt

SEQ ID NO: 162346 - DNA, 13 bp, Artificial Sequence
  Oligonucleotide for detection of SNP TSC0040832
accctaaaactaa

SEQ ID NO: 162347 - DNA, 13 bp, Artificial Sequence
  Oligonucleotide for detection of SNP TSC0040832
ttagttgtagggt

SEQ ID NO: 162348 - DNA, 13 bp, Artificial Sequence
  Oligonucleotide for detection of SNP TSC0040832
accctacaactaa

SEQ ID NO: 162349 - DNA, 13 bp, Artificial Sequence
  Oligonucleotide for detection of SNP TSC0040832
attttagaattga

SEQ ID NO: 162350 - DNA, 13 bp, Artificial Sequence
  Oligonucleotide for detection of SNP TSC0040832
tcaattctaaaat

SEQ ID NO: 162351 - DNA, 13 bp, Artificial Sequence
  Oligonucleotide for detection of SNP TSC0040832
attttataattga

SEQ ID NO: 162352 - DNA, 13 bp, Artificial Sequence
  Oligonucleotide for detection of SNP TSC0040832
tcaattataaaat

SEQ ID NO: 162353 - DNA, 13 bp, Artificial Sequence
  Oligonucleotide for detection of SNP TSC0040833
taatatgtatatg

SEQ ID NO: 162354 - DNA, 13 bp, Artificial Sequence
  Oligonucleotide for detection of SNP TSC0040833
catatacatatta

SEQ ID NO: 162355 - DNA, 13 bp, Artificial Sequence
  Oligonucleotide for detection of SNP TSC0040833
taatatatatatg

SEQ ID NO: 162356 - DNA, 13 bp, Artificial Sequence
  Oligonucleotide for detection of SNP TSC0040833
catatatatatta

SEQ ID NO: 162357 - DNA, 13 bp, Artificial Sequence
  Oligonucleotide for detection of SNP TSC0040842
atatgatttgaag

SEQ ID NO: 162358 - DNA, 13 bp, Artificial Sequence
  Oligonucleotide for detection of SNP TSC0040842
cttcaaatcatat

SEQ ID NO: 162359 - DNA, 13 bp, Artificial Sequence
  Oligonucleotide for detection of SNP TSC0040842
atatgagttgaag

SEQ ID NO: 162360 - DNA, 13 bp, Artificial Sequence
  Oligonucleotide for detection of SNP TSC0040842
cttcaactcatat

SEQ ID NO: 162361 - DNA, 13 bp, Artificial Sequence
  Oligonucleotide for detection of SNP TSC0040842
ttttagattatat

SEQ ID NO: 162362 - DNA, 13 bp, Artificial Sequence
  Oligonucleotide for detection of SNP TSC0040842
atataatctaaaa

SEQ ID NO: 162363 - DNA, 13 bp, Artificial Sequence
  Oligonucleotide for detection of SNP TSC0040842
ttttagtttatat

SEQ ID NO: 162364 - DNA, 13 bp, Artificial Sequence
  Oligonucleotide for detection of SNP TSC0040842
atataaactaaaa

SEQ ID NO: 162365 - DNA, 13 bp, Artificial Sequence
  Oligonucleotide for detection of SNP TSC0040843
ttgtttatttagy

SEQ ID NO: 162366 - DNA, 13 bp, Artificial Sequence
  Oligonucleotide for detection of SNP TSC0040843
rctaaataaacaa

SEQ ID NO: 162367 - DNA, 13 bp, Artificial Sequence
  Oligonucleotide for detection of SNP TSC0040843
ttgtttttttagy

SEQ ID NO: 162368 - DNA, 13 bp, Artificial Sequence
  Oligonucleotide for detection of SNP TSC0040843
rctaaaaaaacaa

SEQ ID NO: 162369 - DNA, 13 bp, Artificial Sequence
  Oligonucleotide for detection of SNP TSC0040843
gttgagtaggtaa

SEQ ID NO: 162370 - DNA, 13 bp, Artificial Sequence
  Oligonucleotide for detection of SNP TSC0040843
ttacctactcaac

SEQ ID NO: 162371 - DNA, 13 bp, Artificial Sequence
  Oligonucleotide for detection of SNP TSC0040843
gttgaggaggtaa

SEQ ID NO: 162372 - DNA, 13 bp, Artificial Sequence
  Oligonucleotide for detection of SNP TSC0040843
ttacctcctcaac

SEQ ID NO: 162373 - DNA, 13 bp, Artificial Sequence
  Oligonucleotide for detection of SNP TSC0040844
tataaggttatta

SEQ ID NO: 162374 - DNA, 13 bp, Artificial Sequence
  Oligonucleotide for detection of SNP TSC0040844
taataaccttata

SEQ ID NO: 162375 - DNA, 13 bp, Artificial Sequence
  Oligonucleotide for detection of SNP TSC0040844
tataagattatta

SEQ ID NO: 162376 - DNA, 13 bp, Artificial Sequence
  Oligonucleotide for detection of SNP TSC0040844
taataatcttata

SEQ ID NO: 162377 - DNA, 13 bp, Artificial Sequence
  Oligonucleotide for detection of SNP TSC0040845
agttatatatgta

SEQ ID NO: 162378 - DNA, 13 bp, Artificial Sequence
  Oligonucleotide for detection of SNP TSC0040845
tacatatataact

SEQ ID NO: 162379 - DNA, 13 bp, Artificial Sequence
  Oligonucleotide for detection of SNP TSC0040845
agttatgtatgta

SEQ ID NO: 162380 - DNA, 13 bp, Artificial Sequence
  Oligonucleotide for detection of SNP TSC0040845
tacatacataact

SEQ ID NO: 162381 - DNA, 13 bp, Artificial Sequence
  Oligonucleotide for detection of SNP TSC0040847
ttattaatatagt

SEQ ID NO: 162382 - DNA, 13 bp, Artificial Sequence
  Oligonucleotide for detection of SNP TSC0040847
actatattaataa

SEQ ID NO: 162383 - DNA, 13 bp, Artificial Sequence
  Oligonucleotide for detection of SNP TSC0040847
ttattagtatagt

SEQ ID NO: 162384 - DNA, 13 bp, Artificial Sequence
  Oligonucleotide for detection of SNP TSC0040847
actatactaataa

SEQ ID NO: 162385 - DNA, 13 bp, Artificial Sequence
  Oligonucleotide for detection of SNP TSC0040848
ttttatgttatgt

SEQ ID NO: 162386 - DNA, 13 bp, Artificial Sequence
  Oligonucleotide for detection of SNP TSC0040848
acataacataaaa

SEQ ID NO: 162387 - DNA, 13 bp, Artificial Sequence
  Oligonucleotide for detection of SNP TSC0040848
ttttatattatgt

SEQ ID NO: 162388 - DNA, 13 bp, Artificial Sequence
  Oligonucleotide for detection of SNP TSC0040848
acataatataaaa

SEQ ID NO: 162389 - DNA, 13 bp, Artificial Sequence
  Oligonucleotide for detection of SNP TSC0040849
tttttttgtaatg

SEQ ID NO: 162390 - DNA, 13 bp, Artificial Sequence
  Oligonucleotide for detection of SNP TSC0040849
cattacaaaaaaa

SEQ ID NO: 162391 - DNA, 13 bp, Artificial Sequence
  Oligonucleotide for detection of SNP TSC0040849
ttttttcgtaatg

SEQ ID NO: 162392 - DNA, 13 bp, Artificial Sequence
  Oligonucleotide for detection of SNP TSC0040849
cattacgaaaaaa

SEQ ID NO: 162393 - DNA, 13 bp, Artificial Sequence
  Oligonucleotide for detection of SNP TSC0040849
tattatgggagaa

SEQ ID NO: 162394 - DNA, 13 bp, Artificial Sequence
  Oligonucleotide for detection of SNP TSC0040849
ttctcccataata

SEQ ID NO: 162395 - DNA, 13 bp, Artificial Sequence
  Oligonucleotide for detection of SNP TSC0040849
tattataggagaa

SEQ ID NO: 162396 - DNA, 13 bp, Artificial Sequence
  Oligonucleotide for detection of SNP TSC0040849
ttctcctataata

SEQ ID NO: 162397 - DNA, 13 bp, Artificial Sequence
  Oligonucleotide for detection of SNP TSC0040849
tattacgggagaa

SEQ ID NO: 162398 - DNA, 13 bp, Artificial Sequence
  Oligonucleotide for detection of SNP TSC0040849
ttctcccgtaata

SEQ ID NO: 162399 - DNA, 13 bp, Artificial Sequence
  Oligonucleotide for detection of SNP TSC0040850
tgttgttgatgtt

SEQ ID NO: 162400 - DNA, 13 bp, Artificial Sequence
  Oligonucleotide for detection of SNP TSC0040850
aacatcaacaaca

SEQ ID NO: 162401 - DNA, 13 bp, Artificial Sequence
  Oligonucleotide for detection of SNP TSC0040850
cgttgttgatgtt

SEQ ID NO: 162402 - DNA, 13 bp, Artificial Sequence
  Oligonucleotide for detection of SNP TSC0040850
aacatcaacaacg

SEQ ID NO: 162403 - DNA, 13 bp, Artificial Sequence
  Oligonucleotide for detection of SNP TSC0040850
tgttgtcgatgtt

SEQ ID NO: 162404 - DNA, 13 bp, Artificial Sequence
  Oligonucleotide for detection of SNP TSC0040850
aacatcgacaaca

SEQ ID NO: 162405 - DNA, 13 bp, Artificial Sequence
  Oligonucleotide for detection of SNP TSC0040850
cgttgtcgatgtt

SEQ ID NO: 162406 - DNA, 13 bp, Artificial Sequence
  Oligonucleotide for detection of SNP TSC0040850
aacatcgacaacg

SEQ ID NO: 162407 - DNA, 13 bp, Artificial Sequence
  Oligonucleotide for detection of SNP TSC0040850
agtattggtaatg

SEQ ID NO: 162408 - DNA, 13 bp, Artificial Sequence
  Oligonucleotide for detection of SNP TSC0040850
cattaccaatact

SEQ ID NO: 162409 - DNA, 13 bp, Artificial Sequence
  Oligonucleotide for detection of SNP TSC0040850
agtattagtaatg

SEQ ID NO: 162410 - DNA, 13 bp, Artificial Sequence
  Oligonucleotide for detection of SNP TSC0040850
cattactaatact

SEQ ID NO: 162411 - DNA, 13 bp, Artificial Sequence
  Oligonucleotide for detection of SNP TSC0040850
agtatcggtaatg

SEQ ID NO: 162412 - DNA, 13 bp, Artificial Sequence
  Oligonucleotide for detection of SNP TSC0040850
cattaccgatact

SEQ ID NO: 162413 - DNA, 13 bp, Artificial Sequence
  Oligonucleotide for detection of SNP TSC0040850
agtattagtaacg

SEQ ID NO: 162414 - DNA, 13 bp, Artificial Sequence
  Oligonucleotide for detection of SNP TSC0040850
cgttactaatact

SEQ ID NO: 162415 - DNA, 13 bp, Artificial Sequence
  Oligonucleotide for detection of SNP TSC0040850
agtattggtaacg

SEQ ID NO: 162416 - DNA, 13 bp, Artificial Sequence
  Oligonucleotide for detection of SNP TSC0040850
cgttaccaatact

SEQ ID NO: 162417 - DNA, 13 bp, Artificial Sequence
  Oligonucleotide for detection of SNP TSC0040850
agtatcggtaacg

SEQ ID NO: 162418 - DNA, 13 bp, Artificial Sequence
  Oligonucleotide for detection of SNP TSC0040850
cgttaccgatact

SEQ ID NO: 162419 - DNA, 13 bp, Artificial Sequence
  Oligonucleotide for detection of SNP TSC0040854
aatttattttaaa

SEQ ID NO: 162420 - DNA, 13 bp, Artificial Sequence
  Oligonucleotide for detection of SNP TSC0040854
tttaaaataaatt

SEQ ID NO: 162421 - DNA, 13 bp, Artificial Sequence
  Oligonucleotide for detection of SNP TSC0040854
tttgggttaggtt

SEQ ID NO: 162422 - DNA, 13 bp, Artificial Sequence
  Oligonucleotide for detection of SNP TSC0040854
aacctaacccaaa

SEQ ID NO: 162423 - DNA, 13 bp, Artificial Sequence
  Oligonucleotide for detection of SNP TSC0040854
tttggggtaggtt

SEQ ID NO: 162424 - DNA, 13 bp, Artificial Sequence
  Oligonucleotide for detection of SNP TSC0040854
aacctaccccaaa

SEQ ID NO: 162425 - DNA, 13 bp, Artificial Sequence
  Oligonucleotide for detection of SNP TSC0040855
ttttgtatataay

SEQ ID NO: 162426 - DNA, 13 bp, Artificial Sequence
  Oligonucleotide for detection of SNP TSC0040855
rttatatacaaaa

SEQ ID NO: 162427 - DNA, 13 bp, Artificial Sequence
  Oligonucleotide for detection of SNP TSC0040855
tttcgtatataay

SEQ ID NO: 162428 - DNA, 13 bp, Artificial Sequence
  Oligonucleotide for detection of SNP TSC0040855
rttatatacgaaa

SEQ ID NO: 162429 - DNA, 13 bp, Artificial Sequence
  Oligonucleotide for detection of SNP TSC0040855
tttcgtgtataay

SEQ ID NO: 162430 - DNA, 13 bp, Artificial Sequence
  Oligonucleotide for detection of SNP TSC0040855
rttatacacgaaa

SEQ ID NO: 162431 - DNA, 13 bp, Artificial Sequence
  Oligonucleotide for detection of SNP TSC0040856
taaggagattaat

SEQ ID NO: 162432 - DNA, 13 bp, Artificial Sequence
  Oligonucleotide for detection of SNP TSC0040856
attaatctcctta

SEQ ID NO: 162433 - DNA, 13 bp, Artificial Sequence
  Oligonucleotide for detection of SNP TSC0040856
taaggaaattaat

SEQ ID NO: 162434 - DNA, 13 bp, Artificial Sequence
  Oligonucleotide for detection of SNP TSC0040856
attaatttcctta

SEQ ID NO: 162435 - DNA, 13 bp, Artificial Sequence
  Oligonucleotide for detection of SNP TSC0040858
ttttattgtttay

SEQ ID NO: 162436 - DNA, 13 bp, Artificial Sequence
  Oligonucleotide for detection of SNP TSC0040858
rtaaacaataaaa

SEQ ID NO: 162437 - DNA, 13 bp, Artificial Sequence
  Oligonucleotide for detection of SNP TSC0040858
ttttatcgtttay

SEQ ID NO: 162438 - DNA, 13 bp, Artificial Sequence
  Oligonucleotide for detection of SNP TSC0040858
rtaaacgataaaa

SEQ ID NO: 162439 - DNA, 13 bp, Artificial Sequence
  Oligonucleotide for detection of SNP TSC0040858
gtgggtggtggag

SEQ ID NO: 162440 - DNA, 13 bp, Artificial Sequence
  Oligonucleotide for detection of SNP TSC0040858
ctccaccacccac

SEQ ID NO: 162441 - DNA, 13 bp, Artificial Sequence
  Oligonucleotide for detection of SNP TSC0040858
gtgggtagtggag

SEQ ID NO: 162442 - DNA, 13 bp, Artificial Sequence
  Oligonucleotide for detection of SNP TSC0040858
ctccactacccac

SEQ ID NO: 162443 - DNA, 13 bp, Artificial Sequence
  Oligonucleotide for detection of SNP TSC0040858
gtgggcggtggag

SEQ ID NO: 162444 - DNA, 13 bp, Artificial Sequence
  Oligonucleotide for detection of SNP TSC0040858
ctccaccgcccac

SEQ ID NO: 162445 - DNA, 13 bp, Artificial Sequence
  Oligonucleotide for detection of SNP TSC0040866
ggaggggggtagy

SEQ ID NO: 162446 - DNA, 13 bp, Artificial Sequence
  Oligonucleotide for detection of SNP TSC0040866
rctacccccctcc

SEQ ID NO: 162447 - DNA, 13 bp, Artificial Sequence
  Oligonucleotide for detection of SNP TSC0040866
ggagggaggtagy

SEQ ID NO: 162448 - DNA, 13 bp, Artificial Sequence
  Oligonucleotide for detection of SNP TSC0040866
rctacctccctcc

SEQ ID NO: 162449 - DNA, 13 bp, Artificial Sequence
  Oligonucleotide for detection of SNP TSC0040868
aggtggggtttag

SEQ ID NO: 162450 - DNA, 13 bp, Artificial Sequence
  Oligonucleotide for detection of SNP TSC0040868
ctaaaccccacct

SEQ ID NO: 162451 - DNA, 13 bp, Artificial Sequence
  Oligonucleotide for detection of SNP TSC0040868
aggtggagtttag

SEQ ID NO: 162452 - DNA, 13 bp, Artificial Sequence
  Oligonucleotide for detection of SNP TSC0040868
ctaaactccacct

SEQ ID NO: 162453 - DNA, 13 bp, Artificial Sequence
  Oligonucleotide for detection of SNP TSC0040868
aggcggggtttag

SEQ ID NO: 162454 - DNA, 13 bp, Artificial Sequence
  Oligonucleotide for detection of SNP TSC0040868
ctaaaccccgcct

SEQ ID NO: 162455 - DNA, 13 bp, Artificial Sequence
  Oligonucleotide for detection of SNP TSC0040868
aggcggagtttag

SEQ ID NO: 162456 - DNA, 13 bp, Artificial Sequence
  Oligonucleotide for detection of SNP TSC0040868
ctaaactccgcct

SEQ ID NO: 162457 - DNA, 13 bp, Artificial Sequence
  Oligonucleotide for detection of SNP TSC0040869
attgtttttttay

SEQ ID NO: 162458 - DNA, 13 bp, Artificial Sequence
  Oligonucleotide for detection of SNP TSC0040869
rtaaaaaaacaat

SEQ ID NO: 162459 - DNA, 13 bp, Artificial Sequence
  Oligonucleotide for detection of SNP TSC0040869
attgttgttttay

SEQ ID NO: 162460 - DNA, 13 bp, Artificial Sequence
  Oligonucleotide for detection of SNP TSC0040869
rtaaaacaacaat

SEQ ID NO: 162461 - DNA, 13 bp, Artificial Sequence
  Oligonucleotide for detection of SNP TSC0040869
gtagaagagtagt

SEQ ID NO: 162462 - DNA, 13 bp, Artificial Sequence
  Oligonucleotide for detection of SNP TSC0040869
actactcttctac

SEQ ID NO: 162463 - DNA, 13 bp, Artificial Sequence
  Oligonucleotide for detection of SNP TSC0040869
gtagaatagtagt

SEQ ID NO: 162464 - DNA, 13 bp, Artificial Sequence
  Oligonucleotide for detection of SNP TSC0040869
actactattctac

SEQ ID NO: 162465 - DNA, 13 bp, Artificial Sequence
  Oligonucleotide for detection of SNP TSC0040870
aaattatttttta

SEQ ID NO: 162466 - DNA, 13 bp, Artificial Sequence
  Oligonucleotide for detection of SNP TSC0040870
taaaaaataattt

SEQ ID NO: 162467 - DNA, 13 bp, Artificial Sequence
  Oligonucleotide for detection of SNP TSC0040870
tgggagttggttt

SEQ ID NO: 162468 - DNA, 13 bp, Artificial Sequence
  Oligonucleotide for detection of SNP TSC0040870
aaaccaactccca

SEQ ID NO: 162469 - DNA, 13 bp, Artificial Sequence
  Oligonucleotide for detection of SNP TSC0040871
attgttattattt

SEQ ID NO: 162470 - DNA, 13 bp, Artificial Sequence
  Oligonucleotide for detection of SNP TSC0040871
aaataataacaat

SEQ ID NO: 162471 - DNA, 13 bp, Artificial Sequence
  Oligonucleotide for detection of SNP TSC0040871
attgtttttattt

SEQ ID NO: 162472 - DNA, 13 bp, Artificial Sequence
  Oligonucleotide for detection of SNP TSC0040871
aaataaaaacaat

SEQ ID NO: 162473 - DNA, 13 bp, Artificial Sequence
  Oligonucleotide for detection of SNP TSC0040871
aagtagtaatagt

SEQ ID NO: 162474 - DNA, 13 bp, Artificial Sequence
  Oligonucleotide for detection of SNP TSC0040871
actattactactt

SEQ ID NO: 162475 - DNA, 13 bp, Artificial Sequence
  Oligonucleotide for detection of SNP TSC0040871
aagtaggaatagt

SEQ ID NO: 162476 - DNA, 13 bp, Artificial Sequence
  Oligonucleotide for detection of SNP TSC0040871
actattcctactt

SEQ ID NO: 162477 - DNA, 13 bp, Artificial Sequence
  Oligonucleotide for detection of SNP TSC0040872
aaattataagatg

SEQ ID NO: 162478 - DNA, 13 bp, Artificial Sequence
  Oligonucleotide for detection of SNP TSC0040872
catcttataattt

SEQ ID NO: 162479 - DNA, 13 bp, Artificial Sequence
  Oligonucleotide for detection of SNP TSC0040872
aaattagaagatg

SEQ ID NO: 162480 - DNA, 13 bp, Artificial Sequence
  Oligonucleotide for detection of SNP TSC0040872
catcttctaattt

SEQ ID NO: 162481 - DNA, 13 bp, Artificial Sequence
  Oligonucleotide for detection of SNP TSC0040873
agagggtaaagta

SEQ ID NO: 162482 - DNA, 13 bp, Artificial Sequence
  Oligonucleotide for detection of SNP TSC0040873
tactttaccctct

SEQ ID NO: 162483 - DNA, 13 bp, Artificial Sequence
  Oligonucleotide for detection of SNP TSC0040873
agaggggaaagta

SEQ ID NO: 162484 - DNA, 13 bp, Artificial Sequence
  Oligonucleotide for detection of SNP TSC0040873
tactttcccctct

SEQ ID NO: 162485 - DNA, 13 bp, Artificial Sequence
  Oligonucleotide for detection of SNP TSC0040874
atattaggaaaat

SEQ ID NO: 162486 - DNA, 13 bp, Artificial Sequence
  Oligonucleotide for detection of SNP TSC0040874
attttcctaatat

SEQ ID NO: 162487 - DNA, 13 bp, Artificial Sequence
  Oligonucleotide for detection of SNP TSC0040874
atattaagaaaat

SEQ ID NO: 162488 - DNA, 13 bp, Artificial Sequence
  Oligonucleotide for detection of SNP TSC0040874
attttcttaatat

SEQ ID NO: 162489 - DNA, 13 bp, Artificial Sequence
  Oligonucleotide for detection of SNP TSC0040877
tgtttaagaaata

SEQ ID NO: 162490 - DNA, 13 bp, Artificial Sequence
  Oligonucleotide for detection of SNP TSC0040877
tatttcttaaaca

SEQ ID NO: 162491 - DNA, 13 bp, Artificial Sequence
  Oligonucleotide for detection of SNP TSC0040877
tgtttatgaaata

SEQ ID NO: 162492 - DNA, 13 bp, Artificial Sequence
  Oligonucleotide for detection of SNP TSC0040877
tatttcataaaca

SEQ ID NO: 162493 - DNA, 13 bp, Artificial Sequence
  Oligonucleotide for detection of SNP TSC0040877
tgtttacgaaata

SEQ ID NO: 162494 - DNA, 13 bp, Artificial Sequence
  Oligonucleotide for detection of SNP TSC0040877
tatttcgtaaaca

SEQ ID NO: 162495 - DNA, 13 bp, Artificial Sequence
  Oligonucleotide for detection of SNP TSC0008948
tattatgatttta

SEQ ID NO: 162496 - DNA, 13 bp, Artificial Sequence
  Oligonucleotide for detection of SNP TSC0008948
taaaatcataata

SEQ ID NO: 162497 - DNA, 13 bp, Artificial Sequence
  Oligonucleotide for detection of SNP TSC0008948
tattacgatttta

SEQ ID NO: 162498 - DNA, 13 bp, Artificial Sequence
  Oligonucleotide for detection of SNP TSC0008948
taaaatcgtaata

SEQ ID NO: 162499 - DNA, 13 bp, Artificial Sequence
  Oligonucleotide for detection of SNP TSC0008948
taaaatagtagtg

SEQ ID NO: 162500 - DNA, 13 bp, Artificial Sequence
  Oligonucleotide for detection of SNP TSC0008948
cactactatttta

SEQ ID NO: 162501 - DNA, 13 bp, Artificial Sequence
  Oligonucleotide for detection of SNP TSC0008948
taaaattgtagtg

SEQ ID NO: 162502 - DNA, 13 bp, Artificial Sequence
  Oligonucleotide for detection of SNP TSC0008948
cactacaatttta

SEQ ID NO: 162503 - DNA, 13 bp, Artificial Sequence
  Oligonucleotide for detection of SNP TSC0008948
taaaatcgtagtg

SEQ ID NO: 162504 - DNA, 13 bp, Artificial Sequence
  Oligonucleotide for detection of SNP TSC0008948
cactacgatttta

SEQ ID NO: 162505 - DNA, 13 bp, Artificial Sequence
  Oligonucleotide for detection of SNP TSC0040879
aattggattaata

SEQ ID NO: 162506 - DNA, 13 bp, Artificial Sequence
  Oligonucleotide for detection of SNP TSC0040879
tattaatccaatt

SEQ ID NO: 162507 - DNA, 13 bp, Artificial Sequence
  Oligonucleotide for detection of SNP TSC0040879
aattgggttaata

SEQ ID NO: 162508 - DNA, 13 bp, Artificial Sequence
  Oligonucleotide for detection of SNP TSC0040879
tattaacccaatt

SEQ ID NO: 162509 - DNA, 13 bp, Artificial Sequence
  Oligonucleotide for detection of SNP TSC0040884
gaaggttgaggta

SEQ ID NO: 162510 - DNA, 13 bp, Artificial Sequence
  Oligonucleotide for detection of SNP TSC0040884
tacctcaaccttc

SEQ ID NO: 162511 - DNA, 13 bp, Artificial Sequence
  Oligonucleotide for detection of SNP TSC0040884
gaaggtcgaggta

SEQ ID NO: 162512 - DNA, 13 bp, Artificial Sequence
  Oligonucleotide for detection of SNP TSC0040884
tacctcgaccttc

SEQ ID NO: 162513 - DNA, 13 bp, Artificial Sequence
  Oligonucleotide for detection of SNP TSC0040885
ttagtattagttt

SEQ ID NO: 162514 - DNA, 13 bp, Artificial Sequence
  Oligonucleotide for detection of SNP TSC0040885
aaactaatactaa

SEQ ID NO: 162515 - DNA, 13 bp, Artificial Sequence
  Oligonucleotide for detection of SNP TSC0040885
ttagtagtagttt

SEQ ID NO: 162516 - DNA, 13 bp, Artificial Sequence
  Oligonucleotide for detection of SNP TSC0040885
aaactactactaa

SEQ ID NO: 162517 - DNA, 13 bp, Artificial Sequence
  Oligonucleotide for detection of SNP TSC0040885
agattagtgttaa

SEQ ID NO: 162518 - DNA, 13 bp, Artificial Sequence
  Oligonucleotide for detection of SNP TSC0040885
ttaacactaatct

SEQ ID NO: 162519 - DNA, 13 bp, Artificial Sequence
  Oligonucleotide for detection of SNP TSC0040885
agattattgttaa

SEQ ID NO: 162520 - DNA, 13 bp, Artificial Sequence
  Oligonucleotide for detection of SNP TSC0040885
ttaacaataatct

SEQ ID NO: 162521 - DNA, 13 bp, Artificial Sequence
  Oligonucleotide for detection of SNP TSC0040887
taaggggtgttta

SEQ ID NO: 162522 - DNA, 13 bp, Artificial Sequence
  Oligonucleotide for detection of SNP TSC0040887
taaacacccctta

SEQ ID NO: 162523 - DNA, 13 bp, Artificial Sequence
  Oligonucleotide for detection of SNP TSC0040887
taagggatgttta

SEQ ID NO: 162524 - DNA, 13 bp, Artificial Sequence
  Oligonucleotide for detection of SNP TSC0040887
taaacatccctta

SEQ ID NO: 162525 - DNA, 13 bp, Artificial Sequence
  Oligonucleotide for detection of SNP TSC0040888
tttatgtattatt

SEQ ID NO: 162526 - DNA, 13 bp, Artificial Sequence
  Oligonucleotide for detection of SNP TSC0040888
aataatacataaa

SEQ ID NO: 162527 - DNA, 13 bp, Artificial Sequence
  Oligonucleotide for detection of SNP TSC0040888
tttatggattatt

SEQ ID NO: 162528 - DNA, 13 bp, Artificial Sequence
  Oligonucleotide for detection of SNP TSC0040888
aataatccataaa

SEQ ID NO: 162529 - DNA, 13 bp, Artificial Sequence
  Oligonucleotide for detection of SNP TSC0040888
aataatatataaa

SEQ ID NO: 162530 - DNA, 13 bp, Artificial Sequence
  Oligonucleotide for detection of SNP TSC0040888
tttatatattatt

SEQ ID NO: 162531 - DNA, 13 bp, Artificial Sequence
  Oligonucleotide for detection of SNP TSC0040889
ttttaggtatttg

SEQ ID NO: 162532 - DNA, 13 bp, Artificial Sequence
  Oligonucleotide for detection of SNP TSC0040889
caaatacctaaaa

SEQ ID NO: 162533 - DNA, 13 bp, Artificial Sequence
  Oligonucleotide for detection of SNP TSC0040889
ttttaggtattcg

SEQ ID NO: 162534 - DNA, 13 bp, Artificial Sequence
  Oligonucleotide for detection of SNP TSC0040889
cgaatacctaaaa

SEQ ID NO: 162535 - DNA, 13 bp, Artificial Sequence
  Oligonucleotide for detection of SNP TSC0040890
tttaaatatttgg

SEQ ID NO: 162536 - DNA, 13 bp, Artificial Sequence
  Oligonucleotide for detection of SNP TSC0040890
ccaaatatttaaa

SEQ ID NO: 162537 - DNA, 13 bp, Artificial Sequence
  Oligonucleotide for detection of SNP TSC0040890
tttaaagatttgg

SEQ ID NO: 162538 - DNA, 13 bp, Artificial Sequence
  Oligonucleotide for detection of SNP TSC0040890
ccaaatctttaaa

SEQ ID NO: 162539 - DNA, 13 bp, Artificial Sequence
  Oligonucleotide for detection of SNP TSC0040890
ttaaatatttggg

SEQ ID NO: 162540 - DNA, 13 bp, Artificial Sequence
  Oligonucleotide for detection of SNP TSC0040890
cccaaatatttaa

SEQ ID NO: 162541 - DNA, 13 bp, Artificial Sequence
  Oligonucleotide for detection of SNP TSC0040890
ttaaatttttggg

SEQ ID NO: 162542 - DNA, 13 bp, Artificial Sequence
  Oligonucleotide for detection of SNP TSC0040890
cccaaaaatttaa

SEQ ID NO: 162543 - DNA, 13 bp, Artificial Sequence
  Oligonucleotide for detection of SNP TSC0040891
gaatgtattttaa

SEQ ID NO: 162544 - DNA, 13 bp, Artificial Sequence
  Oligonucleotide for detection of SNP TSC0040891
ttaaaatacattc

SEQ ID NO: 162545 - DNA, 13 bp, Artificial Sequence
  Oligonucleotide for detection of SNP TSC0040891
gaatgtgttttaa

SEQ ID NO: 162546 - DNA, 13 bp, Artificial Sequence
  Oligonucleotide for detection of SNP TSC0040891
ttaaaacacattc

SEQ ID NO: 162547 - DNA, 13 bp, Artificial Sequence
  Oligonucleotide for detection of SNP TSC0040892
aataaaaagaaay

SEQ ID NO: 162548 - DNA, 13 bp, Artificial Sequence
  Oligonucleotide for detection of SNP TSC0040892
rtttctttttatt

SEQ ID NO: 162549 - DNA, 13 bp, Artificial Sequence
  Oligonucleotide for detection of SNP TSC0040892
aataaagagaaay

SEQ ID NO: 162550 - DNA, 13 bp, Artificial Sequence
  Oligonucleotide for detection of SNP TSC0040892
rtttctctttatt

SEQ ID NO: 162551 - DNA, 13 bp, Artificial Sequence
  Oligonucleotide for detection of SNP TSC0040895
ataggagaggatg

SEQ ID NO: 162552 - DNA, 13 bp, Artificial Sequence
  Oligonucleotide for detection of SNP TSC0040895
catcctctcctat

SEQ ID NO: 162553 - DNA, 13 bp, Artificial Sequence
  Oligonucleotide for detection of SNP TSC0040895
ataggaaaggatg

SEQ ID NO: 162554 - DNA, 13 bp, Artificial Sequence
  Oligonucleotide for detection of SNP TSC0040895
catcctttcctat

SEQ ID NO: 162555 - DNA, 13 bp, Artificial Sequence
  Oligonucleotide for detection of SNP TSC0040896
atagatgtaatag

SEQ ID NO: 162556 - DNA, 13 bp, Artificial Sequence
  Oligonucleotide for detection of SNP TSC0040896
ctattacatctat

SEQ ID NO: 162557 - DNA, 13 bp, Artificial Sequence
  Oligonucleotide for detection of SNP TSC0040896
atagatataatag

SEQ ID NO: 162558 - DNA, 13 bp, Artificial Sequence
  Oligonucleotide for detection of SNP TSC0040896
ctattatatctat

SEQ ID NO: 162559 - DNA, 13 bp, Artificial Sequence
  Oligonucleotide for detection of SNP TSC0040897
aaagatgaagata

SEQ ID NO: 162560 - DNA, 13 bp, Artificial Sequence
  Oligonucleotide for detection of SNP TSC0040897
tatcttcatcttt

SEQ ID NO: 162561 - DNA, 13 bp, Artificial Sequence
  Oligonucleotide for detection of SNP TSC0040897
aaagataaagata

SEQ ID NO: 162562 - DNA, 13 bp, Artificial Sequence
  Oligonucleotide for detection of SNP TSC0040897
tatctttatcttt

SEQ ID NO: 162563 - DNA, 13 bp, Artificial Sequence
  Oligonucleotide for detection of SNP TSC0040897
aaagacgaagata

SEQ ID NO: 162564 - DNA, 13 bp, Artificial Sequence
  Oligonucleotide for detection of SNP TSC0040897
tatcttcgtcttt

SEQ ID NO: 162565 - DNA, 13 bp, Artificial Sequence
  Oligonucleotide for detection of SNP TSC0040898
aggtgagatgatg

SEQ ID NO: 162566 - DNA, 13 bp, Artificial Sequence
  Oligonucleotide for detection of SNP TSC0040898
catcatctcacct

SEQ ID NO: 162567 - DNA, 13 bp, Artificial Sequence
  Oligonucleotide for detection of SNP TSC0040898
aggtgaaatgatg

SEQ ID NO: 162568 - DNA, 13 bp, Artificial Sequence
  Oligonucleotide for detection of SNP TSC0040898
catcatttcacct

SEQ ID NO: 162569 - DNA, 13 bp, Artificial Sequence
  Oligonucleotide for detection of SNP TSC0040899
aggggaagtgtag

SEQ ID NO: 162570 - DNA, 13 bp, Artificial Sequence
  Oligonucleotide for detection of SNP TSC0040899
ctacacttcccct

SEQ ID NO: 162571 - DNA, 13 bp, Artificial Sequence
  Oligonucleotide for detection of SNP TSC0040899
aggggaggtgtag

SEQ ID NO: 162572 - DNA, 13 bp, Artificial Sequence
  Oligonucleotide for detection of SNP TSC0040899
ctacacctcccct

SEQ ID NO: 162573 - DNA, 13 bp, Artificial Sequence
  Oligonucleotide for detection of SNP TSC0040901
gtgtttatatatt

SEQ ID NO: 162574 - DNA, 13 bp, Artificial Sequence
  Oligonucleotide for detection of SNP TSC0040901
aatatataaacac

SEQ ID NO: 162575 - DNA, 13 bp, Artificial Sequence
  Oligonucleotide for detection of SNP TSC0040901
gtgtttgtatatt

SEQ ID NO: 162576 - DNA, 13 bp, Artificial Sequence
  Oligonucleotide for detection of SNP TSC0040901
aatatacaaacac

SEQ ID NO: 162577 - DNA, 13 bp, Artificial Sequence
  Oligonucleotide for detection of SNP TSC0040901
gtgttcgtatatt

SEQ ID NO: 162578 - DNA, 13 bp, Artificial Sequence
  Oligonucleotide for detection of SNP TSC0040901
aatatacgaacac

SEQ ID NO: 162579 - DNA, 13 bp, Artificial Sequence
  Oligonucleotide for detection of SNP TSC0040901
agtatatgaatay

SEQ ID NO: 162580 - DNA, 13 bp, Artificial Sequence
  Oligonucleotide for detection of SNP TSC0040901
rtattcatatact

SEQ ID NO: 162581 - DNA, 13 bp, Artificial Sequence
  Oligonucleotide for detection of SNP TSC0040901
agtatacgaatay

SEQ ID NO: 162582 - DNA, 13 bp, Artificial Sequence
  Oligonucleotide for detection of SNP TSC0040901
rtattcgtatact

SEQ ID NO: 162583 - DNA, 13 bp, Artificial Sequence
  Oligonucleotide for detection of SNP TSC0007820
gtttgtgtagttt

SEQ ID NO: 162584 - DNA, 13 bp, Artificial Sequence
  Oligonucleotide for detection of SNP TSC0007820
aaactacacaaac

SEQ ID NO: 162585 - DNA, 13 bp, Artificial Sequence
  Oligonucleotide for detection of SNP TSC0007820
gtttgtatagttt

SEQ ID NO: 162586 - DNA, 13 bp, Artificial Sequence
  Oligonucleotide for detection of SNP TSC0007820
aaactatacaaac

SEQ ID NO: 162587 - DNA, 13 bp, Artificial Sequence
  Oligonucleotide for detection of SNP TSC0000763
tataatatttatg

SEQ ID NO: 162588 - DNA, 13 bp, Artificial Sequence
  Oligonucleotide for detection of SNP TSC0000763
cataaatattata

SEQ ID NO: 162589 - DNA, 13 bp, Artificial Sequence
  Oligonucleotide for detection of SNP TSC0000763
tataatgtttatg

SEQ ID NO: 162590 - DNA, 13 bp, Artificial Sequence
  Oligonucleotide for detection of SNP TSC0000763
cataaacattata

SEQ ID NO: 162591 - DNA, 13 bp, Artificial Sequence
  Oligonucleotide for detection of SNP TSC0000763
tataacgtttatg

SEQ ID NO: 162592 - DNA, 13 bp, Artificial Sequence
  Oligonucleotide for detection of SNP TSC0000763
cataaacgttata

SEQ ID NO: 162593 - DNA, 13 bp, Artificial Sequence
  Oligonucleotide for detection of SNP TSC0000763
tataaatgttatg

SEQ ID NO: 162594 - DNA, 13 bp, Artificial Sequence
  Oligonucleotide for detection of SNP TSC0000763
cataacatttata

SEQ ID NO: 162595 - DNA, 13 bp, Artificial Sequence
  Oligonucleotide for detection of SNP TSC0000763
tataaacgttatg

SEQ ID NO: 162596 - DNA, 13 bp, Artificial Sequence
  Oligonucleotide for detection of SNP TSC0000763
cataacgtttata

SEQ ID NO: 162597 - DNA, 13 bp, Artificial Sequence
  Oligonucleotide for detection of SNP TSC0040903
ttttatgttgatt

SEQ ID NO: 162598 - DNA, 13 bp, Artificial Sequence
  Oligonucleotide for detection of SNP TSC0040903
aatcaacataaaa

SEQ ID NO: 162599 - DNA, 13 bp, Artificial Sequence
  Oligonucleotide for detection of SNP TSC0040903
ttttatattgatt

SEQ ID NO: 162600 - DNA, 13 bp, Artificial Sequence
  Oligonucleotide for detection of SNP TSC0040903
aatcaatataaaa

SEQ ID NO: 162601 - DNA, 13 bp, Artificial Sequence
  Oligonucleotide for detection of SNP TSC0040905
gggtatagagagy

SEQ ID NO: 162602 - DNA, 13 bp, Artificial Sequence
  Oligonucleotide for detection of SNP TSC0040905
rctctctataccc

SEQ ID NO: 162603 - DNA, 13 bp, Artificial Sequence
  Oligonucleotide for detection of SNP TSC0040905
gggtatggagagy

SEQ ID NO: 162604 - DNA, 13 bp, Artificial Sequence
  Oligonucleotide for detection of SNP TSC0040905
rctctccataccc

SEQ ID NO: 162605 - DNA, 13 bp, Artificial Sequence
  Oligonucleotide for detection of SNP TSC0040905
gggtacggagagy

SEQ ID NO: 162606 - DNA, 13 bp, Artificial Sequence
  Oligonucleotide for detection of SNP TSC0040905
rctctccgtaccc

SEQ ID NO: 162607 - DNA, 13 bp, Artificial Sequence
  Oligonucleotide for detection of SNP TSC0040905
gtttttcgtgtty

SEQ ID NO: 162608 - DNA, 13 bp, Artificial Sequence
  Oligonucleotide for detection of SNP TSC0040905
raacacgaaaaac

SEQ ID NO: 162609 - DNA, 13 bp, Artificial Sequence
  Oligonucleotide for detection of SNP TSC0040906
ttataagggttgt

SEQ ID NO: 162610 - DNA, 13 bp, Artificial Sequence
  Oligonucleotide for detection of SNP TSC0040906
acaacccttataa

SEQ ID NO: 162611 - DNA, 13 bp, Artificial Sequence
  Oligonucleotide for detection of SNP TSC0040906
ttataaaggttgt

SEQ ID NO: 162612 - DNA, 13 bp, Artificial Sequence
  Oligonucleotide for detection of SNP TSC0040906
acaacctttataa

SEQ ID NO: 162613 - DNA, 13 bp, Artificial Sequence
  Oligonucleotide for detection of SNP TSC0040907
tgtaggtgttttt

SEQ ID NO: 162614 - DNA, 13 bp, Artificial Sequence
  Oligonucleotide for detection of SNP TSC0040907
aaaaacacctaca

SEQ ID NO: 162615 - DNA, 13 bp, Artificial Sequence
  Oligonucleotide for detection of SNP TSC0040907
tgtaggcgttttt

SEQ ID NO: 162616 - DNA, 13 bp, Artificial Sequence
  Oligonucleotide for detection of SNP TSC0040907
aaaaacgcctaca

SEQ ID NO: 162617 - DNA, 13 bp, Artificial Sequence
  Oligonucleotide for detection of SNP TSC0040907
aggaatgtttgta

SEQ ID NO: 162618 - DNA, 13 bp, Artificial Sequence
  Oligonucleotide for detection of SNP TSC0040907
tacaaacattcct

SEQ ID NO: 162619 - DNA, 13 bp, Artificial Sequence
  Oligonucleotide for detection of SNP TSC0040907
aggaatatttgta

SEQ ID NO: 162620 - DNA, 13 bp, Artificial Sequence
  Oligonucleotide for detection of SNP TSC0040907
tacaaatattcct

SEQ ID NO: 162621 - DNA, 13 bp, Artificial Sequence
  Oligonucleotide for detection of SNP TSC0040907
aggaacgtttgta

SEQ ID NO: 162622 - DNA, 13 bp, Artificial Sequence
  Oligonucleotide for detection of SNP TSC0040907
tacaaacgttcct

SEQ ID NO: 162623 - DNA, 13 bp, Artificial Sequence
  Oligonucleotide for detection of SNP TSC0040908
ttattatggatty

SEQ ID NO: 162624 - DNA, 13 bp, Artificial Sequence
  Oligonucleotide for detection of SNP TSC0040908
raatccataataa

SEQ ID NO: 162625 - DNA, 13 bp, Artificial Sequence
  Oligonucleotide for detection of SNP TSC0040908
ttattacggatty

SEQ ID NO: 162626 - DNA, 13 bp, Artificial Sequence
  Oligonucleotide for detection of SNP TSC0040908
raatccgtaataa

SEQ ID NO: 162627 - DNA, 13 bp, Artificial Sequence
  Oligonucleotide for detection of SNP TSC0040908
gggtttataatag

SEQ ID NO: 162628 - DNA, 13 bp, Artificial Sequence
  Oligonucleotide for detection of SNP TSC0040908
ctattataaaccc

SEQ ID NO: 162629 - DNA, 13 bp, Artificial Sequence
  Oligonucleotide for detection of SNP TSC0040908
gggttcgtaatag

SEQ ID NO: 162630 - DNA, 13 bp, Artificial Sequence
  Oligonucleotide for detection of SNP TSC0040908
ctattacgaaccc

SEQ ID NO: 162631 - DNA, 13 bp, Artificial Sequence
  Oligonucleotide for detection of SNP TSC0040909
taggtgtgtggaa

SEQ ID NO: 162632 - DNA, 13 bp, Artificial Sequence
  Oligonucleotide for detection of SNP TSC0040909
ttccacacaccta

SEQ ID NO: 162633 - DNA, 13 bp, Artificial Sequence
  Oligonucleotide for detection of SNP TSC0040909
taggtgggtggaa

SEQ ID NO: 162634 - DNA, 13 bp, Artificial Sequence
  Oligonucleotide for detection of SNP TSC0040909
ttccacccaccta

SEQ ID NO: 162635 - DNA, 13 bp, Artificial Sequence
  Oligonucleotide for detection of SNP TSC0040910
tatatagttattt

SEQ ID NO: 162636 - DNA, 13 bp, Artificial Sequence
  Oligonucleotide for detection of SNP TSC0040910
aaataactatata

SEQ ID NO: 162637 - DNA, 13 bp, Artificial Sequence
  Oligonucleotide for detection of SNP TSC0040910
tatataattattt

SEQ ID NO: 162638 - DNA, 13 bp, Artificial Sequence
  Oligonucleotide for detection of SNP TSC0040910
aaataattatata

SEQ ID NO: 162639 - DNA, 13 bp, Artificial Sequence
  Oligonucleotide for detection of SNP TSC0004539
aatttaagtataa

SEQ ID NO: 162640 - DNA, 13 bp, Artificial Sequence
  Oligonucleotide for detection of SNP TSC0004539
ttatacttaaatt

SEQ ID NO: 162641 - DNA, 13 bp, Artificial Sequence
  Oligonucleotide for detection of SNP TSC0004539
aatttaggtataa

SEQ ID NO: 162642 - DNA, 13 bp, Artificial Sequence
  Oligonucleotide for detection of SNP TSC0004539
ttatacctaaatt

SEQ ID NO: 162643 - DNA, 13 bp, Artificial Sequence
  Oligonucleotide for detection of SNP TSC0040911
tatatatttagta

SEQ ID NO: 162644 - DNA, 13 bp, Artificial Sequence
  Oligonucleotide for detection of SNP TSC0040911
tactaaatatata

SEQ ID NO: 162645 - DNA, 13 bp, Artificial Sequence
  Oligonucleotide for detection of SNP TSC0040911
tatatagttagta

SEQ ID NO: 162646 - DNA, 13 bp, Artificial Sequence
  Oligonucleotide for detection of SNP TSC0040911
tactaactatata

SEQ ID NO: 162647 - DNA, 13 bp, Artificial Sequence
  Oligonucleotide for detection of SNP TSC0040911
tgttggatatata

SEQ ID NO: 162648 - DNA, 13 bp, Artificial Sequence
  Oligonucleotide for detection of SNP TSC0040911
tatatatccaaca

SEQ ID NO: 162649 - DNA, 13 bp, Artificial Sequence
  Oligonucleotide for detection of SNP TSC0040912
tattatgggaaat

SEQ ID NO: 162650 - DNA, 13 bp, Artificial Sequence
  Oligonucleotide for detection of SNP TSC0040912
atttcccataata

SEQ ID NO: 162651 - DNA, 13 bp, Artificial Sequence
  Oligonucleotide for detection of SNP TSC0040912
tattataggaaat

SEQ ID NO: 162652 - DNA, 13 bp, Artificial Sequence
  Oligonucleotide for detection of SNP TSC0040912
atttcctataata

SEQ ID NO: 162653 - DNA, 13 bp, Artificial Sequence
  Oligonucleotide for detection of SNP TSC0009891
taaatgataaatg

SEQ ID NO: 162654 - DNA, 13 bp, Artificial Sequence
  Oligonucleotide for detection of SNP TSC0009891
catttatcattta

SEQ ID NO: 162655 - DNA, 13 bp, Artificial Sequence
  Oligonucleotide for detection of SNP TSC0009891
taaatggtaaatg

SEQ ID NO: 162656 - DNA, 13 bp, Artificial Sequence
  Oligonucleotide for detection of SNP TSC0009891
catttaccattta

SEQ ID NO: 162657 - DNA, 13 bp, Artificial Sequence
  Oligonucleotide for detection of SNP TSC0040913
gttagaattaggg

SEQ ID NO: 162658 - DNA, 13 bp, Artificial Sequence
  Oligonucleotide for detection of SNP TSC0040913
ccctaattctaac

SEQ ID NO: 162659 - DNA, 13 bp, Artificial Sequence
  Oligonucleotide for detection of SNP TSC0040913
gttagagttaggg

SEQ ID NO: 162660 - DNA, 13 bp, Artificial Sequence
  Oligonucleotide for detection of SNP TSC0040913
ccctaactctaac

SEQ ID NO: 162661 - DNA, 13 bp, Artificial Sequence
  Oligonucleotide for detection of SNP TSC0040914
ttggagtggggtt

SEQ ID NO: 162662 - DNA, 13 bp, Artificial Sequence
  Oligonucleotide for detection of SNP TSC0040914
aaccccactccaa

SEQ ID NO: 162663 - DNA, 13 bp, Artificial Sequence
  Oligonucleotide for detection of SNP TSC0040914
ttggaggggggtt

SEQ ID NO: 162664 - DNA, 13 bp, Artificial Sequence
  Oligonucleotide for detection of SNP TSC0040914
aacccccctccaa

SEQ ID NO: 162665 - DNA, 13 bp, Artificial Sequence
  Oligonucleotide for detection of SNP TSC0040914
agtttttttttag

SEQ ID NO: 162666 - DNA, 13 bp, Artificial Sequence
  Oligonucleotide for detection of SNP TSC0040914
ctaaaaaaaaact

SEQ ID NO: 162667 - DNA, 13 bp, Artificial Sequence
  Oligonucleotide for detection of SNP TSC0040915
agatgagtaatta

SEQ ID NO: 162668 - DNA, 13 bp, Artificial Sequence
  Oligonucleotide for detection of SNP TSC0040915
taattactcatct

SEQ ID NO: 162669 - DNA, 13 bp, Artificial Sequence
  Oligonucleotide for detection of SNP TSC0040915
agatgaataatta

SEQ ID NO: 162670 - DNA, 13 bp, Artificial Sequence
  Oligonucleotide for detection of SNP TSC0040915
taattattcatct

SEQ ID NO: 162671 - DNA, 13 bp, Artificial Sequence
  Oligonucleotide for detection of SNP TSC0040915
agacgagtaatta

SEQ ID NO: 162672 - DNA, 13 bp, Artificial Sequence
  Oligonucleotide for detection of SNP TSC0040915
taattactcgtct

SEQ ID NO: 162673 - DNA, 13 bp, Artificial Sequence
  Oligonucleotide for detection of SNP TSC0040915
agacgaataatta

SEQ ID NO: 162674 - DNA, 13 bp, Artificial Sequence
  Oligonucleotide for detection of SNP TSC0040915
taattattcgtct

SEQ ID NO: 162675 - DNA, 13 bp, Artificial Sequence
  Oligonucleotide for detection of SNP TSC0040916
tatataaatatty

SEQ ID NO: 162676 - DNA, 13 bp, Artificial Sequence
  Oligonucleotide for detection of SNP TSC0040916
raatatttatata

SEQ ID NO: 162677 - DNA, 13 bp, Artificial Sequence
  Oligonucleotide for detection of SNP TSC0040916
tatatatatatty

SEQ ID NO: 162678 - DNA, 13 bp, Artificial Sequence
  Oligonucleotide for detection of SNP TSC0040916
raatatatatata

SEQ ID NO: 162679 - DNA, 13 bp, Artificial Sequence
  Oligonucleotide for detection of SNP TSC0040916
gagtgtttgtgtg

SEQ ID NO: 162680 - DNA, 13 bp, Artificial Sequence
  Oligonucleotide for detection of SNP TSC0040916
cacacaaacactc

SEQ ID NO: 162681 - DNA, 13 bp, Artificial Sequence
  Oligonucleotide for detection of SNP TSC0040916
gagtgtgtgtgtg

SEQ ID NO: 162682 - DNA, 13 bp, Artificial Sequence
  Oligonucleotide for detection of SNP TSC0040916
cacacacacactc

SEQ ID NO: 162683 - DNA, 13 bp, Artificial Sequence
  Oligonucleotide for detection of SNP TSC0040917
gggttatggggtg

SEQ ID NO: 162684 - DNA, 13 bp, Artificial Sequence
  Oligonucleotide for detection of SNP TSC0040917
caccccataaccc

SEQ ID NO: 162685 - DNA, 13 bp, Artificial Sequence
  Oligonucleotide for detection of SNP TSC0040917
gggttagggggtg

SEQ ID NO: 162686 - DNA, 13 bp, Artificial Sequence
  Oligonucleotide for detection of SNP TSC0040917
caccccctaaccc

SEQ ID NO: 162687 - DNA, 13 bp, Artificial Sequence
  Oligonucleotide for detection of SNP TSC0040917
tattttatgatty

SEQ ID NO: 162688 - DNA, 13 bp, Artificial Sequence
  Oligonucleotide for detection of SNP TSC0040917
raatcataaaata

SEQ ID NO: 162689 - DNA, 13 bp, Artificial Sequence
  Oligonucleotide for detection of SNP TSC0040917
tattttttgatty

SEQ ID NO: 162690 - DNA, 13 bp, Artificial Sequence
  Oligonucleotide for detection of SNP TSC0040917
raatcaaaaaata

SEQ ID NO: 162691 - DNA, 13 bp, Artificial Sequence
  Oligonucleotide for detection of SNP TSC0009802
atttatgtttaga

SEQ ID NO: 162692 - DNA, 13 bp, Artificial Sequence
  Oligonucleotide for detection of SNP TSC0009802
tctaaacataaat

SEQ ID NO: 162693 - DNA, 13 bp, Artificial Sequence
  Oligonucleotide for detection of SNP TSC0009802
atttatatttaga

SEQ ID NO: 162694 - DNA, 13 bp, Artificial Sequence
  Oligonucleotide for detection of SNP TSC0009802
tctaaatataaat

SEQ ID NO: 162695 - DNA, 13 bp, Artificial Sequence
  Oligonucleotide for detection of SNP TSC0007697
tttagggaatatt

SEQ ID NO: 162696 - DNA, 13 bp, Artificial Sequence
  Oligonucleotide for detection of SNP TSC0007697
aatattccctaaa

SEQ ID NO: 162697 - DNA, 13 bp, Artificial Sequence
  Oligonucleotide for detection of SNP TSC0007697
tttaggaaatatt

SEQ ID NO: 162698 - DNA, 13 bp, Artificial Sequence
  Oligonucleotide for detection of SNP TSC0007697
aatatttcctaaa

SEQ ID NO: 162699 - DNA, 13 bp, Artificial Sequence
  Oligonucleotide for detection of SNP TSC0040919
agtttgattttga

SEQ ID NO: 162700 - DNA, 13 bp, Artificial Sequence
  Oligonucleotide for detection of SNP TSC0040919
tcaaaatcaaact

SEQ ID NO: 162701 - DNA, 13 bp, Artificial Sequence
  Oligonucleotide for detection of SNP TSC0040919
agtttggttttga

SEQ ID NO: 162702 - DNA, 13 bp, Artificial Sequence
  Oligonucleotide for detection of SNP TSC0040919
tcaaaaccaaact

SEQ ID NO: 162703 - DNA, 13 bp, Artificial Sequence
  Oligonucleotide for detection of SNP TSC0040920
gtattaaaatgat

SEQ ID NO: 162704 - DNA, 13 bp, Artificial Sequence
  Oligonucleotide for detection of SNP TSC0040920
atcattttaatac

SEQ ID NO: 162705 - DNA, 13 bp, Artificial Sequence
  Oligonucleotide for detection of SNP TSC0040920
gtattagaatgat

SEQ ID NO: 162706 - DNA, 13 bp, Artificial Sequence
  Oligonucleotide for detection of SNP TSC0040920
atcattctaatac

SEQ ID NO: 162707 - DNA, 13 bp, Artificial Sequence
  Oligonucleotide for detection of SNP TSC0040921
agggtggatgttt

SEQ ID NO: 162708 - DNA, 13 bp, Artificial Sequence
  Oligonucleotide for detection of SNP TSC0040921
aaacatccaccct

SEQ ID NO: 162709 - DNA, 13 bp, Artificial Sequence
  Oligonucleotide for detection of SNP TSC0040921
agggtgaatgttt

SEQ ID NO: 162710 - DNA, 13 bp, Artificial Sequence
  Oligonucleotide for detection of SNP TSC0040921
aaacattcaccct

SEQ ID NO: 162711 - DNA, 13 bp, Artificial Sequence
  Oligonucleotide for detection of SNP TSC0006348
aaaataatataga

SEQ ID NO: 162712 - DNA, 13 bp, Artificial Sequence
  Oligonucleotide for detection of SNP TSC0006348
tctatattatttt

SEQ ID NO: 162713 - DNA, 13 bp, Artificial Sequence
  Oligonucleotide for detection of SNP TSC0006348
aaaatattataga

SEQ ID NO: 162714 - DNA, 13 bp, Artificial Sequence
  Oligonucleotide for detection of SNP TSC0006348
tctataatatttt

SEQ ID NO: 162715 - DNA, 13 bp, Artificial Sequence
  Oligonucleotide for detection of SNP TSC0006348
tttatgatatttt

SEQ ID NO: 162716 - DNA, 13 bp, Artificial Sequence
  Oligonucleotide for detection of SNP TSC0006348
aaaatatcataaa

SEQ ID NO: 162717 - DNA, 13 bp, Artificial Sequence
  Oligonucleotide for detection of SNP TSC0040922
taggttgtagaay

SEQ ID NO: 162718 - DNA, 13 bp, Artificial Sequence
  Oligonucleotide for detection of SNP TSC0040922
rttctacaaccta

SEQ ID NO: 162719 - DNA, 13 bp, Artificial Sequence
  Oligonucleotide for detection of SNP TSC0040922
taggttatagaay

SEQ ID NO: 162720 - DNA, 13 bp, Artificial Sequence
  Oligonucleotide for detection of SNP TSC0040922
rttctataaccta

SEQ ID NO: 162721 - DNA, 13 bp, Artificial Sequence
  Oligonucleotide for detection of SNP TSC0040922
taggtcgtagaay

SEQ ID NO: 162722 - DNA, 13 bp, Artificial Sequence
  Oligonucleotide for detection of SNP TSC0040922
rttctacgaccta

SEQ ID NO: 162723 - DNA, 13 bp, Artificial Sequence
  Oligonucleotide for detection of SNP TSC0040923
tttttagttgtaa

SEQ ID NO: 162724 - DNA, 13 bp, Artificial Sequence
  Oligonucleotide for detection of SNP TSC0040923
ttacaactaaaaa

SEQ ID NO: 162725 - DNA, 13 bp, Artificial Sequence
  Oligonucleotide for detection of SNP TSC0040923
tttttaattgtaa

SEQ ID NO: 162726 - DNA, 13 bp, Artificial Sequence
  Oligonucleotide for detection of SNP TSC0040923
ttacaattaaaaa

SEQ ID NO: 162727 - DNA, 13 bp, Artificial Sequence
  Oligonucleotide for detection of SNP TSC0040924
ataagagggtatt

SEQ ID NO: 162728 - DNA, 13 bp, Artificial Sequence
  Oligonucleotide for detection of SNP TSC0040924
aataccctcttat

SEQ ID NO: 162729 - DNA, 13 bp, Artificial Sequence
  Oligonucleotide for detection of SNP TSC0040924
ataagaaggtatt

SEQ ID NO: 162730 - DNA, 13 bp, Artificial Sequence
  Oligonucleotide for detection of SNP TSC0040924
aataccttcttat

SEQ ID NO: 162731 - DNA, 13 bp, Artificial Sequence
  Oligonucleotide for detection of SNP TSC0040925
tgttagattatag

SEQ ID NO: 162732 - DNA, 13 bp, Artificial Sequence
  Oligonucleotide for detection of SNP TSC0040925
ctataatctaaca

SEQ ID NO: 162733 - DNA, 13 bp, Artificial Sequence
  Oligonucleotide for detection of SNP TSC0040925
tgttagtttatag

SEQ ID NO: 162734 - DNA, 13 bp, Artificial Sequence
  Oligonucleotide for detection of SNP TSC0040925
ctataaactaaca

SEQ ID NO: 162735 - DNA, 13 bp, Artificial Sequence
  Oligonucleotide for detection of SNP TSC0040925
ttatagtttggta

SEQ ID NO: 162736 - DNA, 13 bp, Artificial Sequence
  Oligonucleotide for detection of SNP TSC0040925
taccaaactataa

SEQ ID NO: 162737 - DNA, 13 bp, Artificial Sequence
  Oligonucleotide for detection of SNP TSC0040925
ttatagattggta

SEQ ID NO: 162738 - DNA, 13 bp, Artificial Sequence
  Oligonucleotide for detection of SNP TSC0040925
taccaatctataa

SEQ ID NO: 162739 - DNA, 13 bp, Artificial Sequence
  Oligonucleotide for detection of SNP TSC0040926
atttgagattggg

SEQ ID NO: 162740 - DNA, 13 bp, Artificial Sequence
  Oligonucleotide for detection of SNP TSC0040926
cccaatctcaaat

SEQ ID NO: 162741 - DNA, 13 bp, Artificial Sequence
  Oligonucleotide for detection of SNP TSC0040926
atttgaaattggg

SEQ ID NO: 162742 - DNA, 13 bp, Artificial Sequence
  Oligonucleotide for detection of SNP TSC0040926
cccaatttcaaat

SEQ ID NO: 162743 - DNA, 13 bp, Artificial Sequence
  Oligonucleotide for detection of SNP TSC0040927
ttataggggttgt

SEQ ID NO: 162744 - DNA, 13 bp, Artificial Sequence
  Oligonucleotide for detection of SNP TSC0040927
acaacccctataa

SEQ ID NO: 162745 - DNA, 13 bp, Artificial Sequence
  Oligonucleotide for detection of SNP TSC0040927
ttatagaggttgt

SEQ ID NO: 162746 - DNA, 13 bp, Artificial Sequence
  Oligonucleotide for detection of SNP TSC0040927
acaacctctataa

SEQ ID NO: 162747 - DNA, 13 bp, Artificial Sequence
  Oligonucleotide for detection of SNP TSC0006781
attgagggtggay

SEQ ID NO: 162748 - DNA, 13 bp, Artificial Sequence
  Oligonucleotide for detection of SNP TSC0006781
rtccaccctcaat

SEQ ID NO: 162749 - DNA, 13 bp, Artificial Sequence
  Oligonucleotide for detection of SNP TSC0006781
attgagagtggay

SEQ ID NO: 162750 - DNA, 13 bp, Artificial Sequence
  Oligonucleotide for detection of SNP TSC0006781
rtccactctcaat

SEQ ID NO: 162751 - DNA, 13 bp, Artificial Sequence
  Oligonucleotide for detection of SNP TSC0006781
atcgagggtggay

SEQ ID NO: 162752 - DNA, 13 bp, Artificial Sequence
  Oligonucleotide for detection of SNP TSC0006781
rtccaccctcgat

SEQ ID NO: 162753 - DNA, 13 bp, Artificial Sequence
  Oligonucleotide for detection of SNP TSC0006781
atcgagagtggay

SEQ ID NO: 162754 - DNA, 13 bp, Artificial Sequence
  Oligonucleotide for detection of SNP TSC0006781
rtccactctcgat

SEQ ID NO: 162755 - DNA, 13 bp, Artificial Sequence
  Oligonucleotide for detection of SNP TSC0040928
agtttagggttay

SEQ ID NO: 162756 - DNA, 13 bp, Artificial Sequence
  Oligonucleotide for detection of SNP TSC0040928
rtaaccctaaact

SEQ ID NO: 162757 - DNA, 13 bp, Artificial Sequence
  Oligonucleotide for detection of SNP TSC0040928
agtttaaggttay

SEQ ID NO: 162758 - DNA, 13 bp, Artificial Sequence
  Oligonucleotide for detection of SNP TSC0040928
rtaaccttaaact

SEQ ID NO: 162759 - DNA, 13 bp, Artificial Sequence
  Oligonucleotide for detection of SNP TSC0040929
atttgtgtgttta

SEQ ID NO: 162760 - DNA, 13 bp, Artificial Sequence
  Oligonucleotide for detection of SNP TSC0040929
taaacacacaaat

SEQ ID NO: 162761 - DNA, 13 bp, Artificial Sequence
  Oligonucleotide for detection of SNP TSC0040929
atttgtatgttta

SEQ ID NO: 162762 - DNA, 13 bp, Artificial Sequence
  Oligonucleotide for detection of SNP TSC0040929
taaacatacaaat

SEQ ID NO: 162763 - DNA, 13 bp, Artificial Sequence
  Oligonucleotide for detection of SNP TSC0040930
tatataaaagata

SEQ ID NO: 162764 - DNA, 13 bp, Artificial Sequence
  Oligonucleotide for detection of SNP TSC0040930
tatcttttatata

SEQ ID NO: 162765 - DNA, 13 bp, Artificial Sequence
  Oligonucleotide for detection of SNP TSC0040930
tattttgtatgta

SEQ ID NO: 162766 - DNA, 13 bp, Artificial Sequence
  Oligonucleotide for detection of SNP TSC0040930
tacatacaaaata

SEQ ID NO: 162767 - DNA, 13 bp, Artificial Sequence
  Oligonucleotide for detection of SNP TSC0040931
attgaaagaattg

SEQ ID NO: 162768 - DNA, 13 bp, Artificial Sequence
  Oligonucleotide for detection of SNP TSC0040931
caattctttcaat

SEQ ID NO: 162769 - DNA, 13 bp, Artificial Sequence
  Oligonucleotide for detection of SNP TSC0040931
attgaaggaattg

SEQ ID NO: 162770 - DNA, 13 bp, Artificial Sequence
  Oligonucleotide for detection of SNP TSC0040931
caattccttcaat

SEQ ID NO: 162771 - DNA, 13 bp, Artificial Sequence
  Oligonucleotide for detection of SNP TSC0040932
ggttaaatgtaaa

SEQ ID NO: 162772 - DNA, 13 bp, Artificial Sequence
  Oligonucleotide for detection of SNP TSC0040932
tttacatttaacc

SEQ ID NO: 162773 - DNA, 13 bp, Artificial Sequence
  Oligonucleotide for detection of SNP TSC0040932
ggttaagtgtaaa

SEQ ID NO: 162774 - DNA, 13 bp, Artificial Sequence
  Oligonucleotide for detection of SNP TSC0040932
tttacacttaacc

SEQ ID NO: 162775 - DNA, 13 bp, Artificial Sequence
  Oligonucleotide for detection of SNP TSC0007278
gttttttgtggat

SEQ ID NO: 162776 - DNA, 13 bp, Artificial Sequence
  Oligonucleotide for detection of SNP TSC0007278
atccacaaaaaac

SEQ ID NO: 162777 - DNA, 13 bp, Artificial Sequence
  Oligonucleotide for detection of SNP TSC0007278
gtttttcgtggat

SEQ ID NO: 162778 - DNA, 13 bp, Artificial Sequence
  Oligonucleotide for detection of SNP TSC0007278
atccacgaaaaac

SEQ ID NO: 162779 - DNA, 13 bp, Artificial Sequence
  Oligonucleotide for detection of SNP TSC0007278
atttatgggaaay

SEQ ID NO: 162780 - DNA, 13 bp, Artificial Sequence
  Oligonucleotide for detection of SNP TSC0007278
rtttcccataaat

SEQ ID NO: 162781 - DNA, 13 bp, Artificial Sequence
  Oligonucleotide for detection of SNP TSC0007278
atttataggaaay

SEQ ID NO: 162782 - DNA, 13 bp, Artificial Sequence
  Oligonucleotide for detection of SNP TSC0007278
rtttcctataaat

SEQ ID NO: 162783 - DNA, 13 bp, Artificial Sequence
  Oligonucleotide for detection of SNP TSC0007278
atttacgggaaay

SEQ ID NO: 162784 - DNA, 13 bp, Artificial Sequence
  Oligonucleotide for detection of SNP TSC0007278
rtttcccgtaaat

SEQ ID NO: 162785 - DNA, 13 bp, Artificial Sequence
  Oligonucleotide for detection of SNP TSC0007279
atttttatgaaag

SEQ ID NO: 162786 - DNA, 13 bp, Artificial Sequence
  Oligonucleotide for detection of SNP TSC0007279
ctttcataaaaat

SEQ ID NO: 162787 - DNA, 13 bp, Artificial Sequence
  Oligonucleotide for detection of SNP TSC0007279
atttttttgaaag

SEQ ID NO: 162788 - DNA, 13 bp, Artificial Sequence
  Oligonucleotide for detection of SNP TSC0007279
ctttcaaaaaaat

SEQ ID NO: 162789 - DNA, 13 bp, Artificial Sequence
  Oligonucleotide for detection of SNP TSC0007279
atttttacgaaag

SEQ ID NO: 162790 - DNA, 13 bp, Artificial Sequence
  Oligonucleotide for detection of SNP TSC0007279
ctttcgtaaaaat

SEQ ID NO: 162791 - DNA, 13 bp, Artificial Sequence
  Oligonucleotide for detection of SNP TSC0007279
attttttcgaaag

SEQ ID NO: 162792 - DNA, 13 bp, Artificial Sequence
  Oligonucleotide for detection of SNP TSC0007279
ctttcgaaaaaat

SEQ ID NO: 162793 - DNA, 13 bp, Artificial Sequence
  Oligonucleotide for detection of SNP TSC0007279
ttttcgtgggggt

SEQ ID NO: 162794 - DNA, 13 bp, Artificial Sequence
  Oligonucleotide for detection of SNP TSC0007279
acccccacgaaaa

SEQ ID NO: 162795 - DNA, 13 bp, Artificial Sequence
  Oligonucleotide for detection of SNP TSC0007279
ttttcgggggggt

SEQ ID NO: 162796 - DNA, 13 bp, Artificial Sequence
  Oligonucleotide for detection of SNP TSC0007279
acccccccgaaaa

SEQ ID NO: 162797 - DNA, 13 bp, Artificial Sequence
  Oligonucleotide for detection of SNP TSC0040933
tttttagtatggy

SEQ ID NO: 162798 - DNA, 13 bp, Artificial Sequence
  Oligonucleotide for detection of SNP TSC0040933
rccatactaaaaa

SEQ ID NO: 162799 - DNA, 13 bp, Artificial Sequence
  Oligonucleotide for detection of SNP TSC0040933
tttttaatatggy

SEQ ID NO: 162800 - DNA, 13 bp, Artificial Sequence
  Oligonucleotide for detection of SNP TSC0040933
rccatattaaaaa

SEQ ID NO: 162801 - DNA, 13 bp, Artificial Sequence
  Oligonucleotide for detection of SNP TSC0040934
aattgtataattt

SEQ ID NO: 162802 - DNA, 13 bp, Artificial Sequence
  Oligonucleotide for detection of SNP TSC0040934
aaattatacaatt

SEQ ID NO: 162803 - DNA, 13 bp, Artificial Sequence
  Oligonucleotide for detection of SNP TSC0040934
aattgtgtaattt

SEQ ID NO: 162804 - DNA, 13 bp, Artificial Sequence
  Oligonucleotide for detection of SNP TSC0040934
aaattacacaatt

SEQ ID NO: 162805 - DNA, 13 bp, Artificial Sequence
  Oligonucleotide for detection of SNP TSC0040935
tattaagattata

SEQ ID NO: 162806 - DNA, 13 bp, Artificial Sequence
  Oligonucleotide for detection of SNP TSC0040935
tataatcttaata

SEQ ID NO: 162807 - DNA, 13 bp, Artificial Sequence
  Oligonucleotide for detection of SNP TSC0040935
tattaaaattata

SEQ ID NO: 162808 - DNA, 13 bp, Artificial Sequence
  Oligonucleotide for detection of SNP TSC0040935
tataattttaata

SEQ ID NO: 162809 - DNA, 13 bp, Artificial Sequence
  Oligonucleotide for detection of SNP TSC0040938
tggaagtgggtty

SEQ ID NO: 162810 - DNA, 13 bp, Artificial Sequence
  Oligonucleotide for detection of SNP TSC0040938
raacccacttcca

SEQ ID NO: 162811 - DNA, 13 bp, Artificial Sequence
  Oligonucleotide for detection of SNP TSC0040938
cggaagtgggtty

SEQ ID NO: 162812 - DNA, 13 bp, Artificial Sequence
  Oligonucleotide for detection of SNP TSC0040938
raacccacttccg

SEQ ID NO: 162813 - DNA, 13 bp, Artificial Sequence
  Oligonucleotide for detection of SNP TSC0040938
tggaagcgggtty

SEQ ID NO: 162814 - DNA, 13 bp, Artificial Sequence
  Oligonucleotide for detection of SNP TSC0040938
raacccgcttcca

SEQ ID NO: 162815 - DNA, 13 bp, Artificial Sequence
  Oligonucleotide for detection of SNP TSC0040938
cggaagcgggtty

SEQ ID NO: 162816 - DNA, 13 bp, Artificial Sequence
  Oligonucleotide for detection of SNP TSC0040938
raacccgcttccg

SEQ ID NO: 162817 - DNA, 13 bp, Artificial Sequence
  Oligonucleotide for detection of SNP TSC0040938
gggtttgtttttg

SEQ ID NO: 162818 - DNA, 13 bp, Artificial Sequence
  Oligonucleotide for detection of SNP TSC0040938
caaaaacaaaccc

SEQ ID NO: 162819 - DNA, 13 bp, Artificial Sequence
  Oligonucleotide for detection of SNP TSC0040938
gggtttatttttg

SEQ ID NO: 162820 - DNA, 13 bp, Artificial Sequence
  Oligonucleotide for detection of SNP TSC0040938
caaaaataaaccc

SEQ ID NO: 162821 - DNA, 13 bp, Artificial Sequence
  Oligonucleotide for detection of SNP TSC0040938
gggttcgtttttg

SEQ ID NO: 162822 - DNA, 13 bp, Artificial Sequence
  Oligonucleotide for detection of SNP TSC0040938
caaaaacgaaccc

SEQ ID NO: 162823 - DNA, 13 bp, Artificial Sequence
  Oligonucleotide for detection of SNP TSC0040938
gggtttattttcg

SEQ ID NO: 162824 - DNA, 13 bp, Artificial Sequence
  Oligonucleotide for detection of SNP TSC0040938
cgaaaataaaccc

SEQ ID NO: 162825 - DNA, 13 bp, Artificial Sequence
  Oligonucleotide for detection of SNP TSC0040938
gggtttgttttcg

SEQ ID NO: 162826 - DNA, 13 bp, Artificial Sequence
  Oligonucleotide for detection of SNP TSC0040938
cgaaaacaaaccc

SEQ ID NO: 162827 - DNA, 13 bp, Artificial Sequence
  Oligonucleotide for detection of SNP TSC0040938
gggttcgttttcg

SEQ ID NO: 162828 - DNA, 13 bp, Artificial Sequence
  Oligonucleotide for detection of SNP TSC0040938
cgaaaacgaaccc

SEQ ID NO: 162829 - DNA, 13 bp, Artificial Sequence
  Oligonucleotide for detection of SNP TSC0040940
gggtaagttattt

SEQ ID NO: 162830 - DNA, 13 bp, Artificial Sequence
  Oligonucleotide for detection of SNP TSC0040940
aaataacttaccc

SEQ ID NO: 162831 - DNA, 13 bp, Artificial Sequence
  Oligonucleotide for detection of SNP TSC0040940
gggtaaattattt

SEQ ID NO: 162832 - DNA, 13 bp, Artificial Sequence
  Oligonucleotide for detection of SNP TSC0040940
aaataatttaccc

SEQ ID NO: 162833 - DNA, 13 bp, Artificial Sequence
  Oligonucleotide for detection of SNP TSC0040941
attagttgtaaay

SEQ ID NO: 162834 - DNA, 13 bp, Artificial Sequence
  Oligonucleotide for detection of SNP TSC0040941
rtttacaactaat

SEQ ID NO: 162835 - DNA, 13 bp, Artificial Sequence
  Oligonucleotide for detection of SNP TSC0040941
attagtcgtaaay

SEQ ID NO: 162836 - DNA, 13 bp, Artificial Sequence
  Oligonucleotide for detection of SNP TSC0040941
rtttacgactaat

SEQ ID NO: 162837 - DNA, 13 bp, Artificial Sequence
  Oligonucleotide for detection of SNP TSC0040941
gtttgtggttggt

SEQ ID NO: 162838 - DNA, 13 bp, Artificial Sequence
  Oligonucleotide for detection of SNP TSC0040941
accaaccacaaac

SEQ ID NO: 162839 - DNA, 13 bp, Artificial Sequence
  Oligonucleotide for detection of SNP TSC0040941
gtttgtagttggt

SEQ ID NO: 162840 - DNA, 13 bp, Artificial Sequence
  Oligonucleotide for detection of SNP TSC0040941
accaactacaaac

SEQ ID NO: 162841 - DNA, 13 bp, Artificial Sequence
  Oligonucleotide for detection of SNP TSC0040941
gtttgcggttggt

SEQ ID NO: 162842 - DNA, 13 bp, Artificial Sequence
  Oligonucleotide for detection of SNP TSC0040941
accaaccgcaaac

SEQ ID NO: 162843 - DNA, 13 bp, Artificial Sequence
  Oligonucleotide for detection of SNP TSC0040942
ttagagtggggtt

SEQ ID NO: 162844 - DNA, 13 bp, Artificial Sequence
  Oligonucleotide for detection of SNP TSC0040942
aaccccactctaa

SEQ ID NO: 162845 - DNA, 13 bp, Artificial Sequence
  Oligonucleotide for detection of SNP TSC0040942
ttagaggggggtt

SEQ ID NO: 162846 - DNA, 13 bp, Artificial Sequence
  Oligonucleotide for detection of SNP TSC0040942
aacccccctctaa

SEQ ID NO: 162847 - DNA, 13 bp, Artificial Sequence
  Oligonucleotide for detection of SNP TSC0040942
ttagagcggggtt

SEQ ID NO: 162848 - DNA, 13 bp, Artificial Sequence
  Oligonucleotide for detection of SNP TSC0040942
aaccccgctctaa

SEQ ID NO: 162849 - DNA, 13 bp, Artificial Sequence
  Oligonucleotide for detection of SNP TSC0040942
agtttttttttga

SEQ ID NO: 162850 - DNA, 13 bp, Artificial Sequence
  Oligonucleotide for detection of SNP TSC0040942
tcaaaaaaaaact

SEQ ID NO: 162851 - DNA, 13 bp, Artificial Sequence
  Oligonucleotide for detection of SNP TSC0040943
aaatataatttta

SEQ ID NO: 162852 - DNA, 13 bp, Artificial Sequence
  Oligonucleotide for detection of SNP TSC0040943
taaaattatattt

SEQ ID NO: 162853 - DNA, 13 bp, Artificial Sequence
  Oligonucleotide for detection of SNP TSC0040943
aaatatgatttta

SEQ ID NO: 162854 - DNA, 13 bp, Artificial Sequence
  Oligonucleotide for detection of SNP TSC0040943
taaaatcatattt

SEQ ID NO: 162855 - DNA, 13 bp, Artificial Sequence
  Oligonucleotide for detection of SNP TSC0040943
aaatacgatttta

SEQ ID NO: 162856 - DNA, 13 bp, Artificial Sequence
  Oligonucleotide for detection of SNP TSC0040943
taaaatcgtattt

SEQ ID NO: 162857 - DNA, 13 bp, Artificial Sequence
  Oligonucleotide for detection of SNP TSC0040943
taaaattgtattt

SEQ ID NO: 162858 - DNA, 13 bp, Artificial Sequence
  Oligonucleotide for detection of SNP TSC0040943
aaatacaatttta

SEQ ID NO: 162859 - DNA, 13 bp, Artificial Sequence
  Oligonucleotide for detection of SNP TSC0040944
gtgtaaatatgat

SEQ ID NO: 162860 - DNA, 13 bp, Artificial Sequence
  Oligonucleotide for detection of SNP TSC0040944
atcatatttacac

SEQ ID NO: 162861 - DNA, 13 bp, Artificial Sequence
  Oligonucleotide for detection of SNP TSC0040944
gtgtaagtatgat

SEQ ID NO: 162862 - DNA, 13 bp, Artificial Sequence
  Oligonucleotide for detection of SNP TSC0040944
atcatacttacac

SEQ ID NO: 162863 - DNA, 13 bp, Artificial Sequence
  Oligonucleotide for detection of SNP TSC0007104
agaaaaaatggtg

SEQ ID NO: 162864 - DNA, 13 bp, Artificial Sequence
  Oligonucleotide for detection of SNP TSC0007104
caccattttttct

SEQ ID NO: 162865 - DNA, 13 bp, Artificial Sequence
  Oligonucleotide for detection of SNP TSC0007104
agaaaatatggtg

SEQ ID NO: 162866 - DNA, 13 bp, Artificial Sequence
  Oligonucleotide for detection of SNP TSC0007104
caccatattttct

SEQ ID NO: 162867 - DNA, 13 bp, Artificial Sequence
  Oligonucleotide for detection of SNP TSC0007104
tattatttttttt

SEQ ID NO: 162868 - DNA, 13 bp, Artificial Sequence
  Oligonucleotide for detection of SNP TSC0007104
aaaaaaaataata

SEQ ID NO: 162869 - DNA, 13 bp, Artificial Sequence
  Oligonucleotide for detection of SNP TSC0040949
attttagtttatg

SEQ ID NO: 162870 - DNA, 13 bp, Artificial Sequence
  Oligonucleotide for detection of SNP TSC0040949
cataaactaaaat

SEQ ID NO: 162871 - DNA, 13 bp, Artificial Sequence
  Oligonucleotide for detection of SNP TSC0040949
attttaatttatg

SEQ ID NO: 162872 - DNA, 13 bp, Artificial Sequence
  Oligonucleotide for detection of SNP TSC0040949
cataaattaaaat

SEQ ID NO: 162873 - DNA, 13 bp, Artificial Sequence
  Oligonucleotide for detection of SNP TSC0040950
atgaggtggaggg

SEQ ID NO: 162874 - DNA, 13 bp, Artificial Sequence
  Oligonucleotide for detection of SNP TSC0040950
ccctccacctcat

SEQ ID NO: 162875 - DNA, 13 bp, Artificial Sequence
  Oligonucleotide for detection of SNP TSC0040950
atgagggggaggg

SEQ ID NO: 162876 - DNA, 13 bp, Artificial Sequence
  Oligonucleotide for detection of SNP TSC0040950
ccctccccctcat

SEQ ID NO: 162877 - DNA, 13 bp, Artificial Sequence
  Oligonucleotide for detection of SNP TSC0040951
tgattttggatay

SEQ ID NO: 162878 - DNA, 13 bp, Artificial Sequence
  Oligonucleotide for detection of SNP TSC0040951
rtatccaaaatca

SEQ ID NO: 162879 - DNA, 13 bp, Artificial Sequence
  Oligonucleotide for detection of SNP TSC0040951
tgatttcggatay

SEQ ID NO: 162880 - DNA, 13 bp, Artificial Sequence
  Oligonucleotide for detection of SNP TSC0040951
rtatccgaaatca

SEQ ID NO: 162881 - DNA, 13 bp, Artificial Sequence
  Oligonucleotide for detection of SNP TSC0040951
gtatttgaagtta

SEQ ID NO: 162882 - DNA, 13 bp, Artificial Sequence
  Oligonucleotide for detection of SNP TSC0040951
taacttcaaatac

SEQ ID NO: 162883 - DNA, 13 bp, Artificial Sequence
  Oligonucleotide for detection of SNP TSC0040951
gtatttaaagtta

SEQ ID NO: 162884 - DNA, 13 bp, Artificial Sequence
  Oligonucleotide for detection of SNP TSC0040951
taactttaaatac

SEQ ID NO: 162885 - DNA, 13 bp, Artificial Sequence
  Oligonucleotide for detection of SNP TSC0040951
gtattcgaagtta

SEQ ID NO: 162886 - DNA, 13 bp, Artificial Sequence
  Oligonucleotide for detection of SNP TSC0040951
taacttcgaatac

SEQ ID NO: 162887 - DNA, 13 bp, Artificial Sequence
  Oligonucleotide for detection of SNP TSC0040952
ttgtaaatggggg

SEQ ID NO: 162888 - DNA, 13 bp, Artificial Sequence
  Oligonucleotide for detection of SNP TSC0040952
cccccatttacaa

SEQ ID NO: 162889 - DNA, 13 bp, Artificial Sequence
  Oligonucleotide for detection of SNP TSC0040952
ttgtaagtggggg

SEQ ID NO: 162890 - DNA, 13 bp, Artificial Sequence
  Oligonucleotide for detection of SNP TSC0040952
cccccacttacaa

SEQ ID NO: 162891 - DNA, 13 bp, Artificial Sequence
  Oligonucleotide for detection of SNP TSC0040953
aaataagaattgg

SEQ ID NO: 162892 - DNA, 13 bp, Artificial Sequence
  Oligonucleotide for detection of SNP TSC0040953
ccaattcttattt

SEQ ID NO: 162893 - DNA, 13 bp, Artificial Sequence
  Oligonucleotide for detection of SNP TSC0040953
aaataaaaattgg

SEQ ID NO: 162894 - DNA, 13 bp, Artificial Sequence
  Oligonucleotide for detection of SNP TSC0040953
ccaatttttattt

SEQ ID NO: 162895 - DNA, 13 bp, Artificial Sequence
  Oligonucleotide for detection of SNP TSC0006719
atagatggtttaa

SEQ ID NO: 162896 - DNA, 13 bp, Artificial Sequence
  Oligonucleotide for detection of SNP TSC0006719
ttaaaccatctat

SEQ ID NO: 162897 - DNA, 13 bp, Artificial Sequence
  Oligonucleotide for detection of SNP TSC0006719
atagatagtttaa

SEQ ID NO: 162898 - DNA, 13 bp, Artificial Sequence
  Oligonucleotide for detection of SNP TSC0006719
ttaaactatctat

SEQ ID NO: 162899 - DNA, 13 bp, Artificial Sequence
  Oligonucleotide for detection of SNP TSC0040956
ggggattgttagy

SEQ ID NO: 162900 - DNA, 13 bp, Artificial Sequence
  Oligonucleotide for detection of SNP TSC0040956
rctaacaatcccc

SEQ ID NO: 162901 - DNA, 13 bp, Artificial Sequence
  Oligonucleotide for detection of SNP TSC0040956
ggggatcgttagy

SEQ ID NO: 162902 - DNA, 13 bp, Artificial Sequence
  Oligonucleotide for detection of SNP TSC0040956
rctaacgatcccc

SEQ ID NO: 162903 - DNA, 13 bp, Artificial Sequence
  Oligonucleotide for detection of SNP TSC0040956
gttgatggtttty

SEQ ID NO: 162904 - DNA, 13 bp, Artificial Sequence
  Oligonucleotide for detection of SNP TSC0040956
raaaaccatcaac

SEQ ID NO: 162905 - DNA, 13 bp, Artificial Sequence
  Oligonucleotide for detection of SNP TSC0040956
gttgatagtttty

SEQ ID NO: 162906 - DNA, 13 bp, Artificial Sequence
  Oligonucleotide for detection of SNP TSC0040956
raaaactatcaac

SEQ ID NO: 162907 - DNA, 13 bp, Artificial Sequence
  Oligonucleotide for detection of SNP TSC0040956
gttgacggtttty

SEQ ID NO: 162908 - DNA, 13 bp, Artificial Sequence
  Oligonucleotide for detection of SNP TSC0040956
raaaaccgtcaac

SEQ ID NO: 162909 - DNA, 13 bp, Artificial Sequence
  Oligonucleotide for detection of SNP TSC0040957
agtataggtttaa

SEQ ID NO: 162910 - DNA, 13 bp, Artificial Sequence
  Oligonucleotide for detection of SNP TSC0040957
ttaaacctatact

SEQ ID NO: 162911 - DNA, 13 bp, Artificial Sequence
  Oligonucleotide for detection of SNP TSC0040957
ttaggtatgtgtt

SEQ ID NO: 162912 - DNA, 13 bp, Artificial Sequence
  Oligonucleotide for detection of SNP TSC0040957
aacacatacctaa

SEQ ID NO: 162913 - DNA, 13 bp, Artificial Sequence
  Oligonucleotide for detection of SNP TSC0040957
ttaggtttgtgtt

SEQ ID NO: 162914 - DNA, 13 bp, Artificial Sequence
  Oligonucleotide for detection of SNP TSC0040957
aacacaaacctaa

SEQ ID NO: 162915 - DNA, 13 bp, Artificial Sequence
  Oligonucleotide for detection of SNP TSC0040958
ttttaattaattg

SEQ ID NO: 162916 - DNA, 13 bp, Artificial Sequence
  Oligonucleotide for detection of SNP TSC0040958
caattaattaaaa

SEQ ID NO: 162917 - DNA, 13 bp, Artificial Sequence
  Oligonucleotide for detection of SNP TSC0040958
ttttaagtaattg

SEQ ID NO: 162918 - DNA, 13 bp, Artificial Sequence
  Oligonucleotide for detection of SNP TSC0040958
caattacttaaaa

SEQ ID NO: 162919 - DNA, 13 bp, Artificial Sequence
  Oligonucleotide for detection of SNP TSC0040958
tagttggttaggg

SEQ ID NO: 162920 - DNA, 13 bp, Artificial Sequence
  Oligonucleotide for detection of SNP TSC0040958
ccctaaccaacta

SEQ ID NO: 162921 - DNA, 13 bp, Artificial Sequence
  Oligonucleotide for detection of SNP TSC0040958
tagttgtttaggg

SEQ ID NO: 162922 - DNA, 13 bp, Artificial Sequence
  Oligonucleotide for detection of SNP TSC0040958
ccctaaacaacta

SEQ ID NO: 162923 - DNA, 13 bp, Artificial Sequence
  Oligonucleotide for detection of SNP TSC0040959
agtattatatttt

SEQ ID NO: 162924 - DNA, 13 bp, Artificial Sequence
  Oligonucleotide for detection of SNP TSC0040959
aaaatataatact

SEQ ID NO: 162925 - DNA, 13 bp, Artificial Sequence
  Oligonucleotide for detection of SNP TSC0040959
agtattgtatttt

SEQ ID NO: 162926 - DNA, 13 bp, Artificial Sequence
  Oligonucleotide for detection of SNP TSC0040959
aaaatacaatact

SEQ ID NO: 162927 - DNA, 13 bp, Artificial Sequence
  Oligonucleotide for detection of SNP TSC0040959
agtatcgtatttt

SEQ ID NO: 162928 - DNA, 13 bp, Artificial Sequence
  Oligonucleotide for detection of SNP TSC0040959
aaaatacgatact

SEQ ID NO: 162929 - DNA, 13 bp, Artificial Sequence
  Oligonucleotide for detection of SNP TSC0040959
aaaatgtggtatt

SEQ ID NO: 162930 - DNA, 13 bp, Artificial Sequence
  Oligonucleotide for detection of SNP TSC0040959
aataccacatttt

SEQ ID NO: 162931 - DNA, 13 bp, Artificial Sequence
  Oligonucleotide for detection of SNP TSC0040959
aaaatgcggtatt

SEQ ID NO: 162932 - DNA, 13 bp, Artificial Sequence
  Oligonucleotide for detection of SNP TSC0040959
aataccgcatttt

SEQ ID NO: 162933 - DNA, 13 bp, Artificial Sequence
  Oligonucleotide for detection of SNP TSC0040964
aagatatgtaata

SEQ ID NO: 162934 - DNA, 13 bp, Artificial Sequence
  Oligonucleotide for detection of SNP TSC0040964
tattacatatctt

SEQ ID NO: 162935 - DNA, 13 bp, Artificial Sequence
  Oligonucleotide for detection of SNP TSC0040964
aagatacgtaata

SEQ ID NO: 162936 - DNA, 13 bp, Artificial Sequence
  Oligonucleotide for detection of SNP TSC0040964
tattacgtatctt

SEQ ID NO: 162937 - DNA, 13 bp, Artificial Sequence
  Oligonucleotide for detection of SNP TSC0040964
tattatatgtttt

SEQ ID NO: 162938 - DNA, 13 bp, Artificial Sequence
  Oligonucleotide for detection of SNP TSC0040964
aaaacatataata

SEQ ID NO: 162939 - DNA, 13 bp, Artificial Sequence
  Oligonucleotide for detection of SNP TSC0040968
attttaataaaag

SEQ ID NO: 162940 - DNA, 13 bp, Artificial Sequence
  Oligonucleotide for detection of SNP TSC0040968
cttttattaaaat

SEQ ID NO: 162941 - DNA, 13 bp, Artificial Sequence
  Oligonucleotide for detection of SNP TSC0040968
attttagtaaaag

SEQ ID NO: 162942 - DNA, 13 bp, Artificial Sequence
  Oligonucleotide for detection of SNP TSC0040968
cttttactaaaat

SEQ ID NO: 162943 - DNA, 13 bp, Artificial Sequence
  Oligonucleotide for detection of SNP TSC0040970
tttaatgtggttt

SEQ ID NO: 162944 - DNA, 13 bp, Artificial Sequence
  Oligonucleotide for detection of SNP TSC0040970
aaaccacattaaa

SEQ ID NO: 162945 - DNA, 13 bp, Artificial Sequence
  Oligonucleotide for detection of SNP TSC0040970
tttaacgtggttt

SEQ ID NO: 162946 - DNA, 13 bp, Artificial Sequence
  Oligonucleotide for detection of SNP TSC0040970
aaaccacgttaaa

SEQ ID NO: 162947 - DNA, 13 bp, Artificial Sequence
  Oligonucleotide for detection of SNP TSC0040970
agattaagttgga

SEQ ID NO: 162948 - DNA, 13 bp, Artificial Sequence
  Oligonucleotide for detection of SNP TSC0040970
tccaacttaatct

SEQ ID NO: 162949 - DNA, 13 bp, Artificial Sequence
  Oligonucleotide for detection of SNP TSC0040970
agattatgttgga

SEQ ID NO: 162950 - DNA, 13 bp, Artificial Sequence
  Oligonucleotide for detection of SNP TSC0040970
tccaacataatct

SEQ ID NO: 162951 - DNA, 13 bp, Artificial Sequence
  Oligonucleotide for detection of SNP TSC0040970
agattacgttgga

SEQ ID NO: 162952 - DNA, 13 bp, Artificial Sequence
  Oligonucleotide for detection of SNP TSC0040970
tccaacgtaatct

SEQ ID NO: 162953 - DNA, 13 bp, Artificial Sequence
  Oligonucleotide for detection of SNP TSC0040971
agattatagtggy

SEQ ID NO: 162954 - DNA, 13 bp, Artificial Sequence
  Oligonucleotide for detection of SNP TSC0040971
rccactataatct

SEQ ID NO: 162955 - DNA, 13 bp, Artificial Sequence
  Oligonucleotide for detection of SNP TSC0040971
agattagagtggy

SEQ ID NO: 162956 - DNA, 13 bp, Artificial Sequence
  Oligonucleotide for detection of SNP TSC0040971
rccactctaatct

SEQ ID NO: 162957 - DNA, 13 bp, Artificial Sequence
  Oligonucleotide for detection of SNP TSC0040971
gttattgtagttt

SEQ ID NO: 162958 - DNA, 13 bp, Artificial Sequence
  Oligonucleotide for detection of SNP TSC0040971
aaactacaataac

SEQ ID NO: 162959 - DNA, 13 bp, Artificial Sequence
  Oligonucleotide for detection of SNP TSC0040971
gttattttagttt

SEQ ID NO: 162960 - DNA, 13 bp, Artificial Sequence
  Oligonucleotide for detection of SNP TSC0040971
aaactaaaataac

SEQ ID NO: 162961 - DNA, 13 bp, Artificial Sequence
  Oligonucleotide for detection of SNP TSC0040972
tgaatttgtttta

SEQ ID NO: 162962 - DNA, 13 bp, Artificial Sequence
  Oligonucleotide for detection of SNP TSC0040972
taaaacaaattca

SEQ ID NO: 162963 - DNA, 13 bp, Artificial Sequence
  Oligonucleotide for detection of SNP TSC0040972
cgaatttgtttta

SEQ ID NO: 162964 - DNA, 13 bp, Artificial Sequence
  Oligonucleotide for detection of SNP TSC0040972
taaaacaaattcg

SEQ ID NO: 162965 - DNA, 13 bp, Artificial Sequence
  Oligonucleotide for detection of SNP TSC0040972
tgaattcgtttta

SEQ ID NO: 162966 - DNA, 13 bp, Artificial Sequence
  Oligonucleotide for detection of SNP TSC0040972
taaaacgaattca

SEQ ID NO: 162967 - DNA, 13 bp, Artificial Sequence
  Oligonucleotide for detection of SNP TSC0040972
cgaattcgtttta

SEQ ID NO: 162968 - DNA, 13 bp, Artificial Sequence
  Oligonucleotide for detection of SNP TSC0040972
taaaacgaattcg

SEQ ID NO: 162969 - DNA, 13 bp, Artificial Sequence
  Oligonucleotide for detection of SNP TSC0040972
tgaaatggatttg

SEQ ID NO: 162970 - DNA, 13 bp, Artificial Sequence
  Oligonucleotide for detection of SNP TSC0040972
caaatccatttca

SEQ ID NO: 162971 - DNA, 13 bp, Artificial Sequence
  Oligonucleotide for detection of SNP TSC0040972
tgaaatagatttg

SEQ ID NO: 162972 - DNA, 13 bp, Artificial Sequence
  Oligonucleotide for detection of SNP TSC0040972
caaatctatttca

SEQ ID NO: 162973 - DNA, 13 bp, Artificial Sequence
  Oligonucleotide for detection of SNP TSC0040972
tgaaacggatttg

SEQ ID NO: 162974 - DNA, 13 bp, Artificial Sequence
  Oligonucleotide for detection of SNP TSC0040972
caaatccgtttca

SEQ ID NO: 162975 - DNA, 13 bp, Artificial Sequence
  Oligonucleotide for detection of SNP TSC0040972
tgaaatagattcg

SEQ ID NO: 162976 - DNA, 13 bp, Artificial Sequence
  Oligonucleotide for detection of SNP TSC0040972
cgaatctatttca

SEQ ID NO: 162977 - DNA, 13 bp, Artificial Sequence
  Oligonucleotide for detection of SNP TSC0040972
tgaaatggattcg

SEQ ID NO: 162978 - DNA, 13 bp, Artificial Sequence
  Oligonucleotide for detection of SNP TSC0040972
cgaatccatttca

SEQ ID NO: 162979 - DNA, 13 bp, Artificial Sequence
  Oligonucleotide for detection of SNP TSC0040972
tgaaacggattcg

SEQ ID NO: 162980 - DNA, 13 bp, Artificial Sequence
  Oligonucleotide for detection of SNP TSC0040972
cgaatccgtttca

SEQ ID NO: 162981 - DNA, 13 bp, Artificial Sequence
  Oligonucleotide for detection of SNP TSC0040973
aggaaggtgtttt

SEQ ID NO: 162982 - DNA, 13 bp, Artificial Sequence
  Oligonucleotide for detection of SNP TSC0040973
aaaacaccttcct

SEQ ID NO: 162983 - DNA, 13 bp, Artificial Sequence
  Oligonucleotide for detection of SNP TSC0040973
aggaagatgtttt

SEQ ID NO: 162984 - DNA, 13 bp, Artificial Sequence
  Oligonucleotide for detection of SNP TSC0040973
aaaacatcttcct

SEQ ID NO: 162985 - DNA, 13 bp, Artificial Sequence
  Oligonucleotide for detection of SNP TSC0040979
aattatatgtttt

SEQ ID NO: 162986 - DNA, 13 bp, Artificial Sequence
  Oligonucleotide for detection of SNP TSC0040979
aaaacatataatt

SEQ ID NO: 162987 - DNA, 13 bp, Artificial Sequence
  Oligonucleotide for detection of SNP TSC0040981
tataggagattay

SEQ ID NO: 162988 - DNA, 13 bp, Artificial Sequence
  Oligonucleotide for detection of SNP TSC0040981
rtaatctcctata

SEQ ID NO: 162989 - DNA, 13 bp, Artificial Sequence
  Oligonucleotide for detection of SNP TSC0040981
tataggggattay

SEQ ID NO: 162990 - DNA, 13 bp, Artificial Sequence
  Oligonucleotide for detection of SNP TSC0040981
rtaatcccctata

SEQ ID NO: 162991 - DNA, 13 bp, Artificial Sequence
  Oligonucleotide for detection of SNP TSC0040982
ttaaattgtagtt

SEQ ID NO: 162992 - DNA, 13 bp, Artificial Sequence
  Oligonucleotide for detection of SNP TSC0040982
aactacaatttaa

SEQ ID NO: 162993 - DNA, 13 bp, Artificial Sequence
  Oligonucleotide for detection of SNP TSC0040982
ttaaatggtagtt

SEQ ID NO: 162994 - DNA, 13 bp, Artificial Sequence
  Oligonucleotide for detection of SNP TSC0040982
aactaccatttaa

SEQ ID NO: 162995 - DNA, 13 bp, Artificial Sequence
  Oligonucleotide for detection of SNP TSC0040982
agttataatttga

SEQ ID NO: 162996 - DNA, 13 bp, Artificial Sequence
  Oligonucleotide for detection of SNP TSC0040982
tcaaattataact

SEQ ID NO: 162997 - DNA, 13 bp, Artificial Sequence
  Oligonucleotide for detection of SNP TSC0040982
agttattatttga

SEQ ID NO: 162998 - DNA, 13 bp, Artificial Sequence
  Oligonucleotide for detection of SNP TSC0040982
tcaaataataact

SEQ ID NO: 162999 - DNA, 13 bp, Artificial Sequence
  Oligonucleotide for detection of SNP TSC0040983
atggtaattttty

SEQ ID NO: 163000 - DNA, 13 bp, Artificial Sequence
  Oligonucleotide for detection of SNP TSC0040983
raaaaattaccat

SEQ ID NO: 163001 - DNA, 13 bp, Artificial Sequence
  Oligonucleotide for detection of SNP TSC0040983
atggtagttttty

SEQ ID NO: 163002 - DNA, 13 bp, Artificial Sequence
  Oligonucleotide for detection of SNP TSC0040983
raaaaactaccat

SEQ ID NO: 163003 - DNA, 13 bp, Artificial Sequence
  Oligonucleotide for detection of SNP TSC0040984
atttagatattay

SEQ ID NO: 163004 - DNA, 13 bp, Artificial Sequence
  Oligonucleotide for detection of SNP TSC0040984
rtaatatctaaat

SEQ ID NO: 163005 - DNA, 13 bp, Artificial Sequence
  Oligonucleotide for detection of SNP TSC0040984
atttagttattay

SEQ ID NO: 163006 - DNA, 13 bp, Artificial Sequence
  Oligonucleotide for detection of SNP TSC0040984
rtaataactaaat

SEQ ID NO: 163007 - DNA, 13 bp, Artificial Sequence
  Oligonucleotide for detection of SNP TSC0040984
gtgatgtttgagt

SEQ ID NO: 163008 - DNA, 13 bp, Artificial Sequence
  Oligonucleotide for detection of SNP TSC0040984
actcaaacatcac

SEQ ID NO: 163009 - DNA, 13 bp, Artificial Sequence
  Oligonucleotide for detection of SNP TSC0040984
gtgatggttgagt

SEQ ID NO: 163010 - DNA, 13 bp, Artificial Sequence
  Oligonucleotide for detection of SNP TSC0040984
actcaaccatcac

SEQ ID NO: 163011 - DNA, 13 bp, Artificial Sequence
  Oligonucleotide for detection of SNP TSC0010634
agagttgaataaa

SEQ ID NO: 163012 - DNA, 13 bp, Artificial Sequence
  Oligonucleotide for detection of SNP TSC0010634
tttattcaactct

SEQ ID NO: 163013 - DNA, 13 bp, Artificial Sequence
  Oligonucleotide for detection of SNP TSC0010634
agagttaaataaa

SEQ ID NO: 163014 - DNA, 13 bp, Artificial Sequence
  Oligonucleotide for detection of SNP TSC0010634
tttatttaactct

SEQ ID NO: 163015 - DNA, 13 bp, Artificial Sequence
  Oligonucleotide for detection of SNP TSC0009032
tttttgagttgtt

SEQ ID NO: 163016 - DNA, 13 bp, Artificial Sequence
  Oligonucleotide for detection of SNP TSC0009032
aacaactcaaaaa

SEQ ID NO: 163017 - DNA, 13 bp, Artificial Sequence
  Oligonucleotide for detection of SNP TSC0009032
tttttgtgttgtt

SEQ ID NO: 163018 - DNA, 13 bp, Artificial Sequence
  Oligonucleotide for detection of SNP TSC0009032
aacaacacaaaaa

SEQ ID NO: 163019 - DNA, 13 bp, Artificial Sequence
  Oligonucleotide for detection of SNP TSC0009032
agtaatttaagaa

SEQ ID NO: 163020 - DNA, 13 bp, Artificial Sequence
  Oligonucleotide for detection of SNP TSC0009032
ttcttaaattact

SEQ ID NO: 163021 - DNA, 13 bp, Artificial Sequence
  Oligonucleotide for detection of SNP TSC0009032
agtaatataagaa

SEQ ID NO: 163022 - DNA, 13 bp, Artificial Sequence
  Oligonucleotide for detection of SNP TSC0009032
ttcttatattact

SEQ ID NO: 163023 - DNA, 13 bp, Artificial Sequence
  Oligonucleotide for detection of SNP TSC0040985
tagtttagggtta

SEQ ID NO: 163024 - DNA, 13 bp, Artificial Sequence
  Oligonucleotide for detection of SNP TSC0040985
taaccctaaacta

SEQ ID NO: 163025 - DNA, 13 bp, Artificial Sequence
  Oligonucleotide for detection of SNP TSC0040985
tagtttggggtta

SEQ ID NO: 163026 - DNA, 13 bp, Artificial Sequence
  Oligonucleotide for detection of SNP TSC0040985
taaccccaaacta

SEQ ID NO: 163027 - DNA, 13 bp, Artificial Sequence
  Oligonucleotide for detection of SNP TSC0040985
tagttcggggtta

SEQ ID NO: 163028 - DNA, 13 bp, Artificial Sequence
  Oligonucleotide for detection of SNP TSC0040985
taaccccgaacta

SEQ ID NO: 163029 - DNA, 13 bp, Artificial Sequence
  Oligonucleotide for detection of SNP TSC0040985
tggttttgggttg

SEQ ID NO: 163030 - DNA, 13 bp, Artificial Sequence
  Oligonucleotide for detection of SNP TSC0040985
caacccaaaacca

SEQ ID NO: 163031 - DNA, 13 bp, Artificial Sequence
  Oligonucleotide for detection of SNP TSC0040985
tggtttcgggttg

SEQ ID NO: 163032 - DNA, 13 bp, Artificial Sequence
  Oligonucleotide for detection of SNP TSC0040985
caacccgaaacca

SEQ ID NO: 163033 - DNA, 13 bp, Artificial Sequence
  Oligonucleotide for detection of SNP TSC0040987
atggatgagaaaa

SEQ ID NO: 163034 - DNA, 13 bp, Artificial Sequence
  Oligonucleotide for detection of SNP TSC0040987
ttttctcatccat

SEQ ID NO: 163035 - DNA, 13 bp, Artificial Sequence
  Oligonucleotide for detection of SNP TSC0040987
atggataagaaaa

SEQ ID NO: 163036 - DNA, 13 bp, Artificial Sequence
  Oligonucleotide for detection of SNP TSC0040987
ttttcttatccat

SEQ ID NO: 163037 - DNA, 13 bp, Artificial Sequence
  Oligonucleotide for detection of SNP TSC0040987
atggacgagaaaa

SEQ ID NO: 163038 - DNA, 13 bp, Artificial Sequence
  Oligonucleotide for detection of SNP TSC0040987
ttttctcgtccat

SEQ ID NO: 163039 - DNA, 13 bp, Artificial Sequence
  Oligonucleotide for detection of SNP TSC0040988
gatgataaagtgy

SEQ ID NO: 163040 - DNA, 13 bp, Artificial Sequence
  Oligonucleotide for detection of SNP TSC0040988
rcactttatcatc

SEQ ID NO: 163041 - DNA, 13 bp, Artificial Sequence
  Oligonucleotide for detection of SNP TSC0040988
gatgatgaagtgy

SEQ ID NO: 163042 - DNA, 13 bp, Artificial Sequence
  Oligonucleotide for detection of SNP TSC0040988
rcacttcatcatc

SEQ ID NO: 163043 - DNA, 13 bp, Artificial Sequence
  Oligonucleotide for detection of SNP TSC0040989
tgatgaagtgtta

SEQ ID NO: 163044 - DNA, 13 bp, Artificial Sequence
  Oligonucleotide for detection of SNP TSC0040989
taacacttcatca

SEQ ID NO: 163045 - DNA, 13 bp, Artificial Sequence
  Oligonucleotide for detection of SNP TSC0040989
tgatgatgtgtta

SEQ ID NO: 163046 - DNA, 13 bp, Artificial Sequence
  Oligonucleotide for detection of SNP TSC0040989
taacacatcatca

SEQ ID NO: 163047 - DNA, 13 bp, Artificial Sequence
  Oligonucleotide for detection of SNP TSC0040989
tgatgacgtgtta

SEQ ID NO: 163048 - DNA, 13 bp, Artificial Sequence
  Oligonucleotide for detection of SNP TSC0040989
taacacgtcatca

SEQ ID NO: 163049 - DNA, 13 bp, Artificial Sequence
  Oligonucleotide for detection of SNP TSC0040989
tggtattttatta

SEQ ID NO: 163050 - DNA, 13 bp, Artificial Sequence
  Oligonucleotide for detection of SNP TSC0040989
taataaaatacca

SEQ ID NO: 163051 - DNA, 13 bp, Artificial Sequence
  Oligonucleotide for detection of SNP TSC0040989
tggtatgttatta

SEQ ID NO: 163052 - DNA, 13 bp, Artificial Sequence
  Oligonucleotide for detection of SNP TSC0040989
taataacatacca

SEQ ID NO: 163053 - DNA, 13 bp, Artificial Sequence
  Oligonucleotide for detection of SNP TSC0040989
tggtacgttatta

SEQ ID NO: 163054 - DNA, 13 bp, Artificial Sequence
  Oligonucleotide for detection of SNP TSC0040989
taataacgtacca

SEQ ID NO: 163055 - DNA, 13 bp, Artificial Sequence
  Oligonucleotide for detection of SNP TSC0040990
ttttaaagaaggy

SEQ ID NO: 163056 - DNA, 13 bp, Artificial Sequence
  Oligonucleotide for detection of SNP TSC0040990
rccttctttaaaa

SEQ ID NO: 163057 - DNA, 13 bp, Artificial Sequence
  Oligonucleotide for detection of SNP TSC0040990
ttttaaggaaggy

SEQ ID NO: 163058 - DNA, 13 bp, Artificial Sequence
  Oligonucleotide for detection of SNP TSC0040990
rccttccttaaaa

SEQ ID NO: 163059 - DNA, 13 bp, Artificial Sequence
  Oligonucleotide for detection of SNP TSC0040991
tataaatgattgy

SEQ ID NO: 163060 - DNA, 13 bp, Artificial Sequence
  Oligonucleotide for detection of SNP TSC0040991
rcaatcatttata

SEQ ID NO: 163061 - DNA, 13 bp, Artificial Sequence
  Oligonucleotide for detection of SNP TSC0040991
tataaacgattgy

SEQ ID NO: 163062 - DNA, 13 bp, Artificial Sequence
  Oligonucleotide for detection of SNP TSC0040991
rcaatcgtttata

SEQ ID NO: 163063 - DNA, 13 bp, Artificial Sequence
  Oligonucleotide for detection of SNP TSC0040991
gtaattgtttata

SEQ ID NO: 163064 - DNA, 13 bp, Artificial Sequence
  Oligonucleotide for detection of SNP TSC0040991
tataaacaattac

SEQ ID NO: 163065 - DNA, 13 bp, Artificial Sequence
  Oligonucleotide for detection of SNP TSC0040991
gtaattatttata

SEQ ID NO: 163066 - DNA, 13 bp, Artificial Sequence
  Oligonucleotide for detection of SNP TSC0040991
tataaataattac

SEQ ID NO: 163067 - DNA, 13 bp, Artificial Sequence
  Oligonucleotide for detection of SNP TSC0040991
gtaatcgtttata

SEQ ID NO: 163068 - DNA, 13 bp, Artificial Sequence
  Oligonucleotide for detection of SNP TSC0040991
tataaacgattac

SEQ ID NO: 163069 - DNA, 13 bp, Artificial Sequence
  Oligonucleotide for detection of SNP TSC0040992
aatttttttgaaa

SEQ ID NO: 163070 - DNA, 13 bp, Artificial Sequence
  Oligonucleotide for detection of SNP TSC0040992
tttcaaaaaaatt

SEQ ID NO: 163071 - DNA, 13 bp, Artificial Sequence
  Oligonucleotide for detection of SNP TSC0040992
aattttgttgaaa

SEQ ID NO: 163072 - DNA, 13 bp, Artificial Sequence
  Oligonucleotide for detection of SNP TSC0040992
tttcaacaaaatt

SEQ ID NO: 163073 - DNA, 13 bp, Artificial Sequence
  Oligonucleotide for detection of SNP TSC0040992
ttttaaaaagatt

SEQ ID NO: 163074 - DNA, 13 bp, Artificial Sequence
  Oligonucleotide for detection of SNP TSC0040992
aatctttttaaaa

SEQ ID NO: 163075 - DNA, 13 bp, Artificial Sequence
  Oligonucleotide for detection of SNP TSC0040992
ttttaataagatt

SEQ ID NO: 163076 - DNA, 13 bp, Artificial Sequence
  Oligonucleotide for detection of SNP TSC0040992
aatcttattaaaa

SEQ ID NO: 163077 - DNA, 13 bp, Artificial Sequence
  Oligonucleotide for detection of SNP TSC0040993
tttttagaaagat

SEQ ID NO: 163078 - DNA, 13 bp, Artificial Sequence
  Oligonucleotide for detection of SNP TSC0040993
atctttctaaaaa

SEQ ID NO: 163079 - DNA, 13 bp, Artificial Sequence
  Oligonucleotide for detection of SNP TSC0040993
tttttaaaaagat

SEQ ID NO: 163080 - DNA, 13 bp, Artificial Sequence
  Oligonucleotide for detection of SNP TSC0040993
atctttttaaaaa

SEQ ID NO: 163081 - DNA, 13 bp, Artificial Sequence
  Oligonucleotide for detection of SNP TSC0008831
tagagatgtggga

SEQ ID NO: 163082 - DNA, 13 bp, Artificial Sequence
  Oligonucleotide for detection of SNP TSC0008831
tcccacatctcta

SEQ ID NO: 163083 - DNA, 13 bp, Artificial Sequence
  Oligonucleotide for detection of SNP TSC0008831
tagagaggtggga

SEQ ID NO: 163084 - DNA, 13 bp, Artificial Sequence
  Oligonucleotide for detection of SNP TSC0008831
tcccacctctcta

SEQ ID NO: 163085 - DNA, 13 bp, Artificial Sequence
  Oligonucleotide for detection of SNP TSC0040996
gtttgggtaataa

SEQ ID NO: 163086 - DNA, 13 bp, Artificial Sequence
  Oligonucleotide for detection of SNP TSC0040996
ttattacccaaac

SEQ ID NO: 163087 - DNA, 13 bp, Artificial Sequence
  Oligonucleotide for detection of SNP TSC0040996
gtttggataataa

SEQ ID NO: 163088 - DNA, 13 bp, Artificial Sequence
  Oligonucleotide for detection of SNP TSC0040996
ttattatccaaac

SEQ ID NO: 163089 - DNA, 13 bp, Artificial Sequence
  Oligonucleotide for detection of SNP TSC0040997
atagtaagtgtay

SEQ ID NO: 163090 - DNA, 13 bp, Artificial Sequence
  Oligonucleotide for detection of SNP TSC0040997
rtacacttactat

SEQ ID NO: 163091 - DNA, 13 bp, Artificial Sequence
  Oligonucleotide for detection of SNP TSC0040997
atagtaggtgtay

SEQ ID NO: 163092 - DNA, 13 bp, Artificial Sequence
  Oligonucleotide for detection of SNP TSC0040997
rtacacctactat

SEQ ID NO: 163093 - DNA, 13 bp, Artificial Sequence
  Oligonucleotide for detection of SNP TSC0040998
ggtttgtgtgttt

SEQ ID NO: 163094 - DNA, 13 bp, Artificial Sequence
  Oligonucleotide for detection of SNP TSC0040998
aaacacacaaacc

SEQ ID NO: 163095 - DNA, 13 bp, Artificial Sequence
  Oligonucleotide for detection of SNP TSC0040998
ggtttgcgtgttt

SEQ ID NO: 163096 - DNA, 13 bp, Artificial Sequence
  Oligonucleotide for detection of SNP TSC0040998
aaacacgcaaacc

SEQ ID NO: 163097 - DNA, 13 bp, Artificial Sequence
  Oligonucleotide for detection of SNP TSC0040998
aggtatgtaaaty

SEQ ID NO: 163098 - DNA, 13 bp, Artificial Sequence
  Oligonucleotide for detection of SNP TSC0040998
ratttacatacct

SEQ ID NO: 163099 - DNA, 13 bp, Artificial Sequence
  Oligonucleotide for detection of SNP TSC0040998
aggtatataaaty

SEQ ID NO: 163100 - DNA, 13 bp, Artificial Sequence
  Oligonucleotide for detection of SNP TSC0040998
ratttatatacct

SEQ ID NO: 163101 - DNA, 13 bp, Artificial Sequence
  Oligonucleotide for detection of SNP TSC0040998
aggtacgtaaaty

SEQ ID NO: 163102 - DNA, 13 bp, Artificial Sequence
  Oligonucleotide for detection of SNP TSC0040998
ratttacgtacct

SEQ ID NO: 163103 - DNA, 13 bp, Artificial Sequence
  Oligonucleotide for detection of SNP TSC0040999
taaatatgattta

SEQ ID NO: 163104 - DNA, 13 bp, Artificial Sequence
  Oligonucleotide for detection of SNP TSC0040999
taaatcatattta

SEQ ID NO: 163105 - DNA, 13 bp, Artificial Sequence
  Oligonucleotide for detection of SNP TSC0040999
taaatacgattta

SEQ ID NO: 163106 - DNA, 13 bp, Artificial Sequence
  Oligonucleotide for detection of SNP TSC0040999
taaatcgtattta

SEQ ID NO: 163107 - DNA, 13 bp, Artificial Sequence
  Oligonucleotide for detection of SNP TSC0040999
taggttgtattta

SEQ ID NO: 163108 - DNA, 13 bp, Artificial Sequence
  Oligonucleotide for detection of SNP TSC0040999
taaatacaaccta

SEQ ID NO: 163109 - DNA, 13 bp, Artificial Sequence
  Oligonucleotide for detection of SNP TSC0040999
taggttatattta

SEQ ID NO: 163110 - DNA, 13 bp, Artificial Sequence
  Oligonucleotide for detection of SNP TSC0040999
taaatataaccta

SEQ ID NO: 163111 - DNA, 13 bp, Artificial Sequence
  Oligonucleotide for detection of SNP TSC0040999
taggtcgtattta

SEQ ID NO: 163112 - DNA, 13 bp, Artificial Sequence
  Oligonucleotide for detection of SNP TSC0040999
taaatacgaccta

SEQ ID NO: 163113 - DNA, 13 bp, Artificial Sequence
  Oligonucleotide for detection of SNP TSC0041000
agatgtatattaa

SEQ ID NO: 163114 - DNA, 13 bp, Artificial Sequence
  Oligonucleotide for detection of SNP TSC0041000
ttaatatacatct

SEQ ID NO: 163115 - DNA, 13 bp, Artificial Sequence
  Oligonucleotide for detection of SNP TSC0041000
agatgtgtattaa

SEQ ID NO: 163116 - DNA, 13 bp, Artificial Sequence
  Oligonucleotide for detection of SNP TSC0041000
ttaatacacatct

SEQ ID NO: 163117 - DNA, 13 bp, Artificial Sequence
  Oligonucleotide for detection of SNP TSC0041000
agatgcgtattaa

SEQ ID NO: 163118 - DNA, 13 bp, Artificial Sequence
  Oligonucleotide for detection of SNP TSC0041000
ttaatacgcatct

SEQ ID NO: 163119 - DNA, 13 bp, Artificial Sequence
  Oligonucleotide for detection of SNP TSC0041000
ttgatatgtattt

SEQ ID NO: 163120 - DNA, 13 bp, Artificial Sequence
  Oligonucleotide for detection of SNP TSC0041000
aaatacatatcaa

SEQ ID NO: 163121 - DNA, 13 bp, Artificial Sequence
  Oligonucleotide for detection of SNP TSC0041000
ttgatacgtattt

SEQ ID NO: 163122 - DNA, 13 bp, Artificial Sequence
  Oligonucleotide for detection of SNP TSC0041000
aaatacgtatcaa

SEQ ID NO: 163123 - DNA, 13 bp, Artificial Sequence
  Oligonucleotide for detection of SNP TSC0041001
ttatgtatgtggt

SEQ ID NO: 163124 - DNA, 13 bp, Artificial Sequence
  Oligonucleotide for detection of SNP TSC0041001
accacatacataa

SEQ ID NO: 163125 - DNA, 13 bp, Artificial Sequence
  Oligonucleotide for detection of SNP TSC0041001
ttatgtgtgtggt

SEQ ID NO: 163126 - DNA, 13 bp, Artificial Sequence
  Oligonucleotide for detection of SNP TSC0041001
accacacacataa

SEQ ID NO: 163127 - DNA, 13 bp, Artificial Sequence
  Oligonucleotide for detection of SNP TSC0041001
ttatgtacgtggt

SEQ ID NO: 163128 - DNA, 13 bp, Artificial Sequence
  Oligonucleotide for detection of SNP TSC0041001
accacgtacataa

SEQ ID NO: 163129 - DNA, 13 bp, Artificial Sequence
  Oligonucleotide for detection of SNP TSC0041001
ttatgtgcgtggt

SEQ ID NO: 163130 - DNA, 13 bp, Artificial Sequence
  Oligonucleotide for detection of SNP TSC0041001
accacgcacataa

SEQ ID NO: 163131 - DNA, 13 bp, Artificial Sequence
  Oligonucleotide for detection of SNP TSC0041003
ggtttttgtggag

SEQ ID NO: 163132 - DNA, 13 bp, Artificial Sequence
  Oligonucleotide for detection of SNP TSC0041003
ctccacaaaaacc

SEQ ID NO: 163133 - DNA, 13 bp, Artificial Sequence
  Oligonucleotide for detection of SNP TSC0041003
ggttttggtggag

SEQ ID NO: 163134 - DNA, 13 bp, Artificial Sequence
  Oligonucleotide for detection of SNP TSC0041003
ctccaccaaaacc

SEQ ID NO: 163135 - DNA, 13 bp, Artificial Sequence
  Oligonucleotide for detection of SNP TSC0041003
ttttattaaaaty

SEQ ID NO: 163136 - DNA, 13 bp, Artificial Sequence
  Oligonucleotide for detection of SNP TSC0041003
rattttaataaaa

SEQ ID NO: 163137 - DNA, 13 bp, Artificial Sequence
  Oligonucleotide for detection of SNP TSC0041004
aattattgtaaaa

SEQ ID NO: 163138 - DNA, 13 bp, Artificial Sequence
  Oligonucleotide for detection of SNP TSC0041004
ttttacaataatt

SEQ ID NO: 163139 - DNA, 13 bp, Artificial Sequence
  Oligonucleotide for detection of SNP TSC0041004
aattatcgtaaaa

SEQ ID NO: 163140 - DNA, 13 bp, Artificial Sequence
  Oligonucleotide for detection of SNP TSC0041004
ttttacgataatt

SEQ ID NO: 163141 - DNA, 13 bp, Artificial Sequence
  Oligonucleotide for detection of SNP TSC0041004
ttttgtgataatt

SEQ ID NO: 163142 - DNA, 13 bp, Artificial Sequence
  Oligonucleotide for detection of SNP TSC0041004
aattatcacaaaa

SEQ ID NO: 163143 - DNA, 13 bp, Artificial Sequence
  Oligonucleotide for detection of SNP TSC0041004
ttttgtaataatt

SEQ ID NO: 163144 - DNA, 13 bp, Artificial Sequence
  Oligonucleotide for detection of SNP TSC0041004
aattattacaaaa

SEQ ID NO: 163145 - DNA, 13 bp, Artificial Sequence
  Oligonucleotide for detection of SNP TSC0041004
ttttgcgataatt

SEQ ID NO: 163146 - DNA, 13 bp, Artificial Sequence
  Oligonucleotide for detection of SNP TSC0041004
aattatcgcaaaa

SEQ ID NO: 163147 - DNA, 13 bp, Artificial Sequence
  Oligonucleotide for detection of SNP TSC0041005
tttttgatgaggy

SEQ ID NO: 163148 - DNA, 13 bp, Artificial Sequence
  Oligonucleotide for detection of SNP TSC0041005
rcctcatcaaaaa

SEQ ID NO: 163149 - DNA, 13 bp, Artificial Sequence
  Oligonucleotide for detection of SNP TSC0041005
tttttgttgaggy

SEQ ID NO: 163150 - DNA, 13 bp, Artificial Sequence
  Oligonucleotide for detection of SNP TSC0041005
rcctcaacaaaaa

SEQ ID NO: 163151 - DNA, 13 bp, Artificial Sequence
  Oligonucleotide for detection of SNP TSC0041005
gttttattaaaaa

SEQ ID NO: 163152 - DNA, 13 bp, Artificial Sequence
  Oligonucleotide for detection of SNP TSC0041005
tttttaataaaac

SEQ ID NO: 163153 - DNA, 13 bp, Artificial Sequence
  Oligonucleotide for detection of SNP TSC0041005
gttttaataaaaa

SEQ ID NO: 163154 - DNA, 13 bp, Artificial Sequence
  Oligonucleotide for detection of SNP TSC0041005
tttttattaaaac

SEQ ID NO: 163155 - DNA, 13 bp, Artificial Sequence
  Oligonucleotide for detection of SNP TSC0041006
taaaaaataagay

SEQ ID NO: 163156 - DNA, 13 bp, Artificial Sequence
  Oligonucleotide for detection of SNP TSC0041006
rtcttatttttta

SEQ ID NO: 163157 - DNA, 13 bp, Artificial Sequence
  Oligonucleotide for detection of SNP TSC0041006
taaaaattaagay

SEQ ID NO: 163158 - DNA, 13 bp, Artificial Sequence
  Oligonucleotide for detection of SNP TSC0041006
rtcttaattttta

SEQ ID NO: 163159 - DNA, 13 bp, Artificial Sequence
  Oligonucleotide for detection of SNP TSC0041006
gttttatttttta

SEQ ID NO: 163160 - DNA, 13 bp, Artificial Sequence
  Oligonucleotide for detection of SNP TSC0041006
taaaaaataaaac

SEQ ID NO: 163161 - DNA, 13 bp, Artificial Sequence
  Oligonucleotide for detection of SNP TSC0041007
ttttaatggattt

SEQ ID NO: 163162 - DNA, 13 bp, Artificial Sequence
  Oligonucleotide for detection of SNP TSC0041007
aaatccattaaaa

SEQ ID NO: 163163 - DNA, 13 bp, Artificial Sequence
  Oligonucleotide for detection of SNP TSC0041007
ttttaagggattt

SEQ ID NO: 163164 - DNA, 13 bp, Artificial Sequence
  Oligonucleotide for detection of SNP TSC0041007
aaatcccttaaaa

SEQ ID NO: 163165 - DNA, 13 bp, Artificial Sequence
  Oligonucleotide for detection of SNP TSC0041007
aaatttattaaga

SEQ ID NO: 163166 - DNA, 13 bp, Artificial Sequence
  Oligonucleotide for detection of SNP TSC0041007
tcttaataaattt

SEQ ID NO: 163167 - DNA, 13 bp, Artificial Sequence
  Oligonucleotide for detection of SNP TSC0041007
aaattttttaaga

SEQ ID NO: 163168 - DNA, 13 bp, Artificial Sequence
  Oligonucleotide for detection of SNP TSC0041007
tcttaaaaaattt

SEQ ID NO: 163169 - DNA, 13 bp, Artificial Sequence
  Oligonucleotide for detection of SNP TSC0041008
aagtatataatga

SEQ ID NO: 163170 - DNA, 13 bp, Artificial Sequence
  Oligonucleotide for detection of SNP TSC0041008
tcattatatactt

SEQ ID NO: 163171 - DNA, 13 bp, Artificial Sequence
  Oligonucleotide for detection of SNP TSC0041008
aagtatgtaatga

SEQ ID NO: 163172 - DNA, 13 bp, Artificial Sequence
  Oligonucleotide for detection of SNP TSC0041008
tcattacatactt

SEQ ID NO: 163173 - DNA, 13 bp, Artificial Sequence
  Oligonucleotide for detection of SNP TSC0041009
ttttagtgaaatg

SEQ ID NO: 163174 - DNA, 13 bp, Artificial Sequence
  Oligonucleotide for detection of SNP TSC0041009
catttcactaaaa

SEQ ID NO: 163175 - DNA, 13 bp, Artificial Sequence
  Oligonucleotide for detection of SNP TSC0041009
ttttagcgaaatg

SEQ ID NO: 163176 - DNA, 13 bp, Artificial Sequence
  Oligonucleotide for detection of SNP TSC0041009
catttcgctaaaa

SEQ ID NO: 163177 - DNA, 13 bp, Artificial Sequence
  Oligonucleotide for detection of SNP TSC0041009
tattttgttggga

SEQ ID NO: 163178 - DNA, 13 bp, Artificial Sequence
  Oligonucleotide for detection of SNP TSC0041009
tcccaacaaaata

SEQ ID NO: 163179 - DNA, 13 bp, Artificial Sequence
  Oligonucleotide for detection of SNP TSC0041009
tattttattggga

SEQ ID NO: 163180 - DNA, 13 bp, Artificial Sequence
  Oligonucleotide for detection of SNP TSC0041009
tcccaataaaata

SEQ ID NO: 163181 - DNA, 13 bp, Artificial Sequence
  Oligonucleotide for detection of SNP TSC0041009
tatttcgttggga

SEQ ID NO: 163182 - DNA, 13 bp, Artificial Sequence
  Oligonucleotide for detection of SNP TSC0041009
tcccaacgaaata

SEQ ID NO: 163183 - DNA, 13 bp, Artificial Sequence
  Oligonucleotide for detection of SNP TSC0041010
aggtggaaaaaaa

SEQ ID NO: 163184 - DNA, 13 bp, Artificial Sequence
  Oligonucleotide for detection of SNP TSC0041010
tttttttccacct

SEQ ID NO: 163185 - DNA, 13 bp, Artificial Sequence
  Oligonucleotide for detection of SNP TSC0041010
aggtggtaaaaaa

SEQ ID NO: 163186 - DNA, 13 bp, Artificial Sequence
  Oligonucleotide for detection of SNP TSC0041010
ttttttaccacct

SEQ ID NO: 163187 - DNA, 13 bp, Artificial Sequence
  Oligonucleotide for detection of SNP TSC0041011
tgtttggaaatgt

SEQ ID NO: 163188 - DNA, 13 bp, Artificial Sequence
  Oligonucleotide for detection of SNP TSC0041011
acatttccaaaca

SEQ ID NO: 163189 - DNA, 13 bp, Artificial Sequence
  Oligonucleotide for detection of SNP TSC0041011
tgtttgaaaatgt

SEQ ID NO: 163190 - DNA, 13 bp, Artificial Sequence
  Oligonucleotide for detection of SNP TSC0041011
acattttcaaaca

SEQ ID NO: 163191 - DNA, 13 bp, Artificial Sequence
  Oligonucleotide for detection of SNP TSC0041012
ttttagatatata

SEQ ID NO: 163192 - DNA, 13 bp, Artificial Sequence
  Oligonucleotide for detection of SNP TSC0041012
tatatatctaaaa

SEQ ID NO: 163193 - DNA, 13 bp, Artificial Sequence
  Oligonucleotide for detection of SNP TSC0041012
ttttaggtatata

SEQ ID NO: 163194 - DNA, 13 bp, Artificial Sequence
  Oligonucleotide for detection of SNP TSC0041012
tatatacctaaaa

SEQ ID NO: 163195 - DNA, 13 bp, Artificial Sequence
  Oligonucleotide for detection of SNP TSC0041014
tggtgagttttgy

SEQ ID NO: 163196 - DNA, 13 bp, Artificial Sequence
  Oligonucleotide for detection of SNP TSC0041014
rcaaaactcacca

SEQ ID NO: 163197 - DNA, 13 bp, Artificial Sequence
  Oligonucleotide for detection of SNP TSC0041014
tggtgaattttgy

SEQ ID NO: 163198 - DNA, 13 bp, Artificial Sequence
  Oligonucleotide for detection of SNP TSC0041014
rcaaaattcacca

SEQ ID NO: 163199 - DNA, 13 bp, Artificial Sequence
  Oligonucleotide for detection of SNP TSC0041015
atttattgagtga

SEQ ID NO: 163200 - DNA, 13 bp, Artificial Sequence
  Oligonucleotide for detection of SNP TSC0041015
tcactcaataaat

SEQ ID NO: 163201 - DNA, 13 bp, Artificial Sequence
  Oligonucleotide for detection of SNP TSC0041015
atttatcgagtga

SEQ ID NO: 163202 - DNA, 13 bp, Artificial Sequence
  Oligonucleotide for detection of SNP TSC0041015
tcactcgataaat

SEQ ID NO: 163203 - DNA, 13 bp, Artificial Sequence
  Oligonucleotide for detection of SNP TSC0041015
ttatttgataaat

SEQ ID NO: 163204 - DNA, 13 bp, Artificial Sequence
  Oligonucleotide for detection of SNP TSC0041015
atttatcaaataa

SEQ ID NO: 163205 - DNA, 13 bp, Artificial Sequence
  Oligonucleotide for detection of SNP TSC0041015
ttatttaataaat

SEQ ID NO: 163206 - DNA, 13 bp, Artificial Sequence
  Oligonucleotide for detection of SNP TSC0041015
atttattaaataa

SEQ ID NO: 163207 - DNA, 13 bp, Artificial Sequence
  Oligonucleotide for detection of SNP TSC0041015
ttattcgataaat

SEQ ID NO: 163208 - DNA, 13 bp, Artificial Sequence
  Oligonucleotide for detection of SNP TSC0041015
atttatcgaataa

SEQ ID NO: 163209 - DNA, 13 bp, Artificial Sequence
  Oligonucleotide for detection of SNP TSC0041018
aaataagttttaa

SEQ ID NO: 163210 - DNA, 13 bp, Artificial Sequence
  Oligonucleotide for detection of SNP TSC0041018
ttaaaacttattt

SEQ ID NO: 163211 - DNA, 13 bp, Artificial Sequence
  Oligonucleotide for detection of SNP TSC0041019
gtttgttgtatty

SEQ ID NO: 163212 - DNA, 13 bp, Artificial Sequence
  Oligonucleotide for detection of SNP TSC0041019
raatacaacaaac

SEQ ID NO: 163213 - DNA, 13 bp, Artificial Sequence
  Oligonucleotide for detection of SNP TSC0041019
gtttgtcgtatty

SEQ ID NO: 163214 - DNA, 13 bp, Artificial Sequence
  Oligonucleotide for detection of SNP TSC0041019
raatacgacaaac

SEQ ID NO: 163215 - DNA, 13 bp, Artificial Sequence
  Oligonucleotide for detection of SNP TSC0041019
gggtgtggtaaay

SEQ ID NO: 163216 - DNA, 13 bp, Artificial Sequence
  Oligonucleotide for detection of SNP TSC0041019
rtttaccacaccc

SEQ ID NO: 163217 - DNA, 13 bp, Artificial Sequence
  Oligonucleotide for detection of SNP TSC0041019
gggtgtagtaaay

SEQ ID NO: 163218 - DNA, 13 bp, Artificial Sequence
  Oligonucleotide for detection of SNP TSC0041019
rtttactacaccc

SEQ ID NO: 163219 - DNA, 13 bp, Artificial Sequence
  Oligonucleotide for detection of SNP TSC0041019
gggtgcggtaaay

SEQ ID NO: 163220 - DNA, 13 bp, Artificial Sequence
  Oligonucleotide for detection of SNP TSC0041019
rtttaccgcaccc

SEQ ID NO: 163221 - DNA, 13 bp, Artificial Sequence
  Oligonucleotide for detection of SNP TSC0041022
tggataggtttty

SEQ ID NO: 163222 - DNA, 13 bp, Artificial Sequence
  Oligonucleotide for detection of SNP TSC0041022
raaaacctatcca

SEQ ID NO: 163223 - DNA, 13 bp, Artificial Sequence
  Oligonucleotide for detection of SNP TSC0041022
tggataagtttty

SEQ ID NO: 163224 - DNA, 13 bp, Artificial Sequence
  Oligonucleotide for detection of SNP TSC0041022
raaaacttatcca

SEQ ID NO: 163225 - DNA, 13 bp, Artificial Sequence
  Oligonucleotide for detection of SNP TSC0041022
cggataggtttty

SEQ ID NO: 163226 - DNA, 13 bp, Artificial Sequence
  Oligonucleotide for detection of SNP TSC0041022
raaaacctatccg

SEQ ID NO: 163227 - DNA, 13 bp, Artificial Sequence
  Oligonucleotide for detection of SNP TSC0041022
cggataagtttty

SEQ ID NO: 163228 - DNA, 13 bp, Artificial Sequence
  Oligonucleotide for detection of SNP TSC0041022
raaaacttatccg

SEQ ID NO: 163229 - DNA, 13 bp, Artificial Sequence
  Oligonucleotide for detection of SNP TSC0041023
atttgtaagaatg

SEQ ID NO: 163230 - DNA, 13 bp, Artificial Sequence
  Oligonucleotide for detection of SNP TSC0041023
cattcttacaaat

SEQ ID NO: 163231 - DNA, 13 bp, Artificial Sequence
  Oligonucleotide for detection of SNP TSC0041023
atttgtgagaatg

SEQ ID NO: 163232 - DNA, 13 bp, Artificial Sequence
  Oligonucleotide for detection of SNP TSC0041023
cattctcacaaat

SEQ ID NO: 163233 - DNA, 13 bp, Artificial Sequence
  Oligonucleotide for detection of SNP TSC0041026
agggattaaaata

SEQ ID NO: 163234 - DNA, 13 bp, Artificial Sequence
  Oligonucleotide for detection of SNP TSC0041026
tattttaatccct

SEQ ID NO: 163235 - DNA, 13 bp, Artificial Sequence
  Oligonucleotide for detection of SNP TSC0041026
agggatgaaaata

SEQ ID NO: 163236 - DNA, 13 bp, Artificial Sequence
  Oligonucleotide for detection of SNP TSC0041026
tattttcatccct

SEQ ID NO: 163237 - DNA, 13 bp, Artificial Sequence
  Oligonucleotide for detection of SNP TSC0041026
agggacgaaaata

SEQ ID NO: 163238 - DNA, 13 bp, Artificial Sequence
  Oligonucleotide for detection of SNP TSC0041026
tattttcgtccct

SEQ ID NO: 163239 - DNA, 13 bp, Artificial Sequence
  Oligonucleotide for detection of SNP TSC0041032
ttttagtttggta

SEQ ID NO: 163240 - DNA, 13 bp, Artificial Sequence
  Oligonucleotide for detection of SNP TSC0041032
taccaaactaaaa

SEQ ID NO: 163241 - DNA, 13 bp, Artificial Sequence
  Oligonucleotide for detection of SNP TSC0041032
ttttaggttggta

SEQ ID NO: 163242 - DNA, 13 bp, Artificial Sequence
  Oligonucleotide for detection of SNP TSC0041032
taccaacctaaaa

SEQ ID NO: 163243 - DNA, 13 bp, Artificial Sequence
  Oligonucleotide for detection of SNP TSC0041032
tgttaggttggag

SEQ ID NO: 163244 - DNA, 13 bp, Artificial Sequence
  Oligonucleotide for detection of SNP TSC0041032
ctccaacctaaca

SEQ ID NO: 163245 - DNA, 13 bp, Artificial Sequence
  Oligonucleotide for detection of SNP TSC0041032
tgttagtttggag

SEQ ID NO: 163246 - DNA, 13 bp, Artificial Sequence
  Oligonucleotide for detection of SNP TSC0041032
ctccaaactaaca

SEQ ID NO: 163247 - DNA, 13 bp, Artificial Sequence
  Oligonucleotide for detection of SNP TSC0041033
aaaaaagttaata

SEQ ID NO: 163248 - DNA, 13 bp, Artificial Sequence
  Oligonucleotide for detection of SNP TSC0041033
tattaactttttt

SEQ ID NO: 163249 - DNA, 13 bp, Artificial Sequence
  Oligonucleotide for detection of SNP TSC0041033
tattaattttttt

SEQ ID NO: 163250 - DNA, 13 bp, Artificial Sequence
  Oligonucleotide for detection of SNP TSC0041033
aaaaaaattaata

SEQ ID NO: 163251 - DNA, 13 bp, Artificial Sequence
  Oligonucleotide for detection of SNP TSC0041037
aatgtataagtty

SEQ ID NO: 163252 - DNA, 13 bp, Artificial Sequence
  Oligonucleotide for detection of SNP TSC0041037
raacttatacatt

SEQ ID NO: 163253 - DNA, 13 bp, Artificial Sequence
  Oligonucleotide for detection of SNP TSC0041037
aatgtagaagtty

SEQ ID NO: 163254 - DNA, 13 bp, Artificial Sequence
  Oligonucleotide for detection of SNP TSC0041037
raacttctacatt

SEQ ID NO: 163255 - DNA, 13 bp, Artificial Sequence
  Oligonucleotide for detection of SNP TSC0009242
tgaataaaattag

SEQ ID NO: 163256 - DNA, 13 bp, Artificial Sequence
  Oligonucleotide for detection of SNP TSC0009242
ctaattttattca

SEQ ID NO: 163257 - DNA, 13 bp, Artificial Sequence
  Oligonucleotide for detection of SNP TSC0009242
tgaatataattag

SEQ ID NO: 163258 - DNA, 13 bp, Artificial Sequence
  Oligonucleotide for detection of SNP TSC0009242
ctaattatattca

SEQ ID NO: 163259 - DNA, 13 bp, Artificial Sequence
  Oligonucleotide for detection of SNP TSC0009242
ttgattttattta

SEQ ID NO: 163260 - DNA, 13 bp, Artificial Sequence
  Oligonucleotide for detection of SNP TSC0009242
taaataaaatcaa

SEQ ID NO: 163261 - DNA, 13 bp, Artificial Sequence
  Oligonucleotide for detection of SNP TSC0009242
ttgattgtattta

SEQ ID NO: 163262 - DNA, 13 bp, Artificial Sequence
  Oligonucleotide for detection of SNP TSC0009242
taaatacaatcaa

SEQ ID NO: 163263 - DNA, 13 bp, Artificial Sequence
  Oligonucleotide for detection of SNP TSC0009244
ataagaaggtagt

SEQ ID NO: 163264 - DNA, 13 bp, Artificial Sequence
  Oligonucleotide for detection of SNP TSC0009244
actaccttcttat

SEQ ID NO: 163265 - DNA, 13 bp, Artificial Sequence
  Oligonucleotide for detection of SNP TSC0009244
ataagatggtagt

SEQ ID NO: 163266 - DNA, 13 bp, Artificial Sequence
  Oligonucleotide for detection of SNP TSC0009244
actaccatcttat

SEQ ID NO: 163267 - DNA, 13 bp, Artificial Sequence
  Oligonucleotide for detection of SNP TSC0009244
ataagacggtagt

SEQ ID NO: 163268 - DNA, 13 bp, Artificial Sequence
  Oligonucleotide for detection of SNP TSC0009244
actaccgtcttat

SEQ ID NO: 163269 - DNA, 13 bp, Artificial Sequence
  Oligonucleotide for detection of SNP TSC0009244
attgtttttttgt

SEQ ID NO: 163270 - DNA, 13 bp, Artificial Sequence
  Oligonucleotide for detection of SNP TSC0009244
acaaaaaaacaat

SEQ ID NO: 163271 - DNA, 13 bp, Artificial Sequence
  Oligonucleotide for detection of SNP TSC0041038
attatgggtttta

SEQ ID NO: 163272 - DNA, 13 bp, Artificial Sequence
  Oligonucleotide for detection of SNP TSC0041038
taaaacccataat

SEQ ID NO: 163273 - DNA, 13 bp, Artificial Sequence
  Oligonucleotide for detection of SNP TSC0041038
attatgagtttta

SEQ ID NO: 163274 - DNA, 13 bp, Artificial Sequence
  Oligonucleotide for detection of SNP TSC0041038
taaaactcataat

SEQ ID NO: 163275 - DNA, 13 bp, Artificial Sequence
  Oligonucleotide for detection of SNP TSC0041040
agatgttgtgtta

SEQ ID NO: 163276 - DNA, 13 bp, Artificial Sequence
  Oligonucleotide for detection of SNP TSC0041040
taacacaacatct

SEQ ID NO: 163277 - DNA, 13 bp, Artificial Sequence
  Oligonucleotide for detection of SNP TSC0041040
agatgtcgtgtta

SEQ ID NO: 163278 - DNA, 13 bp, Artificial Sequence
  Oligonucleotide for detection of SNP TSC0041040
taacacgacatct

SEQ ID NO: 163279 - DNA, 13 bp, Artificial Sequence
  Oligonucleotide for detection of SNP TSC0041040
tagtatggtattt

SEQ ID NO: 163280 - DNA, 13 bp, Artificial Sequence
  Oligonucleotide for detection of SNP TSC0041040
aaataccatacta

SEQ ID NO: 163281 - DNA, 13 bp, Artificial Sequence
  Oligonucleotide for detection of SNP TSC0041040
tagtatagtattt

SEQ ID NO: 163282 - DNA, 13 bp, Artificial Sequence
  Oligonucleotide for detection of SNP TSC0041040
aaatactatacta

SEQ ID NO: 163283 - DNA, 13 bp, Artificial Sequence
  Oligonucleotide for detection of SNP TSC0041040
tagtacggtattt

SEQ ID NO: 163284 - DNA, 13 bp, Artificial Sequence
  Oligonucleotide for detection of SNP TSC0041040
aaataccgtacta

SEQ ID NO: 163285 - DNA, 13 bp, Artificial Sequence
  Oligonucleotide for detection of SNP TSC0041041
atttgtatatgtg

SEQ ID NO: 163286 - DNA, 13 bp, Artificial Sequence
  Oligonucleotide for detection of SNP TSC0041041
cacatatacaaat

SEQ ID NO: 163287 - DNA, 13 bp, Artificial Sequence
  Oligonucleotide for detection of SNP TSC0041041
atttgtgtatgtg

SEQ ID NO: 163288 - DNA, 13 bp, Artificial Sequence
  Oligonucleotide for detection of SNP TSC0041041
cacatacacaaat

SEQ ID NO: 163289 - DNA, 13 bp, Artificial Sequence
  Oligonucleotide for detection of SNP TSC0041041
atttgcgtatgtg

SEQ ID NO: 163290 - DNA, 13 bp, Artificial Sequence
  Oligonucleotide for detection of SNP TSC0041041
cacatacgcaaat

SEQ ID NO: 163291 - DNA, 13 bp, Artificial Sequence
  Oligonucleotide for detection of SNP TSC0041041
tatatgtgtaggt

SEQ ID NO: 163292 - DNA, 13 bp, Artificial Sequence
  Oligonucleotide for detection of SNP TSC0041041
acctacacatata

SEQ ID NO: 163293 - DNA, 13 bp, Artificial Sequence
  Oligonucleotide for detection of SNP TSC0041041
tatatgcgtaggt

SEQ ID NO: 163294 - DNA, 13 bp, Artificial Sequence
  Oligonucleotide for detection of SNP TSC0041041
acctacgcatata

SEQ ID NO: 163295 - DNA, 13 bp, Artificial Sequence
  Oligonucleotide for detection of SNP TSC0041044
aaaaagttatgtt

SEQ ID NO: 163296 - DNA, 13 bp, Artificial Sequence
  Oligonucleotide for detection of SNP TSC0041044
aacataacttttt

SEQ ID NO: 163297 - DNA, 13 bp, Artificial Sequence
  Oligonucleotide for detection of SNP TSC0041044
aaaaaggtatgtt

SEQ ID NO: 163298 - DNA, 13 bp, Artificial Sequence
  Oligonucleotide for detection of SNP TSC0041044
aacataccttttt

SEQ ID NO: 163299 - DNA, 13 bp, Artificial Sequence
  Oligonucleotide for detection of SNP TSC0041044
aatatggtttttt

SEQ ID NO: 163300 - DNA, 13 bp, Artificial Sequence
  Oligonucleotide for detection of SNP TSC0041044
aaaaaaccatatt

SEQ ID NO: 163301 - DNA, 13 bp, Artificial Sequence
  Oligonucleotide for detection of SNP TSC0041044
aatatgttttttt

SEQ ID NO: 163302 - DNA, 13 bp, Artificial Sequence
  Oligonucleotide for detection of SNP TSC0041044
aaaaaaacatatt

SEQ ID NO: 163303 - DNA, 13 bp, Artificial Sequence
  Oligonucleotide for detection of SNP TSC0041045
atgtttatgggtg

SEQ ID NO: 163304 - DNA, 13 bp, Artificial Sequence
  Oligonucleotide for detection of SNP TSC0041045
cacccataaacat

SEQ ID NO: 163305 - DNA, 13 bp, Artificial Sequence
  Oligonucleotide for detection of SNP TSC0041045
atgtttgtgggtg

SEQ ID NO: 163306 - DNA, 13 bp, Artificial Sequence
  Oligonucleotide for detection of SNP TSC0041045
cacccacaaacat

SEQ ID NO: 163307 - DNA, 13 bp, Artificial Sequence
  Oligonucleotide for detection of SNP TSC0041046
tataggatagaaa

SEQ ID NO: 163308 - DNA, 13 bp, Artificial Sequence
  Oligonucleotide for detection of SNP TSC0041046
tttctatcctata

SEQ ID NO: 163309 - DNA, 13 bp, Artificial Sequence
  Oligonucleotide for detection of SNP TSC0041046
tataggttagaaa

SEQ ID NO: 163310 - DNA, 13 bp, Artificial Sequence
  Oligonucleotide for detection of SNP TSC0041046
tttctaacctata

SEQ ID NO: 163311 - DNA, 13 bp, Artificial Sequence
  Oligonucleotide for detection of SNP TSC0041047
aaatgtgttattg

SEQ ID NO: 163312 - DNA, 13 bp, Artificial Sequence
  Oligonucleotide for detection of SNP TSC0041047
caataacacattt

SEQ ID NO: 163313 - DNA, 13 bp, Artificial Sequence
  Oligonucleotide for detection of SNP TSC0041047
aaatgtattattg

SEQ ID NO: 163314 - DNA, 13 bp, Artificial Sequence
  Oligonucleotide for detection of SNP TSC0041047
caataatacattt

SEQ ID NO: 163315 - DNA, 13 bp, Artificial Sequence
  Oligonucleotide for detection of SNP TSC0041048
tgtttatgggtgg

SEQ ID NO: 163316 - DNA, 13 bp, Artificial Sequence
  Oligonucleotide for detection of SNP TSC0041048
ccacccataaaca

SEQ ID NO: 163317 - DNA, 13 bp, Artificial Sequence
  Oligonucleotide for detection of SNP TSC0041048
tgtttaggggtgg

SEQ ID NO: 163318 - DNA, 13 bp, Artificial Sequence
  Oligonucleotide for detection of SNP TSC0041048
ccacccctaaaca

SEQ ID NO: 163319 - DNA, 13 bp, Artificial Sequence
  Oligonucleotide for detection of SNP TSC0041048
ttatttataaata

SEQ ID NO: 163320 - DNA, 13 bp, Artificial Sequence
  Oligonucleotide for detection of SNP TSC0041048
tatttataaataa

SEQ ID NO: 163321 - DNA, 13 bp, Artificial Sequence
  Oligonucleotide for detection of SNP TSC0041048
ttatttttaaata

SEQ ID NO: 163322 - DNA, 13 bp, Artificial Sequence
  Oligonucleotide for detection of SNP TSC0041048
tatttaaaaataa

SEQ ID NO: 163323 - DNA, 13 bp, Artificial Sequence
  Oligonucleotide for detection of SNP TSC0041051
ttgaggaagagta

SEQ ID NO: 163324 - DNA, 13 bp, Artificial Sequence
  Oligonucleotide for detection of SNP TSC0041051
tactcttcctcaa

SEQ ID NO: 163325 - DNA, 13 bp, Artificial Sequence
  Oligonucleotide for detection of SNP TSC0041051
ttgagggagagta

SEQ ID NO: 163326 - DNA, 13 bp, Artificial Sequence
  Oligonucleotide for detection of SNP TSC0041051
tactctccctcaa

SEQ ID NO: 163327 - DNA, 13 bp, Artificial Sequence
  Oligonucleotide for detection of SNP TSC0041059
aggagtattggtt

SEQ ID NO: 163328 - DNA, 13 bp, Artificial Sequence
  Oligonucleotide for detection of SNP TSC0041059
aaccaatactcct

SEQ ID NO: 163329 - DNA, 13 bp, Artificial Sequence
  Oligonucleotide for detection of SNP TSC0041059
aggagtgttggtt

SEQ ID NO: 163330 - DNA, 13 bp, Artificial Sequence
  Oligonucleotide for detection of SNP TSC0041059
aaccaacactcct

SEQ ID NO: 163331 - DNA, 13 bp, Artificial Sequence
  Oligonucleotide for detection of SNP TSC0041059
aggagcgttggtt

SEQ ID NO: 163332 - DNA, 13 bp, Artificial Sequence
  Oligonucleotide for detection of SNP TSC0041059
aaccaacgctcct

SEQ ID NO: 163333 - DNA, 13 bp, Artificial Sequence
  Oligonucleotide for detection of SNP TSC0041059
aattagtgttttt

SEQ ID NO: 163334 - DNA, 13 bp, Artificial Sequence
  Oligonucleotide for detection of SNP TSC0041059
aaaaacactaatt

SEQ ID NO: 163335 - DNA, 13 bp, Artificial Sequence
  Oligonucleotide for detection of SNP TSC0041059
aattagcgttttt

SEQ ID NO: 163336 - DNA, 13 bp, Artificial Sequence
  Oligonucleotide for detection of SNP TSC0041059
aaaaacgctaatt

SEQ ID NO: 163337 - DNA, 13 bp, Artificial Sequence
  Oligonucleotide for detection of SNP TSC0041060
atatagttttttg

SEQ ID NO: 163338 - DNA, 13 bp, Artificial Sequence
  Oligonucleotide for detection of SNP TSC0041060
caaaaaactatat

SEQ ID NO: 163339 - DNA, 13 bp, Artificial Sequence
  Oligonucleotide for detection of SNP TSC0041060
atataggtttttg

SEQ ID NO: 163340 - DNA, 13 bp, Artificial Sequence
  Oligonucleotide for detection of SNP TSC0041060
caaaaacctatat

SEQ ID NO: 163341 - DNA, 13 bp, Artificial Sequence
  Oligonucleotide for detection of SNP TSC0041060
taaaagattgtgt

SEQ ID NO: 163342 - DNA, 13 bp, Artificial Sequence
  Oligonucleotide for detection of SNP TSC0041060
acacaatctttta

SEQ ID NO: 163343 - DNA, 13 bp, Artificial Sequence
  Oligonucleotide for detection of SNP TSC0041060
taaaagtttgtgt

SEQ ID NO: 163344 - DNA, 13 bp, Artificial Sequence
  Oligonucleotide for detection of SNP TSC0041060
acacaaactttta

SEQ ID NO: 163345 - DNA, 13 bp, Artificial Sequence
  Oligonucleotide for detection of SNP TSC0041061
ataaaaggaatta

SEQ ID NO: 163346 - DNA, 13 bp, Artificial Sequence
  Oligonucleotide for detection of SNP TSC0041061
taattccttttat

SEQ ID NO: 163347 - DNA, 13 bp, Artificial Sequence
  Oligonucleotide for detection of SNP TSC0041062
ggatttaaatgat

SEQ ID NO: 163348 - DNA, 13 bp, Artificial Sequence
  Oligonucleotide for detection of SNP TSC0041062
atcatttaaatcc

SEQ ID NO: 163349 - DNA, 13 bp, Artificial Sequence
  Oligonucleotide for detection of SNP TSC0041062
ggatttgaatgat

SEQ ID NO: 163350 - DNA, 13 bp, Artificial Sequence
  Oligonucleotide for detection of SNP TSC0041062
atcattcaaatcc

SEQ ID NO: 163351 - DNA, 13 bp, Artificial Sequence
  Oligonucleotide for detection of SNP TSC0041062
ggatttaaacgat

SEQ ID NO: 163352 - DNA, 13 bp, Artificial Sequence
  Oligonucleotide for detection of SNP TSC0041062
atcgtttaaatcc

SEQ ID NO: 163353 - DNA, 13 bp, Artificial Sequence
  Oligonucleotide for detection of SNP TSC0041062
ggattcgaatgat

SEQ ID NO: 163354 - DNA, 13 bp, Artificial Sequence
  Oligonucleotide for detection of SNP TSC0041062
atcattcgaatcc

SEQ ID NO: 163355 - DNA, 13 bp, Artificial Sequence
  Oligonucleotide for detection of SNP TSC0041062
ggatttgaacgat

SEQ ID NO: 163356 - DNA, 13 bp, Artificial Sequence
  Oligonucleotide for detection of SNP TSC0041062
atcgttcaaatcc

SEQ ID NO: 163357 - DNA, 13 bp, Artificial Sequence
  Oligonucleotide for detection of SNP TSC0041062
ggattcgaacgat

SEQ ID NO: 163358 - DNA, 13 bp, Artificial Sequence
  Oligonucleotide for detection of SNP TSC0041062
atcgttcgaatcc

SEQ ID NO: 163359 - DNA, 13 bp, Artificial Sequence
  Oligonucleotide for detection of SNP TSC0041062
attgtttgaatty

SEQ ID NO: 163360 - DNA, 13 bp, Artificial Sequence
  Oligonucleotide for detection of SNP TSC0041062
raattcaaacaat

SEQ ID NO: 163361 - DNA, 13 bp, Artificial Sequence
  Oligonucleotide for detection of SNP TSC0041062
atcgtttgaatty

SEQ ID NO: 163362 - DNA, 13 bp, Artificial Sequence
  Oligonucleotide for detection of SNP TSC0041062
raattcaaacgat

SEQ ID NO: 163363 - DNA, 13 bp, Artificial Sequence
  Oligonucleotide for detection of SNP TSC0041062
attgttcgaatty

SEQ ID NO: 163364 - DNA, 13 bp, Artificial Sequence
  Oligonucleotide for detection of SNP TSC0041062
raattcgaacaat

SEQ ID NO: 163365 - DNA, 13 bp, Artificial Sequence
  Oligonucleotide for detection of SNP TSC0041062
atcgttcgaatty

SEQ ID NO: 163366 - DNA, 13 bp, Artificial Sequence
  Oligonucleotide for detection of SNP TSC0041062
raattcgaacgat

SEQ ID NO: 163367 - DNA, 13 bp, Artificial Sequence
  Oligonucleotide for detection of SNP TSC0041063
tataaggattaty

SEQ ID NO: 163368 - DNA, 13 bp, Artificial Sequence
  Oligonucleotide for detection of SNP TSC0041063
rataatccttata

SEQ ID NO: 163369 - DNA, 13 bp, Artificial Sequence
  Oligonucleotide for detection of SNP TSC0041063
tataagaattaty

SEQ ID NO: 163370 - DNA, 13 bp, Artificial Sequence
  Oligonucleotide for detection of SNP TSC0041063
rataattcttata

SEQ ID NO: 163371 - DNA, 13 bp, Artificial Sequence
  Oligonucleotide for detection of SNP TSC0041065
agttatatagatt

SEQ ID NO: 163372 - DNA, 13 bp, Artificial Sequence
  Oligonucleotide for detection of SNP TSC0041065
aatctatataact

SEQ ID NO: 163373 - DNA, 13 bp, Artificial Sequence
  Oligonucleotide for detection of SNP TSC0041065
agttatgtagatt

SEQ ID NO: 163374 - DNA, 13 bp, Artificial Sequence
  Oligonucleotide for detection of SNP TSC0041065
aatctacataact

SEQ ID NO: 163375 - DNA, 13 bp, Artificial Sequence
  Oligonucleotide for detection of SNP TSC0041066
aagttatgagtgy

SEQ ID NO: 163376 - DNA, 13 bp, Artificial Sequence
  Oligonucleotide for detection of SNP TSC0041066
rcactcataactt

SEQ ID NO: 163377 - DNA, 13 bp, Artificial Sequence
  Oligonucleotide for detection of SNP TSC0041066
aagttacgagtgy

SEQ ID NO: 163378 - DNA, 13 bp, Artificial Sequence
  Oligonucleotide for detection of SNP TSC0041066
rcactcgtaactt

SEQ ID NO: 163379 - DNA, 13 bp, Artificial Sequence
  Oligonucleotide for detection of SNP TSC0041066
gtatttatggttt

SEQ ID NO: 163380 - DNA, 13 bp, Artificial Sequence
  Oligonucleotide for detection of SNP TSC0041066
aaaccataaatac

SEQ ID NO: 163381 - DNA, 13 bp, Artificial Sequence
  Oligonucleotide for detection of SNP TSC0041067
tagtgtaaagttg

SEQ ID NO: 163382 - DNA, 13 bp, Artificial Sequence
  Oligonucleotide for detection of SNP TSC0041067
caactttacacta

SEQ ID NO: 163383 - DNA, 13 bp, Artificial Sequence
  Oligonucleotide for detection of SNP TSC0041067
tagtgttaagttg

SEQ ID NO: 163384 - DNA, 13 bp, Artificial Sequence
  Oligonucleotide for detection of SNP TSC0041067
caacttaacacta

SEQ ID NO: 163385 - DNA, 13 bp, Artificial Sequence
  Oligonucleotide for detection of SNP TSC0041067
tagttttgtattg

SEQ ID NO: 163386 - DNA, 13 bp, Artificial Sequence
  Oligonucleotide for detection of SNP TSC0041067
caatacaaaacta

SEQ ID NO: 163387 - DNA, 13 bp, Artificial Sequence
  Oligonucleotide for detection of SNP TSC0041067
tagtttggtattg

SEQ ID NO: 163388 - DNA, 13 bp, Artificial Sequence
  Oligonucleotide for detection of SNP TSC0041067
caataccaaacta

SEQ ID NO: 163389 - DNA, 13 bp, Artificial Sequence
  Oligonucleotide for detection of SNP TSC0041068
gaatgtagagtaa

SEQ ID NO: 163390 - DNA, 13 bp, Artificial Sequence
  Oligonucleotide for detection of SNP TSC0041068
ttactctacattc

SEQ ID NO: 163391 - DNA, 13 bp, Artificial Sequence
  Oligonucleotide for detection of SNP TSC0041068
gaatgtggagtaa

SEQ ID NO: 163392 - DNA, 13 bp, Artificial Sequence
  Oligonucleotide for detection of SNP TSC0041068
ttactccacattc

SEQ ID NO: 163393 - DNA, 13 bp, Artificial Sequence
  Oligonucleotide for detection of SNP TSC0041068
gaatgcggagtaa

SEQ ID NO: 163394 - DNA, 13 bp, Artificial Sequence
  Oligonucleotide for detection of SNP TSC0041068
ttactccgcattc

SEQ ID NO: 163395 - DNA, 13 bp, Artificial Sequence
  Oligonucleotide for detection of SNP TSC0041068
ttgttttgtatty

SEQ ID NO: 163396 - DNA, 13 bp, Artificial Sequence
  Oligonucleotide for detection of SNP TSC0041068
raatacaaaacaa

SEQ ID NO: 163397 - DNA, 13 bp, Artificial Sequence
  Oligonucleotide for detection of SNP TSC0041068
ttgtttcgtatty

SEQ ID NO: 163398 - DNA, 13 bp, Artificial Sequence
  Oligonucleotide for detection of SNP TSC0041068
raatacgaaacaa

SEQ ID NO: 163399 - DNA, 13 bp, Artificial Sequence
  Oligonucleotide for detection of SNP TSC0041069
ttggtatgtgttt

SEQ ID NO: 163400 - DNA, 13 bp, Artificial Sequence
  Oligonucleotide for detection of SNP TSC0041069
aaacacataccaa

SEQ ID NO: 163401 - DNA, 13 bp, Artificial Sequence
  Oligonucleotide for detection of SNP TSC0041069
ttggtacgtgttt

SEQ ID NO: 163402 - DNA, 13 bp, Artificial Sequence
  Oligonucleotide for detection of SNP TSC0041069
aaacacgtaccaa

SEQ ID NO: 163403 - DNA, 13 bp, Artificial Sequence
  Oligonucleotide for detection of SNP TSC0041069
ttggtatgcgttt

SEQ ID NO: 163404 - DNA, 13 bp, Artificial Sequence
  Oligonucleotide for detection of SNP TSC0041069
aaacgcataccaa

SEQ ID NO: 163405 - DNA, 13 bp, Artificial Sequence
  Oligonucleotide for detection of SNP TSC0041069
ttggtacgcgttt

SEQ ID NO: 163406 - DNA, 13 bp, Artificial Sequence
  Oligonucleotide for detection of SNP TSC0041069
aaacgcgtaccaa

SEQ ID NO: 163407 - DNA, 13 bp, Artificial Sequence
  Oligonucleotide for detection of SNP TSC0041069
aggtgtgtattag

SEQ ID NO: 163408 - DNA, 13 bp, Artificial Sequence
  Oligonucleotide for detection of SNP TSC0041069
ctaatacacacct

SEQ ID NO: 163409 - DNA, 13 bp, Artificial Sequence
  Oligonucleotide for detection of SNP TSC0041069
aggtgtatattag

SEQ ID NO: 163410 - DNA, 13 bp, Artificial Sequence
  Oligonucleotide for detection of SNP TSC0041069
ctaatatacacct

SEQ ID NO: 163411 - DNA, 13 bp, Artificial Sequence
  Oligonucleotide for detection of SNP TSC0041069
aggcgtgtattag

SEQ ID NO: 163412 - DNA, 13 bp, Artificial Sequence
  Oligonucleotide for detection of SNP TSC0041069
ctaatacacgcct

SEQ ID NO: 163413 - DNA, 13 bp, Artificial Sequence
  Oligonucleotide for detection of SNP TSC0041069
aggcgtatattag

SEQ ID NO: 163414 - DNA, 13 bp, Artificial Sequence
  Oligonucleotide for detection of SNP TSC0041069
ctaatatacgcct

SEQ ID NO: 163415 - DNA, 13 bp, Artificial Sequence
  Oligonucleotide for detection of SNP TSC0041069
aggtgcgtattag

SEQ ID NO: 163416 - DNA, 13 bp, Artificial Sequence
  Oligonucleotide for detection of SNP TSC0041069
ctaatacgcacct

SEQ ID NO: 163417 - DNA, 13 bp, Artificial Sequence
  Oligonucleotide for detection of SNP TSC0041069
aggcgcgtattag

SEQ ID NO: 163418 - DNA, 13 bp, Artificial Sequence
  Oligonucleotide for detection of SNP TSC0041069
ctaatacgcgcct

SEQ ID NO: 163419 - DNA, 13 bp, Artificial Sequence
  Oligonucleotide for detection of SNP TSC0041070
tatgagattatta

SEQ ID NO: 163420 - DNA, 13 bp, Artificial Sequence
  Oligonucleotide for detection of SNP TSC0041070
taataatctcata

SEQ ID NO: 163421 - DNA, 13 bp, Artificial Sequence
  Oligonucleotide for detection of SNP TSC0041070
tatgaggttatta

SEQ ID NO: 163422 - DNA, 13 bp, Artificial Sequence
  Oligonucleotide for detection of SNP TSC0041070
taataacctcata

SEQ ID NO: 163423 - DNA, 13 bp, Artificial Sequence
  Oligonucleotide for detection of SNP TSC0004850
tttataattggtt

SEQ ID NO: 163424 - DNA, 13 bp, Artificial Sequence
  Oligonucleotide for detection of SNP TSC0004850
aaccaattataaa

SEQ ID NO: 163425 - DNA, 13 bp, Artificial Sequence
  Oligonucleotide for detection of SNP TSC0004850
tttatagttggtt

SEQ ID NO: 163426 - DNA, 13 bp, Artificial Sequence
  Oligonucleotide for detection of SNP TSC0004850
aaccaactataaa

SEQ ID NO: 163427 - DNA, 13 bp, Artificial Sequence
  Oligonucleotide for detection of SNP TSC0041072
tagatgggtatty

SEQ ID NO: 163428 - DNA, 13 bp, Artificial Sequence
  Oligonucleotide for detection of SNP TSC0041072
raatacccatcta

SEQ ID NO: 163429 - DNA, 13 bp, Artificial Sequence
  Oligonucleotide for detection of SNP TSC0041072
tagatgagtatty

SEQ ID NO: 163430 - DNA, 13 bp, Artificial Sequence
  Oligonucleotide for detection of SNP TSC0041072
raatactcatcta

SEQ ID NO: 163431 - DNA, 13 bp, Artificial Sequence
  Oligonucleotide for detection of SNP TSC0041073
agtaatgtaaggy

SEQ ID NO: 163432 - DNA, 13 bp, Artificial Sequence
  Oligonucleotide for detection of SNP TSC0041073
rccttacattact

SEQ ID NO: 163433 - DNA, 13 bp, Artificial Sequence
  Oligonucleotide for detection of SNP TSC0041073
agtaatataaggy

SEQ ID NO: 163434 - DNA, 13 bp, Artificial Sequence
  Oligonucleotide for detection of SNP TSC0041073
rccttatattact

SEQ ID NO: 163435 - DNA, 13 bp, Artificial Sequence
  Oligonucleotide for detection of SNP TSC0041074
aattttttgtgtg

SEQ ID NO: 163436 - DNA, 13 bp, Artificial Sequence
  Oligonucleotide for detection of SNP TSC0041074
cacacaaaaaatt

SEQ ID NO: 163437 - DNA, 13 bp, Artificial Sequence
  Oligonucleotide for detection of SNP TSC0041074
aattttgtgtgtg

SEQ ID NO: 163438 - DNA, 13 bp, Artificial Sequence
  Oligonucleotide for detection of SNP TSC0041074
cacacacaaaatt

SEQ ID NO: 163439 - DNA, 13 bp, Artificial Sequence
  Oligonucleotide for detection of SNP TSC0041074
tatatagaaggtt

SEQ ID NO: 163440 - DNA, 13 bp, Artificial Sequence
  Oligonucleotide for detection of SNP TSC0041074
aaccttctatata

SEQ ID NO: 163441 - DNA, 13 bp, Artificial Sequence
  Oligonucleotide for detection of SNP TSC0041074
tatatataaggtt

SEQ ID NO: 163442 - DNA, 13 bp, Artificial Sequence
  Oligonucleotide for detection of SNP TSC0041074
aaccttatatata

SEQ ID NO: 163443 - DNA, 13 bp, Artificial Sequence
  Oligonucleotide for detection of SNP TSC0041075
aattgtttggttt

SEQ ID NO: 163444 - DNA, 13 bp, Artificial Sequence
  Oligonucleotide for detection of SNP TSC0041075
aaaccaaacaatt

SEQ ID NO: 163445 - DNA, 13 bp, Artificial Sequence
  Oligonucleotide for detection of SNP TSC0041075
aattgtgtggttt

SEQ ID NO: 163446 - DNA, 13 bp, Artificial Sequence
  Oligonucleotide for detection of SNP TSC0041075
aaaccacacaatt

SEQ ID NO: 163447 - DNA, 13 bp, Artificial Sequence
  Oligonucleotide for detection of SNP TSC0041075
aggttagataatt

SEQ ID NO: 163448 - DNA, 13 bp, Artificial Sequence
  Oligonucleotide for detection of SNP TSC0041075
aattatctaacct

SEQ ID NO: 163449 - DNA, 13 bp, Artificial Sequence
  Oligonucleotide for detection of SNP TSC0041075
aggttatataatt

SEQ ID NO: 163450 - DNA, 13 bp, Artificial Sequence
  Oligonucleotide for detection of SNP TSC0041075
aattatataacct

SEQ ID NO: 163451 - DNA, 13 bp, Artificial Sequence
  Oligonucleotide for detection of SNP TSC0041077
gtgtttattttgt

SEQ ID NO: 163452 - DNA, 13 bp, Artificial Sequence
  Oligonucleotide for detection of SNP TSC0041077
acaaaataaacac

SEQ ID NO: 163453 - DNA, 13 bp, Artificial Sequence
  Oligonucleotide for detection of SNP TSC0041077
gtgttttttttgt

SEQ ID NO: 163454 - DNA, 13 bp, Artificial Sequence
  Oligonucleotide for detection of SNP TSC0041077
acaaaaaaaacac

SEQ ID NO: 163455 - DNA, 13 bp, Artificial Sequence
  Oligonucleotide for detection of SNP TSC0041077
gtgtttatttcgt

SEQ ID NO: 163456 - DNA, 13 bp, Artificial Sequence
  Oligonucleotide for detection of SNP TSC0041077
acgaaataaacac

SEQ ID NO: 163457 - DNA, 13 bp, Artificial Sequence
  Oligonucleotide for detection of SNP TSC0041077
gtgtttttttcgt

SEQ ID NO: 163458 - DNA, 13 bp, Artificial Sequence
  Oligonucleotide for detection of SNP TSC0041077
acgaaaaaaacac

SEQ ID NO: 163459 - DNA, 13 bp, Artificial Sequence
  Oligonucleotide for detection of SNP TSC0041077
atgaggtggatay

SEQ ID NO: 163460 - DNA, 13 bp, Artificial Sequence
  Oligonucleotide for detection of SNP TSC0041077
rtatccacctcat

SEQ ID NO: 163461 - DNA, 13 bp, Artificial Sequence
  Oligonucleotide for detection of SNP TSC0041077
atgagggggatay

SEQ ID NO: 163462 - DNA, 13 bp, Artificial Sequence
  Oligonucleotide for detection of SNP TSC0041077
rtatccccctcat

SEQ ID NO: 163463 - DNA, 13 bp, Artificial Sequence
  Oligonucleotide for detection of SNP TSC0041077
acgaggtggatay

SEQ ID NO: 163464 - DNA, 13 bp, Artificial Sequence
  Oligonucleotide for detection of SNP TSC0041077
rtatccacctcgt

SEQ ID NO: 163465 - DNA, 13 bp, Artificial Sequence
  Oligonucleotide for detection of SNP TSC0041077
acgagggggatay

SEQ ID NO: 163466 - DNA, 13 bp, Artificial Sequence
  Oligonucleotide for detection of SNP TSC0041077
rtatccccctcgt

SEQ ID NO: 163467 - DNA, 13 bp, Artificial Sequence
  Oligonucleotide for detection of SNP TSC0041078
tcgtttgtttata

SEQ ID NO: 163468 - DNA, 13 bp, Artificial Sequence
  Oligonucleotide for detection of SNP TSC0041078
tataaacaaacga

SEQ ID NO: 163469 - DNA, 13 bp, Artificial Sequence
  Oligonucleotide for detection of SNP TSC0041078
tcgtttatttata

SEQ ID NO: 163470 - DNA, 13 bp, Artificial Sequence
  Oligonucleotide for detection of SNP TSC0041078
tataaataaacga

SEQ ID NO: 163471 - DNA, 13 bp, Artificial Sequence
  Oligonucleotide for detection of SNP TSC0041079
taattagttgtga

SEQ ID NO: 163472 - DNA, 13 bp, Artificial Sequence
  Oligonucleotide for detection of SNP TSC0041079
tcacaactaatta

SEQ ID NO: 163473 - DNA, 13 bp, Artificial Sequence
  Oligonucleotide for detection of SNP TSC0041079
taattaattgtga

SEQ ID NO: 163474 - DNA, 13 bp, Artificial Sequence
  Oligonucleotide for detection of SNP TSC0041079
tcacaattaatta

SEQ ID NO: 163475 - DNA, 13 bp, Artificial Sequence
  Oligonucleotide for detection of SNP TSC0041081
aattatgtagtat

SEQ ID NO: 163476 - DNA, 13 bp, Artificial Sequence
  Oligonucleotide for detection of SNP TSC0041081
atactacataatt

SEQ ID NO: 163477 - DNA, 13 bp, Artificial Sequence
  Oligonucleotide for detection of SNP TSC0041081
aattatatagtat

SEQ ID NO: 163478 - DNA, 13 bp, Artificial Sequence
  Oligonucleotide for detection of SNP TSC0041081
atactatataatt

SEQ ID NO: 163479 - DNA, 13 bp, Artificial Sequence
  Oligonucleotide for detection of SNP TSC0041082
gattatgttaatt

SEQ ID NO: 163480 - DNA, 13 bp, Artificial Sequence
  Oligonucleotide for detection of SNP TSC0041082
aattaacataatc

SEQ ID NO: 163481 - DNA, 13 bp, Artificial Sequence
  Oligonucleotide for detection of SNP TSC0041082
gattatattaatt

SEQ ID NO: 163482 - DNA, 13 bp, Artificial Sequence
  Oligonucleotide for detection of SNP TSC0041082
aattaatataatc

SEQ ID NO: 163483 - DNA, 13 bp, Artificial Sequence
  Oligonucleotide for detection of SNP TSC0041083
tgatagtgttgaa

SEQ ID NO: 163484 - DNA, 13 bp, Artificial Sequence
  Oligonucleotide for detection of SNP TSC0041083
ttcaacactatca

SEQ ID NO: 163485 - DNA, 13 bp, Artificial Sequence
  Oligonucleotide for detection of SNP TSC0041083
tgatagcgttgaa

SEQ ID NO: 163486 - DNA, 13 bp, Artificial Sequence
  Oligonucleotide for detection of SNP TSC0041083
ttcaacgctatca

SEQ ID NO: 163487 - DNA, 13 bp, Artificial Sequence
  Oligonucleotide for detection of SNP TSC0041083
tttagtgttgtta

SEQ ID NO: 163488 - DNA, 13 bp, Artificial Sequence
  Oligonucleotide for detection of SNP TSC0041083
taacaacactaaa

SEQ ID NO: 163489 - DNA, 13 bp, Artificial Sequence
  Oligonucleotide for detection of SNP TSC0041083
tttagtattgtta

SEQ ID NO: 163490 - DNA, 13 bp, Artificial Sequence
  Oligonucleotide for detection of SNP TSC0041083
taacaatactaaa

SEQ ID NO: 163491 - DNA, 13 bp, Artificial Sequence
  Oligonucleotide for detection of SNP TSC0041083
tttagcgttgtta

SEQ ID NO: 163492 - DNA, 13 bp, Artificial Sequence
  Oligonucleotide for detection of SNP TSC0041083
taacaacgctaaa

SEQ ID NO: 163493 - DNA, 13 bp, Artificial Sequence
  Oligonucleotide for detection of SNP TSC0041087
tgtgtaaaaaaaa

SEQ ID NO: 163494 - DNA, 13 bp, Artificial Sequence
  Oligonucleotide for detection of SNP TSC0041087
ttttttttacaca

SEQ ID NO: 163495 - DNA, 13 bp, Artificial Sequence
  Oligonucleotide for detection of SNP TSC0041087
tgtgtagaaaaaa

SEQ ID NO: 163496 - DNA, 13 bp, Artificial Sequence
  Oligonucleotide for detection of SNP TSC0041087
ttttttctacaca

SEQ ID NO: 163497 - DNA, 13 bp, Artificial Sequence
  Oligonucleotide for detection of SNP TSC0041088
aataatgtaatgt

SEQ ID NO: 163498 - DNA, 13 bp, Artificial Sequence
  Oligonucleotide for detection of SNP TSC0041088
acattacattatt

SEQ ID NO: 163499 - DNA, 13 bp, Artificial Sequence
  Oligonucleotide for detection of SNP TSC0041088
aataatataatgt

SEQ ID NO: 163500 - DNA, 13 bp, Artificial Sequence
  Oligonucleotide for detection of SNP TSC0041088
acattatattatt

SEQ ID NO: 163501 - DNA, 13 bp, Artificial Sequence
  Oligonucleotide for detection of SNP TSC0041089
aaaatgtttagaa

SEQ ID NO: 163502 - DNA, 13 bp, Artificial Sequence
  Oligonucleotide for detection of SNP TSC0041089
ttctaaacatttt

SEQ ID NO: 163503 - DNA, 13 bp, Artificial Sequence
  Oligonucleotide for detection of SNP TSC0041089
aaaatggttagaa

SEQ ID NO: 163504 - DNA, 13 bp, Artificial Sequence
  Oligonucleotide for detection of SNP TSC0041089
ttctaaccatttt

SEQ ID NO: 163505 - DNA, 13 bp, Artificial Sequence
  Oligonucleotide for detection of SNP TSC0041090
gtaatatgaagtt

SEQ ID NO: 163506 - DNA, 13 bp, Artificial Sequence
  Oligonucleotide for detection of SNP TSC0041090
aacttcatattac

SEQ ID NO: 163507 - DNA, 13 bp, Artificial Sequence
  Oligonucleotide for detection of SNP TSC0041090
gtaatacgaagtt

SEQ ID NO: 163508 - DNA, 13 bp, Artificial Sequence
  Oligonucleotide for detection of SNP TSC0041090
aacttcgtattac

SEQ ID NO: 163509 - DNA, 13 bp, Artificial Sequence
  Oligonucleotide for detection of SNP TSC0041090
aattttgtgttay

SEQ ID NO: 163510 - DNA, 13 bp, Artificial Sequence
  Oligonucleotide for detection of SNP TSC0041090
rtaacacaaaatt

SEQ ID NO: 163511 - DNA, 13 bp, Artificial Sequence
  Oligonucleotide for detection of SNP TSC0041090
aattttatgttay

SEQ ID NO: 163512 - DNA, 13 bp, Artificial Sequence
  Oligonucleotide for detection of SNP TSC0041090
rtaacataaaatt

SEQ ID NO: 163513 - DNA, 13 bp, Artificial Sequence
  Oligonucleotide for detection of SNP TSC0041090
aatttcgtgttay

SEQ ID NO: 163514 - DNA, 13 bp, Artificial Sequence
  Oligonucleotide for detection of SNP TSC0041090
rtaacacgaaatt

SEQ ID NO: 163515 - DNA, 13 bp, Artificial Sequence
  Oligonucleotide for detection of SNP TSC0041091
tatagtatatagt

SEQ ID NO: 163516 - DNA, 13 bp, Artificial Sequence
  Oligonucleotide for detection of SNP TSC0041091
actatatactata

SEQ ID NO: 163517 - DNA, 13 bp, Artificial Sequence
  Oligonucleotide for detection of SNP TSC0041091
tatagtgtatagt

SEQ ID NO: 163518 - DNA, 13 bp, Artificial Sequence
  Oligonucleotide for detection of SNP TSC0041091
actatacactata

SEQ ID NO: 163519 - DNA, 13 bp, Artificial Sequence
  Oligonucleotide for detection of SNP TSC0041091
tatagcgtatagt

SEQ ID NO: 163520 - DNA, 13 bp, Artificial Sequence
  Oligonucleotide for detection of SNP TSC0041091
actatacgctata

SEQ ID NO: 163521 - DNA, 13 bp, Artificial Sequence
  Oligonucleotide for detection of SNP TSC0041092
agtagaaattgty

SEQ ID NO: 163522 - DNA, 13 bp, Artificial Sequence
  Oligonucleotide for detection of SNP TSC0041092
racaatttctact

SEQ ID NO: 163523 - DNA, 13 bp, Artificial Sequence
  Oligonucleotide for detection of SNP TSC0041092
agtagagattgty

SEQ ID NO: 163524 - DNA, 13 bp, Artificial Sequence
  Oligonucleotide for detection of SNP TSC0041092
racaatctctact

SEQ ID NO: 163525 - DNA, 13 bp, Artificial Sequence
  Oligonucleotide for detection of SNP TSC0041093
gagtagggggaag

SEQ ID NO: 163526 - DNA, 13 bp, Artificial Sequence
  Oligonucleotide for detection of SNP TSC0041093
cttccccctactc

SEQ ID NO: 163527 - DNA, 13 bp, Artificial Sequence
  Oligonucleotide for detection of SNP TSC0041093
gagtagagggaag

SEQ ID NO: 163528 - DNA, 13 bp, Artificial Sequence
  Oligonucleotide for detection of SNP TSC0041093
cttccctctactc

SEQ ID NO: 163529 - DNA, 13 bp, Artificial Sequence
  Oligonucleotide for detection of SNP TSC0041094
aaatagaaattgt

SEQ ID NO: 163530 - DNA, 13 bp, Artificial Sequence
  Oligonucleotide for detection of SNP TSC0041094
acaatttctattt

SEQ ID NO: 163531 - DNA, 13 bp, Artificial Sequence
  Oligonucleotide for detection of SNP TSC0041094
aaataggaattgt

SEQ ID NO: 163532 - DNA, 13 bp, Artificial Sequence
  Oligonucleotide for detection of SNP TSC0041094
acaattcctattt

SEQ ID NO: 163533 - DNA, 13 bp, Artificial Sequence
  Oligonucleotide for detection of SNP TSC0041097
aaagatatatttt

SEQ ID NO: 163534 - DNA, 13 bp, Artificial Sequence
  Oligonucleotide for detection of SNP TSC0041097
aaaatatatcttt

SEQ ID NO: 163535 - DNA, 13 bp, Artificial Sequence
  Oligonucleotide for detection of SNP TSC0041097
aaagatgtatttt

SEQ ID NO: 163536 - DNA, 13 bp, Artificial Sequence
  Oligonucleotide for detection of SNP TSC0041097
aaaatacatcttt

SEQ ID NO: 163537 - DNA, 13 bp, Artificial Sequence
  Oligonucleotide for detection of SNP TSC0041097
aaagacgtatttt

SEQ ID NO: 163538 - DNA, 13 bp, Artificial Sequence
  Oligonucleotide for detection of SNP TSC0041097
aaaatacgtcttt

SEQ ID NO: 163539 - DNA, 13 bp, Artificial Sequence
  Oligonucleotide for detection of SNP TSC0041097
aagatgtgttttt

SEQ ID NO: 163540 - DNA, 13 bp, Artificial Sequence
  Oligonucleotide for detection of SNP TSC0041097
aaaaacacatctt

SEQ ID NO: 163541 - DNA, 13 bp, Artificial Sequence
  Oligonucleotide for detection of SNP TSC0041097
aagatgcgttttt

SEQ ID NO: 163542 - DNA, 13 bp, Artificial Sequence
  Oligonucleotide for detection of SNP TSC0041097
aaaaacgcatctt

SEQ ID NO: 163543 - DNA, 13 bp, Artificial Sequence
  Oligonucleotide for detection of SNP TSC0006442
gagttggaaagtg

SEQ ID NO: 163544 - DNA, 13 bp, Artificial Sequence
  Oligonucleotide for detection of SNP TSC0006442
cactttccaactc

SEQ ID NO: 163545 - DNA, 13 bp, Artificial Sequence
  Oligonucleotide for detection of SNP TSC0006442
gagttgaaaagtg

SEQ ID NO: 163546 - DNA, 13 bp, Artificial Sequence
  Oligonucleotide for detection of SNP TSC0006442
cacttttcaactc

SEQ ID NO: 163547 - DNA, 13 bp, Artificial Sequence
  Oligonucleotide for detection of SNP TSC0006443
taaaatgtgtata

SEQ ID NO: 163548 - DNA, 13 bp, Artificial Sequence
  Oligonucleotide for detection of SNP TSC0006443
tatacacatttta

SEQ ID NO: 163549 - DNA, 13 bp, Artificial Sequence
  Oligonucleotide for detection of SNP TSC0006443
taaaatatgtata

SEQ ID NO: 163550 - DNA, 13 bp, Artificial Sequence
  Oligonucleotide for detection of SNP TSC0006443
tatacatatttta

SEQ ID NO: 163551 - DNA, 13 bp, Artificial Sequence
  Oligonucleotide for detection of SNP TSC0041102
ttgaagtgtaaaa

SEQ ID NO: 163552 - DNA, 13 bp, Artificial Sequence
  Oligonucleotide for detection of SNP TSC0041102
ttttacacttcaa

SEQ ID NO: 163553 - DNA, 13 bp, Artificial Sequence
  Oligonucleotide for detection of SNP TSC0041102
ttgaagcgtaaaa

SEQ ID NO: 163554 - DNA, 13 bp, Artificial Sequence
  Oligonucleotide for detection of SNP TSC0041102
ttttacgcttcaa

SEQ ID NO: 163555 - DNA, 13 bp, Artificial Sequence
  Oligonucleotide for detection of SNP TSC0041103
atatttttagtat

SEQ ID NO: 163556 - DNA, 13 bp, Artificial Sequence
  Oligonucleotide for detection of SNP TSC0041103
atactaaaaatat

SEQ ID NO: 163557 - DNA, 13 bp, Artificial Sequence
  Oligonucleotide for detection of SNP TSC0041103
atatttgtagtat

SEQ ID NO: 163558 - DNA, 13 bp, Artificial Sequence
  Oligonucleotide for detection of SNP TSC0041103
atactacaaatat

SEQ ID NO: 163559 - DNA, 13 bp, Artificial Sequence
  Oligonucleotide for detection of SNP TSC0041103
atgttgaaagtat

SEQ ID NO: 163560 - DNA, 13 bp, Artificial Sequence
  Oligonucleotide for detection of SNP TSC0041103
atactttcaacat

SEQ ID NO: 163561 - DNA, 13 bp, Artificial Sequence
  Oligonucleotide for detection of SNP TSC0041103
atgttgtaagtat

SEQ ID NO: 163562 - DNA, 13 bp, Artificial Sequence
  Oligonucleotide for detection of SNP TSC0041103
atacttacaacat

SEQ ID NO: 163563 - DNA, 13 bp, Artificial Sequence
  Oligonucleotide for detection of SNP TSC0041104
gtgtgggggtttg

SEQ ID NO: 163564 - DNA, 13 bp, Artificial Sequence
  Oligonucleotide for detection of SNP TSC0041104
caaacccccacac

SEQ ID NO: 163565 - DNA, 13 bp, Artificial Sequence
  Oligonucleotide for detection of SNP TSC0041104
gtgcggtggtttg

SEQ ID NO: 163566 - DNA, 13 bp, Artificial Sequence
  Oligonucleotide for detection of SNP TSC0041104
caaaccaccgcac

SEQ ID NO: 163567 - DNA, 13 bp, Artificial Sequence
  Oligonucleotide for detection of SNP TSC0041104
gtgcgggggtttg

SEQ ID NO: 163568 - DNA, 13 bp, Artificial Sequence
  Oligonucleotide for detection of SNP TSC0041104
caaacccccgcac

SEQ ID NO: 163569 - DNA, 13 bp, Artificial Sequence
  Oligonucleotide for detection of SNP TSC0041104
taggttattgtay

SEQ ID NO: 163570 - DNA, 13 bp, Artificial Sequence
  Oligonucleotide for detection of SNP TSC0041104
rtacaataaccta

SEQ ID NO: 163571 - DNA, 13 bp, Artificial Sequence
  Oligonucleotide for detection of SNP TSC0041104
taggtttttgtay

SEQ ID NO: 163572 - DNA, 13 bp, Artificial Sequence
  Oligonucleotide for detection of SNP TSC0041104
rtacaaaaaccta

SEQ ID NO: 163573 - DNA, 13 bp, Artificial Sequence
  Oligonucleotide for detection of SNP TSC0041104
taggttatcgtay

SEQ ID NO: 163574 - DNA, 13 bp, Artificial Sequence
  Oligonucleotide for detection of SNP TSC0041104
rtacgataaccta

SEQ ID NO: 163575 - DNA, 13 bp, Artificial Sequence
  Oligonucleotide for detection of SNP TSC0041104
taggttttcgtay

SEQ ID NO: 163576 - DNA, 13 bp, Artificial Sequence
  Oligonucleotide for detection of SNP TSC0041104
rtacgaaaaccta

SEQ ID NO: 163577 - DNA, 13 bp, Artificial Sequence
  Oligonucleotide for detection of SNP TSC0041105
agaggaataatay

SEQ ID NO: 163578 - DNA, 13 bp, Artificial Sequence
  Oligonucleotide for detection of SNP TSC0041105
rtattattcctct

SEQ ID NO: 163579 - DNA, 13 bp, Artificial Sequence
  Oligonucleotide for detection of SNP TSC0041105
agaggagtaatay

SEQ ID NO: 163580 - DNA, 13 bp, Artificial Sequence
  Oligonucleotide for detection of SNP TSC0041105
rtattactcctct

SEQ ID NO: 163581 - DNA, 13 bp, Artificial Sequence
  Oligonucleotide for detection of SNP TSC0041106
tttttaagaagty

SEQ ID NO: 163582 - DNA, 13 bp, Artificial Sequence
  Oligonucleotide for detection of SNP TSC0041106
racttcttaaaaa

SEQ ID NO: 163583 - DNA, 13 bp, Artificial Sequence
  Oligonucleotide for detection of SNP TSC0041106
tttttaggaagty

SEQ ID NO: 163584 - DNA, 13 bp, Artificial Sequence
  Oligonucleotide for detection of SNP TSC0041106
racttcctaaaaa

SEQ ID NO: 163585 - DNA, 13 bp, Artificial Sequence
  Oligonucleotide for detection of SNP TSC0041108
taaattattatty

SEQ ID NO: 163586 - DNA, 13 bp, Artificial Sequence
  Oligonucleotide for detection of SNP TSC0041108
raataataattta

SEQ ID NO: 163587 - DNA, 13 bp, Artificial Sequence
  Oligonucleotide for detection of SNP TSC0041108
taaattgttatty

SEQ ID NO: 163588 - DNA, 13 bp, Artificial Sequence
  Oligonucleotide for detection of SNP TSC0041108
raataacaattta

SEQ ID NO: 163589 - DNA, 13 bp, Artificial Sequence
  Oligonucleotide for detection of SNP TSC0041108
taaatcgttatty

SEQ ID NO: 163590 - DNA, 13 bp, Artificial Sequence
  Oligonucleotide for detection of SNP TSC0041108
raataacgattta

SEQ ID NO: 163591 - DNA, 13 bp, Artificial Sequence
  Oligonucleotide for detection of SNP TSC0041108
gaataatggtttg

SEQ ID NO: 163592 - DNA, 13 bp, Artificial Sequence
  Oligonucleotide for detection of SNP TSC0041108
caaaccattattc

SEQ ID NO: 163593 - DNA, 13 bp, Artificial Sequence
  Oligonucleotide for detection of SNP TSC0041108
gaataacggtttg

SEQ ID NO: 163594 - DNA, 13 bp, Artificial Sequence
  Oligonucleotide for detection of SNP TSC0041108
caaaccgttattc

SEQ ID NO: 163595 - DNA, 13 bp, Artificial Sequence
  Oligonucleotide for detection of SNP TSC0041109
tgttatttaggtt

SEQ ID NO: 163596 - DNA, 13 bp, Artificial Sequence
  Oligonucleotide for detection of SNP TSC0041109
aacctaaataaca

SEQ ID NO: 163597 - DNA, 13 bp, Artificial Sequence
  Oligonucleotide for detection of SNP TSC0041109
tgttatgtaggtt

SEQ ID NO: 163598 - DNA, 13 bp, Artificial Sequence
  Oligonucleotide for detection of SNP TSC0041109
aacctacataaca

SEQ ID NO: 163599 - DNA, 13 bp, Artificial Sequence
  Oligonucleotide for detection of SNP TSC0041109
tgttacgtaggtt

SEQ ID NO: 163600 - DNA, 13 bp, Artificial Sequence
  Oligonucleotide for detection of SNP TSC0041109
aacctacgtaaca

SEQ ID NO: 163601 - DNA, 13 bp, Artificial Sequence
  Oligonucleotide for detection of SNP TSC0041109
agtttgggtgata

SEQ ID NO: 163602 - DNA, 13 bp, Artificial Sequence
  Oligonucleotide for detection of SNP TSC0041109
tatcacccaaact

SEQ ID NO: 163603 - DNA, 13 bp, Artificial Sequence
  Oligonucleotide for detection of SNP TSC0041109
agtttgtgtgata

SEQ ID NO: 163604 - DNA, 13 bp, Artificial Sequence
  Oligonucleotide for detection of SNP TSC0041109
tatcacacaaact

SEQ ID NO: 163605 - DNA, 13 bp, Artificial Sequence
  Oligonucleotide for detection of SNP TSC0041109
agtttgcgtgata

SEQ ID NO: 163606 - DNA, 13 bp, Artificial Sequence
  Oligonucleotide for detection of SNP TSC0041109
tatcacgcaaact

SEQ ID NO: 163607 - DNA, 13 bp, Artificial Sequence
  Oligonucleotide for detection of SNP TSC0041110
atgcgtatgtgtg

SEQ ID NO: 163608 - DNA, 13 bp, Artificial Sequence
  Oligonucleotide for detection of SNP TSC0041110
cacacatacgcat

SEQ ID NO: 163609 - DNA, 13 bp, Artificial Sequence
  Oligonucleotide for detection of SNP TSC0041110
atgcgtgtgtgtg

SEQ ID NO: 163610 - DNA, 13 bp, Artificial Sequence
  Oligonucleotide for detection of SNP TSC0041110
cacacacacgcat

SEQ ID NO: 163611 - DNA, 13 bp, Artificial Sequence
  Oligonucleotide for detection of SNP TSC0041110
atgtgtacgtgtg

SEQ ID NO: 163612 - DNA, 13 bp, Artificial Sequence
  Oligonucleotide for detection of SNP TSC0041110
cacacgtacacat

SEQ ID NO: 163613 - DNA, 13 bp, Artificial Sequence
  Oligonucleotide for detection of SNP TSC0041110
atgcgtacgtgtg

SEQ ID NO: 163614 - DNA, 13 bp, Artificial Sequence
  Oligonucleotide for detection of SNP TSC0041110
cacacgtacgcat

SEQ ID NO: 163615 - DNA, 13 bp, Artificial Sequence
  Oligonucleotide for detection of SNP TSC0041110
atgtgtgcgtgtg

SEQ ID NO: 163616 - DNA, 13 bp, Artificial Sequence
  Oligonucleotide for detection of SNP TSC0041110
cacacgcacacat

SEQ ID NO: 163617 - DNA, 13 bp, Artificial Sequence
  Oligonucleotide for detection of SNP TSC0041110
atgcgcgtgtgtg

SEQ ID NO: 163618 - DNA, 13 bp, Artificial Sequence
  Oligonucleotide for detection of SNP TSC0041110
cacacacgcgcat

SEQ ID NO: 163619 - DNA, 13 bp, Artificial Sequence
  Oligonucleotide for detection of SNP TSC0041110
atgcgtgcgtgtg

SEQ ID NO: 163620 - DNA, 13 bp, Artificial Sequence
  Oligonucleotide for detection of SNP TSC0041110
cacacgcacgcat

SEQ ID NO: 163621 - DNA, 13 bp, Artificial Sequence
  Oligonucleotide for detection of SNP TSC0041110
atgtgcgcgtgtg

SEQ ID NO: 163622 - DNA, 13 bp, Artificial Sequence
  Oligonucleotide for detection of SNP TSC0041110
cacacgcgcacat

SEQ ID NO: 163623 - DNA, 13 bp, Artificial Sequence
  Oligonucleotide for detection of SNP TSC0041110
atgcgcgcgtgtg

SEQ ID NO: 163624 - DNA, 13 bp, Artificial Sequence
  Oligonucleotide for detection of SNP TSC0041110
cacacgcgcgcat

SEQ ID NO: 163625 - DNA, 13 bp, Artificial Sequence
  Oligonucleotide for detection of SNP TSC0041110
tatatgtgtgtat

SEQ ID NO: 163626 - DNA, 13 bp, Artificial Sequence
  Oligonucleotide for detection of SNP TSC0041110
atacacacatata

SEQ ID NO: 163627 - DNA, 13 bp, Artificial Sequence
  Oligonucleotide for detection of SNP TSC0041110
tatacgtgtgtat

SEQ ID NO: 163628 - DNA, 13 bp, Artificial Sequence
  Oligonucleotide for detection of SNP TSC0041110
atacacacgtata

SEQ ID NO: 163629 - DNA, 13 bp, Artificial Sequence
  Oligonucleotide for detection of SNP TSC0041110
tatatgtgcgtat

SEQ ID NO: 163630 - DNA, 13 bp, Artificial Sequence
  Oligonucleotide for detection of SNP TSC0041110
atacgcacatata

SEQ ID NO: 163631 - DNA, 13 bp, Artificial Sequence
  Oligonucleotide for detection of SNP TSC0041110
tatatgcgtgtat

SEQ ID NO: 163632 - DNA, 13 bp, Artificial Sequence
  Oligonucleotide for detection of SNP TSC0041110
atacacgcatata

SEQ ID NO: 163633 - DNA, 13 bp, Artificial Sequence
  Oligonucleotide for detection of SNP TSC0041110
tatacgtgcgtat

SEQ ID NO: 163634 - DNA, 13 bp, Artificial Sequence
  Oligonucleotide for detection of SNP TSC0041110
atacgcacgtata

SEQ ID NO: 163635 - DNA, 13 bp, Artificial Sequence
  Oligonucleotide for detection of SNP TSC0041110
tatacgcgtgtat

SEQ ID NO: 163636 - DNA, 13 bp, Artificial Sequence
  Oligonucleotide for detection of SNP TSC0041110
atacacgcgtata

SEQ ID NO: 163637 - DNA, 13 bp, Artificial Sequence
  Oligonucleotide for detection of SNP TSC0041110
tatatgcgcgtat

SEQ ID NO: 163638 - DNA, 13 bp, Artificial Sequence
  Oligonucleotide for detection of SNP TSC0041110
atacgcgcatata

SEQ ID NO: 163639 - DNA, 13 bp, Artificial Sequence
  Oligonucleotide for detection of SNP TSC0041110
tatacgcgcgtat

SEQ ID NO: 163640 - DNA, 13 bp, Artificial Sequence
  Oligonucleotide for detection of SNP TSC0041110
atacgcgcgtata

SEQ ID NO: 163641 - DNA, 13 bp, Artificial Sequence
  Oligonucleotide for detection of SNP TSC0041111
ggaaagtgattta

SEQ ID NO: 163642 - DNA, 13 bp, Artificial Sequence
  Oligonucleotide for detection of SNP TSC0041111
taaatcactttcc

SEQ ID NO: 163643 - DNA, 13 bp, Artificial Sequence
  Oligonucleotide for detection of SNP TSC0041111
ggaaagcgattta

SEQ ID NO: 163644 - DNA, 13 bp, Artificial Sequence
  Oligonucleotide for detection of SNP TSC0041111
taaatcgctttcc

SEQ ID NO: 163645 - DNA, 13 bp, Artificial Sequence
  Oligonucleotide for detection of SNP TSC0005527
gttttagtgatty

SEQ ID NO: 163646 - DNA, 13 bp, Artificial Sequence
  Oligonucleotide for detection of SNP TSC0005527
raatcactaaaac

SEQ ID NO: 163647 - DNA, 13 bp, Artificial Sequence
  Oligonucleotide for detection of SNP TSC0005527
gttttaatgatty

SEQ ID NO: 163648 - DNA, 13 bp, Artificial Sequence
  Oligonucleotide for detection of SNP TSC0005527
raatcattaaaac

SEQ ID NO: 163649 - DNA, 13 bp, Artificial Sequence
  Oligonucleotide for detection of SNP TSC0041112
aggtttattttty

SEQ ID NO: 163650 - DNA, 13 bp, Artificial Sequence
  Oligonucleotide for detection of SNP TSC0041112
raaaaataaacct

SEQ ID NO: 163651 - DNA, 13 bp, Artificial Sequence
  Oligonucleotide for detection of SNP TSC0041112
aggtttgttttty

SEQ ID NO: 163652 - DNA, 13 bp, Artificial Sequence
  Oligonucleotide for detection of SNP TSC0041112
raaaaacaaacct

SEQ ID NO: 163653 - DNA, 13 bp, Artificial Sequence
  Oligonucleotide for detection of SNP TSC0041112
aggttcgttttty

SEQ ID NO: 163654 - DNA, 13 bp, Artificial Sequence
  Oligonucleotide for detection of SNP TSC0041112
raaaaacgaacct

SEQ ID NO: 163655 - DNA, 13 bp, Artificial Sequence
  Oligonucleotide for detection of SNP TSC0041112
gaaaaatggattt

SEQ ID NO: 163656 - DNA, 13 bp, Artificial Sequence
  Oligonucleotide for detection of SNP TSC0041112
aaatccatttttc

SEQ ID NO: 163657 - DNA, 13 bp, Artificial Sequence
  Oligonucleotide for detection of SNP TSC0041112
gaaaaacggattt

SEQ ID NO: 163658 - DNA, 13 bp, Artificial Sequence
  Oligonucleotide for detection of SNP TSC0041112
aaatccgtttttc

SEQ ID NO: 163659 - DNA, 13 bp, Artificial Sequence
  Oligonucleotide for detection of SNP TSC0041113
aatattgtatata

SEQ ID NO: 163660 - DNA, 13 bp, Artificial Sequence
  Oligonucleotide for detection of SNP TSC0041113
tatatacaatatt

SEQ ID NO: 163661 - DNA, 13 bp, Artificial Sequence
  Oligonucleotide for detection of SNP TSC0041113
aatattatatata

SEQ ID NO: 163662 - DNA, 13 bp, Artificial Sequence
  Oligonucleotide for detection of SNP TSC0041113
tatatataatatt

SEQ ID NO: 163663 - DNA, 13 bp, Artificial Sequence
  Oligonucleotide for detection of SNP TSC0041114
ttggggatggtta

SEQ ID NO: 163664 - DNA, 13 bp, Artificial Sequence
  Oligonucleotide for detection of SNP TSC0041114
taaccatccccaa

SEQ ID NO: 163665 - DNA, 13 bp, Artificial Sequence
  Oligonucleotide for detection of SNP TSC0041114
ttgggggtggtta

SEQ ID NO: 163666 - DNA, 13 bp, Artificial Sequence
  Oligonucleotide for detection of SNP TSC0041114
taaccacccccaa

SEQ ID NO: 163667 - DNA, 13 bp, Artificial Sequence
  Oligonucleotide for detection of SNP TSC0041118
ttgttgaagttta

SEQ ID NO: 163668 - DNA, 13 bp, Artificial Sequence
  Oligonucleotide for detection of SNP TSC0041118
taaacttcaacaa

SEQ ID NO: 163669 - DNA, 13 bp, Artificial Sequence
  Oligonucleotide for detection of SNP TSC0041118
ttgttggagttta

SEQ ID NO: 163670 - DNA, 13 bp, Artificial Sequence
  Oligonucleotide for detection of SNP TSC0041118
taaactccaacaa

SEQ ID NO: 163671 - DNA, 13 bp, Artificial Sequence
  Oligonucleotide for detection of SNP TSC0041119
tgtatagatgtag

SEQ ID NO: 163672 - DNA, 13 bp, Artificial Sequence
  Oligonucleotide for detection of SNP TSC0041119
ctacatctataca

SEQ ID NO: 163673 - DNA, 13 bp, Artificial Sequence
  Oligonucleotide for detection of SNP TSC0041119
tgtataaatgtag

SEQ ID NO: 163674 - DNA, 13 bp, Artificial Sequence
  Oligonucleotide for detection of SNP TSC0041119
ctacatttataca

SEQ ID NO: 163675 - DNA, 13 bp, Artificial Sequence
  Oligonucleotide for detection of SNP TSC0041121
taaatgattagtt

SEQ ID NO: 163676 - DNA, 13 bp, Artificial Sequence
  Oligonucleotide for detection of SNP TSC0041121
aactaatcattta

SEQ ID NO: 163677 - DNA, 13 bp, Artificial Sequence
  Oligonucleotide for detection of SNP TSC0041121
taaatggttagtt

SEQ ID NO: 163678 - DNA, 13 bp, Artificial Sequence
  Oligonucleotide for detection of SNP TSC0041121
aactaaccattta

SEQ ID NO: 163679 - DNA, 13 bp, Artificial Sequence
  Oligonucleotide for detection of SNP TSC0041128
taaggaaggttga

SEQ ID NO: 163680 - DNA, 13 bp, Artificial Sequence
  Oligonucleotide for detection of SNP TSC0041128
tcaaccttcctta

SEQ ID NO: 163681 - DNA, 13 bp, Artificial Sequence
  Oligonucleotide for detection of SNP TSC0041128
taaggatggttga

SEQ ID NO: 163682 - DNA, 13 bp, Artificial Sequence
  Oligonucleotide for detection of SNP TSC0041128
tcaaccatcctta

SEQ ID NO: 163683 - DNA, 13 bp, Artificial Sequence
  Oligonucleotide for detection of SNP TSC0041128
ttaattttttttg

SEQ ID NO: 163684 - DNA, 13 bp, Artificial Sequence
  Oligonucleotide for detection of SNP TSC0041128
caaaaaaaattaa

SEQ ID NO: 163685 - DNA, 13 bp, Artificial Sequence
  Oligonucleotide for detection of SNP TSC0041130
ggttgaagtggga

SEQ ID NO: 163686 - DNA, 13 bp, Artificial Sequence
  Oligonucleotide for detection of SNP TSC0041130
tcccacttcaacc

SEQ ID NO: 163687 - DNA, 13 bp, Artificial Sequence
  Oligonucleotide for detection of SNP TSC0041130
ggttgaggtggga

SEQ ID NO: 163688 - DNA, 13 bp, Artificial Sequence
  Oligonucleotide for detection of SNP TSC0041130
tcccacctcaacc

SEQ ID NO: 163689 - DNA, 13 bp, Artificial Sequence
  Oligonucleotide for detection of SNP TSC0041130
ggttgaagcggga

SEQ ID NO: 163690 - DNA, 13 bp, Artificial Sequence
  Oligonucleotide for detection of SNP TSC0041130
tcccgcttcaacc

SEQ ID NO: 163691 - DNA, 13 bp, Artificial Sequence
  Oligonucleotide for detection of SNP TSC0041130
ggttgaggcggga

SEQ ID NO: 163692 - DNA, 13 bp, Artificial Sequence
  Oligonucleotide for detection of SNP TSC0041130
tcccgcctcaacc

SEQ ID NO: 163693 - DNA, 13 bp, Artificial Sequence
  Oligonucleotide for detection of SNP TSC0041131
gtttatagttatg

SEQ ID NO: 163694 - DNA, 13 bp, Artificial Sequence
  Oligonucleotide for detection of SNP TSC0041131
cataactataaac

SEQ ID NO: 163695 - DNA, 13 bp, Artificial Sequence
  Oligonucleotide for detection of SNP TSC0041131
gtttatggttatg

SEQ ID NO: 163696 - DNA, 13 bp, Artificial Sequence
  Oligonucleotide for detection of SNP TSC0041131
cataaccataaac

SEQ ID NO: 163697 - DNA, 13 bp, Artificial Sequence
  Oligonucleotide for detection of SNP TSC0041131
gtttatagttacg

SEQ ID NO: 163698 - DNA, 13 bp, Artificial Sequence
  Oligonucleotide for detection of SNP TSC0041131
cgtaactataaac

SEQ ID NO: 163699 - DNA, 13 bp, Artificial Sequence
  Oligonucleotide for detection of SNP TSC0041131
gtttacggttatg

SEQ ID NO: 163700 - DNA, 13 bp, Artificial Sequence
  Oligonucleotide for detection of SNP TSC0041131
cataaccgtaaac

SEQ ID NO: 163701 - DNA, 13 bp, Artificial Sequence
  Oligonucleotide for detection of SNP TSC0041131
gtttatggttacg

SEQ ID NO: 163702 - DNA, 13 bp, Artificial Sequence
  Oligonucleotide for detection of SNP TSC0041131
cgtaaccataaac

SEQ ID NO: 163703 - DNA, 13 bp, Artificial Sequence
  Oligonucleotide for detection of SNP TSC0041131
gtttacggttacg

SEQ ID NO: 163704 - DNA, 13 bp, Artificial Sequence
  Oligonucleotide for detection of SNP TSC0041131
cgtaaccgtaaac

SEQ ID NO: 163705 - DNA, 13 bp, Artificial Sequence
  Oligonucleotide for detection of SNP TSC0041131
tgtgattgtaagy

SEQ ID NO: 163706 - DNA, 13 bp, Artificial Sequence
  Oligonucleotide for detection of SNP TSC0041131
rcttacaatcaca

SEQ ID NO: 163707 - DNA, 13 bp, Artificial Sequence
  Oligonucleotide for detection of SNP TSC0041131
cgtgattgtaagy

SEQ ID NO: 163708 - DNA, 13 bp, Artificial Sequence
  Oligonucleotide for detection of SNP TSC0041131
rcttacaatcacg

SEQ ID NO: 163709 - DNA, 13 bp, Artificial Sequence
  Oligonucleotide for detection of SNP TSC0041131
tgtgatcgtaagy

SEQ ID NO: 163710 - DNA, 13 bp, Artificial Sequence
  Oligonucleotide for detection of SNP TSC0041131
rcttacgatcaca

SEQ ID NO: 163711 - DNA, 13 bp, Artificial Sequence
  Oligonucleotide for detection of SNP TSC0041131
cgtgatcgtaagy

SEQ ID NO: 163712 - DNA, 13 bp, Artificial Sequence
  Oligonucleotide for detection of SNP TSC0041131
rcttacgatcacg

SEQ ID NO: 163713 - DNA, 13 bp, Artificial Sequence
  Oligonucleotide for detection of SNP TSC0041133
atattaaatatga

SEQ ID NO: 163714 - DNA, 13 bp, Artificial Sequence
  Oligonucleotide for detection of SNP TSC0041133
tcatatttaatat

SEQ ID NO: 163715 - DNA, 13 bp, Artificial Sequence
  Oligonucleotide for detection of SNP TSC0041133
atattagatatga

SEQ ID NO: 163716 - DNA, 13 bp, Artificial Sequence
  Oligonucleotide for detection of SNP TSC0041133
tcatatctaatat

SEQ ID NO: 163717 - DNA, 13 bp, Artificial Sequence
  Oligonucleotide for detection of SNP TSC0041133
atattaaatacga

SEQ ID NO: 163718 - DNA, 13 bp, Artificial Sequence
  Oligonucleotide for detection of SNP TSC0041133
tcgtatttaatat

SEQ ID NO: 163719 - DNA, 13 bp, Artificial Sequence
  Oligonucleotide for detection of SNP TSC0041133
atattagatacga

SEQ ID NO: 163720 - DNA, 13 bp, Artificial Sequence
  Oligonucleotide for detection of SNP TSC0041133
tcgtatctaatat

SEQ ID NO: 163721 - DNA, 13 bp, Artificial Sequence
  Oligonucleotide for detection of SNP TSC0041134
tttttttttggtg

SEQ ID NO: 163722 - DNA, 13 bp, Artificial Sequence
  Oligonucleotide for detection of SNP TSC0041134
caccaaaaaaaaa

SEQ ID NO: 163723 - DNA, 13 bp, Artificial Sequence
  Oligonucleotide for detection of SNP TSC0041134
tattaaaggaaag

SEQ ID NO: 163724 - DNA, 13 bp, Artificial Sequence
  Oligonucleotide for detection of SNP TSC0041134
ctttcctttaata

SEQ ID NO: 163725 - DNA, 13 bp, Artificial Sequence
  Oligonucleotide for detection of SNP TSC0041134
tattaatggaaag

SEQ ID NO: 163726 - DNA, 13 bp, Artificial Sequence
  Oligonucleotide for detection of SNP TSC0041134
ctttccattaata

SEQ ID NO: 163727 - DNA, 13 bp, Artificial Sequence
  Oligonucleotide for detection of SNP TSC0041134
tattaacggaaag

SEQ ID NO: 163728 - DNA, 13 bp, Artificial Sequence
  Oligonucleotide for detection of SNP TSC0041134
ctttccgttaata

SEQ ID NO: 163729 - DNA, 13 bp, Artificial Sequence
  Oligonucleotide for detection of SNP TSC0008466
ttaaagataaagg

SEQ ID NO: 163730 - DNA, 13 bp, Artificial Sequence
  Oligonucleotide for detection of SNP TSC0008466
cctttatctttaa

SEQ ID NO: 163731 - DNA, 13 bp, Artificial Sequence
  Oligonucleotide for detection of SNP TSC0008466
ttaaaggtaaagg

SEQ ID NO: 163732 - DNA, 13 bp, Artificial Sequence
  Oligonucleotide for detection of SNP TSC0008466
cctttacctttaa

SEQ ID NO: 163733 - DNA, 13 bp, Artificial Sequence
  Oligonucleotide for detection of SNP TSC0041138
attataagagaaa

SEQ ID NO: 163734 - DNA, 13 bp, Artificial Sequence
  Oligonucleotide for detection of SNP TSC0041138
tttctcttataat

SEQ ID NO: 163735 - DNA, 13 bp, Artificial Sequence
  Oligonucleotide for detection of SNP TSC0041138
attatatgagaaa

SEQ ID NO: 163736 - DNA, 13 bp, Artificial Sequence
  Oligonucleotide for detection of SNP TSC0041138
tttctcatataat

SEQ ID NO: 163737 - DNA, 13 bp, Artificial Sequence
  Oligonucleotide for detection of SNP TSC0041138
attatacgagaaa

SEQ ID NO: 163738 - DNA, 13 bp, Artificial Sequence
  Oligonucleotide for detection of SNP TSC0041138
tttctcgtataat

SEQ ID NO: 163739 - DNA, 13 bp, Artificial Sequence
  Oligonucleotide for detection of SNP TSC0041138
ttttttttgtgat

SEQ ID NO: 163740 - DNA, 13 bp, Artificial Sequence
  Oligonucleotide for detection of SNP TSC0041138
atcacaaaaaaaa

SEQ ID NO: 163741 - DNA, 13 bp, Artificial Sequence
  Oligonucleotide for detection of SNP TSC0041138
ttttttgtgtgat

SEQ ID NO: 163742 - DNA, 13 bp, Artificial Sequence
  Oligonucleotide for detection of SNP TSC0041138
atcacacaaaaaa

SEQ ID NO: 163743 - DNA, 13 bp, Artificial Sequence
  Oligonucleotide for detection of SNP TSC0041138
tttttcgtgtgat

SEQ ID NO: 163744 - DNA, 13 bp, Artificial Sequence
  Oligonucleotide for detection of SNP TSC0041138
atcacacgaaaaa

SEQ ID NO: 163745 - DNA, 13 bp, Artificial Sequence
  Oligonucleotide for detection of SNP TSC0009919
gtgataaagttat

SEQ ID NO: 163746 - DNA, 13 bp, Artificial Sequence
  Oligonucleotide for detection of SNP TSC0009919
ataactttatcac

SEQ ID NO: 163747 - DNA, 13 bp, Artificial Sequence
  Oligonucleotide for detection of SNP TSC0009919
gtgatagagttat

SEQ ID NO: 163748 - DNA, 13 bp, Artificial Sequence
  Oligonucleotide for detection of SNP TSC0009919
ataactctatcac

SEQ ID NO: 163749 - DNA, 13 bp, Artificial Sequence
  Oligonucleotide for detection of SNP TSC0041141
tattttttttagt

SEQ ID NO: 163750 - DNA, 13 bp, Artificial Sequence
  Oligonucleotide for detection of SNP TSC0041141
actaaaaaaaata

SEQ ID NO: 163751 - DNA, 13 bp, Artificial Sequence
  Oligonucleotide for detection of SNP TSC0041141
tattttgtttagt

SEQ ID NO: 163752 - DNA, 13 bp, Artificial Sequence
  Oligonucleotide for detection of SNP TSC0041141
actaaacaaaata

SEQ ID NO: 163753 - DNA, 13 bp, Artificial Sequence
  Oligonucleotide for detection of SNP TSC0041141
attaaagaaaata

SEQ ID NO: 163754 - DNA, 13 bp, Artificial Sequence
  Oligonucleotide for detection of SNP TSC0041141
tattttctttaat

SEQ ID NO: 163755 - DNA, 13 bp, Artificial Sequence
  Oligonucleotide for detection of SNP TSC0041141
attaaataaaata

SEQ ID NO: 163756 - DNA, 13 bp, Artificial Sequence
  Oligonucleotide for detection of SNP TSC0041141
tattttatttaat

SEQ ID NO: 163757 - DNA, 13 bp, Artificial Sequence
  Oligonucleotide for detection of SNP TSC0041142
gataattatgtta

SEQ ID NO: 163758 - DNA, 13 bp, Artificial Sequence
  Oligonucleotide for detection of SNP TSC0041142
taacataattatc

SEQ ID NO: 163759 - DNA, 13 bp, Artificial Sequence
  Oligonucleotide for detection of SNP TSC0041142
gataatgatgtta

SEQ ID NO: 163760 - DNA, 13 bp, Artificial Sequence
  Oligonucleotide for detection of SNP TSC0041142
taacatcattatc

SEQ ID NO: 163761 - DNA, 13 bp, Artificial Sequence
  Oligonucleotide for detection of SNP TSC0041142
tgatataattgty

SEQ ID NO: 163762 - DNA, 13 bp, Artificial Sequence
  Oligonucleotide for detection of SNP TSC0041142
racaattatatca

SEQ ID NO: 163763 - DNA, 13 bp, Artificial Sequence
  Oligonucleotide for detection of SNP TSC0041142
tgatattattgty

SEQ ID NO: 163764 - DNA, 13 bp, Artificial Sequence
  Oligonucleotide for detection of SNP TSC0041142
racaataatatca

SEQ ID NO: 163765 - DNA, 13 bp, Artificial Sequence
  Oligonucleotide for detection of SNP TSC0041143
gtgagagatttaa

SEQ ID NO: 163766 - DNA, 13 bp, Artificial Sequence
  Oligonucleotide for detection of SNP TSC0041143
ttaaatctctcac

SEQ ID NO: 163767 - DNA, 13 bp, Artificial Sequence
  Oligonucleotide for detection of SNP TSC0041143
gtgagaaatttaa

SEQ ID NO: 163768 - DNA, 13 bp, Artificial Sequence
  Oligonucleotide for detection of SNP TSC0041143
ttaaatttctcac

SEQ ID NO: 163769 - DNA, 13 bp, Artificial Sequence
  Oligonucleotide for detection of SNP TSC0041144
aaattatttaaat

SEQ ID NO: 163770 - DNA, 13 bp, Artificial Sequence
  Oligonucleotide for detection of SNP TSC0041144
atttaaataattt

SEQ ID NO: 163771 - DNA, 13 bp, Artificial Sequence
  Oligonucleotide for detection of SNP TSC0041144
aaattagttaaat

SEQ ID NO: 163772 - DNA, 13 bp, Artificial Sequence
  Oligonucleotide for detection of SNP TSC0041144
atttaactaattt

SEQ ID NO: 163773 - DNA, 13 bp, Artificial Sequence
  Oligonucleotide for detection of SNP TSC0041144
atttgggtaattt

SEQ ID NO: 163774 - DNA, 13 bp, Artificial Sequence
  Oligonucleotide for detection of SNP TSC0041144
aaattacccaaat

SEQ ID NO: 163775 - DNA, 13 bp, Artificial Sequence
  Oligonucleotide for detection of SNP TSC0041144
atttggttaattt

SEQ ID NO: 163776 - DNA, 13 bp, Artificial Sequence
  Oligonucleotide for detection of SNP TSC0041144
aaattaaccaaat

SEQ ID NO: 163777 - DNA, 13 bp, Artificial Sequence
  Oligonucleotide for detection of SNP TSC0041145
tatttaatgggga

SEQ ID NO: 163778 - DNA, 13 bp, Artificial Sequence
  Oligonucleotide for detection of SNP TSC0041145
tccccattaaata

SEQ ID NO: 163779 - DNA, 13 bp, Artificial Sequence
  Oligonucleotide for detection of SNP TSC0041145
tatttagtgggga

SEQ ID NO: 163780 - DNA, 13 bp, Artificial Sequence
  Oligonucleotide for detection of SNP TSC0041145
tccccactaaata

SEQ ID NO: 163781 - DNA, 13 bp, Artificial Sequence
  Oligonucleotide for detection of SNP TSC0041146
attattatagagy

SEQ ID NO: 163782 - DNA, 13 bp, Artificial Sequence
  Oligonucleotide for detection of SNP TSC0041146
rctctataataat

SEQ ID NO: 163783 - DNA, 13 bp, Artificial Sequence
  Oligonucleotide for detection of SNP TSC0041146
attattgtagagy

SEQ ID NO: 163784 - DNA, 13 bp, Artificial Sequence
  Oligonucleotide for detection of SNP TSC0041146
rctctacaataat

SEQ ID NO: 163785 - DNA, 13 bp, Artificial Sequence
  Oligonucleotide for detection of SNP TSC0041146
attatcgtagagy

SEQ ID NO: 163786 - DNA, 13 bp, Artificial Sequence
  Oligonucleotide for detection of SNP TSC0041146
rctctacgataat

SEQ ID NO: 163787 - DNA, 13 bp, Artificial Sequence
  Oligonucleotide for detection of SNP TSC0041146
gttttgtgatgat

SEQ ID NO: 163788 - DNA, 13 bp, Artificial Sequence
  Oligonucleotide for detection of SNP TSC0041146
atcatcacaaaac

SEQ ID NO: 163789 - DNA, 13 bp, Artificial Sequence
  Oligonucleotide for detection of SNP TSC0041146
gttttgcgatgat

SEQ ID NO: 163790 - DNA, 13 bp, Artificial Sequence
  Oligonucleotide for detection of SNP TSC0041146
atcatcgcaaaac

SEQ ID NO: 163791 - DNA, 13 bp, Artificial Sequence
  Oligonucleotide for detection of SNP TSC0041147
attttagtatgta

SEQ ID NO: 163792 - DNA, 13 bp, Artificial Sequence
  Oligonucleotide for detection of SNP TSC0041147
tacatactaaaat

SEQ ID NO: 163793 - DNA, 13 bp, Artificial Sequence
  Oligonucleotide for detection of SNP TSC0041147
attttaatatgta

SEQ ID NO: 163794 - DNA, 13 bp, Artificial Sequence
  Oligonucleotide for detection of SNP TSC0041147
tacatattaaaat

SEQ ID NO: 163795 - DNA, 13 bp, Artificial Sequence
  Oligonucleotide for detection of SNP TSC0010383
aggaaaaggaggg

SEQ ID NO: 163796 - DNA, 13 bp, Artificial Sequence
  Oligonucleotide for detection of SNP TSC0010383
ccctccttttcct

SEQ ID NO: 163797 - DNA, 13 bp, Artificial Sequence
  Oligonucleotide for detection of SNP TSC0010383
aggaaagggaggg

SEQ ID NO: 163798 - DNA, 13 bp, Artificial Sequence
  Oligonucleotide for detection of SNP TSC0010383
ccctccctttcct

SEQ ID NO: 163799 - DNA, 13 bp, Artificial Sequence
  Oligonucleotide for detection of SNP TSC0010384
gtggtaataatty

SEQ ID NO: 163800 - DNA, 13 bp, Artificial Sequence
  Oligonucleotide for detection of SNP TSC0010384
raattattaccac

SEQ ID NO: 163801 - DNA, 13 bp, Artificial Sequence
  Oligonucleotide for detection of SNP TSC0010384
gtggtagtaatty

SEQ ID NO: 163802 - DNA, 13 bp, Artificial Sequence
  Oligonucleotide for detection of SNP TSC0010384
raattactaccac

SEQ ID NO: 163803 - DNA, 13 bp, Artificial Sequence
  Oligonucleotide for detection of SNP TSC0041148
taatatgtaggtt

SEQ ID NO: 163804 - DNA, 13 bp, Artificial Sequence
  Oligonucleotide for detection of SNP TSC0041148
aacctacatatta

SEQ ID NO: 163805 - DNA, 13 bp, Artificial Sequence
  Oligonucleotide for detection of SNP TSC0041148
taatatataggtt

SEQ ID NO: 163806 - DNA, 13 bp, Artificial Sequence
  Oligonucleotide for detection of SNP TSC0041148
aacctatatatta

SEQ ID NO: 163807 - DNA, 13 bp, Artificial Sequence
  Oligonucleotide for detection of SNP TSC0041149
ggtagaagtaggt

SEQ ID NO: 163808 - DNA, 13 bp, Artificial Sequence
  Oligonucleotide for detection of SNP TSC0041149
acctacttctacc

SEQ ID NO: 163809 - DNA, 13 bp, Artificial Sequence
  Oligonucleotide for detection of SNP TSC0041149
ggtagatgtaggt

SEQ ID NO: 163810 - DNA, 13 bp, Artificial Sequence
  Oligonucleotide for detection of SNP TSC0041149
acctacatctacc

SEQ ID NO: 163811 - DNA, 13 bp, Artificial Sequence
  Oligonucleotide for detection of SNP TSC0041149
ggtagaggtaggt

SEQ ID NO: 163812 - DNA, 13 bp, Artificial Sequence
  Oligonucleotide for detection of SNP TSC0041149
acctacctctacc

SEQ ID NO: 163813 - DNA, 13 bp, Artificial Sequence
  Oligonucleotide for detection of SNP TSC0041149
ggtagacgtaggt

SEQ ID NO: 163814 - DNA, 13 bp, Artificial Sequence
  Oligonucleotide for detection of SNP TSC0041149
acctacgtctacc

SEQ ID NO: 163815 - DNA, 13 bp, Artificial Sequence
  Oligonucleotide for detection of SNP TSC0041149
atttacgtttaty

SEQ ID NO: 163816 - DNA, 13 bp, Artificial Sequence
  Oligonucleotide for detection of SNP TSC0041149
rataaacgtaaat

SEQ ID NO: 163817 - DNA, 13 bp, Artificial Sequence
  Oligonucleotide for detection of SNP TSC0041150
agttattgggtty

SEQ ID NO: 163818 - DNA, 13 bp, Artificial Sequence
  Oligonucleotide for detection of SNP TSC0041150
raacccaataact

SEQ ID NO: 163819 - DNA, 13 bp, Artificial Sequence
  Oligonucleotide for detection of SNP TSC0041150
agttatcgggtty

SEQ ID NO: 163820 - DNA, 13 bp, Artificial Sequence
  Oligonucleotide for detection of SNP TSC0041150
raacccgataact

SEQ ID NO: 163821 - DNA, 13 bp, Artificial Sequence
  Oligonucleotide for detection of SNP TSC0041150
gagtttgataatt

SEQ ID NO: 163822 - DNA, 13 bp, Artificial Sequence
  Oligonucleotide for detection of SNP TSC0041150
aattatcaaactc

SEQ ID NO: 163823 - DNA, 13 bp, Artificial Sequence
  Oligonucleotide for detection of SNP TSC0041150
gagtttaataatt

SEQ ID NO: 163824 - DNA, 13 bp, Artificial Sequence
  Oligonucleotide for detection of SNP TSC0041150
aattattaaactc

SEQ ID NO: 163825 - DNA, 13 bp, Artificial Sequence
  Oligonucleotide for detection of SNP TSC0041150
gagttcgataatt

SEQ ID NO: 163826 - DNA, 13 bp, Artificial Sequence
  Oligonucleotide for detection of SNP TSC0041150
aattatcgaactc

SEQ ID NO: 163827 - DNA, 13 bp, Artificial Sequence
  Oligonucleotide for detection of SNP TSC0041151
aaaaaatgtttta

SEQ ID NO: 163828 - DNA, 13 bp, Artificial Sequence
  Oligonucleotide for detection of SNP TSC0041151
taaaacatttttt

SEQ ID NO: 163829 - DNA, 13 bp, Artificial Sequence
  Oligonucleotide for detection of SNP TSC0041152
tatttgttgagga

SEQ ID NO: 163830 - DNA, 13 bp, Artificial Sequence
  Oligonucleotide for detection of SNP TSC0041152
tcctcaacaaata

SEQ ID NO: 163831 - DNA, 13 bp, Artificial Sequence
  Oligonucleotide for detection of SNP TSC0041152
tatttggtgagga

SEQ ID NO: 163832 - DNA, 13 bp, Artificial Sequence
  Oligonucleotide for detection of SNP TSC0041152
tcctcaccaaata

SEQ ID NO: 163833 - DNA, 13 bp, Artificial Sequence
  Oligonucleotide for detection of SNP TSC0041152
tattcgttgagga

SEQ ID NO: 163834 - DNA, 13 bp, Artificial Sequence
  Oligonucleotide for detection of SNP TSC0041152
tcctcaacgaata

SEQ ID NO: 163835 - DNA, 13 bp, Artificial Sequence
  Oligonucleotide for detection of SNP TSC0041152
tattcggtgagga

SEQ ID NO: 163836 - DNA, 13 bp, Artificial Sequence
  Oligonucleotide for detection of SNP TSC0041152
tcctcaccgaata

SEQ ID NO: 163837 - DNA, 13 bp, Artificial Sequence
  Oligonucleotide for detection of SNP TSC0041152
tttttaatggatg

SEQ ID NO: 163838 - DNA, 13 bp, Artificial Sequence
  Oligonucleotide for detection of SNP TSC0041152
catccattaaaaa

SEQ ID NO: 163839 - DNA, 13 bp, Artificial Sequence
  Oligonucleotide for detection of SNP TSC0041152
tttttattggatg

SEQ ID NO: 163840 - DNA, 13 bp, Artificial Sequence
  Oligonucleotide for detection of SNP TSC0041152
catccaataaaaa

SEQ ID NO: 163841 - DNA, 13 bp, Artificial Sequence
  Oligonucleotide for detection of SNP TSC0041152
tttttaacggatg

SEQ ID NO: 163842 - DNA, 13 bp, Artificial Sequence
  Oligonucleotide for detection of SNP TSC0041152
catccgttaaaaa

SEQ ID NO: 163843 - DNA, 13 bp, Artificial Sequence
  Oligonucleotide for detection of SNP TSC0041152
tttttatcggatg

SEQ ID NO: 163844 - DNA, 13 bp, Artificial Sequence
  Oligonucleotide for detection of SNP TSC0041152
catccgataaaaa

SEQ ID NO: 163845 - DNA, 13 bp, Artificial Sequence
  Oligonucleotide for detection of SNP TSC0007619
ggtatagttagtt

SEQ ID NO: 163846 - DNA, 13 bp, Artificial Sequence
  Oligonucleotide for detection of SNP TSC0007619
aactaactatacc

SEQ ID NO: 163847 - DNA, 13 bp, Artificial Sequence
  Oligonucleotide for detection of SNP TSC0007619
ggtataattagtt

SEQ ID NO: 163848 - DNA, 13 bp, Artificial Sequence
  Oligonucleotide for detection of SNP TSC0007619
aactaattatacc

SEQ ID NO: 163849 - DNA, 13 bp, Artificial Sequence
  Oligonucleotide for detection of SNP TSC0041153
aaatttaggaata

SEQ ID NO: 163850 - DNA, 13 bp, Artificial Sequence
  Oligonucleotide for detection of SNP TSC0041153
tattcctaaattt

SEQ ID NO: 163851 - DNA, 13 bp, Artificial Sequence
  Oligonucleotide for detection of SNP TSC0041153
aaattttggaata

SEQ ID NO: 163852 - DNA, 13 bp, Artificial Sequence
  Oligonucleotide for detection of SNP TSC0041153
tattccaaaattt

SEQ ID NO: 163853 - DNA, 13 bp, Artificial Sequence
  Oligonucleotide for detection of SNP TSC0041153
aaatttcggaata

SEQ ID NO: 163854 - DNA, 13 bp, Artificial Sequence
  Oligonucleotide for detection of SNP TSC0041153
tattccgaaattt

SEQ ID NO: 163855 - DNA, 13 bp, Artificial Sequence
  Oligonucleotide for detection of SNP TSC0041153
tgtttttggattt

SEQ ID NO: 163856 - DNA, 13 bp, Artificial Sequence
  Oligonucleotide for detection of SNP TSC0041153
aaatccaaaaaca

SEQ ID NO: 163857 - DNA, 13 bp, Artificial Sequence
  Oligonucleotide for detection of SNP TSC0041153
tgttttgggattt

SEQ ID NO: 163858 - DNA, 13 bp, Artificial Sequence
  Oligonucleotide for detection of SNP TSC0041153
aaatcccaaaaca

SEQ ID NO: 163859 - DNA, 13 bp, Artificial Sequence
  Oligonucleotide for detection of SNP TSC0041153
tgtttcgggattt

SEQ ID NO: 163860 - DNA, 13 bp, Artificial Sequence
  Oligonucleotide for detection of SNP TSC0041153
aaatcccgaaaca

SEQ ID NO: 163861 - DNA, 13 bp, Artificial Sequence
  Oligonucleotide for detection of SNP TSC0041154
gataatagatgtt

SEQ ID NO: 163862 - DNA, 13 bp, Artificial Sequence
  Oligonucleotide for detection of SNP TSC0041154
aacatctattatc

SEQ ID NO: 163863 - DNA, 13 bp, Artificial Sequence
  Oligonucleotide for detection of SNP TSC0041154
gataatggatgtt

SEQ ID NO: 163864 - DNA, 13 bp, Artificial Sequence
  Oligonucleotide for detection of SNP TSC0041154
aacatccattatc

SEQ ID NO: 163865 - DNA, 13 bp, Artificial Sequence
  Oligonucleotide for detection of SNP TSC0041154
gataacggatgtt

SEQ ID NO: 163866 - DNA, 13 bp, Artificial Sequence
  Oligonucleotide for detection of SNP TSC0041154
aacatccgttatc

SEQ ID NO: 163867 - DNA, 13 bp, Artificial Sequence
  Oligonucleotide for detection of SNP TSC0041154
agtatttgttaty

SEQ ID NO: 163868 - DNA, 13 bp, Artificial Sequence
  Oligonucleotide for detection of SNP TSC0041154
rataacaaatact

SEQ ID NO: 163869 - DNA, 13 bp, Artificial Sequence
  Oligonucleotide for detection of SNP TSC0041154
agtattcgttaty

SEQ ID NO: 163870 - DNA, 13 bp, Artificial Sequence
  Oligonucleotide for detection of SNP TSC0041154
rataacgaatact

SEQ ID NO: 163871 - DNA, 13 bp, Artificial Sequence
  Oligonucleotide for detection of SNP TSC0009132
aattttaagaagt

SEQ ID NO: 163872 - DNA, 13 bp, Artificial Sequence
  Oligonucleotide for detection of SNP TSC0009132
acttcttaaaatt

SEQ ID NO: 163873 - DNA, 13 bp, Artificial Sequence
  Oligonucleotide for detection of SNP TSC0009132
aattttgagaagt

SEQ ID NO: 163874 - DNA, 13 bp, Artificial Sequence
  Oligonucleotide for detection of SNP TSC0009132
acttctcaaaatt

SEQ ID NO: 163875 - DNA, 13 bp, Artificial Sequence
  Oligonucleotide for detection of SNP TSC0009132
aatttcgagaagt

SEQ ID NO: 163876 - DNA, 13 bp, Artificial Sequence
  Oligonucleotide for detection of SNP TSC0009132
acttctcgaaatt

SEQ ID NO: 163877 - DNA, 13 bp, Artificial Sequence
  Oligonucleotide for detection of SNP TSC0041155
ttttgagaggtta

SEQ ID NO: 163878 - DNA, 13 bp, Artificial Sequence
  Oligonucleotide for detection of SNP TSC0041155
taacctctcaaaa

SEQ ID NO: 163879 - DNA, 13 bp, Artificial Sequence
  Oligonucleotide for detection of SNP TSC0041155
ttttgaaaggtta

SEQ ID NO: 163880 - DNA, 13 bp, Artificial Sequence
  Oligonucleotide for detection of SNP TSC0041155
taacctttcaaaa

SEQ ID NO: 163881 - DNA, 13 bp, Artificial Sequence
  Oligonucleotide for detection of SNP TSC0041158
ttttataagtaat

SEQ ID NO: 163882 - DNA, 13 bp, Artificial Sequence
  Oligonucleotide for detection of SNP TSC0041158
attacttataaaa

SEQ ID NO: 163883 - DNA, 13 bp, Artificial Sequence
  Oligonucleotide for detection of SNP TSC0041158
attgtttgtgaga

SEQ ID NO: 163884 - DNA, 13 bp, Artificial Sequence
  Oligonucleotide for detection of SNP TSC0041158
tctcacaaacaat

SEQ ID NO: 163885 - DNA, 13 bp, Artificial Sequence
  Oligonucleotide for detection of SNP TSC0041158
attgttggtgaga

SEQ ID NO: 163886 - DNA, 13 bp, Artificial Sequence
  Oligonucleotide for detection of SNP TSC0041158
tctcaccaacaat

SEQ ID NO: 163887 - DNA, 13 bp, Artificial Sequence
  Oligonucleotide for detection of SNP TSC0008057
gagtttatagtgg

SEQ ID NO: 163888 - DNA, 13 bp, Artificial Sequence
  Oligonucleotide for detection of SNP TSC0008057
ccactataaactc

SEQ ID NO: 163889 - DNA, 13 bp, Artificial Sequence
  Oligonucleotide for detection of SNP TSC0008057
gagtttttagtgg

SEQ ID NO: 163890 - DNA, 13 bp, Artificial Sequence
  Oligonucleotide for detection of SNP TSC0008057
ccactaaaaactc

SEQ ID NO: 163891 - DNA, 13 bp, Artificial Sequence
  Oligonucleotide for detection of SNP TSC0008057
gagtttatagcgg

SEQ ID NO: 163892 - DNA, 13 bp, Artificial Sequence
  Oligonucleotide for detection of SNP TSC0008057
ccgctataaactc

SEQ ID NO: 163893 - DNA, 13 bp, Artificial Sequence
  Oligonucleotide for detection of SNP TSC0008057
gagtttttagcgg

SEQ ID NO: 163894 - DNA, 13 bp, Artificial Sequence
  Oligonucleotide for detection of SNP TSC0008057
ccgctaaaaactc

SEQ ID NO: 163895 - DNA, 13 bp, Artificial Sequence
  Oligonucleotide for detection of SNP TSC0008057
ttgttgtgagtty

SEQ ID NO: 163896 - DNA, 13 bp, Artificial Sequence
  Oligonucleotide for detection of SNP TSC0008057
raactcacaacaa

SEQ ID NO: 163897 - DNA, 13 bp, Artificial Sequence
  Oligonucleotide for detection of SNP TSC0008057
ttgttgggagtty

SEQ ID NO: 163898 - DNA, 13 bp, Artificial Sequence
  Oligonucleotide for detection of SNP TSC0008057
raactcccaacaa

SEQ ID NO: 163899 - DNA, 13 bp, Artificial Sequence
  Oligonucleotide for detection of SNP TSC0008057
tcgttgtgagtty

SEQ ID NO: 163900 - DNA, 13 bp, Artificial Sequence
  Oligonucleotide for detection of SNP TSC0008057
raactcacaacga

SEQ ID NO: 163901 - DNA, 13 bp, Artificial Sequence
  Oligonucleotide for detection of SNP TSC0008057
tcgttgggagtty

SEQ ID NO: 163902 - DNA, 13 bp, Artificial Sequence
  Oligonucleotide for detection of SNP TSC0008057
raactcccaacga

SEQ ID NO: 163903 - DNA, 13 bp, Artificial Sequence
  Oligonucleotide for detection of SNP TSC0041159
attaaaaaggtay

SEQ ID NO: 163904 - DNA, 13 bp, Artificial Sequence
  Oligonucleotide for detection of SNP TSC0041159
rtacctttttaat

SEQ ID NO: 163905 - DNA, 13 bp, Artificial Sequence
  Oligonucleotide for detection of SNP TSC0041159
attaaataggtay

SEQ ID NO: 163906 - DNA, 13 bp, Artificial Sequence
  Oligonucleotide for detection of SNP TSC0041159
rtacctatttaat

SEQ ID NO: 163907 - DNA, 13 bp, Artificial Sequence
  Oligonucleotide for detection of SNP TSC0041159
gtatttgtttaat

SEQ ID NO: 163908 - DNA, 13 bp, Artificial Sequence
  Oligonucleotide for detection of SNP TSC0041159
attaaacaaatac

SEQ ID NO: 163909 - DNA, 13 bp, Artificial Sequence
  Oligonucleotide for detection of SNP TSC0041160
atatttttatatt

SEQ ID NO: 163910 - DNA, 13 bp, Artificial Sequence
  Oligonucleotide for detection of SNP TSC0041160
aatataaaaatat

SEQ ID NO: 163911 - DNA, 13 bp, Artificial Sequence
  Oligonucleotide for detection of SNP TSC0041160
atatttgtatatt

SEQ ID NO: 163912 - DNA, 13 bp, Artificial Sequence
  Oligonucleotide for detection of SNP TSC0041160
aatatacaaatat

SEQ ID NO: 163913 - DNA, 13 bp, Artificial Sequence
  Oligonucleotide for detection of SNP TSC0041160
agtataaaaatgt

SEQ ID NO: 163914 - DNA, 13 bp, Artificial Sequence
  Oligonucleotide for detection of SNP TSC0041160
acatttttatact

SEQ ID NO: 163915 - DNA, 13 bp, Artificial Sequence
  Oligonucleotide for detection of SNP TSC0041160
agtatataaatgt

SEQ ID NO: 163916 - DNA, 13 bp, Artificial Sequence
  Oligonucleotide for detection of SNP TSC0041160
acatttatatact

SEQ ID NO: 163917 - DNA, 13 bp, Artificial Sequence
  Oligonucleotide for detection of SNP TSC0005704
ggtttaatttgat

SEQ ID NO: 163918 - DNA, 13 bp, Artificial Sequence
  Oligonucleotide for detection of SNP TSC0005704
atcaaattaaacc

SEQ ID NO: 163919 - DNA, 13 bp, Artificial Sequence
  Oligonucleotide for detection of SNP TSC0005704
ggtttagtttgat

SEQ ID NO: 163920 - DNA, 13 bp, Artificial Sequence
  Oligonucleotide for detection of SNP TSC0005704
atcaaactaaacc

SEQ ID NO: 163921 - DNA, 13 bp, Artificial Sequence
  Oligonucleotide for detection of SNP TSC0041161
tataggtgttaaa

SEQ ID NO: 163922 - DNA, 13 bp, Artificial Sequence
  Oligonucleotide for detection of SNP TSC0041161
tttaacacctata

SEQ ID NO: 163923 - DNA, 13 bp, Artificial Sequence
  Oligonucleotide for detection of SNP TSC0041161
tataggcgttaaa

SEQ ID NO: 163924 - DNA, 13 bp, Artificial Sequence
  Oligonucleotide for detection of SNP TSC0041161
tttaacgcctata

SEQ ID NO: 163925 - DNA, 13 bp, Artificial Sequence
  Oligonucleotide for detection of SNP TSC0041161
tttagcgtttata

SEQ ID NO: 163926 - DNA, 13 bp, Artificial Sequence
  Oligonucleotide for detection of SNP TSC0041161
tataaacgctaaa

SEQ ID NO: 163927 - DNA, 13 bp, Artificial Sequence
  Oligonucleotide for detection of SNP TSC0041163
taaggttggtatt

SEQ ID NO: 163928 - DNA, 13 bp, Artificial Sequence
  Oligonucleotide for detection of SNP TSC0041163
aataccaacctta

SEQ ID NO: 163929 - DNA, 13 bp, Artificial Sequence
  Oligonucleotide for detection of SNP TSC0041163
taaggtcggtatt

SEQ ID NO: 163930 - DNA, 13 bp, Artificial Sequence
  Oligonucleotide for detection of SNP TSC0041163
aataccgacctta

SEQ ID NO: 163931 - DNA, 13 bp, Artificial Sequence
  Oligonucleotide for detection of SNP TSC0041163
aatattagtttta

SEQ ID NO: 163932 - DNA, 13 bp, Artificial Sequence
  Oligonucleotide for detection of SNP TSC0041163
taaaactaatatt

SEQ ID NO: 163933 - DNA, 13 bp, Artificial Sequence
  Oligonucleotide for detection of SNP TSC0005985
gtgataattatat

SEQ ID NO: 163934 - DNA, 13 bp, Artificial Sequence
  Oligonucleotide for detection of SNP TSC0005985
atataattatcac

SEQ ID NO: 163935 - DNA, 13 bp, Artificial Sequence
  Oligonucleotide for detection of SNP TSC0005985
gtgatagttatat

SEQ ID NO: 163936 - DNA, 13 bp, Artificial Sequence
  Oligonucleotide for detection of SNP TSC0005985
atataactatcac

SEQ ID NO: 163937 - DNA, 13 bp, Artificial Sequence
  Oligonucleotide for detection of SNP TSC0005894
tattttatttagt

SEQ ID NO: 163938 - DNA, 13 bp, Artificial Sequence
  Oligonucleotide for detection of SNP TSC0005894
actaaataaaata

SEQ ID NO: 163939 - DNA, 13 bp, Artificial Sequence
  Oligonucleotide for detection of SNP TSC0005894
attggatgaagtg

SEQ ID NO: 163940 - DNA, 13 bp, Artificial Sequence
  Oligonucleotide for detection of SNP TSC0005894
cacttcatccaat

SEQ ID NO: 163941 - DNA, 13 bp, Artificial Sequence
  Oligonucleotide for detection of SNP TSC0005894
attggaggaagtg

SEQ ID NO: 163942 - DNA, 13 bp, Artificial Sequence
  Oligonucleotide for detection of SNP TSC0005894
cacttcctccaat

SEQ ID NO: 163943 - DNA, 13 bp, Artificial Sequence
  Oligonucleotide for detection of SNP TSC0041167
ggaaaggttttgy

SEQ ID NO: 163944 - DNA, 13 bp, Artificial Sequence
  Oligonucleotide for detection of SNP TSC0041167
rcaaaacctttcc

SEQ ID NO: 163945 - DNA, 13 bp, Artificial Sequence
  Oligonucleotide for detection of SNP TSC0041167
ggaaagattttgy

SEQ ID NO: 163946 - DNA, 13 bp, Artificial Sequence
  Oligonucleotide for detection of SNP TSC0041167
rcaaaatctttcc

SEQ ID NO: 163947 - DNA, 13 bp, Artificial Sequence
  Oligonucleotide for detection of SNP TSC0041168
tagagtaaagtag

SEQ ID NO: 163948 - DNA, 13 bp, Artificial Sequence
  Oligonucleotide for detection of SNP TSC0041168
ctactttactcta

SEQ ID NO: 163949 - DNA, 13 bp, Artificial Sequence
  Oligonucleotide for detection of SNP TSC0041168
tagagtgaagtag

SEQ ID NO: 163950 - DNA, 13 bp, Artificial Sequence
  Oligonucleotide for detection of SNP TSC0041168
ctacttcactcta

SEQ ID NO: 163951 - DNA, 13 bp, Artificial Sequence
  Oligonucleotide for detection of SNP TSC0041169
tttttaaatatty

SEQ ID NO: 163952 - DNA, 13 bp, Artificial Sequence
  Oligonucleotide for detection of SNP TSC0041169
raatatttaaaaa

SEQ ID NO: 163953 - DNA, 13 bp, Artificial Sequence
  Oligonucleotide for detection of SNP TSC0041169
tttttagatatty

SEQ ID NO: 163954 - DNA, 13 bp, Artificial Sequence
  Oligonucleotide for detection of SNP TSC0041169
raatatctaaaaa

SEQ ID NO: 163955 - DNA, 13 bp, Artificial Sequence
  Oligonucleotide for detection of SNP TSC0041170
atttttatattay

SEQ ID NO: 163956 - DNA, 13 bp, Artificial Sequence
  Oligonucleotide for detection of SNP TSC0041170
rtaatataaaaat

SEQ ID NO: 163957 - DNA, 13 bp, Artificial Sequence
  Oligonucleotide for detection of SNP TSC0041170
atttttgtattay

SEQ ID NO: 163958 - DNA, 13 bp, Artificial Sequence
  Oligonucleotide for detection of SNP TSC0041170
rtaatacaaaaat

SEQ ID NO: 163959 - DNA, 13 bp, Artificial Sequence
  Oligonucleotide for detection of SNP TSC0041170
attttcgtattay

SEQ ID NO: 163960 - DNA, 13 bp, Artificial Sequence
  Oligonucleotide for detection of SNP TSC0041170
rtaatacgaaaat

SEQ ID NO: 163961 - DNA, 13 bp, Artificial Sequence
  Oligonucleotide for detection of SNP TSC0041170
gtgatgtgggaat

SEQ ID NO: 163962 - DNA, 13 bp, Artificial Sequence
  Oligonucleotide for detection of SNP TSC0041170
attcccacatcac

SEQ ID NO: 163963 - DNA, 13 bp, Artificial Sequence
  Oligonucleotide for detection of SNP TSC0041170
gtgatgcgggaat

SEQ ID NO: 163964 - DNA, 13 bp, Artificial Sequence
  Oligonucleotide for detection of SNP TSC0041170
attcccgcatcac

SEQ ID NO: 163965 - DNA, 13 bp, Artificial Sequence
  Oligonucleotide for detection of SNP TSC0041174
agaaaaatttgaa

SEQ ID NO: 163966 - DNA, 13 bp, Artificial Sequence
  Oligonucleotide for detection of SNP TSC0041174
ttcaaatttttct

SEQ ID NO: 163967 - DNA, 13 bp, Artificial Sequence
  Oligonucleotide for detection of SNP TSC0041174
agaaaattttgaa

SEQ ID NO: 163968 - DNA, 13 bp, Artificial Sequence
  Oligonucleotide for detection of SNP TSC0041174
ttcaaaattttct

SEQ ID NO: 163969 - DNA, 13 bp, Artificial Sequence
  Oligonucleotide for detection of SNP TSC0041175
gtttgagtagtty

SEQ ID NO: 163970 - DNA, 13 bp, Artificial Sequence
  Oligonucleotide for detection of SNP TSC0041175
raactactcaaac

SEQ ID NO: 163971 - DNA, 13 bp, Artificial Sequence
  Oligonucleotide for detection of SNP TSC0041175
gtttgaatagtty

SEQ ID NO: 163972 - DNA, 13 bp, Artificial Sequence
  Oligonucleotide for detection of SNP TSC0041175
raactattcaaac

SEQ ID NO: 163973 - DNA, 13 bp, Artificial Sequence
  Oligonucleotide for detection of SNP TSC0008563
ggaattaagttgy

SEQ ID NO: 163974 - DNA, 13 bp, Artificial Sequence
  Oligonucleotide for detection of SNP TSC0008563
rcaacttaattcc

SEQ ID NO: 163975 - DNA, 13 bp, Artificial Sequence
  Oligonucleotide for detection of SNP TSC0008563
ggaattgagttgy

SEQ ID NO: 163976 - DNA, 13 bp, Artificial Sequence
  Oligonucleotide for detection of SNP TSC0008563
rcaactcaattcc

SEQ ID NO: 163977 - DNA, 13 bp, Artificial Sequence
  Oligonucleotide for detection of SNP TSC0008563
ggaattaagtcgy

SEQ ID NO: 163978 - DNA, 13 bp, Artificial Sequence
  Oligonucleotide for detection of SNP TSC0008563
rcgacttaattcc

SEQ ID NO: 163979 - DNA, 13 bp, Artificial Sequence
  Oligonucleotide for detection of SNP TSC0008563
ggaatcgagttgy

SEQ ID NO: 163980 - DNA, 13 bp, Artificial Sequence
  Oligonucleotide for detection of SNP TSC0008563
rcaactcgattcc

SEQ ID NO: 163981 - DNA, 13 bp, Artificial Sequence
  Oligonucleotide for detection of SNP TSC0008563
ggaattgagtcgy

SEQ ID NO: 163982 - DNA, 13 bp, Artificial Sequence
  Oligonucleotide for detection of SNP TSC0008563
rcgactcaattcc

SEQ ID NO: 163983 - DNA, 13 bp, Artificial Sequence
  Oligonucleotide for detection of SNP TSC0008563
ggaatcgagtcgy

SEQ ID NO: 163984 - DNA, 13 bp, Artificial Sequence
  Oligonucleotide for detection of SNP TSC0008563
rcgactcgattcc

SEQ ID NO: 163985 - DNA, 13 bp, Artificial Sequence
  Oligonucleotide for detection of SNP TSC0008563
gtggtttggttty

SEQ ID NO: 163986 - DNA, 13 bp, Artificial Sequence
  Oligonucleotide for detection of SNP TSC0008563
raaaccaaaccac

SEQ ID NO: 163987 - DNA, 13 bp, Artificial Sequence
  Oligonucleotide for detection of SNP TSC0008563
gcggtttggttty

SEQ ID NO: 163988 - DNA, 13 bp, Artificial Sequence
  Oligonucleotide for detection of SNP TSC0008563
raaaccaaaccgc

SEQ ID NO: 163989 - DNA, 13 bp, Artificial Sequence
  Oligonucleotide for detection of SNP TSC0008563
gtggttcggttty

SEQ ID NO: 163990 - DNA, 13 bp, Artificial Sequence
  Oligonucleotide for detection of SNP TSC0008563
raaaccgaaccac

SEQ ID NO: 163991 - DNA, 13 bp, Artificial Sequence
  Oligonucleotide for detection of SNP TSC0008563
gcggttcggttty

SEQ ID NO: 163992 - DNA, 13 bp, Artificial Sequence
  Oligonucleotide for detection of SNP TSC0008563
raaaccgaaccgc

SEQ ID NO: 163993 - DNA, 13 bp, Artificial Sequence
  Oligonucleotide for detection of SNP TSC0041177
ttttatttagtty

SEQ ID NO: 163994 - DNA, 13 bp, Artificial Sequence
  Oligonucleotide for detection of SNP TSC0041177
raactaaataaaa

SEQ ID NO: 163995 - DNA, 13 bp, Artificial Sequence
  Oligonucleotide for detection of SNP TSC0041177
gagttggataagg

SEQ ID NO: 163996 - DNA, 13 bp, Artificial Sequence
  Oligonucleotide for detection of SNP TSC0041177
ccttatccaactc

SEQ ID NO: 163997 - DNA, 13 bp, Artificial Sequence
  Oligonucleotide for detection of SNP TSC0041177
gagttgtataagg

SEQ ID NO: 163998 - DNA, 13 bp, Artificial Sequence
  Oligonucleotide for detection of SNP TSC0041177
ccttatacaactc

SEQ ID NO: 163999 - DNA, 13 bp, Artificial Sequence
  Oligonucleotide for detection of SNP TSC0041178
gtgttaaaagaaa

SEQ ID NO: 164000 - DNA, 13 bp, Artificial Sequence
  Oligonucleotide for detection of SNP TSC0041178
tttcttttaacac

SEQ ID NO: 164001 - DNA, 13 bp, Artificial Sequence
  Oligonucleotide for detection of SNP TSC0041178
gtgttagaagaaa

SEQ ID NO: 164002 - DNA, 13 bp, Artificial Sequence
  Oligonucleotide for detection of SNP TSC0041178
tttcttctaacac

SEQ ID NO: 164003 - DNA, 13 bp, Artificial Sequence
  Oligonucleotide for detection of SNP TSC0041179
tgtattatggttt

SEQ ID NO: 164004 - DNA, 13 bp, Artificial Sequence
  Oligonucleotide for detection of SNP TSC0041179
aaaccataataca

SEQ ID NO: 164005 - DNA, 13 bp, Artificial Sequence
  Oligonucleotide for detection of SNP TSC0041179
tgtattttggttt

SEQ ID NO: 164006 - DNA, 13 bp, Artificial Sequence
  Oligonucleotide for detection of SNP TSC0041179
aaaccaaaataca

SEQ ID NO: 164007 - DNA, 13 bp, Artificial Sequence
  Oligonucleotide for detection of SNP TSC0041179
aaattatagtata

SEQ ID NO: 164008 - DNA, 13 bp, Artificial Sequence
  Oligonucleotide for detection of SNP TSC0041179
tatactataattt

SEQ ID NO: 164009 - DNA, 13 bp, Artificial Sequence
  Oligonucleotide for detection of SNP TSC0041179
aaattagagtata

SEQ ID NO: 164010 - DNA, 13 bp, Artificial Sequence
  Oligonucleotide for detection of SNP TSC0041179
tatactctaattt

SEQ ID NO: 164011 - DNA, 13 bp, Artificial Sequence
  Oligonucleotide for detection of SNP TSC0041181
ttattatggaaat

SEQ ID NO: 164012 - DNA, 13 bp, Artificial Sequence
  Oligonucleotide for detection of SNP TSC0041181
atttccataataa

SEQ ID NO: 164013 - DNA, 13 bp, Artificial Sequence
  Oligonucleotide for detection of SNP TSC0041181
ttattacggaaat

SEQ ID NO: 164014 - DNA, 13 bp, Artificial Sequence
  Oligonucleotide for detection of SNP TSC0041181
atttccgtaataa

SEQ ID NO: 164015 - DNA, 13 bp, Artificial Sequence
  Oligonucleotide for detection of SNP TSC0041181
atttttgtggtgg

SEQ ID NO: 164016 - DNA, 13 bp, Artificial Sequence
  Oligonucleotide for detection of SNP TSC0041181
ccaccacaaaaat

SEQ ID NO: 164017 - DNA, 13 bp, Artificial Sequence
  Oligonucleotide for detection of SNP TSC0041181
atttttatggtgg

SEQ ID NO: 164018 - DNA, 13 bp, Artificial Sequence
  Oligonucleotide for detection of SNP TSC0041181
ccaccataaaaat

SEQ ID NO: 164019 - DNA, 13 bp, Artificial Sequence
  Oligonucleotide for detection of SNP TSC0041181
attttcgtggtgg

SEQ ID NO: 164020 - DNA, 13 bp, Artificial Sequence
  Oligonucleotide for detection of SNP TSC0041181
ccaccacgaaaat

SEQ ID NO: 164021 - DNA, 13 bp, Artificial Sequence
  Oligonucleotide for detection of SNP TSC0041182
tagtttagtgtty

SEQ ID NO: 164022 - DNA, 13 bp, Artificial Sequence
  Oligonucleotide for detection of SNP TSC0041182
raacactaaacta

SEQ ID NO: 164023 - DNA, 13 bp, Artificial Sequence
  Oligonucleotide for detection of SNP TSC0041182
tagttttgtgtty

SEQ ID NO: 164024 - DNA, 13 bp, Artificial Sequence
  Oligonucleotide for detection of SNP TSC0041182
raacacaaaacta

SEQ ID NO: 164025 - DNA, 13 bp, Artificial Sequence
  Oligonucleotide for detection of SNP TSC0041182
tagtttcgtgtty

SEQ ID NO: 164026 - DNA, 13 bp, Artificial Sequence
  Oligonucleotide for detection of SNP TSC0041182
raacacgaaacta

SEQ ID NO: 164027 - DNA, 13 bp, Artificial Sequence
  Oligonucleotide for detection of SNP TSC0041182
gaatattagatta

SEQ ID NO: 164028 - DNA, 13 bp, Artificial Sequence
  Oligonucleotide for detection of SNP TSC0041182
taatctaatattc

SEQ ID NO: 164029 - DNA, 13 bp, Artificial Sequence
  Oligonucleotide for detection of SNP TSC0041182
gaatatgagatta

SEQ ID NO: 164030 - DNA, 13 bp, Artificial Sequence
  Oligonucleotide for detection of SNP TSC0041182
taatctcatattc

SEQ ID NO: 164031 - DNA, 13 bp, Artificial Sequence
  Oligonucleotide for detection of SNP TSC0041182
gaatacgagatta

SEQ ID NO: 164032 - DNA, 13 bp, Artificial Sequence
  Oligonucleotide for detection of SNP TSC0041182
taatctcgtattc

SEQ ID NO: 164033 - DNA, 13 bp, Artificial Sequence
  Oligonucleotide for detection of SNP TSC0041183
tttgttattgatt

SEQ ID NO: 164034 - DNA, 13 bp, Artificial Sequence
  Oligonucleotide for detection of SNP TSC0041183
aatcaataacaaa

SEQ ID NO: 164035 - DNA, 13 bp, Artificial Sequence
  Oligonucleotide for detection of SNP TSC0041184
attgatagtaaaa

SEQ ID NO: 164036 - DNA, 13 bp, Artificial Sequence
  Oligonucleotide for detection of SNP TSC0041184
ttttactatcaat

SEQ ID NO: 164037 - DNA, 13 bp, Artificial Sequence
  Oligonucleotide for detection of SNP TSC0041184
attgatggtaaaa

SEQ ID NO: 164038 - DNA, 13 bp, Artificial Sequence
  Oligonucleotide for detection of SNP TSC0041184
ttttaccatcaat

SEQ ID NO: 164039 - DNA, 13 bp, Artificial Sequence
  Oligonucleotide for detection of SNP TSC0041187
agggtttgaggaa

SEQ ID NO: 164040 - DNA, 13 bp, Artificial Sequence
  Oligonucleotide for detection of SNP TSC0041187
ttcctcaaaccct

SEQ ID NO: 164041 - DNA, 13 bp, Artificial Sequence
  Oligonucleotide for detection of SNP TSC0041187
agggttcgaggaa

SEQ ID NO: 164042 - DNA, 13 bp, Artificial Sequence
  Oligonucleotide for detection of SNP TSC0041187
ttcctcgaaccct

SEQ ID NO: 164043 - DNA, 13 bp, Artificial Sequence
  Oligonucleotide for detection of SNP TSC0005349
ttatattaaattt

SEQ ID NO: 164044 - DNA, 13 bp, Artificial Sequence
  Oligonucleotide for detection of SNP TSC0005349
aaatttaatataa

SEQ ID NO: 164045 - DNA, 13 bp, Artificial Sequence
  Oligonucleotide for detection of SNP TSC0005349
aagtttaatgtgg

SEQ ID NO: 164046 - DNA, 13 bp, Artificial Sequence
  Oligonucleotide for detection of SNP TSC0005349
ccacattaaactt

SEQ ID NO: 164047 - DNA, 13 bp, Artificial Sequence
  Oligonucleotide for detection of SNP TSC0005349
aagttttatgtgg

SEQ ID NO: 164048 - DNA, 13 bp, Artificial Sequence
  Oligonucleotide for detection of SNP TSC0005349
ccacataaaactt

SEQ ID NO: 164049 - DNA, 13 bp, Artificial Sequence
  Oligonucleotide for detection of SNP TSC0005350
agaaaatggggaa

SEQ ID NO: 164050 - DNA, 13 bp, Artificial Sequence
  Oligonucleotide for detection of SNP TSC0005350
ttccccattttct

SEQ ID NO: 164051 - DNA, 13 bp, Artificial Sequence
  Oligonucleotide for detection of SNP TSC0005350
agaaaacggggaa

SEQ ID NO: 164052 - DNA, 13 bp, Artificial Sequence
  Oligonucleotide for detection of SNP TSC0005350
ttccccgttttct

SEQ ID NO: 164053 - DNA, 13 bp, Artificial Sequence
  Oligonucleotide for detection of SNP TSC0041188
aaataggtggttt

SEQ ID NO: 164054 - DNA, 13 bp, Artificial Sequence
  Oligonucleotide for detection of SNP TSC0041188
aaaccacctattt

SEQ ID NO: 164055 - DNA, 13 bp, Artificial Sequence
  Oligonucleotide for detection of SNP TSC0041188
aaatagatggttt

SEQ ID NO: 164056 - DNA, 13 bp, Artificial Sequence
  Oligonucleotide for detection of SNP TSC0041188
aaaccatctattt

SEQ ID NO: 164057 - DNA, 13 bp, Artificial Sequence
  Oligonucleotide for detection of SNP TSC0041189
ttatggagtaagy

SEQ ID NO: 164058 - DNA, 13 bp, Artificial Sequence
  Oligonucleotide for detection of SNP TSC0041189
rcttactccataa

SEQ ID NO: 164059 - DNA, 13 bp, Artificial Sequence
  Oligonucleotide for detection of SNP TSC0041189
ttatggggtaagy

SEQ ID NO: 164060 - DNA, 13 bp, Artificial Sequence
  Oligonucleotide for detection of SNP TSC0041189
rcttaccccataa

SEQ ID NO: 164061 - DNA, 13 bp, Artificial Sequence
  Oligonucleotide for detection of SNP TSC0041190
taaatggtgaata

SEQ ID NO: 164062 - DNA, 13 bp, Artificial Sequence
  Oligonucleotide for detection of SNP TSC0041190
tattcaccattta

SEQ ID NO: 164063 - DNA, 13 bp, Artificial Sequence
  Oligonucleotide for detection of SNP TSC0041190
taaatgatgaata

SEQ ID NO: 164064 - DNA, 13 bp, Artificial Sequence
  Oligonucleotide for detection of SNP TSC0041190
tattcatcattta

SEQ ID NO: 164065 - DNA, 13 bp, Artificial Sequence
  Oligonucleotide for detection of SNP TSC0041192
tggtttgtattty

SEQ ID NO: 164066 - DNA, 13 bp, Artificial Sequence
  Oligonucleotide for detection of SNP TSC0041192
raaatacaaacca

SEQ ID NO: 164067 - DNA, 13 bp, Artificial Sequence
  Oligonucleotide for detection of SNP TSC0041192
tggtttatattty

SEQ ID NO: 164068 - DNA, 13 bp, Artificial Sequence
  Oligonucleotide for detection of SNP TSC0041192
raaatataaacca

SEQ ID NO: 164069 - DNA, 13 bp, Artificial Sequence
  Oligonucleotide for detection of SNP TSC0041195
agattttttttga

SEQ ID NO: 164070 - DNA, 13 bp, Artificial Sequence
  Oligonucleotide for detection of SNP TSC0041195
tcaaaaaaaatct

SEQ ID NO: 164071 - DNA, 13 bp, Artificial Sequence
  Oligonucleotide for detection of SNP TSC0041195
agatttgttttga

SEQ ID NO: 164072 - DNA, 13 bp, Artificial Sequence
  Oligonucleotide for detection of SNP TSC0041195
tcaaaacaaatct

SEQ ID NO: 164073 - DNA, 13 bp, Artificial Sequence
  Oligonucleotide for detection of SNP TSC0041195
ttaaaaaaagttt

SEQ ID NO: 164074 - DNA, 13 bp, Artificial Sequence
  Oligonucleotide for detection of SNP TSC0041195
aaactttttttaa

SEQ ID NO: 164075 - DNA, 13 bp, Artificial Sequence
  Oligonucleotide for detection of SNP TSC0041195
ttaaaataagttt

SEQ ID NO: 164076 - DNA, 13 bp, Artificial Sequence
  Oligonucleotide for detection of SNP TSC0041195
aaacttattttaa

SEQ ID NO: 164077 - DNA, 13 bp, Artificial Sequence
  Oligonucleotide for detection of SNP TSC0041196
ggaataattaagy

SEQ ID NO: 164078 - DNA, 13 bp, Artificial Sequence
  Oligonucleotide for detection of SNP TSC0041196
rcttaattattcc

SEQ ID NO: 164079 - DNA, 13 bp, Artificial Sequence
  Oligonucleotide for detection of SNP TSC0041196
ggaatagttaagy

SEQ ID NO: 164080 - DNA, 13 bp, Artificial Sequence
  Oligonucleotide for detection of SNP TSC0041196
rcttaactattcc

SEQ ID NO: 164081 - DNA, 13 bp, Artificial Sequence
  Oligonucleotide for detection of SNP TSC0041197
tttaagtgcgttt

SEQ ID NO: 164082 - DNA, 13 bp, Artificial Sequence
  Oligonucleotide for detection of SNP TSC0041197
aaacgcacttaaa

SEQ ID NO: 164083 - DNA, 13 bp, Artificial Sequence
  Oligonucleotide for detection of SNP TSC0041197
tttaagcgcgttt

SEQ ID NO: 164084 - DNA, 13 bp, Artificial Sequence
  Oligonucleotide for detection of SNP TSC0041197
aaacgcgcttaaa

SEQ ID NO: 164085 - DNA, 13 bp, Artificial Sequence
  Oligonucleotide for detection of SNP TSC0041197
agatgtgtttagg

SEQ ID NO: 164086 - DNA, 13 bp, Artificial Sequence
  Oligonucleotide for detection of SNP TSC0041197
cctaaacacatct

SEQ ID NO: 164087 - DNA, 13 bp, Artificial Sequence
  Oligonucleotide for detection of SNP TSC0041197
agatgtatttagg

SEQ ID NO: 164088 - DNA, 13 bp, Artificial Sequence
  Oligonucleotide for detection of SNP TSC0041197
cctaaatacatct

SEQ ID NO: 164089 - DNA, 13 bp, Artificial Sequence
  Oligonucleotide for detection of SNP TSC0041197
agacgtgtttagg

SEQ ID NO: 164090 - DNA, 13 bp, Artificial Sequence
  Oligonucleotide for detection of SNP TSC0041197
cctaaacacgtct

SEQ ID NO: 164091 - DNA, 13 bp, Artificial Sequence
  Oligonucleotide for detection of SNP TSC0041197
agacgtatttagg

SEQ ID NO: 164092 - DNA, 13 bp, Artificial Sequence
  Oligonucleotide for detection of SNP TSC0041197
cctaaatacgtct

SEQ ID NO: 164093 - DNA, 13 bp, Artificial Sequence
  Oligonucleotide for detection of SNP TSC0041197
agatgcgtttagg

SEQ ID NO: 164094 - DNA, 13 bp, Artificial Sequence
  Oligonucleotide for detection of SNP TSC0041197
cctaaacgcatct

SEQ ID NO: 164095 - DNA, 13 bp, Artificial Sequence
  Oligonucleotide for detection of SNP TSC0041197
agacgcgtttagg

SEQ ID NO: 164096 - DNA, 13 bp, Artificial Sequence
  Oligonucleotide for detection of SNP TSC0041197
cctaaacgcgtct

SEQ ID NO: 164097 - DNA, 13 bp, Artificial Sequence
  Oligonucleotide for detection of SNP TSC0041198
ttaatagtaaagt

SEQ ID NO: 164098 - DNA, 13 bp, Artificial Sequence
  Oligonucleotide for detection of SNP TSC0041198
actttactattaa

SEQ ID NO: 164099 - DNA, 13 bp, Artificial Sequence
  Oligonucleotide for detection of SNP TSC0041198
ttaataataaagt

SEQ ID NO: 164100 - DNA, 13 bp, Artificial Sequence
  Oligonucleotide for detection of SNP TSC0041198
actttattattaa

SEQ ID NO: 164101 - DNA, 13 bp, Artificial Sequence
  Oligonucleotide for detection of SNP TSC0041199
agataaaggatag

SEQ ID NO: 164102 - DNA, 13 bp, Artificial Sequence
  Oligonucleotide for detection of SNP TSC0041199
ctatcctttatct

SEQ ID NO: 164103 - DNA, 13 bp, Artificial Sequence
  Oligonucleotide for detection of SNP TSC0041199
agataagggatag

SEQ ID NO: 164104 - DNA, 13 bp, Artificial Sequence
  Oligonucleotide for detection of SNP TSC0041199
ctatcccttatct

SEQ ID NO: 164105 - DNA, 13 bp, Artificial Sequence
  Oligonucleotide for detection of SNP TSC0041207
atttgagttgtty

SEQ ID NO: 164106 - DNA, 13 bp, Artificial Sequence
  Oligonucleotide for detection of SNP TSC0041207
raacaactcaaat

SEQ ID NO: 164107 - DNA, 13 bp, Artificial Sequence
  Oligonucleotide for detection of SNP TSC0041207
atttgaattgtty

SEQ ID NO: 164108 - DNA, 13 bp, Artificial Sequence
  Oligonucleotide for detection of SNP TSC0041207
raacaattcaaat

SEQ ID NO: 164109 - DNA, 13 bp, Artificial Sequence
  Oligonucleotide for detection of SNP TSC0041210
ttaattggttaay

SEQ ID NO: 164110 - DNA, 13 bp, Artificial Sequence
  Oligonucleotide for detection of SNP TSC0041210
rttaaccaattaa

SEQ ID NO: 164111 - DNA, 13 bp, Artificial Sequence
  Oligonucleotide for detection of SNP TSC0041210
ttaattagttaay

SEQ ID NO: 164112 - DNA, 13 bp, Artificial Sequence
  Oligonucleotide for detection of SNP TSC0041210
rttaactaattaa

SEQ ID NO: 164113 - DNA, 13 bp, Artificial Sequence
  Oligonucleotide for detection of SNP TSC0041212
gtagtttgtagty

SEQ ID NO: 164114 - DNA, 13 bp, Artificial Sequence
  Oligonucleotide for detection of SNP TSC0041212
ractacaaactac

SEQ ID NO: 164115 - DNA, 13 bp, Artificial Sequence
  Oligonucleotide for detection of SNP TSC0041212
gtagttcgtagty

SEQ ID NO: 164116 - DNA, 13 bp, Artificial Sequence
  Oligonucleotide for detection of SNP TSC0041212
ractacgaactac

SEQ ID NO: 164117 - DNA, 13 bp, Artificial Sequence
  Oligonucleotide for detection of SNP TSC0041212
gattgtggattgy

SEQ ID NO: 164118 - DNA, 13 bp, Artificial Sequence
  Oligonucleotide for detection of SNP TSC0041212
rcaatccacaatc

SEQ ID NO: 164119 - DNA, 13 bp, Artificial Sequence
  Oligonucleotide for detection of SNP TSC0041212
gattgtagattgy

SEQ ID NO: 164120 - DNA, 13 bp, Artificial Sequence
  Oligonucleotide for detection of SNP TSC0041212
rcaatctacaatc

SEQ ID NO: 164121 - DNA, 13 bp, Artificial Sequence
  Oligonucleotide for detection of SNP TSC0041212
gattgcggattgy

SEQ ID NO: 164122 - DNA, 13 bp, Artificial Sequence
  Oligonucleotide for detection of SNP TSC0041212
rcaatccgcaatc

SEQ ID NO: 164123 - DNA, 13 bp, Artificial Sequence
  Oligonucleotide for detection of SNP TSC0041214
gtattaggttaga

SEQ ID NO: 164124 - DNA, 13 bp, Artificial Sequence
  Oligonucleotide for detection of SNP TSC0041214
tctaacctaatac

SEQ ID NO: 164125 - DNA, 13 bp, Artificial Sequence
  Oligonucleotide for detection of SNP TSC0041214
gtattaagttaga

SEQ ID NO: 164126 - DNA, 13 bp, Artificial Sequence
  Oligonucleotide for detection of SNP TSC0041214
tctaacttaatac

SEQ ID NO: 164127 - DNA, 13 bp, Artificial Sequence
  Oligonucleotide for detection of SNP TSC0041215
tatatatagaaag

SEQ ID NO: 164128 - DNA, 13 bp, Artificial Sequence
  Oligonucleotide for detection of SNP TSC0041215
ctttctatatata

SEQ ID NO: 164129 - DNA, 13 bp, Artificial Sequence
  Oligonucleotide for detection of SNP TSC0041215
tatatagagaaag

SEQ ID NO: 164130 - DNA, 13 bp, Artificial Sequence
  Oligonucleotide for detection of SNP TSC0041215
ctttctctatata

SEQ ID NO: 164131 - DNA, 13 bp, Artificial Sequence
  Oligonucleotide for detection of SNP TSC0041216
gtttatttgttty

SEQ ID NO: 164132 - DNA, 13 bp, Artificial Sequence
  Oligonucleotide for detection of SNP TSC0041216
raaacaaataaac

SEQ ID NO: 164133 - DNA, 13 bp, Artificial Sequence
  Oligonucleotide for detection of SNP TSC0041216
gaagtatgtggay

SEQ ID NO: 164134 - DNA, 13 bp, Artificial Sequence
  Oligonucleotide for detection of SNP TSC0041216
rtccacatacttc

SEQ ID NO: 164135 - DNA, 13 bp, Artificial Sequence
  Oligonucleotide for detection of SNP TSC0041216
gaagtaagtggay

SEQ ID NO: 164136 - DNA, 13 bp, Artificial Sequence
  Oligonucleotide for detection of SNP TSC0041216
rtccacttacttc

SEQ ID NO: 164137 - DNA, 13 bp, Artificial Sequence
  Oligonucleotide for detection of SNP TSC0041217
agattttgatagt

SEQ ID NO: 164138 - DNA, 13 bp, Artificial Sequence
  Oligonucleotide for detection of SNP TSC0041217
actatcaaaatct

SEQ ID NO: 164139 - DNA, 13 bp, Artificial Sequence
  Oligonucleotide for detection of SNP TSC0041217
agatttcgatagt

SEQ ID NO: 164140 - DNA, 13 bp, Artificial Sequence
  Oligonucleotide for detection of SNP TSC0041217
actatcgaaatct

SEQ ID NO: 164141 - DNA, 13 bp, Artificial Sequence
  Oligonucleotide for detection of SNP TSC0041217
attgttggaattt

SEQ ID NO: 164142 - DNA, 13 bp, Artificial Sequence
  Oligonucleotide for detection of SNP TSC0041217
aaattccaacaat

SEQ ID NO: 164143 - DNA, 13 bp, Artificial Sequence
  Oligonucleotide for detection of SNP TSC0041217
attgtcggaattt

SEQ ID NO: 164144 - DNA, 13 bp, Artificial Sequence
  Oligonucleotide for detection of SNP TSC0041217
aaattccgacaat

SEQ ID NO: 164145 - DNA, 13 bp, Artificial Sequence
  Oligonucleotide for detection of SNP TSC0041218
gattttagaaaga

SEQ ID NO: 164146 - DNA, 13 bp, Artificial Sequence
  Oligonucleotide for detection of SNP TSC0041218
tctttctaaaatc

SEQ ID NO: 164147 - DNA, 13 bp, Artificial Sequence
  Oligonucleotide for detection of SNP TSC0041218
gattttggaaaga

SEQ ID NO: 164148 - DNA, 13 bp, Artificial Sequence
  Oligonucleotide for detection of SNP TSC0041218
tctttccaaaatc

SEQ ID NO: 164149 - DNA, 13 bp, Artificial Sequence
  Oligonucleotide for detection of SNP TSC0041218
gatttcggaaaga

SEQ ID NO: 164150 - DNA, 13 bp, Artificial Sequence
  Oligonucleotide for detection of SNP TSC0041218
tctttccgaaatc

SEQ ID NO: 164151 - DNA, 13 bp, Artificial Sequence
  Oligonucleotide for detection of SNP TSC0041218
tttttttgaagty

SEQ ID NO: 164152 - DNA, 13 bp, Artificial Sequence
  Oligonucleotide for detection of SNP TSC0041218
racttcaaaaaaa

SEQ ID NO: 164153 - DNA, 13 bp, Artificial Sequence
  Oligonucleotide for detection of SNP TSC0041218
ttttttcgaagty

SEQ ID NO: 164154 - DNA, 13 bp, Artificial Sequence
  Oligonucleotide for detection of SNP TSC0041218
racttcgaaaaaa

SEQ ID NO: 164155 - DNA, 13 bp, Artificial Sequence
  Oligonucleotide for detection of SNP TSC0041220
attgtggaagttt

SEQ ID NO: 164156 - DNA, 13 bp, Artificial Sequence
  Oligonucleotide for detection of SNP TSC0041220
aaacttccacaat

SEQ ID NO: 164157 - DNA, 13 bp, Artificial Sequence
  Oligonucleotide for detection of SNP TSC0041220
attgtgaaagttt

SEQ ID NO: 164158 - DNA, 13 bp, Artificial Sequence
  Oligonucleotide for detection of SNP TSC0041220
aaactttcacaat

SEQ ID NO: 164159 - DNA, 13 bp, Artificial Sequence
  Oligonucleotide for detection of SNP TSC0041222
tgaggtattgata

SEQ ID NO: 164160 - DNA, 13 bp, Artificial Sequence
  Oligonucleotide for detection of SNP TSC0041222
tatcaatacctca

SEQ ID NO: 164161 - DNA, 13 bp, Artificial Sequence
  Oligonucleotide for detection of SNP TSC0041222
tgaggttttgata

SEQ ID NO: 164162 - DNA, 13 bp, Artificial Sequence
  Oligonucleotide for detection of SNP TSC0041222
tatcaaaacctca

SEQ ID NO: 164163 - DNA, 13 bp, Artificial Sequence
  Oligonucleotide for detection of SNP TSC0041222
cgaggtattgata

SEQ ID NO: 164164 - DNA, 13 bp, Artificial Sequence
  Oligonucleotide for detection of SNP TSC0041222
tatcaatacctcg

SEQ ID NO: 164165 - DNA, 13 bp, Artificial Sequence
  Oligonucleotide for detection of SNP TSC0041222
cgaggttttgata

SEQ ID NO: 164166 - DNA, 13 bp, Artificial Sequence
  Oligonucleotide for detection of SNP TSC0041222
tatcaaaacctcg

SEQ ID NO: 164167 - DNA, 13 bp, Artificial Sequence
  Oligonucleotide for detection of SNP TSC0041222
tgaggtatcgata

SEQ ID NO: 164168 - DNA, 13 bp, Artificial Sequence
  Oligonucleotide for detection of SNP TSC0041222
tatcgatacctca

SEQ ID NO: 164169 - DNA, 13 bp, Artificial Sequence
  Oligonucleotide for detection of SNP TSC0041222
tgaggtttcgata

SEQ ID NO: 164170 - DNA, 13 bp, Artificial Sequence
  Oligonucleotide for detection of SNP TSC0041222
tatcgaaacctca

SEQ ID NO: 164171 - DNA, 13 bp, Artificial Sequence
  Oligonucleotide for detection of SNP TSC0041222
cgaggtatcgata

SEQ ID NO: 164172 - DNA, 13 bp, Artificial Sequence
  Oligonucleotide for detection of SNP TSC0041222
tatcgatacctcg

SEQ ID NO: 164173 - DNA, 13 bp, Artificial Sequence
  Oligonucleotide for detection of SNP TSC0041222
cgaggtttcgata

SEQ ID NO: 164174 - DNA, 13 bp, Artificial Sequence
  Oligonucleotide for detection of SNP TSC0041222
tatcgaaacctcg

SEQ ID NO: 164175 - DNA, 13 bp, Artificial Sequence
  Oligonucleotide for detection of SNP TSC0041222
tgttggtgttttg

SEQ ID NO: 164176 - DNA, 13 bp, Artificial Sequence
  Oligonucleotide for detection of SNP TSC0041222
caaaacaccaaca

SEQ ID NO: 164177 - DNA, 13 bp, Artificial Sequence
  Oligonucleotide for detection of SNP TSC0041222
tgttggggttttg

SEQ ID NO: 164178 - DNA, 13 bp, Artificial Sequence
  Oligonucleotide for detection of SNP TSC0041222
caaaaccccaaca

SEQ ID NO: 164179 - DNA, 13 bp, Artificial Sequence
  Oligonucleotide for detection of SNP TSC0041222
tgtcggtgttttg

SEQ ID NO: 164180 - DNA, 13 bp, Artificial Sequence
  Oligonucleotide for detection of SNP TSC0041222
caaaacaccgaca

SEQ ID NO: 164181 - DNA, 13 bp, Artificial Sequence
  Oligonucleotide for detection of SNP TSC0041222
tgtcggggttttg

SEQ ID NO: 164182 - DNA, 13 bp, Artificial Sequence
  Oligonucleotide for detection of SNP TSC0041222
caaaaccccgaca

SEQ ID NO: 164183 - DNA, 13 bp, Artificial Sequence
  Oligonucleotide for detection of SNP TSC0041222
tgttggtgtttcg

SEQ ID NO: 164184 - DNA, 13 bp, Artificial Sequence
  Oligonucleotide for detection of SNP TSC0041222
cgaaacaccaaca

SEQ ID NO: 164185 - DNA, 13 bp, Artificial Sequence
  Oligonucleotide for detection of SNP TSC0041222
tgttggggtttcg

SEQ ID NO: 164186 - DNA, 13 bp, Artificial Sequence
  Oligonucleotide for detection of SNP TSC0041222
cgaaaccccaaca

SEQ ID NO: 164187 - DNA, 13 bp, Artificial Sequence
  Oligonucleotide for detection of SNP TSC0041222
tgtcggtgtttcg

SEQ ID NO: 164188 - DNA, 13 bp, Artificial Sequence
  Oligonucleotide for detection of SNP TSC0041222
cgaaacaccgaca

SEQ ID NO: 164189 - DNA, 13 bp, Artificial Sequence
  Oligonucleotide for detection of SNP TSC0041222
tgtcggggtttcg

SEQ ID NO: 164190 - DNA, 13 bp, Artificial Sequence
  Oligonucleotide for detection of SNP TSC0041222
cgaaaccccgaca

SEQ ID NO: 164191 - DNA, 13 bp, Artificial Sequence
  Oligonucleotide for detection of SNP TSC0041223
atttttgagttay

SEQ ID NO: 164192 - DNA, 13 bp, Artificial Sequence
  Oligonucleotide for detection of SNP TSC0041223
rtaactcaaaaat

SEQ ID NO: 164193 - DNA, 13 bp, Artificial Sequence
  Oligonucleotide for detection of SNP TSC0041223
gtaattaaaaaat

SEQ ID NO: 164194 - DNA, 13 bp, Artificial Sequence
  Oligonucleotide for detection of SNP TSC0041223
attttttaattac

SEQ ID NO: 164195 - DNA, 13 bp, Artificial Sequence
  Oligonucleotide for detection of SNP TSC0041223
gtaatttaaaaat

SEQ ID NO: 164196 - DNA, 13 bp, Artificial Sequence
  Oligonucleotide for detection of SNP TSC0041223
atttttaaattac

SEQ ID NO: 164197 - DNA, 13 bp, Artificial Sequence
  Oligonucleotide for detection of SNP TSC0041225
gttaggtagttga

SEQ ID NO: 164198 - DNA, 13 bp, Artificial Sequence
  Oligonucleotide for detection of SNP TSC0041225
tcaactacctaac

SEQ ID NO: 164199 - DNA, 13 bp, Artificial Sequence
  Oligonucleotide for detection of SNP TSC0041225
gttagggagttga

SEQ ID NO: 164200 - DNA, 13 bp, Artificial Sequence
  Oligonucleotide for detection of SNP TSC0041225
tcaactccctaac

SEQ ID NO: 164201 - DNA, 13 bp, Artificial Sequence
  Oligonucleotide for detection of SNP TSC0041225
ttagttatttagy

SEQ ID NO: 164202 - DNA, 13 bp, Artificial Sequence
  Oligonucleotide for detection of SNP TSC0041225
rctaaataactaa

SEQ ID NO: 164203 - DNA, 13 bp, Artificial Sequence
  Oligonucleotide for detection of SNP TSC0041225
ttagttttttagy

SEQ ID NO: 164204 - DNA, 13 bp, Artificial Sequence
  Oligonucleotide for detection of SNP TSC0041225
rctaaaaaactaa

SEQ ID NO: 164205 - DNA, 13 bp, Artificial Sequence
  Oligonucleotide for detection of SNP TSC0041227
aataattagatat

SEQ ID NO: 164206 - DNA, 13 bp, Artificial Sequence
  Oligonucleotide for detection of SNP TSC0041227
atatctaattatt

SEQ ID NO: 164207 - DNA, 13 bp, Artificial Sequence
  Oligonucleotide for detection of SNP TSC0041227
aataatgagatat

SEQ ID NO: 164208 - DNA, 13 bp, Artificial Sequence
  Oligonucleotide for detection of SNP TSC0041227
atatctcattatt

SEQ ID NO: 164209 - DNA, 13 bp, Artificial Sequence
  Oligonucleotide for detection of SNP TSC0041227
atattttattgtt

SEQ ID NO: 164210 - DNA, 13 bp, Artificial Sequence
  Oligonucleotide for detection of SNP TSC0041227
aacaataaaatat

SEQ ID NO: 164211 - DNA, 13 bp, Artificial Sequence
  Oligonucleotide for detection of SNP TSC0041228
atgataagatttt

SEQ ID NO: 164212 - DNA, 13 bp, Artificial Sequence
  Oligonucleotide for detection of SNP TSC0041228
aaaatcttatcat

SEQ ID NO: 164213 - DNA, 13 bp, Artificial Sequence
  Oligonucleotide for detection of SNP TSC0041229
taagatgtgtttg

SEQ ID NO: 164214 - DNA, 13 bp, Artificial Sequence
  Oligonucleotide for detection of SNP TSC0041229
caaacacatctta

SEQ ID NO: 164215 - DNA, 13 bp, Artificial Sequence
  Oligonucleotide for detection of SNP TSC0041229
taagatatgtttg

SEQ ID NO: 164216 - DNA, 13 bp, Artificial Sequence
  Oligonucleotide for detection of SNP TSC0041229
caaacatatctta

SEQ ID NO: 164217 - DNA, 13 bp, Artificial Sequence
  Oligonucleotide for detection of SNP TSC0041232
gtagttttgtgaa

SEQ ID NO: 164218 - DNA, 13 bp, Artificial Sequence
  Oligonucleotide for detection of SNP TSC0041232
ttcacaaaactac

SEQ ID NO: 164219 - DNA, 13 bp, Artificial Sequence
  Oligonucleotide for detection of SNP TSC0041232
gtagttgtgtgaa

SEQ ID NO: 164220 - DNA, 13 bp, Artificial Sequence
  Oligonucleotide for detection of SNP TSC0041232
ttcacacaactac

SEQ ID NO: 164221 - DNA, 13 bp, Artificial Sequence
  Oligonucleotide for detection of SNP TSC0041232
gtagtcgtgtgaa

SEQ ID NO: 164222 - DNA, 13 bp, Artificial Sequence
  Oligonucleotide for detection of SNP TSC0041232
ttcacacgactac

SEQ ID NO: 164223 - DNA, 13 bp, Artificial Sequence
  Oligonucleotide for detection of SNP TSC0041232
tttataagattgy

SEQ ID NO: 164224 - DNA, 13 bp, Artificial Sequence
  Oligonucleotide for detection of SNP TSC0041232
rcaatcttataaa

SEQ ID NO: 164225 - DNA, 13 bp, Artificial Sequence
  Oligonucleotide for detection of SNP TSC0041233
ataaatggggaaa

SEQ ID NO: 164226 - DNA, 13 bp, Artificial Sequence
  Oligonucleotide for detection of SNP TSC0041233
tttccccatttat

SEQ ID NO: 164227 - DNA, 13 bp, Artificial Sequence
  Oligonucleotide for detection of SNP TSC0041233
ataaatagggaaa

SEQ ID NO: 164228 - DNA, 13 bp, Artificial Sequence
  Oligonucleotide for detection of SNP TSC0041233
tttccctatttat

SEQ ID NO: 164229 - DNA, 13 bp, Artificial Sequence
  Oligonucleotide for detection of SNP TSC0041234
ttaaatgaataaa

SEQ ID NO: 164230 - DNA, 13 bp, Artificial Sequence
  Oligonucleotide for detection of SNP TSC0041234
tttattcatttaa

SEQ ID NO: 164231 - DNA, 13 bp, Artificial Sequence
  Oligonucleotide for detection of SNP TSC0041234
ttaaataaataaa

SEQ ID NO: 164232 - DNA, 13 bp, Artificial Sequence
  Oligonucleotide for detection of SNP TSC0041234
tttatttatttaa

SEQ ID NO: 164233 - DNA, 13 bp, Artificial Sequence
  Oligonucleotide for detection of SNP TSC0041235
ttataggtatgtt

SEQ ID NO: 164234 - DNA, 13 bp, Artificial Sequence
  Oligonucleotide for detection of SNP TSC0041235
aacatacctataa

SEQ ID NO: 164235 - DNA, 13 bp, Artificial Sequence
  Oligonucleotide for detection of SNP TSC0041235
ttatagatatgtt

SEQ ID NO: 164236 - DNA, 13 bp, Artificial Sequence
  Oligonucleotide for detection of SNP TSC0041235
aacatatctataa

SEQ ID NO: 164237 - DNA, 13 bp, Artificial Sequence
  Oligonucleotide for detection of SNP TSC0041236
atgtagggtatta

SEQ ID NO: 164238 - DNA, 13 bp, Artificial Sequence
  Oligonucleotide for detection of SNP TSC0041236
taataccctacat

SEQ ID NO: 164239 - DNA, 13 bp, Artificial Sequence
  Oligonucleotide for detection of SNP TSC0041236
atgtagagtatta

SEQ ID NO: 164240 - DNA, 13 bp, Artificial Sequence
  Oligonucleotide for detection of SNP TSC0041236
taatactctacat

SEQ ID NO: 164241 - DNA, 13 bp, Artificial Sequence
  Oligonucleotide for detection of SNP TSC0041237
ggtggtatgtaty

SEQ ID NO: 164242 - DNA, 13 bp, Artificial Sequence
  Oligonucleotide for detection of SNP TSC0041237
ratacataccacc

SEQ ID NO: 164243 - DNA, 13 bp, Artificial Sequence
  Oligonucleotide for detection of SNP TSC0041237
ggtggtgtgtaty

SEQ ID NO: 164244 - DNA, 13 bp, Artificial Sequence
  Oligonucleotide for detection of SNP TSC0041237
ratacacaccacc

SEQ ID NO: 164245 - DNA, 13 bp, Artificial Sequence
  Oligonucleotide for detection of SNP TSC0041237
ggtggcgtgtaty

SEQ ID NO: 164246 - DNA, 13 bp, Artificial Sequence
  Oligonucleotide for detection of SNP TSC0041237
ratacacgccacc

SEQ ID NO: 164247 - DNA, 13 bp, Artificial Sequence
  Oligonucleotide for detection of SNP TSC0041237
ggtatatgttaty

SEQ ID NO: 164248 - DNA, 13 bp, Artificial Sequence
  Oligonucleotide for detection of SNP TSC0041237
rataacatatacc

SEQ ID NO: 164249 - DNA, 13 bp, Artificial Sequence
  Oligonucleotide for detection of SNP TSC0041237
ggtatacgttaty

SEQ ID NO: 164250 - DNA, 13 bp, Artificial Sequence
  Oligonucleotide for detection of SNP TSC0041237
rataacgtatacc

SEQ ID NO: 164251 - DNA, 13 bp, Artificial Sequence
  Oligonucleotide for detection of SNP TSC0041238
ttttttgtaagag

SEQ ID NO: 164252 - DNA, 13 bp, Artificial Sequence
  Oligonucleotide for detection of SNP TSC0041238
ctcttacaaaaaa

SEQ ID NO: 164253 - DNA, 13 bp, Artificial Sequence
  Oligonucleotide for detection of SNP TSC0041238
tttttcgtaagag

SEQ ID NO: 164254 - DNA, 13 bp, Artificial Sequence
  Oligonucleotide for detection of SNP TSC0041238
ctcttacgaaaaa

SEQ ID NO: 164255 - DNA, 13 bp, Artificial Sequence
  Oligonucleotide for detection of SNP TSC0041239
ttttatagttaaa

SEQ ID NO: 164256 - DNA, 13 bp, Artificial Sequence
  Oligonucleotide for detection of SNP TSC0041239
tttaactataaaa

SEQ ID NO: 164257 - DNA, 13 bp, Artificial Sequence
  Oligonucleotide for detection of SNP TSC0041239
ttttatggttaaa

SEQ ID NO: 164258 - DNA, 13 bp, Artificial Sequence
  Oligonucleotide for detection of SNP TSC0041239
tttaaccataaaa

SEQ ID NO: 164259 - DNA, 13 bp, Artificial Sequence
  Oligonucleotide for detection of SNP TSC0041239
ttttacggttaaa

SEQ ID NO: 164260 - DNA, 13 bp, Artificial Sequence
  Oligonucleotide for detection of SNP TSC0041239
tttaaccgtaaaa

SEQ ID NO: 164261 - DNA, 13 bp, Artificial Sequence
  Oligonucleotide for detection of SNP TSC0041239
tttagttgtgaaa

SEQ ID NO: 164262 - DNA, 13 bp, Artificial Sequence
  Oligonucleotide for detection of SNP TSC0041239
tttcacaactaaa

SEQ ID NO: 164263 - DNA, 13 bp, Artificial Sequence
  Oligonucleotide for detection of SNP TSC0041239
tttagtcgtgaaa

SEQ ID NO: 164264 - DNA, 13 bp, Artificial Sequence
  Oligonucleotide for detection of SNP TSC0041239
tttcacgactaaa

SEQ ID NO: 164265 - DNA, 13 bp, Artificial Sequence
  Oligonucleotide for detection of SNP TSC0041244
ttttttcggaaaa

SEQ ID NO: 164266 - DNA, 13 bp, Artificial Sequence
  Oligonucleotide for detection of SNP TSC0041244
ttttccgaaaaaa

SEQ ID NO: 164267 - DNA, 13 bp, Artificial Sequence
  Oligonucleotide for detection of SNP TSC0041244
ttttttgaaaaaa

SEQ ID NO: 164268 - DNA, 13 bp, Artificial Sequence
  Oligonucleotide for detection of SNP TSC0041244
ttttttcaaaaaa

SEQ ID NO: 164269 - DNA, 13 bp, Artificial Sequence
  Oligonucleotide for detection of SNP TSC0041245
tgggattgttttt

SEQ ID NO: 164270 - DNA, 13 bp, Artificial Sequence
  Oligonucleotide for detection of SNP TSC0041245
aaaaacaatccca

SEQ ID NO: 164271 - DNA, 13 bp, Artificial Sequence
  Oligonucleotide for detection of SNP TSC0041245
tgggatcgttttt

SEQ ID NO: 164272 - DNA, 13 bp, Artificial Sequence
  Oligonucleotide for detection of SNP TSC0041245
aaaaacgatccca

SEQ ID NO: 164273 - DNA, 13 bp, Artificial Sequence
  Oligonucleotide for detection of SNP TSC0041245
agggatggtttta

SEQ ID NO: 164274 - DNA, 13 bp, Artificial Sequence
  Oligonucleotide for detection of SNP TSC0041245
taaaaccatccct

SEQ ID NO: 164275 - DNA, 13 bp, Artificial Sequence
  Oligonucleotide for detection of SNP TSC0041245
agggatagtttta

SEQ ID NO: 164276 - DNA, 13 bp, Artificial Sequence
  Oligonucleotide for detection of SNP TSC0041245
taaaactatccct

SEQ ID NO: 164277 - DNA, 13 bp, Artificial Sequence
  Oligonucleotide for detection of SNP TSC0041245
agggacggtttta

SEQ ID NO: 164278 - DNA, 13 bp, Artificial Sequence
  Oligonucleotide for detection of SNP TSC0041245
taaaaccgtccct

SEQ ID NO: 164279 - DNA, 13 bp, Artificial Sequence
  Oligonucleotide for detection of SNP TSC0041247
ttttttcgttgay

SEQ ID NO: 164280 - DNA, 13 bp, Artificial Sequence
  Oligonucleotide for detection of SNP TSC0041247
rtcaacgaaaaaa

SEQ ID NO: 164281 - DNA, 13 bp, Artificial Sequence
  Oligonucleotide for detection of SNP TSC0041247
ttttttcgtcgay

SEQ ID NO: 164282 - DNA, 13 bp, Artificial Sequence
  Oligonucleotide for detection of SNP TSC0041247
rtcgacgaaaaaa

SEQ ID NO: 164283 - DNA, 13 bp, Artificial Sequence
  Oligonucleotide for detection of SNP TSC0041247
gttgatggggaaa

SEQ ID NO: 164284 - DNA, 13 bp, Artificial Sequence
  Oligonucleotide for detection of SNP TSC0041247
tttccccatcaac

SEQ ID NO: 164285 - DNA, 13 bp, Artificial Sequence
  Oligonucleotide for detection of SNP TSC0041247
gttgatagggaaa

SEQ ID NO: 164286 - DNA, 13 bp, Artificial Sequence
  Oligonucleotide for detection of SNP TSC0041247
tttccctatcaac

SEQ ID NO: 164287 - DNA, 13 bp, Artificial Sequence
  Oligonucleotide for detection of SNP TSC0041247
gtcgatggggaaa

SEQ ID NO: 164288 - DNA, 13 bp, Artificial Sequence
  Oligonucleotide for detection of SNP TSC0041247
tttccccatcgac

SEQ ID NO: 164289 - DNA, 13 bp, Artificial Sequence
  Oligonucleotide for detection of SNP TSC0041247
gtcgatagggaaa

SEQ ID NO: 164290 - DNA, 13 bp, Artificial Sequence
  Oligonucleotide for detection of SNP TSC0041247
tttccctatcgac

SEQ ID NO: 164291 - DNA, 13 bp, Artificial Sequence
  Oligonucleotide for detection of SNP TSC0041247
gttgacggggaaa

SEQ ID NO: 164292 - DNA, 13 bp, Artificial Sequence
  Oligonucleotide for detection of SNP TSC0041247
tttccccgtcaac

SEQ ID NO: 164293 - DNA, 13 bp, Artificial Sequence
  Oligonucleotide for detection of SNP TSC0041247
gtcgacggggaaa

SEQ ID NO: 164294 - DNA, 13 bp, Artificial Sequence
  Oligonucleotide for detection of SNP TSC0041247
tttccccgtcgac

SEQ ID NO: 164295 - DNA, 13 bp, Artificial Sequence
  Oligonucleotide for detection of SNP TSC0041252
ttatttaagatta

SEQ ID NO: 164296 - DNA, 13 bp, Artificial Sequence
  Oligonucleotide for detection of SNP TSC0041252
taatcttaaataa

SEQ ID NO: 164297 - DNA, 13 bp, Artificial Sequence
  Oligonucleotide for detection of SNP TSC0041252
ttattttagatta

SEQ ID NO: 164298 - DNA, 13 bp, Artificial Sequence
  Oligonucleotide for detection of SNP TSC0041252
taatctaaaataa

SEQ ID NO: 164299 - DNA, 13 bp, Artificial Sequence
  Oligonucleotide for detection of SNP TSC0041252
ttatttgagatta

SEQ ID NO: 164300 - DNA, 13 bp, Artificial Sequence
  Oligonucleotide for detection of SNP TSC0041252
taatctcaaataa

SEQ ID NO: 164301 - DNA, 13 bp, Artificial Sequence
  Oligonucleotide for detection of SNP TSC0041252
tagttttaggtag

SEQ ID NO: 164302 - DNA, 13 bp, Artificial Sequence
  Oligonucleotide for detection of SNP TSC0041252
ctacctaaaacta

SEQ ID NO: 164303 - DNA, 13 bp, Artificial Sequence
  Oligonucleotide for detection of SNP TSC0041252
tagtttgaggtag

SEQ ID NO: 164304 - DNA, 13 bp, Artificial Sequence
  Oligonucleotide for detection of SNP TSC0041252
ctacctcaaacta

SEQ ID NO: 164305 - DNA, 13 bp, Artificial Sequence
  Oligonucleotide for detection of SNP TSC0041252
tagtttaaggtag

SEQ ID NO: 164306 - DNA, 13 bp, Artificial Sequence
  Oligonucleotide for detection of SNP TSC0041252
ctaccttaaacta

SEQ ID NO: 164307 - DNA, 13 bp, Artificial Sequence
  Oligonucleotide for detection of SNP TSC0041255
gagtataaggttg

SEQ ID NO: 164308 - DNA, 13 bp, Artificial Sequence
  Oligonucleotide for detection of SNP TSC0041255
caaccttatactc

SEQ ID NO: 164309 - DNA, 13 bp, Artificial Sequence
  Oligonucleotide for detection of SNP TSC0041255
gagtatgaggttg

SEQ ID NO: 164310 - DNA, 13 bp, Artificial Sequence
  Oligonucleotide for detection of SNP TSC0041255
caacctcatactc

SEQ ID NO: 164311 - DNA, 13 bp, Artificial Sequence
  Oligonucleotide for detection of SNP TSC0041255
gagtataaggtcg

SEQ ID NO: 164312 - DNA, 13 bp, Artificial Sequence
  Oligonucleotide for detection of SNP TSC0041255
cgaccttatactc

SEQ ID NO: 164313 - DNA, 13 bp, Artificial Sequence
  Oligonucleotide for detection of SNP TSC0041255
gagtacgaggttg

SEQ ID NO: 164314 - DNA, 13 bp, Artificial Sequence
  Oligonucleotide for detection of SNP TSC0041255
caacctcgtactc

SEQ ID NO: 164315 - DNA, 13 bp, Artificial Sequence
  Oligonucleotide for detection of SNP TSC0041255
gagtatgaggtcg

SEQ ID NO: 164316 - DNA, 13 bp, Artificial Sequence
  Oligonucleotide for detection of SNP TSC0041255
cgacctcatactc

SEQ ID NO: 164317 - DNA, 13 bp, Artificial Sequence
  Oligonucleotide for detection of SNP TSC0041255
gagtacgaggtcg

SEQ ID NO: 164318 - DNA, 13 bp, Artificial Sequence
  Oligonucleotide for detection of SNP TSC0041255
cgacctcgtactc

SEQ ID NO: 164319 - DNA, 13 bp, Artificial Sequence
  Oligonucleotide for detection of SNP TSC0041255
tgattttgtgtty

SEQ ID NO: 164320 - DNA, 13 bp, Artificial Sequence
  Oligonucleotide for detection of SNP TSC0041255
raacacaaaatca

SEQ ID NO: 164321 - DNA, 13 bp, Artificial Sequence
  Oligonucleotide for detection of SNP TSC0041255
cgattttgtgtty

SEQ ID NO: 164322 - DNA, 13 bp, Artificial Sequence
  Oligonucleotide for detection of SNP TSC0041255
raacacaaaatcg

SEQ ID NO: 164323 - DNA, 13 bp, Artificial Sequence
  Oligonucleotide for detection of SNP TSC0041255
tgatttcgtgtty

SEQ ID NO: 164324 - DNA, 13 bp, Artificial Sequence
  Oligonucleotide for detection of SNP TSC0041255
raacacgaaatca

SEQ ID NO: 164325 - DNA, 13 bp, Artificial Sequence
  Oligonucleotide for detection of SNP TSC0041255
cgatttcgtgtty

SEQ ID NO: 164326 - DNA, 13 bp, Artificial Sequence
  Oligonucleotide for detection of SNP TSC0041255
raacacgaaatcg

SEQ ID NO: 164327 - DNA, 13 bp, Artificial Sequence
  Oligonucleotide for detection of SNP TSC0041258
aatttgagattta

SEQ ID NO: 164328 - DNA, 13 bp, Artificial Sequence
  Oligonucleotide for detection of SNP TSC0041258
taaatctcaaatt

SEQ ID NO: 164329 - DNA, 13 bp, Artificial Sequence
  Oligonucleotide for detection of SNP TSC0041258
aatttgtgattta

SEQ ID NO: 164330 - DNA, 13 bp, Artificial Sequence
  Oligonucleotide for detection of SNP TSC0041258
taaatcacaaatt

SEQ ID NO: 164331 - DNA, 13 bp, Artificial Sequence
  Oligonucleotide for detection of SNP TSC0041258
aatttgcgattta

SEQ ID NO: 164332 - DNA, 13 bp, Artificial Sequence
  Oligonucleotide for detection of SNP TSC0041258
taaatcgcaaatt

SEQ ID NO: 164333 - DNA, 13 bp, Artificial Sequence
  Oligonucleotide for detection of SNP TSC0041258
taaattttaaatt

SEQ ID NO: 164334 - DNA, 13 bp, Artificial Sequence
  Oligonucleotide for detection of SNP TSC0041258
aatttaaaattta

SEQ ID NO: 164335 - DNA, 13 bp, Artificial Sequence
  Oligonucleotide for detection of SNP TSC0041258
taaattgtaaatt

SEQ ID NO: 164336 - DNA, 13 bp, Artificial Sequence
  Oligonucleotide for detection of SNP TSC0041258
aatttacaattta

SEQ ID NO: 164337 - DNA, 13 bp, Artificial Sequence
  Oligonucleotide for detection of SNP TSC0041258
taaatcgtaaatt

SEQ ID NO: 164338 - DNA, 13 bp, Artificial Sequence
  Oligonucleotide for detection of SNP TSC0041258
aatttacgattta

SEQ ID NO: 164339 - DNA, 13 bp, Artificial Sequence
  Oligonucleotide for detection of SNP TSC0041261
aaataataatttt

SEQ ID NO: 164340 - DNA, 13 bp, Artificial Sequence
  Oligonucleotide for detection of SNP TSC0041261
aaaattattattt

SEQ ID NO: 164341 - DNA, 13 bp, Artificial Sequence
  Oligonucleotide for detection of SNP TSC0041261
aaataagaatttt

SEQ ID NO: 164342 - DNA, 13 bp, Artificial Sequence
  Oligonucleotide for detection of SNP TSC0041261
aaaattcttattt

SEQ ID NO: 164343 - DNA, 13 bp, Artificial Sequence
  Oligonucleotide for detection of SNP TSC0041261
aaagtttttattt

SEQ ID NO: 164344 - DNA, 13 bp, Artificial Sequence
  Oligonucleotide for detection of SNP TSC0041261
aaataaaaacttt

SEQ ID NO: 164345 - DNA, 13 bp, Artificial Sequence
  Oligonucleotide for detection of SNP TSC0041262
tagatggttattt

SEQ ID NO: 164346 - DNA, 13 bp, Artificial Sequence
  Oligonucleotide for detection of SNP TSC0041262
aaataaccatcta

SEQ ID NO: 164347 - DNA, 13 bp, Artificial Sequence
  Oligonucleotide for detection of SNP TSC0041262
tagatgattattt

SEQ ID NO: 164348 - DNA, 13 bp, Artificial Sequence
  Oligonucleotide for detection of SNP TSC0041262
aaataatcatcta

SEQ ID NO: 164349 - DNA, 13 bp, Artificial Sequence
  Oligonucleotide for detection of SNP TSC0041263
gttttaagatatg

SEQ ID NO: 164350 - DNA, 13 bp, Artificial Sequence
  Oligonucleotide for detection of SNP TSC0041263
catatcttaaaac

SEQ ID NO: 164351 - DNA, 13 bp, Artificial Sequence
  Oligonucleotide for detection of SNP TSC0041263
gttttaggatatg

SEQ ID NO: 164352 - DNA, 13 bp, Artificial Sequence
  Oligonucleotide for detection of SNP TSC0041263
catatcctaaaac

SEQ ID NO: 164353 - DNA, 13 bp, Artificial Sequence
  Oligonucleotide for detection of SNP TSC0041264
gagttttgatata

SEQ ID NO: 164354 - DNA, 13 bp, Artificial Sequence
  Oligonucleotide for detection of SNP TSC0041264
tatatcaaaactc

SEQ ID NO: 164355 - DNA, 13 bp, Artificial Sequence
  Oligonucleotide for detection of SNP TSC0041264
gagtttcgatata

SEQ ID NO: 164356 - DNA, 13 bp, Artificial Sequence
  Oligonucleotide for detection of SNP TSC0041264
tatatcgaaactc

SEQ ID NO: 164357 - DNA, 13 bp, Artificial Sequence
  Oligonucleotide for detection of SNP TSC0041264
tgtgttggggtty

SEQ ID NO: 164358 - DNA, 13 bp, Artificial Sequence
  Oligonucleotide for detection of SNP TSC0041264
raaccccaacaca

SEQ ID NO: 164359 - DNA, 13 bp, Artificial Sequence
  Oligonucleotide for detection of SNP TSC0041264
tgtgttagggtty

SEQ ID NO: 164360 - DNA, 13 bp, Artificial Sequence
  Oligonucleotide for detection of SNP TSC0041264
raaccctaacaca

SEQ ID NO: 164361 - DNA, 13 bp, Artificial Sequence
  Oligonucleotide for detection of SNP TSC0041264
tgtgtcggggtty

SEQ ID NO: 164362 - DNA, 13 bp, Artificial Sequence
  Oligonucleotide for detection of SNP TSC0041264
raaccccgacaca

SEQ ID NO: 164363 - DNA, 13 bp, Artificial Sequence
  Oligonucleotide for detection of SNP TSC0041265
tataaagttttty

SEQ ID NO: 164364 - DNA, 13 bp, Artificial Sequence
  Oligonucleotide for detection of SNP TSC0041265
raaaaactttata

SEQ ID NO: 164365 - DNA, 13 bp, Artificial Sequence
  Oligonucleotide for detection of SNP TSC0041266
tttaatattattt

SEQ ID NO: 164366 - DNA, 13 bp, Artificial Sequence
  Oligonucleotide for detection of SNP TSC0041266
aaataatattaaa

SEQ ID NO: 164367 - DNA, 13 bp, Artificial Sequence
  Oligonucleotide for detection of SNP TSC0041267
aatggtatagtga

SEQ ID NO: 164368 - DNA, 13 bp, Artificial Sequence
  Oligonucleotide for detection of SNP TSC0041267
tcactataccatt

SEQ ID NO: 164369 - DNA, 13 bp, Artificial Sequence
  Oligonucleotide for detection of SNP TSC0041267
aatggtttagtga

SEQ ID NO: 164370 - DNA, 13 bp, Artificial Sequence
  Oligonucleotide for detection of SNP TSC0041267
tcactaaaccatt

SEQ ID NO: 164371 - DNA, 13 bp, Artificial Sequence
  Oligonucleotide for detection of SNP TSC0041267
ttattgtgttatt

SEQ ID NO: 164372 - DNA, 13 bp, Artificial Sequence
  Oligonucleotide for detection of SNP TSC0041267
aataacacaataa

SEQ ID NO: 164373 - DNA, 13 bp, Artificial Sequence
  Oligonucleotide for detection of SNP TSC0041267
ttattgagttatt

SEQ ID NO: 164374 - DNA, 13 bp, Artificial Sequence
  Oligonucleotide for detection of SNP TSC0041267
aataactcaataa

SEQ ID NO: 164375 - DNA, 13 bp, Artificial Sequence
  Oligonucleotide for detection of SNP TSC0041270
attttttgtgtta

SEQ ID NO: 164376 - DNA, 13 bp, Artificial Sequence
  Oligonucleotide for detection of SNP TSC0041270
taacacaaaaaat

SEQ ID NO: 164377 - DNA, 13 bp, Artificial Sequence
  Oligonucleotide for detection of SNP TSC0041270
atttttcgtgtta

SEQ ID NO: 164378 - DNA, 13 bp, Artificial Sequence
  Oligonucleotide for detection of SNP TSC0041270
taacacgaaaaat

SEQ ID NO: 164379 - DNA, 13 bp, Artificial Sequence
  Oligonucleotide for detection of SNP TSC0041270
tgatatggagggt

SEQ ID NO: 164380 - DNA, 13 bp, Artificial Sequence
  Oligonucleotide for detection of SNP TSC0041270
accctccatatca

SEQ ID NO: 164381 - DNA, 13 bp, Artificial Sequence
  Oligonucleotide for detection of SNP TSC0041270
tgatatagagggt

SEQ ID NO: 164382 - DNA, 13 bp, Artificial Sequence
  Oligonucleotide for detection of SNP TSC0041270
accctctatatca

SEQ ID NO: 164383 - DNA, 13 bp, Artificial Sequence
  Oligonucleotide for detection of SNP TSC0041270
tgatacggagggt

SEQ ID NO: 164384 - DNA, 13 bp, Artificial Sequence
  Oligonucleotide for detection of SNP TSC0041270
accctccgtatca

SEQ ID NO: 164385 - DNA, 13 bp, Artificial Sequence
  Oligonucleotide for detection of SNP TSC0041271
ggggaaggaggaa

SEQ ID NO: 164386 - DNA, 13 bp, Artificial Sequence
  Oligonucleotide for detection of SNP TSC0041271
ttcctccttcccc

SEQ ID NO: 164387 - DNA, 13 bp, Artificial Sequence
  Oligonucleotide for detection of SNP TSC0041271
ggggaaagaggaa

SEQ ID NO: 164388 - DNA, 13 bp, Artificial Sequence
  Oligonucleotide for detection of SNP TSC0041271
ttcctctttcccc

SEQ ID NO: 164389 - DNA, 13 bp, Artificial Sequence
  Oligonucleotide for detection of SNP TSC0041272
aaagtattatttt

SEQ ID NO: 164390 - DNA, 13 bp, Artificial Sequence
  Oligonucleotide for detection of SNP TSC0041272
aaaataatacttt

SEQ ID NO: 164391 - DNA, 13 bp, Artificial Sequence
  Oligonucleotide for detection of SNP TSC0041272
aaagtagtatttt

SEQ ID NO: 164392 - DNA, 13 bp, Artificial Sequence
  Oligonucleotide for detection of SNP TSC0041272
aaaatactacttt

SEQ ID NO: 164393 - DNA, 13 bp, Artificial Sequence
  Oligonucleotide for detection of SNP TSC0041272
aaggtaatgtttt

SEQ ID NO: 164394 - DNA, 13 bp, Artificial Sequence
  Oligonucleotide for detection of SNP TSC0041272
aaaacattacctt

SEQ ID NO: 164395 - DNA, 13 bp, Artificial Sequence
  Oligonucleotide for detection of SNP TSC0041272
aaggtattgtttt

SEQ ID NO: 164396 - DNA, 13 bp, Artificial Sequence
  Oligonucleotide for detection of SNP TSC0041272
aaaacaatacctt

SEQ ID NO: 164397 - DNA, 13 bp, Artificial Sequence
  Oligonucleotide for detection of SNP TSC0041274
tggatattaaata

SEQ ID NO: 164398 - DNA, 13 bp, Artificial Sequence
  Oligonucleotide for detection of SNP TSC0041274
tatttaatatcca

SEQ ID NO: 164399 - DNA, 13 bp, Artificial Sequence
  Oligonucleotide for detection of SNP TSC0041274
tggatagtaaata

SEQ ID NO: 164400 - DNA, 13 bp, Artificial Sequence
  Oligonucleotide for detection of SNP TSC0041274
tatttactatcca

SEQ ID NO: 164401 - DNA, 13 bp, Artificial Sequence
  Oligonucleotide for detection of SNP TSC0041274
tgtttagtgttta

SEQ ID NO: 164402 - DNA, 13 bp, Artificial Sequence
  Oligonucleotide for detection of SNP TSC0041274
taaacactaaaca

SEQ ID NO: 164403 - DNA, 13 bp, Artificial Sequence
  Oligonucleotide for detection of SNP TSC0041274
tgtttattgttta

SEQ ID NO: 164404 - DNA, 13 bp, Artificial Sequence
  Oligonucleotide for detection of SNP TSC0041274
taaacaataaaca

SEQ ID NO: 164405 - DNA, 13 bp, Artificial Sequence
  Oligonucleotide for detection of SNP TSC0041275
agtatcgtatata

SEQ ID NO: 164406 - DNA, 13 bp, Artificial Sequence
  Oligonucleotide for detection of SNP TSC0041275
tatatacgatact

SEQ ID NO: 164407 - DNA, 13 bp, Artificial Sequence
  Oligonucleotide for detection of SNP TSC0041275
tgtgtgtgatatt

SEQ ID NO: 164408 - DNA, 13 bp, Artificial Sequence
  Oligonucleotide for detection of SNP TSC0041275
aatatcacacaca

SEQ ID NO: 164409 - DNA, 13 bp, Artificial Sequence
  Oligonucleotide for detection of SNP TSC0041275
tgtgtgcgatatt

SEQ ID NO: 164410 - DNA, 13 bp, Artificial Sequence
  Oligonucleotide for detection of SNP TSC0041275
aatatcgcacaca

SEQ ID NO: 164411 - DNA, 13 bp, Artificial Sequence
  Oligonucleotide for detection of SNP TSC0007645
atatgtgttaggy

SEQ ID NO: 164412 - DNA, 13 bp, Artificial Sequence
  Oligonucleotide for detection of SNP TSC0007645
rcctaacacatat

SEQ ID NO: 164413 - DNA, 13 bp, Artificial Sequence
  Oligonucleotide for detection of SNP TSC0007645
atatgtattaggy

SEQ ID NO: 164414 - DNA, 13 bp, Artificial Sequence
  Oligonucleotide for detection of SNP TSC0007645
rcctaatacatat

SEQ ID NO: 164415 - DNA, 13 bp, Artificial Sequence
  Oligonucleotide for detection of SNP TSC0007933
gaatttagtgaag

SEQ ID NO: 164416 - DNA, 13 bp, Artificial Sequence
  Oligonucleotide for detection of SNP TSC0007933
cttcactaaattc

SEQ ID NO: 164417 - DNA, 13 bp, Artificial Sequence
  Oligonucleotide for detection of SNP TSC0007933
ttttattggatty

SEQ ID NO: 164418 - DNA, 13 bp, Artificial Sequence
  Oligonucleotide for detection of SNP TSC0007933
raatccaataaaa

SEQ ID NO: 164419 - DNA, 13 bp, Artificial Sequence
  Oligonucleotide for detection of SNP TSC0007933
ttttatcggatty

SEQ ID NO: 164420 - DNA, 13 bp, Artificial Sequence
  Oligonucleotide for detection of SNP TSC0007933
raatccgataaaa

SEQ ID NO: 164421 - DNA, 13 bp, Artificial Sequence
  Oligonucleotide for detection of SNP TSC0009404
tgttatatatggy

SEQ ID NO: 164422 - DNA, 13 bp, Artificial Sequence
  Oligonucleotide for detection of SNP TSC0009404
rccatatataaca

SEQ ID NO: 164423 - DNA, 13 bp, Artificial Sequence
  Oligonucleotide for detection of SNP TSC0009404
tgttatttatggy

SEQ ID NO: 164424 - DNA, 13 bp, Artificial Sequence
  Oligonucleotide for detection of SNP TSC0009404
rccataaataaca

SEQ ID NO: 164425 - DNA, 13 bp, Artificial Sequence
  Oligonucleotide for detection of SNP TSC0009404
gttatgtgtgata

SEQ ID NO: 164426 - DNA, 13 bp, Artificial Sequence
  Oligonucleotide for detection of SNP TSC0009404
tatcacacataac

SEQ ID NO: 164427 - DNA, 13 bp, Artificial Sequence
  Oligonucleotide for detection of SNP TSC0009404
gttatgggtgata

SEQ ID NO: 164428 - DNA, 13 bp, Artificial Sequence
  Oligonucleotide for detection of SNP TSC0009404
tatcacccataac

SEQ ID NO: 164429 - DNA, 13 bp, Artificial Sequence
  Oligonucleotide for detection of SNP TSC0041277
ttagtagatgggg

SEQ ID NO: 164430 - DNA, 13 bp, Artificial Sequence
  Oligonucleotide for detection of SNP TSC0041277
ccccatctactaa

SEQ ID NO: 164431 - DNA, 13 bp, Artificial Sequence
  Oligonucleotide for detection of SNP TSC0041277
ttagtaaatgggg

SEQ ID NO: 164432 - DNA, 13 bp, Artificial Sequence
  Oligonucleotide for detection of SNP TSC0041277
ccccatttactaa

SEQ ID NO: 164433 - DNA, 13 bp, Artificial Sequence
  Oligonucleotide for detection of SNP TSC0041277
ttagtagacgggg

SEQ ID NO: 164434 - DNA, 13 bp, Artificial Sequence
  Oligonucleotide for detection of SNP TSC0041277
ccccgtctactaa

SEQ ID NO: 164435 - DNA, 13 bp, Artificial Sequence
  Oligonucleotide for detection of SNP TSC0041277
ttagtaaacgggg

SEQ ID NO: 164436 - DNA, 13 bp, Artificial Sequence
  Oligonucleotide for detection of SNP TSC0041277
ccccgtttactaa

SEQ ID NO: 164437 - DNA, 13 bp, Artificial Sequence
  Oligonucleotide for detection of SNP TSC0041278
atgtaaaggttty

SEQ ID NO: 164438 - DNA, 13 bp, Artificial Sequence
  Oligonucleotide for detection of SNP TSC0041278
raaacctttacat

SEQ ID NO: 164439 - DNA, 13 bp, Artificial Sequence
  Oligonucleotide for detection of SNP TSC0041278
atgtaagggttty

SEQ ID NO: 164440 - DNA, 13 bp, Artificial Sequence
  Oligonucleotide for detection of SNP TSC0041278
raaacccttacat

SEQ ID NO: 164441 - DNA, 13 bp, Artificial Sequence
  Oligonucleotide for detection of SNP TSC0041280
agtattgataagg

SEQ ID NO: 164442 - DNA, 13 bp, Artificial Sequence
  Oligonucleotide for detection of SNP TSC0041280
ccttatcaatact

SEQ ID NO: 164443 - DNA, 13 bp, Artificial Sequence
  Oligonucleotide for detection of SNP TSC0041280
agtattaataagg

SEQ ID NO: 164444 - DNA, 13 bp, Artificial Sequence
  Oligonucleotide for detection of SNP TSC0041280
ccttattaatact

SEQ ID NO: 164445 - DNA, 13 bp, Artificial Sequence
  Oligonucleotide for detection of SNP TSC0041280
agtatcgataagg

SEQ ID NO: 164446 - DNA, 13 bp, Artificial Sequence
  Oligonucleotide for detection of SNP TSC0041280
ccttatcgatact

SEQ ID NO: 164447 - DNA, 13 bp, Artificial Sequence
  Oligonucleotide for detection of SNP TSC0041281
ttataaatagtty

SEQ ID NO: 164448 - DNA, 13 bp, Artificial Sequence
  Oligonucleotide for detection of SNP TSC0041281
raactatttataa

SEQ ID NO: 164449 - DNA, 13 bp, Artificial Sequence
  Oligonucleotide for detection of SNP TSC0041281
ttataattagtty

SEQ ID NO: 164450 - DNA, 13 bp, Artificial Sequence
  Oligonucleotide for detection of SNP TSC0041281
raactaattataa

SEQ ID NO: 164451 - DNA, 13 bp, Artificial Sequence
  Oligonucleotide for detection of SNP TSC0041281
gagttatttatgg

SEQ ID NO: 164452 - DNA, 13 bp, Artificial Sequence
  Oligonucleotide for detection of SNP TSC0041281
ccataaataactc

SEQ ID NO: 164453 - DNA, 13 bp, Artificial Sequence
  Oligonucleotide for detection of SNP TSC0041281
gagttaattatgg

SEQ ID NO: 164454 - DNA, 13 bp, Artificial Sequence
  Oligonucleotide for detection of SNP TSC0041281
ccataattaactc

SEQ ID NO: 164455 - DNA, 13 bp, Artificial Sequence
  Oligonucleotide for detection of SNP TSC0009633
atgttaattattt

SEQ ID NO: 164456 - DNA, 13 bp, Artificial Sequence
  Oligonucleotide for detection of SNP TSC0009633
aaataattaacat

SEQ ID NO: 164457 - DNA, 13 bp, Artificial Sequence
  Oligonucleotide for detection of SNP TSC0009633
atgttatttattt

SEQ ID NO: 164458 - DNA, 13 bp, Artificial Sequence
  Oligonucleotide for detection of SNP TSC0009633
aaataaataacat

SEQ ID NO: 164459 - DNA, 13 bp, Artificial Sequence
  Oligonucleotide for detection of SNP TSC0009633
aaatggttggtat

SEQ ID NO: 164460 - DNA, 13 bp, Artificial Sequence
  Oligonucleotide for detection of SNP TSC0009633
ataccaaccattt

SEQ ID NO: 164461 - DNA, 13 bp, Artificial Sequence
  Oligonucleotide for detection of SNP TSC0009633
aaatgggtggtat

SEQ ID NO: 164462 - DNA, 13 bp, Artificial Sequence
  Oligonucleotide for detection of SNP TSC0009633
ataccacccattt

SEQ ID NO: 164463 - DNA, 13 bp, Artificial Sequence
  Oligonucleotide for detection of SNP TSC0009675
tatatgaaagggy

SEQ ID NO: 164464 - DNA, 13 bp, Artificial Sequence
  Oligonucleotide for detection of SNP TSC0009675
rccctttcatata

SEQ ID NO: 164465 - DNA, 13 bp, Artificial Sequence
  Oligonucleotide for detection of SNP TSC0009675
tatatgtaagggy

SEQ ID NO: 164466 - DNA, 13 bp, Artificial Sequence
  Oligonucleotide for detection of SNP TSC0009675
rcccttacatata

SEQ ID NO: 164467 - DNA, 13 bp, Artificial Sequence
  Oligonucleotide for detection of SNP TSC0009675
gtttttttatatg

SEQ ID NO: 164468 - DNA, 13 bp, Artificial Sequence
  Oligonucleotide for detection of SNP TSC0009675
catataaaaaaac

SEQ ID NO: 164469 - DNA, 13 bp, Artificial Sequence
  Oligonucleotide for detection of SNP TSC0009675
gtttttatatatg

SEQ ID NO: 164470 - DNA, 13 bp, Artificial Sequence
  Oligonucleotide for detection of SNP TSC0009675
catatataaaaac

SEQ ID NO: 164471 - DNA, 13 bp, Artificial Sequence
  Oligonucleotide for detection of SNP TSC0041282
tttaggatgtaty

SEQ ID NO: 164472 - DNA, 13 bp, Artificial Sequence
  Oligonucleotide for detection of SNP TSC0041282
ratacatcctaaa

SEQ ID NO: 164473 - DNA, 13 bp, Artificial Sequence
  Oligonucleotide for detection of SNP TSC0041282
tttagggtgtaty

SEQ ID NO: 164474 - DNA, 13 bp, Artificial Sequence
  Oligonucleotide for detection of SNP TSC0041282
ratacaccctaaa

SEQ ID NO: 164475 - DNA, 13 bp, Artificial Sequence
  Oligonucleotide for detection of SNP TSC0041287
tattggataggaa

SEQ ID NO: 164476 - DNA, 13 bp, Artificial Sequence
  Oligonucleotide for detection of SNP TSC0041287
ttcctatccaata

SEQ ID NO: 164477 - DNA, 13 bp, Artificial Sequence
  Oligonucleotide for detection of SNP TSC0041287
tattgggtaggaa

SEQ ID NO: 164478 - DNA, 13 bp, Artificial Sequence
  Oligonucleotide for detection of SNP TSC0041287
ttcctacccaata

SEQ ID NO: 164479 - DNA, 13 bp, Artificial Sequence
  Oligonucleotide for detection of SNP TSC0041288
agtttatatatag

SEQ ID NO: 164480 - DNA, 13 bp, Artificial Sequence
  Oligonucleotide for detection of SNP TSC0041288
ctatatataaact

SEQ ID NO: 164481 - DNA, 13 bp, Artificial Sequence
  Oligonucleotide for detection of SNP TSC0041288
agtttagatatag

SEQ ID NO: 164482 - DNA, 13 bp, Artificial Sequence
  Oligonucleotide for detection of SNP TSC0041288
ctatatctaaact

SEQ ID NO: 164483 - DNA, 13 bp, Artificial Sequence
  Oligonucleotide for detection of SNP TSC0041288
ttatgtataagtt

SEQ ID NO: 164484 - DNA, 13 bp, Artificial Sequence
  Oligonucleotide for detection of SNP TSC0041288
aacttatacataa

SEQ ID NO: 164485 - DNA, 13 bp, Artificial Sequence
  Oligonucleotide for detection of SNP TSC0041288
ttatgtttaagtt

SEQ ID NO: 164486 - DNA, 13 bp, Artificial Sequence
  Oligonucleotide for detection of SNP TSC0041288
aacttaaacataa

SEQ ID NO: 164487 - DNA, 13 bp, Artificial Sequence
  Oligonucleotide for detection of SNP TSC0041289
tagtgaagtgagy

SEQ ID NO: 164488 - DNA, 13 bp, Artificial Sequence
  Oligonucleotide for detection of SNP TSC0041289
rctcacttcacta

SEQ ID NO: 164489 - DNA, 13 bp, Artificial Sequence
  Oligonucleotide for detection of SNP TSC0041289
tagtgaggtgagy

SEQ ID NO: 164490 - DNA, 13 bp, Artificial Sequence
  Oligonucleotide for detection of SNP TSC0041289
rctcacctcacta

SEQ ID NO: 164491 - DNA, 13 bp, Artificial Sequence
  Oligonucleotide for detection of SNP TSC0041291
taagttgaaatta

SEQ ID NO: 164492 - DNA, 13 bp, Artificial Sequence
  Oligonucleotide for detection of SNP TSC0041291
taatttcaactta

SEQ ID NO: 164493 - DNA, 13 bp, Artificial Sequence
  Oligonucleotide for detection of SNP TSC0041291
taagttaaaatta

SEQ ID NO: 164494 - DNA, 13 bp, Artificial Sequence
  Oligonucleotide for detection of SNP TSC0041291
taattttaactta

SEQ ID NO: 164495 - DNA, 13 bp, Artificial Sequence
  Oligonucleotide for detection of SNP TSC0041291
taagtcgaaatta

SEQ ID NO: 164496 - DNA, 13 bp, Artificial Sequence
  Oligonucleotide for detection of SNP TSC0041291
taatttcgactta

SEQ ID NO: 164497 - DNA, 13 bp, Artificial Sequence
  Oligonucleotide for detection of SNP TSC0008136
aattagataagtg

SEQ ID NO: 164498 - DNA, 13 bp, Artificial Sequence
  Oligonucleotide for detection of SNP TSC0008136
cacttatctaatt

SEQ ID NO: 164499 - DNA, 13 bp, Artificial Sequence
  Oligonucleotide for detection of SNP TSC0008136
aattaggtaagtg

SEQ ID NO: 164500 - DNA, 13 bp, Artificial Sequence
  Oligonucleotide for detection of SNP TSC0008136
cacttacctaatt

SEQ ID NO: 164501 - DNA, 13 bp, Artificial Sequence
  Oligonucleotide for detection of SNP TSC0041292
ttgataagaaata

SEQ ID NO: 164502 - DNA, 13 bp, Artificial Sequence
  Oligonucleotide for detection of SNP TSC0041292
tatttcttatcaa

SEQ ID NO: 164503 - DNA, 13 bp, Artificial Sequence
  Oligonucleotide for detection of SNP TSC0041292
ttgatatgaaata

SEQ ID NO: 164504 - DNA, 13 bp, Artificial Sequence
  Oligonucleotide for detection of SNP TSC0041292
tatttcatatcaa

SEQ ID NO: 164505 - DNA, 13 bp, Artificial Sequence
  Oligonucleotide for detection of SNP TSC0041292
ttgatacgaaata

SEQ ID NO: 164506 - DNA, 13 bp, Artificial Sequence
  Oligonucleotide for detection of SNP TSC0041292
tatttcgtatcaa

SEQ ID NO: 164507 - DNA, 13 bp, Artificial Sequence
  Oligonucleotide for detection of SNP TSC0041292
tatttcgtattag

SEQ ID NO: 164508 - DNA, 13 bp, Artificial Sequence
  Oligonucleotide for detection of SNP TSC0041292
ctaatacgaaata

SEQ ID NO: 164509 - DNA, 13 bp, Artificial Sequence
  Oligonucleotide for detection of SNP TSC0041293
tatttaagtgtaa

SEQ ID NO: 164510 - DNA, 13 bp, Artificial Sequence
  Oligonucleotide for detection of SNP TSC0041293
ttacacttaaata

SEQ ID NO: 164511 - DNA, 13 bp, Artificial Sequence
  Oligonucleotide for detection of SNP TSC0041293
ttatatttaaata

SEQ ID NO: 164512 - DNA, 13 bp, Artificial Sequence
  Oligonucleotide for detection of SNP TSC0041293
tatttaaatataa

SEQ ID NO: 164513 - DNA, 13 bp, Artificial Sequence
  Oligonucleotide for detection of SNP TSC0041293
ttatatgtaaata

SEQ ID NO: 164514 - DNA, 13 bp, Artificial Sequence
  Oligonucleotide for detection of SNP TSC0041293
tatttacatataa

SEQ ID NO: 164515 - DNA, 13 bp, Artificial Sequence
  Oligonucleotide for detection of SNP TSC0041294
tttttgaaagtty

SEQ ID NO: 164516 - DNA, 13 bp, Artificial Sequence
  Oligonucleotide for detection of SNP TSC0041294
raactttcaaaaa

SEQ ID NO: 164517 - DNA, 13 bp, Artificial Sequence
  Oligonucleotide for detection of SNP TSC0041294
tttttggaagtty

SEQ ID NO: 164518 - DNA, 13 bp, Artificial Sequence
  Oligonucleotide for detection of SNP TSC0041294
raacttccaaaaa

SEQ ID NO: 164519 - DNA, 13 bp, Artificial Sequence
  Oligonucleotide for detection of SNP TSC0041295
aataaatgtggtt

SEQ ID NO: 164520 - DNA, 13 bp, Artificial Sequence
  Oligonucleotide for detection of SNP TSC0041295
aaccacatttatt

SEQ ID NO: 164521 - DNA, 13 bp, Artificial Sequence
  Oligonucleotide for detection of SNP TSC0041295
aataaacgtggtt

SEQ ID NO: 164522 - DNA, 13 bp, Artificial Sequence
  Oligonucleotide for detection of SNP TSC0041295
aaccacgtttatt

SEQ ID NO: 164523 - DNA, 13 bp, Artificial Sequence
  Oligonucleotide for detection of SNP TSC0041295
agttatgtttatt

SEQ ID NO: 164524 - DNA, 13 bp, Artificial Sequence
  Oligonucleotide for detection of SNP TSC0041295
aataaacataact

SEQ ID NO: 164525 - DNA, 13 bp, Artificial Sequence
  Oligonucleotide for detection of SNP TSC0041295
agttatatttatt

SEQ ID NO: 164526 - DNA, 13 bp, Artificial Sequence
  Oligonucleotide for detection of SNP TSC0041295
aataaatataact

SEQ ID NO: 164527 - DNA, 13 bp, Artificial Sequence
  Oligonucleotide for detection of SNP TSC0041295
agttacgtttatt

SEQ ID NO: 164528 - DNA, 13 bp, Artificial Sequence
  Oligonucleotide for detection of SNP TSC0041295
aataaacgtaact

SEQ ID NO: 164529 - DNA, 13 bp, Artificial Sequence
  Oligonucleotide for detection of SNP TSC0041296
ttttgaggtttaa

SEQ ID NO: 164530 - DNA, 13 bp, Artificial Sequence
  Oligonucleotide for detection of SNP TSC0041296
ttaaacctcaaaa

SEQ ID NO: 164531 - DNA, 13 bp, Artificial Sequence
  Oligonucleotide for detection of SNP TSC0041297
ttatggatgttta

SEQ ID NO: 164532 - DNA, 13 bp, Artificial Sequence
  Oligonucleotide for detection of SNP TSC0041297
taaacatccataa

SEQ ID NO: 164533 - DNA, 13 bp, Artificial Sequence
  Oligonucleotide for detection of SNP TSC0041297
ttatggttgttta

SEQ ID NO: 164534 - DNA, 13 bp, Artificial Sequence
  Oligonucleotide for detection of SNP TSC0041297
taaacaaccataa

SEQ ID NO: 164535 - DNA, 13 bp, Artificial Sequence
  Oligonucleotide for detection of SNP TSC0041297
taagtatttatga

SEQ ID NO: 164536 - DNA, 13 bp, Artificial Sequence
  Oligonucleotide for detection of SNP TSC0041297
tcataaatactta

SEQ ID NO: 164537 - DNA, 13 bp, Artificial Sequence
  Oligonucleotide for detection of SNP TSC0041297
taagtaattatga

SEQ ID NO: 164538 - DNA, 13 bp, Artificial Sequence
  Oligonucleotide for detection of SNP TSC0041297
tcataattactta

SEQ ID NO: 164539 - DNA, 13 bp, Artificial Sequence
  Oligonucleotide for detection of SNP TSC0041299
atattttttattt

SEQ ID NO: 164540 - DNA, 13 bp, Artificial Sequence
  Oligonucleotide for detection of SNP TSC0041299
aaataaaaaatat

SEQ ID NO: 164541 - DNA, 13 bp, Artificial Sequence
  Oligonucleotide for detection of SNP TSC0041299
aaataatagatat

SEQ ID NO: 164542 - DNA, 13 bp, Artificial Sequence
  Oligonucleotide for detection of SNP TSC0041299
atatctattattt

SEQ ID NO: 164543 - DNA, 13 bp, Artificial Sequence
  Oligonucleotide for detection of SNP TSC0041299
aaataaaagatat

SEQ ID NO: 164544 - DNA, 13 bp, Artificial Sequence
  Oligonucleotide for detection of SNP TSC0041299
atatcttttattt

SEQ ID NO: 164545 - DNA, 13 bp, Artificial Sequence
  Oligonucleotide for detection of SNP TSC0041301
tttttacgtggtg

SEQ ID NO: 164546 - DNA, 13 bp, Artificial Sequence
  Oligonucleotide for detection of SNP TSC0041301
caccacgtaaaaa

SEQ ID NO: 164547 - DNA, 13 bp, Artificial Sequence
  Oligonucleotide for detection of SNP TSC0041301
tattatatggaag

SEQ ID NO: 164548 - DNA, 13 bp, Artificial Sequence
  Oligonucleotide for detection of SNP TSC0041301
cttccatataata

SEQ ID NO: 164549 - DNA, 13 bp, Artificial Sequence
  Oligonucleotide for detection of SNP TSC0041301
tattatgtggaag

SEQ ID NO: 164550 - DNA, 13 bp, Artificial Sequence
  Oligonucleotide for detection of SNP TSC0041301
cttccacataata

SEQ ID NO: 164551 - DNA, 13 bp, Artificial Sequence
  Oligonucleotide for detection of SNP TSC0041301
tattacgtggaag

SEQ ID NO: 164552 - DNA, 13 bp, Artificial Sequence
  Oligonucleotide for detection of SNP TSC0041301
cttccacgtaata

SEQ ID NO: 164553 - DNA, 13 bp, Artificial Sequence
  Oligonucleotide for detection of SNP TSC0041302
gggtataagtggt

SEQ ID NO: 164554 - DNA, 13 bp, Artificial Sequence
  Oligonucleotide for detection of SNP TSC0041302
accacttataccc

SEQ ID NO: 164555 - DNA, 13 bp, Artificial Sequence
  Oligonucleotide for detection of SNP TSC0041302
gggtatgagtggt

SEQ ID NO: 164556 - DNA, 13 bp, Artificial Sequence
  Oligonucleotide for detection of SNP TSC0041302
accactcataccc

SEQ ID NO: 164557 - DNA, 13 bp, Artificial Sequence
  Oligonucleotide for detection of SNP TSC0041302
gggtacgagtggt

SEQ ID NO: 164558 - DNA, 13 bp, Artificial Sequence
  Oligonucleotide for detection of SNP TSC0041302
accactcgtaccc

SEQ ID NO: 164559 - DNA, 13 bp, Artificial Sequence
  Oligonucleotide for detection of SNP TSC0041302
attattcgtatty

SEQ ID NO: 164560 - DNA, 13 bp, Artificial Sequence
  Oligonucleotide for detection of SNP TSC0041302
raatacgaataat

SEQ ID NO: 164561 - DNA, 13 bp, Artificial Sequence
  Oligonucleotide for detection of SNP TSC0041303
tatattgggaata

SEQ ID NO: 164562 - DNA, 13 bp, Artificial Sequence
  Oligonucleotide for detection of SNP TSC0041303
tattcccaatata

SEQ ID NO: 164563 - DNA, 13 bp, Artificial Sequence
  Oligonucleotide for detection of SNP TSC0041303
tatattaggaata

SEQ ID NO: 164564 - DNA, 13 bp, Artificial Sequence
  Oligonucleotide for detection of SNP TSC0041303
tattcctaatata

SEQ ID NO: 164565 - DNA, 13 bp, Artificial Sequence
  Oligonucleotide for detection of SNP TSC0041306
taaaattttttag

SEQ ID NO: 164566 - DNA, 13 bp, Artificial Sequence
  Oligonucleotide for detection of SNP TSC0041306
ctaaaaaatttta

SEQ ID NO: 164567 - DNA, 13 bp, Artificial Sequence
  Oligonucleotide for detection of SNP TSC0041306
ttggaatgtttta

SEQ ID NO: 164568 - DNA, 13 bp, Artificial Sequence
  Oligonucleotide for detection of SNP TSC0041306
taaaacattccaa

SEQ ID NO: 164569 - DNA, 13 bp, Artificial Sequence
  Oligonucleotide for detection of SNP TSC0041306
ttggaaggtttta

SEQ ID NO: 164570 - DNA, 13 bp, Artificial Sequence
  Oligonucleotide for detection of SNP TSC0041306
taaaaccttccaa

SEQ ID NO: 164571 - DNA, 13 bp, Artificial Sequence
  Oligonucleotide for detection of SNP TSC0041307
gtagatatggttt

SEQ ID NO: 164572 - DNA, 13 bp, Artificial Sequence
  Oligonucleotide for detection of SNP TSC0041307
aaaccatatctac

SEQ ID NO: 164573 - DNA, 13 bp, Artificial Sequence
  Oligonucleotide for detection of SNP TSC0041307
gtagatgtggttt

SEQ ID NO: 164574 - DNA, 13 bp, Artificial Sequence
  Oligonucleotide for detection of SNP TSC0041307
aaaccacatctac

SEQ ID NO: 164575 - DNA, 13 bp, Artificial Sequence
  Oligonucleotide for detection of SNP TSC0041307
gtagatacggttt

SEQ ID NO: 164576 - DNA, 13 bp, Artificial Sequence
  Oligonucleotide for detection of SNP TSC0041307
aaaccgtatctac

SEQ ID NO: 164577 - DNA, 13 bp, Artificial Sequence
  Oligonucleotide for detection of SNP TSC0041307
gtagacgtggttt

SEQ ID NO: 164578 - DNA, 13 bp, Artificial Sequence
  Oligonucleotide for detection of SNP TSC0041307
aaaccacgtctac

SEQ ID NO: 164579 - DNA, 13 bp, Artificial Sequence
  Oligonucleotide for detection of SNP TSC0041307
gtagatgcggttt

SEQ ID NO: 164580 - DNA, 13 bp, Artificial Sequence
  Oligonucleotide for detection of SNP TSC0041307
aaaccgcatctac

SEQ ID NO: 164581 - DNA, 13 bp, Artificial Sequence
  Oligonucleotide for detection of SNP TSC0041307
gtagacgcggttt

SEQ ID NO: 164582 - DNA, 13 bp, Artificial Sequence
  Oligonucleotide for detection of SNP TSC0041307
aaaccgcgtctac

SEQ ID NO: 164583 - DNA, 13 bp, Artificial Sequence
  Oligonucleotide for detection of SNP TSC0041307
aaattgtgtttay

SEQ ID NO: 164584 - DNA, 13 bp, Artificial Sequence
  Oligonucleotide for detection of SNP TSC0041307
rtaaacacaattt

SEQ ID NO: 164585 - DNA, 13 bp, Artificial Sequence
  Oligonucleotide for detection of SNP TSC0041307
aaatcgtgtttay

SEQ ID NO: 164586 - DNA, 13 bp, Artificial Sequence
  Oligonucleotide for detection of SNP TSC0041307
rtaaacacgattt

SEQ ID NO: 164587 - DNA, 13 bp, Artificial Sequence
  Oligonucleotide for detection of SNP TSC0041307
aaattgcgtttay

SEQ ID NO: 164588 - DNA, 13 bp, Artificial Sequence
  Oligonucleotide for detection of SNP TSC0041307
rtaaacgcaattt

SEQ ID NO: 164589 - DNA, 13 bp, Artificial Sequence
  Oligonucleotide for detection of SNP TSC0041307
aaatcgcgtttay

SEQ ID NO: 164590 - DNA, 13 bp, Artificial Sequence
  Oligonucleotide for detection of SNP TSC0041307
rtaaacgcgattt

SEQ ID NO: 164591 - DNA, 13 bp, Artificial Sequence
  Oligonucleotide for detection of SNP TSC0006221
ggaaatggaatty

SEQ ID NO: 164592 - DNA, 13 bp, Artificial Sequence
  Oligonucleotide for detection of SNP TSC0006221
raattccatttcc

SEQ ID NO: 164593 - DNA, 13 bp, Artificial Sequence
  Oligonucleotide for detection of SNP TSC0006221
ggaaatagaatty

SEQ ID NO: 164594 - DNA, 13 bp, Artificial Sequence
  Oligonucleotide for detection of SNP TSC0006221
raattctatttcc

SEQ ID NO: 164595 - DNA, 13 bp, Artificial Sequence
  Oligonucleotide for detection of SNP TSC0041308
ttttatattatga

SEQ ID NO: 164596 - DNA, 13 bp, Artificial Sequence
  Oligonucleotide for detection of SNP TSC0041308
tcataatataaaa

SEQ ID NO: 164597 - DNA, 13 bp, Artificial Sequence
  Oligonucleotide for detection of SNP TSC0041308
ttttattttatga

SEQ ID NO: 164598 - DNA, 13 bp, Artificial Sequence
  Oligonucleotide for detection of SNP TSC0041308
tcataaaataaaa

SEQ ID NO: 164599 - DNA, 13 bp, Artificial Sequence
  Oligonucleotide for detection of SNP TSC0041308
ttatggtatgaga

SEQ ID NO: 164600 - DNA, 13 bp, Artificial Sequence
  Oligonucleotide for detection of SNP TSC0041308
tctcataccataa

SEQ ID NO: 164601 - DNA, 13 bp, Artificial Sequence
  Oligonucleotide for detection of SNP TSC0041308
ttatgggatgaga

SEQ ID NO: 164602 - DNA, 13 bp, Artificial Sequence
  Oligonucleotide for detection of SNP TSC0041308
tctcatcccataa

SEQ ID NO: 164603 - DNA, 13 bp, Artificial Sequence
  Oligonucleotide for detection of SNP TSC0041310
atattattttgaa

SEQ ID NO: 164604 - DNA, 13 bp, Artificial Sequence
  Oligonucleotide for detection of SNP TSC0041310
ttcaaaataatat

SEQ ID NO: 164605 - DNA, 13 bp, Artificial Sequence
  Oligonucleotide for detection of SNP TSC0041310
atattagtttgaa

SEQ ID NO: 164606 - DNA, 13 bp, Artificial Sequence
  Oligonucleotide for detection of SNP TSC0041310
ttcaaactaatat

SEQ ID NO: 164607 - DNA, 13 bp, Artificial Sequence
  Oligonucleotide for detection of SNP TSC0041310
tttagagtgatgt

SEQ ID NO: 164608 - DNA, 13 bp, Artificial Sequence
  Oligonucleotide for detection of SNP TSC0041310
acatcactctaaa

SEQ ID NO: 164609 - DNA, 13 bp, Artificial Sequence
  Oligonucleotide for detection of SNP TSC0041310
tttagattgatgt

SEQ ID NO: 164610 - DNA, 13 bp, Artificial Sequence
  Oligonucleotide for detection of SNP TSC0041310
acatcaatctaaa

SEQ ID NO: 164611 - DNA, 13 bp, Artificial Sequence
  Oligonucleotide for detection of SNP TSC0041311
tttttaagtataa

SEQ ID NO: 164612 - DNA, 13 bp, Artificial Sequence
  Oligonucleotide for detection of SNP TSC0041311
ttatacttaaaaa

SEQ ID NO: 164613 - DNA, 13 bp, Artificial Sequence
  Oligonucleotide for detection of SNP TSC0041311
tttttaggtataa

SEQ ID NO: 164614 - DNA, 13 bp, Artificial Sequence
  Oligonucleotide for detection of SNP TSC0041311
ttatacctaaaaa

SEQ ID NO: 164615 - DNA, 13 bp, Artificial Sequence
  Oligonucleotide for detection of SNP TSC0041312
gagtatatatata

SEQ ID NO: 164616 - DNA, 13 bp, Artificial Sequence
  Oligonucleotide for detection of SNP TSC0041312
tatatatatactc

SEQ ID NO: 164617 - DNA, 13 bp, Artificial Sequence
  Oligonucleotide for detection of SNP TSC0041312
gagtatgtatata

SEQ ID NO: 164618 - DNA, 13 bp, Artificial Sequence
  Oligonucleotide for detection of SNP TSC0041312
tatatacatactc

SEQ ID NO: 164619 - DNA, 13 bp, Artificial Sequence
  Oligonucleotide for detection of SNP TSC0041313
tgatatatgttgg

SEQ ID NO: 164620 - DNA, 13 bp, Artificial Sequence
  Oligonucleotide for detection of SNP TSC0041313
ccaacatatatca

SEQ ID NO: 164621 - DNA, 13 bp, Artificial Sequence
  Oligonucleotide for detection of SNP TSC0041313
tgatatgtgttgg

SEQ ID NO: 164622 - DNA, 13 bp, Artificial Sequence
  Oligonucleotide for detection of SNP TSC0041313
ccaacacatatca

SEQ ID NO: 164623 - DNA, 13 bp, Artificial Sequence
  Oligonucleotide for detection of SNP TSC0041314
atttatataatgg

SEQ ID NO: 164624 - DNA, 13 bp, Artificial Sequence
  Oligonucleotide for detection of SNP TSC0041314
ccattatataaat

SEQ ID NO: 164625 - DNA, 13 bp, Artificial Sequence
  Oligonucleotide for detection of SNP TSC0041314
atttatgtaatgg

SEQ ID NO: 164626 - DNA, 13 bp, Artificial Sequence
  Oligonucleotide for detection of SNP TSC0041314
ccattacataaat

SEQ ID NO: 164627 - DNA, 13 bp, Artificial Sequence
  Oligonucleotide for detection of SNP TSC0041315
aatttttgaagtg

SEQ ID NO: 164628 - DNA, 13 bp, Artificial Sequence
  Oligonucleotide for detection of SNP TSC0041315
cacttcaaaaatt

SEQ ID NO: 164629 - DNA, 13 bp, Artificial Sequence
  Oligonucleotide for detection of SNP TSC0041315
aattttggaagtg

SEQ ID NO: 164630 - DNA, 13 bp, Artificial Sequence
  Oligonucleotide for detection of SNP TSC0041315
cacttccaaaatt

SEQ ID NO: 164631 - DNA, 13 bp, Artificial Sequence
  Oligonucleotide for detection of SNP TSC0041315
aattttcgaagtg

SEQ ID NO: 164632 - DNA, 13 bp, Artificial Sequence
  Oligonucleotide for detection of SNP TSC0041315
cacttcgaaaatt

SEQ ID NO: 164633 - DNA, 13 bp, Artificial Sequence
  Oligonucleotide for detection of SNP TSC0041316
gatttttttaaaa

SEQ ID NO: 164634 - DNA, 13 bp, Artificial Sequence
  Oligonucleotide for detection of SNP TSC0041316
ttttaaaaaaatc

SEQ ID NO: 164635 - DNA, 13 bp, Artificial Sequence
  Oligonucleotide for detection of SNP TSC0041316
gattttgttaaaa

SEQ ID NO: 164636 - DNA, 13 bp, Artificial Sequence
  Oligonucleotide for detection of SNP TSC0041316
ttttaacaaaatc

SEQ ID NO: 164637 - DNA, 13 bp, Artificial Sequence
  Oligonucleotide for detection of SNP TSC0041316
ttttgagaaaaty

SEQ ID NO: 164638 - DNA, 13 bp, Artificial Sequence
  Oligonucleotide for detection of SNP TSC0041316
rattttctcaaaa

SEQ ID NO: 164639 - DNA, 13 bp, Artificial Sequence
  Oligonucleotide for detection of SNP TSC0041316
ttttgaaaaaaty

SEQ ID NO: 164640 - DNA, 13 bp, Artificial Sequence
  Oligonucleotide for detection of SNP TSC0041316
rattttttcaaaa

SEQ ID NO: 164641 - DNA, 13 bp, Artificial Sequence
  Oligonucleotide for detection of SNP TSC0041316
ttttgataaaaty

SEQ ID NO: 164642 - DNA, 13 bp, Artificial Sequence
  Oligonucleotide for detection of SNP TSC0041316
rattttatcaaaa

SEQ ID NO: 164643 - DNA, 13 bp, Artificial Sequence
  Oligonucleotide for detection of SNP TSC0041317
aattgtaaaattt

SEQ ID NO: 164644 - DNA, 13 bp, Artificial Sequence
  Oligonucleotide for detection of SNP TSC0041317
aaattttacaatt

SEQ ID NO: 164645 - DNA, 13 bp, Artificial Sequence
  Oligonucleotide for detection of SNP TSC0041317
aattgttaaattt

SEQ ID NO: 164646 - DNA, 13 bp, Artificial Sequence
  Oligonucleotide for detection of SNP TSC0041317
aaatttaacaatt

SEQ ID NO: 164647 - DNA, 13 bp, Artificial Sequence
  Oligonucleotide for detection of SNP TSC0041317
aggttttataatt

SEQ ID NO: 164648 - DNA, 13 bp, Artificial Sequence
  Oligonucleotide for detection of SNP TSC0041317
aattataaaacct

SEQ ID NO: 164649 - DNA, 13 bp, Artificial Sequence
  Oligonucleotide for detection of SNP TSC0041317
aggtttgataatt

SEQ ID NO: 164650 - DNA, 13 bp, Artificial Sequence
  Oligonucleotide for detection of SNP TSC0041317
aattatcaaacct

SEQ ID NO: 164651 - DNA, 13 bp, Artificial Sequence
  Oligonucleotide for detection of SNP TSC0041318
ttgggatatatty

SEQ ID NO: 164652 - DNA, 13 bp, Artificial Sequence
  Oligonucleotide for detection of SNP TSC0041318
raatatatcccaa

SEQ ID NO: 164653 - DNA, 13 bp, Artificial Sequence
  Oligonucleotide for detection of SNP TSC0041318
ttgggagatatty

SEQ ID NO: 164654 - DNA, 13 bp, Artificial Sequence
  Oligonucleotide for detection of SNP TSC0041318
raatatctcccaa

SEQ ID NO: 164655 - DNA, 13 bp, Artificial Sequence
  Oligonucleotide for detection of SNP TSC0041318
gaatatgttttag

SEQ ID NO: 164656 - DNA, 13 bp, Artificial Sequence
  Oligonucleotide for detection of SNP TSC0041318
ctaaaacatattc

SEQ ID NO: 164657 - DNA, 13 bp, Artificial Sequence
  Oligonucleotide for detection of SNP TSC0041318
gaatattttttag

SEQ ID NO: 164658 - DNA, 13 bp, Artificial Sequence
  Oligonucleotide for detection of SNP TSC0041318
ctaaaaaatattc

SEQ ID NO: 164659 - DNA, 13 bp, Artificial Sequence
  Oligonucleotide for detection of SNP TSC0041319
aataagttagaag

SEQ ID NO: 164660 - DNA, 13 bp, Artificial Sequence
  Oligonucleotide for detection of SNP TSC0041319
cttctaacttatt

SEQ ID NO: 164661 - DNA, 13 bp, Artificial Sequence
  Oligonucleotide for detection of SNP TSC0041319
aataaggtagaag

SEQ ID NO: 164662 - DNA, 13 bp, Artificial Sequence
  Oligonucleotide for detection of SNP TSC0041319
cttctaccttatt

SEQ ID NO: 164663 - DNA, 13 bp, Artificial Sequence
  Oligonucleotide for detection of SNP TSC0041320
taaaaggtattaa

SEQ ID NO: 164664 - DNA, 13 bp, Artificial Sequence
  Oligonucleotide for detection of SNP TSC0041320
ttaatacctttta

SEQ ID NO: 164665 - DNA, 13 bp, Artificial Sequence
  Oligonucleotide for detection of SNP TSC0041320
taaaagatattaa

SEQ ID NO: 164666 - DNA, 13 bp, Artificial Sequence
  Oligonucleotide for detection of SNP TSC0041320
ttaatatctttta

SEQ ID NO: 164667 - DNA, 13 bp, Artificial Sequence
  Oligonucleotide for detection of SNP TSC0006368
aataataaagagy

SEQ ID NO: 164668 - DNA, 13 bp, Artificial Sequence
  Oligonucleotide for detection of SNP TSC0006368
rctctttattatt

SEQ ID NO: 164669 - DNA, 13 bp, Artificial Sequence
  Oligonucleotide for detection of SNP TSC0006368
aataatgaagagy

SEQ ID NO: 164670 - DNA, 13 bp, Artificial Sequence
  Oligonucleotide for detection of SNP TSC0006368
rctcttcattatt

SEQ ID NO: 164671 - DNA, 13 bp, Artificial Sequence
  Oligonucleotide for detection of SNP TSC0041321
atagggtgtatgg

SEQ ID NO: 164672 - DNA, 13 bp, Artificial Sequence
  Oligonucleotide for detection of SNP TSC0041321
ccatacaccctat

SEQ ID NO: 164673 - DNA, 13 bp, Artificial Sequence
  Oligonucleotide for detection of SNP TSC0041321
atagggcgtatgg

SEQ ID NO: 164674 - DNA, 13 bp, Artificial Sequence
  Oligonucleotide for detection of SNP TSC0041321
ccatacgccctat

SEQ ID NO: 164675 - DNA, 13 bp, Artificial Sequence
  Oligonucleotide for detection of SNP TSC0041321
ttatgtgttttgt

SEQ ID NO: 164676 - DNA, 13 bp, Artificial Sequence
  Oligonucleotide for detection of SNP TSC0041321
acaaaacacataa

SEQ ID NO: 164677 - DNA, 13 bp, Artificial Sequence
  Oligonucleotide for detection of SNP TSC0041321
ttatgcgttttgt

SEQ ID NO: 164678 - DNA, 13 bp, Artificial Sequence
  Oligonucleotide for detection of SNP TSC0041321
acaaaacgcataa

SEQ ID NO: 164679 - DNA, 13 bp, Artificial Sequence
  Oligonucleotide for detection of SNP TSC0041322
gtatttattgata

SEQ ID NO: 164680 - DNA, 13 bp, Artificial Sequence
  Oligonucleotide for detection of SNP TSC0041322
tatcaataaatac

SEQ ID NO: 164681 - DNA, 13 bp, Artificial Sequence
  Oligonucleotide for detection of SNP TSC0041322
gtatttgttgata

SEQ ID NO: 164682 - DNA, 13 bp, Artificial Sequence
  Oligonucleotide for detection of SNP TSC0041322
tatcaacaaatac

SEQ ID NO: 164683 - DNA, 13 bp, Artificial Sequence
  Oligonucleotide for detection of SNP TSC0041323
ttagggggggtag

SEQ ID NO: 164684 - DNA, 13 bp, Artificial Sequence
  Oligonucleotide for detection of SNP TSC0041323
ctaccccccctaa

SEQ ID NO: 164685 - DNA, 13 bp, Artificial Sequence
  Oligonucleotide for detection of SNP TSC0041324
gttttttttgatg

SEQ ID NO: 164686 - DNA, 13 bp, Artificial Sequence
  Oligonucleotide for detection of SNP TSC0041324
catcaaaaaaaac

SEQ ID NO: 164687 - DNA, 13 bp, Artificial Sequence
  Oligonucleotide for detection of SNP TSC0041324
gtttttgttgatg

SEQ ID NO: 164688 - DNA, 13 bp, Artificial Sequence
  Oligonucleotide for detection of SNP TSC0041324
catcaacaaaaac

SEQ ID NO: 164689 - DNA, 13 bp, Artificial Sequence
  Oligonucleotide for detection of SNP TSC0041324
gttttttttgacg

SEQ ID NO: 164690 - DNA, 13 bp, Artificial Sequence
  Oligonucleotide for detection of SNP TSC0041324
cgtcaaaaaaaac

SEQ ID NO: 164691 - DNA, 13 bp, Artificial Sequence
  Oligonucleotide for detection of SNP TSC0041324
gttttcgttgatg

SEQ ID NO: 164692 - DNA, 13 bp, Artificial Sequence
  Oligonucleotide for detection of SNP TSC0041324
catcaacgaaaac

SEQ ID NO: 164693 - DNA, 13 bp, Artificial Sequence
  Oligonucleotide for detection of SNP TSC0041324
gtttttgttgacg

SEQ ID NO: 164694 - DNA, 13 bp, Artificial Sequence
  Oligonucleotide for detection of SNP TSC0041324
cgtcaacaaaaac

SEQ ID NO: 164695 - DNA, 13 bp, Artificial Sequence
  Oligonucleotide for detection of SNP TSC0041324
gttttcgttgacg

SEQ ID NO: 164696 - DNA, 13 bp, Artificial Sequence
  Oligonucleotide for detection of SNP TSC0041324
cgtcaacgaaaac

SEQ ID NO: 164697 - DNA, 13 bp, Artificial Sequence
  Oligonucleotide for detection of SNP TSC0041324
tgttagggggggy

SEQ ID NO: 164698 - DNA, 13 bp, Artificial Sequence
  Oligonucleotide for detection of SNP TSC0041324
rccccccctaaca

SEQ ID NO: 164699 - DNA, 13 bp, Artificial Sequence
  Oligonucleotide for detection of SNP TSC0041324
tgttagtgggggy

SEQ ID NO: 164700 - DNA, 13 bp, Artificial Sequence
  Oligonucleotide for detection of SNP TSC0041324
rcccccactaaca

SEQ ID NO: 164701 - DNA, 13 bp, Artificial Sequence
  Oligonucleotide for detection of SNP TSC0041324
cgttagggggggy

SEQ ID NO: 164702 - DNA, 13 bp, Artificial Sequence
  Oligonucleotide for detection of SNP TSC0041324
rccccccctaacg

SEQ ID NO: 164703 - DNA, 13 bp, Artificial Sequence
  Oligonucleotide for detection of SNP TSC0041324
cgttagtgggggy

SEQ ID NO: 164704 - DNA, 13 bp, Artificial Sequence
  Oligonucleotide for detection of SNP TSC0041324
rcccccactaacg

SEQ ID NO: 164705 - DNA, 13 bp, Artificial Sequence
  Oligonucleotide for detection of SNP TSC0041324
tgttagcgggggy

SEQ ID NO: 164706 - DNA, 13 bp, Artificial Sequence
  Oligonucleotide for detection of SNP TSC0041324
rcccccgctaaca

SEQ ID NO: 164707 - DNA, 13 bp, Artificial Sequence
  Oligonucleotide for detection of SNP TSC0041324
cgttagcgggggy

SEQ ID NO: 164708 - DNA, 13 bp, Artificial Sequence
  Oligonucleotide for detection of SNP TSC0041324
rcccccgctaacg

SEQ ID NO: 164709 - DNA, 13 bp, Artificial Sequence
  Oligonucleotide for detection of SNP TSC0041325
gggtgtatggaty

SEQ ID NO: 164710 - DNA, 13 bp, Artificial Sequence
  Oligonucleotide for detection of SNP TSC0041325
ratccatacaccc

SEQ ID NO: 164711 - DNA, 13 bp, Artificial Sequence
  Oligonucleotide for detection of SNP TSC0041325
gggtgtgtggaty

SEQ ID NO: 164712 - DNA, 13 bp, Artificial Sequence
  Oligonucleotide for detection of SNP TSC0041325
ratccacacaccc

SEQ ID NO: 164713 - DNA, 13 bp, Artificial Sequence
  Oligonucleotide for detection of SNP TSC0041325
gggtgcgtggaty

SEQ ID NO: 164714 - DNA, 13 bp, Artificial Sequence
  Oligonucleotide for detection of SNP TSC0041325
ratccacgcaccc

SEQ ID NO: 164715 - DNA, 13 bp, Artificial Sequence
  Oligonucleotide for detection of SNP TSC0041325
ggtttatgtatty

SEQ ID NO: 164716 - DNA, 13 bp, Artificial Sequence
  Oligonucleotide for detection of SNP TSC0041325
raatacataaacc

SEQ ID NO: 164717 - DNA, 13 bp, Artificial Sequence
  Oligonucleotide for detection of SNP TSC0041325
ggtttacgtatty

SEQ ID NO: 164718 - DNA, 13 bp, Artificial Sequence
  Oligonucleotide for detection of SNP TSC0041325
raatacgtaaacc

SEQ ID NO: 164719 - DNA, 13 bp, Artificial Sequence
  Oligonucleotide for detection of SNP TSC0041326
attatagtaatty

SEQ ID NO: 164720 - DNA, 13 bp, Artificial Sequence
  Oligonucleotide for detection of SNP TSC0041326
raattactataat

SEQ ID NO: 164721 - DNA, 13 bp, Artificial Sequence
  Oligonucleotide for detection of SNP TSC0041326
attataataatty

SEQ ID NO: 164722 - DNA, 13 bp, Artificial Sequence
  Oligonucleotide for detection of SNP TSC0041326
raattattataat

SEQ ID NO: 164723 - DNA, 13 bp, Artificial Sequence
  Oligonucleotide for detection of SNP TSC0041329
gtttgtgtttaaa

SEQ ID NO: 164724 - DNA, 13 bp, Artificial Sequence
  Oligonucleotide for detection of SNP TSC0041329
tttaaacacaaac

SEQ ID NO: 164725 - DNA, 13 bp, Artificial Sequence
  Oligonucleotide for detection of SNP TSC0041329
gttcgtgtttaaa

SEQ ID NO: 164726 - DNA, 13 bp, Artificial Sequence
  Oligonucleotide for detection of SNP TSC0041329
tttaaacacgaac

SEQ ID NO: 164727 - DNA, 13 bp, Artificial Sequence
  Oligonucleotide for detection of SNP TSC0041329
gttcgtatttaaa

SEQ ID NO: 164728 - DNA, 13 bp, Artificial Sequence
  Oligonucleotide for detection of SNP TSC0041329
tttaaatacgaac

SEQ ID NO: 164729 - DNA, 13 bp, Artificial Sequence
  Oligonucleotide for detection of SNP TSC0041330
tttttggtaaagt

SEQ ID NO: 164730 - DNA, 13 bp, Artificial Sequence
  Oligonucleotide for detection of SNP TSC0041330
actttaccaaaaa

SEQ ID NO: 164731 - DNA, 13 bp, Artificial Sequence
  Oligonucleotide for detection of SNP TSC0041330
tttttgataaagt

SEQ ID NO: 164732 - DNA, 13 bp, Artificial Sequence
  Oligonucleotide for detection of SNP TSC0041330
actttatcaaaaa

SEQ ID NO: 164733 - DNA, 13 bp, Artificial Sequence
  Oligonucleotide for detection of SNP TSC0041333
ttttatatttgtt

SEQ ID NO: 164734 - DNA, 13 bp, Artificial Sequence
  Oligonucleotide for detection of SNP TSC0041333
aacaaatataaaa

SEQ ID NO: 164735 - DNA, 13 bp, Artificial Sequence
  Oligonucleotide for detection of SNP TSC0041333
ttttatgtttgtt

SEQ ID NO: 164736 - DNA, 13 bp, Artificial Sequence
  Oligonucleotide for detection of SNP TSC0041333
aacaaacataaaa

SEQ ID NO: 164737 - DNA, 13 bp, Artificial Sequence
  Oligonucleotide for detection of SNP TSC0041334
attttaaattaay

SEQ ID NO: 164738 - DNA, 13 bp, Artificial Sequence
  Oligonucleotide for detection of SNP TSC0041334
rttaatttaaaat

SEQ ID NO: 164739 - DNA, 13 bp, Artificial Sequence
  Oligonucleotide for detection of SNP TSC0041334
attttatattaay

SEQ ID NO: 164740 - DNA, 13 bp, Artificial Sequence
  Oligonucleotide for detection of SNP TSC0041334
rttaatataaaat

SEQ ID NO: 164741 - DNA, 13 bp, Artificial Sequence
  Oligonucleotide for detection of SNP TSC0041334
gttgatttgaggt

SEQ ID NO: 164742 - DNA, 13 bp, Artificial Sequence
  Oligonucleotide for detection of SNP TSC0041334
acctcaaatcaac

SEQ ID NO: 164743 - DNA, 13 bp, Artificial Sequence
  Oligonucleotide for detection of SNP TSC0041334
gttgatgtgaggt

SEQ ID NO: 164744 - DNA, 13 bp, Artificial Sequence
  Oligonucleotide for detection of SNP TSC0041334
acctcacatcaac

SEQ ID NO: 164745 - DNA, 13 bp, Artificial Sequence
  Oligonucleotide for detection of SNP TSC0041336
tgattttgtatgg

SEQ ID NO: 164746 - DNA, 13 bp, Artificial Sequence
  Oligonucleotide for detection of SNP TSC0041336
ccatacaaaatca

SEQ ID NO: 164747 - DNA, 13 bp, Artificial Sequence
  Oligonucleotide for detection of SNP TSC0041336
tgatttggtatgg

SEQ ID NO: 164748 - DNA, 13 bp, Artificial Sequence
  Oligonucleotide for detection of SNP TSC0041336
ccataccaaatca

SEQ ID NO: 164749 - DNA, 13 bp, Artificial Sequence
  Oligonucleotide for detection of SNP TSC0041336
tgattcggtatgg

SEQ ID NO: 164750 - DNA, 13 bp, Artificial Sequence
  Oligonucleotide for detection of SNP TSC0041336
ccataccgaatca

SEQ ID NO: 164751 - DNA, 13 bp, Artificial Sequence
  Oligonucleotide for detection of SNP TSC0041336
ttatgtagggtta

SEQ ID NO: 164752 - DNA, 13 bp, Artificial Sequence
  Oligonucleotide for detection of SNP TSC0041336
taaccctacataa

SEQ ID NO: 164753 - DNA, 13 bp, Artificial Sequence
  Oligonucleotide for detection of SNP TSC0041340
ttttttaatggag

SEQ ID NO: 164754 - DNA, 13 bp, Artificial Sequence
  Oligonucleotide for detection of SNP TSC0041340
ctccattaaaaaa

SEQ ID NO: 164755 - DNA, 13 bp, Artificial Sequence
  Oligonucleotide for detection of SNP TSC0041340
ttttttgatggag

SEQ ID NO: 164756 - DNA, 13 bp, Artificial Sequence
  Oligonucleotide for detection of SNP TSC0041340
ctccatcaaaaaa

SEQ ID NO: 164757 - DNA, 13 bp, Artificial Sequence
  Oligonucleotide for detection of SNP TSC0041341
aattaaagtaaag

SEQ ID NO: 164758 - DNA, 13 bp, Artificial Sequence
  Oligonucleotide for detection of SNP TSC0041341
ctttactttaatt

SEQ ID NO: 164759 - DNA, 13 bp, Artificial Sequence
  Oligonucleotide for detection of SNP TSC0041341
aattaaggtaaag

SEQ ID NO: 164760 - DNA, 13 bp, Artificial Sequence
  Oligonucleotide for detection of SNP TSC0041341
ctttaccttaatt

SEQ ID NO: 164761 - DNA, 13 bp, Artificial Sequence
  Oligonucleotide for detection of SNP TSC0041342
gagtgtatatagy

SEQ ID NO: 164762 - DNA, 13 bp, Artificial Sequence
  Oligonucleotide for detection of SNP TSC0041342
rctatatacactc

SEQ ID NO: 164763 - DNA, 13 bp, Artificial Sequence
  Oligonucleotide for detection of SNP TSC0041342
gagtgtgtatagy

SEQ ID NO: 164764 - DNA, 13 bp, Artificial Sequence
  Oligonucleotide for detection of SNP TSC0041342
rctatacacactc

SEQ ID NO: 164765 - DNA, 13 bp, Artificial Sequence
  Oligonucleotide for detection of SNP TSC0041342
gagcgtatatagy

SEQ ID NO: 164766 - DNA, 13 bp, Artificial Sequence
  Oligonucleotide for detection of SNP TSC0041342
rctatatacgctc

SEQ ID NO: 164767 - DNA, 13 bp, Artificial Sequence
  Oligonucleotide for detection of SNP TSC0041342
gagcgtgtatagy

SEQ ID NO: 164768 - DNA, 13 bp, Artificial Sequence
  Oligonucleotide for detection of SNP TSC0041342
rctatacacgctc

SEQ ID NO: 164769 - DNA, 13 bp, Artificial Sequence
  Oligonucleotide for detection of SNP TSC0041342
gagtgcgtatagy

SEQ ID NO: 164770 - DNA, 13 bp, Artificial Sequence
  Oligonucleotide for detection of SNP TSC0041342
rctatacgcactc

SEQ ID NO: 164771 - DNA, 13 bp, Artificial Sequence
  Oligonucleotide for detection of SNP TSC0041342
gagcgcgtatagy

SEQ ID NO: 164772 - DNA, 13 bp, Artificial Sequence
  Oligonucleotide for detection of SNP TSC0041342
rctatacgcgctc

SEQ ID NO: 164773 - DNA, 13 bp, Artificial Sequence
  Oligonucleotide for detection of SNP TSC0041342
gttgtatgtgtty

SEQ ID NO: 164774 - DNA, 13 bp, Artificial Sequence
  Oligonucleotide for detection of SNP TSC0041342
raacacatacaac

SEQ ID NO: 164775 - DNA, 13 bp, Artificial Sequence
  Oligonucleotide for detection of SNP TSC0041342
gttgtatgcgtty

SEQ ID NO: 164776 - DNA, 13 bp, Artificial Sequence
  Oligonucleotide for detection of SNP TSC0041342
raacgcatacaac

SEQ ID NO: 164777 - DNA, 13 bp, Artificial Sequence
  Oligonucleotide for detection of SNP TSC0041342
gttgtacgtgtty

SEQ ID NO: 164778 - DNA, 13 bp, Artificial Sequence
  Oligonucleotide for detection of SNP TSC0041342
raacacgtacaac

SEQ ID NO: 164779 - DNA, 13 bp, Artificial Sequence
  Oligonucleotide for detection of SNP TSC0041342
gttgtacgcgtty

SEQ ID NO: 164780 - DNA, 13 bp, Artificial Sequence
  Oligonucleotide for detection of SNP TSC0041342
raacgcgtacaac

SEQ ID NO: 164781 - DNA, 13 bp, Artificial Sequence
  Oligonucleotide for detection of SNP TSC0041343
atataaagtaggt

SEQ ID NO: 164782 - DNA, 13 bp, Artificial Sequence
  Oligonucleotide for detection of SNP TSC0041343
acctactttatat

SEQ ID NO: 164783 - DNA, 13 bp, Artificial Sequence
  Oligonucleotide for detection of SNP TSC0041343
atataatgtaggt

SEQ ID NO: 164784 - DNA, 13 bp, Artificial Sequence
  Oligonucleotide for detection of SNP TSC0041343
acctacattatat

SEQ ID NO: 164785 - DNA, 13 bp, Artificial Sequence
  Oligonucleotide for detection of SNP TSC0041343
atataacgtaggt

SEQ ID NO: 164786 - DNA, 13 bp, Artificial Sequence
  Oligonucleotide for detection of SNP TSC0041343
acctacgttatat

SEQ ID NO: 164787 - DNA, 13 bp, Artificial Sequence
  Oligonucleotide for detection of SNP TSC0041343
atttgttttgtgt

SEQ ID NO: 164788 - DNA, 13 bp, Artificial Sequence
  Oligonucleotide for detection of SNP TSC0041343
acacaaaacaaat

SEQ ID NO: 164789 - DNA, 13 bp, Artificial Sequence
  Oligonucleotide for detection of SNP TSC0041343
atttgtgttgtgt

SEQ ID NO: 164790 - DNA, 13 bp, Artificial Sequence
  Oligonucleotide for detection of SNP TSC0041343
acacaacacaaat

SEQ ID NO: 164791 - DNA, 13 bp, Artificial Sequence
  Oligonucleotide for detection of SNP TSC0041343
atttgtattgtgt

SEQ ID NO: 164792 - DNA, 13 bp, Artificial Sequence
  Oligonucleotide for detection of SNP TSC0041343
acacaatacaaat

SEQ ID NO: 164793 - DNA, 13 bp, Artificial Sequence
  Oligonucleotide for detection of SNP TSC0041343
atttgcgttgtgt

SEQ ID NO: 164794 - DNA, 13 bp, Artificial Sequence
  Oligonucleotide for detection of SNP TSC0041343
acacaacgcaaat

SEQ ID NO: 164795 - DNA, 13 bp, Artificial Sequence
  Oligonucleotide for detection of SNP TSC0041344
ataggttgttggg

SEQ ID NO: 164796 - DNA, 13 bp, Artificial Sequence
  Oligonucleotide for detection of SNP TSC0041344
cccaacaacctat

SEQ ID NO: 164797 - DNA, 13 bp, Artificial Sequence
  Oligonucleotide for detection of SNP TSC0041344
ataggtcgttggg

SEQ ID NO: 164798 - DNA, 13 bp, Artificial Sequence
  Oligonucleotide for detection of SNP TSC0041344
cccaacgacctat

SEQ ID NO: 164799 - DNA, 13 bp, Artificial Sequence
  Oligonucleotide for detection of SNP TSC0041344
tttaatggtttgt

SEQ ID NO: 164800 - DNA, 13 bp, Artificial Sequence
  Oligonucleotide for detection of SNP TSC0041344
acaaaccattaaa

SEQ ID NO: 164801 - DNA, 13 bp, Artificial Sequence
  Oligonucleotide for detection of SNP TSC0041344
tttaatagtttgt

SEQ ID NO: 164802 - DNA, 13 bp, Artificial Sequence
  Oligonucleotide for detection of SNP TSC0041344
acaaactattaaa

SEQ ID NO: 164803 - DNA, 13 bp, Artificial Sequence
  Oligonucleotide for detection of SNP TSC0041344
tttaacggtttgt

SEQ ID NO: 164804 - DNA, 13 bp, Artificial Sequence
  Oligonucleotide for detection of SNP TSC0041344
acaaaccgttaaa

SEQ ID NO: 164805 - DNA, 13 bp, Artificial Sequence
  Oligonucleotide for detection of SNP TSC0041345
ggaattagtattt

SEQ ID NO: 164806 - DNA, 13 bp, Artificial Sequence
  Oligonucleotide for detection of SNP TSC0041345
aaatactaattcc

SEQ ID NO: 164807 - DNA, 13 bp, Artificial Sequence
  Oligonucleotide for detection of SNP TSC0041345
ggaattggtattt

SEQ ID NO: 164808 - DNA, 13 bp, Artificial Sequence
  Oligonucleotide for detection of SNP TSC0041345
aaataccaattcc

SEQ ID NO: 164809 - DNA, 13 bp, Artificial Sequence
  Oligonucleotide for detection of SNP TSC0041346
aaattttgtaata

SEQ ID NO: 164810 - DNA, 13 bp, Artificial Sequence
  Oligonucleotide for detection of SNP TSC0041346
tattacaaaattt

SEQ ID NO: 164811 - DNA, 13 bp, Artificial Sequence
  Oligonucleotide for detection of SNP TSC0041346
aaatttggtaata

SEQ ID NO: 164812 - DNA, 13 bp, Artificial Sequence
  Oligonucleotide for detection of SNP TSC0041346
tattaccaaattt

SEQ ID NO: 164813 - DNA, 13 bp, Artificial Sequence
  Oligonucleotide for detection of SNP TSC0041346
tattataaaattt

SEQ ID NO: 164814 - DNA, 13 bp, Artificial Sequence
  Oligonucleotide for detection of SNP TSC0041346
aaattttataata

SEQ ID NO: 164815 - DNA, 13 bp, Artificial Sequence
  Oligonucleotide for detection of SNP TSC0041346
tattattaaattt

SEQ ID NO: 164816 - DNA, 13 bp, Artificial Sequence
  Oligonucleotide for detection of SNP TSC0041346
aaatttaataata

SEQ ID NO: 164817 - DNA, 13 bp, Artificial Sequence
  Oligonucleotide for detection of SNP TSC0041347
aattttttaatat

SEQ ID NO: 164818 - DNA, 13 bp, Artificial Sequence
  Oligonucleotide for detection of SNP TSC0041347
atattaaaaaatt

SEQ ID NO: 164819 - DNA, 13 bp, Artificial Sequence
  Oligonucleotide for detection of SNP TSC0041347
aattttgtaatat

SEQ ID NO: 164820 - DNA, 13 bp, Artificial Sequence
  Oligonucleotide for detection of SNP TSC0041347
atattacaaaatt

SEQ ID NO: 164821 - DNA, 13 bp, Artificial Sequence
  Oligonucleotide for detection of SNP TSC0041347
atattataaaatt

SEQ ID NO: 164822 - DNA, 13 bp, Artificial Sequence
  Oligonucleotide for detection of SNP TSC0041347
aattttataatat

SEQ ID NO: 164823 - DNA, 13 bp, Artificial Sequence
  Oligonucleotide for detection of SNP TSC0041352
aggattatgttgg

SEQ ID NO: 164824 - DNA, 13 bp, Artificial Sequence
  Oligonucleotide for detection of SNP TSC0041352
ccaacataatcct

SEQ ID NO: 164825 - DNA, 13 bp, Artificial Sequence
  Oligonucleotide for detection of SNP TSC0041352
aggattttgttgg

SEQ ID NO: 164826 - DNA, 13 bp, Artificial Sequence
  Oligonucleotide for detection of SNP TSC0041352
ccaacaaaatcct

SEQ ID NO: 164827 - DNA, 13 bp, Artificial Sequence
  Oligonucleotide for detection of SNP TSC0041353
ggtgggagtatgg

SEQ ID NO: 164828 - DNA, 13 bp, Artificial Sequence
  Oligonucleotide for detection of SNP TSC0041353
ccatactcccacc

SEQ ID NO: 164829 - DNA, 13 bp, Artificial Sequence
  Oligonucleotide for detection of SNP TSC0041353
ggtgggggtatgg

SEQ ID NO: 164830 - DNA, 13 bp, Artificial Sequence
  Oligonucleotide for detection of SNP TSC0041353
ccatacccccacc

SEQ ID NO: 164831 - DNA, 13 bp, Artificial Sequence
  Oligonucleotide for detection of SNP TSC0041354
atagatatattty

SEQ ID NO: 164832 - DNA, 13 bp, Artificial Sequence
  Oligonucleotide for detection of SNP TSC0041354
raaatatatctat

SEQ ID NO: 164833 - DNA, 13 bp, Artificial Sequence
  Oligonucleotide for detection of SNP TSC0041354
atagatgtattty

SEQ ID NO: 164834 - DNA, 13 bp, Artificial Sequence
  Oligonucleotide for detection of SNP TSC0041354
raaatacatctat

SEQ ID NO: 164835 - DNA, 13 bp, Artificial Sequence
  Oligonucleotide for detection of SNP TSC0041355
gagagaaagttag

SEQ ID NO: 164836 - DNA, 13 bp, Artificial Sequence
  Oligonucleotide for detection of SNP TSC0041355
ctaactttctctc

SEQ ID NO: 164837 - DNA, 13 bp, Artificial Sequence
  Oligonucleotide for detection of SNP TSC0041355
gagagagagttag

SEQ ID NO: 164838 - DNA, 13 bp, Artificial Sequence
  Oligonucleotide for detection of SNP TSC0041355
ctaactctctctc

SEQ ID NO: 164839 - DNA, 13 bp, Artificial Sequence
  Oligonucleotide for detection of SNP TSC0009582
ggaatatgatttg

SEQ ID NO: 164840 - DNA, 13 bp, Artificial Sequence
  Oligonucleotide for detection of SNP TSC0009582
caaatcatattcc

SEQ ID NO: 164841 - DNA, 13 bp, Artificial Sequence
  Oligonucleotide for detection of SNP TSC0009582
ggaatacgatttg

SEQ ID NO: 164842 - DNA, 13 bp, Artificial Sequence
  Oligonucleotide for detection of SNP TSC0009582
caaatcgtattcc

SEQ ID NO: 164843 - DNA, 13 bp, Artificial Sequence
  Oligonucleotide for detection of SNP TSC0009582
tagattgtattty

SEQ ID NO: 164844 - DNA, 13 bp, Artificial Sequence
  Oligonucleotide for detection of SNP TSC0009582
raaatacaatcta

SEQ ID NO: 164845 - DNA, 13 bp, Artificial Sequence
  Oligonucleotide for detection of SNP TSC0009582
tagattatattty

SEQ ID NO: 164846 - DNA, 13 bp, Artificial Sequence
  Oligonucleotide for detection of SNP TSC0009582
raaatataatcta

SEQ ID NO: 164847 - DNA, 13 bp, Artificial Sequence
  Oligonucleotide for detection of SNP TSC0009582
tagatcgtattty

SEQ ID NO: 164848 - DNA, 13 bp, Artificial Sequence
  Oligonucleotide for detection of SNP TSC0009582
raaatacgatcta

SEQ ID NO: 164849 - DNA, 13 bp, Artificial Sequence
  Oligonucleotide for detection of SNP TSC0041356
tttattataagtt

SEQ ID NO: 164850 - DNA, 13 bp, Artificial Sequence
  Oligonucleotide for detection of SNP TSC0041356
aacttataataaa

SEQ ID NO: 164851 - DNA, 13 bp, Artificial Sequence
  Oligonucleotide for detection of SNP TSC0041356
tttattgtaagtt

SEQ ID NO: 164852 - DNA, 13 bp, Artificial Sequence
  Oligonucleotide for detection of SNP TSC0041356
aacttacaataaa

SEQ ID NO: 164853 - DNA, 13 bp, Artificial Sequence
  Oligonucleotide for detection of SNP TSC0041357
aattataggttag

SEQ ID NO: 164854 - DNA, 13 bp, Artificial Sequence
  Oligonucleotide for detection of SNP TSC0041357
ctaacctataatt

SEQ ID NO: 164855 - DNA, 13 bp, Artificial Sequence
  Oligonucleotide for detection of SNP TSC0041357
aattattggttag

SEQ ID NO: 164856 - DNA, 13 bp, Artificial Sequence
  Oligonucleotide for detection of SNP TSC0041357
ctaaccaataatt

SEQ ID NO: 164857 - DNA, 13 bp, Artificial Sequence
  Oligonucleotide for detection of SNP TSC0041357
ttggtttgtagtt

SEQ ID NO: 164858 - DNA, 13 bp, Artificial Sequence
  Oligonucleotide for detection of SNP TSC0041357
aactacaaaccaa

SEQ ID NO: 164859 - DNA, 13 bp, Artificial Sequence
  Oligonucleotide for detection of SNP TSC0041357
ttggttagtagtt

SEQ ID NO: 164860 - DNA, 13 bp, Artificial Sequence
  Oligonucleotide for detection of SNP TSC0041357
aactactaaccaa

SEQ ID NO: 164861 - DNA, 13 bp, Artificial Sequence
  Oligonucleotide for detection of SNP TSC0041358
aatattgttaaaa

SEQ ID NO: 164862 - DNA, 13 bp, Artificial Sequence
  Oligonucleotide for detection of SNP TSC0041358
ttttaacaatatt

SEQ ID NO: 164863 - DNA, 13 bp, Artificial Sequence
  Oligonucleotide for detection of SNP TSC0041358
ttttgatggtgtt

SEQ ID NO: 164864 - DNA, 13 bp, Artificial Sequence
  Oligonucleotide for detection of SNP TSC0041358
aacaccatcaaaa

SEQ ID NO: 164865 - DNA, 13 bp, Artificial Sequence
  Oligonucleotide for detection of SNP TSC0041358
ttttgacggtgtt

SEQ ID NO: 164866 - DNA, 13 bp, Artificial Sequence
  Oligonucleotide for detection of SNP TSC0041358
aacaccgtcaaaa

SEQ ID NO: 164867 - DNA, 13 bp, Artificial Sequence
  Oligonucleotide for detection of SNP TSC0041359
ataataatagggy

SEQ ID NO: 164868 - DNA, 13 bp, Artificial Sequence
  Oligonucleotide for detection of SNP TSC0041359
rccctattattat

SEQ ID NO: 164869 - DNA, 13 bp, Artificial Sequence
  Oligonucleotide for detection of SNP TSC0041359
ataatagtagggy

SEQ ID NO: 164870 - DNA, 13 bp, Artificial Sequence
  Oligonucleotide for detection of SNP TSC0041359
rccctactattat

SEQ ID NO: 164871 - DNA, 13 bp, Artificial Sequence
  Oligonucleotide for detection of SNP TSC0041363
ttagagggtttgt

SEQ ID NO: 164872 - DNA, 13 bp, Artificial Sequence
  Oligonucleotide for detection of SNP TSC0041363
acaaaccctctaa

SEQ ID NO: 164873 - DNA, 13 bp, Artificial Sequence
  Oligonucleotide for detection of SNP TSC0041363
ttagagagtttgt

SEQ ID NO: 164874 - DNA, 13 bp, Artificial Sequence
  Oligonucleotide for detection of SNP TSC0041363
acaaactctctaa

SEQ ID NO: 164875 - DNA, 13 bp, Artificial Sequence
  Oligonucleotide for detection of SNP TSC0041364
ggaatgtgttata

SEQ ID NO: 164876 - DNA, 13 bp, Artificial Sequence
  Oligonucleotide for detection of SNP TSC0041364
tataacacattcc

SEQ ID NO: 164877 - DNA, 13 bp, Artificial Sequence
  Oligonucleotide for detection of SNP TSC0041364
ggaacgtgttata

SEQ ID NO: 164878 - DNA, 13 bp, Artificial Sequence
  Oligonucleotide for detection of SNP TSC0041364
tataacacgttcc

SEQ ID NO: 164879 - DNA, 13 bp, Artificial Sequence
  Oligonucleotide for detection of SNP TSC0041364
ggaatgcgttata

SEQ ID NO: 164880 - DNA, 13 bp, Artificial Sequence
  Oligonucleotide for detection of SNP TSC0041364
tataacgcattcc

SEQ ID NO: 164881 - DNA, 13 bp, Artificial Sequence
  Oligonucleotide for detection of SNP TSC0041364
ggaacgcgttata

SEQ ID NO: 164882 - DNA, 13 bp, Artificial Sequence
  Oligonucleotide for detection of SNP TSC0041364
tataacgcgttcc

SEQ ID NO: 164883 - DNA, 13 bp, Artificial Sequence
  Oligonucleotide for detection of SNP TSC0041364
tataatgtgttty

SEQ ID NO: 164884 - DNA, 13 bp, Artificial Sequence
  Oligonucleotide for detection of SNP TSC0041364
raaacacattata

SEQ ID NO: 164885 - DNA, 13 bp, Artificial Sequence
  Oligonucleotide for detection of SNP TSC0041364
tataatatgttty

SEQ ID NO: 164886 - DNA, 13 bp, Artificial Sequence
  Oligonucleotide for detection of SNP TSC0041364
raaacatattata

SEQ ID NO: 164887 - DNA, 13 bp, Artificial Sequence
  Oligonucleotide for detection of SNP TSC0041364
tataacgtgttty

SEQ ID NO: 164888 - DNA, 13 bp, Artificial Sequence
  Oligonucleotide for detection of SNP TSC0041364
raaacacgttata

SEQ ID NO: 164889 - DNA, 13 bp, Artificial Sequence
  Oligonucleotide for detection of SNP TSC0041364
tataatacgttty

SEQ ID NO: 164890 - DNA, 13 bp, Artificial Sequence
  Oligonucleotide for detection of SNP TSC0041364
raaacgtattata

SEQ ID NO: 164891 - DNA, 13 bp, Artificial Sequence
  Oligonucleotide for detection of SNP TSC0041364
tataatgcgttty

SEQ ID NO: 164892 - DNA, 13 bp, Artificial Sequence
  Oligonucleotide for detection of SNP TSC0041364
raaacgcattata

SEQ ID NO: 164893 - DNA, 13 bp, Artificial Sequence
  Oligonucleotide for detection of SNP TSC0041364
tataacgcgttty

SEQ ID NO: 164894 - DNA, 13 bp, Artificial Sequence
  Oligonucleotide for detection of SNP TSC0041364
raaacgcgttata

SEQ ID NO: 164895 - DNA, 13 bp, Artificial Sequence
  Oligonucleotide for detection of SNP TSC0041365
ttggggatttgta

SEQ ID NO: 164896 - DNA, 13 bp, Artificial Sequence
  Oligonucleotide for detection of SNP TSC0041365
tacaaatccccaa

SEQ ID NO: 164897 - DNA, 13 bp, Artificial Sequence
  Oligonucleotide for detection of SNP TSC0041365
ttgggggtttgta

SEQ ID NO: 164898 - DNA, 13 bp, Artificial Sequence
  Oligonucleotide for detection of SNP TSC0041365
tacaaacccccaa

SEQ ID NO: 164899 - DNA, 13 bp, Artificial Sequence
  Oligonucleotide for detection of SNP TSC0041366
atttatatagaty

SEQ ID NO: 164900 - DNA, 13 bp, Artificial Sequence
  Oligonucleotide for detection of SNP TSC0041366
ratctatataaat

SEQ ID NO: 164901 - DNA, 13 bp, Artificial Sequence
  Oligonucleotide for detection of SNP TSC0041366
atttatgtagaty

SEQ ID NO: 164902 - DNA, 13 bp, Artificial Sequence
  Oligonucleotide for detection of SNP TSC0041366
ratctacataaat

SEQ ID NO: 164903 - DNA, 13 bp, Artificial Sequence
  Oligonucleotide for detection of SNP TSC0041366
atttacgtagaty

SEQ ID NO: 164904 - DNA, 13 bp, Artificial Sequence
  Oligonucleotide for detection of SNP TSC0041366
ratctacgtaaat

SEQ ID NO: 164905 - DNA, 13 bp, Artificial Sequence
  Oligonucleotide for detection of SNP TSC0041366
ggtttgtgtgggt

SEQ ID NO: 164906 - DNA, 13 bp, Artificial Sequence
  Oligonucleotide for detection of SNP TSC0041366
acccacacaaacc

SEQ ID NO: 164907 - DNA, 13 bp, Artificial Sequence
  Oligonucleotide for detection of SNP TSC0041366
ggtttgcgtgggt

SEQ ID NO: 164908 - DNA, 13 bp, Artificial Sequence
  Oligonucleotide for detection of SNP TSC0041366
acccacgcaaacc

SEQ ID NO: 164909 - DNA, 13 bp, Artificial Sequence
  Oligonucleotide for detection of SNP TSC0041367
aattaatattttt

SEQ ID NO: 164910 - DNA, 13 bp, Artificial Sequence
  Oligonucleotide for detection of SNP TSC0041367
aaaaatattaatt

SEQ ID NO: 164911 - DNA, 13 bp, Artificial Sequence
  Oligonucleotide for detection of SNP TSC0041367
aattaagattttt

SEQ ID NO: 164912 - DNA, 13 bp, Artificial Sequence
  Oligonucleotide for detection of SNP TSC0041367
aaaaatcttaatt

SEQ ID NO: 164913 - DNA, 13 bp, Artificial Sequence
  Oligonucleotide for detection of SNP TSC0041367
aaaaattttaatt

SEQ ID NO: 164914 - DNA, 13 bp, Artificial Sequence
  Oligonucleotide for detection of SNP TSC0041367
aattaaaattttt

SEQ ID NO: 164915 - DNA, 13 bp, Artificial Sequence
  Oligonucleotide for detection of SNP TSC0041368
tgtgtgagagata

SEQ ID NO: 164916 - DNA, 13 bp, Artificial Sequence
  Oligonucleotide for detection of SNP TSC0041368
tatctctcacaca

SEQ ID NO: 164917 - DNA, 13 bp, Artificial Sequence
  Oligonucleotide for detection of SNP TSC0041368
tgtgtgtgagata

SEQ ID NO: 164918 - DNA, 13 bp, Artificial Sequence
  Oligonucleotide for detection of SNP TSC0041368
tatctcacacaca

SEQ ID NO: 164919 - DNA, 13 bp, Artificial Sequence
  Oligonucleotide for detection of SNP TSC0041369
tattttagaaaaa

SEQ ID NO: 164920 - DNA, 13 bp, Artificial Sequence
  Oligonucleotide for detection of SNP TSC0041369
tttttctaaaata

SEQ ID NO: 164921 - DNA, 13 bp, Artificial Sequence
  Oligonucleotide for detection of SNP TSC0041369
tattttggaaaaa

SEQ ID NO: 164922 - DNA, 13 bp, Artificial Sequence
  Oligonucleotide for detection of SNP TSC0041369
tttttccaaaata

SEQ ID NO: 164923 - DNA, 13 bp, Artificial Sequence
  Oligonucleotide for detection of SNP TSC0041371
ttatataaaaggg

SEQ ID NO: 164924 - DNA, 13 bp, Artificial Sequence
  Oligonucleotide for detection of SNP TSC0041371
cccttttatataa

SEQ ID NO: 164925 - DNA, 13 bp, Artificial Sequence
  Oligonucleotide for detection of SNP TSC0041371
ttatattaaaggg

SEQ ID NO: 164926 - DNA, 13 bp, Artificial Sequence
  Oligonucleotide for detection of SNP TSC0041371
ccctttaatataa

SEQ ID NO: 164927 - DNA, 13 bp, Artificial Sequence
  Oligonucleotide for detection of SNP TSC0041371
tttttttgtataa

SEQ ID NO: 164928 - DNA, 13 bp, Artificial Sequence
  Oligonucleotide for detection of SNP TSC0041371
ttatacaaaaaaa

SEQ ID NO: 164929 - DNA, 13 bp, Artificial Sequence
  Oligonucleotide for detection of SNP TSC0041371
ttttttggtataa

SEQ ID NO: 164930 - DNA, 13 bp, Artificial Sequence
  Oligonucleotide for detection of SNP TSC0041371
ttataccaaaaaa

SEQ ID NO: 164931 - DNA, 13 bp, Artificial Sequence
  Oligonucleotide for detection of SNP TSC0041372
ttaagtaaggagy

SEQ ID NO: 164932 - DNA, 13 bp, Artificial Sequence
  Oligonucleotide for detection of SNP TSC0041372
rctccttacttaa

SEQ ID NO: 164933 - DNA, 13 bp, Artificial Sequence
  Oligonucleotide for detection of SNP TSC0041372
ttaagtgaggagy

SEQ ID NO: 164934 - DNA, 13 bp, Artificial Sequence
  Oligonucleotide for detection of SNP TSC0041372
rctcctcacttaa

SEQ ID NO: 164935 - DNA, 13 bp, Artificial Sequence
  Oligonucleotide for detection of SNP TSC0041372
ttaagcgaggagy

SEQ ID NO: 164936 - DNA, 13 bp, Artificial Sequence
  Oligonucleotide for detection of SNP TSC0041372
rctcctcgcttaa

SEQ ID NO: 164937 - DNA, 13 bp, Artificial Sequence
  Oligonucleotide for detection of SNP TSC0041372
gttttttgtttag

SEQ ID NO: 164938 - DNA, 13 bp, Artificial Sequence
  Oligonucleotide for detection of SNP TSC0041372
ctaaacaaaaaac

SEQ ID NO: 164939 - DNA, 13 bp, Artificial Sequence
  Oligonucleotide for detection of SNP TSC0041372
gtttttcgtttag

SEQ ID NO: 164940 - DNA, 13 bp, Artificial Sequence
  Oligonucleotide for detection of SNP TSC0041372
ctaaacgaaaaac

SEQ ID NO: 164941 - DNA, 13 bp, Artificial Sequence
  Oligonucleotide for detection of SNP TSC0041374
aaaaaagatatay

SEQ ID NO: 164942 - DNA, 13 bp, Artificial Sequence
  Oligonucleotide for detection of SNP TSC0041374
rtatatctttttt

SEQ ID NO: 164943 - DNA, 13 bp, Artificial Sequence
  Oligonucleotide for detection of SNP TSC0041375
ttttattgtgtaa

SEQ ID NO: 164944 - DNA, 13 bp, Artificial Sequence
  Oligonucleotide for detection of SNP TSC0041375
ttacacaataaaa

SEQ ID NO: 164945 - DNA, 13 bp, Artificial Sequence
  Oligonucleotide for detection of SNP TSC0041375
ttttatcgtgtaa

SEQ ID NO: 164946 - DNA, 13 bp, Artificial Sequence
  Oligonucleotide for detection of SNP TSC0041375
ttacacgataaaa

SEQ ID NO: 164947 - DNA, 13 bp, Artificial Sequence
  Oligonucleotide for detection of SNP TSC0041375
ttgtatggtagag

SEQ ID NO: 164948 - DNA, 13 bp, Artificial Sequence
  Oligonucleotide for detection of SNP TSC0041375
ctctaccatacaa

SEQ ID NO: 164949 - DNA, 13 bp, Artificial Sequence
  Oligonucleotide for detection of SNP TSC0041375
ttgtatagtagag

SEQ ID NO: 164950 - DNA, 13 bp, Artificial Sequence
  Oligonucleotide for detection of SNP TSC0041375
ctctactatacaa

SEQ ID NO: 164951 - DNA, 13 bp, Artificial Sequence
  Oligonucleotide for detection of SNP TSC0041375
ttgtacggtagag

SEQ ID NO: 164952 - DNA, 13 bp, Artificial Sequence
  Oligonucleotide for detection of SNP TSC0041375
ctctaccgtacaa

SEQ ID NO: 164953 - DNA, 13 bp, Artificial Sequence
  Oligonucleotide for detection of SNP TSC0041376
taagtgatagtat

SEQ ID NO: 164954 - DNA, 13 bp, Artificial Sequence
  Oligonucleotide for detection of SNP TSC0041376
atactatcactta

SEQ ID NO: 164955 - DNA, 13 bp, Artificial Sequence
  Oligonucleotide for detection of SNP TSC0041376
taagtggtagtat

SEQ ID NO: 164956 - DNA, 13 bp, Artificial Sequence
  Oligonucleotide for detection of SNP TSC0041376
atactaccactta

SEQ ID NO: 164957 - DNA, 13 bp, Artificial Sequence
  Oligonucleotide for detection of SNP TSC0041381
aatattggagagg

SEQ ID NO: 164958 - DNA, 13 bp, Artificial Sequence
  Oligonucleotide for detection of SNP TSC0041381
cctctccaatatt

SEQ ID NO: 164959 - DNA, 13 bp, Artificial Sequence
  Oligonucleotide for detection of SNP TSC0041381
aatattagagagg

SEQ ID NO: 164960 - DNA, 13 bp, Artificial Sequence
  Oligonucleotide for detection of SNP TSC0041381
cctctctaatatt

SEQ ID NO: 164961 - DNA, 13 bp, Artificial Sequence
  Oligonucleotide for detection of SNP TSC0041382
tttgatatgattt

SEQ ID NO: 164962 - DNA, 13 bp, Artificial Sequence
  Oligonucleotide for detection of SNP TSC0041382
aaatcatatcaaa

SEQ ID NO: 164963 - DNA, 13 bp, Artificial Sequence
  Oligonucleotide for detection of SNP TSC0041382
tttgatgtgattt

SEQ ID NO: 164964 - DNA, 13 bp, Artificial Sequence
  Oligonucleotide for detection of SNP TSC0041382
aaatcacatcaaa

SEQ ID NO: 164965 - DNA, 13 bp, Artificial Sequence
  Oligonucleotide for detection of SNP TSC0006375
gagtagtaataaa

SEQ ID NO: 164966 - DNA, 13 bp, Artificial Sequence
  Oligonucleotide for detection of SNP TSC0006375
tttattactactc

SEQ ID NO: 164967 - DNA, 13 bp, Artificial Sequence
  Oligonucleotide for detection of SNP TSC0006375
gagtaggaataaa

SEQ ID NO: 164968 - DNA, 13 bp, Artificial Sequence
  Oligonucleotide for detection of SNP TSC0006375
tttattcctactc

SEQ ID NO: 164969 - DNA, 13 bp, Artificial Sequence
  Oligonucleotide for detection of SNP TSC0006375
tttattgttgtty

SEQ ID NO: 164970 - DNA, 13 bp, Artificial Sequence
  Oligonucleotide for detection of SNP TSC0006375
raacaacaataaa

SEQ ID NO: 164971 - DNA, 13 bp, Artificial Sequence
  Oligonucleotide for detection of SNP TSC0006375
tttatttttgtty

SEQ ID NO: 164972 - DNA, 13 bp, Artificial Sequence
  Oligonucleotide for detection of SNP TSC0006375
raacaaaaataaa

SEQ ID NO: 164973 - DNA, 13 bp, Artificial Sequence
  Oligonucleotide for detection of SNP TSC0041386
aatgtagtggggt

SEQ ID NO: 164974 - DNA, 13 bp, Artificial Sequence
  Oligonucleotide for detection of SNP TSC0041386
accccactacatt

SEQ ID NO: 164975 - DNA, 13 bp, Artificial Sequence
  Oligonucleotide for detection of SNP TSC0041386
aatgtaatggggt

SEQ ID NO: 164976 - DNA, 13 bp, Artificial Sequence
  Oligonucleotide for detection of SNP TSC0041386
accccattacatt

SEQ ID NO: 164977 - DNA, 13 bp, Artificial Sequence
  Oligonucleotide for detection of SNP TSC0041386
aacgtagtggggt

SEQ ID NO: 164978 - DNA, 13 bp, Artificial Sequence
  Oligonucleotide for detection of SNP TSC0041386
accccactacgtt

SEQ ID NO: 164979 - DNA, 13 bp, Artificial Sequence
  Oligonucleotide for detection of SNP TSC0041386
aacgtaatggggt

SEQ ID NO: 164980 - DNA, 13 bp, Artificial Sequence
  Oligonucleotide for detection of SNP TSC0041386
accccattacgtt

SEQ ID NO: 164981 - DNA, 13 bp, Artificial Sequence
  Oligonucleotide for detection of SNP TSC0041387
gtttaaaaaatag

SEQ ID NO: 164982 - DNA, 13 bp, Artificial Sequence
  Oligonucleotide for detection of SNP TSC0041387
ctattttttaaac

SEQ ID NO: 164983 - DNA, 13 bp, Artificial Sequence
  Oligonucleotide for detection of SNP TSC0041387
gtttaagaaatag

SEQ ID NO: 164984 - DNA, 13 bp, Artificial Sequence
  Oligonucleotide for detection of SNP TSC0041387
ctatttcttaaac

SEQ ID NO: 164985 - DNA, 13 bp, Artificial Sequence
  Oligonucleotide for detection of SNP TSC0041392
aaggttaatgagy

SEQ ID NO: 164986 - DNA, 13 bp, Artificial Sequence
  Oligonucleotide for detection of SNP TSC0041392
rctcattaacctt

SEQ ID NO: 164987 - DNA, 13 bp, Artificial Sequence
  Oligonucleotide for detection of SNP TSC0041392
aaggtttatgagy

SEQ ID NO: 164988 - DNA, 13 bp, Artificial Sequence
  Oligonucleotide for detection of SNP TSC0041392
rctcataaacctt

SEQ ID NO: 164989 - DNA, 13 bp, Artificial Sequence
  Oligonucleotide for detection of SNP TSC0041392
gtttattggtttt

SEQ ID NO: 164990 - DNA, 13 bp, Artificial Sequence
  Oligonucleotide for detection of SNP TSC0041392
aaaaccaataaac

SEQ ID NO: 164991 - DNA, 13 bp, Artificial Sequence
  Oligonucleotide for detection of SNP TSC0041392
gtttatgggtttt

SEQ ID NO: 164992 - DNA, 13 bp, Artificial Sequence
  Oligonucleotide for detection of SNP TSC0041392
aaaacccataaac

SEQ ID NO: 164993 - DNA, 13 bp, Artificial Sequence
  Oligonucleotide for detection of SNP TSC0041394
ttttagagtttaa

SEQ ID NO: 164994 - DNA, 13 bp, Artificial Sequence
  Oligonucleotide for detection of SNP TSC0041394
ttaaactctaaaa

SEQ ID NO: 164995 - DNA, 13 bp, Artificial Sequence
  Oligonucleotide for detection of SNP TSC0041394
ttttagggtttaa

SEQ ID NO: 164996 - DNA, 13 bp, Artificial Sequence
  Oligonucleotide for detection of SNP TSC0041394
ttaaaccctaaaa

SEQ ID NO: 164997 - DNA, 13 bp, Artificial Sequence
  Oligonucleotide for detection of SNP TSC0041396
ttagaaatttgag

SEQ ID NO: 164998 - DNA, 13 bp, Artificial Sequence
  Oligonucleotide for detection of SNP TSC0041396
ctcaaatttctaa

SEQ ID NO: 164999 - DNA, 13 bp, Artificial Sequence
  Oligonucleotide for detection of SNP TSC0041396
ttagaattttgag

SEQ ID NO: 165000 - DNA, 13 bp, Artificial Sequence
  Oligonucleotide for detection of SNP TSC0041396
ctcaaaattctaa

SEQ ID NO: 165001 - DNA, 13 bp, Artificial Sequence
  Oligonucleotide for detection of SNP TSC0041396
tttaggtttttaa

SEQ ID NO: 165002 - DNA, 13 bp, Artificial Sequence
  Oligonucleotide for detection of SNP TSC0041396
ttaaaaacctaaa

SEQ ID NO: 165003 - DNA, 13 bp, Artificial Sequence
  Oligonucleotide for detection of SNP TSC0041396
tttaggattttaa

SEQ ID NO: 165004 - DNA, 13 bp, Artificial Sequence
  Oligonucleotide for detection of SNP TSC0041396
ttaaaatcctaaa

SEQ ID NO: 165005 - DNA, 13 bp, Artificial Sequence
  Oligonucleotide for detection of SNP TSC0006942
taagttataaagy

SEQ ID NO: 165006 - DNA, 13 bp, Artificial Sequence
  Oligonucleotide for detection of SNP TSC0006942
rctttataactta

SEQ ID NO: 165007 - DNA, 13 bp, Artificial Sequence
  Oligonucleotide for detection of SNP TSC0006942
taagttttaaagy

SEQ ID NO: 165008 - DNA, 13 bp, Artificial Sequence
  Oligonucleotide for detection of SNP TSC0006942
rctttaaaactta

SEQ ID NO: 165009 - DNA, 13 bp, Artificial Sequence
  Oligonucleotide for detection of SNP TSC0006942
gttttgtaatttg

SEQ ID NO: 165010 - DNA, 13 bp, Artificial Sequence
  Oligonucleotide for detection of SNP TSC0006942
caaattacaaaac

SEQ ID NO: 165011 - DNA, 13 bp, Artificial Sequence
  Oligonucleotide for detection of SNP TSC0006942
gttttggaatttg

SEQ ID NO: 165012 - DNA, 13 bp, Artificial Sequence
  Oligonucleotide for detection of SNP TSC0006942
caaattccaaaac

SEQ ID NO: 165013 - DNA, 13 bp, Artificial Sequence
  Oligonucleotide for detection of SNP TSC0041397
tttaataaaagga

SEQ ID NO: 165014 - DNA, 13 bp, Artificial Sequence
  Oligonucleotide for detection of SNP TSC0041397
tccttttattaaa

SEQ ID NO: 165015 - DNA, 13 bp, Artificial Sequence
  Oligonucleotide for detection of SNP TSC0041397
tttaatgaaagga

SEQ ID NO: 165016 - DNA, 13 bp, Artificial Sequence
  Oligonucleotide for detection of SNP TSC0041397
tcctttcattaaa

SEQ ID NO: 165017 - DNA, 13 bp, Artificial Sequence
  Oligonucleotide for detection of SNP TSC0006240
tttttattgttga

SEQ ID NO: 165018 - DNA, 13 bp, Artificial Sequence
  Oligonucleotide for detection of SNP TSC0006240
tcaacaataaaaa

SEQ ID NO: 165019 - DNA, 13 bp, Artificial Sequence
  Oligonucleotide for detection of SNP TSC0006240
tttttagtgttga

SEQ ID NO: 165020 - DNA, 13 bp, Artificial Sequence
  Oligonucleotide for detection of SNP TSC0006240
tcaacactaaaaa

SEQ ID NO: 165021 - DNA, 13 bp, Artificial Sequence
  Oligonucleotide for detection of SNP TSC0006240
ttaataatgaaga

SEQ ID NO: 165022 - DNA, 13 bp, Artificial Sequence
  Oligonucleotide for detection of SNP TSC0006240
tcttcattattaa

SEQ ID NO: 165023 - DNA, 13 bp, Artificial Sequence
  Oligonucleotide for detection of SNP TSC0006240
ttaatattgaaga

SEQ ID NO: 165024 - DNA, 13 bp, Artificial Sequence
  Oligonucleotide for detection of SNP TSC0006240
tcttcaatattaa

SEQ ID NO: 165025 - DNA, 13 bp, Artificial Sequence
  Oligonucleotide for detection of SNP TSC0006241
agttagatttttt

SEQ ID NO: 165026 - DNA, 13 bp, Artificial Sequence
  Oligonucleotide for detection of SNP TSC0006241
aaaaaatctaact

SEQ ID NO: 165027 - DNA, 13 bp, Artificial Sequence
  Oligonucleotide for detection of SNP TSC0006241
agttagttttttt

SEQ ID NO: 165028 - DNA, 13 bp, Artificial Sequence
  Oligonucleotide for detection of SNP TSC0006241
aaaaaaactaact

SEQ ID NO: 165029 - DNA, 13 bp, Artificial Sequence
  Oligonucleotide for detection of SNP TSC0006241
aaaaagtttaatt

SEQ ID NO: 165030 - DNA, 13 bp, Artificial Sequence
  Oligonucleotide for detection of SNP TSC0006241
aattaaacttttt

SEQ ID NO: 165031 - DNA, 13 bp, Artificial Sequence
  Oligonucleotide for detection of SNP TSC0006241
aaaaagattaatt

SEQ ID NO: 165032 - DNA, 13 bp, Artificial Sequence
  Oligonucleotide for detection of SNP TSC0006241
aattaatcttttt

SEQ ID NO: 165033 - DNA, 13 bp, Artificial Sequence
  Oligonucleotide for detection of SNP TSC0041398
tgtttatgttgta

SEQ ID NO: 165034 - DNA, 13 bp, Artificial Sequence
  Oligonucleotide for detection of SNP TSC0041398
tacaacataaaca

SEQ ID NO: 165035 - DNA, 13 bp, Artificial Sequence
  Oligonucleotide for detection of SNP TSC0041398
tgtttacgttgta

SEQ ID NO: 165036 - DNA, 13 bp, Artificial Sequence
  Oligonucleotide for detection of SNP TSC0041398
tacaacgtaaaca

SEQ ID NO: 165037 - DNA, 13 bp, Artificial Sequence
  Oligonucleotide for detection of SNP TSC0041398
tataatgtaagta

SEQ ID NO: 165038 - DNA, 13 bp, Artificial Sequence
  Oligonucleotide for detection of SNP TSC0041398
tacttacattata

SEQ ID NO: 165039 - DNA, 13 bp, Artificial Sequence
  Oligonucleotide for detection of SNP TSC0041398
tataatataagta

SEQ ID NO: 165040 - DNA, 13 bp, Artificial Sequence
  Oligonucleotide for detection of SNP TSC0041398
tacttatattata

SEQ ID NO: 165041 - DNA, 13 bp, Artificial Sequence
  Oligonucleotide for detection of SNP TSC0041398
tataacgtaagta

SEQ ID NO: 165042 - DNA, 13 bp, Artificial Sequence
  Oligonucleotide for detection of SNP TSC0041398
tacttacgttata

SEQ ID NO: 165043 - DNA, 13 bp, Artificial Sequence
  Oligonucleotide for detection of SNP TSC0041400
atatgtatttttt

SEQ ID NO: 165044 - DNA, 13 bp, Artificial Sequence
  Oligonucleotide for detection of SNP TSC0041400
aaaaaatacatat

SEQ ID NO: 165045 - DNA, 13 bp, Artificial Sequence
  Oligonucleotide for detection of SNP TSC0041400
atatgtttttttt

SEQ ID NO: 165046 - DNA, 13 bp, Artificial Sequence
  Oligonucleotide for detection of SNP TSC0041400
aaaaaaaacatat

SEQ ID NO: 165047 - DNA, 13 bp, Artificial Sequence
  Oligonucleotide for detection of SNP TSC0041400
agaaagtatatgt

SEQ ID NO: 165048 - DNA, 13 bp, Artificial Sequence
  Oligonucleotide for detection of SNP TSC0041400
acatatactttct

SEQ ID NO: 165049 - DNA, 13 bp, Artificial Sequence
  Oligonucleotide for detection of SNP TSC0041400
agaaagaatatgt

SEQ ID NO: 165050 - DNA, 13 bp, Artificial Sequence
  Oligonucleotide for detection of SNP TSC0041400
acatattctttct

SEQ ID NO: 165051 - DNA, 13 bp, Artificial Sequence
  Oligonucleotide for detection of SNP TSC0041404
tttattatggtty

SEQ ID NO: 165052 - DNA, 13 bp, Artificial Sequence
  Oligonucleotide for detection of SNP TSC0041404
raaccataataaa

SEQ ID NO: 165053 - DNA, 13 bp, Artificial Sequence
  Oligonucleotide for detection of SNP TSC0041404
tttattgtggtty

SEQ ID NO: 165054 - DNA, 13 bp, Artificial Sequence
  Oligonucleotide for detection of SNP TSC0041404
raaccacaataaa

SEQ ID NO: 165055 - DNA, 13 bp, Artificial Sequence
  Oligonucleotide for detection of SNP TSC0041404
tttatcgtggtty

SEQ ID NO: 165056 - DNA, 13 bp, Artificial Sequence
  Oligonucleotide for detection of SNP TSC0041404
raaccacgataaa

SEQ ID NO: 165057 - DNA, 13 bp, Artificial Sequence
  Oligonucleotide for detection of SNP TSC0041404
gaattatggtgaa

SEQ ID NO: 165058 - DNA, 13 bp, Artificial Sequence
  Oligonucleotide for detection of SNP TSC0041404
ttcaccataattc

SEQ ID NO: 165059 - DNA, 13 bp, Artificial Sequence
  Oligonucleotide for detection of SNP TSC0041404
gaattacggtgaa

SEQ ID NO: 165060 - DNA, 13 bp, Artificial Sequence
  Oligonucleotide for detection of SNP TSC0041404
ttcaccgtaattc

SEQ ID NO: 165061 - DNA, 13 bp, Artificial Sequence
  Oligonucleotide for detection of SNP TSC0041405
tgtagatgggaag

SEQ ID NO: 165062 - DNA, 13 bp, Artificial Sequence
  Oligonucleotide for detection of SNP TSC0041405
cttcccatctaca

SEQ ID NO: 165063 - DNA, 13 bp, Artificial Sequence
  Oligonucleotide for detection of SNP TSC0041405
tgtagacgggaag

SEQ ID NO: 165064 - DNA, 13 bp, Artificial Sequence
  Oligonucleotide for detection of SNP TSC0041405
cttcccgtctaca

SEQ ID NO: 165065 - DNA, 13 bp, Artificial Sequence
  Oligonucleotide for detection of SNP TSC0041408
aagggaaagagty

SEQ ID NO: 165066 - DNA, 13 bp, Artificial Sequence
  Oligonucleotide for detection of SNP TSC0041408
ractctttccctt

SEQ ID NO: 165067 - DNA, 13 bp, Artificial Sequence
  Oligonucleotide for detection of SNP TSC0041408
aagggagagagty

SEQ ID NO: 165068 - DNA, 13 bp, Artificial Sequence
  Oligonucleotide for detection of SNP TSC0041408
ractctctccctt

SEQ ID NO: 165069 - DNA, 13 bp, Artificial Sequence
  Oligonucleotide for detection of SNP TSC0041409
tgtttttgaattg

SEQ ID NO: 165070 - DNA, 13 bp, Artificial Sequence
  Oligonucleotide for detection of SNP TSC0041409
caattcaaaaaca

SEQ ID NO: 165071 - DNA, 13 bp, Artificial Sequence
  Oligonucleotide for detection of SNP TSC0041409
tgttttggaattg

SEQ ID NO: 165072 - DNA, 13 bp, Artificial Sequence
  Oligonucleotide for detection of SNP TSC0041409
caattccaaaaca

SEQ ID NO: 165073 - DNA, 13 bp, Artificial Sequence
  Oligonucleotide for detection of SNP TSC0041409
tgttttcgaattg

SEQ ID NO: 165074 - DNA, 13 bp, Artificial Sequence
  Oligonucleotide for detection of SNP TSC0041409
caattcgaaaaca

SEQ ID NO: 165075 - DNA, 13 bp, Artificial Sequence
  Oligonucleotide for detection of SNP TSC0041409
taatttgagagta

SEQ ID NO: 165076 - DNA, 13 bp, Artificial Sequence
  Oligonucleotide for detection of SNP TSC0041409
tactctcaaatta

SEQ ID NO: 165077 - DNA, 13 bp, Artificial Sequence
  Oligonucleotide for detection of SNP TSC0041409
taattttagagta

SEQ ID NO: 165078 - DNA, 13 bp, Artificial Sequence
  Oligonucleotide for detection of SNP TSC0041409
tactctaaaatta

SEQ ID NO: 165079 - DNA, 13 bp, Artificial Sequence
  Oligonucleotide for detection of SNP TSC0041409
taattcgagagta

SEQ ID NO: 165080 - DNA, 13 bp, Artificial Sequence
  Oligonucleotide for detection of SNP TSC0041409
tactctcgaatta

SEQ ID NO: 165081 - DNA, 13 bp, Artificial Sequence
  Oligonucleotide for detection of SNP TSC0041410
aggaagataatga

SEQ ID NO: 165082 - DNA, 13 bp, Artificial Sequence
  Oligonucleotide for detection of SNP TSC0041410
tcattatcttcct

SEQ ID NO: 165083 - DNA, 13 bp, Artificial Sequence
  Oligonucleotide for detection of SNP TSC0041410
aggaagttaatga

SEQ ID NO: 165084 - DNA, 13 bp, Artificial Sequence
  Oligonucleotide for detection of SNP TSC0041410
tcattaacttcct

SEQ ID NO: 165085 - DNA, 13 bp, Artificial Sequence
  Oligonucleotide for detection of SNP TSC0041411
ttgtatgtgttta

SEQ ID NO: 165086 - DNA, 13 bp, Artificial Sequence
  Oligonucleotide for detection of SNP TSC0041411
taaacacatacaa

SEQ ID NO: 165087 - DNA, 13 bp, Artificial Sequence
  Oligonucleotide for detection of SNP TSC0041411
ttgtatatgttta

SEQ ID NO: 165088 - DNA, 13 bp, Artificial Sequence
  Oligonucleotide for detection of SNP TSC0041411
taaacatatacaa

SEQ ID NO: 165089 - DNA, 13 bp, Artificial Sequence
  Oligonucleotide for detection of SNP TSC0041412
gatggtattttat

SEQ ID NO: 165090 - DNA, 13 bp, Artificial Sequence
  Oligonucleotide for detection of SNP TSC0041412
ataaaataccatc

SEQ ID NO: 165091 - DNA, 13 bp, Artificial Sequence
  Oligonucleotide for detection of SNP TSC0041412
gatggttttttat

SEQ ID NO: 165092 - DNA, 13 bp, Artificial Sequence
  Oligonucleotide for detection of SNP TSC0041412
ataaaaaaccatc

SEQ ID NO: 165093 - DNA, 13 bp, Artificial Sequence
  Oligonucleotide for detection of SNP TSC0041412
gacggtattttat

SEQ ID NO: 165094 - DNA, 13 bp, Artificial Sequence
  Oligonucleotide for detection of SNP TSC0041412
ataaaataccgtc

SEQ ID NO: 165095 - DNA, 13 bp, Artificial Sequence
  Oligonucleotide for detection of SNP TSC0041412
gacggttttttat

SEQ ID NO: 165096 - DNA, 13 bp, Artificial Sequence
  Oligonucleotide for detection of SNP TSC0041412
ataaaaaaccgtc

SEQ ID NO: 165097 - DNA, 13 bp, Artificial Sequence
  Oligonucleotide for detection of SNP TSC0041412
ataaaatgttgty

SEQ ID NO: 165098 - DNA, 13 bp, Artificial Sequence
  Oligonucleotide for detection of SNP TSC0041412
racaacattttat

SEQ ID NO: 165099 - DNA, 13 bp, Artificial Sequence
  Oligonucleotide for detection of SNP TSC0041412
ataaaaggttgty

SEQ ID NO: 165100 - DNA, 13 bp, Artificial Sequence
  Oligonucleotide for detection of SNP TSC0041412
racaaccttttat

SEQ ID NO: 165101 - DNA, 13 bp, Artificial Sequence
  Oligonucleotide for detection of SNP TSC0041412
ataaaatgtcgty

SEQ ID NO: 165102 - DNA, 13 bp, Artificial Sequence
  Oligonucleotide for detection of SNP TSC0041412
racgacattttat

SEQ ID NO: 165103 - DNA, 13 bp, Artificial Sequence
  Oligonucleotide for detection of SNP TSC0041412
ataaaaggtcgty

SEQ ID NO: 165104 - DNA, 13 bp, Artificial Sequence
  Oligonucleotide for detection of SNP TSC0041412
racgaccttttat

SEQ ID NO: 165105 - DNA, 13 bp, Artificial Sequence
  Oligonucleotide for detection of SNP TSC0041413
gttagagttagga

SEQ ID NO: 165106 - DNA, 13 bp, Artificial Sequence
  Oligonucleotide for detection of SNP TSC0041413
tcctaactctaac

SEQ ID NO: 165107 - DNA, 13 bp, Artificial Sequence
  Oligonucleotide for detection of SNP TSC0041413
gttagaattagga

SEQ ID NO: 165108 - DNA, 13 bp, Artificial Sequence
  Oligonucleotide for detection of SNP TSC0041413
tcctaattctaac

SEQ ID NO: 165109 - DNA, 13 bp, Artificial Sequence
  Oligonucleotide for detection of SNP TSC0041414
gaggtaggtaggg

SEQ ID NO: 165110 - DNA, 13 bp, Artificial Sequence
  Oligonucleotide for detection of SNP TSC0041414
ccctacctacctc

SEQ ID NO: 165111 - DNA, 13 bp, Artificial Sequence
  Oligonucleotide for detection of SNP TSC0041414
gaggtaagtaggg

SEQ ID NO: 165112 - DNA, 13 bp, Artificial Sequence
  Oligonucleotide for detection of SNP TSC0041414
ccctacttacctc

SEQ ID NO: 165113 - DNA, 13 bp, Artificial Sequence
  Oligonucleotide for detection of SNP TSC0010029
tttatatgtatga

SEQ ID NO: 165114 - DNA, 13 bp, Artificial Sequence
  Oligonucleotide for detection of SNP TSC0010029
tcatacatataaa

SEQ ID NO: 165115 - DNA, 13 bp, Artificial Sequence
  Oligonucleotide for detection of SNP TSC0010029
tttatacgtatga

SEQ ID NO: 165116 - DNA, 13 bp, Artificial Sequence
  Oligonucleotide for detection of SNP TSC0010029
tcatacgtataaa

SEQ ID NO: 165117 - DNA, 13 bp, Artificial Sequence
  Oligonucleotide for detection of SNP TSC0010029
ttatgtgtataga

SEQ ID NO: 165118 - DNA, 13 bp, Artificial Sequence
  Oligonucleotide for detection of SNP TSC0010029
tctatacacataa

SEQ ID NO: 165119 - DNA, 13 bp, Artificial Sequence
  Oligonucleotide for detection of SNP TSC0010029
ttatgtatataga

SEQ ID NO: 165120 - DNA, 13 bp, Artificial Sequence
  Oligonucleotide for detection of SNP TSC0010029
tctatatacataa

SEQ ID NO: 165121 - DNA, 13 bp, Artificial Sequence
  Oligonucleotide for detection of SNP TSC0010029
ttatgcgtataga

SEQ ID NO: 165122 - DNA, 13 bp, Artificial Sequence
  Oligonucleotide for detection of SNP TSC0010029
tctatacgcataa

SEQ ID NO: 165123 - DNA, 13 bp, Artificial Sequence
  Oligonucleotide for detection of SNP TSC0008496
ttattttggattt

SEQ ID NO: 165124 - DNA, 13 bp, Artificial Sequence
  Oligonucleotide for detection of SNP TSC0008496
aaatccaaaataa

SEQ ID NO: 165125 - DNA, 13 bp, Artificial Sequence
  Oligonucleotide for detection of SNP TSC0008496
ttatttcggattt

SEQ ID NO: 165126 - DNA, 13 bp, Artificial Sequence
  Oligonucleotide for detection of SNP TSC0008496
aaatccgaaataa

SEQ ID NO: 165127 - DNA, 13 bp, Artificial Sequence
  Oligonucleotide for detection of SNP TSC0008496
aaatttggaataa

SEQ ID NO: 165128 - DNA, 13 bp, Artificial Sequence
  Oligonucleotide for detection of SNP TSC0008496
ttattccaaattt

SEQ ID NO: 165129 - DNA, 13 bp, Artificial Sequence
  Oligonucleotide for detection of SNP TSC0008496
aaatttagaataa

SEQ ID NO: 165130 - DNA, 13 bp, Artificial Sequence
  Oligonucleotide for detection of SNP TSC0008496
ttattctaaattt

SEQ ID NO: 165131 - DNA, 13 bp, Artificial Sequence
  Oligonucleotide for detection of SNP TSC0008496
aaattcggaataa

SEQ ID NO: 165132 - DNA, 13 bp, Artificial Sequence
  Oligonucleotide for detection of SNP TSC0008496
ttattccgaattt

SEQ ID NO: 165133 - DNA, 13 bp, Artificial Sequence
  Oligonucleotide for detection of SNP TSC0041417
aggggggtgtaaa

SEQ ID NO: 165134 - DNA, 13 bp, Artificial Sequence
  Oligonucleotide for detection of SNP TSC0041417
tttacacccccct

SEQ ID NO: 165135 - DNA, 13 bp, Artificial Sequence
  Oligonucleotide for detection of SNP TSC0041417
agggggttgtaaa

SEQ ID NO: 165136 - DNA, 13 bp, Artificial Sequence
  Oligonucleotide for detection of SNP TSC0041417
tttacaaccccct

SEQ ID NO: 165137 - DNA, 13 bp, Artificial Sequence
  Oligonucleotide for detection of SNP TSC0041420
gagaataaagtag

SEQ ID NO: 165138 - DNA, 13 bp, Artificial Sequence
  Oligonucleotide for detection of SNP TSC0041420
ctactttattctc

SEQ ID NO: 165139 - DNA, 13 bp, Artificial Sequence
  Oligonucleotide for detection of SNP TSC0041420
gagaattaagtag

SEQ ID NO: 165140 - DNA, 13 bp, Artificial Sequence
  Oligonucleotide for detection of SNP TSC0041420
ctacttaattctc

SEQ ID NO: 165141 - DNA, 13 bp, Artificial Sequence
  Oligonucleotide for detection of SNP TSC0006192
tatatattttgtt

SEQ ID NO: 165142 - DNA, 13 bp, Artificial Sequence
  Oligonucleotide for detection of SNP TSC0006192
aacaaaatatata

SEQ ID NO: 165143 - DNA, 13 bp, Artificial Sequence
  Oligonucleotide for detection of SNP TSC0006192
aatagaatatgta

SEQ ID NO: 165144 - DNA, 13 bp, Artificial Sequence
  Oligonucleotide for detection of SNP TSC0006192
tacatattctatt

SEQ ID NO: 165145 - DNA, 13 bp, Artificial Sequence
  Oligonucleotide for detection of SNP TSC0006192
aatagattatgta

SEQ ID NO: 165146 - DNA, 13 bp, Artificial Sequence
  Oligonucleotide for detection of SNP TSC0006192
tacataatctatt

SEQ ID NO: 165147 - DNA, 13 bp, Artificial Sequence
  Oligonucleotide for detection of SNP TSC0041421
ttttttaaaaaay

SEQ ID NO: 165148 - DNA, 13 bp, Artificial Sequence
  Oligonucleotide for detection of SNP TSC0041421
rttttttaaaaaa

SEQ ID NO: 165149 - DNA, 13 bp, Artificial Sequence
  Oligonucleotide for detection of SNP TSC0041421
tttttttaaaaay

SEQ ID NO: 165150 - DNA, 13 bp, Artificial Sequence
  Oligonucleotide for detection of SNP TSC0041421
rtttttaaaaaaa

SEQ ID NO: 165151 - DNA, 13 bp, Artificial Sequence
  Oligonucleotide for detection of SNP TSC0041422
taagattgaaagt

SEQ ID NO: 165152 - DNA, 13 bp, Artificial Sequence
  Oligonucleotide for detection of SNP TSC0041422
actttcaatctta

SEQ ID NO: 165153 - DNA, 13 bp, Artificial Sequence
  Oligonucleotide for detection of SNP TSC0041422
taagatggaaagt

SEQ ID NO: 165154 - DNA, 13 bp, Artificial Sequence
  Oligonucleotide for detection of SNP TSC0041422
actttccatctta

SEQ ID NO: 165155 - DNA, 13 bp, Artificial Sequence
  Oligonucleotide for detection of SNP TSC0041422
taagacggaaagt

SEQ ID NO: 165156 - DNA, 13 bp, Artificial Sequence
  Oligonucleotide for detection of SNP TSC0041422
actttccgtctta

SEQ ID NO: 165157 - DNA, 13 bp, Artificial Sequence
  Oligonucleotide for detection of SNP TSC0041423
agagagaggtaay

SEQ ID NO: 165158 - DNA, 13 bp, Artificial Sequence
  Oligonucleotide for detection of SNP TSC0041423
rttacctctctct

SEQ ID NO: 165159 - DNA, 13 bp, Artificial Sequence
  Oligonucleotide for detection of SNP TSC0041423
agagagtggtaay

SEQ ID NO: 165160 - DNA, 13 bp, Artificial Sequence
  Oligonucleotide for detection of SNP TSC0041423
rttaccactctct

SEQ ID NO: 165161 - DNA, 13 bp, Artificial Sequence
  Oligonucleotide for detection of SNP TSC0041423
agagagcggtaay

SEQ ID NO: 165162 - DNA, 13 bp, Artificial Sequence
  Oligonucleotide for detection of SNP TSC0041423
rttaccgctctct

SEQ ID NO: 165163 - DNA, 13 bp, Artificial Sequence
  Oligonucleotide for detection of SNP TSC0041424
aattttaaattty

SEQ ID NO: 165164 - DNA, 13 bp, Artificial Sequence
  Oligonucleotide for detection of SNP TSC0041424
raaatttaaaatt

SEQ ID NO: 165165 - DNA, 13 bp, Artificial Sequence
  Oligonucleotide for detection of SNP TSC0041424
aatttttaattty

SEQ ID NO: 165166 - DNA, 13 bp, Artificial Sequence
  Oligonucleotide for detection of SNP TSC0041424
raaattaaaaatt

SEQ ID NO: 165167 - DNA, 13 bp, Artificial Sequence
  Oligonucleotide for detection of SNP TSC0041424
gaggtttaaggtt

SEQ ID NO: 165168 - DNA, 13 bp, Artificial Sequence
  Oligonucleotide for detection of SNP TSC0041424
aaccttaaacctc

SEQ ID NO: 165169 - DNA, 13 bp, Artificial Sequence
  Oligonucleotide for detection of SNP TSC0041424
gaggttgaaggtt

SEQ ID NO: 165170 - DNA, 13 bp, Artificial Sequence
  Oligonucleotide for detection of SNP TSC0041424
aaccttcaacctc

SEQ ID NO: 165171 - DNA, 13 bp, Artificial Sequence
  Oligonucleotide for detection of SNP TSC0041425
attatgtttaatt

SEQ ID NO: 165172 - DNA, 13 bp, Artificial Sequence
  Oligonucleotide for detection of SNP TSC0041425
aattaaacataat

SEQ ID NO: 165173 - DNA, 13 bp, Artificial Sequence
  Oligonucleotide for detection of SNP TSC0041425
attatggttaatt

SEQ ID NO: 165174 - DNA, 13 bp, Artificial Sequence
  Oligonucleotide for detection of SNP TSC0041425
aattaaccataat

SEQ ID NO: 165175 - DNA, 13 bp, Artificial Sequence
  Oligonucleotide for detection of SNP TSC0041425
agttaggtatgat

SEQ ID NO: 165176 - DNA, 13 bp, Artificial Sequence
  Oligonucleotide for detection of SNP TSC0041425
atcatacctaact

SEQ ID NO: 165177 - DNA, 13 bp, Artificial Sequence
  Oligonucleotide for detection of SNP TSC0041425
agttagttatgat

SEQ ID NO: 165178 - DNA, 13 bp, Artificial Sequence
  Oligonucleotide for detection of SNP TSC0041425
atcataactaact

SEQ ID NO: 165179 - DNA, 13 bp, Artificial Sequence
  Oligonucleotide for detection of SNP TSC0041426
ggttaagtgagta

SEQ ID NO: 165180 - DNA, 13 bp, Artificial Sequence
  Oligonucleotide for detection of SNP TSC0041426
tactcacttaacc

SEQ ID NO: 165181 - DNA, 13 bp, Artificial Sequence
  Oligonucleotide for detection of SNP TSC0041426
ggttaaatgagta

SEQ ID NO: 165182 - DNA, 13 bp, Artificial Sequence
  Oligonucleotide for detection of SNP TSC0041426
tactcatttaacc

SEQ ID NO: 165183 - DNA, 13 bp, Artificial Sequence
  Oligonucleotide for detection of SNP TSC0041427
ttttggagatgty

SEQ ID NO: 165184 - DNA, 13 bp, Artificial Sequence
  Oligonucleotide for detection of SNP TSC0041427
racatctccaaaa

SEQ ID NO: 165185 - DNA, 13 bp, Artificial Sequence
  Oligonucleotide for detection of SNP TSC0041427
ttttggggatgty

SEQ ID NO: 165186 - DNA, 13 bp, Artificial Sequence
  Oligonucleotide for detection of SNP TSC0041427
racatccccaaaa

SEQ ID NO: 165187 - DNA, 13 bp, Artificial Sequence
  Oligonucleotide for detection of SNP TSC0041428
ggtttagagttty

SEQ ID NO: 165188 - DNA, 13 bp, Artificial Sequence
  Oligonucleotide for detection of SNP TSC0041428
raaactctaaacc

SEQ ID NO: 165189 - DNA, 13 bp, Artificial Sequence
  Oligonucleotide for detection of SNP TSC0041428
ggtttaaagttty

SEQ ID NO: 165190 - DNA, 13 bp, Artificial Sequence
  Oligonucleotide for detection of SNP TSC0041428
raaactttaaacc

SEQ ID NO: 165191 - DNA, 13 bp, Artificial Sequence
  Oligonucleotide for detection of SNP TSC0041433
agtttatttttty

SEQ ID NO: 165192 - DNA, 13 bp, Artificial Sequence
  Oligonucleotide for detection of SNP TSC0041433
raaaaaataaact

SEQ ID NO: 165193 - DNA, 13 bp, Artificial Sequence
  Oligonucleotide for detection of SNP TSC0041433
gggaaaatgggtt

SEQ ID NO: 165194 - DNA, 13 bp, Artificial Sequence
  Oligonucleotide for detection of SNP TSC0041433
aacccattttccc

SEQ ID NO: 165195 - DNA, 13 bp, Artificial Sequence
  Oligonucleotide for detection of SNP TSC0041433
gggaaattgggtt

SEQ ID NO: 165196 - DNA, 13 bp, Artificial Sequence
  Oligonucleotide for detection of SNP TSC0041433
aacccaatttccc

SEQ ID NO: 165197 - DNA, 13 bp, Artificial Sequence
  Oligonucleotide for detection of SNP TSC0041434
tagattattagag

SEQ ID NO: 165198 - DNA, 13 bp, Artificial Sequence
  Oligonucleotide for detection of SNP TSC0041434
ctctaataatcta

SEQ ID NO: 165199 - DNA, 13 bp, Artificial Sequence
  Oligonucleotide for detection of SNP TSC0041434
tagattgttagag

SEQ ID NO: 165200 - DNA, 13 bp, Artificial Sequence
  Oligonucleotide for detection of SNP TSC0041434
ctctaacaatcta

SEQ ID NO: 165201 - DNA, 13 bp, Artificial Sequence
  Oligonucleotide for detection of SNP TSC0041434
tagatcgttagag

SEQ ID NO: 165202 - DNA, 13 bp, Artificial Sequence
  Oligonucleotide for detection of SNP TSC0041434
ctctaacgatcta

SEQ ID NO: 165203 - DNA, 13 bp, Artificial Sequence
  Oligonucleotide for detection of SNP TSC0041434
ttttgatgattta

SEQ ID NO: 165204 - DNA, 13 bp, Artificial Sequence
  Oligonucleotide for detection of SNP TSC0041434
taaatcatcaaaa

SEQ ID NO: 165205 - DNA, 13 bp, Artificial Sequence
  Oligonucleotide for detection of SNP TSC0041434
ttttgacgattta

SEQ ID NO: 165206 - DNA, 13 bp, Artificial Sequence
  Oligonucleotide for detection of SNP TSC0041434
taaatcgtcaaaa

SEQ ID NO: 165207 - DNA, 13 bp, Artificial Sequence
  Oligonucleotide for detection of SNP TSC0041435
atagggtgttaag

SEQ ID NO: 165208 - DNA, 13 bp, Artificial Sequence
  Oligonucleotide for detection of SNP TSC0041435
cttaacaccctat

SEQ ID NO: 165209 - DNA, 13 bp, Artificial Sequence
  Oligonucleotide for detection of SNP TSC0041435
atagggggttaag

SEQ ID NO: 165210 - DNA, 13 bp, Artificial Sequence
  Oligonucleotide for detection of SNP TSC0041435
cttaaccccctat

SEQ ID NO: 165211 - DNA, 13 bp, Artificial Sequence
  Oligonucleotide for detection of SNP TSC0041435
atagggcgttaag

SEQ ID NO: 165212 - DNA, 13 bp, Artificial Sequence
  Oligonucleotide for detection of SNP TSC0041435
cttaacgccctat

SEQ ID NO: 165213 - DNA, 13 bp, Artificial Sequence
  Oligonucleotide for detection of SNP TSC0041435
tttagttttttgt

SEQ ID NO: 165214 - DNA, 13 bp, Artificial Sequence
  Oligonucleotide for detection of SNP TSC0041435
acaaaaaactaaa

SEQ ID NO: 165215 - DNA, 13 bp, Artificial Sequence
  Oligonucleotide for detection of SNP TSC0041436
ggtttatgggtga

SEQ ID NO: 165216 - DNA, 13 bp, Artificial Sequence
  Oligonucleotide for detection of SNP TSC0041436
tcacccataaacc

SEQ ID NO: 165217 - DNA, 13 bp, Artificial Sequence
  Oligonucleotide for detection of SNP TSC0041436
ggtttaggggtga

SEQ ID NO: 165218 - DNA, 13 bp, Artificial Sequence
  Oligonucleotide for detection of SNP TSC0041436
tcacccctaaacc

SEQ ID NO: 165219 - DNA, 13 bp, Artificial Sequence
  Oligonucleotide for detection of SNP TSC0041437
atagaagtgtagg

SEQ ID NO: 165220 - DNA, 13 bp, Artificial Sequence
  Oligonucleotide for detection of SNP TSC0041437
cctacacttctat

SEQ ID NO: 165221 - DNA, 13 bp, Artificial Sequence
  Oligonucleotide for detection of SNP TSC0041437
atagaaatgtagg

SEQ ID NO: 165222 - DNA, 13 bp, Artificial Sequence
  Oligonucleotide for detection of SNP TSC0041437
cctacatttctat

SEQ ID NO: 165223 - DNA, 13 bp, Artificial Sequence
  Oligonucleotide for detection of SNP TSC0041437
atagaattgtagg

SEQ ID NO: 165224 - DNA, 13 bp, Artificial Sequence
  Oligonucleotide for detection of SNP TSC0041437
cctacaattctat

SEQ ID NO: 165225 - DNA, 13 bp, Artificial Sequence
  Oligonucleotide for detection of SNP TSC0041438
tgtttaaaattty

SEQ ID NO: 165226 - DNA, 13 bp, Artificial Sequence
  Oligonucleotide for detection of SNP TSC0041438
raaattttaaaca

SEQ ID NO: 165227 - DNA, 13 bp, Artificial Sequence
  Oligonucleotide for detection of SNP TSC0041438
tgtttataattty

SEQ ID NO: 165228 - DNA, 13 bp, Artificial Sequence
  Oligonucleotide for detection of SNP TSC0041438
raaattataaaca

SEQ ID NO: 165229 - DNA, 13 bp, Artificial Sequence
  Oligonucleotide for detection of SNP TSC0041438
gaggttttgagta

SEQ ID NO: 165230 - DNA, 13 bp, Artificial Sequence
  Oligonucleotide for detection of SNP TSC0041438
tactcaaaacctc

SEQ ID NO: 165231 - DNA, 13 bp, Artificial Sequence
  Oligonucleotide for detection of SNP TSC0041438
gaggttgtgagta

SEQ ID NO: 165232 - DNA, 13 bp, Artificial Sequence
  Oligonucleotide for detection of SNP TSC0041438
tactcacaacctc

SEQ ID NO: 165233 - DNA, 13 bp, Artificial Sequence
  Oligonucleotide for detection of SNP TSC0041438
gaggttatgagta

SEQ ID NO: 165234 - DNA, 13 bp, Artificial Sequence
  Oligonucleotide for detection of SNP TSC0041438
tactcataacctc

SEQ ID NO: 165235 - DNA, 13 bp, Artificial Sequence
  Oligonucleotide for detection of SNP TSC0041439
tgaataaatatat

SEQ ID NO: 165236 - DNA, 13 bp, Artificial Sequence
  Oligonucleotide for detection of SNP TSC0041439
atatatttattca

SEQ ID NO: 165237 - DNA, 13 bp, Artificial Sequence
  Oligonucleotide for detection of SNP TSC0041439
tgaatatatatat

SEQ ID NO: 165238 - DNA, 13 bp, Artificial Sequence
  Oligonucleotide for detection of SNP TSC0041439
atatatatattca

SEQ ID NO: 165239 - DNA, 13 bp, Artificial Sequence
  Oligonucleotide for detection of SNP TSC0041439
tgaatagatatat

SEQ ID NO: 165240 - DNA, 13 bp, Artificial Sequence
  Oligonucleotide for detection of SNP TSC0041439
atatatctattca

SEQ ID NO: 165241 - DNA, 13 bp, Artificial Sequence
  Oligonucleotide for detection of SNP TSC0041439
atgtgtttattta

SEQ ID NO: 165242 - DNA, 13 bp, Artificial Sequence
  Oligonucleotide for detection of SNP TSC0041439
taaataaacacat

SEQ ID NO: 165243 - DNA, 13 bp, Artificial Sequence
  Oligonucleotide for detection of SNP TSC0041439
atgtgtgtattta

SEQ ID NO: 165244 - DNA, 13 bp, Artificial Sequence
  Oligonucleotide for detection of SNP TSC0041439
taaatacacacat

SEQ ID NO: 165245 - DNA, 13 bp, Artificial Sequence
  Oligonucleotide for detection of SNP TSC0041440
ggtataagtatty

SEQ ID NO: 165246 - DNA, 13 bp, Artificial Sequence
  Oligonucleotide for detection of SNP TSC0041440
raatacttatacc

SEQ ID NO: 165247 - DNA, 13 bp, Artificial Sequence
  Oligonucleotide for detection of SNP TSC0041440
ggtatatgtatty

SEQ ID NO: 165248 - DNA, 13 bp, Artificial Sequence
  Oligonucleotide for detection of SNP TSC0041440
raatacatatacc

SEQ ID NO: 165249 - DNA, 13 bp, Artificial Sequence
  Oligonucleotide for detection of SNP TSC0041440
gaatatttgtgty

SEQ ID NO: 165250 - DNA, 13 bp, Artificial Sequence
  Oligonucleotide for detection of SNP TSC0041440
racacaaatattc

SEQ ID NO: 165251 - DNA, 13 bp, Artificial Sequence
  Oligonucleotide for detection of SNP TSC0041440
gaatatatgtgty

SEQ ID NO: 165252 - DNA, 13 bp, Artificial Sequence
  Oligonucleotide for detection of SNP TSC0041440
racacatatattc

SEQ ID NO: 165253 - DNA, 13 bp, Artificial Sequence
  Oligonucleotide for detection of SNP TSC0041443
gtttttgtaaaga

SEQ ID NO: 165254 - DNA, 13 bp, Artificial Sequence
  Oligonucleotide for detection of SNP TSC0041443
tctttacaaaaac

SEQ ID NO: 165255 - DNA, 13 bp, Artificial Sequence
  Oligonucleotide for detection of SNP TSC0041443
gtttttataaaga

SEQ ID NO: 165256 - DNA, 13 bp, Artificial Sequence
  Oligonucleotide for detection of SNP TSC0041443
tctttataaaaac

SEQ ID NO: 165257 - DNA, 13 bp, Artificial Sequence
  Oligonucleotide for detection of SNP TSC0041445
ttgaattttattg

SEQ ID NO: 165258 - DNA, 13 bp, Artificial Sequence
  Oligonucleotide for detection of SNP TSC0041445
caataaaattcaa

SEQ ID NO: 165259 - DNA, 13 bp, Artificial Sequence
  Oligonucleotide for detection of SNP TSC0041445
ttgaatgttattg

SEQ ID NO: 165260 - DNA, 13 bp, Artificial Sequence
  Oligonucleotide for detection of SNP TSC0041445
caataacattcaa

SEQ ID NO: 165261 - DNA, 13 bp, Artificial Sequence
  Oligonucleotide for detection of SNP TSC0041445
tagtggaatttag

SEQ ID NO: 165262 - DNA, 13 bp, Artificial Sequence
  Oligonucleotide for detection of SNP TSC0041445
ctaaattccacta

SEQ ID NO: 165263 - DNA, 13 bp, Artificial Sequence
  Oligonucleotide for detection of SNP TSC0041445
tagtggtatttag

SEQ ID NO: 165264 - DNA, 13 bp, Artificial Sequence
  Oligonucleotide for detection of SNP TSC0041445
ctaaataccacta

SEQ ID NO: 165265 - DNA, 13 bp, Artificial Sequence
  Oligonucleotide for detection of SNP TSC0041446
atgaatgagaaag

SEQ ID NO: 165266 - DNA, 13 bp, Artificial Sequence
  Oligonucleotide for detection of SNP TSC0041446
ctttctcattcat

SEQ ID NO: 165267 - DNA, 13 bp, Artificial Sequence
  Oligonucleotide for detection of SNP TSC0041446
atgaataagaaag

SEQ ID NO: 165268 - DNA, 13 bp, Artificial Sequence
  Oligonucleotide for detection of SNP TSC0041446
ctttcttattcat

SEQ ID NO: 165269 - DNA, 13 bp, Artificial Sequence
  Oligonucleotide for detection of SNP TSC0041447
gattttgttaaat

SEQ ID NO: 165270 - DNA, 13 bp, Artificial Sequence
  Oligonucleotide for detection of SNP TSC0041447
atttaacaaaatc

SEQ ID NO: 165271 - DNA, 13 bp, Artificial Sequence
  Oligonucleotide for detection of SNP TSC0041447
gatttcgttaaat

SEQ ID NO: 165272 - DNA, 13 bp, Artificial Sequence
  Oligonucleotide for detection of SNP TSC0041447
atttaacgaaatc

SEQ ID NO: 165273 - DNA, 13 bp, Artificial Sequence
  Oligonucleotide for detection of SNP TSC0041447
atttgatgaggty

SEQ ID NO: 165274 - DNA, 13 bp, Artificial Sequence
  Oligonucleotide for detection of SNP TSC0041447
racctcatcaaat

SEQ ID NO: 165275 - DNA, 13 bp, Artificial Sequence
  Oligonucleotide for detection of SNP TSC0041447
atttgacgaggty

SEQ ID NO: 165276 - DNA, 13 bp, Artificial Sequence
  Oligonucleotide for detection of SNP TSC0041447
racctcgtcaaat

SEQ ID NO: 165277 - DNA, 13 bp, Artificial Sequence
  Oligonucleotide for detection of SNP TSC0041448
ggtgggggagtgt

SEQ ID NO: 165278 - DNA, 13 bp, Artificial Sequence
  Oligonucleotide for detection of SNP TSC0041448
acactcccccacc

SEQ ID NO: 165279 - DNA, 13 bp, Artificial Sequence
  Oligonucleotide for detection of SNP TSC0041448
ggtgggagagtgt

SEQ ID NO: 165280 - DNA, 13 bp, Artificial Sequence
  Oligonucleotide for detection of SNP TSC0041448
acactctcccacc

SEQ ID NO: 165281 - DNA, 13 bp, Artificial Sequence
  Oligonucleotide for detection of SNP TSC0041451
gttgttgtaataa

SEQ ID NO: 165282 - DNA, 13 bp, Artificial Sequence
  Oligonucleotide for detection of SNP TSC0041451
ttattacaacaac

SEQ ID NO: 165283 - DNA, 13 bp, Artificial Sequence
  Oligonucleotide for detection of SNP TSC0041451
gttgttataataa

SEQ ID NO: 165284 - DNA, 13 bp, Artificial Sequence
  Oligonucleotide for detection of SNP TSC0041451
ttattataacaac

SEQ ID NO: 165285 - DNA, 13 bp, Artificial Sequence
  Oligonucleotide for detection of SNP TSC0041452
taatatttgtata

SEQ ID NO: 165286 - DNA, 13 bp, Artificial Sequence
  Oligonucleotide for detection of SNP TSC0041452
tatacaaatatta

SEQ ID NO: 165287 - DNA, 13 bp, Artificial Sequence
  Oligonucleotide for detection of SNP TSC0041452
tatgtagatattg

SEQ ID NO: 165288 - DNA, 13 bp, Artificial Sequence
  Oligonucleotide for detection of SNP TSC0041452
caatatctacata

SEQ ID NO: 165289 - DNA, 13 bp, Artificial Sequence
  Oligonucleotide for detection of SNP TSC0041452
tatgtatatattg

SEQ ID NO: 165290 - DNA, 13 bp, Artificial Sequence
  Oligonucleotide for detection of SNP TSC0041452
caatatatacata

SEQ ID NO: 165291 - DNA, 13 bp, Artificial Sequence
  Oligonucleotide for detection of SNP TSC0041458
gtattaattattt

SEQ ID NO: 165292 - DNA, 13 bp, Artificial Sequence
  Oligonucleotide for detection of SNP TSC0041458
aaataattaatac

SEQ ID NO: 165293 - DNA, 13 bp, Artificial Sequence
  Oligonucleotide for detection of SNP TSC0041458
gtattagttattt

SEQ ID NO: 165294 - DNA, 13 bp, Artificial Sequence
  Oligonucleotide for detection of SNP TSC0041458
aaataactaatac

SEQ ID NO: 165295 - DNA, 13 bp, Artificial Sequence
  Oligonucleotide for detection of SNP TSC0041460
tgagtaaatagaa

SEQ ID NO: 165296 - DNA, 13 bp, Artificial Sequence
  Oligonucleotide for detection of SNP TSC0041460
ttctatttactca

SEQ ID NO: 165297 - DNA, 13 bp, Artificial Sequence
  Oligonucleotide for detection of SNP TSC0041460
tgagtagatagaa

SEQ ID NO: 165298 - DNA, 13 bp, Artificial Sequence
  Oligonucleotide for detection of SNP TSC0041460
ttctatctactca

SEQ ID NO: 165299 - DNA, 13 bp, Artificial Sequence
  Oligonucleotide for detection of SNP TSC0041461
tgtataatttatt

SEQ ID NO: 165300 - DNA, 13 bp, Artificial Sequence
  Oligonucleotide for detection of SNP TSC0041461
aataaattataca

SEQ ID NO: 165301 - DNA, 13 bp, Artificial Sequence
  Oligonucleotide for detection of SNP TSC0041461
tgtatagtttatt

SEQ ID NO: 165302 - DNA, 13 bp, Artificial Sequence
  Oligonucleotide for detection of SNP TSC0041461
aataaactataca

SEQ ID NO: 165303 - DNA, 13 bp, Artificial Sequence
  Oligonucleotide for detection of SNP TSC0041462
tgagttatatagt

SEQ ID NO: 165304 - DNA, 13 bp, Artificial Sequence
  Oligonucleotide for detection of SNP TSC0041462
actatataactca

SEQ ID NO: 165305 - DNA, 13 bp, Artificial Sequence
  Oligonucleotide for detection of SNP TSC0041462
tgagttgtatagt

SEQ ID NO: 165306 - DNA, 13 bp, Artificial Sequence
  Oligonucleotide for detection of SNP TSC0041462
actatacaactca

SEQ ID NO: 165307 - DNA, 13 bp, Artificial Sequence
  Oligonucleotide for detection of SNP TSC0041463
gaatatatgatga

SEQ ID NO: 165308 - DNA, 13 bp, Artificial Sequence
  Oligonucleotide for detection of SNP TSC0041463
tcatcatatattc

SEQ ID NO: 165309 - DNA, 13 bp, Artificial Sequence
  Oligonucleotide for detection of SNP TSC0041463
gaatatgtgatga

SEQ ID NO: 165310 - DNA, 13 bp, Artificial Sequence
  Oligonucleotide for detection of SNP TSC0041463
tcatcacatattc

SEQ ID NO: 165311 - DNA, 13 bp, Artificial Sequence
  Oligonucleotide for detection of SNP TSC0041463
gaatacgtgatga

SEQ ID NO: 165312 - DNA, 13 bp, Artificial Sequence
  Oligonucleotide for detection of SNP TSC0041463
tcatcacgtattc

SEQ ID NO: 165313 - DNA, 13 bp, Artificial Sequence
  Oligonucleotide for detection of SNP TSC0041463
ttattatgtgtty

SEQ ID NO: 165314 - DNA, 13 bp, Artificial Sequence
  Oligonucleotide for detection of SNP TSC0041463
raacacataataa

SEQ ID NO: 165315 - DNA, 13 bp, Artificial Sequence
  Oligonucleotide for detection of SNP TSC0041463
ttattacgtgtty

SEQ ID NO: 165316 - DNA, 13 bp, Artificial Sequence
  Oligonucleotide for detection of SNP TSC0041463
raacacgtaataa

SEQ ID NO: 165317 - DNA, 13 bp, Artificial Sequence
  Oligonucleotide for detection of SNP TSC0041464
tgttaatgtatag

SEQ ID NO: 165318 - DNA, 13 bp, Artificial Sequence
  Oligonucleotide for detection of SNP TSC0041464
ctatacattaaca

SEQ ID NO: 165319 - DNA, 13 bp, Artificial Sequence
  Oligonucleotide for detection of SNP TSC0041464
tgttaacgtatag

SEQ ID NO: 165320 - DNA, 13 bp, Artificial Sequence
  Oligonucleotide for detection of SNP TSC0041464
ctatacgttaaca

SEQ ID NO: 165321 - DNA, 13 bp, Artificial Sequence
  Oligonucleotide for detection of SNP TSC0041464
ttgtatgttgata

SEQ ID NO: 165322 - DNA, 13 bp, Artificial Sequence
  Oligonucleotide for detection of SNP TSC0041464
tatcaacatacaa

SEQ ID NO: 165323 - DNA, 13 bp, Artificial Sequence
  Oligonucleotide for detection of SNP TSC0041464
ttgtatattgata

SEQ ID NO: 165324 - DNA, 13 bp, Artificial Sequence
  Oligonucleotide for detection of SNP TSC0041464
tatcaatatacaa

SEQ ID NO: 165325 - DNA, 13 bp, Artificial Sequence
  Oligonucleotide for detection of SNP TSC0041464
ttgtacgttgata

SEQ ID NO: 165326 - DNA, 13 bp, Artificial Sequence
  Oligonucleotide for detection of SNP TSC0041464
tatcaacgtacaa

SEQ ID NO: 165327 - DNA, 13 bp, Artificial Sequence
  Oligonucleotide for detection of SNP TSC0041465
tatttagtaattt

SEQ ID NO: 165328 - DNA, 13 bp, Artificial Sequence
  Oligonucleotide for detection of SNP TSC0041465
aaattactaaata

SEQ ID NO: 165329 - DNA, 13 bp, Artificial Sequence
  Oligonucleotide for detection of SNP TSC0041465
tatttaataattt

SEQ ID NO: 165330 - DNA, 13 bp, Artificial Sequence
  Oligonucleotide for detection of SNP TSC0041465
aaattattaaata

SEQ ID NO: 165331 - DNA, 13 bp, Artificial Sequence
  Oligonucleotide for detection of SNP TSC0041466
ttagttaagagaa

SEQ ID NO: 165332 - DNA, 13 bp, Artificial Sequence
  Oligonucleotide for detection of SNP TSC0041466
ttctcttaactaa

SEQ ID NO: 165333 - DNA, 13 bp, Artificial Sequence
  Oligonucleotide for detection of SNP TSC0041466
ttagttgagagaa

SEQ ID NO: 165334 - DNA, 13 bp, Artificial Sequence
  Oligonucleotide for detection of SNP TSC0041466
ttctctcaactaa

SEQ ID NO: 165335 - DNA, 13 bp, Artificial Sequence
  Oligonucleotide for detection of SNP TSC0041467
tttaaggggtggg

SEQ ID NO: 165336 - DNA, 13 bp, Artificial Sequence
  Oligonucleotide for detection of SNP TSC0041467
cccaccccttaaa

SEQ ID NO: 165337 - DNA, 13 bp, Artificial Sequence
  Oligonucleotide for detection of SNP TSC0041467
tttaagaggtggg

SEQ ID NO: 165338 - DNA, 13 bp, Artificial Sequence
  Oligonucleotide for detection of SNP TSC0041467
cccacctcttaaa

SEQ ID NO: 165339 - DNA, 13 bp, Artificial Sequence
  Oligonucleotide for detection of SNP TSC0041467
tttaaggggcggg

SEQ ID NO: 165340 - DNA, 13 bp, Artificial Sequence
  Oligonucleotide for detection of SNP TSC0041467
cccgccccttaaa

SEQ ID NO: 165341 - DNA, 13 bp, Artificial Sequence
  Oligonucleotide for detection of SNP TSC0041467
tttaagaggcggg

SEQ ID NO: 165342 - DNA, 13 bp, Artificial Sequence
  Oligonucleotide for detection of SNP TSC0041467
cccgcctcttaaa

SEQ ID NO: 165343 - DNA, 13 bp, Artificial Sequence
  Oligonucleotide for detection of SNP TSC0041468
ggttgatgtggga

SEQ ID NO: 165344 - DNA, 13 bp, Artificial Sequence
  Oligonucleotide for detection of SNP TSC0041468
tcccacatcaacc

SEQ ID NO: 165345 - DNA, 13 bp, Artificial Sequence
  Oligonucleotide for detection of SNP TSC0041468
ggttgacgtggga

SEQ ID NO: 165346 - DNA, 13 bp, Artificial Sequence
  Oligonucleotide for detection of SNP TSC0041468
tcccacgtcaacc

SEQ ID NO: 165347 - DNA, 13 bp, Artificial Sequence
  Oligonucleotide for detection of SNP TSC0041469
atagtagagtgty

SEQ ID NO: 165348 - DNA, 13 bp, Artificial Sequence
  Oligonucleotide for detection of SNP TSC0041469
racactctactat

SEQ ID NO: 165349 - DNA, 13 bp, Artificial Sequence
  Oligonucleotide for detection of SNP TSC0041469
atagtaaagtgty

SEQ ID NO: 165350 - DNA, 13 bp, Artificial Sequence
  Oligonucleotide for detection of SNP TSC0041469
racactttactat

SEQ ID NO: 165351 - DNA, 13 bp, Artificial Sequence
  Oligonucleotide for detection of SNP TSC0041470
ataagtgagagaa

SEQ ID NO: 165352 - DNA, 13 bp, Artificial Sequence
  Oligonucleotide for detection of SNP TSC0041470
ttctctcacttat

SEQ ID NO: 165353 - DNA, 13 bp, Artificial Sequence
  Oligonucleotide for detection of SNP TSC0041470
ataagttagagaa

SEQ ID NO: 165354 - DNA, 13 bp, Artificial Sequence
  Oligonucleotide for detection of SNP TSC0041470
ttctctaacttat

SEQ ID NO: 165355 - DNA, 13 bp, Artificial Sequence
  Oligonucleotide for detection of SNP TSC0041472
tttggaaagttaa

SEQ ID NO: 165356 - DNA, 13 bp, Artificial Sequence
  Oligonucleotide for detection of SNP TSC0041472
ttaactttccaaa

SEQ ID NO: 165357 - DNA, 13 bp, Artificial Sequence
  Oligonucleotide for detection of SNP TSC0041472
tttggagagttaa

SEQ ID NO: 165358 - DNA, 13 bp, Artificial Sequence
  Oligonucleotide for detection of SNP TSC0041472
ttaactctccaaa

SEQ ID NO: 165359 - DNA, 13 bp, Artificial Sequence
  Oligonucleotide for detection of SNP TSC0041473
aaattatatttta

SEQ ID NO: 165360 - DNA, 13 bp, Artificial Sequence
  Oligonucleotide for detection of SNP TSC0041473
taaaatataattt

SEQ ID NO: 165361 - DNA, 13 bp, Artificial Sequence
  Oligonucleotide for detection of SNP TSC0041473
aaattagatttta

SEQ ID NO: 165362 - DNA, 13 bp, Artificial Sequence
  Oligonucleotide for detection of SNP TSC0041473
taaaatctaattt

SEQ ID NO: 165363 - DNA, 13 bp, Artificial Sequence
  Oligonucleotide for detection of SNP TSC0041473
taaaatgtagttt

SEQ ID NO: 165364 - DNA, 13 bp, Artificial Sequence
  Oligonucleotide for detection of SNP TSC0041473
aaactacatttta

SEQ ID NO: 165365 - DNA, 13 bp, Artificial Sequence
  Oligonucleotide for detection of SNP TSC0041473
taaaatttagttt

SEQ ID NO: 165366 - DNA, 13 bp, Artificial Sequence
  Oligonucleotide for detection of SNP TSC0041473
aaactaaatttta

SEQ ID NO: 165367 - DNA, 13 bp, Artificial Sequence
  Oligonucleotide for detection of SNP TSC0041475
ttaattgtttagy

SEQ ID NO: 165368 - DNA, 13 bp, Artificial Sequence
  Oligonucleotide for detection of SNP TSC0041475
rctaaacaattaa

SEQ ID NO: 165369 - DNA, 13 bp, Artificial Sequence
  Oligonucleotide for detection of SNP TSC0041475
ttaattatttagy

SEQ ID NO: 165370 - DNA, 13 bp, Artificial Sequence
  Oligonucleotide for detection of SNP TSC0041475
rctaaataattaa

SEQ ID NO: 165371 - DNA, 13 bp, Artificial Sequence
  Oligonucleotide for detection of SNP TSC0041476
taatttggggatg

SEQ ID NO: 165372 - DNA, 13 bp, Artificial Sequence
  Oligonucleotide for detection of SNP TSC0041476
catccccaaatta

SEQ ID NO: 165373 - DNA, 13 bp, Artificial Sequence
  Oligonucleotide for detection of SNP TSC0041476
taatttagggatg

SEQ ID NO: 165374 - DNA, 13 bp, Artificial Sequence
  Oligonucleotide for detection of SNP TSC0041476
catccctaaatta

SEQ ID NO: 165375 - DNA, 13 bp, Artificial Sequence
  Oligonucleotide for detection of SNP TSC0041477
ggtgagaataatg

SEQ ID NO: 165376 - DNA, 13 bp, Artificial Sequence
  Oligonucleotide for detection of SNP TSC0041477
cattattctcacc

SEQ ID NO: 165377 - DNA, 13 bp, Artificial Sequence
  Oligonucleotide for detection of SNP TSC0041477
ggtgagtataatg

SEQ ID NO: 165378 - DNA, 13 bp, Artificial Sequence
  Oligonucleotide for detection of SNP TSC0041477
cattatactcacc

SEQ ID NO: 165379 - DNA, 13 bp, Artificial Sequence
  Oligonucleotide for detection of SNP TSC0041477
ggcgagaataatg

SEQ ID NO: 165380 - DNA, 13 bp, Artificial Sequence
  Oligonucleotide for detection of SNP TSC0041477
cattattctcgcc

SEQ ID NO: 165381 - DNA, 13 bp, Artificial Sequence
  Oligonucleotide for detection of SNP TSC0041477
ggcgagtataatg

SEQ ID NO: 165382 - DNA, 13 bp, Artificial Sequence
  Oligonucleotide for detection of SNP TSC0041477
cattatactcgcc

SEQ ID NO: 165383 - DNA, 13 bp, Artificial Sequence
  Oligonucleotide for detection of SNP TSC0041477
tattgttttcgty

SEQ ID NO: 165384 - DNA, 13 bp, Artificial Sequence
  Oligonucleotide for detection of SNP TSC0041477
racgaaaacaata

SEQ ID NO: 165385 - DNA, 13 bp, Artificial Sequence
  Oligonucleotide for detection of SNP TSC0041477
tattgtgttcgty

SEQ ID NO: 165386 - DNA, 13 bp, Artificial Sequence
  Oligonucleotide for detection of SNP TSC0041477
racgaacacaata

SEQ ID NO: 165387 - DNA, 13 bp, Artificial Sequence
  Oligonucleotide for detection of SNP TSC0041480
agtaatgataatt

SEQ ID NO: 165388 - DNA, 13 bp, Artificial Sequence
  Oligonucleotide for detection of SNP TSC0041480
aattatcattact

SEQ ID NO: 165389 - DNA, 13 bp, Artificial Sequence
  Oligonucleotide for detection of SNP TSC0041480
agtaataataatt

SEQ ID NO: 165390 - DNA, 13 bp, Artificial Sequence
  Oligonucleotide for detection of SNP TSC0041480
aattattattact

SEQ ID NO: 165391 - DNA, 13 bp, Artificial Sequence
  Oligonucleotide for detection of SNP TSC0041481
ttattaatatata

SEQ ID NO: 165392 - DNA, 13 bp, Artificial Sequence
  Oligonucleotide for detection of SNP TSC0041481
tatatattaataa

SEQ ID NO: 165393 - DNA, 13 bp, Artificial Sequence
  Oligonucleotide for detection of SNP TSC0041481
ttattattatata

SEQ ID NO: 165394 - DNA, 13 bp, Artificial Sequence
  Oligonucleotide for detection of SNP TSC0041481
tatataataataa

SEQ ID NO: 165395 - DNA, 13 bp, Artificial Sequence
  Oligonucleotide for detection of SNP TSC0041481
tatatattgatga

SEQ ID NO: 165396 - DNA, 13 bp, Artificial Sequence
  Oligonucleotide for detection of SNP TSC0041481
tcatcaatatata

SEQ ID NO: 165397 - DNA, 13 bp, Artificial Sequence
  Oligonucleotide for detection of SNP TSC0041481
tatataatgatga

SEQ ID NO: 165398 - DNA, 13 bp, Artificial Sequence
  Oligonucleotide for detection of SNP TSC0041481
tcatcattatata

SEQ ID NO: 165399 - DNA, 13 bp, Artificial Sequence
  Oligonucleotide for detection of SNP TSC0041482
aagatagtagaag

SEQ ID NO: 165400 - DNA, 13 bp, Artificial Sequence
  Oligonucleotide for detection of SNP TSC0041482
cttctactatctt

SEQ ID NO: 165401 - DNA, 13 bp, Artificial Sequence
  Oligonucleotide for detection of SNP TSC0041482
aagataatagaag

SEQ ID NO: 165402 - DNA, 13 bp, Artificial Sequence
  Oligonucleotide for detection of SNP TSC0041482
cttctattatctt

SEQ ID NO: 165403 - DNA, 13 bp, Artificial Sequence
  Oligonucleotide for detection of SNP TSC0041483
aggaattgtgatg

SEQ ID NO: 165404 - DNA, 13 bp, Artificial Sequence
  Oligonucleotide for detection of SNP TSC0041483
catcacaattcct

SEQ ID NO: 165405 - DNA, 13 bp, Artificial Sequence
  Oligonucleotide for detection of SNP TSC0041483
aggaatcgtgatg

SEQ ID NO: 165406 - DNA, 13 bp, Artificial Sequence
  Oligonucleotide for detection of SNP TSC0041483
catcacgattcct

SEQ ID NO: 165407 - DNA, 13 bp, Artificial Sequence
  Oligonucleotide for detection of SNP TSC0041483
tattataattttt

SEQ ID NO: 165408 - DNA, 13 bp, Artificial Sequence
  Oligonucleotide for detection of SNP TSC0041483
aaaaattataata

SEQ ID NO: 165409 - DNA, 13 bp, Artificial Sequence
  Oligonucleotide for detection of SNP TSC0041483
tattacgattttt

SEQ ID NO: 165410 - DNA, 13 bp, Artificial Sequence
  Oligonucleotide for detection of SNP TSC0041483
aaaaatcgtaata

SEQ ID NO: 165411 - DNA, 13 bp, Artificial Sequence
  Oligonucleotide for detection of SNP TSC0041486
ttaaattttggtg

SEQ ID NO: 165412 - DNA, 13 bp, Artificial Sequence
  Oligonucleotide for detection of SNP TSC0041486
caccaaaatttaa

SEQ ID NO: 165413 - DNA, 13 bp, Artificial Sequence
  Oligonucleotide for detection of SNP TSC0041486
ttaaatgttggtg

SEQ ID NO: 165414 - DNA, 13 bp, Artificial Sequence
  Oligonucleotide for detection of SNP TSC0041486
caccaacatttaa

SEQ ID NO: 165415 - DNA, 13 bp, Artificial Sequence
  Oligonucleotide for detection of SNP TSC0041486
ttaaacgttggtg

SEQ ID NO: 165416 - DNA, 13 bp, Artificial Sequence
  Oligonucleotide for detection of SNP TSC0041486
caccaacgtttaa

SEQ ID NO: 165417 - DNA, 13 bp, Artificial Sequence
  Oligonucleotide for detection of SNP TSC0041486
tattaaagtttga

SEQ ID NO: 165418 - DNA, 13 bp, Artificial Sequence
  Oligonucleotide for detection of SNP TSC0041486
tcaaactttaata

SEQ ID NO: 165419 - DNA, 13 bp, Artificial Sequence
  Oligonucleotide for detection of SNP TSC0041486
tattaatgtttga

SEQ ID NO: 165420 - DNA, 13 bp, Artificial Sequence
  Oligonucleotide for detection of SNP TSC0041486
tcaaacattaata

SEQ ID NO: 165421 - DNA, 13 bp, Artificial Sequence
  Oligonucleotide for detection of SNP TSC0041486
tattaacgtttga

SEQ ID NO: 165422 - DNA, 13 bp, Artificial Sequence
  Oligonucleotide for detection of SNP TSC0041486
tcaaacgttaata

SEQ ID NO: 165423 - DNA, 13 bp, Artificial Sequence
  Oligonucleotide for detection of SNP TSC0041489
ataaagagagttg

SEQ ID NO: 165424 - DNA, 13 bp, Artificial Sequence
  Oligonucleotide for detection of SNP TSC0041489
caactctctttat

SEQ ID NO: 165425 - DNA, 13 bp, Artificial Sequence
  Oligonucleotide for detection of SNP TSC0041489
ataaagggagttg

SEQ ID NO: 165426 - DNA, 13 bp, Artificial Sequence
  Oligonucleotide for detection of SNP TSC0041489
caactccctttat

SEQ ID NO: 165427 - DNA, 13 bp, Artificial Sequence
  Oligonucleotide for detection of SNP TSC0041490
tattttgtatatt

SEQ ID NO: 165428 - DNA, 13 bp, Artificial Sequence
  Oligonucleotide for detection of SNP TSC0041490
aatatacaaaata

SEQ ID NO: 165429 - DNA, 13 bp, Artificial Sequence
  Oligonucleotide for detection of SNP TSC0041490
tatttcgtatatt

SEQ ID NO: 165430 - DNA, 13 bp, Artificial Sequence
  Oligonucleotide for detection of SNP TSC0041490
aatatacgaaata

SEQ ID NO: 165431 - DNA, 13 bp, Artificial Sequence
  Oligonucleotide for detection of SNP TSC0041490
aatgtgtggggta

SEQ ID NO: 165432 - DNA, 13 bp, Artificial Sequence
  Oligonucleotide for detection of SNP TSC0041490
taccccacacatt

SEQ ID NO: 165433 - DNA, 13 bp, Artificial Sequence
  Oligonucleotide for detection of SNP TSC0041490
aatgtgcggggta

SEQ ID NO: 165434 - DNA, 13 bp, Artificial Sequence
  Oligonucleotide for detection of SNP TSC0041490
taccccgcacatt

SEQ ID NO: 165435 - DNA, 13 bp, Artificial Sequence
  Oligonucleotide for detection of SNP TSC0041491
ttttaaaatgttg

SEQ ID NO: 165436 - DNA, 13 bp, Artificial Sequence
  Oligonucleotide for detection of SNP TSC0041491
caacattttaaaa

SEQ ID NO: 165437 - DNA, 13 bp, Artificial Sequence
  Oligonucleotide for detection of SNP TSC0041491
ttttaagatgttg

SEQ ID NO: 165438 - DNA, 13 bp, Artificial Sequence
  Oligonucleotide for detection of SNP TSC0041491
caacatcttaaaa

SEQ ID NO: 165439 - DNA, 13 bp, Artificial Sequence
  Oligonucleotide for detection of SNP TSC0041492
atttttttgttty

SEQ ID NO: 165440 - DNA, 13 bp, Artificial Sequence
  Oligonucleotide for detection of SNP TSC0041492
raaacaaaaaaat

SEQ ID NO: 165441 - DNA, 13 bp, Artificial Sequence
  Oligonucleotide for detection of SNP TSC0041492
gaagtaggagaat

SEQ ID NO: 165442 - DNA, 13 bp, Artificial Sequence
  Oligonucleotide for detection of SNP TSC0041492
attctcctacttc

SEQ ID NO: 165443 - DNA, 13 bp, Artificial Sequence
  Oligonucleotide for detection of SNP TSC0041492
gaagtaagagaat

SEQ ID NO: 165444 - DNA, 13 bp, Artificial Sequence
  Oligonucleotide for detection of SNP TSC0041492
attctcttacttc

SEQ ID NO: 165445 - DNA, 13 bp, Artificial Sequence
  Oligonucleotide for detection of SNP TSC0041492
gaagtatgagaat

SEQ ID NO: 165446 - DNA, 13 bp, Artificial Sequence
  Oligonucleotide for detection of SNP TSC0041492
attctcatacttc

SEQ ID NO: 165447 - DNA, 13 bp, Artificial Sequence
  Oligonucleotide for detection of SNP TSC0041492
gaagtacgagaat

SEQ ID NO: 165448 - DNA, 13 bp, Artificial Sequence
  Oligonucleotide for detection of SNP TSC0041492
attctcgtacttc

SEQ ID NO: 165449 - DNA, 13 bp, Artificial Sequence
  Oligonucleotide for detection of SNP TSC0041493
atgtgtataagtt

SEQ ID NO: 165450 - DNA, 13 bp, Artificial Sequence
  Oligonucleotide for detection of SNP TSC0041493
aacttatacacat

SEQ ID NO: 165451 - DNA, 13 bp, Artificial Sequence
  Oligonucleotide for detection of SNP TSC0041493
atgtgtgtaagtt

SEQ ID NO: 165452 - DNA, 13 bp, Artificial Sequence
  Oligonucleotide for detection of SNP TSC0041493
aacttacacacat

SEQ ID NO: 165453 - DNA, 13 bp, Artificial Sequence
  Oligonucleotide for detection of SNP TSC0041493
atgtgcgtaagtt

SEQ ID NO: 165454 - DNA, 13 bp, Artificial Sequence
  Oligonucleotide for detection of SNP TSC0041493
aacttacgcacat

SEQ ID NO: 165455 - DNA, 13 bp, Artificial Sequence
  Oligonucleotide for detection of SNP TSC0041493
aatttatgtatat

SEQ ID NO: 165456 - DNA, 13 bp, Artificial Sequence
  Oligonucleotide for detection of SNP TSC0041493
atatacataaatt

SEQ ID NO: 165457 - DNA, 13 bp, Artificial Sequence
  Oligonucleotide for detection of SNP TSC0041493
aatttacgtatat

SEQ ID NO: 165458 - DNA, 13 bp, Artificial Sequence
  Oligonucleotide for detection of SNP TSC0041493
atatacgtaaatt

SEQ ID NO: 165459 - DNA, 13 bp, Artificial Sequence
  Oligonucleotide for detection of SNP TSC0041496
attttttttatag

SEQ ID NO: 165460 - DNA, 13 bp, Artificial Sequence
  Oligonucleotide for detection of SNP TSC0041496
ctataaaaaaaat

SEQ ID NO: 165461 - DNA, 13 bp, Artificial Sequence
  Oligonucleotide for detection of SNP TSC0041496
ttatgagagaggt

SEQ ID NO: 165462 - DNA, 13 bp, Artificial Sequence
  Oligonucleotide for detection of SNP TSC0041496
acctctctcataa

SEQ ID NO: 165463 - DNA, 13 bp, Artificial Sequence
  Oligonucleotide for detection of SNP TSC0041496
ttatgatagaggt

SEQ ID NO: 165464 - DNA, 13 bp, Artificial Sequence
  Oligonucleotide for detection of SNP TSC0041496
acctctatcataa

SEQ ID NO: 165465 - DNA, 13 bp, Artificial Sequence
  Oligonucleotide for detection of SNP TSC0041497
ttttgaggtaatg

SEQ ID NO: 165466 - DNA, 13 bp, Artificial Sequence
  Oligonucleotide for detection of SNP TSC0041497
cattacctcaaaa

SEQ ID NO: 165467 - DNA, 13 bp, Artificial Sequence
  Oligonucleotide for detection of SNP TSC0041497
ttttgaagtaatg

SEQ ID NO: 165468 - DNA, 13 bp, Artificial Sequence
  Oligonucleotide for detection of SNP TSC0041497
cattacttcaaaa

SEQ ID NO: 165469 - DNA, 13 bp, Artificial Sequence
  Oligonucleotide for detection of SNP TSC0041498
attagcggttata

SEQ ID NO: 165470 - DNA, 13 bp, Artificial Sequence
  Oligonucleotide for detection of SNP TSC0041498
tataaccgctaat

SEQ ID NO: 165471 - DNA, 13 bp, Artificial Sequence
  Oligonucleotide for detection of SNP TSC0041498
tgtgattgttaat

SEQ ID NO: 165472 - DNA, 13 bp, Artificial Sequence
  Oligonucleotide for detection of SNP TSC0041498
attaacaatcaca

SEQ ID NO: 165473 - DNA, 13 bp, Artificial Sequence
  Oligonucleotide for detection of SNP TSC0041498
tgtgatcgttaat

SEQ ID NO: 165474 - DNA, 13 bp, Artificial Sequence
  Oligonucleotide for detection of SNP TSC0041498
attaacgatcaca

SEQ ID NO: 165475 - DNA, 13 bp, Artificial Sequence
  Oligonucleotide for detection of SNP TSC0041499
tttattttaggtt

SEQ ID NO: 165476 - DNA, 13 bp, Artificial Sequence
  Oligonucleotide for detection of SNP TSC0041499
aacctaaaataaa

SEQ ID NO: 165477 - DNA, 13 bp, Artificial Sequence
  Oligonucleotide for detection of SNP TSC0041499
tttattgtaggtt

SEQ ID NO: 165478 - DNA, 13 bp, Artificial Sequence
  Oligonucleotide for detection of SNP TSC0041499
aacctacaataaa

SEQ ID NO: 165479 - DNA, 13 bp, Artificial Sequence
  Oligonucleotide for detection of SNP TSC0041499
agtttggagtaga

SEQ ID NO: 165480 - DNA, 13 bp, Artificial Sequence
  Oligonucleotide for detection of SNP TSC0041499
tctactccaaact

SEQ ID NO: 165481 - DNA, 13 bp, Artificial Sequence
  Oligonucleotide for detection of SNP TSC0041499
agtttgtagtaga

SEQ ID NO: 165482 - DNA, 13 bp, Artificial Sequence
  Oligonucleotide for detection of SNP TSC0041499
tctactacaaact

SEQ ID NO: 165483 - DNA, 13 bp, Artificial Sequence
  Oligonucleotide for detection of SNP TSC0041500
atttatagtatgt

SEQ ID NO: 165484 - DNA, 13 bp, Artificial Sequence
  Oligonucleotide for detection of SNP TSC0041500
acatactataaat

SEQ ID NO: 165485 - DNA, 13 bp, Artificial Sequence
  Oligonucleotide for detection of SNP TSC0041500
atttatggtatgt

SEQ ID NO: 165486 - DNA, 13 bp, Artificial Sequence
  Oligonucleotide for detection of SNP TSC0041500
acataccataaat

SEQ ID NO: 165487 - DNA, 13 bp, Artificial Sequence
  Oligonucleotide for detection of SNP TSC0041501
tgtagtatgtatt

SEQ ID NO: 165488 - DNA, 13 bp, Artificial Sequence
  Oligonucleotide for detection of SNP TSC0041501
aatacatactaca

SEQ ID NO: 165489 - DNA, 13 bp, Artificial Sequence
  Oligonucleotide for detection of SNP TSC0041501
tgtagtgtgtatt

SEQ ID NO: 165490 - DNA, 13 bp, Artificial Sequence
  Oligonucleotide for detection of SNP TSC0041501
aatacacactaca

SEQ ID NO: 165491 - DNA, 13 bp, Artificial Sequence
  Oligonucleotide for detection of SNP TSC0041501
tgtagcgtgtatt

SEQ ID NO: 165492 - DNA, 13 bp, Artificial Sequence
  Oligonucleotide for detection of SNP TSC0041501
aatacacgctaca

SEQ ID NO: 165493 - DNA, 13 bp, Artificial Sequence
  Oligonucleotide for detection of SNP TSC0041501
aatatatgttata

SEQ ID NO: 165494 - DNA, 13 bp, Artificial Sequence
  Oligonucleotide for detection of SNP TSC0041501
tataacatatatt

SEQ ID NO: 165495 - DNA, 13 bp, Artificial Sequence
  Oligonucleotide for detection of SNP TSC0041501
aatatacgttata

SEQ ID NO: 165496 - DNA, 13 bp, Artificial Sequence
  Oligonucleotide for detection of SNP TSC0041501
tataacgtatatt

SEQ ID NO: 165497 - DNA, 13 bp, Artificial Sequence
  Oligonucleotide for detection of SNP TSC0041502
tttggtagtttaa

SEQ ID NO: 165498 - DNA, 13 bp, Artificial Sequence
  Oligonucleotide for detection of SNP TSC0041502
ttaaactaccaaa

SEQ ID NO: 165499 - DNA, 13 bp, Artificial Sequence
  Oligonucleotide for detection of SNP TSC0041502
tttggtggtttaa

SEQ ID NO: 165500 - DNA, 13 bp, Artificial Sequence
  Oligonucleotide for detection of SNP TSC0041502
ttaaaccaccaaa

SEQ ID NO: 165501 - DNA, 13 bp, Artificial Sequence
  Oligonucleotide for detection of SNP TSC0041502
ttcggtagtttaa

SEQ ID NO: 165502 - DNA, 13 bp, Artificial Sequence
  Oligonucleotide for detection of SNP TSC0041502
ttaaactaccgaa

SEQ ID NO: 165503 - DNA, 13 bp, Artificial Sequence
  Oligonucleotide for detection of SNP TSC0041502
ttcggtggtttaa

SEQ ID NO: 165504 - DNA, 13 bp, Artificial Sequence
  Oligonucleotide for detection of SNP TSC0041502
ttaaaccaccgaa

SEQ ID NO: 165505 - DNA, 13 bp, Artificial Sequence
  Oligonucleotide for detection of SNP TSC0041502
tttggcggtttaa

SEQ ID NO: 165506 - DNA, 13 bp, Artificial Sequence
  Oligonucleotide for detection of SNP TSC0041502
ttaaaccgccaaa

SEQ ID NO: 165507 - DNA, 13 bp, Artificial Sequence
  Oligonucleotide for detection of SNP TSC0041502
ttcggcggtttaa

SEQ ID NO: 165508 - DNA, 13 bp, Artificial Sequence
  Oligonucleotide for detection of SNP TSC0041502
ttaaaccgccgaa

SEQ ID NO: 165509 - DNA, 13 bp, Artificial Sequence
  Oligonucleotide for detection of SNP TSC0041502
ttaaattgttgaa

SEQ ID NO: 165510 - DNA, 13 bp, Artificial Sequence
  Oligonucleotide for detection of SNP TSC0041502
ttcaacaatttaa

SEQ ID NO: 165511 - DNA, 13 bp, Artificial Sequence
  Oligonucleotide for detection of SNP TSC0041502
ttaaattgtcgaa

SEQ ID NO: 165512 - DNA, 13 bp, Artificial Sequence
  Oligonucleotide for detection of SNP TSC0041502
ttcgacaatttaa

SEQ ID NO: 165513 - DNA, 13 bp, Artificial Sequence
  Oligonucleotide for detection of SNP TSC0041502
ttaaatcgttgaa

SEQ ID NO: 165514 - DNA, 13 bp, Artificial Sequence
  Oligonucleotide for detection of SNP TSC0041502
ttcaacgatttaa

SEQ ID NO: 165515 - DNA, 13 bp, Artificial Sequence
  Oligonucleotide for detection of SNP TSC0041502
ttaaatcgtcgaa

SEQ ID NO: 165516 - DNA, 13 bp, Artificial Sequence
  Oligonucleotide for detection of SNP TSC0041502
ttcgacgatttaa

SEQ ID NO: 165517 - DNA, 13 bp, Artificial Sequence
  Oligonucleotide for detection of SNP TSC0041504
tagagagtatttt

SEQ ID NO: 165518 - DNA, 13 bp, Artificial Sequence
  Oligonucleotide for detection of SNP TSC0041504
aaaatactctcta

SEQ ID NO: 165519 - DNA, 13 bp, Artificial Sequence
  Oligonucleotide for detection of SNP TSC0041504
tagagaatatttt

SEQ ID NO: 165520 - DNA, 13 bp, Artificial Sequence
  Oligonucleotide for detection of SNP TSC0041504
aaaatattctcta

SEQ ID NO: 165521 - DNA, 13 bp, Artificial Sequence
  Oligonucleotide for detection of SNP TSC0041505
atttaagaaaaty

SEQ ID NO: 165522 - DNA, 13 bp, Artificial Sequence
  Oligonucleotide for detection of SNP TSC0041505
rattttcttaaat

SEQ ID NO: 165523 - DNA, 13 bp, Artificial Sequence
  Oligonucleotide for detection of SNP TSC0041505
atttaaaaaaaty

SEQ ID NO: 165524 - DNA, 13 bp, Artificial Sequence
  Oligonucleotide for detection of SNP TSC0041505
ratttttttaaat

SEQ ID NO: 165525 - DNA, 13 bp, Artificial Sequence
  Oligonucleotide for detection of SNP TSC0041507
ttaagagggaagy

SEQ ID NO: 165526 - DNA, 13 bp, Artificial Sequence
  Oligonucleotide for detection of SNP TSC0041507
rcttccctcttaa

SEQ ID NO: 165527 - DNA, 13 bp, Artificial Sequence
  Oligonucleotide for detection of SNP TSC0041507
ttaagaaggaagy

SEQ ID NO: 165528 - DNA, 13 bp, Artificial Sequence
  Oligonucleotide for detection of SNP TSC0041507
rcttccttcttaa

SEQ ID NO: 165529 - DNA, 13 bp, Artificial Sequence
  Oligonucleotide for detection of SNP TSC0041508
aagataaagtatt

SEQ ID NO: 165530 - DNA, 13 bp, Artificial Sequence
  Oligonucleotide for detection of SNP TSC0041508
aatactttatctt

SEQ ID NO: 165531 - DNA, 13 bp, Artificial Sequence
  Oligonucleotide for detection of SNP TSC0041508
aagatatagtatt

SEQ ID NO: 165532 - DNA, 13 bp, Artificial Sequence
  Oligonucleotide for detection of SNP TSC0041508
aatactatatctt

SEQ ID NO: 165533 - DNA, 13 bp, Artificial Sequence
  Oligonucleotide for detection of SNP TSC0041508
aatattttatttt

SEQ ID NO: 165534 - DNA, 13 bp, Artificial Sequence
  Oligonucleotide for detection of SNP TSC0041508
aaaataaaatatt

SEQ ID NO: 165535 - DNA, 13 bp, Artificial Sequence
  Oligonucleotide for detection of SNP TSC0041509
tatatttgattty

SEQ ID NO: 165536 - DNA, 13 bp, Artificial Sequence
  Oligonucleotide for detection of SNP TSC0041509
raaatcaaatata

SEQ ID NO: 165537 - DNA, 13 bp, Artificial Sequence
  Oligonucleotide for detection of SNP TSC0041509
tatattcgattty

SEQ ID NO: 165538 - DNA, 13 bp, Artificial Sequence
  Oligonucleotide for detection of SNP TSC0041509
raaatcgaatata

SEQ ID NO: 165539 - DNA, 13 bp, Artificial Sequence
  Oligonucleotide for detection of SNP TSC0041509
gaaattgaatata

SEQ ID NO: 165540 - DNA, 13 bp, Artificial Sequence
  Oligonucleotide for detection of SNP TSC0041509
tatattcaatttc

SEQ ID NO: 165541 - DNA, 13 bp, Artificial Sequence
  Oligonucleotide for detection of SNP TSC0041509
gaaattaaatata

SEQ ID NO: 165542 - DNA, 13 bp, Artificial Sequence
  Oligonucleotide for detection of SNP TSC0041509
tatatttaatttc

SEQ ID NO: 165543 - DNA, 13 bp, Artificial Sequence
  Oligonucleotide for detection of SNP TSC0041509
gaaatcgaatata

SEQ ID NO: 165544 - DNA, 13 bp, Artificial Sequence
  Oligonucleotide for detection of SNP TSC0041509
tatattcgatttc

SEQ ID NO: 165545 - DNA, 13 bp, Artificial Sequence
  Oligonucleotide for detection of SNP TSC0041511
gtatagtggtata

SEQ ID NO: 165546 - DNA, 13 bp, Artificial Sequence
  Oligonucleotide for detection of SNP TSC0041511
tataccactatac

SEQ ID NO: 165547 - DNA, 13 bp, Artificial Sequence
  Oligonucleotide for detection of SNP TSC0041511
gtataggggtata

SEQ ID NO: 165548 - DNA, 13 bp, Artificial Sequence
  Oligonucleotide for detection of SNP TSC0041511
tatacccctatac

SEQ ID NO: 165549 - DNA, 13 bp, Artificial Sequence
  Oligonucleotide for detection of SNP TSC0041511
tgtgttattgtay

SEQ ID NO: 165550 - DNA, 13 bp, Artificial Sequence
  Oligonucleotide for detection of SNP TSC0041511
rtacaataacaca

SEQ ID NO: 165551 - DNA, 13 bp, Artificial Sequence
  Oligonucleotide for detection of SNP TSC0041511
tgtgtttttgtay

SEQ ID NO: 165552 - DNA, 13 bp, Artificial Sequence
  Oligonucleotide for detection of SNP TSC0041511
rtacaaaaacaca

SEQ ID NO: 165553 - DNA, 13 bp, Artificial Sequence
  Oligonucleotide for detection of SNP TSC0041512
aggtatatattay

SEQ ID NO: 165554 - DNA, 13 bp, Artificial Sequence
  Oligonucleotide for detection of SNP TSC0041512
rtaatatatacct

SEQ ID NO: 165555 - DNA, 13 bp, Artificial Sequence
  Oligonucleotide for detection of SNP TSC0041512
aggtatgtattay

SEQ ID NO: 165556 - DNA, 13 bp, Artificial Sequence
  Oligonucleotide for detection of SNP TSC0041512
rtaatacatacct

SEQ ID NO: 165557 - DNA, 13 bp, Artificial Sequence
  Oligonucleotide for detection of SNP TSC0041512
aggtacgtattay

SEQ ID NO: 165558 - DNA, 13 bp, Artificial Sequence
  Oligonucleotide for detection of SNP TSC0041512
rtaatacgtacct

SEQ ID NO: 165559 - DNA, 13 bp, Artificial Sequence
  Oligonucleotide for detection of SNP TSC0041513
ttaataagttaaa

SEQ ID NO: 165560 - DNA, 13 bp, Artificial Sequence
  Oligonucleotide for detection of SNP TSC0041513
tttaacttattaa

SEQ ID NO: 165561 - DNA, 13 bp, Artificial Sequence
  Oligonucleotide for detection of SNP TSC0041513
ttaataggttaaa

SEQ ID NO: 165562 - DNA, 13 bp, Artificial Sequence
  Oligonucleotide for detection of SNP TSC0041513
tttaacctattaa

SEQ ID NO: 165563 - DNA, 13 bp, Artificial Sequence
  Oligonucleotide for detection of SNP TSC0041514
ttttaagttttgg

SEQ ID NO: 165564 - DNA, 13 bp, Artificial Sequence
  Oligonucleotide for detection of SNP TSC0041514
ccaaaacttaaaa

SEQ ID NO: 165565 - DNA, 13 bp, Artificial Sequence
  Oligonucleotide for detection of SNP TSC0041514
ttttaaattttgg

SEQ ID NO: 165566 - DNA, 13 bp, Artificial Sequence
  Oligonucleotide for detection of SNP TSC0041514
ccaaaatttaaaa

SEQ ID NO: 165567 - DNA, 13 bp, Artificial Sequence
  Oligonucleotide for detection of SNP TSC0041515
ggatttaatagtg

SEQ ID NO: 165568 - DNA, 13 bp, Artificial Sequence
  Oligonucleotide for detection of SNP TSC0041515
cactattaaatcc

SEQ ID NO: 165569 - DNA, 13 bp, Artificial Sequence
  Oligonucleotide for detection of SNP TSC0041515
ggattttatagtg

SEQ ID NO: 165570 - DNA, 13 bp, Artificial Sequence
  Oligonucleotide for detection of SNP TSC0041515
cactataaaatcc

SEQ ID NO: 165571 - DNA, 13 bp, Artificial Sequence
  Oligonucleotide for detection of SNP TSC0041515
tattgttggatty

SEQ ID NO: 165572 - DNA, 13 bp, Artificial Sequence
  Oligonucleotide for detection of SNP TSC0041515
raatccaacaata

SEQ ID NO: 165573 - DNA, 13 bp, Artificial Sequence
  Oligonucleotide for detection of SNP TSC0041515
tattgtgggatty

SEQ ID NO: 165574 - DNA, 13 bp, Artificial Sequence
  Oligonucleotide for detection of SNP TSC0041515
raatcccacaata

SEQ ID NO: 165575 - DNA, 13 bp, Artificial Sequence
  Oligonucleotide for detection of SNP TSC0041516
aatgtggttttty

SEQ ID NO: 165576 - DNA, 13 bp, Artificial Sequence
  Oligonucleotide for detection of SNP TSC0041516
raaaaaccacatt

SEQ ID NO: 165577 - DNA, 13 bp, Artificial Sequence
  Oligonucleotide for detection of SNP TSC0041517
agtagtagttttg

SEQ ID NO: 165578 - DNA, 13 bp, Artificial Sequence
  Oligonucleotide for detection of SNP TSC0041517
caaaactactact

SEQ ID NO: 165579 - DNA, 13 bp, Artificial Sequence
  Oligonucleotide for detection of SNP TSC0041517
agtagtggttttg

SEQ ID NO: 165580 - DNA, 13 bp, Artificial Sequence
  Oligonucleotide for detection of SNP TSC0041517
caaaaccactact

SEQ ID NO: 165581 - DNA, 13 bp, Artificial Sequence
  Oligonucleotide for detection of SNP TSC0041517
agtagcggttttg

SEQ ID NO: 165582 - DNA, 13 bp, Artificial Sequence
  Oligonucleotide for detection of SNP TSC0041517
caaaaccgctact

SEQ ID NO: 165583 - DNA, 13 bp, Artificial Sequence
  Oligonucleotide for detection of SNP TSC0041517
taggattgttatt

SEQ ID NO: 165584 - DNA, 13 bp, Artificial Sequence
  Oligonucleotide for detection of SNP TSC0041517
aataacaatccta

SEQ ID NO: 165585 - DNA, 13 bp, Artificial Sequence
  Oligonucleotide for detection of SNP TSC0041517
taggatcgttatt

SEQ ID NO: 165586 - DNA, 13 bp, Artificial Sequence
  Oligonucleotide for detection of SNP TSC0041517
aataacgatccta

SEQ ID NO: 165587 - DNA, 13 bp, Artificial Sequence
  Oligonucleotide for detection of SNP TSC0007614
ttaaggtggggtg

SEQ ID NO: 165588 - DNA, 13 bp, Artificial Sequence
  Oligonucleotide for detection of SNP TSC0007614
caccccaccttaa

SEQ ID NO: 165589 - DNA, 13 bp, Artificial Sequence
  Oligonucleotide for detection of SNP TSC0007614
ttaagggggggtg

SEQ ID NO: 165590 - DNA, 13 bp, Artificial Sequence
  Oligonucleotide for detection of SNP TSC0007614
cacccccccttaa

SEQ ID NO: 165591 - DNA, 13 bp, Artificial Sequence
  Oligonucleotide for detection of SNP TSC0041521
ggttaagtataag

SEQ ID NO: 165592 - DNA, 13 bp, Artificial Sequence
  Oligonucleotide for detection of SNP TSC0041521
cttatacttaacc

SEQ ID NO: 165593 - DNA, 13 bp, Artificial Sequence
  Oligonucleotide for detection of SNP TSC0041521
ggttaaatataag

SEQ ID NO: 165594 - DNA, 13 bp, Artificial Sequence
  Oligonucleotide for detection of SNP TSC0041521
cttatatttaacc

SEQ ID NO: 165595 - DNA, 13 bp, Artificial Sequence
  Oligonucleotide for detection of SNP TSC0041527
ttgagatgttgtg

SEQ ID NO: 165596 - DNA, 13 bp, Artificial Sequence
  Oligonucleotide for detection of SNP TSC0041527
cacaacatctcaa

SEQ ID NO: 165597 - DNA, 13 bp, Artificial Sequence
  Oligonucleotide for detection of SNP TSC0041527
ttgagaggttgtg

SEQ ID NO: 165598 - DNA, 13 bp, Artificial Sequence
  Oligonucleotide for detection of SNP TSC0041527
cacaacctctcaa

SEQ ID NO: 165599 - DNA, 13 bp, Artificial Sequence
  Oligonucleotide for detection of SNP TSC0041527
ttgagatgttgcg

SEQ ID NO: 165600 - DNA, 13 bp, Artificial Sequence
  Oligonucleotide for detection of SNP TSC0041527
cgcaacatctcaa

SEQ ID NO: 165601 - DNA, 13 bp, Artificial Sequence
  Oligonucleotide for detection of SNP TSC0041527
ttgagaggttgcg

SEQ ID NO: 165602 - DNA, 13 bp, Artificial Sequence
  Oligonucleotide for detection of SNP TSC0041527
cgcaacctctcaa

SEQ ID NO: 165603 - DNA, 13 bp, Artificial Sequence
  Oligonucleotide for detection of SNP TSC0041527
tgtagtattttag

SEQ ID NO: 165604 - DNA, 13 bp, Artificial Sequence
  Oligonucleotide for detection of SNP TSC0041527
ctaaaatactaca

SEQ ID NO: 165605 - DNA, 13 bp, Artificial Sequence
  Oligonucleotide for detection of SNP TSC0041527
tgtagttttttag

SEQ ID NO: 165606 - DNA, 13 bp, Artificial Sequence
  Oligonucleotide for detection of SNP TSC0041527
ctaaaaaactaca

SEQ ID NO: 165607 - DNA, 13 bp, Artificial Sequence
  Oligonucleotide for detection of SNP TSC0041527
cgtagtattttag

SEQ ID NO: 165608 - DNA, 13 bp, Artificial Sequence
  Oligonucleotide for detection of SNP TSC0041527
ctaaaatactacg

SEQ ID NO: 165609 - DNA, 13 bp, Artificial Sequence
  Oligonucleotide for detection of SNP TSC0041527
cgtagttttttag

SEQ ID NO: 165610 - DNA, 13 bp, Artificial Sequence
  Oligonucleotide for detection of SNP TSC0041527
ctaaaaaactacg

SEQ ID NO: 165611 - DNA, 13 bp, Artificial Sequence
  Oligonucleotide for detection of SNP TSC0041528
tatgttgttaggt

SEQ ID NO: 165612 - DNA, 13 bp, Artificial Sequence
  Oligonucleotide for detection of SNP TSC0041528
acctaacaacata

SEQ ID NO: 165613 - DNA, 13 bp, Artificial Sequence
  Oligonucleotide for detection of SNP TSC0041528
tatgttattaggt

SEQ ID NO: 165614 - DNA, 13 bp, Artificial Sequence
  Oligonucleotide for detection of SNP TSC0041528
acctaataacata

SEQ ID NO: 165615 - DNA, 13 bp, Artificial Sequence
  Oligonucleotide for detection of SNP TSC0041529
ataattaggaagt

SEQ ID NO: 165616 - DNA, 13 bp, Artificial Sequence
  Oligonucleotide for detection of SNP TSC0041529
acttcctaattat

SEQ ID NO: 165617 - DNA, 13 bp, Artificial Sequence
  Oligonucleotide for detection of SNP TSC0041529
ataattgggaagt

SEQ ID NO: 165618 - DNA, 13 bp, Artificial Sequence
  Oligonucleotide for detection of SNP TSC0041529
acttcccaattat

SEQ ID NO: 165619 - DNA, 13 bp, Artificial Sequence
  Oligonucleotide for detection of SNP TSC0041530
ttgtttgtaagty

SEQ ID NO: 165620 - DNA, 13 bp, Artificial Sequence
  Oligonucleotide for detection of SNP TSC0041530
racttacaaacaa

SEQ ID NO: 165621 - DNA, 13 bp, Artificial Sequence
  Oligonucleotide for detection of SNP TSC0041530
ttgtttataagty

SEQ ID NO: 165622 - DNA, 13 bp, Artificial Sequence
  Oligonucleotide for detection of SNP TSC0041530
racttataaacaa

SEQ ID NO: 165623 - DNA, 13 bp, Artificial Sequence
  Oligonucleotide for detection of SNP TSC0041531
aaggataataaat

SEQ ID NO: 165624 - DNA, 13 bp, Artificial Sequence
  Oligonucleotide for detection of SNP TSC0041531
atttattatcctt

SEQ ID NO: 165625 - DNA, 13 bp, Artificial Sequence
  Oligonucleotide for detection of SNP TSC0041531
aaggatgataaat

SEQ ID NO: 165626 - DNA, 13 bp, Artificial Sequence
  Oligonucleotide for detection of SNP TSC0041531
atttatcatcctt

SEQ ID NO: 165627 - DNA, 13 bp, Artificial Sequence
  Oligonucleotide for detection of SNP TSC0041532
aattttatgtaag

SEQ ID NO: 165628 - DNA, 13 bp, Artificial Sequence
  Oligonucleotide for detection of SNP TSC0041532
cttacataaaatt

SEQ ID NO: 165629 - DNA, 13 bp, Artificial Sequence
  Oligonucleotide for detection of SNP TSC0041532
aattttgtgtaag

SEQ ID NO: 165630 - DNA, 13 bp, Artificial Sequence
  Oligonucleotide for detection of SNP TSC0041532
cttacacaaaatt

SEQ ID NO: 165631 - DNA, 13 bp, Artificial Sequence
  Oligonucleotide for detection of SNP TSC0041532
aattttacgtaag

SEQ ID NO: 165632 - DNA, 13 bp, Artificial Sequence
  Oligonucleotide for detection of SNP TSC0041532
cttacgtaaaatt

SEQ ID NO: 165633 - DNA, 13 bp, Artificial Sequence
  Oligonucleotide for detection of SNP TSC0041532
aatttcgtgtaag

SEQ ID NO: 165634 - DNA, 13 bp, Artificial Sequence
  Oligonucleotide for detection of SNP TSC0041532
cttacacgaaatt

SEQ ID NO: 165635 - DNA, 13 bp, Artificial Sequence
  Oligonucleotide for detection of SNP TSC0041532
aattttgcgtaag

SEQ ID NO: 165636 - DNA, 13 bp, Artificial Sequence
  Oligonucleotide for detection of SNP TSC0041532
cttacgcaaaatt

SEQ ID NO: 165637 - DNA, 13 bp, Artificial Sequence
  Oligonucleotide for detection of SNP TSC0041532
aatttcgcgtaag

SEQ ID NO: 165638 - DNA, 13 bp, Artificial Sequence
  Oligonucleotide for detection of SNP TSC0041532
cttacgcgaaatt

SEQ ID NO: 165639 - DNA, 13 bp, Artificial Sequence
  Oligonucleotide for detection of SNP TSC0041532
tttatgtgggatt

SEQ ID NO: 165640 - DNA, 13 bp, Artificial Sequence
  Oligonucleotide for detection of SNP TSC0041532
aatcccacataaa

SEQ ID NO: 165641 - DNA, 13 bp, Artificial Sequence
  Oligonucleotide for detection of SNP TSC0041532
tttacgtgggatt

SEQ ID NO: 165642 - DNA, 13 bp, Artificial Sequence
  Oligonucleotide for detection of SNP TSC0041532
aatcccacgtaaa

SEQ ID NO: 165643 - DNA, 13 bp, Artificial Sequence
  Oligonucleotide for detection of SNP TSC0041532
tttatgcgggatt

SEQ ID NO: 165644 - DNA, 13 bp, Artificial Sequence
  Oligonucleotide for detection of SNP TSC0041532
aatcccgcataaa

SEQ ID NO: 165645 - DNA, 13 bp, Artificial Sequence
  Oligonucleotide for detection of SNP TSC0041532
tttacgcgggatt

SEQ ID NO: 165646 - DNA, 13 bp, Artificial Sequence
  Oligonucleotide for detection of SNP TSC0041532
aatcccgcgtaaa

SEQ ID NO: 165647 - DNA, 13 bp, Artificial Sequence
  Oligonucleotide for detection of SNP TSC0041535
gtgttatgaggaa

SEQ ID NO: 165648 - DNA, 13 bp, Artificial Sequence
  Oligonucleotide for detection of SNP TSC0041535
ttcctcataacac

SEQ ID NO: 165649 - DNA, 13 bp, Artificial Sequence
  Oligonucleotide for detection of SNP TSC0041535
gtgttaggaggaa

SEQ ID NO: 165650 - DNA, 13 bp, Artificial Sequence
  Oligonucleotide for detection of SNP TSC0041535
ttcctcctaacac

SEQ ID NO: 165651 - DNA, 13 bp, Artificial Sequence
  Oligonucleotide for detection of SNP TSC0041539
gaatataataaaa

SEQ ID NO: 165652 - DNA, 13 bp, Artificial Sequence
  Oligonucleotide for detection of SNP TSC0041539
ttttattatattc

SEQ ID NO: 165653 - DNA, 13 bp, Artificial Sequence
  Oligonucleotide for detection of SNP TSC0041539
gaatatgataaaa

SEQ ID NO: 165654 - DNA, 13 bp, Artificial Sequence
  Oligonucleotide for detection of SNP TSC0041539
ttttatcatattc

SEQ ID NO: 165655 - DNA, 13 bp, Artificial Sequence
  Oligonucleotide for detection of SNP TSC0041544
ttaattttgttty

SEQ ID NO: 165656 - DNA, 13 bp, Artificial Sequence
  Oligonucleotide for detection of SNP TSC0041544
raaacaaaattaa

SEQ ID NO: 165657 - DNA, 13 bp, Artificial Sequence
  Oligonucleotide for detection of SNP TSC0041544
ttaattgtgttty

SEQ ID NO: 165658 - DNA, 13 bp, Artificial Sequence
  Oligonucleotide for detection of SNP TSC0041544
raaacacaattaa

SEQ ID NO: 165659 - DNA, 13 bp, Artificial Sequence
  Oligonucleotide for detection of SNP TSC0041544
gaagtagagttaa

SEQ ID NO: 165660 - DNA, 13 bp, Artificial Sequence
  Oligonucleotide for detection of SNP TSC0041544
ttaactctacttc

SEQ ID NO: 165661 - DNA, 13 bp, Artificial Sequence
  Oligonucleotide for detection of SNP TSC0041544
gaagtatagttaa

SEQ ID NO: 165662 - DNA, 13 bp, Artificial Sequence
  Oligonucleotide for detection of SNP TSC0041544
ttaactatacttc

SEQ ID NO: 165663 - DNA, 13 bp, Artificial Sequence
  Oligonucleotide for detection of SNP TSC0006814
gtagattaaaagy

SEQ ID NO: 165664 - DNA, 13 bp, Artificial Sequence
  Oligonucleotide for detection of SNP TSC0006814
rcttttaatctac

SEQ ID NO: 165665 - DNA, 13 bp, Artificial Sequence
  Oligonucleotide for detection of SNP TSC0006814
gtagatgaaaagy

SEQ ID NO: 165666 - DNA, 13 bp, Artificial Sequence
  Oligonucleotide for detection of SNP TSC0006814
rcttttcatctac

SEQ ID NO: 165667 - DNA, 13 bp, Artificial Sequence
  Oligonucleotide for detection of SNP TSC0006814
gtttttgatttay

SEQ ID NO: 165668 - DNA, 13 bp, Artificial Sequence
  Oligonucleotide for detection of SNP TSC0006814
rtaaatcaaaaac

SEQ ID NO: 165669 - DNA, 13 bp, Artificial Sequence
  Oligonucleotide for detection of SNP TSC0041545
ttattggtttgtt

SEQ ID NO: 165670 - DNA, 13 bp, Artificial Sequence
  Oligonucleotide for detection of SNP TSC0041545
aacaaaccaataa

SEQ ID NO: 165671 - DNA, 13 bp, Artificial Sequence
  Oligonucleotide for detection of SNP TSC0041545
ttattgatttgtt

SEQ ID NO: 165672 - DNA, 13 bp, Artificial Sequence
  Oligonucleotide for detection of SNP TSC0041545
aacaaatcaataa

SEQ ID NO: 165673 - DNA, 13 bp, Artificial Sequence
  Oligonucleotide for detection of SNP TSC0041546
ttttttaaagata

SEQ ID NO: 165674 - DNA, 13 bp, Artificial Sequence
  Oligonucleotide for detection of SNP TSC0041546
tatctttaaaaaa

SEQ ID NO: 165675 - DNA, 13 bp, Artificial Sequence
  Oligonucleotide for detection of SNP TSC0041546
ttttttgaagata

SEQ ID NO: 165676 - DNA, 13 bp, Artificial Sequence
  Oligonucleotide for detection of SNP TSC0041546
tatcttcaaaaaa

SEQ ID NO: 165677 - DNA, 13 bp, Artificial Sequence
  Oligonucleotide for detection of SNP TSC0041549
tagttttgtgtaa

SEQ ID NO: 165678 - DNA, 13 bp, Artificial Sequence
  Oligonucleotide for detection of SNP TSC0041549
ttacacaaaacta

SEQ ID NO: 165679 - DNA, 13 bp, Artificial Sequence
  Oligonucleotide for detection of SNP TSC0041549
tagtttcgtgtaa

SEQ ID NO: 165680 - DNA, 13 bp, Artificial Sequence
  Oligonucleotide for detection of SNP TSC0041549
ttacacgaaacta

SEQ ID NO: 165681 - DNA, 13 bp, Artificial Sequence
  Oligonucleotide for detection of SNP TSC0041549
ttgtatggagttg

SEQ ID NO: 165682 - DNA, 13 bp, Artificial Sequence
  Oligonucleotide for detection of SNP TSC0041549
caactccatacaa

SEQ ID NO: 165683 - DNA, 13 bp, Artificial Sequence
  Oligonucleotide for detection of SNP TSC0041549
ttgtatagagttg

SEQ ID NO: 165684 - DNA, 13 bp, Artificial Sequence
  Oligonucleotide for detection of SNP TSC0041549
caactctatacaa

SEQ ID NO: 165685 - DNA, 13 bp, Artificial Sequence
  Oligonucleotide for detection of SNP TSC0041549
ttgtacggagttg

SEQ ID NO: 165686 - DNA, 13 bp, Artificial Sequence
  Oligonucleotide for detection of SNP TSC0041549
caactccgtacaa

SEQ ID NO: 165687 - DNA, 13 bp, Artificial Sequence
  Oligonucleotide for detection of SNP TSC0006697
tttaatatgttty

SEQ ID NO: 165688 - DNA, 13 bp, Artificial Sequence
  Oligonucleotide for detection of SNP TSC0006697
raaacatattaaa

SEQ ID NO: 165689 - DNA, 13 bp, Artificial Sequence
  Oligonucleotide for detection of SNP TSC0006697
tttaatttgttty

SEQ ID NO: 165690 - DNA, 13 bp, Artificial Sequence
  Oligonucleotide for detection of SNP TSC0006697
raaacaaattaaa

SEQ ID NO: 165691 - DNA, 13 bp, Artificial Sequence
  Oligonucleotide for detection of SNP TSC0006697
gaagtatgttaag

SEQ ID NO: 165692 - DNA, 13 bp, Artificial Sequence
  Oligonucleotide for detection of SNP TSC0006697
cttaacatacttc

SEQ ID NO: 165693 - DNA, 13 bp, Artificial Sequence
  Oligonucleotide for detection of SNP TSC0006697
gaagtaagttaag

SEQ ID NO: 165694 - DNA, 13 bp, Artificial Sequence
  Oligonucleotide for detection of SNP TSC0006697
cttaacttacttc

SEQ ID NO: 165695 - DNA, 13 bp, Artificial Sequence
  Oligonucleotide for detection of SNP TSC0041552
ttaagtaattttt

SEQ ID NO: 165696 - DNA, 13 bp, Artificial Sequence
  Oligonucleotide for detection of SNP TSC0041552
aaaaattacttaa

SEQ ID NO: 165697 - DNA, 13 bp, Artificial Sequence
  Oligonucleotide for detection of SNP TSC0041555
taggatatggttt

SEQ ID NO: 165698 - DNA, 13 bp, Artificial Sequence
  Oligonucleotide for detection of SNP TSC0041555
aaaccatatccta

SEQ ID NO: 165699 - DNA, 13 bp, Artificial Sequence
  Oligonucleotide for detection of SNP TSC0041555
taggatgtggttt

SEQ ID NO: 165700 - DNA, 13 bp, Artificial Sequence
  Oligonucleotide for detection of SNP TSC0041555
aaaccacatccta

SEQ ID NO: 165701 - DNA, 13 bp, Artificial Sequence
  Oligonucleotide for detection of SNP TSC0041556
tatttagtttgta

SEQ ID NO: 165702 - DNA, 13 bp, Artificial Sequence
  Oligonucleotide for detection of SNP TSC0041556
tacaaactaaata

SEQ ID NO: 165703 - DNA, 13 bp, Artificial Sequence
  Oligonucleotide for detection of SNP TSC0041556
tatttaatttgta

SEQ ID NO: 165704 - DNA, 13 bp, Artificial Sequence
  Oligonucleotide for detection of SNP TSC0041556
tacaaattaaata

SEQ ID NO: 165705 - DNA, 13 bp, Artificial Sequence
  Oligonucleotide for detection of SNP TSC0041557
ttgaaatatgggt

SEQ ID NO: 165706 - DNA, 13 bp, Artificial Sequence
  Oligonucleotide for detection of SNP TSC0041557
acccatatttcaa

SEQ ID NO: 165707 - DNA, 13 bp, Artificial Sequence
  Oligonucleotide for detection of SNP TSC0041557
ttgaaagatgggt

SEQ ID NO: 165708 - DNA, 13 bp, Artificial Sequence
  Oligonucleotide for detection of SNP TSC0041557
acccatctttcaa

SEQ ID NO: 165709 - DNA, 13 bp, Artificial Sequence
  Oligonucleotide for detection of SNP TSC0041557
atttatattttag

SEQ ID NO: 165710 - DNA, 13 bp, Artificial Sequence
  Oligonucleotide for detection of SNP TSC0041557
ctaaaatataaat

SEQ ID NO: 165711 - DNA, 13 bp, Artificial Sequence
  Oligonucleotide for detection of SNP TSC0041557
atttattttttag

SEQ ID NO: 165712 - DNA, 13 bp, Artificial Sequence
  Oligonucleotide for detection of SNP TSC0041557
ctaaaaaataaat

SEQ ID NO: 165713 - DNA, 13 bp, Artificial Sequence
  Oligonucleotide for detection of SNP TSC0007117
ttttatgtgtgtg

SEQ ID NO: 165714 - DNA, 13 bp, Artificial Sequence
  Oligonucleotide for detection of SNP TSC0007117
cacacacataaaa

SEQ ID NO: 165715 - DNA, 13 bp, Artificial Sequence
  Oligonucleotide for detection of SNP TSC0007117
ttttatatgtgtg

SEQ ID NO: 165716 - DNA, 13 bp, Artificial Sequence
  Oligonucleotide for detection of SNP TSC0007117
cacacatataaaa

SEQ ID NO: 165717 - DNA, 13 bp, Artificial Sequence
  Oligonucleotide for detection of SNP TSC0041558
ttagttaatgtty

SEQ ID NO: 165718 - DNA, 13 bp, Artificial Sequence
  Oligonucleotide for detection of SNP TSC0041558
raacattaactaa

SEQ ID NO: 165719 - DNA, 13 bp, Artificial Sequence
  Oligonucleotide for detection of SNP TSC0041558
ttagtttatgtty

SEQ ID NO: 165720 - DNA, 13 bp, Artificial Sequence
  Oligonucleotide for detection of SNP TSC0041558
raacataaactaa

SEQ ID NO: 165721 - DNA, 13 bp, Artificial Sequence
  Oligonucleotide for detection of SNP TSC0041558
gagtatgggttag

SEQ ID NO: 165722 - DNA, 13 bp, Artificial Sequence
  Oligonucleotide for detection of SNP TSC0041558
ctaacccatactc

SEQ ID NO: 165723 - DNA, 13 bp, Artificial Sequence
  Oligonucleotide for detection of SNP TSC0041559
gatttaagttttg

SEQ ID NO: 165724 - DNA, 13 bp, Artificial Sequence
  Oligonucleotide for detection of SNP TSC0041559
caaaacttaaatc

SEQ ID NO: 165725 - DNA, 13 bp, Artificial Sequence
  Oligonucleotide for detection of SNP TSC0041559
gatttaggttttg

SEQ ID NO: 165726 - DNA, 13 bp, Artificial Sequence
  Oligonucleotide for detection of SNP TSC0041559
caaaacctaaatc

SEQ ID NO: 165727 - DNA, 13 bp, Artificial Sequence
  Oligonucleotide for detection of SNP TSC0041560
aggtaagttatga

SEQ ID NO: 165728 - DNA, 13 bp, Artificial Sequence
  Oligonucleotide for detection of SNP TSC0041560
tcataacttacct

SEQ ID NO: 165729 - DNA, 13 bp, Artificial Sequence
  Oligonucleotide for detection of SNP TSC0041560
aggtaaattatga

SEQ ID NO: 165730 - DNA, 13 bp, Artificial Sequence
  Oligonucleotide for detection of SNP TSC0041560
tcataatttacct

SEQ ID NO: 165731 - DNA, 13 bp, Artificial Sequence
  Oligonucleotide for detection of SNP TSC0041562
gggaaggaaggaa

SEQ ID NO: 165732 - DNA, 13 bp, Artificial Sequence
  Oligonucleotide for detection of SNP TSC0041562
ttccttccttccc

SEQ ID NO: 165733 - DNA, 13 bp, Artificial Sequence
  Oligonucleotide for detection of SNP TSC0041562
gggaagaaaggaa

SEQ ID NO: 165734 - DNA, 13 bp, Artificial Sequence
  Oligonucleotide for detection of SNP TSC0041562
ttcctttcttccc

SEQ ID NO: 165735 - DNA, 13 bp, Artificial Sequence
  Oligonucleotide for detection of SNP TSC0041569
ttaagagattaat

SEQ ID NO: 165736 - DNA, 13 bp, Artificial Sequence
  Oligonucleotide for detection of SNP TSC0041569
attaatctcttaa

SEQ ID NO: 165737 - DNA, 13 bp, Artificial Sequence
  Oligonucleotide for detection of SNP TSC0041569
ttaagaaattaat

SEQ ID NO: 165738 - DNA, 13 bp, Artificial Sequence
  Oligonucleotide for detection of SNP TSC0041569
attaatttcttaa

SEQ ID NO: 165739 - DNA, 13 bp, Artificial Sequence
  Oligonucleotide for detection of SNP TSC0041570
tttgggtattatt

SEQ ID NO: 165740 - DNA, 13 bp, Artificial Sequence
  Oligonucleotide for detection of SNP TSC0041570
aataatacccaaa

SEQ ID NO: 165741 - DNA, 13 bp, Artificial Sequence
  Oligonucleotide for detection of SNP TSC0041570
tttggggattatt

SEQ ID NO: 165742 - DNA, 13 bp, Artificial Sequence
  Oligonucleotide for detection of SNP TSC0041570
aataatccccaaa

SEQ ID NO: 165743 - DNA, 13 bp, Artificial Sequence
  Oligonucleotide for detection of SNP TSC0041570
aatggtgtttaag

SEQ ID NO: 165744 - DNA, 13 bp, Artificial Sequence
  Oligonucleotide for detection of SNP TSC0041570
cttaaacaccatt

SEQ ID NO: 165745 - DNA, 13 bp, Artificial Sequence
  Oligonucleotide for detection of SNP TSC0041570
aatggtttttaag

SEQ ID NO: 165746 - DNA, 13 bp, Artificial Sequence
  Oligonucleotide for detection of SNP TSC0041570
cttaaaaaccatt

SEQ ID NO: 165747 - DNA, 13 bp, Artificial Sequence
  Oligonucleotide for detection of SNP TSC0041571
ttgtttattatga

SEQ ID NO: 165748 - DNA, 13 bp, Artificial Sequence
  Oligonucleotide for detection of SNP TSC0041571
tcataataaacaa

SEQ ID NO: 165749 - DNA, 13 bp, Artificial Sequence
  Oligonucleotide for detection of SNP TSC0041571
ttgtttgttatga

SEQ ID NO: 165750 - DNA, 13 bp, Artificial Sequence
  Oligonucleotide for detection of SNP TSC0041571
tcataacaaacaa

SEQ ID NO: 165751 - DNA, 13 bp, Artificial Sequence
  Oligonucleotide for detection of SNP TSC0041571
ttgttcgttatga

SEQ ID NO: 165752 - DNA, 13 bp, Artificial Sequence
  Oligonucleotide for detection of SNP TSC0041571
tcataacgaacaa

SEQ ID NO: 165753 - DNA, 13 bp, Artificial Sequence
  Oligonucleotide for detection of SNP TSC0041571
ttatggtgaatag

SEQ ID NO: 165754 - DNA, 13 bp, Artificial Sequence
  Oligonucleotide for detection of SNP TSC0041571
ctattcaccataa

SEQ ID NO: 165755 - DNA, 13 bp, Artificial Sequence
  Oligonucleotide for detection of SNP TSC0041571
ttatggcgaatag

SEQ ID NO: 165756 - DNA, 13 bp, Artificial Sequence
  Oligonucleotide for detection of SNP TSC0041571
ctattcgccataa

SEQ ID NO: 165757 - DNA, 13 bp, Artificial Sequence
  Oligonucleotide for detection of SNP TSC0041573
ggatgttttggaa

SEQ ID NO: 165758 - DNA, 13 bp, Artificial Sequence
  Oligonucleotide for detection of SNP TSC0041573
ttccaaaacatcc

SEQ ID NO: 165759 - DNA, 13 bp, Artificial Sequence
  Oligonucleotide for detection of SNP TSC0041573
ggatgtgttggaa

SEQ ID NO: 165760 - DNA, 13 bp, Artificial Sequence
  Oligonucleotide for detection of SNP TSC0041573
ttccaacacatcc

SEQ ID NO: 165761 - DNA, 13 bp, Artificial Sequence
  Oligonucleotide for detection of SNP TSC0041574
gaattatttttta

SEQ ID NO: 165762 - DNA, 13 bp, Artificial Sequence
  Oligonucleotide for detection of SNP TSC0041574
taaaaaataattc

SEQ ID NO: 165763 - DNA, 13 bp, Artificial Sequence
  Oligonucleotide for detection of SNP TSC0041574
tgggaggtaatty

SEQ ID NO: 165764 - DNA, 13 bp, Artificial Sequence
  Oligonucleotide for detection of SNP TSC0041574
raattacctccca

SEQ ID NO: 165765 - DNA, 13 bp, Artificial Sequence
  Oligonucleotide for detection of SNP TSC0041574
tgggagttaatty

SEQ ID NO: 165766 - DNA, 13 bp, Artificial Sequence
  Oligonucleotide for detection of SNP TSC0041574
raattaactccca

SEQ ID NO: 165767 - DNA, 13 bp, Artificial Sequence
  Oligonucleotide for detection of SNP TSC0041575
gatgtagatttaa

SEQ ID NO: 165768 - DNA, 13 bp, Artificial Sequence
  Oligonucleotide for detection of SNP TSC0041575
ttaaatctacatc

SEQ ID NO: 165769 - DNA, 13 bp, Artificial Sequence
  Oligonucleotide for detection of SNP TSC0041575
gatgtaaatttaa

SEQ ID NO: 165770 - DNA, 13 bp, Artificial Sequence
  Oligonucleotide for detection of SNP TSC0041575
ttaaatttacatc

SEQ ID NO: 165771 - DNA, 13 bp, Artificial Sequence
  Oligonucleotide for detection of SNP TSC0041576
ataaaataataga

SEQ ID NO: 165772 - DNA, 13 bp, Artificial Sequence
  Oligonucleotide for detection of SNP TSC0041576
tctattattttat

SEQ ID NO: 165773 - DNA, 13 bp, Artificial Sequence
  Oligonucleotide for detection of SNP TSC0041576
ataaaagaataga

SEQ ID NO: 165774 - DNA, 13 bp, Artificial Sequence
  Oligonucleotide for detection of SNP TSC0041576
tctattcttttat

SEQ ID NO: 165775 - DNA, 13 bp, Artificial Sequence
  Oligonucleotide for detection of SNP TSC0041576
tttatttttttgt

SEQ ID NO: 165776 - DNA, 13 bp, Artificial Sequence
  Oligonucleotide for detection of SNP TSC0041576
acaaaaaaataaa

SEQ ID NO: 165777 - DNA, 13 bp, Artificial Sequence
  Oligonucleotide for detection of SNP TSC0041578
attattatgttta

SEQ ID NO: 165778 - DNA, 13 bp, Artificial Sequence
  Oligonucleotide for detection of SNP TSC0041578
taaacataataat

SEQ ID NO: 165779 - DNA, 13 bp, Artificial Sequence
  Oligonucleotide for detection of SNP TSC0041578
attattgtgttta

SEQ ID NO: 165780 - DNA, 13 bp, Artificial Sequence
  Oligonucleotide for detection of SNP TSC0041578
taaacacaataat

SEQ ID NO: 165781 - DNA, 13 bp, Artificial Sequence
  Oligonucleotide for detection of SNP TSC0041578
attattacgttta

SEQ ID NO: 165782 - DNA, 13 bp, Artificial Sequence
  Oligonucleotide for detection of SNP TSC0041578
taaacgtaataat

SEQ ID NO: 165783 - DNA, 13 bp, Artificial Sequence
  Oligonucleotide for detection of SNP TSC0041578
attatcgtgttta

SEQ ID NO: 165784 - DNA, 13 bp, Artificial Sequence
  Oligonucleotide for detection of SNP TSC0041578
taaacacgataat

SEQ ID NO: 165785 - DNA, 13 bp, Artificial Sequence
  Oligonucleotide for detection of SNP TSC0041578
attattgcgttta

SEQ ID NO: 165786 - DNA, 13 bp, Artificial Sequence
  Oligonucleotide for detection of SNP TSC0041578
taaacgcaataat

SEQ ID NO: 165787 - DNA, 13 bp, Artificial Sequence
  Oligonucleotide for detection of SNP TSC0041578
attatcgcgttta

SEQ ID NO: 165788 - DNA, 13 bp, Artificial Sequence
  Oligonucleotide for detection of SNP TSC0041578
taaacgcgataat

SEQ ID NO: 165789 - DNA, 13 bp, Artificial Sequence
  Oligonucleotide for detection of SNP TSC0041578
tgggtgtgatggt

SEQ ID NO: 165790 - DNA, 13 bp, Artificial Sequence
  Oligonucleotide for detection of SNP TSC0041578
accatcacaccca

SEQ ID NO: 165791 - DNA, 13 bp, Artificial Sequence
  Oligonucleotide for detection of SNP TSC0041578
tgggcgtgatggt

SEQ ID NO: 165792 - DNA, 13 bp, Artificial Sequence
  Oligonucleotide for detection of SNP TSC0041578
accatcacgccca

SEQ ID NO: 165793 - DNA, 13 bp, Artificial Sequence
  Oligonucleotide for detection of SNP TSC0041578
tgggtgcgatggt

SEQ ID NO: 165794 - DNA, 13 bp, Artificial Sequence
  Oligonucleotide for detection of SNP TSC0041578
accatcgcaccca

SEQ ID NO: 165795 - DNA, 13 bp, Artificial Sequence
  Oligonucleotide for detection of SNP TSC0041578
tgggcgcgatggt

SEQ ID NO: 165796 - DNA, 13 bp, Artificial Sequence
  Oligonucleotide for detection of SNP TSC0041578
accatcgcgccca

SEQ ID NO: 165797 - DNA, 13 bp, Artificial Sequence
  Oligonucleotide for detection of SNP TSC0041580
agagggaagaaat

SEQ ID NO: 165798 - DNA, 13 bp, Artificial Sequence
  Oligonucleotide for detection of SNP TSC0041580
atttcttccctct

SEQ ID NO: 165799 - DNA, 13 bp, Artificial Sequence
  Oligonucleotide for detection of SNP TSC0041580
agagggtagaaat

SEQ ID NO: 165800 - DNA, 13 bp, Artificial Sequence
  Oligonucleotide for detection of SNP TSC0041580
atttctaccctct

SEQ ID NO: 165801 - DNA, 13 bp, Artificial Sequence
  Oligonucleotide for detection of SNP TSC0041581
agagagtttttga

SEQ ID NO: 165802 - DNA, 13 bp, Artificial Sequence
  Oligonucleotide for detection of SNP TSC0041581
tcaaaaactctct

SEQ ID NO: 165803 - DNA, 13 bp, Artificial Sequence
  Oligonucleotide for detection of SNP TSC0041581
agagaggttttga

SEQ ID NO: 165804 - DNA, 13 bp, Artificial Sequence
  Oligonucleotide for detection of SNP TSC0041581
tcaaaacctctct

SEQ ID NO: 165805 - DNA, 13 bp, Artificial Sequence
  Oligonucleotide for detection of SNP TSC0041581
ttagaggtttttt

SEQ ID NO: 165806 - DNA, 13 bp, Artificial Sequence
  Oligonucleotide for detection of SNP TSC0041581
aaaaaacctctaa

SEQ ID NO: 165807 - DNA, 13 bp, Artificial Sequence
  Oligonucleotide for detection of SNP TSC0041581
ttagagttttttt

SEQ ID NO: 165808 - DNA, 13 bp, Artificial Sequence
  Oligonucleotide for detection of SNP TSC0041581
aaaaaaactctaa

SEQ ID NO: 165809 - DNA, 13 bp, Artificial Sequence
  Oligonucleotide for detection of SNP TSC0041582
ttgggtatatttg

SEQ ID NO: 165810 - DNA, 13 bp, Artificial Sequence
  Oligonucleotide for detection of SNP TSC0041582
caaatatacccaa

SEQ ID NO: 165811 - DNA, 13 bp, Artificial Sequence
  Oligonucleotide for detection of SNP TSC0041582
ttgggtgtatttg

SEQ ID NO: 165812 - DNA, 13 bp, Artificial Sequence
  Oligonucleotide for detection of SNP TSC0041582
caaatacacccaa

SEQ ID NO: 165813 - DNA, 13 bp, Artificial Sequence
  Oligonucleotide for detection of SNP TSC0041583
gtttaagttttty

SEQ ID NO: 165814 - DNA, 13 bp, Artificial Sequence
  Oligonucleotide for detection of SNP TSC0041583
raaaaacttaaac

SEQ ID NO: 165815 - DNA, 13 bp, Artificial Sequence
  Oligonucleotide for detection of SNP TSC0041583
gagggaattaggy

SEQ ID NO: 165816 - DNA, 13 bp, Artificial Sequence
  Oligonucleotide for detection of SNP TSC0041583
rcctaattccctc

SEQ ID NO: 165817 - DNA, 13 bp, Artificial Sequence
  Oligonucleotide for detection of SNP TSC0041583
gagggatttaggy

SEQ ID NO: 165818 - DNA, 13 bp, Artificial Sequence
  Oligonucleotide for detection of SNP TSC0041583
rcctaaatccctc

SEQ ID NO: 165819 - DNA, 13 bp, Artificial Sequence
  Oligonucleotide for detection of SNP TSC0041585
tgattgatgtggy

SEQ ID NO: 165820 - DNA, 13 bp, Artificial Sequence
  Oligonucleotide for detection of SNP TSC0041585
rccacatcaatca

SEQ ID NO: 165821 - DNA, 13 bp, Artificial Sequence
  Oligonucleotide for detection of SNP TSC0041585
tgattggtgtggy

SEQ ID NO: 165822 - DNA, 13 bp, Artificial Sequence
  Oligonucleotide for detection of SNP TSC0041585
rccacaccaatca

SEQ ID NO: 165823 - DNA, 13 bp, Artificial Sequence
  Oligonucleotide for detection of SNP TSC0041586
ggtattattttay

SEQ ID NO: 165824 - DNA, 13 bp, Artificial Sequence
  Oligonucleotide for detection of SNP TSC0041586
rtaaaataatacc

SEQ ID NO: 165825 - DNA, 13 bp, Artificial Sequence
  Oligonucleotide for detection of SNP TSC0041586
ggtattgttttay

SEQ ID NO: 165826 - DNA, 13 bp, Artificial Sequence
  Oligonucleotide for detection of SNP TSC0041586
rtaaaacaatacc

SEQ ID NO: 165827 - DNA, 13 bp, Artificial Sequence
  Oligonucleotide for detection of SNP TSC0041586
ggtatcgttttay

SEQ ID NO: 165828 - DNA, 13 bp, Artificial Sequence
  Oligonucleotide for detection of SNP TSC0041586
rtaaaacgatacc

SEQ ID NO: 165829 - DNA, 13 bp, Artificial Sequence
  Oligonucleotide for detection of SNP TSC0041586
gtgagatggtaty

SEQ ID NO: 165830 - DNA, 13 bp, Artificial Sequence
  Oligonucleotide for detection of SNP TSC0041586
rataccatctcac

SEQ ID NO: 165831 - DNA, 13 bp, Artificial Sequence
  Oligonucleotide for detection of SNP TSC0041586
gtgagacggtaty

SEQ ID NO: 165832 - DNA, 13 bp, Artificial Sequence
  Oligonucleotide for detection of SNP TSC0041586
rataccgtctcac

SEQ ID NO: 165833 - DNA, 13 bp, Artificial Sequence
  Oligonucleotide for detection of SNP TSC0041588
gttatattttttg

SEQ ID NO: 165834 - DNA, 13 bp, Artificial Sequence
  Oligonucleotide for detection of SNP TSC0041588
caaaaaatataac

SEQ ID NO: 165835 - DNA, 13 bp, Artificial Sequence
  Oligonucleotide for detection of SNP TSC0041588
tagaagttgtagy

SEQ ID NO: 165836 - DNA, 13 bp, Artificial Sequence
  Oligonucleotide for detection of SNP TSC0041588
rctacaacttcta

SEQ ID NO: 165837 - DNA, 13 bp, Artificial Sequence
  Oligonucleotide for detection of SNP TSC0041588
tagaaggtgtagy

SEQ ID NO: 165838 - DNA, 13 bp, Artificial Sequence
  Oligonucleotide for detection of SNP TSC0041588
rctacaccttcta

SEQ ID NO: 165839 - DNA, 13 bp, Artificial Sequence
  Oligonucleotide for detection of SNP TSC0041589
gggttgatttaag

SEQ ID NO: 165840 - DNA, 13 bp, Artificial Sequence
  Oligonucleotide for detection of SNP TSC0041589
cttaaatcaaccc

SEQ ID NO: 165841 - DNA, 13 bp, Artificial Sequence
  Oligonucleotide for detection of SNP TSC0041589
gggttggtttaag

SEQ ID NO: 165842 - DNA, 13 bp, Artificial Sequence
  Oligonucleotide for detection of SNP TSC0041589
cttaaaccaaccc

SEQ ID NO: 165843 - DNA, 13 bp, Artificial Sequence
  Oligonucleotide for detection of SNP TSC0041591
tttaagtgtaaty

SEQ ID NO: 165844 - DNA, 13 bp, Artificial Sequence
  Oligonucleotide for detection of SNP TSC0041591
rattacacttaaa

SEQ ID NO: 165845 - DNA, 13 bp, Artificial Sequence
  Oligonucleotide for detection of SNP TSC0041591
tttaagggtaaty

SEQ ID NO: 165846 - DNA, 13 bp, Artificial Sequence
  Oligonucleotide for detection of SNP TSC0041591
rattacccttaaa

SEQ ID NO: 165847 - DNA, 13 bp, Artificial Sequence
  Oligonucleotide for detection of SNP TSC0041591
gattatatttagg

SEQ ID NO: 165848 - DNA, 13 bp, Artificial Sequence
  Oligonucleotide for detection of SNP TSC0041591
cctaaatataatc

SEQ ID NO: 165849 - DNA, 13 bp, Artificial Sequence
  Oligonucleotide for detection of SNP TSC0041591
gattatttttagg

SEQ ID NO: 165850 - DNA, 13 bp, Artificial Sequence
  Oligonucleotide for detection of SNP TSC0041591
cctaaaaataatc

SEQ ID NO: 165851 - DNA, 13 bp, Artificial Sequence
  Oligonucleotide for detection of SNP TSC0041592
attattattaatg

SEQ ID NO: 165852 - DNA, 13 bp, Artificial Sequence
  Oligonucleotide for detection of SNP TSC0041592
cattaataataat

SEQ ID NO: 165853 - DNA, 13 bp, Artificial Sequence
  Oligonucleotide for detection of SNP TSC0041592
attattgttaatg

SEQ ID NO: 165854 - DNA, 13 bp, Artificial Sequence
  Oligonucleotide for detection of SNP TSC0041592
cattaacaataat

SEQ ID NO: 165855 - DNA, 13 bp, Artificial Sequence
  Oligonucleotide for detection of SNP TSC0041592
attatcgttaatg

SEQ ID NO: 165856 - DNA, 13 bp, Artificial Sequence
  Oligonucleotide for detection of SNP TSC0041592
cattaacgataat

SEQ ID NO: 165857 - DNA, 13 bp, Artificial Sequence
  Oligonucleotide for detection of SNP TSC0041592
tattgatggtgat

SEQ ID NO: 165858 - DNA, 13 bp, Artificial Sequence
  Oligonucleotide for detection of SNP TSC0041592
atcaccatcaata

SEQ ID NO: 165859 - DNA, 13 bp, Artificial Sequence
  Oligonucleotide for detection of SNP TSC0041592
tattgacggtgat

SEQ ID NO: 165860 - DNA, 13 bp, Artificial Sequence
  Oligonucleotide for detection of SNP TSC0041592
atcaccgtcaata

SEQ ID NO: 165861 - DNA, 13 bp, Artificial Sequence
  Oligonucleotide for detection of SNP TSC0008897
taatttattaata

SEQ ID NO: 165862 - DNA, 13 bp, Artificial Sequence
  Oligonucleotide for detection of SNP TSC0008897
tattaataaatta

SEQ ID NO: 165863 - DNA, 13 bp, Artificial Sequence
  Oligonucleotide for detection of SNP TSC0008897
taatttgttaata

SEQ ID NO: 165864 - DNA, 13 bp, Artificial Sequence
  Oligonucleotide for detection of SNP TSC0008897
tattaacaaatta

SEQ ID NO: 165865 - DNA, 13 bp, Artificial Sequence
  Oligonucleotide for detection of SNP TSC0008898
taaaatatttatt

SEQ ID NO: 165866 - DNA, 13 bp, Artificial Sequence
  Oligonucleotide for detection of SNP TSC0008898
aataaatatttta

SEQ ID NO: 165867 - DNA, 13 bp, Artificial Sequence
  Oligonucleotide for detection of SNP TSC0008898
taaaatgtttatt

SEQ ID NO: 165868 - DNA, 13 bp, Artificial Sequence
  Oligonucleotide for detection of SNP TSC0008898
aataaacatttta

SEQ ID NO: 165869 - DNA, 13 bp, Artificial Sequence
  Oligonucleotide for detection of SNP TSC0008898
taaaacgtttatt

SEQ ID NO: 165870 - DNA, 13 bp, Artificial Sequence
  Oligonucleotide for detection of SNP TSC0008898
aataaacgtttta

SEQ ID NO: 165871 - DNA, 13 bp, Artificial Sequence
  Oligonucleotide for detection of SNP TSC0008898
aatgaatgtttta

SEQ ID NO: 165872 - DNA, 13 bp, Artificial Sequence
  Oligonucleotide for detection of SNP TSC0008898
taaaacattcatt

SEQ ID NO: 165873 - DNA, 13 bp, Artificial Sequence
  Oligonucleotide for detection of SNP TSC0008898
aatgaacgtttta

SEQ ID NO: 165874 - DNA, 13 bp, Artificial Sequence
  Oligonucleotide for detection of SNP TSC0008898
taaaacgttcatt

SEQ ID NO: 165875 - DNA, 13 bp, Artificial Sequence
  Oligonucleotide for detection of SNP TSC0041594
gtattaggatgag

SEQ ID NO: 165876 - DNA, 13 bp, Artificial Sequence
  Oligonucleotide for detection of SNP TSC0041594
ctcatcctaatac

SEQ ID NO: 165877 - DNA, 13 bp, Artificial Sequence
  Oligonucleotide for detection of SNP TSC0041594
gtattaagatgag

SEQ ID NO: 165878 - DNA, 13 bp, Artificial Sequence
  Oligonucleotide for detection of SNP TSC0041594
ctcatcttaatac

SEQ ID NO: 165879 - DNA, 13 bp, Artificial Sequence
  Oligonucleotide for detection of SNP TSC0041595
atatgtttatgtt

SEQ ID NO: 165880 - DNA, 13 bp, Artificial Sequence
  Oligonucleotide for detection of SNP TSC0041595
aacataaacatat

SEQ ID NO: 165881 - DNA, 13 bp, Artificial Sequence
  Oligonucleotide for detection of SNP TSC0041595
atatgtgtatgtt

SEQ ID NO: 165882 - DNA, 13 bp, Artificial Sequence
  Oligonucleotide for detection of SNP TSC0041595
aacatacacatat

SEQ ID NO: 165883 - DNA, 13 bp, Artificial Sequence
  Oligonucleotide for detection of SNP TSC0041595
aatatagatatat

SEQ ID NO: 165884 - DNA, 13 bp, Artificial Sequence
  Oligonucleotide for detection of SNP TSC0041595
atatatctatatt

SEQ ID NO: 165885 - DNA, 13 bp, Artificial Sequence
  Oligonucleotide for detection of SNP TSC0005770
atttgatataagt

SEQ ID NO: 165886 - DNA, 13 bp, Artificial Sequence
  Oligonucleotide for detection of SNP TSC0005770
acttatatcaaat

SEQ ID NO: 165887 - DNA, 13 bp, Artificial Sequence
  Oligonucleotide for detection of SNP TSC0005770
atttgagataagt

SEQ ID NO: 165888 - DNA, 13 bp, Artificial Sequence
  Oligonucleotide for detection of SNP TSC0005770
acttatctcaaat

SEQ ID NO: 165889 - DNA, 13 bp, Artificial Sequence
  Oligonucleotide for detection of SNP TSC0005770
atttatattaaat

SEQ ID NO: 165890 - DNA, 13 bp, Artificial Sequence
  Oligonucleotide for detection of SNP TSC0005770
atttaatataaat

SEQ ID NO: 165891 - DNA, 13 bp, Artificial Sequence
  Oligonucleotide for detection of SNP TSC0005770
atttattttaaat

SEQ ID NO: 165892 - DNA, 13 bp, Artificial Sequence
  Oligonucleotide for detection of SNP TSC0005770
atttaaaataaat

SEQ ID NO: 165893 - DNA, 13 bp, Artificial Sequence
  Oligonucleotide for detection of SNP TSC0005771
taattattggtta

SEQ ID NO: 165894 - DNA, 13 bp, Artificial Sequence
  Oligonucleotide for detection of SNP TSC0005771
taaccaataatta

SEQ ID NO: 165895 - DNA, 13 bp, Artificial Sequence
  Oligonucleotide for detection of SNP TSC0005771
taattagtggtta

SEQ ID NO: 165896 - DNA, 13 bp, Artificial Sequence
  Oligonucleotide for detection of SNP TSC0005771
taaccactaatta

SEQ ID NO: 165897 - DNA, 13 bp, Artificial Sequence
  Oligonucleotide for detection of SNP TSC0005771
tggttaatgattg

SEQ ID NO: 165898 - DNA, 13 bp, Artificial Sequence
  Oligonucleotide for detection of SNP TSC0005771
caatcattaacca

SEQ ID NO: 165899 - DNA, 13 bp, Artificial Sequence
  Oligonucleotide for detection of SNP TSC0005771
tggttattgattg

SEQ ID NO: 165900 - DNA, 13 bp, Artificial Sequence
  Oligonucleotide for detection of SNP TSC0005771
caatcaataacca

SEQ ID NO: 165901 - DNA, 13 bp, Artificial Sequence
  Oligonucleotide for detection of SNP TSC0041597
tgtagaaaaaagg

SEQ ID NO: 165902 - DNA, 13 bp, Artificial Sequence
  Oligonucleotide for detection of SNP TSC0041597
ccttttttctaca

SEQ ID NO: 165903 - DNA, 13 bp, Artificial Sequence
  Oligonucleotide for detection of SNP TSC0041597
tgtagagaaaagg

SEQ ID NO: 165904 - DNA, 13 bp, Artificial Sequence
  Oligonucleotide for detection of SNP TSC0041597
ccttttctctaca

SEQ ID NO: 165905 - DNA, 13 bp, Artificial Sequence
  Oligonucleotide for detection of SNP TSC0041597
cgtagaaaaaagg

SEQ ID NO: 165906 - DNA, 13 bp, Artificial Sequence
  Oligonucleotide for detection of SNP TSC0041597
ccttttttctacg

SEQ ID NO: 165907 - DNA, 13 bp, Artificial Sequence
  Oligonucleotide for detection of SNP TSC0041597
cgtagagaaaagg

SEQ ID NO: 165908 - DNA, 13 bp, Artificial Sequence
  Oligonucleotide for detection of SNP TSC0041597
ccttttctctacg

SEQ ID NO: 165909 - DNA, 13 bp, Artificial Sequence
  Oligonucleotide for detection of SNP TSC0041599
gttaggattaagg

SEQ ID NO: 165910 - DNA, 13 bp, Artificial Sequence
  Oligonucleotide for detection of SNP TSC0041599
ccttaatcctaac

SEQ ID NO: 165911 - DNA, 13 bp, Artificial Sequence
  Oligonucleotide for detection of SNP TSC0041599
gttagggttaagg

SEQ ID NO: 165912 - DNA, 13 bp, Artificial Sequence
  Oligonucleotide for detection of SNP TSC0041599
ccttaaccctaac

SEQ ID NO: 165913 - DNA, 13 bp, Artificial Sequence
  Oligonucleotide for detection of SNP TSC0041600
atttgagataatt

SEQ ID NO: 165914 - DNA, 13 bp, Artificial Sequence
  Oligonucleotide for detection of SNP TSC0041600
aattatctcaaat

SEQ ID NO: 165915 - DNA, 13 bp, Artificial Sequence
  Oligonucleotide for detection of SNP TSC0041600
atttgaaataatt

SEQ ID NO: 165916 - DNA, 13 bp, Artificial Sequence
  Oligonucleotide for detection of SNP TSC0041600
aattatttcaaat

SEQ ID NO: 165917 - DNA, 13 bp, Artificial Sequence
  Oligonucleotide for detection of SNP TSC0041601
gtgagttggagaa

SEQ ID NO: 165918 - DNA, 13 bp, Artificial Sequence
  Oligonucleotide for detection of SNP TSC0041601
ttctccaactcac

SEQ ID NO: 165919 - DNA, 13 bp, Artificial Sequence
  Oligonucleotide for detection of SNP TSC0041601
gtgagtcggagaa

SEQ ID NO: 165920 - DNA, 13 bp, Artificial Sequence
  Oligonucleotide for detection of SNP TSC0041601
ttctccgactcac

SEQ ID NO: 165921 - DNA, 13 bp, Artificial Sequence
  Oligonucleotide for detection of SNP TSC0041602
ggtttaataaata

SEQ ID NO: 165922 - DNA, 13 bp, Artificial Sequence
  Oligonucleotide for detection of SNP TSC0041602
tatttattaaacc

SEQ ID NO: 165923 - DNA, 13 bp, Artificial Sequence
  Oligonucleotide for detection of SNP TSC0041602
ggtttagtaaata

SEQ ID NO: 165924 - DNA, 13 bp, Artificial Sequence
  Oligonucleotide for detection of SNP TSC0041602
tatttactaaacc

SEQ ID NO: 165925 - DNA, 13 bp, Artificial Sequence
  Oligonucleotide for detection of SNP TSC0010815
atatatgttggaa

SEQ ID NO: 165926 - DNA, 13 bp, Artificial Sequence
  Oligonucleotide for detection of SNP TSC0010815
ttccaacatatat

SEQ ID NO: 165927 - DNA, 13 bp, Artificial Sequence
  Oligonucleotide for detection of SNP TSC0010815
atatatattggaa

SEQ ID NO: 165928 - DNA, 13 bp, Artificial Sequence
  Oligonucleotide for detection of SNP TSC0010815
ttccaatatatat

SEQ ID NO: 165929 - DNA, 13 bp, Artificial Sequence
  Oligonucleotide for detection of SNP TSC0009124
gtggttaagtaty

SEQ ID NO: 165930 - DNA, 13 bp, Artificial Sequence
  Oligonucleotide for detection of SNP TSC0009124
ratacttaaccac

SEQ ID NO: 165931 - DNA, 13 bp, Artificial Sequence
  Oligonucleotide for detection of SNP TSC0009124
gtggttgagtaty

SEQ ID NO: 165932 - DNA, 13 bp, Artificial Sequence
  Oligonucleotide for detection of SNP TSC0009124
ratactcaaccac

SEQ ID NO: 165933 - DNA, 13 bp, Artificial Sequence
  Oligonucleotide for detection of SNP TSC0009124
gtggtcgagtaty

SEQ ID NO: 165934 - DNA, 13 bp, Artificial Sequence
  Oligonucleotide for detection of SNP TSC0009124
ratactcgaccac

SEQ ID NO: 165935 - DNA, 13 bp, Artificial Sequence
  Oligonucleotide for detection of SNP TSC0009124
ggtatttggttay

SEQ ID NO: 165936 - DNA, 13 bp, Artificial Sequence
  Oligonucleotide for detection of SNP TSC0009124
rtaaccaaatacc

SEQ ID NO: 165937 - DNA, 13 bp, Artificial Sequence
  Oligonucleotide for detection of SNP TSC0009124
ggtattcggttay

SEQ ID NO: 165938 - DNA, 13 bp, Artificial Sequence
  Oligonucleotide for detection of SNP TSC0009124
rtaaccgaatacc

SEQ ID NO: 165939 - DNA, 13 bp, Artificial Sequence
  Oligonucleotide for detection of SNP TSC0007423
tttttgattaaay

SEQ ID NO: 165940 - DNA, 13 bp, Artificial Sequence
  Oligonucleotide for detection of SNP TSC0007423
rtttaatcaaaaa

SEQ ID NO: 165941 - DNA, 13 bp, Artificial Sequence
  Oligonucleotide for detection of SNP TSC0007423
tttttgtttaaay

SEQ ID NO: 165942 - DNA, 13 bp, Artificial Sequence
  Oligonucleotide for detection of SNP TSC0007423
rtttaaacaaaaa

SEQ ID NO: 165943 - DNA, 13 bp, Artificial Sequence
  Oligonucleotide for detection of SNP TSC0007423
gtttggttaaaag

SEQ ID NO: 165944 - DNA, 13 bp, Artificial Sequence
  Oligonucleotide for detection of SNP TSC0007423
cttttaaccaaac

SEQ ID NO: 165945 - DNA, 13 bp, Artificial Sequence
  Oligonucleotide for detection of SNP TSC0007423
gtttggataaaag

SEQ ID NO: 165946 - DNA, 13 bp, Artificial Sequence
  Oligonucleotide for detection of SNP TSC0007423
cttttatccaaac

SEQ ID NO: 165947 - DNA, 13 bp, Artificial Sequence
  Oligonucleotide for detection of SNP TSC0007424
ggttatagtttty

SEQ ID NO: 165948 - DNA, 13 bp, Artificial Sequence
  Oligonucleotide for detection of SNP TSC0007424
raaaactataacc

SEQ ID NO: 165949 - DNA, 13 bp, Artificial Sequence
  Oligonucleotide for detection of SNP TSC0007424
ggttatggtttty

SEQ ID NO: 165950 - DNA, 13 bp, Artificial Sequence
  Oligonucleotide for detection of SNP TSC0007424
raaaaccataacc

SEQ ID NO: 165951 - DNA, 13 bp, Artificial Sequence
  Oligonucleotide for detection of SNP TSC0007424
ggttacggtttty

SEQ ID NO: 165952 - DNA, 13 bp, Artificial Sequence
  Oligonucleotide for detection of SNP TSC0007424
raaaaccgtaacc

SEQ ID NO: 165953 - DNA, 13 bp, Artificial Sequence
  Oligonucleotide for detection of SNP TSC0007424
gaaaattgtgaty

SEQ ID NO: 165954 - DNA, 13 bp, Artificial Sequence
  Oligonucleotide for detection of SNP TSC0007424
ratcacaattttc

SEQ ID NO: 165955 - DNA, 13 bp, Artificial Sequence
  Oligonucleotide for detection of SNP TSC0007424
gaaaatcgtgaty

SEQ ID NO: 165956 - DNA, 13 bp, Artificial Sequence
  Oligonucleotide for detection of SNP TSC0007424
ratcacgattttc

SEQ ID NO: 165957 - DNA, 13 bp, Artificial Sequence
  Oligonucleotide for detection of SNP TSC0008164
gatagtattttta

SEQ ID NO: 165958 - DNA, 13 bp, Artificial Sequence
  Oligonucleotide for detection of SNP TSC0008164
taaaaatactatc

SEQ ID NO: 165959 - DNA, 13 bp, Artificial Sequence
  Oligonucleotide for detection of SNP TSC0008164
gatagtgttttta

SEQ ID NO: 165960 - DNA, 13 bp, Artificial Sequence
  Oligonucleotide for detection of SNP TSC0008164
taaaaacactatc

SEQ ID NO: 165961 - DNA, 13 bp, Artificial Sequence
  Oligonucleotide for detection of SNP TSC0041605
aaaatttgaggga

SEQ ID NO: 165962 - DNA, 13 bp, Artificial Sequence
  Oligonucleotide for detection of SNP TSC0041605
tccctcaaatttt

SEQ ID NO: 165963 - DNA, 13 bp, Artificial Sequence
  Oligonucleotide for detection of SNP TSC0041605
aaaattcgaggga

SEQ ID NO: 165964 - DNA, 13 bp, Artificial Sequence
  Oligonucleotide for detection of SNP TSC0041605
tccctcgaatttt

SEQ ID NO: 165965 - DNA, 13 bp, Artificial Sequence
  Oligonucleotide for detection of SNP TSC0041606
tttttagttgagt

SEQ ID NO: 165966 - DNA, 13 bp, Artificial Sequence
  Oligonucleotide for detection of SNP TSC0041606
actcaactaaaaa

SEQ ID NO: 165967 - DNA, 13 bp, Artificial Sequence
  Oligonucleotide for detection of SNP TSC0041606
tttttaattgagt

SEQ ID NO: 165968 - DNA, 13 bp, Artificial Sequence
  Oligonucleotide for detection of SNP TSC0041606
actcaattaaaaa

SEQ ID NO: 165969 - DNA, 13 bp, Artificial Sequence
  Oligonucleotide for detection of SNP TSC0041607
ttagtaggagaty

SEQ ID NO: 165970 - DNA, 13 bp, Artificial Sequence
  Oligonucleotide for detection of SNP TSC0041607
ratctcctactaa

SEQ ID NO: 165971 - DNA, 13 bp, Artificial Sequence
  Oligonucleotide for detection of SNP TSC0041607
ttagtaagagaty

SEQ ID NO: 165972 - DNA, 13 bp, Artificial Sequence
  Oligonucleotide for detection of SNP TSC0041607
ratctcttactaa

SEQ ID NO: 165973 - DNA, 13 bp, Artificial Sequence
  Oligonucleotide for detection of SNP TSC0041608
aataagaaatttt

SEQ ID NO: 165974 - DNA, 13 bp, Artificial Sequence
  Oligonucleotide for detection of SNP TSC0041608
aaaatttcttatt

SEQ ID NO: 165975 - DNA, 13 bp, Artificial Sequence
  Oligonucleotide for detection of SNP TSC0041608
aataaggaatttt

SEQ ID NO: 165976 - DNA, 13 bp, Artificial Sequence
  Oligonucleotide for detection of SNP TSC0041608
aaaattccttatt

SEQ ID NO: 165977 - DNA, 13 bp, Artificial Sequence
  Oligonucleotide for detection of SNP TSC0041609
ggtagtagtagta

SEQ ID NO: 165978 - DNA, 13 bp, Artificial Sequence
  Oligonucleotide for detection of SNP TSC0041609
tactactactacc

SEQ ID NO: 165979 - DNA, 13 bp, Artificial Sequence
  Oligonucleotide for detection of SNP TSC0041609
ggtagtggtagta

SEQ ID NO: 165980 - DNA, 13 bp, Artificial Sequence
  Oligonucleotide for detection of SNP TSC0041609
tactaccactacc

SEQ ID NO: 165981 - DNA, 13 bp, Artificial Sequence
  Oligonucleotide for detection of SNP TSC0041610
tatttatgaaaaa

SEQ ID NO: 165982 - DNA, 13 bp, Artificial Sequence
  Oligonucleotide for detection of SNP TSC0041610
tttttcataaata

SEQ ID NO: 165983 - DNA, 13 bp, Artificial Sequence
  Oligonucleotide for detection of SNP TSC0041610
tatttacgaaaaa

SEQ ID NO: 165984 - DNA, 13 bp, Artificial Sequence
  Oligonucleotide for detection of SNP TSC0041610
tttttcgtaaata

SEQ ID NO: 165985 - DNA, 13 bp, Artificial Sequence
  Oligonucleotide for detection of SNP TSC0041614
aaggaagaaaatt

SEQ ID NO: 165986 - DNA, 13 bp, Artificial Sequence
  Oligonucleotide for detection of SNP TSC0041614
aattttcttcctt

SEQ ID NO: 165987 - DNA, 13 bp, Artificial Sequence
  Oligonucleotide for detection of SNP TSC0041614
aaggaaaaaaatt

SEQ ID NO: 165988 - DNA, 13 bp, Artificial Sequence
  Oligonucleotide for detection of SNP TSC0041614
aatttttttcctt

SEQ ID NO: 165989 - DNA, 13 bp, Artificial Sequence
  Oligonucleotide for detection of SNP TSC0041615
tagaatattttgg

SEQ ID NO: 165990 - DNA, 13 bp, Artificial Sequence
  Oligonucleotide for detection of SNP TSC0041615
ccaaaatattcta

SEQ ID NO: 165991 - DNA, 13 bp, Artificial Sequence
  Oligonucleotide for detection of SNP TSC0041615
tagaatgttttgg

SEQ ID NO: 165992 - DNA, 13 bp, Artificial Sequence
  Oligonucleotide for detection of SNP TSC0041615
ccaaaacattcta

SEQ ID NO: 165993 - DNA, 13 bp, Artificial Sequence
  Oligonucleotide for detection of SNP TSC0041616
atttttaaggaaa

SEQ ID NO: 165994 - DNA, 13 bp, Artificial Sequence
  Oligonucleotide for detection of SNP TSC0041616
tttccttaaaaat

SEQ ID NO: 165995 - DNA, 13 bp, Artificial Sequence
  Oligonucleotide for detection of SNP TSC0041616
atttttgaggaaa

SEQ ID NO: 165996 - DNA, 13 bp, Artificial Sequence
  Oligonucleotide for detection of SNP TSC0041616
tttcctcaaaaat

SEQ ID NO: 165997 - DNA, 13 bp, Artificial Sequence
  Oligonucleotide for detection of SNP TSC0041616
attttcgaggaaa

SEQ ID NO: 165998 - DNA, 13 bp, Artificial Sequence
  Oligonucleotide for detection of SNP TSC0041616
tttcctcgaaaat

SEQ ID NO: 165999 - DNA, 13 bp, Artificial Sequence
  Oligonucleotide for detection of SNP TSC0041616
tttttttggggat

SEQ ID NO: 166000 - DNA, 13 bp, Artificial Sequence
  Oligonucleotide for detection of SNP TSC0041616
atccccaaaaaaa

SEQ ID NO: 166001 - DNA, 13 bp, Artificial Sequence
  Oligonucleotide for detection of SNP TSC0041616
ttttttcggggat

SEQ ID NO: 166002 - DNA, 13 bp, Artificial Sequence
  Oligonucleotide for detection of SNP TSC0041616
atccccgaaaaaa

SEQ ID NO: 166003 - DNA, 13 bp, Artificial Sequence
  Oligonucleotide for detection of SNP TSC0041618
ggggagtgtttgg

SEQ ID NO: 166004 - DNA, 13 bp, Artificial Sequence
  Oligonucleotide for detection of SNP TSC0041618
ccaaacactcccc

SEQ ID NO: 166005 - DNA, 13 bp, Artificial Sequence
  Oligonucleotide for detection of SNP TSC0041618
ggggagggtttgg

SEQ ID NO: 166006 - DNA, 13 bp, Artificial Sequence
  Oligonucleotide for detection of SNP TSC0041618
ccaaaccctcccc

SEQ ID NO: 166007 - DNA, 13 bp, Artificial Sequence
  Oligonucleotide for detection of SNP TSC0041619
attagatgaaggg

SEQ ID NO: 166008 - DNA, 13 bp, Artificial Sequence
  Oligonucleotide for detection of SNP TSC0041619
cccttcatctaat

SEQ ID NO: 166009 - DNA, 13 bp, Artificial Sequence
  Oligonucleotide for detection of SNP TSC0041619
attagacgaaggg

SEQ ID NO: 166010 - DNA, 13 bp, Artificial Sequence
  Oligonucleotide for detection of SNP TSC0041619
cccttcgtctaat

SEQ ID NO: 166011 - DNA, 13 bp, Artificial Sequence
  Oligonucleotide for detection of SNP TSC0041620
tgggttagggttg

SEQ ID NO: 166012 - DNA, 13 bp, Artificial Sequence
  Oligonucleotide for detection of SNP TSC0041620
caaccctaaccca

SEQ ID NO: 166013 - DNA, 13 bp, Artificial Sequence
  Oligonucleotide for detection of SNP TSC0041620
tgggttggggttg

SEQ ID NO: 166014 - DNA, 13 bp, Artificial Sequence
  Oligonucleotide for detection of SNP TSC0041620
caaccccaaccca

SEQ ID NO: 166015 - DNA, 13 bp, Artificial Sequence
  Oligonucleotide for detection of SNP TSC0041620
cgggttagggttg

SEQ ID NO: 166016 - DNA, 13 bp, Artificial Sequence
  Oligonucleotide for detection of SNP TSC0041620
caaccctaacccg

SEQ ID NO: 166017 - DNA, 13 bp, Artificial Sequence
  Oligonucleotide for detection of SNP TSC0041620
cgggttggggttg

SEQ ID NO: 166018 - DNA, 13 bp, Artificial Sequence
  Oligonucleotide for detection of SNP TSC0041620
caaccccaacccg

SEQ ID NO: 166019 - DNA, 13 bp, Artificial Sequence
  Oligonucleotide for detection of SNP TSC0041621
aaaagtttaggga

SEQ ID NO: 166020 - DNA, 13 bp, Artificial Sequence
  Oligonucleotide for detection of SNP TSC0041621
tccctaaactttt

SEQ ID NO: 166021 - DNA, 13 bp, Artificial Sequence
  Oligonucleotide for detection of SNP TSC0041621
aaaagtgtaggga

SEQ ID NO: 166022 - DNA, 13 bp, Artificial Sequence
  Oligonucleotide for detection of SNP TSC0041621
tccctacactttt

SEQ ID NO: 166023 - DNA, 13 bp, Artificial Sequence
  Oligonucleotide for detection of SNP TSC0041623
atttagataaaag

SEQ ID NO: 166024 - DNA, 13 bp, Artificial Sequence
  Oligonucleotide for detection of SNP TSC0041623
cttttatctaaat

SEQ ID NO: 166025 - DNA, 13 bp, Artificial Sequence
  Oligonucleotide for detection of SNP TSC0041623
atttaggtaaaag

SEQ ID NO: 166026 - DNA, 13 bp, Artificial Sequence
  Oligonucleotide for detection of SNP TSC0041623
cttttacctaaat

SEQ ID NO: 166027 - DNA, 13 bp, Artificial Sequence
  Oligonucleotide for detection of SNP TSC0041630
ttagatgttgaaa

SEQ ID NO: 166028 - DNA, 13 bp, Artificial Sequence
  Oligonucleotide for detection of SNP TSC0041630
tttcaacatctaa

SEQ ID NO: 166029 - DNA, 13 bp, Artificial Sequence
  Oligonucleotide for detection of SNP TSC0041630
ttagatattgaaa

SEQ ID NO: 166030 - DNA, 13 bp, Artificial Sequence
  Oligonucleotide for detection of SNP TSC0041630
tttcaatatctaa

SEQ ID NO: 166031 - DNA, 13 bp, Artificial Sequence
  Oligonucleotide for detection of SNP TSC0006254
aggagagtgtaaa

SEQ ID NO: 166032 - DNA, 13 bp, Artificial Sequence
  Oligonucleotide for detection of SNP TSC0006254
tttacactctcct

SEQ ID NO: 166033 - DNA, 13 bp, Artificial Sequence
  Oligonucleotide for detection of SNP TSC0006254
aggagaatgtaaa

SEQ ID NO: 166034 - DNA, 13 bp, Artificial Sequence
  Oligonucleotide for detection of SNP TSC0006254
tttacattctcct

SEQ ID NO: 166035 - DNA, 13 bp, Artificial Sequence
  Oligonucleotide for detection of SNP TSC0041633
atttttaatggtt

SEQ ID NO: 166036 - DNA, 13 bp, Artificial Sequence
  Oligonucleotide for detection of SNP TSC0041633
aaccattaaaaat

SEQ ID NO: 166037 - DNA, 13 bp, Artificial Sequence
  Oligonucleotide for detection of SNP TSC0041633
atttttgatggtt

SEQ ID NO: 166038 - DNA, 13 bp, Artificial Sequence
  Oligonucleotide for detection of SNP TSC0041633
aaccatcaaaaat

SEQ ID NO: 166039 - DNA, 13 bp, Artificial Sequence
  Oligonucleotide for detection of SNP TSC0041633
attttcgatggtt

SEQ ID NO: 166040 - DNA, 13 bp, Artificial Sequence
  Oligonucleotide for detection of SNP TSC0041633
aaccatcgaaaat

SEQ ID NO: 166041 - DNA, 13 bp, Artificial Sequence
  Oligonucleotide for detection of SNP TSC0041633
aattattgaaagt

SEQ ID NO: 166042 - DNA, 13 bp, Artificial Sequence
  Oligonucleotide for detection of SNP TSC0041633
actttcaataatt

SEQ ID NO: 166043 - DNA, 13 bp, Artificial Sequence
  Oligonucleotide for detection of SNP TSC0041633
aattatcgaaagt

SEQ ID NO: 166044 - DNA, 13 bp, Artificial Sequence
  Oligonucleotide for detection of SNP TSC0041633
actttcgataatt

SEQ ID NO: 166045 - DNA, 13 bp, Artificial Sequence
  Oligonucleotide for detection of SNP TSC0041634
tttttgtatgtga

SEQ ID NO: 166046 - DNA, 13 bp, Artificial Sequence
  Oligonucleotide for detection of SNP TSC0041634
tcacatacaaaaa

SEQ ID NO: 166047 - DNA, 13 bp, Artificial Sequence
  Oligonucleotide for detection of SNP TSC0041634
ttatatgtaagag

SEQ ID NO: 166048 - DNA, 13 bp, Artificial Sequence
  Oligonucleotide for detection of SNP TSC0041634
ctcttacatataa

SEQ ID NO: 166049 - DNA, 13 bp, Artificial Sequence
  Oligonucleotide for detection of SNP TSC0041634
ttatatttaagag

SEQ ID NO: 166050 - DNA, 13 bp, Artificial Sequence
  Oligonucleotide for detection of SNP TSC0041634
ctcttaaatataa

SEQ ID NO: 166051 - DNA, 13 bp, Artificial Sequence
  Oligonucleotide for detection of SNP TSC0041635
aaaaaaagatagg

SEQ ID NO: 166052 - DNA, 13 bp, Artificial Sequence
  Oligonucleotide for detection of SNP TSC0041635
cctatcttttttt

SEQ ID NO: 166053 - DNA, 13 bp, Artificial Sequence
  Oligonucleotide for detection of SNP TSC0041635
aaaaaaggatagg

SEQ ID NO: 166054 - DNA, 13 bp, Artificial Sequence
  Oligonucleotide for detection of SNP TSC0041635
cctatcctttttt

SEQ ID NO: 166055 - DNA, 13 bp, Artificial Sequence
  Oligonucleotide for detection of SNP TSC0041636
tttagagttggtg

SEQ ID NO: 166056 - DNA, 13 bp, Artificial Sequence
  Oligonucleotide for detection of SNP TSC0041636
caccaactctaaa

SEQ ID NO: 166057 - DNA, 13 bp, Artificial Sequence
  Oligonucleotide for detection of SNP TSC0041636
tttagaattggcg

SEQ ID NO: 166058 - DNA, 13 bp, Artificial Sequence
  Oligonucleotide for detection of SNP TSC0041636
cgccaattctaaa

SEQ ID NO: 166059 - DNA, 13 bp, Artificial Sequence
  Oligonucleotide for detection of SNP TSC0041636
tttagagttggcg

SEQ ID NO: 166060 - DNA, 13 bp, Artificial Sequence
  Oligonucleotide for detection of SNP TSC0041636
cgccaactctaaa

SEQ ID NO: 166061 - DNA, 13 bp, Artificial Sequence
  Oligonucleotide for detection of SNP TSC0041637
agattgtggaggg

SEQ ID NO: 166062 - DNA, 13 bp, Artificial Sequence
  Oligonucleotide for detection of SNP TSC0041637
ccctccacaatct

SEQ ID NO: 166063 - DNA, 13 bp, Artificial Sequence
  Oligonucleotide for detection of SNP TSC0041637
agattgcggaggg

SEQ ID NO: 166064 - DNA, 13 bp, Artificial Sequence
  Oligonucleotide for detection of SNP TSC0041637
ccctccgcaatct

SEQ ID NO: 166065 - DNA, 13 bp, Artificial Sequence
  Oligonucleotide for detection of SNP TSC0041638
atgaaagttagtg

SEQ ID NO: 166066 - DNA, 13 bp, Artificial Sequence
  Oligonucleotide for detection of SNP TSC0041638
cactaactttcat

SEQ ID NO: 166067 - DNA, 13 bp, Artificial Sequence
  Oligonucleotide for detection of SNP TSC0041638
atgaaaattagtg

SEQ ID NO: 166068 - DNA, 13 bp, Artificial Sequence
  Oligonucleotide for detection of SNP TSC0041638
cactaattttcat

SEQ ID NO: 166069 - DNA, 13 bp, Artificial Sequence
  Oligonucleotide for detection of SNP TSC0005097
tttttaatattat

SEQ ID NO: 166070 - DNA, 13 bp, Artificial Sequence
  Oligonucleotide for detection of SNP TSC0005097
ataatattaaaaa

SEQ ID NO: 166071 - DNA, 13 bp, Artificial Sequence
  Oligonucleotide for detection of SNP TSC0005097
atgatgttggaag

SEQ ID NO: 166072 - DNA, 13 bp, Artificial Sequence
  Oligonucleotide for detection of SNP TSC0005097
cttccaacatcat

SEQ ID NO: 166073 - DNA, 13 bp, Artificial Sequence
  Oligonucleotide for detection of SNP TSC0005097
atgatgatggaag

SEQ ID NO: 166074 - DNA, 13 bp, Artificial Sequence
  Oligonucleotide for detection of SNP TSC0005097
cttccatcatcat

SEQ ID NO: 166075 - DNA, 13 bp, Artificial Sequence
  Oligonucleotide for detection of SNP TSC0041639
atagatatttttg

SEQ ID NO: 166076 - DNA, 13 bp, Artificial Sequence
  Oligonucleotide for detection of SNP TSC0041639
caaaaatatctat

SEQ ID NO: 166077 - DNA, 13 bp, Artificial Sequence
  Oligonucleotide for detection of SNP TSC0041639
atagatttttttg

SEQ ID NO: 166078 - DNA, 13 bp, Artificial Sequence
  Oligonucleotide for detection of SNP TSC0041639
caaaaaaatctat

SEQ ID NO: 166079 - DNA, 13 bp, Artificial Sequence
  Oligonucleotide for detection of SNP TSC0041639
tagaaatgtttgt

SEQ ID NO: 166080 - DNA, 13 bp, Artificial Sequence
  Oligonucleotide for detection of SNP TSC0041639
acaaacatttcta

SEQ ID NO: 166081 - DNA, 13 bp, Artificial Sequence
  Oligonucleotide for detection of SNP TSC0041639
tagaaaagtttgt

SEQ ID NO: 166082 - DNA, 13 bp, Artificial Sequence
  Oligonucleotide for detection of SNP TSC0041639
acaaacttttcta

SEQ ID NO: 166083 - DNA, 13 bp, Artificial Sequence
  Oligonucleotide for detection of SNP TSC0007702
ttttgtggtgtty

SEQ ID NO: 166084 - DNA, 13 bp, Artificial Sequence
  Oligonucleotide for detection of SNP TSC0007702
raacaccacaaaa

SEQ ID NO: 166085 - DNA, 13 bp, Artificial Sequence
  Oligonucleotide for detection of SNP TSC0007702
ttttgcggtgtty

SEQ ID NO: 166086 - DNA, 13 bp, Artificial Sequence
  Oligonucleotide for detection of SNP TSC0007702
raacaccgcaaaa

SEQ ID NO: 166087 - DNA, 13 bp, Artificial Sequence
  Oligonucleotide for detection of SNP TSC0007702
ttttgttgcgtty

SEQ ID NO: 166088 - DNA, 13 bp, Artificial Sequence
  Oligonucleotide for detection of SNP TSC0007702
raacgcaacaaaa

SEQ ID NO: 166089 - DNA, 13 bp, Artificial Sequence
  Oligonucleotide for detection of SNP TSC0007702
ttttgtggcgtty

SEQ ID NO: 166090 - DNA, 13 bp, Artificial Sequence
  Oligonucleotide for detection of SNP TSC0007702
raacgccacaaaa

SEQ ID NO: 166091 - DNA, 13 bp, Artificial Sequence
  Oligonucleotide for detection of SNP TSC0007702
ttttgtcgcgtty

SEQ ID NO: 166092 - DNA, 13 bp, Artificial Sequence
  Oligonucleotide for detection of SNP TSC0007702
raacgcgacaaaa

SEQ ID NO: 166093 - DNA, 13 bp, Artificial Sequence
  Oligonucleotide for detection of SNP TSC0007702
ttttgcggcgtty

SEQ ID NO: 166094 - DNA, 13 bp, Artificial Sequence
  Oligonucleotide for detection of SNP TSC0007702
raacgccgcaaaa

SEQ ID NO: 166095 - DNA, 13 bp, Artificial Sequence
  Oligonucleotide for detection of SNP TSC0007702
gagtgtggtagaa

SEQ ID NO: 166096 - DNA, 13 bp, Artificial Sequence
  Oligonucleotide for detection of SNP TSC0007702
ttctaccacactc

SEQ ID NO: 166097 - DNA, 13 bp, Artificial Sequence
  Oligonucleotide for detection of SNP TSC0007702
gagtgttgtagaa

SEQ ID NO: 166098 - DNA, 13 bp, Artificial Sequence
  Oligonucleotide for detection of SNP TSC0007702
ttctacaacactc

SEQ ID NO: 166099 - DNA, 13 bp, Artificial Sequence
  Oligonucleotide for detection of SNP TSC0007702
gagcgtggtagaa

SEQ ID NO: 166100 - DNA, 13 bp, Artificial Sequence
  Oligonucleotide for detection of SNP TSC0007702
ttctaccacgctc

SEQ ID NO: 166101 - DNA, 13 bp, Artificial Sequence
  Oligonucleotide for detection of SNP TSC0007702
gagcgttgtagaa

SEQ ID NO: 166102 - DNA, 13 bp, Artificial Sequence
  Oligonucleotide for detection of SNP TSC0007702
ttctacaacgctc

SEQ ID NO: 166103 - DNA, 13 bp, Artificial Sequence
  Oligonucleotide for detection of SNP TSC0007702
gagtgcggtagaa

SEQ ID NO: 166104 - DNA, 13 bp, Artificial Sequence
  Oligonucleotide for detection of SNP TSC0007702
ttctaccgcactc

SEQ ID NO: 166105 - DNA, 13 bp, Artificial Sequence
  Oligonucleotide for detection of SNP TSC0007702
gagtgtcgtagaa

SEQ ID NO: 166106 - DNA, 13 bp, Artificial Sequence
  Oligonucleotide for detection of SNP TSC0007702
ttctacgacactc

SEQ ID NO: 166107 - DNA, 13 bp, Artificial Sequence
  Oligonucleotide for detection of SNP TSC0007702
gagcgcggtagaa

SEQ ID NO: 166108 - DNA, 13 bp, Artificial Sequence
  Oligonucleotide for detection of SNP TSC0007702
ttctaccgcgctc

SEQ ID NO: 166109 - DNA, 13 bp, Artificial Sequence
  Oligonucleotide for detection of SNP TSC0007702
gagcgtcgtagaa

SEQ ID NO: 166110 - DNA, 13 bp, Artificial Sequence
  Oligonucleotide for detection of SNP TSC0007702
ttctacgacgctc

SEQ ID NO: 166111 - DNA, 13 bp, Artificial Sequence
  Oligonucleotide for detection of SNP TSC0041640
ttagaaaaattaa

SEQ ID NO: 166112 - DNA, 13 bp, Artificial Sequence
  Oligonucleotide for detection of SNP TSC0041640
ttaatttttctaa

SEQ ID NO: 166113 - DNA, 13 bp, Artificial Sequence
  Oligonucleotide for detection of SNP TSC0041640
ttagaataattaa

SEQ ID NO: 166114 - DNA, 13 bp, Artificial Sequence
  Oligonucleotide for detection of SNP TSC0041640
ttaattattctaa

SEQ ID NO: 166115 - DNA, 13 bp, Artificial Sequence
  Oligonucleotide for detection of SNP TSC0004807
gagaagtgggttg

SEQ ID NO: 166116 - DNA, 13 bp, Artificial Sequence
  Oligonucleotide for detection of SNP TSC0004807
caacccacttctc

SEQ ID NO: 166117 - DNA, 13 bp, Artificial Sequence
  Oligonucleotide for detection of SNP TSC0004807
gagaagcgggttg

SEQ ID NO: 166118 - DNA, 13 bp, Artificial Sequence
  Oligonucleotide for detection of SNP TSC0004807
caacccgcttctc

SEQ ID NO: 166119 - DNA, 13 bp, Artificial Sequence
  Oligonucleotide for detection of SNP TSC0041641
tgagtttgtttta

SEQ ID NO: 166120 - DNA, 13 bp, Artificial Sequence
  Oligonucleotide for detection of SNP TSC0041641
taaaacaaactca

SEQ ID NO: 166121 - DNA, 13 bp, Artificial Sequence
  Oligonucleotide for detection of SNP TSC0041641
tgagttggtttta

SEQ ID NO: 166122 - DNA, 13 bp, Artificial Sequence
  Oligonucleotide for detection of SNP TSC0041641
taaaaccaactca

SEQ ID NO: 166123 - DNA, 13 bp, Artificial Sequence
  Oligonucleotide for detection of SNP TSC0041641
taggataaattta

SEQ ID NO: 166124 - DNA, 13 bp, Artificial Sequence
  Oligonucleotide for detection of SNP TSC0041641
taaatttatccta

SEQ ID NO: 166125 - DNA, 13 bp, Artificial Sequence
  Oligonucleotide for detection of SNP TSC0041641
taggattaattta

SEQ ID NO: 166126 - DNA, 13 bp, Artificial Sequence
  Oligonucleotide for detection of SNP TSC0041641
taaattaatccta

SEQ ID NO: 166127 - DNA, 13 bp, Artificial Sequence
  Oligonucleotide for detection of SNP TSC0041644
atttgttggtggt

SEQ ID NO: 166128 - DNA, 13 bp, Artificial Sequence
  Oligonucleotide for detection of SNP TSC0041644
accaccaacaaat

SEQ ID NO: 166129 - DNA, 13 bp, Artificial Sequence
  Oligonucleotide for detection of SNP TSC0041644
atttgtcggtggt

SEQ ID NO: 166130 - DNA, 13 bp, Artificial Sequence
  Oligonucleotide for detection of SNP TSC0041644
accaccgacaaat

SEQ ID NO: 166131 - DNA, 13 bp, Artificial Sequence
  Oligonucleotide for detection of SNP TSC0041644
attattggtaagt

SEQ ID NO: 166132 - DNA, 13 bp, Artificial Sequence
  Oligonucleotide for detection of SNP TSC0041644
acttaccaataat

SEQ ID NO: 166133 - DNA, 13 bp, Artificial Sequence
  Oligonucleotide for detection of SNP TSC0041644
attattagtaagt

SEQ ID NO: 166134 - DNA, 13 bp, Artificial Sequence
  Oligonucleotide for detection of SNP TSC0041644
acttactaataat

SEQ ID NO: 166135 - DNA, 13 bp, Artificial Sequence
  Oligonucleotide for detection of SNP TSC0041644
attatcggtaagt

SEQ ID NO: 166136 - DNA, 13 bp, Artificial Sequence
  Oligonucleotide for detection of SNP TSC0041644
acttaccgataat

SEQ ID NO: 166137 - DNA, 13 bp, Artificial Sequence
  Oligonucleotide for detection of SNP TSC0041646
ttttgggtgatty

SEQ ID NO: 166138 - DNA, 13 bp, Artificial Sequence
  Oligonucleotide for detection of SNP TSC0041646
raatcacccaaaa

SEQ ID NO: 166139 - DNA, 13 bp, Artificial Sequence
  Oligonucleotide for detection of SNP TSC0041646
ttttggatgatty

SEQ ID NO: 166140 - DNA, 13 bp, Artificial Sequence
  Oligonucleotide for detection of SNP TSC0041646
raatcatccaaaa

SEQ ID NO: 166141 - DNA, 13 bp, Artificial Sequence
  Oligonucleotide for detection of SNP TSC0041646
tttcgggtgatty

SEQ ID NO: 166142 - DNA, 13 bp, Artificial Sequence
  Oligonucleotide for detection of SNP TSC0041646
raatcacccgaaa

SEQ ID NO: 166143 - DNA, 13 bp, Artificial Sequence
  Oligonucleotide for detection of SNP TSC0041646
tttcggatgatty

SEQ ID NO: 166144 - DNA, 13 bp, Artificial Sequence
  Oligonucleotide for detection of SNP TSC0041646
raatcatccgaaa

SEQ ID NO: 166145 - DNA, 13 bp, Artificial Sequence
  Oligonucleotide for detection of SNP TSC0041647
tagttattatagt

SEQ ID NO: 166146 - DNA, 13 bp, Artificial Sequence
  Oligonucleotide for detection of SNP TSC0041647
actataataacta

SEQ ID NO: 166147 - DNA, 13 bp, Artificial Sequence
  Oligonucleotide for detection of SNP TSC0041647
tagttagtatagt

SEQ ID NO: 166148 - DNA, 13 bp, Artificial Sequence
  Oligonucleotide for detection of SNP TSC0041647
actatactaacta

SEQ ID NO: 166149 - DNA, 13 bp, Artificial Sequence
  Oligonucleotide for detection of SNP TSC0041647
attgtaatgattg

SEQ ID NO: 166150 - DNA, 13 bp, Artificial Sequence
  Oligonucleotide for detection of SNP TSC0041647
caatcattacaat

SEQ ID NO: 166151 - DNA, 13 bp, Artificial Sequence
  Oligonucleotide for detection of SNP TSC0041647
attgtattgattg

SEQ ID NO: 166152 - DNA, 13 bp, Artificial Sequence
  Oligonucleotide for detection of SNP TSC0041647
caatcaatacaat

SEQ ID NO: 166153 - DNA, 13 bp, Artificial Sequence
  Oligonucleotide for detection of SNP TSC0041649
ggtgttattttty

SEQ ID NO: 166154 - DNA, 13 bp, Artificial Sequence
  Oligonucleotide for detection of SNP TSC0041649
raaaaataacacc

SEQ ID NO: 166155 - DNA, 13 bp, Artificial Sequence
  Oligonucleotide for detection of SNP TSC0041649
ggtgttgttttty

SEQ ID NO: 166156 - DNA, 13 bp, Artificial Sequence
  Oligonucleotide for detection of SNP TSC0041649
raaaaacaacacc

SEQ ID NO: 166157 - DNA, 13 bp, Artificial Sequence
  Oligonucleotide for detection of SNP TSC0041649
ggtgtcgttttty

SEQ ID NO: 166158 - DNA, 13 bp, Artificial Sequence
  Oligonucleotide for detection of SNP TSC0041649
raaaaacgacacc

SEQ ID NO: 166159 - DNA, 13 bp, Artificial Sequence
  Oligonucleotide for detection of SNP TSC0041649
gaaagatgataty

SEQ ID NO: 166160 - DNA, 13 bp, Artificial Sequence
  Oligonucleotide for detection of SNP TSC0041649
ratatcatctttc

SEQ ID NO: 166161 - DNA, 13 bp, Artificial Sequence
  Oligonucleotide for detection of SNP TSC0041649
gaaagacgataty

SEQ ID NO: 166162 - DNA, 13 bp, Artificial Sequence
  Oligonucleotide for detection of SNP TSC0041649
ratatcgtctttc

SEQ ID NO: 166163 - DNA, 13 bp, Artificial Sequence
  Oligonucleotide for detection of SNP TSC0041651
gggtaatggaggy

SEQ ID NO: 166164 - DNA, 13 bp, Artificial Sequence
  Oligonucleotide for detection of SNP TSC0041651
rcctccattaccc

SEQ ID NO: 166165 - DNA, 13 bp, Artificial Sequence
  Oligonucleotide for detection of SNP TSC0041651
gggtaagggaggy

SEQ ID NO: 166166 - DNA, 13 bp, Artificial Sequence
  Oligonucleotide for detection of SNP TSC0041651
rcctcccttaccc

SEQ ID NO: 166167 - DNA, 13 bp, Artificial Sequence
  Oligonucleotide for detection of SNP TSC0041651
gggtaacggaggy

SEQ ID NO: 166168 - DNA, 13 bp, Artificial Sequence
  Oligonucleotide for detection of SNP TSC0041651
rcctccgttaccc

SEQ ID NO: 166169 - DNA, 13 bp, Artificial Sequence
  Oligonucleotide for detection of SNP TSC0041651
gtttttgttgtty

SEQ ID NO: 166170 - DNA, 13 bp, Artificial Sequence
  Oligonucleotide for detection of SNP TSC0041651
raacaacaaaaac

SEQ ID NO: 166171 - DNA, 13 bp, Artificial Sequence
  Oligonucleotide for detection of SNP TSC0041651
gttttttttgtty

SEQ ID NO: 166172 - DNA, 13 bp, Artificial Sequence
  Oligonucleotide for detection of SNP TSC0041651
raacaaaaaaaac

SEQ ID NO: 166173 - DNA, 13 bp, Artificial Sequence
  Oligonucleotide for detection of SNP TSC0041651
gttttcgttgtty

SEQ ID NO: 166174 - DNA, 13 bp, Artificial Sequence
  Oligonucleotide for detection of SNP TSC0041651
raacaacgaaaac

SEQ ID NO: 166175 - DNA, 13 bp, Artificial Sequence
  Oligonucleotide for detection of SNP TSC0041653
ttattttgtgaag

SEQ ID NO: 166176 - DNA, 13 bp, Artificial Sequence
  Oligonucleotide for detection of SNP TSC0041653
cttcacaaaataa

SEQ ID NO: 166177 - DNA, 13 bp, Artificial Sequence
  Oligonucleotide for detection of SNP TSC0041653
ttatttcgtgaag

SEQ ID NO: 166178 - DNA, 13 bp, Artificial Sequence
  Oligonucleotide for detection of SNP TSC0041653
cttcacgaaataa

SEQ ID NO: 166179 - DNA, 13 bp, Artificial Sequence
  Oligonucleotide for detection of SNP TSC0041653
ttttatggaataa

SEQ ID NO: 166180 - DNA, 13 bp, Artificial Sequence
  Oligonucleotide for detection of SNP TSC0041653
ttattccataaaa

SEQ ID NO: 166181 - DNA, 13 bp, Artificial Sequence
  Oligonucleotide for detection of SNP TSC0041653
ttttatagaataa

SEQ ID NO: 166182 - DNA, 13 bp, Artificial Sequence
  Oligonucleotide for detection of SNP TSC0041653
ttattctataaaa

SEQ ID NO: 166183 - DNA, 13 bp, Artificial Sequence
  Oligonucleotide for detection of SNP TSC0041653
ttttacggaataa

SEQ ID NO: 166184 - DNA, 13 bp, Artificial Sequence
  Oligonucleotide for detection of SNP TSC0041653
ttattccgtaaaa

SEQ ID NO: 166185 - DNA, 13 bp, Artificial Sequence
  Oligonucleotide for detection of SNP TSC0041654
attaattattgtt

SEQ ID NO: 166186 - DNA, 13 bp, Artificial Sequence
  Oligonucleotide for detection of SNP TSC0041654
aacaataattaat

SEQ ID NO: 166187 - DNA, 13 bp, Artificial Sequence
  Oligonucleotide for detection of SNP TSC0041654
attaatgattgtt

SEQ ID NO: 166188 - DNA, 13 bp, Artificial Sequence
  Oligonucleotide for detection of SNP TSC0041654
aacaatcattaat

SEQ ID NO: 166189 - DNA, 13 bp, Artificial Sequence
  Oligonucleotide for detection of SNP TSC0041654
agtaatgattaat

SEQ ID NO: 166190 - DNA, 13 bp, Artificial Sequence
  Oligonucleotide for detection of SNP TSC0041654
attaatcattact

SEQ ID NO: 166191 - DNA, 13 bp, Artificial Sequence
  Oligonucleotide for detection of SNP TSC0041654
agtaattattaat

SEQ ID NO: 166192 - DNA, 13 bp, Artificial Sequence
  Oligonucleotide for detection of SNP TSC0041654
attaataattact

SEQ ID NO: 166193 - DNA, 13 bp, Artificial Sequence
  Oligonucleotide for detection of SNP TSC0009235
gtatagaaatgat

SEQ ID NO: 166194 - DNA, 13 bp, Artificial Sequence
  Oligonucleotide for detection of SNP TSC0009235
atcatttctatac

SEQ ID NO: 166195 - DNA, 13 bp, Artificial Sequence
  Oligonucleotide for detection of SNP TSC0009235
gtatagtaatgat

SEQ ID NO: 166196 - DNA, 13 bp, Artificial Sequence
  Oligonucleotide for detection of SNP TSC0009235
atcattactatac

SEQ ID NO: 166197 - DNA, 13 bp, Artificial Sequence
  Oligonucleotide for detection of SNP TSC0009235
attatttttatay

SEQ ID NO: 166198 - DNA, 13 bp, Artificial Sequence
  Oligonucleotide for detection of SNP TSC0009235
rtataaaaataat

SEQ ID NO: 166199 - DNA, 13 bp, Artificial Sequence
  Oligonucleotide for detection of SNP TSC0009236
ttttataatagag

SEQ ID NO: 166200 - DNA, 13 bp, Artificial Sequence
  Oligonucleotide for detection of SNP TSC0009236
ctctattataaaa

SEQ ID NO: 166201 - DNA, 13 bp, Artificial Sequence
  Oligonucleotide for detection of SNP TSC0009236
ttttattatagag

SEQ ID NO: 166202 - DNA, 13 bp, Artificial Sequence
  Oligonucleotide for detection of SNP TSC0009236
ctctataataaaa

SEQ ID NO: 166203 - DNA, 13 bp, Artificial Sequence
  Oligonucleotide for detection of SNP TSC0009236
ttttattatgaga

SEQ ID NO: 166204 - DNA, 13 bp, Artificial Sequence
  Oligonucleotide for detection of SNP TSC0009236
tctcataataaaa

SEQ ID NO: 166205 - DNA, 13 bp, Artificial Sequence
  Oligonucleotide for detection of SNP TSC0009237
tttatagtttttg

SEQ ID NO: 166206 - DNA, 13 bp, Artificial Sequence
  Oligonucleotide for detection of SNP TSC0009237
caaaaactataaa

SEQ ID NO: 166207 - DNA, 13 bp, Artificial Sequence
  Oligonucleotide for detection of SNP TSC0009238
gttataatatttg

SEQ ID NO: 166208 - DNA, 13 bp, Artificial Sequence
  Oligonucleotide for detection of SNP TSC0009238
caaatattataac

SEQ ID NO: 166209 - DNA, 13 bp, Artificial Sequence
  Oligonucleotide for detection of SNP TSC0009238
gttatattatttg

SEQ ID NO: 166210 - DNA, 13 bp, Artificial Sequence
  Oligonucleotide for detection of SNP TSC0009238
caaataatataac

SEQ ID NO: 166211 - DNA, 13 bp, Artificial Sequence
  Oligonucleotide for detection of SNP TSC0009238
tagatgttatgay

SEQ ID NO: 166212 - DNA, 13 bp, Artificial Sequence
  Oligonucleotide for detection of SNP TSC0009238
rtcataacatcta

SEQ ID NO: 166213 - DNA, 13 bp, Artificial Sequence
  Oligonucleotide for detection of SNP TSC0009238
tagatgatatgay

SEQ ID NO: 166214 - DNA, 13 bp, Artificial Sequence
  Oligonucleotide for detection of SNP TSC0009238
rtcatatcatcta

SEQ ID NO: 166215 - DNA, 13 bp, Artificial Sequence
  Oligonucleotide for detection of SNP TSC0041655
ttgagtgtagagg

SEQ ID NO: 166216 - DNA, 13 bp, Artificial Sequence
  Oligonucleotide for detection of SNP TSC0041655
cctctacactcaa

SEQ ID NO: 166217 - DNA, 13 bp, Artificial Sequence
  Oligonucleotide for detection of SNP TSC0041655
ttgagtatagagg

SEQ ID NO: 166218 - DNA, 13 bp, Artificial Sequence
  Oligonucleotide for detection of SNP TSC0041655
cctctatactcaa

SEQ ID NO: 166219 - DNA, 13 bp, Artificial Sequence
  Oligonucleotide for detection of SNP TSC0041656
gtattatgatagt

SEQ ID NO: 166220 - DNA, 13 bp, Artificial Sequence
  Oligonucleotide for detection of SNP TSC0041656
actatcataatac

SEQ ID NO: 166221 - DNA, 13 bp, Artificial Sequence
  Oligonucleotide for detection of SNP TSC0041656
gtattaggatagt

SEQ ID NO: 166222 - DNA, 13 bp, Artificial Sequence
  Oligonucleotide for detection of SNP TSC0041656
actatcctaatac

SEQ ID NO: 166223 - DNA, 13 bp, Artificial Sequence
  Oligonucleotide for detection of SNP TSC0041656
gtattacgatagt

SEQ ID NO: 166224 - DNA, 13 bp, Artificial Sequence
  Oligonucleotide for detection of SNP TSC0041656
actatcgtaatac

SEQ ID NO: 166225 - DNA, 13 bp, Artificial Sequence
  Oligonucleotide for detection of SNP TSC0041656
attgttgtggtay

SEQ ID NO: 166226 - DNA, 13 bp, Artificial Sequence
  Oligonucleotide for detection of SNP TSC0041656
rtaccacaacaat

SEQ ID NO: 166227 - DNA, 13 bp, Artificial Sequence
  Oligonucleotide for detection of SNP TSC0041656
attgttttggtay

SEQ ID NO: 166228 - DNA, 13 bp, Artificial Sequence
  Oligonucleotide for detection of SNP TSC0041656
rtaccaaaacaat

SEQ ID NO: 166229 - DNA, 13 bp, Artificial Sequence
  Oligonucleotide for detection of SNP TSC0041656
attgtcgtggtay

SEQ ID NO: 166230 - DNA, 13 bp, Artificial Sequence
  Oligonucleotide for detection of SNP TSC0041656
rtaccacgacaat

SEQ ID NO: 166231 - DNA, 13 bp, Artificial Sequence
  Oligonucleotide for detection of SNP TSC0041657
taggtatgaaatt

SEQ ID NO: 166232 - DNA, 13 bp, Artificial Sequence
  Oligonucleotide for detection of SNP TSC0041657
aatttcataccta

SEQ ID NO: 166233 - DNA, 13 bp, Artificial Sequence
  Oligonucleotide for detection of SNP TSC0041657
taggtacgaaatt

SEQ ID NO: 166234 - DNA, 13 bp, Artificial Sequence
  Oligonucleotide for detection of SNP TSC0041657
aatttcgtaccta

SEQ ID NO: 166235 - DNA, 13 bp, Artificial Sequence
  Oligonucleotide for detection of SNP TSC0041657
aattttatatttg

SEQ ID NO: 166236 - DNA, 13 bp, Artificial Sequence
  Oligonucleotide for detection of SNP TSC0041657
caaatataaaatt

SEQ ID NO: 166237 - DNA, 13 bp, Artificial Sequence
  Oligonucleotide for detection of SNP TSC0041657
aatttcgtatttg

SEQ ID NO: 166238 - DNA, 13 bp, Artificial Sequence
  Oligonucleotide for detection of SNP TSC0041657
caaatacgaaatt

SEQ ID NO: 166239 - DNA, 13 bp, Artificial Sequence
  Oligonucleotide for detection of SNP TSC0041658
tatttttgtgaaa

SEQ ID NO: 166240 - DNA, 13 bp, Artificial Sequence
  Oligonucleotide for detection of SNP TSC0041658
tttcacaaaaata

SEQ ID NO: 166241 - DNA, 13 bp, Artificial Sequence
  Oligonucleotide for detection of SNP TSC0041658
tattttcgtgaaa

SEQ ID NO: 166242 - DNA, 13 bp, Artificial Sequence
  Oligonucleotide for detection of SNP TSC0041658
tttcacgaaaata

SEQ ID NO: 166243 - DNA, 13 bp, Artificial Sequence
  Oligonucleotide for detection of SNP TSC0041658
ttttatgaagata

SEQ ID NO: 166244 - DNA, 13 bp, Artificial Sequence
  Oligonucleotide for detection of SNP TSC0041658
tatcttcataaaa

SEQ ID NO: 166245 - DNA, 13 bp, Artificial Sequence
  Oligonucleotide for detection of SNP TSC0041658
ttttataaagata

SEQ ID NO: 166246 - DNA, 13 bp, Artificial Sequence
  Oligonucleotide for detection of SNP TSC0041658
tatctttataaaa

SEQ ID NO: 166247 - DNA, 13 bp, Artificial Sequence
  Oligonucleotide for detection of SNP TSC0041658
ttttacgaagata

SEQ ID NO: 166248 - DNA, 13 bp, Artificial Sequence
  Oligonucleotide for detection of SNP TSC0041658
tatcttcgtaaaa

SEQ ID NO: 166249 - DNA, 13 bp, Artificial Sequence
  Oligonucleotide for detection of SNP TSC0041659
ggagtatattatt

SEQ ID NO: 166250 - DNA, 13 bp, Artificial Sequence
  Oligonucleotide for detection of SNP TSC0041659
aataatatactcc

SEQ ID NO: 166251 - DNA, 13 bp, Artificial Sequence
  Oligonucleotide for detection of SNP TSC0041659
ggagtagattatt

SEQ ID NO: 166252 - DNA, 13 bp, Artificial Sequence
  Oligonucleotide for detection of SNP TSC0041659
aataatctactcc

SEQ ID NO: 166253 - DNA, 13 bp, Artificial Sequence
  Oligonucleotide for detection of SNP TSC0041659
aataatatgttty

SEQ ID NO: 166254 - DNA, 13 bp, Artificial Sequence
  Oligonucleotide for detection of SNP TSC0041659
raaacatattatt

SEQ ID NO: 166255 - DNA, 13 bp, Artificial Sequence
  Oligonucleotide for detection of SNP TSC0041659
aataatttgttty

SEQ ID NO: 166256 - DNA, 13 bp, Artificial Sequence
  Oligonucleotide for detection of SNP TSC0041659
raaacaaattatt

SEQ ID NO: 166257 - DNA, 13 bp, Artificial Sequence
  Oligonucleotide for detection of SNP TSC0041660
gggattaggagty

SEQ ID NO: 166258 - DNA, 13 bp, Artificial Sequence
  Oligonucleotide for detection of SNP TSC0041660
ractcctaatccc

SEQ ID NO: 166259 - DNA, 13 bp, Artificial Sequence
  Oligonucleotide for detection of SNP TSC0041660
gggattgggagty

SEQ ID NO: 166260 - DNA, 13 bp, Artificial Sequence
  Oligonucleotide for detection of SNP TSC0041660
ractcccaatccc

SEQ ID NO: 166261 - DNA, 13 bp, Artificial Sequence
  Oligonucleotide for detection of SNP TSC0041660
gggatcgggagty

SEQ ID NO: 166262 - DNA, 13 bp, Artificial Sequence
  Oligonucleotide for detection of SNP TSC0041660
ractcccgatccc

SEQ ID NO: 166263 - DNA, 13 bp, Artificial Sequence
  Oligonucleotide for detection of SNP TSC0041660
ggtttttggttty

SEQ ID NO: 166264 - DNA, 13 bp, Artificial Sequence
  Oligonucleotide for detection of SNP TSC0041660
raaaccaaaaacc

SEQ ID NO: 166265 - DNA, 13 bp, Artificial Sequence
  Oligonucleotide for detection of SNP TSC0041660
ggttttcggttty

SEQ ID NO: 166266 - DNA, 13 bp, Artificial Sequence
  Oligonucleotide for detection of SNP TSC0041660
raaaccgaaaacc

SEQ ID NO: 166267 - DNA, 13 bp, Artificial Sequence
  Oligonucleotide for detection of SNP TSC0041661
ggttggaattaga

SEQ ID NO: 166268 - DNA, 13 bp, Artificial Sequence
  Oligonucleotide for detection of SNP TSC0041661
tctaattccaacc

SEQ ID NO: 166269 - DNA, 13 bp, Artificial Sequence
  Oligonucleotide for detection of SNP TSC0041661
ggttgggattaga

SEQ ID NO: 166270 - DNA, 13 bp, Artificial Sequence
  Oligonucleotide for detection of SNP TSC0041661
tctaatcccaacc

SEQ ID NO: 166271 - DNA, 13 bp, Artificial Sequence
  Oligonucleotide for detection of SNP TSC0041662
agtggtgtgttta

SEQ ID NO: 166272 - DNA, 13 bp, Artificial Sequence
  Oligonucleotide for detection of SNP TSC0041662
taaacacaccact

SEQ ID NO: 166273 - DNA, 13 bp, Artificial Sequence
  Oligonucleotide for detection of SNP TSC0041662
agtggtatgttta

SEQ ID NO: 166274 - DNA, 13 bp, Artificial Sequence
  Oligonucleotide for detection of SNP TSC0041662
taaacataccact

SEQ ID NO: 166275 - DNA, 13 bp, Artificial Sequence
  Oligonucleotide for detection of SNP TSC0041663
agagaatatagaa

SEQ ID NO: 166276 - DNA, 13 bp, Artificial Sequence
  Oligonucleotide for detection of SNP TSC0041663
ttctatattctct

SEQ ID NO: 166277 - DNA, 13 bp, Artificial Sequence
  Oligonucleotide for detection of SNP TSC0041663
agagaagatagaa

SEQ ID NO: 166278 - DNA, 13 bp, Artificial Sequence
  Oligonucleotide for detection of SNP TSC0041663
ttctatcttctct

SEQ ID NO: 166279 - DNA, 13 bp, Artificial Sequence
  Oligonucleotide for detection of SNP TSC0009210
ttgtataatgttt

SEQ ID NO: 166280 - DNA, 13 bp, Artificial Sequence
  Oligonucleotide for detection of SNP TSC0009210
aaacattatacaa

SEQ ID NO: 166281 - DNA, 13 bp, Artificial Sequence
  Oligonucleotide for detection of SNP TSC0009210
ttgtacgatgttt

SEQ ID NO: 166282 - DNA, 13 bp, Artificial Sequence
  Oligonucleotide for detection of SNP TSC0009210
aaacatcgtacaa

SEQ ID NO: 166283 - DNA, 13 bp, Artificial Sequence
  Oligonucleotide for detection of SNP TSC0009210
aaatattgtataa

SEQ ID NO: 166284 - DNA, 13 bp, Artificial Sequence
  Oligonucleotide for detection of SNP TSC0009210
ttatacaatattt

SEQ ID NO: 166285 - DNA, 13 bp, Artificial Sequence
  Oligonucleotide for detection of SNP TSC0009210
aaatatcgtataa

SEQ ID NO: 166286 - DNA, 13 bp, Artificial Sequence
  Oligonucleotide for detection of SNP TSC0009210
ttatacgatattt

SEQ ID NO: 166287 - DNA, 13 bp, Artificial Sequence
  Oligonucleotide for detection of SNP TSC0009211
gttttaagtaaaa

SEQ ID NO: 166288 - DNA, 13 bp, Artificial Sequence
  Oligonucleotide for detection of SNP TSC0009211
ttttacttaaaac

SEQ ID NO: 166289 - DNA, 13 bp, Artificial Sequence
  Oligonucleotide for detection of SNP TSC0009211
gttttatgtaaaa

SEQ ID NO: 166290 - DNA, 13 bp, Artificial Sequence
  Oligonucleotide for detection of SNP TSC0009211
ttttacataaaac

SEQ ID NO: 166291 - DNA, 13 bp, Artificial Sequence
  Oligonucleotide for detection of SNP TSC0009211
gttttacgtaaaa

SEQ ID NO: 166292 - DNA, 13 bp, Artificial Sequence
  Oligonucleotide for detection of SNP TSC0009211
ttttacgtaaaac

SEQ ID NO: 166293 - DNA, 13 bp, Artificial Sequence
  Oligonucleotide for detection of SNP TSC0009211
ttttatttggagy

SEQ ID NO: 166294 - DNA, 13 bp, Artificial Sequence
  Oligonucleotide for detection of SNP TSC0009211
rctccaaataaaa

SEQ ID NO: 166295 - DNA, 13 bp, Artificial Sequence
  Oligonucleotide for detection of SNP TSC0009211
ttttatgtggagy

SEQ ID NO: 166296 - DNA, 13 bp, Artificial Sequence
  Oligonucleotide for detection of SNP TSC0009211
rctccacataaaa

SEQ ID NO: 166297 - DNA, 13 bp, Artificial Sequence
  Oligonucleotide for detection of SNP TSC0009211
ttttacgtggagy

SEQ ID NO: 166298 - DNA, 13 bp, Artificial Sequence
  Oligonucleotide for detection of SNP TSC0009211
rctccacgtaaaa

SEQ ID NO: 166299 - DNA, 13 bp, Artificial Sequence
  Oligonucleotide for detection of SNP TSC0010071
tttttaatgttgg

SEQ ID NO: 166300 - DNA, 13 bp, Artificial Sequence
  Oligonucleotide for detection of SNP TSC0010071
ccaacattaaaaa

SEQ ID NO: 166301 - DNA, 13 bp, Artificial Sequence
  Oligonucleotide for detection of SNP TSC0010071
tttttattgttgg

SEQ ID NO: 166302 - DNA, 13 bp, Artificial Sequence
  Oligonucleotide for detection of SNP TSC0010071
ccaacaataaaaa

SEQ ID NO: 166303 - DNA, 13 bp, Artificial Sequence
  Oligonucleotide for detection of SNP TSC0010071
ttaatattgggga

SEQ ID NO: 166304 - DNA, 13 bp, Artificial Sequence
  Oligonucleotide for detection of SNP TSC0010071
tccccaatattaa

SEQ ID NO: 166305 - DNA, 13 bp, Artificial Sequence
  Oligonucleotide for detection of SNP TSC0010071
ttaataatgggga

SEQ ID NO: 166306 - DNA, 13 bp, Artificial Sequence
  Oligonucleotide for detection of SNP TSC0010071
tccccattattaa

SEQ ID NO: 166307 - DNA, 13 bp, Artificial Sequence
  Oligonucleotide for detection of SNP TSC0010072
atgtgattttgtt

SEQ ID NO: 166308 - DNA, 13 bp, Artificial Sequence
  Oligonucleotide for detection of SNP TSC0010072
aacaaaatcacat

SEQ ID NO: 166309 - DNA, 13 bp, Artificial Sequence
  Oligonucleotide for detection of SNP TSC0010072
atgtgagtttgtt

SEQ ID NO: 166310 - DNA, 13 bp, Artificial Sequence
  Oligonucleotide for detection of SNP TSC0010072
aacaaactcacat

SEQ ID NO: 166311 - DNA, 13 bp, Artificial Sequence
  Oligonucleotide for detection of SNP TSC0010072
agtaaagttatat

SEQ ID NO: 166312 - DNA, 13 bp, Artificial Sequence
  Oligonucleotide for detection of SNP TSC0010072
atataactttact

SEQ ID NO: 166313 - DNA, 13 bp, Artificial Sequence
  Oligonucleotide for detection of SNP TSC0010072
agtaaatttatat

SEQ ID NO: 166314 - DNA, 13 bp, Artificial Sequence
  Oligonucleotide for detection of SNP TSC0010072
atataaatttact

SEQ ID NO: 166315 - DNA, 13 bp, Artificial Sequence
  Oligonucleotide for detection of SNP TSC0041664
tgtatgataataa

SEQ ID NO: 166316 - DNA, 13 bp, Artificial Sequence
  Oligonucleotide for detection of SNP TSC0041664
ttattatcataca

SEQ ID NO: 166317 - DNA, 13 bp, Artificial Sequence
  Oligonucleotide for detection of SNP TSC0041664
tgtatggtaataa

SEQ ID NO: 166318 - DNA, 13 bp, Artificial Sequence
  Oligonucleotide for detection of SNP TSC0041664
ttattaccataca

SEQ ID NO: 166319 - DNA, 13 bp, Artificial Sequence
  Oligonucleotide for detection of SNP TSC0041665
gtgtatagaattt

SEQ ID NO: 166320 - DNA, 13 bp, Artificial Sequence
  Oligonucleotide for detection of SNP TSC0041665
aaattctatacac

SEQ ID NO: 166321 - DNA, 13 bp, Artificial Sequence
  Oligonucleotide for detection of SNP TSC0041665
gtgtatggaattt

SEQ ID NO: 166322 - DNA, 13 bp, Artificial Sequence
  Oligonucleotide for detection of SNP TSC0041665
aaattccatacac

SEQ ID NO: 166323 - DNA, 13 bp, Artificial Sequence
  Oligonucleotide for detection of SNP TSC0041665
gtgtacggaattt

SEQ ID NO: 166324 - DNA, 13 bp, Artificial Sequence
  Oligonucleotide for detection of SNP TSC0041665
aaattccgtacac

SEQ ID NO: 166325 - DNA, 13 bp, Artificial Sequence
  Oligonucleotide for detection of SNP TSC0041665
aggttttgtgtay

SEQ ID NO: 166326 - DNA, 13 bp, Artificial Sequence
  Oligonucleotide for detection of SNP TSC0041665
rtacacaaaacct

SEQ ID NO: 166327 - DNA, 13 bp, Artificial Sequence
  Oligonucleotide for detection of SNP TSC0041665
aggtttcgtgtay

SEQ ID NO: 166328 - DNA, 13 bp, Artificial Sequence
  Oligonucleotide for detection of SNP TSC0041665
rtacacgaaacct

SEQ ID NO: 166329 - DNA, 13 bp, Artificial Sequence
  Oligonucleotide for detection of SNP TSC0041666
gatttatatattt

SEQ ID NO: 166330 - DNA, 13 bp, Artificial Sequence
  Oligonucleotide for detection of SNP TSC0041666
aaatatataaatc

SEQ ID NO: 166331 - DNA, 13 bp, Artificial Sequence
  Oligonucleotide for detection of SNP TSC0041666
gatttagatattt

SEQ ID NO: 166332 - DNA, 13 bp, Artificial Sequence
  Oligonucleotide for detection of SNP TSC0041666
aaatatctaaatc

SEQ ID NO: 166333 - DNA, 13 bp, Artificial Sequence
  Oligonucleotide for detection of SNP TSC0041666
agatatgtaggty

SEQ ID NO: 166334 - DNA, 13 bp, Artificial Sequence
  Oligonucleotide for detection of SNP TSC0041666
racctacatatct

SEQ ID NO: 166335 - DNA, 13 bp, Artificial Sequence
  Oligonucleotide for detection of SNP TSC0041666
agatatttaggty

SEQ ID NO: 166336 - DNA, 13 bp, Artificial Sequence
  Oligonucleotide for detection of SNP TSC0041666
racctaaatatct

SEQ ID NO: 166337 - DNA, 13 bp, Artificial Sequence
  Oligonucleotide for detection of SNP TSC0041667
tggttatgattaa

SEQ ID NO: 166338 - DNA, 13 bp, Artificial Sequence
  Oligonucleotide for detection of SNP TSC0041667
ttaatcataacca

SEQ ID NO: 166339 - DNA, 13 bp, Artificial Sequence
  Oligonucleotide for detection of SNP TSC0041667
tggttacgattaa

SEQ ID NO: 166340 - DNA, 13 bp, Artificial Sequence
  Oligonucleotide for detection of SNP TSC0041667
ttaatcgtaacca

SEQ ID NO: 166341 - DNA, 13 bp, Artificial Sequence
  Oligonucleotide for detection of SNP TSC0041667
ttaattgtaatta

SEQ ID NO: 166342 - DNA, 13 bp, Artificial Sequence
  Oligonucleotide for detection of SNP TSC0041667
taattacaattaa

SEQ ID NO: 166343 - DNA, 13 bp, Artificial Sequence
  Oligonucleotide for detection of SNP TSC0041667
ttaattataatta

SEQ ID NO: 166344 - DNA, 13 bp, Artificial Sequence
  Oligonucleotide for detection of SNP TSC0041667
taattataattaa

SEQ ID NO: 166345 - DNA, 13 bp, Artificial Sequence
  Oligonucleotide for detection of SNP TSC0041667
ttaatcgtaatta

SEQ ID NO: 166346 - DNA, 13 bp, Artificial Sequence
  Oligonucleotide for detection of SNP TSC0041667
taattacgattaa

SEQ ID NO: 166347 - DNA, 13 bp, Artificial Sequence
  Oligonucleotide for detection of SNP TSC0041668
tttattataagta

SEQ ID NO: 166348 - DNA, 13 bp, Artificial Sequence
  Oligonucleotide for detection of SNP TSC0041668
tacttataataaa

SEQ ID NO: 166349 - DNA, 13 bp, Artificial Sequence
  Oligonucleotide for detection of SNP TSC0041668
tttattgtaagta

SEQ ID NO: 166350 - DNA, 13 bp, Artificial Sequence
  Oligonucleotide for detection of SNP TSC0041668
tacttacaataaa

SEQ ID NO: 166351 - DNA, 13 bp, Artificial Sequence
  Oligonucleotide for detection of SNP TSC0041669
atagagatttgtt

SEQ ID NO: 166352 - DNA, 13 bp, Artificial Sequence
  Oligonucleotide for detection of SNP TSC0041669
aacaaatctctat

SEQ ID NO: 166353 - DNA, 13 bp, Artificial Sequence
  Oligonucleotide for detection of SNP TSC0041669
atagagattcgtt

SEQ ID NO: 166354 - DNA, 13 bp, Artificial Sequence
  Oligonucleotide for detection of SNP TSC0041669
aacgaatctctat

SEQ ID NO: 166355 - DNA, 13 bp, Artificial Sequence
  Oligonucleotide for detection of SNP TSC0041669
atagaggttcgtt

SEQ ID NO: 166356 - DNA, 13 bp, Artificial Sequence
  Oligonucleotide for detection of SNP TSC0041669
aacgaacctctat

SEQ ID NO: 166357 - DNA, 13 bp, Artificial Sequence
  Oligonucleotide for detection of SNP TSC0041672
attataaagaaaa

SEQ ID NO: 166358 - DNA, 13 bp, Artificial Sequence
  Oligonucleotide for detection of SNP TSC0041672
ttttctttataat

SEQ ID NO: 166359 - DNA, 13 bp, Artificial Sequence
  Oligonucleotide for detection of SNP TSC0041672
attatagagaaaa

SEQ ID NO: 166360 - DNA, 13 bp, Artificial Sequence
  Oligonucleotide for detection of SNP TSC0041672
ttttctctataat

SEQ ID NO: 166361 - DNA, 13 bp, Artificial Sequence
  Oligonucleotide for detection of SNP TSC0006798
gtaggaagatgtt

SEQ ID NO: 166362 - DNA, 13 bp, Artificial Sequence
  Oligonucleotide for detection of SNP TSC0006798
aacatcttcctac

SEQ ID NO: 166363 - DNA, 13 bp, Artificial Sequence
  Oligonucleotide for detection of SNP TSC0006798
gtaggaggatgtt

SEQ ID NO: 166364 - DNA, 13 bp, Artificial Sequence
  Oligonucleotide for detection of SNP TSC0006798
aacatcctcctac

SEQ ID NO: 166365 - DNA, 13 bp, Artificial Sequence
  Oligonucleotide for detection of SNP TSC0041675
taagtataattaa

SEQ ID NO: 166366 - DNA, 13 bp, Artificial Sequence
  Oligonucleotide for detection of SNP TSC0041675
ttaattatactta

SEQ ID NO: 166367 - DNA, 13 bp, Artificial Sequence
  Oligonucleotide for detection of SNP TSC0041675
taagtagaattaa

SEQ ID NO: 166368 - DNA, 13 bp, Artificial Sequence
  Oligonucleotide for detection of SNP TSC0041675
ttaattctactta

SEQ ID NO: 166369 - DNA, 13 bp, Artificial Sequence
  Oligonucleotide for detection of SNP TSC0041675
ttaattgtattta

SEQ ID NO: 166370 - DNA, 13 bp, Artificial Sequence
  Oligonucleotide for detection of SNP TSC0041675
taaatacaattaa

SEQ ID NO: 166371 - DNA, 13 bp, Artificial Sequence
  Oligonucleotide for detection of SNP TSC0041676
tttggaatttagg

SEQ ID NO: 166372 - DNA, 13 bp, Artificial Sequence
  Oligonucleotide for detection of SNP TSC0041676
cctaaattccaaa

SEQ ID NO: 166373 - DNA, 13 bp, Artificial Sequence
  Oligonucleotide for detection of SNP TSC0041676
tttggagtttagg

SEQ ID NO: 166374 - DNA, 13 bp, Artificial Sequence
  Oligonucleotide for detection of SNP TSC0041676
cctaaactccaaa

SEQ ID NO: 166375 - DNA, 13 bp, Artificial Sequence
  Oligonucleotide for detection of SNP TSC0041677
agtgatgtggaaa

SEQ ID NO: 166376 - DNA, 13 bp, Artificial Sequence
  Oligonucleotide for detection of SNP TSC0041677
tttccacatcact

SEQ ID NO: 166377 - DNA, 13 bp, Artificial Sequence
  Oligonucleotide for detection of SNP TSC0041677
agtgatatggaaa

SEQ ID NO: 166378 - DNA, 13 bp, Artificial Sequence
  Oligonucleotide for detection of SNP TSC0041677
tttccatatcact

SEQ ID NO: 166379 - DNA, 13 bp, Artificial Sequence
  Oligonucleotide for detection of SNP TSC0041678
tagaagaagtggg

SEQ ID NO: 166380 - DNA, 13 bp, Artificial Sequence
  Oligonucleotide for detection of SNP TSC0041678
cccacttcttcta

SEQ ID NO: 166381 - DNA, 13 bp, Artificial Sequence
  Oligonucleotide for detection of SNP TSC0041678
tagaaggagtggg

SEQ ID NO: 166382 - DNA, 13 bp, Artificial Sequence
  Oligonucleotide for detection of SNP TSC0041678
cccactccttcta

SEQ ID NO: 166383 - DNA, 13 bp, Artificial Sequence
  Oligonucleotide for detection of SNP TSC0041679
attttgaatttgg

SEQ ID NO: 166384 - DNA, 13 bp, Artificial Sequence
  Oligonucleotide for detection of SNP TSC0041679
ccaaattcaaaat

SEQ ID NO: 166385 - DNA, 13 bp, Artificial Sequence
  Oligonucleotide for detection of SNP TSC0041679
attttgtatttgg

SEQ ID NO: 166386 - DNA, 13 bp, Artificial Sequence
  Oligonucleotide for detection of SNP TSC0041679
ccaaatacaaaat

SEQ ID NO: 166387 - DNA, 13 bp, Artificial Sequence
  Oligonucleotide for detection of SNP TSC0041679
ttaaatttagagt

SEQ ID NO: 166388 - DNA, 13 bp, Artificial Sequence
  Oligonucleotide for detection of SNP TSC0041679
actctaaatttaa

SEQ ID NO: 166389 - DNA, 13 bp, Artificial Sequence
  Oligonucleotide for detection of SNP TSC0041679
ttaaatatagagt

SEQ ID NO: 166390 - DNA, 13 bp, Artificial Sequence
  Oligonucleotide for detection of SNP TSC0041679
actctatatttaa

SEQ ID NO: 166391 - DNA, 13 bp, Artificial Sequence
  Oligonucleotide for detection of SNP TSC0041680
tagtttattttaa

SEQ ID NO: 166392 - DNA, 13 bp, Artificial Sequence
  Oligonucleotide for detection of SNP TSC0041680
ttaaaataaacta

SEQ ID NO: 166393 - DNA, 13 bp, Artificial Sequence
  Oligonucleotide for detection of SNP TSC0041680
tagtttgttttaa

SEQ ID NO: 166394 - DNA, 13 bp, Artificial Sequence
  Oligonucleotide for detection of SNP TSC0041680
ttaaaacaaacta

SEQ ID NO: 166395 - DNA, 13 bp, Artificial Sequence
  Oligonucleotide for detection of SNP TSC0041680
tagttcgttttaa

SEQ ID NO: 166396 - DNA, 13 bp, Artificial Sequence
  Oligonucleotide for detection of SNP TSC0041680
ttaaaacgaacta

SEQ ID NO: 166397 - DNA, 13 bp, Artificial Sequence
  Oligonucleotide for detection of SNP TSC0041680
ttggagtgagttg

SEQ ID NO: 166398 - DNA, 13 bp, Artificial Sequence
  Oligonucleotide for detection of SNP TSC0041680
caactcactccaa

SEQ ID NO: 166399 - DNA, 13 bp, Artificial Sequence
  Oligonucleotide for detection of SNP TSC0041680
ttggagcgagttg

SEQ ID NO: 166400 - DNA, 13 bp, Artificial Sequence
  Oligonucleotide for detection of SNP TSC0041680
caactcgctccaa

SEQ ID NO: 166401 - DNA, 13 bp, Artificial Sequence
  Oligonucleotide for detection of SNP TSC0005763
atgttaagtttag

SEQ ID NO: 166402 - DNA, 13 bp, Artificial Sequence
  Oligonucleotide for detection of SNP TSC0005763
ctaaacttaacat

SEQ ID NO: 166403 - DNA, 13 bp, Artificial Sequence
  Oligonucleotide for detection of SNP TSC0005763
atgttaggtttag

SEQ ID NO: 166404 - DNA, 13 bp, Artificial Sequence
  Oligonucleotide for detection of SNP TSC0005763
ctaaacctaacat

SEQ ID NO: 166405 - DNA, 13 bp, Artificial Sequence
  Oligonucleotide for detection of SNP TSC0005764
ttagatagtagat

SEQ ID NO: 166406 - DNA, 13 bp, Artificial Sequence
  Oligonucleotide for detection of SNP TSC0005764
atctactatctaa

SEQ ID NO: 166407 - DNA, 13 bp, Artificial Sequence
  Oligonucleotide for detection of SNP TSC0005764
ttagatggtagat

SEQ ID NO: 166408 - DNA, 13 bp, Artificial Sequence
  Oligonucleotide for detection of SNP TSC0005764
atctaccatctaa

SEQ ID NO: 166409 - DNA, 13 bp, Artificial Sequence
  Oligonucleotide for detection of SNP TSC0006025
aaattagtagtty

SEQ ID NO: 166410 - DNA, 13 bp, Artificial Sequence
  Oligonucleotide for detection of SNP TSC0006025
raactactaattt

SEQ ID NO: 166411 - DNA, 13 bp, Artificial Sequence
  Oligonucleotide for detection of SNP TSC0006025
aaattaatagtty

SEQ ID NO: 166412 - DNA, 13 bp, Artificial Sequence
  Oligonucleotide for detection of SNP TSC0006025
raactattaattt

SEQ ID NO: 166413 - DNA, 13 bp, Artificial Sequence
  Oligonucleotide for detection of SNP TSC0041681
gaggtagagtgtg

SEQ ID NO: 166414 - DNA, 13 bp, Artificial Sequence
  Oligonucleotide for detection of SNP TSC0041681
cacactctacctc

SEQ ID NO: 166415 - DNA, 13 bp, Artificial Sequence
  Oligonucleotide for detection of SNP TSC0041681
gaggtaaagtgtg

SEQ ID NO: 166416 - DNA, 13 bp, Artificial Sequence
  Oligonucleotide for detection of SNP TSC0041681
cacactttacctc

SEQ ID NO: 166417 - DNA, 13 bp, Artificial Sequence
  Oligonucleotide for detection of SNP TSC0010400
atattttgtttat

SEQ ID NO: 166418 - DNA, 13 bp, Artificial Sequence
  Oligonucleotide for detection of SNP TSC0010400
ataaacaaaatat

SEQ ID NO: 166419 - DNA, 13 bp, Artificial Sequence
  Oligonucleotide for detection of SNP TSC0010400
atatttcgtttat

SEQ ID NO: 166420 - DNA, 13 bp, Artificial Sequence
  Oligonucleotide for detection of SNP TSC0010400
ataaacgaaatat

SEQ ID NO: 166421 - DNA, 13 bp, Artificial Sequence
  Oligonucleotide for detection of SNP TSC0010400
ataagtgaagtgt

SEQ ID NO: 166422 - DNA, 13 bp, Artificial Sequence
  Oligonucleotide for detection of SNP TSC0010400
acacttcacttat

SEQ ID NO: 166423 - DNA, 13 bp, Artificial Sequence
  Oligonucleotide for detection of SNP TSC0010400
ataagtaaagtgt

SEQ ID NO: 166424 - DNA, 13 bp, Artificial Sequence
  Oligonucleotide for detection of SNP TSC0010400
acactttacttat

SEQ ID NO: 166425 - DNA, 13 bp, Artificial Sequence
  Oligonucleotide for detection of SNP TSC0010400
ataagcgaagtgt

SEQ ID NO: 166426 - DNA, 13 bp, Artificial Sequence
  Oligonucleotide for detection of SNP TSC0010400
acacttcgcttat

SEQ ID NO: 166427 - DNA, 13 bp, Artificial Sequence
  Oligonucleotide for detection of SNP TSC0041682
atatttttagtgt

SEQ ID NO: 166428 - DNA, 13 bp, Artificial Sequence
  Oligonucleotide for detection of SNP TSC0041682
acactaaaaatat

SEQ ID NO: 166429 - DNA, 13 bp, Artificial Sequence
  Oligonucleotide for detection of SNP TSC0041682
atatttgtagtgt

SEQ ID NO: 166430 - DNA, 13 bp, Artificial Sequence
  Oligonucleotide for detection of SNP TSC0041682
acactacaaatat

SEQ ID NO: 166431 - DNA, 13 bp, Artificial Sequence
  Oligonucleotide for detection of SNP TSC0041682
atattagaaatgt

SEQ ID NO: 166432 - DNA, 13 bp, Artificial Sequence
  Oligonucleotide for detection of SNP TSC0041682
acatttctaatat

SEQ ID NO: 166433 - DNA, 13 bp, Artificial Sequence
  Oligonucleotide for detection of SNP TSC0041682
atattataaatgt

SEQ ID NO: 166434 - DNA, 13 bp, Artificial Sequence
  Oligonucleotide for detection of SNP TSC0041682
acatttataatat

SEQ ID NO: 166435 - DNA, 13 bp, Artificial Sequence
  Oligonucleotide for detection of SNP TSC0041683
tattatatattay

SEQ ID NO: 166436 - DNA, 13 bp, Artificial Sequence
  Oligonucleotide for detection of SNP TSC0041683
rtaatatataata

SEQ ID NO: 166437 - DNA, 13 bp, Artificial Sequence
  Oligonucleotide for detection of SNP TSC0041683
tattatttattay

SEQ ID NO: 166438 - DNA, 13 bp, Artificial Sequence
  Oligonucleotide for detection of SNP TSC0041683
rtaataaataata

SEQ ID NO: 166439 - DNA, 13 bp, Artificial Sequence
  Oligonucleotide for detection of SNP TSC0041683
gtgatatataata

SEQ ID NO: 166440 - DNA, 13 bp, Artificial Sequence
  Oligonucleotide for detection of SNP TSC0041683
tattatatatcac

SEQ ID NO: 166441 - DNA, 13 bp, Artificial Sequence
  Oligonucleotide for detection of SNP TSC0041683
gtgatagataata

SEQ ID NO: 166442 - DNA, 13 bp, Artificial Sequence
  Oligonucleotide for detection of SNP TSC0041683
tattatctatcac

SEQ ID NO: 166443 - DNA, 13 bp, Artificial Sequence
  Oligonucleotide for detection of SNP TSC0041685
atgttaaagtatt

SEQ ID NO: 166444 - DNA, 13 bp, Artificial Sequence
  Oligonucleotide for detection of SNP TSC0041685
aatactttaacat

SEQ ID NO: 166445 - DNA, 13 bp, Artificial Sequence
  Oligonucleotide for detection of SNP TSC0041685
atgttagagtatt

SEQ ID NO: 166446 - DNA, 13 bp, Artificial Sequence
  Oligonucleotide for detection of SNP TSC0041685
aatactctaacat

SEQ ID NO: 166447 - DNA, 13 bp, Artificial Sequence
  Oligonucleotide for detection of SNP TSC0041686
ttgggtatgttta

SEQ ID NO: 166448 - DNA, 13 bp, Artificial Sequence
  Oligonucleotide for detection of SNP TSC0041686
taaacatacccaa

SEQ ID NO: 166449 - DNA, 13 bp, Artificial Sequence
  Oligonucleotide for detection of SNP TSC0041686
ttgggtttgttta

SEQ ID NO: 166450 - DNA, 13 bp, Artificial Sequence
  Oligonucleotide for detection of SNP TSC0041686
taaacaaacccaa

SEQ ID NO: 166451 - DNA, 13 bp, Artificial Sequence
  Oligonucleotide for detection of SNP TSC0041686
tagatatatttag

SEQ ID NO: 166452 - DNA, 13 bp, Artificial Sequence
  Oligonucleotide for detection of SNP TSC0041686
ctaaatatatcta

SEQ ID NO: 166453 - DNA, 13 bp, Artificial Sequence
  Oligonucleotide for detection of SNP TSC0041686
tagatagatttag

SEQ ID NO: 166454 - DNA, 13 bp, Artificial Sequence
  Oligonucleotide for detection of SNP TSC0041686
ctaaatctatcta

SEQ ID NO: 166455 - DNA, 13 bp, Artificial Sequence
  Oligonucleotide for detection of SNP TSC0041687
ttgtttataagta

SEQ ID NO: 166456 - DNA, 13 bp, Artificial Sequence
  Oligonucleotide for detection of SNP TSC0041687
tacttataaacaa

SEQ ID NO: 166457 - DNA, 13 bp, Artificial Sequence
  Oligonucleotide for detection of SNP TSC0041687
ttgtttgtaagta

SEQ ID NO: 166458 - DNA, 13 bp, Artificial Sequence
  Oligonucleotide for detection of SNP TSC0041687
tacttacaaacaa

SEQ ID NO: 166459 - DNA, 13 bp, Artificial Sequence
  Oligonucleotide for detection of SNP TSC0041688
gggtttagagtga

SEQ ID NO: 166460 - DNA, 13 bp, Artificial Sequence
  Oligonucleotide for detection of SNP TSC0041688
tcactctaaaccc

SEQ ID NO: 166461 - DNA, 13 bp, Artificial Sequence
  Oligonucleotide for detection of SNP TSC0041688
gggtttggagtga

SEQ ID NO: 166462 - DNA, 13 bp, Artificial Sequence
  Oligonucleotide for detection of SNP TSC0041688
tcactccaaaccc

SEQ ID NO: 166463 - DNA, 13 bp, Artificial Sequence
  Oligonucleotide for detection of SNP TSC0041689
tgtattataaggg

SEQ ID NO: 166464 - DNA, 13 bp, Artificial Sequence
  Oligonucleotide for detection of SNP TSC0041689
cccttataataca

SEQ ID NO: 166465 - DNA, 13 bp, Artificial Sequence
  Oligonucleotide for detection of SNP TSC0041689
tgtattgtaaggg

SEQ ID NO: 166466 - DNA, 13 bp, Artificial Sequence
  Oligonucleotide for detection of SNP TSC0041689
cccttacaataca

SEQ ID NO: 166467 - DNA, 13 bp, Artificial Sequence
  Oligonucleotide for detection of SNP TSC0041690
tgaattgttagaa

SEQ ID NO: 166468 - DNA, 13 bp, Artificial Sequence
  Oligonucleotide for detection of SNP TSC0041690
ttctaacaattca

SEQ ID NO: 166469 - DNA, 13 bp, Artificial Sequence
  Oligonucleotide for detection of SNP TSC0041690
tgaattattagaa

SEQ ID NO: 166470 - DNA, 13 bp, Artificial Sequence
  Oligonucleotide for detection of SNP TSC0041690
ttctaataattca

SEQ ID NO: 166471 - DNA, 13 bp, Artificial Sequence
  Oligonucleotide for detection of SNP TSC0041691
aatgaaatttagt

SEQ ID NO: 166472 - DNA, 13 bp, Artificial Sequence
  Oligonucleotide for detection of SNP TSC0041691
actaaatttcatt

SEQ ID NO: 166473 - DNA, 13 bp, Artificial Sequence
  Oligonucleotide for detection of SNP TSC0041691
aatgaagtttagt

SEQ ID NO: 166474 - DNA, 13 bp, Artificial Sequence
  Oligonucleotide for detection of SNP TSC0041691
actaaacttcatt

SEQ ID NO: 166475 - DNA, 13 bp, Artificial Sequence
  Oligonucleotide for detection of SNP TSC0041692
tatagtatatttt

SEQ ID NO: 166476 - DNA, 13 bp, Artificial Sequence
  Oligonucleotide for detection of SNP TSC0041692
aaaatatactata

SEQ ID NO: 166477 - DNA, 13 bp, Artificial Sequence
  Oligonucleotide for detection of SNP TSC0041692
tatagtgtatttt

SEQ ID NO: 166478 - DNA, 13 bp, Artificial Sequence
  Oligonucleotide for detection of SNP TSC0041692
aaaatacactata

SEQ ID NO: 166479 - DNA, 13 bp, Artificial Sequence
  Oligonucleotide for detection of SNP TSC0041693
tttataattgaat

SEQ ID NO: 166480 - DNA, 13 bp, Artificial Sequence
  Oligonucleotide for detection of SNP TSC0041693
attcaattataaa

SEQ ID NO: 166481 - DNA, 13 bp, Artificial Sequence
  Oligonucleotide for detection of SNP TSC0041693
tttatatttgaat

SEQ ID NO: 166482 - DNA, 13 bp, Artificial Sequence
  Oligonucleotide for detection of SNP TSC0041693
attcaaatataaa

SEQ ID NO: 166483 - DNA, 13 bp, Artificial Sequence
  Oligonucleotide for detection of SNP TSC0041693
atttaattatgaa

SEQ ID NO: 166484 - DNA, 13 bp, Artificial Sequence
  Oligonucleotide for detection of SNP TSC0041693
ttcataattaaat

SEQ ID NO: 166485 - DNA, 13 bp, Artificial Sequence
  Oligonucleotide for detection of SNP TSC0041693
atttaagtatgaa

SEQ ID NO: 166486 - DNA, 13 bp, Artificial Sequence
  Oligonucleotide for detection of SNP TSC0041693
ttcatacttaaat

SEQ ID NO: 166487 - DNA, 13 bp, Artificial Sequence
  Oligonucleotide for detection of SNP TSC0041695
aagtaaatttttt

SEQ ID NO: 166488 - DNA, 13 bp, Artificial Sequence
  Oligonucleotide for detection of SNP TSC0041695
aaaaaatttactt

SEQ ID NO: 166489 - DNA, 13 bp, Artificial Sequence
  Oligonucleotide for detection of SNP TSC0041695
aagtaagtttttt

SEQ ID NO: 166490 - DNA, 13 bp, Artificial Sequence
  Oligonucleotide for detection of SNP TSC0041695
aaaaaacttactt

SEQ ID NO: 166491 - DNA, 13 bp, Artificial Sequence
  Oligonucleotide for detection of SNP TSC0041699
ttttttatattgt

SEQ ID NO: 166492 - DNA, 13 bp, Artificial Sequence
  Oligonucleotide for detection of SNP TSC0041699
acaatataaaaaa

SEQ ID NO: 166493 - DNA, 13 bp, Artificial Sequence
  Oligonucleotide for detection of SNP TSC0041699
ttttttgtattgt

SEQ ID NO: 166494 - DNA, 13 bp, Artificial Sequence
  Oligonucleotide for detection of SNP TSC0041699
acaatacaaaaaa

SEQ ID NO: 166495 - DNA, 13 bp, Artificial Sequence
  Oligonucleotide for detection of SNP TSC0041699
tttttcgtattgt

SEQ ID NO: 166496 - DNA, 13 bp, Artificial Sequence
  Oligonucleotide for detection of SNP TSC0041699
acaatacgaaaaa

SEQ ID NO: 166497 - DNA, 13 bp, Artificial Sequence
  Oligonucleotide for detection of SNP TSC0041699
atagtatggaaga

SEQ ID NO: 166498 - DNA, 13 bp, Artificial Sequence
  Oligonucleotide for detection of SNP TSC0041699
tcttccatactat

SEQ ID NO: 166499 - DNA, 13 bp, Artificial Sequence
  Oligonucleotide for detection of SNP TSC0041699
atagtacggaaga

SEQ ID NO: 166500 - DNA, 13 bp, Artificial Sequence
  Oligonucleotide for detection of SNP TSC0041699
tcttccgtactat

SEQ ID NO: 166501 - DNA, 13 bp, Artificial Sequence
  Oligonucleotide for detection of SNP TSC0041700
tttatatagtaty

SEQ ID NO: 166502 - DNA, 13 bp, Artificial Sequence
  Oligonucleotide for detection of SNP TSC0041700
ratactatataaa

SEQ ID NO: 166503 - DNA, 13 bp, Artificial Sequence
  Oligonucleotide for detection of SNP TSC0041700
tttatagagtaty

SEQ ID NO: 166504 - DNA, 13 bp, Artificial Sequence
  Oligonucleotide for detection of SNP TSC0041700
ratactctataaa

SEQ ID NO: 166505 - DNA, 13 bp, Artificial Sequence
  Oligonucleotide for detection of SNP TSC0041700
gatattatatgga

SEQ ID NO: 166506 - DNA, 13 bp, Artificial Sequence
  Oligonucleotide for detection of SNP TSC0041700
tccatataatatc

SEQ ID NO: 166507 - DNA, 13 bp, Artificial Sequence
  Oligonucleotide for detection of SNP TSC0041700
gatattttatgga

SEQ ID NO: 166508 - DNA, 13 bp, Artificial Sequence
  Oligonucleotide for detection of SNP TSC0041700
tccataaaatatc

SEQ ID NO: 166509 - DNA, 13 bp, Artificial Sequence
  Oligonucleotide for detection of SNP TSC0041705
gatgttaatggty

SEQ ID NO: 166510 - DNA, 13 bp, Artificial Sequence
  Oligonucleotide for detection of SNP TSC0041705
raccattaacatc

SEQ ID NO: 166511 - DNA, 13 bp, Artificial Sequence
  Oligonucleotide for detection of SNP TSC0041705
gatgttgatggty

SEQ ID NO: 166512 - DNA, 13 bp, Artificial Sequence
  Oligonucleotide for detection of SNP TSC0041705
raccatcaacatc

SEQ ID NO: 166513 - DNA, 13 bp, Artificial Sequence
  Oligonucleotide for detection of SNP TSC0041706
aagtaaaaaatta

SEQ ID NO: 166514 - DNA, 13 bp, Artificial Sequence
  Oligonucleotide for detection of SNP TSC0041706
taattttttactt

SEQ ID NO: 166515 - DNA, 13 bp, Artificial Sequence
  Oligonucleotide for detection of SNP TSC0041706
aagtaagaaatta

SEQ ID NO: 166516 - DNA, 13 bp, Artificial Sequence
  Oligonucleotide for detection of SNP TSC0041706
taatttcttactt

SEQ ID NO: 166517 - DNA, 13 bp, Artificial Sequence
  Oligonucleotide for detection of SNP TSC0041708
ggtattgttttat

SEQ ID NO: 166518 - DNA, 13 bp, Artificial Sequence
  Oligonucleotide for detection of SNP TSC0041708
ataaaacaatacc

SEQ ID NO: 166519 - DNA, 13 bp, Artificial Sequence
  Oligonucleotide for detection of SNP TSC0041708
ggtattattttat

SEQ ID NO: 166520 - DNA, 13 bp, Artificial Sequence
  Oligonucleotide for detection of SNP TSC0041708
ataaaataatacc

SEQ ID NO: 166521 - DNA, 13 bp, Artificial Sequence
  Oligonucleotide for detection of SNP TSC0041712
gattagagttaty

SEQ ID NO: 166522 - DNA, 13 bp, Artificial Sequence
  Oligonucleotide for detection of SNP TSC0041712
rataactctaatc

SEQ ID NO: 166523 - DNA, 13 bp, Artificial Sequence
  Oligonucleotide for detection of SNP TSC0041712
gattagtgttaty

SEQ ID NO: 166524 - DNA, 13 bp, Artificial Sequence
  Oligonucleotide for detection of SNP TSC0041712
rataacactaatc

SEQ ID NO: 166525 - DNA, 13 bp, Artificial Sequence
  Oligonucleotide for detection of SNP TSC0041712
gattagcgttaty

SEQ ID NO: 166526 - DNA, 13 bp, Artificial Sequence
  Oligonucleotide for detection of SNP TSC0041712
rataacgctaatc

SEQ ID NO: 166527 - DNA, 13 bp, Artificial Sequence
  Oligonucleotide for detection of SNP TSC0041712
ggtaattttgaty

SEQ ID NO: 166528 - DNA, 13 bp, Artificial Sequence
  Oligonucleotide for detection of SNP TSC0041712
ratcaaaattacc

SEQ ID NO: 166529 - DNA, 13 bp, Artificial Sequence
  Oligonucleotide for detection of SNP TSC0041712
ggtaatgttgaty

SEQ ID NO: 166530 - DNA, 13 bp, Artificial Sequence
  Oligonucleotide for detection of SNP TSC0041712
ratcaacattacc

SEQ ID NO: 166531 - DNA, 13 bp, Artificial Sequence
  Oligonucleotide for detection of SNP TSC0041712
ggtaacgttgaty

SEQ ID NO: 166532 - DNA, 13 bp, Artificial Sequence
  Oligonucleotide for detection of SNP TSC0041712
ratcaacgttacc

SEQ ID NO: 166533 - DNA, 13 bp, Artificial Sequence
  Oligonucleotide for detection of SNP TSC0041713
tttgggtgttaty

SEQ ID NO: 166534 - DNA, 13 bp, Artificial Sequence
  Oligonucleotide for detection of SNP TSC0041713
rataacacccaaa

SEQ ID NO: 166535 - DNA, 13 bp, Artificial Sequence
  Oligonucleotide for detection of SNP TSC0041713
tttgggggttaty

SEQ ID NO: 166536 - DNA, 13 bp, Artificial Sequence
  Oligonucleotide for detection of SNP TSC0041713
rataacccccaaa

SEQ ID NO: 166537 - DNA, 13 bp, Artificial Sequence
  Oligonucleotide for detection of SNP TSC0041713
gatagtatttaga

SEQ ID NO: 166538 - DNA, 13 bp, Artificial Sequence
  Oligonucleotide for detection of SNP TSC0041713
tctaaatactatc

SEQ ID NO: 166539 - DNA, 13 bp, Artificial Sequence
  Oligonucleotide for detection of SNP TSC0041713
gatagtttttaga

SEQ ID NO: 166540 - DNA, 13 bp, Artificial Sequence
  Oligonucleotide for detection of SNP TSC0041713
tctaaaaactatc

SEQ ID NO: 166541 - DNA, 13 bp, Artificial Sequence
  Oligonucleotide for detection of SNP TSC0041714
tgatttagttgag

SEQ ID NO: 166542 - DNA, 13 bp, Artificial Sequence
  Oligonucleotide for detection of SNP TSC0041714
ctcaactaaatca

SEQ ID NO: 166543 - DNA, 13 bp, Artificial Sequence
  Oligonucleotide for detection of SNP TSC0041714
tgatttggttgag

SEQ ID NO: 166544 - DNA, 13 bp, Artificial Sequence
  Oligonucleotide for detection of SNP TSC0041714
ctcaaccaaatca

SEQ ID NO: 166545 - DNA, 13 bp, Artificial Sequence
  Oligonucleotide for detection of SNP TSC0041714
tgattcggttgag

SEQ ID NO: 166546 - DNA, 13 bp, Artificial Sequence
  Oligonucleotide for detection of SNP TSC0041714
ctcaaccgaatca

SEQ ID NO: 166547 - DNA, 13 bp, Artificial Sequence
  Oligonucleotide for detection of SNP TSC0041714
tttagttgggtta

SEQ ID NO: 166548 - DNA, 13 bp, Artificial Sequence
  Oligonucleotide for detection of SNP TSC0041714
taacccaactaaa

SEQ ID NO: 166549 - DNA, 13 bp, Artificial Sequence
  Oligonucleotide for detection of SNP TSC0041714
tttagtcgggtta

SEQ ID NO: 166550 - DNA, 13 bp, Artificial Sequence
  Oligonucleotide for detection of SNP TSC0041714
taacccgactaaa

SEQ ID NO: 166551 - DNA, 13 bp, Artificial Sequence
  Oligonucleotide for detection of SNP TSC0041716
ttattaatgtttt

SEQ ID NO: 166552 - DNA, 13 bp, Artificial Sequence
  Oligonucleotide for detection of SNP TSC0041716
aaaacattaataa

SEQ ID NO: 166553 - DNA, 13 bp, Artificial Sequence
  Oligonucleotide for detection of SNP TSC0041716
ttattagtgtttt

SEQ ID NO: 166554 - DNA, 13 bp, Artificial Sequence
  Oligonucleotide for detection of SNP TSC0041716
aaaacactaataa

SEQ ID NO: 166555 - DNA, 13 bp, Artificial Sequence
  Oligonucleotide for detection of SNP TSC0041717
agagtaaataaay

SEQ ID NO: 166556 - DNA, 13 bp, Artificial Sequence
  Oligonucleotide for detection of SNP TSC0041717
rtttatttactct

SEQ ID NO: 166557 - DNA, 13 bp, Artificial Sequence
  Oligonucleotide for detection of SNP TSC0041717
agagtagataaay

SEQ ID NO: 166558 - DNA, 13 bp, Artificial Sequence
  Oligonucleotide for detection of SNP TSC0041717
rtttatctactct

SEQ ID NO: 166559 - DNA, 13 bp, Artificial Sequence
  Oligonucleotide for detection of SNP TSC0041718
attgataaagttg

SEQ ID NO: 166560 - DNA, 13 bp, Artificial Sequence
  Oligonucleotide for detection of SNP TSC0041718
caactttatcaat

SEQ ID NO: 166561 - DNA, 13 bp, Artificial Sequence
  Oligonucleotide for detection of SNP TSC0041718
attgatgaagttg

SEQ ID NO: 166562 - DNA, 13 bp, Artificial Sequence
  Oligonucleotide for detection of SNP TSC0041718
caacttcatcaat

SEQ ID NO: 166563 - DNA, 13 bp, Artificial Sequence
  Oligonucleotide for detection of SNP TSC0041718
atcgataaagttg

SEQ ID NO: 166564 - DNA, 13 bp, Artificial Sequence
  Oligonucleotide for detection of SNP TSC0041718
caactttatcgat

SEQ ID NO: 166565 - DNA, 13 bp, Artificial Sequence
  Oligonucleotide for detection of SNP TSC0041718
atcgatgaagttg

SEQ ID NO: 166566 - DNA, 13 bp, Artificial Sequence
  Oligonucleotide for detection of SNP TSC0041718
caacttcatcgat

SEQ ID NO: 166567 - DNA, 13 bp, Artificial Sequence
  Oligonucleotide for detection of SNP TSC0041718
attgacgaagttg

SEQ ID NO: 166568 - DNA, 13 bp, Artificial Sequence
  Oligonucleotide for detection of SNP TSC0041718
caacttcgtcaat

SEQ ID NO: 166569 - DNA, 13 bp, Artificial Sequence
  Oligonucleotide for detection of SNP TSC0041718
atcgacgaagttg

SEQ ID NO: 166570 - DNA, 13 bp, Artificial Sequence
  Oligonucleotide for detection of SNP TSC0041718
caacttcgtcgat

SEQ ID NO: 166571 - DNA, 13 bp, Artificial Sequence
  Oligonucleotide for detection of SNP TSC0041718
tagttttgttggt

SEQ ID NO: 166572 - DNA, 13 bp, Artificial Sequence
  Oligonucleotide for detection of SNP TSC0041718
accaacaaaacta

SEQ ID NO: 166573 - DNA, 13 bp, Artificial Sequence
  Oligonucleotide for detection of SNP TSC0041718
tagttttgtcggt

SEQ ID NO: 166574 - DNA, 13 bp, Artificial Sequence
  Oligonucleotide for detection of SNP TSC0041718
accgacaaaacta

SEQ ID NO: 166575 - DNA, 13 bp, Artificial Sequence
  Oligonucleotide for detection of SNP TSC0041718
tagtttcgttggt

SEQ ID NO: 166576 - DNA, 13 bp, Artificial Sequence
  Oligonucleotide for detection of SNP TSC0041718
accaacgaaacta

SEQ ID NO: 166577 - DNA, 13 bp, Artificial Sequence
  Oligonucleotide for detection of SNP TSC0041718
tagtttcgtcggt

SEQ ID NO: 166578 - DNA, 13 bp, Artificial Sequence
  Oligonucleotide for detection of SNP TSC0041718
accgacgaaacta

SEQ ID NO: 166579 - DNA, 13 bp, Artificial Sequence
  Oligonucleotide for detection of SNP TSC0041720
atattaaaaagta

SEQ ID NO: 166580 - DNA, 13 bp, Artificial Sequence
  Oligonucleotide for detection of SNP TSC0041720
tactttttaatat

SEQ ID NO: 166581 - DNA, 13 bp, Artificial Sequence
  Oligonucleotide for detection of SNP TSC0041720
atattagaaagta

SEQ ID NO: 166582 - DNA, 13 bp, Artificial Sequence
  Oligonucleotide for detection of SNP TSC0041720
tactttctaatat

SEQ ID NO: 166583 - DNA, 13 bp, Artificial Sequence
  Oligonucleotide for detection of SNP TSC0006148
tttggagtggtgt

SEQ ID NO: 166584 - DNA, 13 bp, Artificial Sequence
  Oligonucleotide for detection of SNP TSC0006148
acaccactccaaa

SEQ ID NO: 166585 - DNA, 13 bp, Artificial Sequence
  Oligonucleotide for detection of SNP TSC0006148
tttggaatggtgt

SEQ ID NO: 166586 - DNA, 13 bp, Artificial Sequence
  Oligonucleotide for detection of SNP TSC0006148
acaccattccaaa

SEQ ID NO: 166587 - DNA, 13 bp, Artificial Sequence
  Oligonucleotide for detection of SNP TSC0041721
gattgtaagaaat

SEQ ID NO: 166588 - DNA, 13 bp, Artificial Sequence
  Oligonucleotide for detection of SNP TSC0041721
atttcttacaatc

SEQ ID NO: 166589 - DNA, 13 bp, Artificial Sequence
  Oligonucleotide for detection of SNP TSC0041721
gattgtgagaaat

SEQ ID NO: 166590 - DNA, 13 bp, Artificial Sequence
  Oligonucleotide for detection of SNP TSC0041721
atttctcacaatc

SEQ ID NO: 166591 - DNA, 13 bp, Artificial Sequence
  Oligonucleotide for detection of SNP TSC0041721
gattgcgagaaat

SEQ ID NO: 166592 - DNA, 13 bp, Artificial Sequence
  Oligonucleotide for detection of SNP TSC0041721
atttctcgcaatc

SEQ ID NO: 166593 - DNA, 13 bp, Artificial Sequence
  Oligonucleotide for detection of SNP TSC0041721
attttttgtagty

SEQ ID NO: 166594 - DNA, 13 bp, Artificial Sequence
  Oligonucleotide for detection of SNP TSC0041721
ractacaaaaaat

SEQ ID NO: 166595 - DNA, 13 bp, Artificial Sequence
  Oligonucleotide for detection of SNP TSC0041721
atttttcgtagty

SEQ ID NO: 166596 - DNA, 13 bp, Artificial Sequence
  Oligonucleotide for detection of SNP TSC0041721
ractacgaaaaat

SEQ ID NO: 166597 - DNA, 13 bp, Artificial Sequence
  Oligonucleotide for detection of SNP TSC0041722
gaaatattaattg

SEQ ID NO: 166598 - DNA, 13 bp, Artificial Sequence
  Oligonucleotide for detection of SNP TSC0041722
caattaatatttc

SEQ ID NO: 166599 - DNA, 13 bp, Artificial Sequence
  Oligonucleotide for detection of SNP TSC0041722
gaaatagtaattg

SEQ ID NO: 166600 - DNA, 13 bp, Artificial Sequence
  Oligonucleotide for detection of SNP TSC0041722
caattactatttc

SEQ ID NO: 166601 - DNA, 13 bp, Artificial Sequence
  Oligonucleotide for detection of SNP TSC0041722
tagttaatgttty

SEQ ID NO: 166602 - DNA, 13 bp, Artificial Sequence
  Oligonucleotide for detection of SNP TSC0041722
raaacattaacta

SEQ ID NO: 166603 - DNA, 13 bp, Artificial Sequence
  Oligonucleotide for detection of SNP TSC0041722
tagttattgttty

SEQ ID NO: 166604 - DNA, 13 bp, Artificial Sequence
  Oligonucleotide for detection of SNP TSC0041722
raaacaataacta

SEQ ID NO: 166605 - DNA, 13 bp, Artificial Sequence
  Oligonucleotide for detection of SNP TSC0041723
tatgttttttgga

SEQ ID NO: 166606 - DNA, 13 bp, Artificial Sequence
  Oligonucleotide for detection of SNP TSC0041723
tccaaaaaacata

SEQ ID NO: 166607 - DNA, 13 bp, Artificial Sequence
  Oligonucleotide for detection of SNP TSC0041723
tatgttgtttgga

SEQ ID NO: 166608 - DNA, 13 bp, Artificial Sequence
  Oligonucleotide for detection of SNP TSC0041723
tccaaacaacata

SEQ ID NO: 166609 - DNA, 13 bp, Artificial Sequence
  Oligonucleotide for detection of SNP TSC0041723
tatgtcgtttgga

SEQ ID NO: 166610 - DNA, 13 bp, Artificial Sequence
  Oligonucleotide for detection of SNP TSC0041723
tccaaacgacata

SEQ ID NO: 166611 - DNA, 13 bp, Artificial Sequence
  Oligonucleotide for detection of SNP TSC0041723
tttaggagatatg

SEQ ID NO: 166612 - DNA, 13 bp, Artificial Sequence
  Oligonucleotide for detection of SNP TSC0041723
catatctcctaaa

SEQ ID NO: 166613 - DNA, 13 bp, Artificial Sequence
  Oligonucleotide for detection of SNP TSC0041723
tttaggtgatatg

SEQ ID NO: 166614 - DNA, 13 bp, Artificial Sequence
  Oligonucleotide for detection of SNP TSC0041723
catatcacctaaa

SEQ ID NO: 166615 - DNA, 13 bp, Artificial Sequence
  Oligonucleotide for detection of SNP TSC0041723
tttaggcgatatg

SEQ ID NO: 166616 - DNA, 13 bp, Artificial Sequence
  Oligonucleotide for detection of SNP TSC0041723
catatcgcctaaa

SEQ ID NO: 166617 - DNA, 13 bp, Artificial Sequence
  Oligonucleotide for detection of SNP TSC0041724
taattttttttty

SEQ ID NO: 166618 - DNA, 13 bp, Artificial Sequence
  Oligonucleotide for detection of SNP TSC0041724
raaaaaaaaatta

SEQ ID NO: 166619 - DNA, 13 bp, Artificial Sequence
  Oligonucleotide for detection of SNP TSC0041724
gggagagaagttg

SEQ ID NO: 166620 - DNA, 13 bp, Artificial Sequence
  Oligonucleotide for detection of SNP TSC0041724
caacttctctccc

SEQ ID NO: 166621 - DNA, 13 bp, Artificial Sequence
  Oligonucleotide for detection of SNP TSC0041724
gggagataagttg

SEQ ID NO: 166622 - DNA, 13 bp, Artificial Sequence
  Oligonucleotide for detection of SNP TSC0041724
caacttatctccc

SEQ ID NO: 166623 - DNA, 13 bp, Artificial Sequence
  Oligonucleotide for detection of SNP TSC0041729
atgtatttatata

SEQ ID NO: 166624 - DNA, 13 bp, Artificial Sequence
  Oligonucleotide for detection of SNP TSC0041729
tatataaatacat

SEQ ID NO: 166625 - DNA, 13 bp, Artificial Sequence
  Oligonucleotide for detection of SNP TSC0041734
ttaaaagaagggt

SEQ ID NO: 166626 - DNA, 13 bp, Artificial Sequence
  Oligonucleotide for detection of SNP TSC0041734
acccttcttttaa

SEQ ID NO: 166627 - DNA, 13 bp, Artificial Sequence
  Oligonucleotide for detection of SNP TSC0041734
ttaaaaaaagggt

SEQ ID NO: 166628 - DNA, 13 bp, Artificial Sequence
  Oligonucleotide for detection of SNP TSC0041734
accctttttttaa

SEQ ID NO: 166629 - DNA, 13 bp, Artificial Sequence
  Oligonucleotide for detection of SNP TSC0041735
gagtattttagaa

SEQ ID NO: 166630 - DNA, 13 bp, Artificial Sequence
  Oligonucleotide for detection of SNP TSC0041735
ttctaaaatactc

SEQ ID NO: 166631 - DNA, 13 bp, Artificial Sequence
  Oligonucleotide for detection of SNP TSC0041735
gagtatgttagaa

SEQ ID NO: 166632 - DNA, 13 bp, Artificial Sequence
  Oligonucleotide for detection of SNP TSC0041735
ttctaacatactc

SEQ ID NO: 166633 - DNA, 13 bp, Artificial Sequence
  Oligonucleotide for detection of SNP TSC0041735
ttttgagatgtty

SEQ ID NO: 166634 - DNA, 13 bp, Artificial Sequence
  Oligonucleotide for detection of SNP TSC0041735
raacatctcaaaa

SEQ ID NO: 166635 - DNA, 13 bp, Artificial Sequence
  Oligonucleotide for detection of SNP TSC0041735
ttttgatatgtty

SEQ ID NO: 166636 - DNA, 13 bp, Artificial Sequence
  Oligonucleotide for detection of SNP TSC0041735
raacatatcaaaa

SEQ ID NO: 166637 - DNA, 13 bp, Artificial Sequence
  Oligonucleotide for detection of SNP TSC0041738
gtaattttaagtg

SEQ ID NO: 166638 - DNA, 13 bp, Artificial Sequence
  Oligonucleotide for detection of SNP TSC0041738
cacttaaaattac

SEQ ID NO: 166639 - DNA, 13 bp, Artificial Sequence
  Oligonucleotide for detection of SNP TSC0041738
gtaattgtaagtg

SEQ ID NO: 166640 - DNA, 13 bp, Artificial Sequence
  Oligonucleotide for detection of SNP TSC0041738
cacttacaattac

SEQ ID NO: 166641 - DNA, 13 bp, Artificial Sequence
  Oligonucleotide for detection of SNP TSC0041738
tatttgaaattay

SEQ ID NO: 166642 - DNA, 13 bp, Artificial Sequence
  Oligonucleotide for detection of SNP TSC0041738
rtaatttcaaata

SEQ ID NO: 166643 - DNA, 13 bp, Artificial Sequence
  Oligonucleotide for detection of SNP TSC0041738
tatttgtaattay

SEQ ID NO: 166644 - DNA, 13 bp, Artificial Sequence
  Oligonucleotide for detection of SNP TSC0041738
rtaattacaaata

SEQ ID NO: 166645 - DNA, 13 bp, Artificial Sequence
  Oligonucleotide for detection of SNP TSC0041739
ttgtggaagaata

SEQ ID NO: 166646 - DNA, 13 bp, Artificial Sequence
  Oligonucleotide for detection of SNP TSC0041739
tattcttccacaa

SEQ ID NO: 166647 - DNA, 13 bp, Artificial Sequence
  Oligonucleotide for detection of SNP TSC0041739
ttgtggtagaata

SEQ ID NO: 166648 - DNA, 13 bp, Artificial Sequence
  Oligonucleotide for detection of SNP TSC0041739
tattctaccacaa

SEQ ID NO: 166649 - DNA, 13 bp, Artificial Sequence
  Oligonucleotide for detection of SNP TSC0041740
ttagggagaagat

SEQ ID NO: 166650 - DNA, 13 bp, Artificial Sequence
  Oligonucleotide for detection of SNP TSC0041740
atcttctccctaa

SEQ ID NO: 166651 - DNA, 13 bp, Artificial Sequence
  Oligonucleotide for detection of SNP TSC0041740
ttagggtgaagat

SEQ ID NO: 166652 - DNA, 13 bp, Artificial Sequence
  Oligonucleotide for detection of SNP TSC0041740
atcttcaccctaa

SEQ ID NO: 166653 - DNA, 13 bp, Artificial Sequence
  Oligonucleotide for detection of SNP TSC0041740
attttttttttga

SEQ ID NO: 166654 - DNA, 13 bp, Artificial Sequence
  Oligonucleotide for detection of SNP TSC0041740
tcaaaaaaaaaat

SEQ ID NO: 166655 - DNA, 13 bp, Artificial Sequence
  Oligonucleotide for detection of SNP TSC0041741
attgtgatagaat

SEQ ID NO: 166656 - DNA, 13 bp, Artificial Sequence
  Oligonucleotide for detection of SNP TSC0041741
attctatcacaat

SEQ ID NO: 166657 - DNA, 13 bp, Artificial Sequence
  Oligonucleotide for detection of SNP TSC0041741
attgtggtagaat

SEQ ID NO: 166658 - DNA, 13 bp, Artificial Sequence
  Oligonucleotide for detection of SNP TSC0041741
attctaccacaat

SEQ ID NO: 166659 - DNA, 13 bp, Artificial Sequence
  Oligonucleotide for detection of SNP TSC0041742
tatagagaaagaa

SEQ ID NO: 166660 - DNA, 13 bp, Artificial Sequence
  Oligonucleotide for detection of SNP TSC0041742
ttctttctctata

SEQ ID NO: 166661 - DNA, 13 bp, Artificial Sequence
  Oligonucleotide for detection of SNP TSC0041742
tatagaaaaagaa

SEQ ID NO: 166662 - DNA, 13 bp, Artificial Sequence
  Oligonucleotide for detection of SNP TSC0041742
ttctttttctata

SEQ ID NO: 166663 - DNA, 13 bp, Artificial Sequence
  Oligonucleotide for detection of SNP TSC0041743
gttaggggtttgt

SEQ ID NO: 166664 - DNA, 13 bp, Artificial Sequence
  Oligonucleotide for detection of SNP TSC0041743
acaaacccctaac

SEQ ID NO: 166665 - DNA, 13 bp, Artificial Sequence
  Oligonucleotide for detection of SNP TSC0041743
gttaggagtttgt

SEQ ID NO: 166666 - DNA, 13 bp, Artificial Sequence
  Oligonucleotide for detection of SNP TSC0041743
acaaactcctaac

SEQ ID NO: 166667 - DNA, 13 bp, Artificial Sequence
  Oligonucleotide for detection of SNP TSC0041743
gttaggggttcgt

SEQ ID NO: 166668 - DNA, 13 bp, Artificial Sequence
  Oligonucleotide for detection of SNP TSC0041743
acgaacccctaac

SEQ ID NO: 166669 - DNA, 13 bp, Artificial Sequence
  Oligonucleotide for detection of SNP TSC0041743
gttaggagttcgt

SEQ ID NO: 166670 - DNA, 13 bp, Artificial Sequence
  Oligonucleotide for detection of SNP TSC0041743
acgaactcctaac

SEQ ID NO: 166671 - DNA, 13 bp, Artificial Sequence
  Oligonucleotide for detection of SNP TSC0041744
tattttgatgtty

SEQ ID NO: 166672 - DNA, 13 bp, Artificial Sequence
  Oligonucleotide for detection of SNP TSC0041744
raacatcaaaata

SEQ ID NO: 166673 - DNA, 13 bp, Artificial Sequence
  Oligonucleotide for detection of SNP TSC0041744
tatttcgatgtty

SEQ ID NO: 166674 - DNA, 13 bp, Artificial Sequence
  Oligonucleotide for detection of SNP TSC0041744
raacatcgaaata

SEQ ID NO: 166675 - DNA, 13 bp, Artificial Sequence
  Oligonucleotide for detection of SNP TSC0041744
gggtattgggata

SEQ ID NO: 166676 - DNA, 13 bp, Artificial Sequence
  Oligonucleotide for detection of SNP TSC0041744
tatcccaataccc

SEQ ID NO: 166677 - DNA, 13 bp, Artificial Sequence
  Oligonucleotide for detection of SNP TSC0041744
gggtatcgggata

SEQ ID NO: 166678 - DNA, 13 bp, Artificial Sequence
  Oligonucleotide for detection of SNP TSC0041744
tatcccgataccc

SEQ ID NO: 166679 - DNA, 13 bp, Artificial Sequence
  Oligonucleotide for detection of SNP TSC0041745
attatattgttaa

SEQ ID NO: 166680 - DNA, 13 bp, Artificial Sequence
  Oligonucleotide for detection of SNP TSC0041745
ttaacaatataat

SEQ ID NO: 166681 - DNA, 13 bp, Artificial Sequence
  Oligonucleotide for detection of SNP TSC0041745
attatagtgttaa

SEQ ID NO: 166682 - DNA, 13 bp, Artificial Sequence
  Oligonucleotide for detection of SNP TSC0041745
ttaacactataat

SEQ ID NO: 166683 - DNA, 13 bp, Artificial Sequence
  Oligonucleotide for detection of SNP TSC0041745
ttggtagtataat

SEQ ID NO: 166684 - DNA, 13 bp, Artificial Sequence
  Oligonucleotide for detection of SNP TSC0041745
attatactaccaa

SEQ ID NO: 166685 - DNA, 13 bp, Artificial Sequence
  Oligonucleotide for detection of SNP TSC0041745
ttggtattataat

SEQ ID NO: 166686 - DNA, 13 bp, Artificial Sequence
  Oligonucleotide for detection of SNP TSC0041745
attataataccaa

SEQ ID NO: 166687 - DNA, 13 bp, Artificial Sequence
  Oligonucleotide for detection of SNP TSC0005891
tttttaagtggga

SEQ ID NO: 166688 - DNA, 13 bp, Artificial Sequence
  Oligonucleotide for detection of SNP TSC0005891
tcccacttaaaaa

SEQ ID NO: 166689 - DNA, 13 bp, Artificial Sequence
  Oligonucleotide for detection of SNP TSC0005891
tttttatgtggga

SEQ ID NO: 166690 - DNA, 13 bp, Artificial Sequence
  Oligonucleotide for detection of SNP TSC0005891
tcccacataaaaa

SEQ ID NO: 166691 - DNA, 13 bp, Artificial Sequence
  Oligonucleotide for detection of SNP TSC0005891
tttttacgtggga

SEQ ID NO: 166692 - DNA, 13 bp, Artificial Sequence
  Oligonucleotide for detection of SNP TSC0005891
tcccacgtaaaaa

SEQ ID NO: 166693 - DNA, 13 bp, Artificial Sequence
  Oligonucleotide for detection of SNP TSC0005891
ttttatttgaaaa

SEQ ID NO: 166694 - DNA, 13 bp, Artificial Sequence
  Oligonucleotide for detection of SNP TSC0005891
ttttcaaataaaa

SEQ ID NO: 166695 - DNA, 13 bp, Artificial Sequence
  Oligonucleotide for detection of SNP TSC0041746
agaatagaaaaaa

SEQ ID NO: 166696 - DNA, 13 bp, Artificial Sequence
  Oligonucleotide for detection of SNP TSC0041746
ttttttctattct

SEQ ID NO: 166697 - DNA, 13 bp, Artificial Sequence
  Oligonucleotide for detection of SNP TSC0041746
agaatataaaaaa

SEQ ID NO: 166698 - DNA, 13 bp, Artificial Sequence
  Oligonucleotide for detection of SNP TSC0041746
ttttttatattct

SEQ ID NO: 166699 - DNA, 13 bp, Artificial Sequence
  Oligonucleotide for detection of SNP TSC0041751
aagtttatataay

SEQ ID NO: 166700 - DNA, 13 bp, Artificial Sequence
  Oligonucleotide for detection of SNP TSC0041751
rttatataaactt

SEQ ID NO: 166701 - DNA, 13 bp, Artificial Sequence
  Oligonucleotide for detection of SNP TSC0041751
aagtttttataay

SEQ ID NO: 166702 - DNA, 13 bp, Artificial Sequence
  Oligonucleotide for detection of SNP TSC0041751
rttataaaaactt

SEQ ID NO: 166703 - DNA, 13 bp, Artificial Sequence
  Oligonucleotide for detection of SNP TSC0041751
gttatgtaaattt

SEQ ID NO: 166704 - DNA, 13 bp, Artificial Sequence
  Oligonucleotide for detection of SNP TSC0041751
aaatttacataac

SEQ ID NO: 166705 - DNA, 13 bp, Artificial Sequence
  Oligonucleotide for detection of SNP TSC0041751
gttatggaaattt

SEQ ID NO: 166706 - DNA, 13 bp, Artificial Sequence
  Oligonucleotide for detection of SNP TSC0041751
aaatttccataac

SEQ ID NO: 166707 - DNA, 13 bp, Artificial Sequence
  Oligonucleotide for detection of SNP TSC0007216
ttttattttttgg

SEQ ID NO: 166708 - DNA, 13 bp, Artificial Sequence
  Oligonucleotide for detection of SNP TSC0007216
ccaaaaaataaaa

SEQ ID NO: 166709 - DNA, 13 bp, Artificial Sequence
  Oligonucleotide for detection of SNP TSC0007216
ttttatgttttgg

SEQ ID NO: 166710 - DNA, 13 bp, Artificial Sequence
  Oligonucleotide for detection of SNP TSC0007216
ccaaaacataaaa

SEQ ID NO: 166711 - DNA, 13 bp, Artificial Sequence
  Oligonucleotide for detection of SNP TSC0007216
ttttacgttttgg

SEQ ID NO: 166712 - DNA, 13 bp, Artificial Sequence
  Oligonucleotide for detection of SNP TSC0007216
ccaaaacgtaaaa

SEQ ID NO: 166713 - DNA, 13 bp, Artificial Sequence
  Oligonucleotide for detection of SNP TSC0007216
ttaggaggtggag

SEQ ID NO: 166714 - DNA, 13 bp, Artificial Sequence
  Oligonucleotide for detection of SNP TSC0007216
ctccacctcctaa

SEQ ID NO: 166715 - DNA, 13 bp, Artificial Sequence
  Oligonucleotide for detection of SNP TSC0007216
ttaggatgtggag

SEQ ID NO: 166716 - DNA, 13 bp, Artificial Sequence
  Oligonucleotide for detection of SNP TSC0007216
ctccacatcctaa

SEQ ID NO: 166717 - DNA, 13 bp, Artificial Sequence
  Oligonucleotide for detection of SNP TSC0007216
ttaggacgtggag

SEQ ID NO: 166718 - DNA, 13 bp, Artificial Sequence
  Oligonucleotide for detection of SNP TSC0007216
ctccacgtcctaa

SEQ ID NO: 166719 - DNA, 13 bp, Artificial Sequence
  Oligonucleotide for detection of SNP TSC0007217
ttatttagaatag

SEQ ID NO: 166720 - DNA, 13 bp, Artificial Sequence
  Oligonucleotide for detection of SNP TSC0007217
ctattctaaataa

SEQ ID NO: 166721 - DNA, 13 bp, Artificial Sequence
  Oligonucleotide for detection of SNP TSC0007217
ttatttggaatag

SEQ ID NO: 166722 - DNA, 13 bp, Artificial Sequence
  Oligonucleotide for detection of SNP TSC0007217
ctattccaaataa

SEQ ID NO: 166723 - DNA, 13 bp, Artificial Sequence
  Oligonucleotide for detection of SNP TSC0007217
ttattcggaatag

SEQ ID NO: 166724 - DNA, 13 bp, Artificial Sequence
  Oligonucleotide for detection of SNP TSC0007217
ctattccgaataa

SEQ ID NO: 166725 - DNA, 13 bp, Artificial Sequence
  Oligonucleotide for detection of SNP TSC0007217
ttgttttgaatag

SEQ ID NO: 166726 - DNA, 13 bp, Artificial Sequence
  Oligonucleotide for detection of SNP TSC0007217
ctattcaaaacaa

SEQ ID NO: 166727 - DNA, 13 bp, Artificial Sequence
  Oligonucleotide for detection of SNP TSC0007217
ttgtttcgaatag

SEQ ID NO: 166728 - DNA, 13 bp, Artificial Sequence
  Oligonucleotide for detection of SNP TSC0007217
ctattcgaaacaa

SEQ ID NO: 166729 - DNA, 13 bp, Artificial Sequence
  Oligonucleotide for detection of SNP TSC0041752
attgaaaatttaa

SEQ ID NO: 166730 - DNA, 13 bp, Artificial Sequence
  Oligonucleotide for detection of SNP TSC0041752
ttaaattttcaat

SEQ ID NO: 166731 - DNA, 13 bp, Artificial Sequence
  Oligonucleotide for detection of SNP TSC0041752
attgaatatttaa

SEQ ID NO: 166732 - DNA, 13 bp, Artificial Sequence
  Oligonucleotide for detection of SNP TSC0041752
ttaaatattcaat

SEQ ID NO: 166733 - DNA, 13 bp, Artificial Sequence
  Oligonucleotide for detection of SNP TSC0041752
ttaggtttttagt

SEQ ID NO: 166734 - DNA, 13 bp, Artificial Sequence
  Oligonucleotide for detection of SNP TSC0041752
actaaaaacctaa

SEQ ID NO: 166735 - DNA, 13 bp, Artificial Sequence
  Oligonucleotide for detection of SNP TSC0041752
ttaggtatttagt

SEQ ID NO: 166736 - DNA, 13 bp, Artificial Sequence
  Oligonucleotide for detection of SNP TSC0041752
actaaatacctaa

SEQ ID NO: 166737 - DNA, 13 bp, Artificial Sequence
  Oligonucleotide for detection of SNP TSC0041753
aattgtaaaataa

SEQ ID NO: 166738 - DNA, 13 bp, Artificial Sequence
  Oligonucleotide for detection of SNP TSC0041753
ttattttacaatt

SEQ ID NO: 166739 - DNA, 13 bp, Artificial Sequence
  Oligonucleotide for detection of SNP TSC0041753
aattgttaaataa

SEQ ID NO: 166740 - DNA, 13 bp, Artificial Sequence
  Oligonucleotide for detection of SNP TSC0041753
ttatttaacaatt

SEQ ID NO: 166741 - DNA, 13 bp, Artificial Sequence
  Oligonucleotide for detection of SNP TSC0041753
ttatttagtaatt

SEQ ID NO: 166742 - DNA, 13 bp, Artificial Sequence
  Oligonucleotide for detection of SNP TSC0041753
aattactaaataa

SEQ ID NO: 166743 - DNA, 13 bp, Artificial Sequence
  Oligonucleotide for detection of SNP TSC0007491
aattttaatttat

SEQ ID NO: 166744 - DNA, 13 bp, Artificial Sequence
  Oligonucleotide for detection of SNP TSC0007491
ataaattaaaatt

SEQ ID NO: 166745 - DNA, 13 bp, Artificial Sequence
  Oligonucleotide for detection of SNP TSC0007491
aatttttatttat

SEQ ID NO: 166746 - DNA, 13 bp, Artificial Sequence
  Oligonucleotide for detection of SNP TSC0007491
ataaataaaaatt

SEQ ID NO: 166747 - DNA, 13 bp, Artificial Sequence
  Oligonucleotide for detection of SNP TSC0007491
ataagttggaatt

SEQ ID NO: 166748 - DNA, 13 bp, Artificial Sequence
  Oligonucleotide for detection of SNP TSC0007491
aattccaacttat

SEQ ID NO: 166749 - DNA, 13 bp, Artificial Sequence
  Oligonucleotide for detection of SNP TSC0007491
ataagtgggaatt

SEQ ID NO: 166750 - DNA, 13 bp, Artificial Sequence
  Oligonucleotide for detection of SNP TSC0007491
aattcccacttat

SEQ ID NO: 166751 - DNA, 13 bp, Artificial Sequence
  Oligonucleotide for detection of SNP TSC0041756
attattatgttga

SEQ ID NO: 166752 - DNA, 13 bp, Artificial Sequence
  Oligonucleotide for detection of SNP TSC0041756
tcaacataataat

SEQ ID NO: 166753 - DNA, 13 bp, Artificial Sequence
  Oligonucleotide for detection of SNP TSC0041756
attattgtgttga

SEQ ID NO: 166754 - DNA, 13 bp, Artificial Sequence
  Oligonucleotide for detection of SNP TSC0041756
tcaacacaataat

SEQ ID NO: 166755 - DNA, 13 bp, Artificial Sequence
  Oligonucleotide for detection of SNP TSC0041757
ataaatatagttt

SEQ ID NO: 166756 - DNA, 13 bp, Artificial Sequence
  Oligonucleotide for detection of SNP TSC0041757
aaactatatttat

SEQ ID NO: 166757 - DNA, 13 bp, Artificial Sequence
  Oligonucleotide for detection of SNP TSC0041757
ataaatgtagttt

SEQ ID NO: 166758 - DNA, 13 bp, Artificial Sequence
  Oligonucleotide for detection of SNP TSC0041757
aaactacatttat

SEQ ID NO: 166759 - DNA, 13 bp, Artificial Sequence
  Oligonucleotide for detection of SNP TSC0041757
ataaacgtagttt

SEQ ID NO: 166760 - DNA, 13 bp, Artificial Sequence
  Oligonucleotide for detection of SNP TSC0041757
aaactacgtttat

SEQ ID NO: 166761 - DNA, 13 bp, Artificial Sequence
  Oligonucleotide for detection of SNP TSC0041757
aggttgtgtttgt

SEQ ID NO: 166762 - DNA, 13 bp, Artificial Sequence
  Oligonucleotide for detection of SNP TSC0041757
acaaacacaacct

SEQ ID NO: 166763 - DNA, 13 bp, Artificial Sequence
  Oligonucleotide for detection of SNP TSC0041757
aggttgcgtttgt

SEQ ID NO: 166764 - DNA, 13 bp, Artificial Sequence
  Oligonucleotide for detection of SNP TSC0041757
acaaacgcaacct

SEQ ID NO: 166765 - DNA, 13 bp, Artificial Sequence
  Oligonucleotide for detection of SNP TSC0041758
taagatggttaga

SEQ ID NO: 166766 - DNA, 13 bp, Artificial Sequence
  Oligonucleotide for detection of SNP TSC0041758
tctaaccatctta

SEQ ID NO: 166767 - DNA, 13 bp, Artificial Sequence
  Oligonucleotide for detection of SNP TSC0041758
taagatagttaga

SEQ ID NO: 166768 - DNA, 13 bp, Artificial Sequence
  Oligonucleotide for detection of SNP TSC0041758
tctaactatctta

SEQ ID NO: 166769 - DNA, 13 bp, Artificial Sequence
  Oligonucleotide for detection of SNP TSC0041759
atgaggaagttat

SEQ ID NO: 166770 - DNA, 13 bp, Artificial Sequence
  Oligonucleotide for detection of SNP TSC0041759
ataacttcctcat

SEQ ID NO: 166771 - DNA, 13 bp, Artificial Sequence
  Oligonucleotide for detection of SNP TSC0041759
atgaggtagttat

SEQ ID NO: 166772 - DNA, 13 bp, Artificial Sequence
  Oligonucleotide for detection of SNP TSC0041759
ataactacctcat

SEQ ID NO: 166773 - DNA, 13 bp, Artificial Sequence
  Oligonucleotide for detection of SNP TSC0041759
atgagggagttat

SEQ ID NO: 166774 - DNA, 13 bp, Artificial Sequence
  Oligonucleotide for detection of SNP TSC0041759
ataactccctcat

SEQ ID NO: 166775 - DNA, 13 bp, Artificial Sequence
  Oligonucleotide for detection of SNP TSC0041759
atgatttttttat

SEQ ID NO: 166776 - DNA, 13 bp, Artificial Sequence
  Oligonucleotide for detection of SNP TSC0041759
ataaaaaaatcat

SEQ ID NO: 166777 - DNA, 13 bp, Artificial Sequence
  Oligonucleotide for detection of SNP TSC0041760
ggggataatgtty

SEQ ID NO: 166778 - DNA, 13 bp, Artificial Sequence
  Oligonucleotide for detection of SNP TSC0041760
raacattatcccc

SEQ ID NO: 166779 - DNA, 13 bp, Artificial Sequence
  Oligonucleotide for detection of SNP TSC0041760
ggggatgatgtty

SEQ ID NO: 166780 - DNA, 13 bp, Artificial Sequence
  Oligonucleotide for detection of SNP TSC0041760
raacatcatcccc

SEQ ID NO: 166781 - DNA, 13 bp, Artificial Sequence
  Oligonucleotide for detection of SNP TSC0005895
ttatgtttaaagy

SEQ ID NO: 166782 - DNA, 13 bp, Artificial Sequence
  Oligonucleotide for detection of SNP TSC0005895
rctttaaacataa

SEQ ID NO: 166783 - DNA, 13 bp, Artificial Sequence
  Oligonucleotide for detection of SNP TSC0005895
ttatgtgtaaagy

SEQ ID NO: 166784 - DNA, 13 bp, Artificial Sequence
  Oligonucleotide for detection of SNP TSC0005895
rctttacacataa

SEQ ID NO: 166785 - DNA, 13 bp, Artificial Sequence
  Oligonucleotide for detection of SNP TSC0005895
gttttgaatataa

SEQ ID NO: 166786 - DNA, 13 bp, Artificial Sequence
  Oligonucleotide for detection of SNP TSC0005895
ttatattcaaaac

SEQ ID NO: 166787 - DNA, 13 bp, Artificial Sequence
  Oligonucleotide for detection of SNP TSC0005895
gttttgtatataa

SEQ ID NO: 166788 - DNA, 13 bp, Artificial Sequence
  Oligonucleotide for detection of SNP TSC0005895
ttatatacaaaac

SEQ ID NO: 166789 - DNA, 13 bp, Artificial Sequence
  Oligonucleotide for detection of SNP TSC0006825
ggttaagtagatt

SEQ ID NO: 166790 - DNA, 13 bp, Artificial Sequence
  Oligonucleotide for detection of SNP TSC0006825
aatctacttaacc

SEQ ID NO: 166791 - DNA, 13 bp, Artificial Sequence
  Oligonucleotide for detection of SNP TSC0006825
ggttaaatagatt

SEQ ID NO: 166792 - DNA, 13 bp, Artificial Sequence
  Oligonucleotide for detection of SNP TSC0006825
aatctatttaacc

SEQ ID NO: 166793 - DNA, 13 bp, Artificial Sequence
  Oligonucleotide for detection of SNP TSC0006826
atttgtatggaaa

SEQ ID NO: 166794 - DNA, 13 bp, Artificial Sequence
  Oligonucleotide for detection of SNP TSC0006826
tttccatacaaat

SEQ ID NO: 166795 - DNA, 13 bp, Artificial Sequence
  Oligonucleotide for detection of SNP TSC0006826
atttgtgtggaaa

SEQ ID NO: 166796 - DNA, 13 bp, Artificial Sequence
  Oligonucleotide for detection of SNP TSC0006826
tttccacacaaat

SEQ ID NO: 166797 - DNA, 13 bp, Artificial Sequence
  Oligonucleotide for detection of SNP TSC0041764
gtagagaatttay

SEQ ID NO: 166798 - DNA, 13 bp, Artificial Sequence
  Oligonucleotide for detection of SNP TSC0041764
rtaaattctctac

SEQ ID NO: 166799 - DNA, 13 bp, Artificial Sequence
  Oligonucleotide for detection of SNP TSC0041764
gtagagtatttay

SEQ ID NO: 166800 - DNA, 13 bp, Artificial Sequence
  Oligonucleotide for detection of SNP TSC0041764
rtaaatactctac

SEQ ID NO: 166801 - DNA, 13 bp, Artificial Sequence
  Oligonucleotide for detection of SNP TSC0041764
gtaaattttttay

SEQ ID NO: 166802 - DNA, 13 bp, Artificial Sequence
  Oligonucleotide for detection of SNP TSC0041764
rtaaaaaatttac

SEQ ID NO: 166803 - DNA, 13 bp, Artificial Sequence
  Oligonucleotide for detection of SNP TSC0041764
gtaaatattttay

SEQ ID NO: 166804 - DNA, 13 bp, Artificial Sequence
  Oligonucleotide for detection of SNP TSC0041764
rtaaaatatttac

SEQ ID NO: 166805 - DNA, 13 bp, Artificial Sequence
  Oligonucleotide for detection of SNP TSC0041765
tatgatattgtat

SEQ ID NO: 166806 - DNA, 13 bp, Artificial Sequence
  Oligonucleotide for detection of SNP TSC0041765
atacaatatcata

SEQ ID NO: 166807 - DNA, 13 bp, Artificial Sequence
  Oligonucleotide for detection of SNP TSC0041765
tatgatgttgtat

SEQ ID NO: 166808 - DNA, 13 bp, Artificial Sequence
  Oligonucleotide for detection of SNP TSC0041765
atacaacatcata

SEQ ID NO: 166809 - DNA, 13 bp, Artificial Sequence
  Oligonucleotide for detection of SNP TSC0041765
tatgacgttgtat

SEQ ID NO: 166810 - DNA, 13 bp, Artificial Sequence
  Oligonucleotide for detection of SNP TSC0041765
atacaacgtcata

SEQ ID NO: 166811 - DNA, 13 bp, Artificial Sequence
  Oligonucleotide for detection of SNP TSC0041765
atgtagtgttatg

SEQ ID NO: 166812 - DNA, 13 bp, Artificial Sequence
  Oligonucleotide for detection of SNP TSC0041765
cataacactacat

SEQ ID NO: 166813 - DNA, 13 bp, Artificial Sequence
  Oligonucleotide for detection of SNP TSC0041765
atgtagcgttatg

SEQ ID NO: 166814 - DNA, 13 bp, Artificial Sequence
  Oligonucleotide for detection of SNP TSC0041765
cataacgctacat

SEQ ID NO: 166815 - DNA, 13 bp, Artificial Sequence
  Oligonucleotide for detection of SNP TSC0041769
atataatttaaaa

SEQ ID NO: 166816 - DNA, 13 bp, Artificial Sequence
  Oligonucleotide for detection of SNP TSC0041769
ttttaaattatat

SEQ ID NO: 166817 - DNA, 13 bp, Artificial Sequence
  Oligonucleotide for detection of SNP TSC0041769
atataaattaaaa

SEQ ID NO: 166818 - DNA, 13 bp, Artificial Sequence
  Oligonucleotide for detection of SNP TSC0041769
ttttaatttatat

SEQ ID NO: 166819 - DNA, 13 bp, Artificial Sequence
  Oligonucleotide for detection of SNP TSC0041770
ttatatagttatt

SEQ ID NO: 166820 - DNA, 13 bp, Artificial Sequence
  Oligonucleotide for detection of SNP TSC0041770
aataactatataa

SEQ ID NO: 166821 - DNA, 13 bp, Artificial Sequence
  Oligonucleotide for detection of SNP TSC0041770
ttatatggttatt

SEQ ID NO: 166822 - DNA, 13 bp, Artificial Sequence
  Oligonucleotide for detection of SNP TSC0041770
aataaccatataa

SEQ ID NO: 166823 - DNA, 13 bp, Artificial Sequence
  Oligonucleotide for detection of SNP TSC0041770
ttatacggttatt

SEQ ID NO: 166824 - DNA, 13 bp, Artificial Sequence
  Oligonucleotide for detection of SNP TSC0041770
aataaccgtataa

SEQ ID NO: 166825 - DNA, 13 bp, Artificial Sequence
  Oligonucleotide for detection of SNP TSC0041770
agtaattgtataa

SEQ ID NO: 166826 - DNA, 13 bp, Artificial Sequence
  Oligonucleotide for detection of SNP TSC0041770
ttatacaattact

SEQ ID NO: 166827 - DNA, 13 bp, Artificial Sequence
  Oligonucleotide for detection of SNP TSC0041770
agtaatcgtataa

SEQ ID NO: 166828 - DNA, 13 bp, Artificial Sequence
  Oligonucleotide for detection of SNP TSC0041770
ttatacgattact

SEQ ID NO: 166829 - DNA, 13 bp, Artificial Sequence
  Oligonucleotide for detection of SNP TSC0041771
aaaatggaaatat

SEQ ID NO: 166830 - DNA, 13 bp, Artificial Sequence
  Oligonucleotide for detection of SNP TSC0041771
atatttccatttt

SEQ ID NO: 166831 - DNA, 13 bp, Artificial Sequence
  Oligonucleotide for detection of SNP TSC0041771
aaaatgaaaatat

SEQ ID NO: 166832 - DNA, 13 bp, Artificial Sequence
  Oligonucleotide for detection of SNP TSC0041771
atattttcatttt

SEQ ID NO: 166833 - DNA, 13 bp, Artificial Sequence
  Oligonucleotide for detection of SNP TSC0041772
tgggtttggttgy

SEQ ID NO: 166834 - DNA, 13 bp, Artificial Sequence
  Oligonucleotide for detection of SNP TSC0041772
rcaaccaaaccca

SEQ ID NO: 166835 - DNA, 13 bp, Artificial Sequence
  Oligonucleotide for detection of SNP TSC0041772
tgggttcggttgy

SEQ ID NO: 166836 - DNA, 13 bp, Artificial Sequence
  Oligonucleotide for detection of SNP TSC0041772
rcaaccgaaccca

SEQ ID NO: 166837 - DNA, 13 bp, Artificial Sequence
  Oligonucleotide for detection of SNP TSC0041772
gtagttgagttta

SEQ ID NO: 166838 - DNA, 13 bp, Artificial Sequence
  Oligonucleotide for detection of SNP TSC0041772
taaactcaactac

SEQ ID NO: 166839 - DNA, 13 bp, Artificial Sequence
  Oligonucleotide for detection of SNP TSC0041772
gtagttaagttta

SEQ ID NO: 166840 - DNA, 13 bp, Artificial Sequence
  Oligonucleotide for detection of SNP TSC0041772
taaacttaactac

SEQ ID NO: 166841 - DNA, 13 bp, Artificial Sequence
  Oligonucleotide for detection of SNP TSC0041772
gtagtcgagttta

SEQ ID NO: 166842 - DNA, 13 bp, Artificial Sequence
  Oligonucleotide for detection of SNP TSC0041772
taaactcgactac

SEQ ID NO: 166843 - DNA, 13 bp, Artificial Sequence
  Oligonucleotide for detection of SNP TSC0006834
aatagttatagta

SEQ ID NO: 166844 - DNA, 13 bp, Artificial Sequence
  Oligonucleotide for detection of SNP TSC0006834
tactataactatt

SEQ ID NO: 166845 - DNA, 13 bp, Artificial Sequence
  Oligonucleotide for detection of SNP TSC0006834
aatagtgatagta

SEQ ID NO: 166846 - DNA, 13 bp, Artificial Sequence
  Oligonucleotide for detection of SNP TSC0006834
tactatcactatt

SEQ ID NO: 166847 - DNA, 13 bp, Artificial Sequence
  Oligonucleotide for detection of SNP TSC0006834
tattatgattatt

SEQ ID NO: 166848 - DNA, 13 bp, Artificial Sequence
  Oligonucleotide for detection of SNP TSC0006834
aataatcataata

SEQ ID NO: 166849 - DNA, 13 bp, Artificial Sequence
  Oligonucleotide for detection of SNP TSC0006835
gggaatatggttg

SEQ ID NO: 166850 - DNA, 13 bp, Artificial Sequence
  Oligonucleotide for detection of SNP TSC0006835
caaccatattccc

SEQ ID NO: 166851 - DNA, 13 bp, Artificial Sequence
  Oligonucleotide for detection of SNP TSC0006835
gggaatgtggttg

SEQ ID NO: 166852 - DNA, 13 bp, Artificial Sequence
  Oligonucleotide for detection of SNP TSC0006835
caaccacattccc

SEQ ID NO: 166853 - DNA, 13 bp, Artificial Sequence
  Oligonucleotide for detection of SNP TSC0006835
gggaacgtggttg

SEQ ID NO: 166854 - DNA, 13 bp, Artificial Sequence
  Oligonucleotide for detection of SNP TSC0006835
caaccacgttccc

SEQ ID NO: 166855 - DNA, 13 bp, Artificial Sequence
  Oligonucleotide for detection of SNP TSC0006835
taattatgtttty

SEQ ID NO: 166856 - DNA, 13 bp, Artificial Sequence
  Oligonucleotide for detection of SNP TSC0006835
raaaacataatta

SEQ ID NO: 166857 - DNA, 13 bp, Artificial Sequence
  Oligonucleotide for detection of SNP TSC0006835
taattacgtttty

SEQ ID NO: 166858 - DNA, 13 bp, Artificial Sequence
  Oligonucleotide for detection of SNP TSC0006835
raaaacgtaatta

SEQ ID NO: 166859 - DNA, 13 bp, Artificial Sequence
  Oligonucleotide for detection of SNP TSC0041773
tgtaatgtgtgty

SEQ ID NO: 166860 - DNA, 13 bp, Artificial Sequence
  Oligonucleotide for detection of SNP TSC0041773
racacacattaca

SEQ ID NO: 166861 - DNA, 13 bp, Artificial Sequence
  Oligonucleotide for detection of SNP TSC0041773
tgtaatatgtgty

SEQ ID NO: 166862 - DNA, 13 bp, Artificial Sequence
  Oligonucleotide for detection of SNP TSC0041773
racacatattaca

SEQ ID NO: 166863 - DNA, 13 bp, Artificial Sequence
  Oligonucleotide for detection of SNP TSC0041773
cgtaatgtgtgty

SEQ ID NO: 166864 - DNA, 13 bp, Artificial Sequence
  Oligonucleotide for detection of SNP TSC0041773
racacacattacg

SEQ ID NO: 166865 - DNA, 13 bp, Artificial Sequence
  Oligonucleotide for detection of SNP TSC0041773
cgtaatatgtgty

SEQ ID NO: 166866 - DNA, 13 bp, Artificial Sequence
  Oligonucleotide for detection of SNP TSC0041773
racacatattacg

SEQ ID NO: 166867 - DNA, 13 bp, Artificial Sequence
  Oligonucleotide for detection of SNP TSC0041775
tatatttgaatga

SEQ ID NO: 166868 - DNA, 13 bp, Artificial Sequence
  Oligonucleotide for detection of SNP TSC0041775
tcattcaaatata

SEQ ID NO: 166869 - DNA, 13 bp, Artificial Sequence
  Oligonucleotide for detection of SNP TSC0041775
tatattcgaatga

SEQ ID NO: 166870 - DNA, 13 bp, Artificial Sequence
  Oligonucleotide for detection of SNP TSC0041775
tcattcgaatata

SEQ ID NO: 166871 - DNA, 13 bp, Artificial Sequence
  Oligonucleotide for detection of SNP TSC0041775
ttatttgagtatg

SEQ ID NO: 166872 - DNA, 13 bp, Artificial Sequence
  Oligonucleotide for detection of SNP TSC0041775
catactcaaataa

SEQ ID NO: 166873 - DNA, 13 bp, Artificial Sequence
  Oligonucleotide for detection of SNP TSC0041775
ttatttaagtatg

SEQ ID NO: 166874 - DNA, 13 bp, Artificial Sequence
  Oligonucleotide for detection of SNP TSC0041775
catacttaaataa

SEQ ID NO: 166875 - DNA, 13 bp, Artificial Sequence
  Oligonucleotide for detection of SNP TSC0041775
ttattcgagtatg

SEQ ID NO: 166876 - DNA, 13 bp, Artificial Sequence
  Oligonucleotide for detection of SNP TSC0041775
catactcgaataa

SEQ ID NO: 166877 - DNA, 13 bp, Artificial Sequence
  Oligonucleotide for detection of SNP TSC0041778
ttgattatataaa

SEQ ID NO: 166878 - DNA, 13 bp, Artificial Sequence
  Oligonucleotide for detection of SNP TSC0041778
tttatataatcaa

SEQ ID NO: 166879 - DNA, 13 bp, Artificial Sequence
  Oligonucleotide for detection of SNP TSC0041778
ttgattgtataaa

SEQ ID NO: 166880 - DNA, 13 bp, Artificial Sequence
  Oligonucleotide for detection of SNP TSC0041778
tttatacaatcaa

SEQ ID NO: 166881 - DNA, 13 bp, Artificial Sequence
  Oligonucleotide for detection of SNP TSC0041779
ggtgggttttttt

SEQ ID NO: 166882 - DNA, 13 bp, Artificial Sequence
  Oligonucleotide for detection of SNP TSC0041779
aaaaaaacccacc

SEQ ID NO: 166883 - DNA, 13 bp, Artificial Sequence
  Oligonucleotide for detection of SNP TSC0041779
ggtggggtttttt

SEQ ID NO: 166884 - DNA, 13 bp, Artificial Sequence
  Oligonucleotide for detection of SNP TSC0041779
aaaaaaccccacc

SEQ ID NO: 166885 - DNA, 13 bp, Artificial Sequence
  Oligonucleotide for detection of SNP TSC0041779
aaaaaaatttaty

SEQ ID NO: 166886 - DNA, 13 bp, Artificial Sequence
  Oligonucleotide for detection of SNP TSC0041779
rataaattttttt

SEQ ID NO: 166887 - DNA, 13 bp, Artificial Sequence
  Oligonucleotide for detection of SNP TSC0041779
aaaaaattttaty

SEQ ID NO: 166888 - DNA, 13 bp, Artificial Sequence
  Oligonucleotide for detection of SNP TSC0041779
rataaaatttttt

SEQ ID NO: 166889 - DNA, 13 bp, Artificial Sequence
  Oligonucleotide for detection of SNP TSC0041780
ggaggtaagagag

SEQ ID NO: 166890 - DNA, 13 bp, Artificial Sequence
  Oligonucleotide for detection of SNP TSC0041780
ctctcttacctcc

SEQ ID NO: 166891 - DNA, 13 bp, Artificial Sequence
  Oligonucleotide for detection of SNP TSC0041780
ggaggtgagagag

SEQ ID NO: 166892 - DNA, 13 bp, Artificial Sequence
  Oligonucleotide for detection of SNP TSC0041780
ctctctcacctcc

SEQ ID NO: 166893 - DNA, 13 bp, Artificial Sequence
  Oligonucleotide for detection of SNP TSC0041780
ggaggcgagagag

SEQ ID NO: 166894 - DNA, 13 bp, Artificial Sequence
  Oligonucleotide for detection of SNP TSC0041780
ctctctcgcctcc

SEQ ID NO: 166895 - DNA, 13 bp, Artificial Sequence
  Oligonucleotide for detection of SNP TSC0041784
aagttgagaattg

SEQ ID NO: 166896 - DNA, 13 bp, Artificial Sequence
  Oligonucleotide for detection of SNP TSC0041784
caattctcaactt

SEQ ID NO: 166897 - DNA, 13 bp, Artificial Sequence
  Oligonucleotide for detection of SNP TSC0041784
aagttgggaattg

SEQ ID NO: 166898 - DNA, 13 bp, Artificial Sequence
  Oligonucleotide for detection of SNP TSC0041784
caattcccaactt

SEQ ID NO: 166899 - DNA, 13 bp, Artificial Sequence
  Oligonucleotide for detection of SNP TSC0041785
aatgatagaaaga

SEQ ID NO: 166900 - DNA, 13 bp, Artificial Sequence
  Oligonucleotide for detection of SNP TSC0041785
tctttctatcatt

SEQ ID NO: 166901 - DNA, 13 bp, Artificial Sequence
  Oligonucleotide for detection of SNP TSC0041785
aatgatggaaaga

SEQ ID NO: 166902 - DNA, 13 bp, Artificial Sequence
  Oligonucleotide for detection of SNP TSC0041785
tctttccatcatt

SEQ ID NO: 166903 - DNA, 13 bp, Artificial Sequence
  Oligonucleotide for detection of SNP TSC0041785
aatgacggaaaga

SEQ ID NO: 166904 - DNA, 13 bp, Artificial Sequence
  Oligonucleotide for detection of SNP TSC0041785
tctttccgtcatt

SEQ ID NO: 166905 - DNA, 13 bp, Artificial Sequence
  Oligonucleotide for detection of SNP TSC0041786
gaggttattgtay

SEQ ID NO: 166906 - DNA, 13 bp, Artificial Sequence
  Oligonucleotide for detection of SNP TSC0041786
rtacaataacctc

SEQ ID NO: 166907 - DNA, 13 bp, Artificial Sequence
  Oligonucleotide for detection of SNP TSC0041786
gaggttgttgtay

SEQ ID NO: 166908 - DNA, 13 bp, Artificial Sequence
  Oligonucleotide for detection of SNP TSC0041786
rtacaacaacctc

SEQ ID NO: 166909 - DNA, 13 bp, Artificial Sequence
  Oligonucleotide for detection of SNP TSC0041786
gaggtcgttgtay

SEQ ID NO: 166910 - DNA, 13 bp, Artificial Sequence
  Oligonucleotide for detection of SNP TSC0041786
rtacaacgacctc

SEQ ID NO: 166911 - DNA, 13 bp, Artificial Sequence
  Oligonucleotide for detection of SNP TSC0041786
gtatagtggttty

SEQ ID NO: 166912 - DNA, 13 bp, Artificial Sequence
  Oligonucleotide for detection of SNP TSC0041786
raaaccactatac

SEQ ID NO: 166913 - DNA, 13 bp, Artificial Sequence
  Oligonucleotide for detection of SNP TSC0041786
gtatagcggttty

SEQ ID NO: 166914 - DNA, 13 bp, Artificial Sequence
  Oligonucleotide for detection of SNP TSC0041786
raaaccgctatac

SEQ ID NO: 166915 - DNA, 13 bp, Artificial Sequence
  Oligonucleotide for detection of SNP TSC0041788
aggatagtttatg

SEQ ID NO: 166916 - DNA, 13 bp, Artificial Sequence
  Oligonucleotide for detection of SNP TSC0041788
cataaactatcct

SEQ ID NO: 166917 - DNA, 13 bp, Artificial Sequence
  Oligonucleotide for detection of SNP TSC0041788
aggataatttatg

SEQ ID NO: 166918 - DNA, 13 bp, Artificial Sequence
  Oligonucleotide for detection of SNP TSC0041788
cataaattatcct

SEQ ID NO: 166919 - DNA, 13 bp, Artificial Sequence
  Oligonucleotide for detection of SNP TSC0041790
ggttgaagtagaa

SEQ ID NO: 166920 - DNA, 13 bp, Artificial Sequence
  Oligonucleotide for detection of SNP TSC0041790
ttctacttcaacc

SEQ ID NO: 166921 - DNA, 13 bp, Artificial Sequence
  Oligonucleotide for detection of SNP TSC0041790
ggttgaggtagaa

SEQ ID NO: 166922 - DNA, 13 bp, Artificial Sequence
  Oligonucleotide for detection of SNP TSC0041790
ttctacctcaacc

SEQ ID NO: 166923 - DNA, 13 bp, Artificial Sequence
  Oligonucleotide for detection of SNP TSC0041791
ttgttgtatttat

SEQ ID NO: 166924 - DNA, 13 bp, Artificial Sequence
  Oligonucleotide for detection of SNP TSC0041791
ataaatacaacaa

SEQ ID NO: 166925 - DNA, 13 bp, Artificial Sequence
  Oligonucleotide for detection of SNP TSC0041791
ttgttggatttat

SEQ ID NO: 166926 - DNA, 13 bp, Artificial Sequence
  Oligonucleotide for detection of SNP TSC0041791
ataaatccaacaa

SEQ ID NO: 166927 - DNA, 13 bp, Artificial Sequence
  Oligonucleotide for detection of SNP TSC0041791
atgagtataataa

SEQ ID NO: 166928 - DNA, 13 bp, Artificial Sequence
  Oligonucleotide for detection of SNP TSC0041791
ttattatactcat

SEQ ID NO: 166929 - DNA, 13 bp, Artificial Sequence
  Oligonucleotide for detection of SNP TSC0041791
atgagtttaataa

SEQ ID NO: 166930 - DNA, 13 bp, Artificial Sequence
  Oligonucleotide for detection of SNP TSC0041791
ttattaaactcat

SEQ ID NO: 166931 - DNA, 13 bp, Artificial Sequence
  Oligonucleotide for detection of SNP TSC0041792
tattaaagataaa

SEQ ID NO: 166932 - DNA, 13 bp, Artificial Sequence
  Oligonucleotide for detection of SNP TSC0041792
tttatctttaata

SEQ ID NO: 166933 - DNA, 13 bp, Artificial Sequence
  Oligonucleotide for detection of SNP TSC0041792
tattaaggataaa

SEQ ID NO: 166934 - DNA, 13 bp, Artificial Sequence
  Oligonucleotide for detection of SNP TSC0041792
tttatccttaata

SEQ ID NO: 166935 - DNA, 13 bp, Artificial Sequence
  Oligonucleotide for detection of SNP TSC0041793
atttttatataaa

SEQ ID NO: 166936 - DNA, 13 bp, Artificial Sequence
  Oligonucleotide for detection of SNP TSC0041793
tttatataaaaat

SEQ ID NO: 166937 - DNA, 13 bp, Artificial Sequence
  Oligonucleotide for detection of SNP TSC0041793
atttttgtataaa

SEQ ID NO: 166938 - DNA, 13 bp, Artificial Sequence
  Oligonucleotide for detection of SNP TSC0041793
tttatacaaaaat

SEQ ID NO: 166939 - DNA, 13 bp, Artificial Sequence
  Oligonucleotide for detection of SNP TSC0041793
attttcgtataaa

SEQ ID NO: 166940 - DNA, 13 bp, Artificial Sequence
  Oligonucleotide for detection of SNP TSC0041793
tttatacgaaaat

SEQ ID NO: 166941 - DNA, 13 bp, Artificial Sequence
  Oligonucleotide for detection of SNP TSC0041793
tttatatgaaagt

SEQ ID NO: 166942 - DNA, 13 bp, Artificial Sequence
  Oligonucleotide for detection of SNP TSC0041793
actttcatataaa

SEQ ID NO: 166943 - DNA, 13 bp, Artificial Sequence
  Oligonucleotide for detection of SNP TSC0041793
tttatacgaaagt

SEQ ID NO: 166944 - DNA, 13 bp, Artificial Sequence
  Oligonucleotide for detection of SNP TSC0041793
actttcgtataaa

SEQ ID NO: 166945 - DNA, 13 bp, Artificial Sequence
  Oligonucleotide for detection of SNP TSC0041794
ttttatgtgaaag

SEQ ID NO: 166946 - DNA, 13 bp, Artificial Sequence
  Oligonucleotide for detection of SNP TSC0041794
ctttcacataaaa

SEQ ID NO: 166947 - DNA, 13 bp, Artificial Sequence
  Oligonucleotide for detection of SNP TSC0041794
ttttatatgaaag

SEQ ID NO: 166948 - DNA, 13 bp, Artificial Sequence
  Oligonucleotide for detection of SNP TSC0041794
ctttcatataaaa

SEQ ID NO: 166949 - DNA, 13 bp, Artificial Sequence
  Oligonucleotide for detection of SNP TSC0041797
taattagaaaata

SEQ ID NO: 166950 - DNA, 13 bp, Artificial Sequence
  Oligonucleotide for detection of SNP TSC0041797
tattttctaatta

SEQ ID NO: 166951 - DNA, 13 bp, Artificial Sequence
  Oligonucleotide for detection of SNP TSC0041797
taattaaaaaata

SEQ ID NO: 166952 - DNA, 13 bp, Artificial Sequence
  Oligonucleotide for detection of SNP TSC0041797
tattttttaatta

SEQ ID NO: 166953 - DNA, 13 bp, Artificial Sequence
  Oligonucleotide for detection of SNP TSC0041798
aaaatttggaaaa

SEQ ID NO: 166954 - DNA, 13 bp, Artificial Sequence
  Oligonucleotide for detection of SNP TSC0041798
ttttccaaatttt

SEQ ID NO: 166955 - DNA, 13 bp, Artificial Sequence
  Oligonucleotide for detection of SNP TSC0041798
aaaattcggaaaa

SEQ ID NO: 166956 - DNA, 13 bp, Artificial Sequence
  Oligonucleotide for detection of SNP TSC0041798
ttttccgaatttt

SEQ ID NO: 166957 - DNA, 13 bp, Artificial Sequence
  Oligonucleotide for detection of SNP TSC0041799
ttttttgattata

SEQ ID NO: 166958 - DNA, 13 bp, Artificial Sequence
  Oligonucleotide for detection of SNP TSC0041799
tataatcaaaaaa

SEQ ID NO: 166959 - DNA, 13 bp, Artificial Sequence
  Oligonucleotide for detection of SNP TSC0041800
agtatgtggaaag

SEQ ID NO: 166960 - DNA, 13 bp, Artificial Sequence
  Oligonucleotide for detection of SNP TSC0041800
ctttccacatact

SEQ ID NO: 166961 - DNA, 13 bp, Artificial Sequence
  Oligonucleotide for detection of SNP TSC0041800
agtatgcggaaag

SEQ ID NO: 166962 - DNA, 13 bp, Artificial Sequence
  Oligonucleotide for detection of SNP TSC0041800
ctttccgcatact

SEQ ID NO: 166963 - DNA, 13 bp, Artificial Sequence
  Oligonucleotide for detection of SNP TSC0041801
ttatatattagag

SEQ ID NO: 166964 - DNA, 13 bp, Artificial Sequence
  Oligonucleotide for detection of SNP TSC0041801
ctctaatatataa

SEQ ID NO: 166965 - DNA, 13 bp, Artificial Sequence
  Oligonucleotide for detection of SNP TSC0041801
ttatattttagag

SEQ ID NO: 166966 - DNA, 13 bp, Artificial Sequence
  Oligonucleotide for detection of SNP TSC0041801
ctctaaaatataa

SEQ ID NO: 166967 - DNA, 13 bp, Artificial Sequence
  Oligonucleotide for detection of SNP TSC0041801
ttttaatatatga

SEQ ID NO: 166968 - DNA, 13 bp, Artificial Sequence
  Oligonucleotide for detection of SNP TSC0041801
tcatatattaaaa

SEQ ID NO: 166969 - DNA, 13 bp, Artificial Sequence
  Oligonucleotide for detection of SNP TSC0041801
ttttaagatatga

SEQ ID NO: 166970 - DNA, 13 bp, Artificial Sequence
  Oligonucleotide for detection of SNP TSC0041801
tcatatcttaaaa

SEQ ID NO: 166971 - DNA, 13 bp, Artificial Sequence
  Oligonucleotide for detection of SNP TSC0041802
ggaggtttattat

SEQ ID NO: 166972 - DNA, 13 bp, Artificial Sequence
  Oligonucleotide for detection of SNP TSC0041802
ataataaacctcc

SEQ ID NO: 166973 - DNA, 13 bp, Artificial Sequence
  Oligonucleotide for detection of SNP TSC0041802
ggaggtgtattat

SEQ ID NO: 166974 - DNA, 13 bp, Artificial Sequence
  Oligonucleotide for detection of SNP TSC0041802
ataatacacctcc

SEQ ID NO: 166975 - DNA, 13 bp, Artificial Sequence
  Oligonucleotide for detection of SNP TSC0041802
atgatggatttty

SEQ ID NO: 166976 - DNA, 13 bp, Artificial Sequence
  Oligonucleotide for detection of SNP TSC0041802
raaaatccatcat

SEQ ID NO: 166977 - DNA, 13 bp, Artificial Sequence
  Oligonucleotide for detection of SNP TSC0041802
atgatgtatttty

SEQ ID NO: 166978 - DNA, 13 bp, Artificial Sequence
  Oligonucleotide for detection of SNP TSC0041802
raaaatacatcat

SEQ ID NO: 166979 - DNA, 13 bp, Artificial Sequence
  Oligonucleotide for detection of SNP TSC0041803
aatgttgtaatag

SEQ ID NO: 166980 - DNA, 13 bp, Artificial Sequence
  Oligonucleotide for detection of SNP TSC0041803
ctattacaacatt

SEQ ID NO: 166981 - DNA, 13 bp, Artificial Sequence
  Oligonucleotide for detection of SNP TSC0041803
aatgttataatag

SEQ ID NO: 166982 - DNA, 13 bp, Artificial Sequence
  Oligonucleotide for detection of SNP TSC0041803
ctattataacatt

SEQ ID NO: 166983 - DNA, 13 bp, Artificial Sequence
  Oligonucleotide for detection of SNP TSC0041807
atttaggaaagtg

SEQ ID NO: 166984 - DNA, 13 bp, Artificial Sequence
  Oligonucleotide for detection of SNP TSC0041807
cactttcctaaat

SEQ ID NO: 166985 - DNA, 13 bp, Artificial Sequence
  Oligonucleotide for detection of SNP TSC0041807
atttagaaaagtg

SEQ ID NO: 166986 - DNA, 13 bp, Artificial Sequence
  Oligonucleotide for detection of SNP TSC0041807
cacttttctaaat

SEQ ID NO: 166987 - DNA, 13 bp, Artificial Sequence
  Oligonucleotide for detection of SNP TSC0041808
tttagtgtaatat

SEQ ID NO: 166988 - DNA, 13 bp, Artificial Sequence
  Oligonucleotide for detection of SNP TSC0041808
atattacactaaa

SEQ ID NO: 166989 - DNA, 13 bp, Artificial Sequence
  Oligonucleotide for detection of SNP TSC0041808
tttagtataatat

SEQ ID NO: 166990 - DNA, 13 bp, Artificial Sequence
  Oligonucleotide for detection of SNP TSC0041808
atattatactaaa

SEQ ID NO: 166991 - DNA, 13 bp, Artificial Sequence
  Oligonucleotide for detection of SNP TSC0041810
ttttaggttattt

SEQ ID NO: 166992 - DNA, 13 bp, Artificial Sequence
  Oligonucleotide for detection of SNP TSC0041810
aaataacctaaaa

SEQ ID NO: 166993 - DNA, 13 bp, Artificial Sequence
  Oligonucleotide for detection of SNP TSC0041826
aatttaattatat

SEQ ID NO: 166994 - DNA, 13 bp, Artificial Sequence
  Oligonucleotide for detection of SNP TSC0041826
atataattaaatt

SEQ ID NO: 166995 - DNA, 13 bp, Artificial Sequence
  Oligonucleotide for detection of SNP TSC0041826
aatttagttatat

SEQ ID NO: 166996 - DNA, 13 bp, Artificial Sequence
  Oligonucleotide for detection of SNP TSC0041826
atataactaaatt

SEQ ID NO: 166997 - DNA, 13 bp, Artificial Sequence
  Oligonucleotide for detection of SNP TSC0041827
attattgagatty

SEQ ID NO: 166998 - DNA, 13 bp, Artificial Sequence
  Oligonucleotide for detection of SNP TSC0041827
raatctcaataat

SEQ ID NO: 166999 - DNA, 13 bp, Artificial Sequence
  Oligonucleotide for detection of SNP TSC0041827
attattaagatty

SEQ ID NO: 167000 - DNA, 13 bp, Artificial Sequence
  Oligonucleotide for detection of SNP TSC0041827
raatcttaataat

SEQ ID NO: 167001 - DNA, 13 bp, Artificial Sequence
  Oligonucleotide for detection of SNP TSC0008523
gataaaatattay

SEQ ID NO: 167002 - DNA, 13 bp, Artificial Sequence
  Oligonucleotide for detection of SNP TSC0008523
rtaatattttatc

SEQ ID NO: 167003 - DNA, 13 bp, Artificial Sequence
  Oligonucleotide for detection of SNP TSC0008523
gataaattattay

SEQ ID NO: 167004 - DNA, 13 bp, Artificial Sequence
  Oligonucleotide for detection of SNP TSC0008523
rtaataatttatc

SEQ ID NO: 167005 - DNA, 13 bp, Artificial Sequence
  Oligonucleotide for detection of SNP TSC0008523
gtgatattttgty

SEQ ID NO: 167006 - DNA, 13 bp, Artificial Sequence
  Oligonucleotide for detection of SNP TSC0008523
racaaaatatcac

SEQ ID NO: 167007 - DNA, 13 bp, Artificial Sequence
  Oligonucleotide for detection of SNP TSC0008523
gtgatagtttgty

SEQ ID NO: 167008 - DNA, 13 bp, Artificial Sequence
  Oligonucleotide for detection of SNP TSC0008523
racaaactatcac

SEQ ID NO: 167009 - DNA, 13 bp, Artificial Sequence
  Oligonucleotide for detection of SNP TSC0041829
ttgtatgttagtt

SEQ ID NO: 167010 - DNA, 13 bp, Artificial Sequence
  Oligonucleotide for detection of SNP TSC0041829
aactaacatacaa

SEQ ID NO: 167011 - DNA, 13 bp, Artificial Sequence
  Oligonucleotide for detection of SNP TSC0041829
agttggaatgtag

SEQ ID NO: 167012 - DNA, 13 bp, Artificial Sequence
  Oligonucleotide for detection of SNP TSC0041829
ctacattccaact

SEQ ID NO: 167013 - DNA, 13 bp, Artificial Sequence
  Oligonucleotide for detection of SNP TSC0041829
agttggtatgtag

SEQ ID NO: 167014 - DNA, 13 bp, Artificial Sequence
  Oligonucleotide for detection of SNP TSC0041829
ctacataccaact

SEQ ID NO: 167015 - DNA, 13 bp, Artificial Sequence
  Oligonucleotide for detection of SNP TSC0008414
ggttaagtttgtt

SEQ ID NO: 167016 - DNA, 13 bp, Artificial Sequence
  Oligonucleotide for detection of SNP TSC0008414
aacaaacttaacc

SEQ ID NO: 167017 - DNA, 13 bp, Artificial Sequence
  Oligonucleotide for detection of SNP TSC0008414
ggttaaatttgtt

SEQ ID NO: 167018 - DNA, 13 bp, Artificial Sequence
  Oligonucleotide for detection of SNP TSC0008414
aacaaatttaacc

SEQ ID NO: 167019 - DNA, 13 bp, Artificial Sequence
  Oligonucleotide for detection of SNP TSC0041834
aaaaagtgtgaaa

SEQ ID NO: 167020 - DNA, 13 bp, Artificial Sequence
  Oligonucleotide for detection of SNP TSC0041834
tttcacacttttt

SEQ ID NO: 167021 - DNA, 13 bp, Artificial Sequence
  Oligonucleotide for detection of SNP TSC0041834
aaaaagggtgaaa

SEQ ID NO: 167022 - DNA, 13 bp, Artificial Sequence
  Oligonucleotide for detection of SNP TSC0041834
tttcacccttttt

SEQ ID NO: 167023 - DNA, 13 bp, Artificial Sequence
  Oligonucleotide for detection of SNP TSC0010735
ttttgttggtatt

SEQ ID NO: 167024 - DNA, 13 bp, Artificial Sequence
  Oligonucleotide for detection of SNP TSC0010735
aataccaacaaaa

SEQ ID NO: 167025 - DNA, 13 bp, Artificial Sequence
  Oligonucleotide for detection of SNP TSC0010735
tttcgttggtatt

SEQ ID NO: 167026 - DNA, 13 bp, Artificial Sequence
  Oligonucleotide for detection of SNP TSC0010735
aataccaacgaaa

SEQ ID NO: 167027 - DNA, 13 bp, Artificial Sequence
  Oligonucleotide for detection of SNP TSC0010735
ttttgtcggtatt

SEQ ID NO: 167028 - DNA, 13 bp, Artificial Sequence
  Oligonucleotide for detection of SNP TSC0010735
aataccgacaaaa

SEQ ID NO: 167029 - DNA, 13 bp, Artificial Sequence
  Oligonucleotide for detection of SNP TSC0010735
tttcgtcggtatt

SEQ ID NO: 167030 - DNA, 13 bp, Artificial Sequence
  Oligonucleotide for detection of SNP TSC0010735
aataccgacgaaa

SEQ ID NO: 167031 - DNA, 13 bp, Artificial Sequence
  Oligonucleotide for detection of SNP TSC0010735
aatgttggtgaag

SEQ ID NO: 167032 - DNA, 13 bp, Artificial Sequence
  Oligonucleotide for detection of SNP TSC0010735
cttcaccaacatt

SEQ ID NO: 167033 - DNA, 13 bp, Artificial Sequence
  Oligonucleotide for detection of SNP TSC0010735
aatgttagtgaag

SEQ ID NO: 167034 - DNA, 13 bp, Artificial Sequence
  Oligonucleotide for detection of SNP TSC0010735
cttcactaacatt

SEQ ID NO: 167035 - DNA, 13 bp, Artificial Sequence
  Oligonucleotide for detection of SNP TSC0010735
aatgtcggtgaag

SEQ ID NO: 167036 - DNA, 13 bp, Artificial Sequence
  Oligonucleotide for detection of SNP TSC0010735
cttcaccgacatt

SEQ ID NO: 167037 - DNA, 13 bp, Artificial Sequence
  Oligonucleotide for detection of SNP TSC0010735
aatgttagcgaag

SEQ ID NO: 167038 - DNA, 13 bp, Artificial Sequence
  Oligonucleotide for detection of SNP TSC0010735
cttcgctaacatt

SEQ ID NO: 167039 - DNA, 13 bp, Artificial Sequence
  Oligonucleotide for detection of SNP TSC0010735
aatgttggcgaag

SEQ ID NO: 167040 - DNA, 13 bp, Artificial Sequence
  Oligonucleotide for detection of SNP TSC0010735
cttcgccaacatt

SEQ ID NO: 167041 - DNA, 13 bp, Artificial Sequence
  Oligonucleotide for detection of SNP TSC0010735
aatgtcggcgaag

SEQ ID NO: 167042 - DNA, 13 bp, Artificial Sequence
  Oligonucleotide for detection of SNP TSC0010735
cttcgccgacatt

SEQ ID NO: 167043 - DNA, 13 bp, Artificial Sequence
  Oligonucleotide for detection of SNP TSC0041835
agaaaggaggaaa

SEQ ID NO: 167044 - DNA, 13 bp, Artificial Sequence
  Oligonucleotide for detection of SNP TSC0041835
tttcctcctttct

SEQ ID NO: 167045 - DNA, 13 bp, Artificial Sequence
  Oligonucleotide for detection of SNP TSC0041835
agaaagtaggaaa

SEQ ID NO: 167046 - DNA, 13 bp, Artificial Sequence
  Oligonucleotide for detection of SNP TSC0041835
tttcctactttct

SEQ ID NO: 167047 - DNA, 13 bp, Artificial Sequence
  Oligonucleotide for detection of SNP TSC0041836
gaggggtggaata

SEQ ID NO: 167048 - DNA, 13 bp, Artificial Sequence
  Oligonucleotide for detection of SNP TSC0041836
tattccacccctc

SEQ ID NO: 167049 - DNA, 13 bp, Artificial Sequence
  Oligonucleotide for detection of SNP TSC0041836
gaggggcggaata

SEQ ID NO: 167050 - DNA, 13 bp, Artificial Sequence
  Oligonucleotide for detection of SNP TSC0041836
tattccgcccctc

SEQ ID NO: 167051 - DNA, 13 bp, Artificial Sequence
  Oligonucleotide for detection of SNP TSC0005409
tattatattaaga

SEQ ID NO: 167052 - DNA, 13 bp, Artificial Sequence
  Oligonucleotide for detection of SNP TSC0005409
tcttaatataata

SEQ ID NO: 167053 - DNA, 13 bp, Artificial Sequence
  Oligonucleotide for detection of SNP TSC0005409
tattatgttaaga

SEQ ID NO: 167054 - DNA, 13 bp, Artificial Sequence
  Oligonucleotide for detection of SNP TSC0005409
tcttaacataata

SEQ ID NO: 167055 - DNA, 13 bp, Artificial Sequence
  Oligonucleotide for detection of SNP TSC0005410
tttaggaaggttt

SEQ ID NO: 167056 - DNA, 13 bp, Artificial Sequence
  Oligonucleotide for detection of SNP TSC0005410
aaaccttcctaaa

SEQ ID NO: 167057 - DNA, 13 bp, Artificial Sequence
  Oligonucleotide for detection of SNP TSC0005410
tttagggaggttt

SEQ ID NO: 167058 - DNA, 13 bp, Artificial Sequence
  Oligonucleotide for detection of SNP TSC0005410
aaacctccctaaa

SEQ ID NO: 167059 - DNA, 13 bp, Artificial Sequence
  Oligonucleotide for detection of SNP TSC0008300
aaaggaagattga

SEQ ID NO: 167060 - DNA, 13 bp, Artificial Sequence
  Oligonucleotide for detection of SNP TSC0008300
tcaatcttccttt

SEQ ID NO: 167061 - DNA, 13 bp, Artificial Sequence
  Oligonucleotide for detection of SNP TSC0008300
aaaggaggattga

SEQ ID NO: 167062 - DNA, 13 bp, Artificial Sequence
  Oligonucleotide for detection of SNP TSC0008300
tcaatcctccttt

SEQ ID NO: 167063 - DNA, 13 bp, Artificial Sequence
  Oligonucleotide for detection of SNP TSC0008301
gtagggaatgagg

SEQ ID NO: 167064 - DNA, 13 bp, Artificial Sequence
  Oligonucleotide for detection of SNP TSC0008301
cctcattccctac

SEQ ID NO: 167065 - DNA, 13 bp, Artificial Sequence
  Oligonucleotide for detection of SNP TSC0008301
gtagggtatgagg

SEQ ID NO: 167066 - DNA, 13 bp, Artificial Sequence
  Oligonucleotide for detection of SNP TSC0008301
cctcataccctac

SEQ ID NO: 167067 - DNA, 13 bp, Artificial Sequence
  Oligonucleotide for detection of SNP TSC0009524
ttttttggttaag

SEQ ID NO: 167068 - DNA, 13 bp, Artificial Sequence
  Oligonucleotide for detection of SNP TSC0009524
cttaaccaaaaaa

SEQ ID NO: 167069 - DNA, 13 bp, Artificial Sequence
  Oligonucleotide for detection of SNP TSC0009524
ttttttagttaag

SEQ ID NO: 167070 - DNA, 13 bp, Artificial Sequence
  Oligonucleotide for detection of SNP TSC0009524
cttaactaaaaaa

SEQ ID NO: 167071 - DNA, 13 bp, Artificial Sequence
  Oligonucleotide for detection of SNP TSC0041838
tgtttttgattgt

SEQ ID NO: 167072 - DNA, 13 bp, Artificial Sequence
  Oligonucleotide for detection of SNP TSC0041838
acaatcaaaaaca

SEQ ID NO: 167073 - DNA, 13 bp, Artificial Sequence
  Oligonucleotide for detection of SNP TSC0041838
tgttttcgattgt

SEQ ID NO: 167074 - DNA, 13 bp, Artificial Sequence
  Oligonucleotide for detection of SNP TSC0041838
acaatcgaaaaca

SEQ ID NO: 167075 - DNA, 13 bp, Artificial Sequence
  Oligonucleotide for detection of SNP TSC0041838
tgtttttgatcgt

SEQ ID NO: 167076 - DNA, 13 bp, Artificial Sequence
  Oligonucleotide for detection of SNP TSC0041838
acgatcaaaaaca

SEQ ID NO: 167077 - DNA, 13 bp, Artificial Sequence
  Oligonucleotide for detection of SNP TSC0041838
tgttttcgatcgt

SEQ ID NO: 167078 - DNA, 13 bp, Artificial Sequence
  Oligonucleotide for detection of SNP TSC0041838
acgatcgaaaaca

SEQ ID NO: 167079 - DNA, 13 bp, Artificial Sequence
  Oligonucleotide for detection of SNP TSC0041838
atgattggaagta

SEQ ID NO: 167080 - DNA, 13 bp, Artificial Sequence
  Oligonucleotide for detection of SNP TSC0041838
tacttccaatcat

SEQ ID NO: 167081 - DNA, 13 bp, Artificial Sequence
  Oligonucleotide for detection of SNP TSC0041838
atgattagaagta

SEQ ID NO: 167082 - DNA, 13 bp, Artificial Sequence
  Oligonucleotide for detection of SNP TSC0041838
tacttctaatcat

SEQ ID NO: 167083 - DNA, 13 bp, Artificial Sequence
  Oligonucleotide for detection of SNP TSC0041838
acgattggaagta

SEQ ID NO: 167084 - DNA, 13 bp, Artificial Sequence
  Oligonucleotide for detection of SNP TSC0041838
tacttccaatcgt

SEQ ID NO: 167085 - DNA, 13 bp, Artificial Sequence
  Oligonucleotide for detection of SNP TSC0041838
acgattagaagta

SEQ ID NO: 167086 - DNA, 13 bp, Artificial Sequence
  Oligonucleotide for detection of SNP TSC0041838
tacttctaatcgt

SEQ ID NO: 167087 - DNA, 13 bp, Artificial Sequence
  Oligonucleotide for detection of SNP TSC0041838
atgatcggaagta

SEQ ID NO: 167088 - DNA, 13 bp, Artificial Sequence
  Oligonucleotide for detection of SNP TSC0041838
tacttccgatcat

SEQ ID NO: 167089 - DNA, 13 bp, Artificial Sequence
  Oligonucleotide for detection of SNP TSC0041838
acgatcggaagta

SEQ ID NO: 167090 - DNA, 13 bp, Artificial Sequence
  Oligonucleotide for detection of SNP TSC0041838
tacttccgatcgt

SEQ ID NO: 167091 - DNA, 13 bp, Artificial Sequence
  Oligonucleotide for detection of SNP TSC0041839
attatttatattt

SEQ ID NO: 167092 - DNA, 13 bp, Artificial Sequence
  Oligonucleotide for detection of SNP TSC0041839
aaatataaataat

SEQ ID NO: 167093 - DNA, 13 bp, Artificial Sequence
  Oligonucleotide for detection of SNP TSC0041839
attattgatattt

SEQ ID NO: 167094 - DNA, 13 bp, Artificial Sequence
  Oligonucleotide for detection of SNP TSC0041839
aaatatcaataat

SEQ ID NO: 167095 - DNA, 13 bp, Artificial Sequence
  Oligonucleotide for detection of SNP TSC0041839
attatcgatattt

SEQ ID NO: 167096 - DNA, 13 bp, Artificial Sequence
  Oligonucleotide for detection of SNP TSC0041839
aaatatcgataat

SEQ ID NO: 167097 - DNA, 13 bp, Artificial Sequence
  Oligonucleotide for detection of SNP TSC0041839
aaatgtgggtgat

SEQ ID NO: 167098 - DNA, 13 bp, Artificial Sequence
  Oligonucleotide for detection of SNP TSC0041839
atcacccacattt

SEQ ID NO: 167099 - DNA, 13 bp, Artificial Sequence
  Oligonucleotide for detection of SNP TSC0041839
aaatgtaggtgat

SEQ ID NO: 167100 - DNA, 13 bp, Artificial Sequence
  Oligonucleotide for detection of SNP TSC0041839
atcacctacattt

SEQ ID NO: 167101 - DNA, 13 bp, Artificial Sequence
  Oligonucleotide for detection of SNP TSC0041839
aaatgttggtgat

SEQ ID NO: 167102 - DNA, 13 bp, Artificial Sequence
  Oligonucleotide for detection of SNP TSC0041839
atcaccaacattt

SEQ ID NO: 167103 - DNA, 13 bp, Artificial Sequence
  Oligonucleotide for detection of SNP TSC0041839
aaatgtcggtgat

SEQ ID NO: 167104 - DNA, 13 bp, Artificial Sequence
  Oligonucleotide for detection of SNP TSC0041839
atcaccgacattt

SEQ ID NO: 167105 - DNA, 13 bp, Artificial Sequence
  Oligonucleotide for detection of SNP TSC0010090
tttaataagttta

SEQ ID NO: 167106 - DNA, 13 bp, Artificial Sequence
  Oligonucleotide for detection of SNP TSC0010090
taaacttattaaa

SEQ ID NO: 167107 - DNA, 13 bp, Artificial Sequence
  Oligonucleotide for detection of SNP TSC0010091
tgtttatgtgaay

SEQ ID NO: 167108 - DNA, 13 bp, Artificial Sequence
  Oligonucleotide for detection of SNP TSC0010091
rttcacataaaca

SEQ ID NO: 167109 - DNA, 13 bp, Artificial Sequence
  Oligonucleotide for detection of SNP TSC0010091
tgtttacgtgaay

SEQ ID NO: 167110 - DNA, 13 bp, Artificial Sequence
  Oligonucleotide for detection of SNP TSC0010091
rttcacgtaaaca

SEQ ID NO: 167111 - DNA, 13 bp, Artificial Sequence
  Oligonucleotide for detection of SNP TSC0010091
gtttatgtgggta

SEQ ID NO: 167112 - DNA, 13 bp, Artificial Sequence
  Oligonucleotide for detection of SNP TSC0010091
tacccacataaac

SEQ ID NO: 167113 - DNA, 13 bp, Artificial Sequence
  Oligonucleotide for detection of SNP TSC0010091
gtttatatgggta

SEQ ID NO: 167114 - DNA, 13 bp, Artificial Sequence
  Oligonucleotide for detection of SNP TSC0010091
tacccatataaac

SEQ ID NO: 167115 - DNA, 13 bp, Artificial Sequence
  Oligonucleotide for detection of SNP TSC0010091
gtttacgtgggta

SEQ ID NO: 167116 - DNA, 13 bp, Artificial Sequence
  Oligonucleotide for detection of SNP TSC0010091
tacccacgtaaac

SEQ ID NO: 167117 - DNA, 13 bp, Artificial Sequence
  Oligonucleotide for detection of SNP TSC0010092
ttaagaggattag

SEQ ID NO: 167118 - DNA, 13 bp, Artificial Sequence
  Oligonucleotide for detection of SNP TSC0010092
ctaatcctcttaa

SEQ ID NO: 167119 - DNA, 13 bp, Artificial Sequence
  Oligonucleotide for detection of SNP TSC0010092
ttaagaagattag

SEQ ID NO: 167120 - DNA, 13 bp, Artificial Sequence
  Oligonucleotide for detection of SNP TSC0010092
ctaatcttcttaa

SEQ ID NO: 167121 - DNA, 13 bp, Artificial Sequence
  Oligonucleotide for detection of SNP TSC0041841
gtttttaggaaaa

SEQ ID NO: 167122 - DNA, 13 bp, Artificial Sequence
  Oligonucleotide for detection of SNP TSC0041841
ttttcctaaaaac

SEQ ID NO: 167123 - DNA, 13 bp, Artificial Sequence
  Oligonucleotide for detection of SNP TSC0041841
gttttttggaaaa

SEQ ID NO: 167124 - DNA, 13 bp, Artificial Sequence
  Oligonucleotide for detection of SNP TSC0041841
ttttccaaaaaac

SEQ ID NO: 167125 - DNA, 13 bp, Artificial Sequence
  Oligonucleotide for detection of SNP TSC0041841
gtttttgggaaaa

SEQ ID NO: 167126 - DNA, 13 bp, Artificial Sequence
  Oligonucleotide for detection of SNP TSC0041841
ttttcccaaaaac

SEQ ID NO: 167127 - DNA, 13 bp, Artificial Sequence
  Oligonucleotide for detection of SNP TSC0041841
gtttttcggaaaa

SEQ ID NO: 167128 - DNA, 13 bp, Artificial Sequence
  Oligonucleotide for detection of SNP TSC0041841
ttttccgaaaaac

SEQ ID NO: 167129 - DNA, 13 bp, Artificial Sequence
  Oligonucleotide for detection of SNP TSC0041841
gttttcgggaaaa

SEQ ID NO: 167130 - DNA, 13 bp, Artificial Sequence
  Oligonucleotide for detection of SNP TSC0041841
ttttcccgaaaac

SEQ ID NO: 167131 - DNA, 13 bp, Artificial Sequence
  Oligonucleotide for detection of SNP TSC0041841
tttttttgagggy

SEQ ID NO: 167132 - DNA, 13 bp, Artificial Sequence
  Oligonucleotide for detection of SNP TSC0041841
rccctcaaaaaaa

SEQ ID NO: 167133 - DNA, 13 bp, Artificial Sequence
  Oligonucleotide for detection of SNP TSC0041841
ttttttggagggy

SEQ ID NO: 167134 - DNA, 13 bp, Artificial Sequence
  Oligonucleotide for detection of SNP TSC0041841
rccctccaaaaaa

SEQ ID NO: 167135 - DNA, 13 bp, Artificial Sequence
  Oligonucleotide for detection of SNP TSC0041841
tttttcggagggy

SEQ ID NO: 167136 - DNA, 13 bp, Artificial Sequence
  Oligonucleotide for detection of SNP TSC0041841
rccctccgaaaaa

SEQ ID NO: 167137 - DNA, 13 bp, Artificial Sequence
  Oligonucleotide for detection of SNP TSC0041841
ttttttcgagggy

SEQ ID NO: 167138 - DNA, 13 bp, Artificial Sequence
  Oligonucleotide for detection of SNP TSC0041841
rccctcgaaaaaa

SEQ ID NO: 167139 - DNA, 13 bp, Artificial Sequence
  Oligonucleotide for detection of SNP TSC0041842
aaaatttgttaag

SEQ ID NO: 167140 - DNA, 13 bp, Artificial Sequence
  Oligonucleotide for detection of SNP TSC0041842
cttaacaaatttt

SEQ ID NO: 167141 - DNA, 13 bp, Artificial Sequence
  Oligonucleotide for detection of SNP TSC0041842
aaaattcgttaag

SEQ ID NO: 167142 - DNA, 13 bp, Artificial Sequence
  Oligonucleotide for detection of SNP TSC0041842
cttaacgaatttt

SEQ ID NO: 167143 - DNA, 13 bp, Artificial Sequence
  Oligonucleotide for detection of SNP TSC0041842
tttaatggatttt

SEQ ID NO: 167144 - DNA, 13 bp, Artificial Sequence
  Oligonucleotide for detection of SNP TSC0041842
aaaatccattaaa

SEQ ID NO: 167145 - DNA, 13 bp, Artificial Sequence
  Oligonucleotide for detection of SNP TSC0041842
tttaatagatttt

SEQ ID NO: 167146 - DNA, 13 bp, Artificial Sequence
  Oligonucleotide for detection of SNP TSC0041842
aaaatctattaaa

SEQ ID NO: 167147 - DNA, 13 bp, Artificial Sequence
  Oligonucleotide for detection of SNP TSC0041842
tttaacggatttt

SEQ ID NO: 167148 - DNA, 13 bp, Artificial Sequence
  Oligonucleotide for detection of SNP TSC0041842
aaaatccgttaaa

SEQ ID NO: 167149 - DNA, 13 bp, Artificial Sequence
  Oligonucleotide for detection of SNP TSC0000089
ttgattagttgat

SEQ ID NO: 167150 - DNA, 13 bp, Artificial Sequence
  Oligonucleotide for detection of SNP TSC0000089
atcaactaatcaa

SEQ ID NO: 167151 - DNA, 13 bp, Artificial Sequence
  Oligonucleotide for detection of SNP TSC0000089
ttgattggttgat

SEQ ID NO: 167152 - DNA, 13 bp, Artificial Sequence
  Oligonucleotide for detection of SNP TSC0000089
atcaaccaatcaa

SEQ ID NO: 167153 - DNA, 13 bp, Artificial Sequence
  Oligonucleotide for detection of SNP TSC0010008
gtgtggggttaat

SEQ ID NO: 167154 - DNA, 13 bp, Artificial Sequence
  Oligonucleotide for detection of SNP TSC0010008
attaaccccacac

SEQ ID NO: 167155 - DNA, 13 bp, Artificial Sequence
  Oligonucleotide for detection of SNP TSC0010008
gtgtggagttaat

SEQ ID NO: 167156 - DNA, 13 bp, Artificial Sequence
  Oligonucleotide for detection of SNP TSC0010008
attaactccacac

SEQ ID NO: 167157 - DNA, 13 bp, Artificial Sequence
  Oligonucleotide for detection of SNP TSC0041843
taattgattaatt

SEQ ID NO: 167158 - DNA, 13 bp, Artificial Sequence
  Oligonucleotide for detection of SNP TSC0041843
aattaatcaatta

SEQ ID NO: 167159 - DNA, 13 bp, Artificial Sequence
  Oligonucleotide for detection of SNP TSC0041843
taattgtttaatt

SEQ ID NO: 167160 - DNA, 13 bp, Artificial Sequence
  Oligonucleotide for detection of SNP TSC0041843
aattaaacaatta

SEQ ID NO: 167161 - DNA, 13 bp, Artificial Sequence
  Oligonucleotide for detection of SNP TSC0041843
agttgattagtta

SEQ ID NO: 167162 - DNA, 13 bp, Artificial Sequence
  Oligonucleotide for detection of SNP TSC0041843
taactaatcaact

SEQ ID NO: 167163 - DNA, 13 bp, Artificial Sequence
  Oligonucleotide for detection of SNP TSC0041843
agttgagtagtta

SEQ ID NO: 167164 - DNA, 13 bp, Artificial Sequence
  Oligonucleotide for detection of SNP TSC0041843
taactactcaact

SEQ ID NO: 167165 - DNA, 13 bp, Artificial Sequence
  Oligonucleotide for detection of SNP TSC0009486
tgttgttggtagy

SEQ ID NO: 167166 - DNA, 13 bp, Artificial Sequence
  Oligonucleotide for detection of SNP TSC0009486
rctaccaacaaca

SEQ ID NO: 167167 - DNA, 13 bp, Artificial Sequence
  Oligonucleotide for detection of SNP TSC0009486
tgttgtcggtagy

SEQ ID NO: 167168 - DNA, 13 bp, Artificial Sequence
  Oligonucleotide for detection of SNP TSC0009486
rctaccgacaaca

SEQ ID NO: 167169 - DNA, 13 bp, Artificial Sequence
  Oligonucleotide for detection of SNP TSC0009486
gttgttgatagta

SEQ ID NO: 167170 - DNA, 13 bp, Artificial Sequence
  Oligonucleotide for detection of SNP TSC0009486
tactatcaacaac

SEQ ID NO: 167171 - DNA, 13 bp, Artificial Sequence
  Oligonucleotide for detection of SNP TSC0009486
gttgttaatagta

SEQ ID NO: 167172 - DNA, 13 bp, Artificial Sequence
  Oligonucleotide for detection of SNP TSC0009486
tactattaacaac

SEQ ID NO: 167173 - DNA, 13 bp, Artificial Sequence
  Oligonucleotide for detection of SNP TSC0009486
gttgtcgatagta

SEQ ID NO: 167174 - DNA, 13 bp, Artificial Sequence
  Oligonucleotide for detection of SNP TSC0009486
tactatcgacaac

SEQ ID NO: 167175 - DNA, 13 bp, Artificial Sequence
  Oligonucleotide for detection of SNP TSC0041845
tatgatgtgaggy

SEQ ID NO: 167176 - DNA, 13 bp, Artificial Sequence
  Oligonucleotide for detection of SNP TSC0041845
rcctcacatcata

SEQ ID NO: 167177 - DNA, 13 bp, Artificial Sequence
  Oligonucleotide for detection of SNP TSC0041845
tatgatatgaggy

SEQ ID NO: 167178 - DNA, 13 bp, Artificial Sequence
  Oligonucleotide for detection of SNP TSC0041845
rcctcatatcata

SEQ ID NO: 167179 - DNA, 13 bp, Artificial Sequence
  Oligonucleotide for detection of SNP TSC0041845
tatgatgcgaggy

SEQ ID NO: 167180 - DNA, 13 bp, Artificial Sequence
  Oligonucleotide for detection of SNP TSC0041845
rcctcgcatcata

SEQ ID NO: 167181 - DNA, 13 bp, Artificial Sequence
  Oligonucleotide for detection of SNP TSC0041845
tatgatacgaggy

SEQ ID NO: 167182 - DNA, 13 bp, Artificial Sequence
  Oligonucleotide for detection of SNP TSC0041845
rcctcgtatcata

SEQ ID NO: 167183 - DNA, 13 bp, Artificial Sequence
  Oligonucleotide for detection of SNP TSC0009483
tatagttgtttgy

SEQ ID NO: 167184 - DNA, 13 bp, Artificial Sequence
  Oligonucleotide for detection of SNP TSC0009483
rcaaacaactata

SEQ ID NO: 167185 - DNA, 13 bp, Artificial Sequence
  Oligonucleotide for detection of SNP TSC0009483
tatagtcgtttgy

SEQ ID NO: 167186 - DNA, 13 bp, Artificial Sequence
  Oligonucleotide for detection of SNP TSC0009483
rcaaacgactata

SEQ ID NO: 167187 - DNA, 13 bp, Artificial Sequence
  Oligonucleotide for detection of SNP TSC0009483
gtagatggttgtg

SEQ ID NO: 167188 - DNA, 13 bp, Artificial Sequence
  Oligonucleotide for detection of SNP TSC0009483
cacaaccatctac

SEQ ID NO: 167189 - DNA, 13 bp, Artificial Sequence
  Oligonucleotide for detection of SNP TSC0009483
gtagatagttgtg

SEQ ID NO: 167190 - DNA, 13 bp, Artificial Sequence
  Oligonucleotide for detection of SNP TSC0009483
cacaactatctac

SEQ ID NO: 167191 - DNA, 13 bp, Artificial Sequence
  Oligonucleotide for detection of SNP TSC0009483
gtagacggttgtg

SEQ ID NO: 167192 - DNA, 13 bp, Artificial Sequence
  Oligonucleotide for detection of SNP TSC0009483
cacaaccgtctac

SEQ ID NO: 167193 - DNA, 13 bp, Artificial Sequence
  Oligonucleotide for detection of SNP TSC0009484
atttttagattag

SEQ ID NO: 167194 - DNA, 13 bp, Artificial Sequence
  Oligonucleotide for detection of SNP TSC0009484
ctaatctaaaaat

SEQ ID NO: 167195 - DNA, 13 bp, Artificial Sequence
  Oligonucleotide for detection of SNP TSC0009484
atttttggattag

SEQ ID NO: 167196 - DNA, 13 bp, Artificial Sequence
  Oligonucleotide for detection of SNP TSC0009484
ctaatccaaaaat

SEQ ID NO: 167197 - DNA, 13 bp, Artificial Sequence
  Oligonucleotide for detection of SNP TSC0009484
attttcggattag

SEQ ID NO: 167198 - DNA, 13 bp, Artificial Sequence
  Oligonucleotide for detection of SNP TSC0009484
ctaatccgaaaat

SEQ ID NO: 167199 - DNA, 13 bp, Artificial Sequence
  Oligonucleotide for detection of SNP TSC0009484
ttagtttggggat

SEQ ID NO: 167200 - DNA, 13 bp, Artificial Sequence
  Oligonucleotide for detection of SNP TSC0009484
atccccaaactaa

SEQ ID NO: 167201 - DNA, 13 bp, Artificial Sequence
  Oligonucleotide for detection of SNP TSC0009484
ttagttcggggat

SEQ ID NO: 167202 - DNA, 13 bp, Artificial Sequence
  Oligonucleotide for detection of SNP TSC0009484
atccccgaactaa

SEQ ID NO: 167203 - DNA, 13 bp, Artificial Sequence
  Oligonucleotide for detection of SNP TSC0041846
tgggattgtttty

SEQ ID NO: 167204 - DNA, 13 bp, Artificial Sequence
  Oligonucleotide for detection of SNP TSC0041846
raaaacaatccca

SEQ ID NO: 167205 - DNA, 13 bp, Artificial Sequence
  Oligonucleotide for detection of SNP TSC0041846
tgggatggtttty

SEQ ID NO: 167206 - DNA, 13 bp, Artificial Sequence
  Oligonucleotide for detection of SNP TSC0041846
raaaaccatccca

SEQ ID NO: 167207 - DNA, 13 bp, Artificial Sequence
  Oligonucleotide for detection of SNP TSC0041846
tgggatcgtttty

SEQ ID NO: 167208 - DNA, 13 bp, Artificial Sequence
  Oligonucleotide for detection of SNP TSC0041846
raaaacgatccca

SEQ ID NO: 167209 - DNA, 13 bp, Artificial Sequence
  Oligonucleotide for detection of SNP TSC0041846
gaaaatgatttta

SEQ ID NO: 167210 - DNA, 13 bp, Artificial Sequence
  Oligonucleotide for detection of SNP TSC0041846
taaaatcattttc

SEQ ID NO: 167211 - DNA, 13 bp, Artificial Sequence
  Oligonucleotide for detection of SNP TSC0041846
gaaaattatttta

SEQ ID NO: 167212 - DNA, 13 bp, Artificial Sequence
  Oligonucleotide for detection of SNP TSC0041846
taaaataattttc

SEQ ID NO: 167213 - DNA, 13 bp, Artificial Sequence
  Oligonucleotide for detection of SNP TSC0041846
gaaaacgatttta

SEQ ID NO: 167214 - DNA, 13 bp, Artificial Sequence
  Oligonucleotide for detection of SNP TSC0041846
taaaatcgttttc

SEQ ID NO: 167215 - DNA, 13 bp, Artificial Sequence
  Oligonucleotide for detection of SNP TSC0041854
atattgaatttta

SEQ ID NO: 167216 - DNA, 13 bp, Artificial Sequence
  Oligonucleotide for detection of SNP TSC0041854
taaaattcaatat

SEQ ID NO: 167217 - DNA, 13 bp, Artificial Sequence
  Oligonucleotide for detection of SNP TSC0041855
tttatttgggaat

SEQ ID NO: 167218 - DNA, 13 bp, Artificial Sequence
  Oligonucleotide for detection of SNP TSC0041855
attcccaaataaa

SEQ ID NO: 167219 - DNA, 13 bp, Artificial Sequence
  Oligonucleotide for detection of SNP TSC0041855
tttattcgggaat

SEQ ID NO: 167220 - DNA, 13 bp, Artificial Sequence
  Oligonucleotide for detection of SNP TSC0041855
attcccgaataaa

SEQ ID NO: 167221 - DNA, 13 bp, Artificial Sequence
  Oligonucleotide for detection of SNP TSC0041855
atttttgggtaga

SEQ ID NO: 167222 - DNA, 13 bp, Artificial Sequence
  Oligonucleotide for detection of SNP TSC0041855
tctacccaaaaat

SEQ ID NO: 167223 - DNA, 13 bp, Artificial Sequence
  Oligonucleotide for detection of SNP TSC0041855
atttttaggtaga

SEQ ID NO: 167224 - DNA, 13 bp, Artificial Sequence
  Oligonucleotide for detection of SNP TSC0041855
tctacctaaaaat

SEQ ID NO: 167225 - DNA, 13 bp, Artificial Sequence
  Oligonucleotide for detection of SNP TSC0041855
attttcgggtaga

SEQ ID NO: 167226 - DNA, 13 bp, Artificial Sequence
  Oligonucleotide for detection of SNP TSC0041855
tctacccgaaaat

SEQ ID NO: 167227 - DNA, 13 bp, Artificial Sequence
  Oligonucleotide for detection of SNP TSC0041856
ttagttaatatty

SEQ ID NO: 167228 - DNA, 13 bp, Artificial Sequence
  Oligonucleotide for detection of SNP TSC0041856
raatattaactaa

SEQ ID NO: 167229 - DNA, 13 bp, Artificial Sequence
  Oligonucleotide for detection of SNP TSC0041856
ttagttgatatty

SEQ ID NO: 167230 - DNA, 13 bp, Artificial Sequence
  Oligonucleotide for detection of SNP TSC0041856
raatatcaactaa

SEQ ID NO: 167231 - DNA, 13 bp, Artificial Sequence
  Oligonucleotide for detection of SNP TSC0041856
ttagtcgatatty

SEQ ID NO: 167232 - DNA, 13 bp, Artificial Sequence
  Oligonucleotide for detection of SNP TSC0041856
raatatcgactaa

SEQ ID NO: 167233 - DNA, 13 bp, Artificial Sequence
  Oligonucleotide for detection of SNP TSC0041856
ggatgttggttgg

SEQ ID NO: 167234 - DNA, 13 bp, Artificial Sequence
  Oligonucleotide for detection of SNP TSC0041856
ccaaccaacatcc

SEQ ID NO: 167235 - DNA, 13 bp, Artificial Sequence
  Oligonucleotide for detection of SNP TSC0041856
ggatgtcggttgg

SEQ ID NO: 167236 - DNA, 13 bp, Artificial Sequence
  Oligonucleotide for detection of SNP TSC0041856
ccaaccgacatcc

SEQ ID NO: 167237 - DNA, 13 bp, Artificial Sequence
  Oligonucleotide for detection of SNP TSC0041857
gtttatagtttta

SEQ ID NO: 167238 - DNA, 13 bp, Artificial Sequence
  Oligonucleotide for detection of SNP TSC0041857
taaaactataaac

SEQ ID NO: 167239 - DNA, 13 bp, Artificial Sequence
  Oligonucleotide for detection of SNP TSC0041857
gtttattgtttta

SEQ ID NO: 167240 - DNA, 13 bp, Artificial Sequence
  Oligonucleotide for detection of SNP TSC0041857
taaaacaataaac

SEQ ID NO: 167241 - DNA, 13 bp, Artificial Sequence
  Oligonucleotide for detection of SNP TSC0041857
gtttatcgtttta

SEQ ID NO: 167242 - DNA, 13 bp, Artificial Sequence
  Oligonucleotide for detection of SNP TSC0041857
taaaacgataaac

SEQ ID NO: 167243 - DNA, 13 bp, Artificial Sequence
  Oligonucleotide for detection of SNP TSC0041857
tgggattgtaaay

SEQ ID NO: 167244 - DNA, 13 bp, Artificial Sequence
  Oligonucleotide for detection of SNP TSC0041857
rtttacaatccca

SEQ ID NO: 167245 - DNA, 13 bp, Artificial Sequence
  Oligonucleotide for detection of SNP TSC0041857
tgggatggtaaay

SEQ ID NO: 167246 - DNA, 13 bp, Artificial Sequence
  Oligonucleotide for detection of SNP TSC0041857
rtttaccatccca

SEQ ID NO: 167247 - DNA, 13 bp, Artificial Sequence
  Oligonucleotide for detection of SNP TSC0041857
tgggacggtaaay

SEQ ID NO: 167248 - DNA, 13 bp, Artificial Sequence
  Oligonucleotide for detection of SNP TSC0041857
rtttaccgtccca

SEQ ID NO: 167249 - DNA, 13 bp, Artificial Sequence
  Oligonucleotide for detection of SNP TSC0041858
ttgttagaataaa

SEQ ID NO: 167250 - DNA, 13 bp, Artificial Sequence
  Oligonucleotide for detection of SNP TSC0041858
tttattctaacaa

SEQ ID NO: 167251 - DNA, 13 bp, Artificial Sequence
  Oligonucleotide for detection of SNP TSC0041858
ttgttaaaataaa

SEQ ID NO: 167252 - DNA, 13 bp, Artificial Sequence
  Oligonucleotide for detection of SNP TSC0041858
tttattttaacaa

SEQ ID NO: 167253 - DNA, 13 bp, Artificial Sequence
  Oligonucleotide for detection of SNP TSC0041859
aaagatatatgta

SEQ ID NO: 167254 - DNA, 13 bp, Artificial Sequence
  Oligonucleotide for detection of SNP TSC0041859
tacatatatcttt

SEQ ID NO: 167255 - DNA, 13 bp, Artificial Sequence
  Oligonucleotide for detection of SNP TSC0041859
aaagatgtatgta

SEQ ID NO: 167256 - DNA, 13 bp, Artificial Sequence
  Oligonucleotide for detection of SNP TSC0041859
tacatacatcttt

SEQ ID NO: 167257 - DNA, 13 bp, Artificial Sequence
  Oligonucleotide for detection of SNP TSC0041859
aaagatatacgta

SEQ ID NO: 167258 - DNA, 13 bp, Artificial Sequence
  Oligonucleotide for detection of SNP TSC0041859
tacgtatatcttt

SEQ ID NO: 167259 - DNA, 13 bp, Artificial Sequence
  Oligonucleotide for detection of SNP TSC0041859
aaagatgtacgta

SEQ ID NO: 167260 - DNA, 13 bp, Artificial Sequence
  Oligonucleotide for detection of SNP TSC0041859
tacgtacatcttt

SEQ ID NO: 167261 - DNA, 13 bp, Artificial Sequence
  Oligonucleotide for detection of SNP TSC0010084
ggaaggtgaaggg

SEQ ID NO: 167262 - DNA, 13 bp, Artificial Sequence
  Oligonucleotide for detection of SNP TSC0010084
cccttcaccttcc

SEQ ID NO: 167263 - DNA, 13 bp, Artificial Sequence
  Oligonucleotide for detection of SNP TSC0010084
ggaaggcgaaggg

SEQ ID NO: 167264 - DNA, 13 bp, Artificial Sequence
  Oligonucleotide for detection of SNP TSC0010084
cccttcgccttcc

SEQ ID NO: 167265 - DNA, 13 bp, Artificial Sequence
  Oligonucleotide for detection of SNP TSC0010085
atggagatgagaa

SEQ ID NO: 167266 - DNA, 13 bp, Artificial Sequence
  Oligonucleotide for detection of SNP TSC0010085
ttctcatctccat

SEQ ID NO: 167267 - DNA, 13 bp, Artificial Sequence
  Oligonucleotide for detection of SNP TSC0010085
atggagttgagaa

SEQ ID NO: 167268 - DNA, 13 bp, Artificial Sequence
  Oligonucleotide for detection of SNP TSC0010085
ttctcaactccat

SEQ ID NO: 167269 - DNA, 13 bp, Artificial Sequence
  Oligonucleotide for detection of SNP TSC0009878
ttatagttgtaty

SEQ ID NO: 167270 - DNA, 13 bp, Artificial Sequence
  Oligonucleotide for detection of SNP TSC0009878
ratacaactataa

SEQ ID NO: 167271 - DNA, 13 bp, Artificial Sequence
  Oligonucleotide for detection of SNP TSC0009878
ttataggtgtaty

SEQ ID NO: 167272 - DNA, 13 bp, Artificial Sequence
  Oligonucleotide for detection of SNP TSC0009878
ratacacctataa

SEQ ID NO: 167273 - DNA, 13 bp, Artificial Sequence
  Oligonucleotide for detection of SNP TSC0009878
ggtataattgtaa

SEQ ID NO: 167274 - DNA, 13 bp, Artificial Sequence
  Oligonucleotide for detection of SNP TSC0009878
ttacaattatacc

SEQ ID NO: 167275 - DNA, 13 bp, Artificial Sequence
  Oligonucleotide for detection of SNP TSC0009878
ggtatatttgtaa

SEQ ID NO: 167276 - DNA, 13 bp, Artificial Sequence
  Oligonucleotide for detection of SNP TSC0009878
ttacaaatatacc

SEQ ID NO: 167277 - DNA, 13 bp, Artificial Sequence
  Oligonucleotide for detection of SNP TSC0041869
aaagtttaattaa

SEQ ID NO: 167278 - DNA, 13 bp, Artificial Sequence
  Oligonucleotide for detection of SNP TSC0041869
ttaattaaacttt

SEQ ID NO: 167279 - DNA, 13 bp, Artificial Sequence
  Oligonucleotide for detection of SNP TSC0041869
aaagttgaattaa

SEQ ID NO: 167280 - DNA, 13 bp, Artificial Sequence
  Oligonucleotide for detection of SNP TSC0041869
ttaattcaacttt

SEQ ID NO: 167281 - DNA, 13 bp, Artificial Sequence
  Oligonucleotide for detection of SNP TSC0041869
ttaattgaatttt

SEQ ID NO: 167282 - DNA, 13 bp, Artificial Sequence
  Oligonucleotide for detection of SNP TSC0041869
aaaattcaattaa

SEQ ID NO: 167283 - DNA, 13 bp, Artificial Sequence
  Oligonucleotide for detection of SNP TSC0041869
ttaatttaatttt

SEQ ID NO: 167284 - DNA, 13 bp, Artificial Sequence
  Oligonucleotide for detection of SNP TSC0041869
aaaattaaattaa

SEQ ID NO: 167285 - DNA, 13 bp, Artificial Sequence
  Oligonucleotide for detection of SNP TSC0041870
tatgtggttttty

SEQ ID NO: 167286 - DNA, 13 bp, Artificial Sequence
  Oligonucleotide for detection of SNP TSC0041870
raaaaaccacata

SEQ ID NO: 167287 - DNA, 13 bp, Artificial Sequence
  Oligonucleotide for detection of SNP TSC0041870
tatgtgattttty

SEQ ID NO: 167288 - DNA, 13 bp, Artificial Sequence
  Oligonucleotide for detection of SNP TSC0041870
raaaaatcacata

SEQ ID NO: 167289 - DNA, 13 bp, Artificial Sequence
  Oligonucleotide for detection of SNP TSC0041871
aagttaataattg

SEQ ID NO: 167290 - DNA, 13 bp, Artificial Sequence
  Oligonucleotide for detection of SNP TSC0041871
caattattaactt

SEQ ID NO: 167291 - DNA, 13 bp, Artificial Sequence
  Oligonucleotide for detection of SNP TSC0041871
aagttagtaattg

SEQ ID NO: 167292 - DNA, 13 bp, Artificial Sequence
  Oligonucleotide for detection of SNP TSC0041871
caattactaactt

SEQ ID NO: 167293 - DNA, 13 bp, Artificial Sequence
  Oligonucleotide for detection of SNP TSC0041872
ttgaaaattgaat

SEQ ID NO: 167294 - DNA, 13 bp, Artificial Sequence
  Oligonucleotide for detection of SNP TSC0041872
attcaattttcaa

SEQ ID NO: 167295 - DNA, 13 bp, Artificial Sequence
  Oligonucleotide for detection of SNP TSC0041872
ttgaaagttgaat

SEQ ID NO: 167296 - DNA, 13 bp, Artificial Sequence
  Oligonucleotide for detection of SNP TSC0041872
attcaactttcaa

SEQ ID NO: 167297 - DNA, 13 bp, Artificial Sequence
  Oligonucleotide for detection of SNP TSC0041877
gttatttttattt

SEQ ID NO: 167298 - DNA, 13 bp, Artificial Sequence
  Oligonucleotide for detection of SNP TSC0041877
aaataaaaataac

SEQ ID NO: 167299 - DNA, 13 bp, Artificial Sequence
  Oligonucleotide for detection of SNP TSC0041877
aaataatagtaay

SEQ ID NO: 167300 - DNA, 13 bp, Artificial Sequence
  Oligonucleotide for detection of SNP TSC0041877
rttactattattt

SEQ ID NO: 167301 - DNA, 13 bp, Artificial Sequence
  Oligonucleotide for detection of SNP TSC0041877
aaataagagtaay

SEQ ID NO: 167302 - DNA, 13 bp, Artificial Sequence
  Oligonucleotide for detection of SNP TSC0041877
rttactcttattt

SEQ ID NO: 167303 - DNA, 13 bp, Artificial Sequence
  Oligonucleotide for detection of SNP TSC0041877
aaataaaagtaay

SEQ ID NO: 167304 - DNA, 13 bp, Artificial Sequence
  Oligonucleotide for detection of SNP TSC0041877
rttacttttattt

SEQ ID NO: 167305 - DNA, 13 bp, Artificial Sequence
  Oligonucleotide for detection of SNP TSC0041879
gttgaaaagagaa

SEQ ID NO: 167306 - DNA, 13 bp, Artificial Sequence
  Oligonucleotide for detection of SNP TSC0041879
ttctcttttcaac

SEQ ID NO: 167307 - DNA, 13 bp, Artificial Sequence
  Oligonucleotide for detection of SNP TSC0041879
gttgaagagagaa

SEQ ID NO: 167308 - DNA, 13 bp, Artificial Sequence
  Oligonucleotide for detection of SNP TSC0041879
ttctctcttcaac

SEQ ID NO: 167309 - DNA, 13 bp, Artificial Sequence
  Oligonucleotide for detection of SNP TSC0041880
ttgttagtttgty

SEQ ID NO: 167310 - DNA, 13 bp, Artificial Sequence
  Oligonucleotide for detection of SNP TSC0041880
racaaactaacaa

SEQ ID NO: 167311 - DNA, 13 bp, Artificial Sequence
  Oligonucleotide for detection of SNP TSC0041880
ttgttaatttgty

SEQ ID NO: 167312 - DNA, 13 bp, Artificial Sequence
  Oligonucleotide for detection of SNP TSC0041880
racaaattaacaa

SEQ ID NO: 167313 - DNA, 13 bp, Artificial Sequence
  Oligonucleotide for detection of SNP TSC0041881
ggatgtagattay

SEQ ID NO: 167314 - DNA, 13 bp, Artificial Sequence
  Oligonucleotide for detection of SNP TSC0041881
rtaatctacatcc

SEQ ID NO: 167315 - DNA, 13 bp, Artificial Sequence
  Oligonucleotide for detection of SNP TSC0041881
ggatgtggattay

SEQ ID NO: 167316 - DNA, 13 bp, Artificial Sequence
  Oligonucleotide for detection of SNP TSC0041881
rtaatccacatcc

SEQ ID NO: 167317 - DNA, 13 bp, Artificial Sequence
  Oligonucleotide for detection of SNP TSC0041883
attgatatgaatg

SEQ ID NO: 167318 - DNA, 13 bp, Artificial Sequence
  Oligonucleotide for detection of SNP TSC0041883
cattcatatcaat

SEQ ID NO: 167319 - DNA, 13 bp, Artificial Sequence
  Oligonucleotide for detection of SNP TSC0041883
attgatttgaatg

SEQ ID NO: 167320 - DNA, 13 bp, Artificial Sequence
  Oligonucleotide for detection of SNP TSC0041883
cattcaaatcaat

SEQ ID NO: 167321 - DNA, 13 bp, Artificial Sequence
  Oligonucleotide for detection of SNP TSC0041883
tatttatattaat

SEQ ID NO: 167322 - DNA, 13 bp, Artificial Sequence
  Oligonucleotide for detection of SNP TSC0041883
attaatataaata

SEQ ID NO: 167323 - DNA, 13 bp, Artificial Sequence
  Oligonucleotide for detection of SNP TSC0041883
tatttagattaat

SEQ ID NO: 167324 - DNA, 13 bp, Artificial Sequence
  Oligonucleotide for detection of SNP TSC0041883
attaatctaaata

SEQ ID NO: 167325 - DNA, 13 bp, Artificial Sequence
  Oligonucleotide for detection of SNP TSC0041884
atatatgtggtty

SEQ ID NO: 167326 - DNA, 13 bp, Artificial Sequence
  Oligonucleotide for detection of SNP TSC0041884
raaccacatatat

SEQ ID NO: 167327 - DNA, 13 bp, Artificial Sequence
  Oligonucleotide for detection of SNP TSC0041884
atatatatggtty

SEQ ID NO: 167328 - DNA, 13 bp, Artificial Sequence
  Oligonucleotide for detection of SNP TSC0041884
raaccatatatat

SEQ ID NO: 167329 - DNA, 13 bp, Artificial Sequence
  Oligonucleotide for detection of SNP TSC0041885
aggaaggtttagg

SEQ ID NO: 167330 - DNA, 13 bp, Artificial Sequence
  Oligonucleotide for detection of SNP TSC0041885
cctaaaccttcct

SEQ ID NO: 167331 - DNA, 13 bp, Artificial Sequence
  Oligonucleotide for detection of SNP TSC0041885
aggaagatttagg

SEQ ID NO: 167332 - DNA, 13 bp, Artificial Sequence
  Oligonucleotide for detection of SNP TSC0041885
cctaaatcttcct

SEQ ID NO: 167333 - DNA, 13 bp, Artificial Sequence
  Oligonucleotide for detection of SNP TSC0041886
agtttattaagta

SEQ ID NO: 167334 - DNA, 13 bp, Artificial Sequence
  Oligonucleotide for detection of SNP TSC0041886
tacttaataaact

SEQ ID NO: 167335 - DNA, 13 bp, Artificial Sequence
  Oligonucleotide for detection of SNP TSC0041886
agtttagtaagta

SEQ ID NO: 167336 - DNA, 13 bp, Artificial Sequence
  Oligonucleotide for detection of SNP TSC0041886
tacttactaaact

SEQ ID NO: 167337 - DNA, 13 bp, Artificial Sequence
  Oligonucleotide for detection of SNP TSC0041886
tgtttgatgaatt

SEQ ID NO: 167338 - DNA, 13 bp, Artificial Sequence
  Oligonucleotide for detection of SNP TSC0041886
aattcatcaaaca

SEQ ID NO: 167339 - DNA, 13 bp, Artificial Sequence
  Oligonucleotide for detection of SNP TSC0041886
tgtttgttgaatt

SEQ ID NO: 167340 - DNA, 13 bp, Artificial Sequence
  Oligonucleotide for detection of SNP TSC0041886
aattcaacaaaca

SEQ ID NO: 167341 - DNA, 13 bp, Artificial Sequence
  Oligonucleotide for detection of SNP TSC0041887
aagataagttagt

SEQ ID NO: 167342 - DNA, 13 bp, Artificial Sequence
  Oligonucleotide for detection of SNP TSC0041887
actaacttatctt

SEQ ID NO: 167343 - DNA, 13 bp, Artificial Sequence
  Oligonucleotide for detection of SNP TSC0041887
aagataggttagt

SEQ ID NO: 167344 - DNA, 13 bp, Artificial Sequence
  Oligonucleotide for detection of SNP TSC0041887
actaacctatctt

SEQ ID NO: 167345 - DNA, 13 bp, Artificial Sequence
  Oligonucleotide for detection of SNP TSC0041889
atttatttttatg

SEQ ID NO: 167346 - DNA, 13 bp, Artificial Sequence
  Oligonucleotide for detection of SNP TSC0041889
cataaaaataaat

SEQ ID NO: 167347 - DNA, 13 bp, Artificial Sequence
  Oligonucleotide for detection of SNP TSC0041889
tatggagataaat

SEQ ID NO: 167348 - DNA, 13 bp, Artificial Sequence
  Oligonucleotide for detection of SNP TSC0041889
atttatctccata

SEQ ID NO: 167349 - DNA, 13 bp, Artificial Sequence
  Oligonucleotide for detection of SNP TSC0041889
tatggatataaat

SEQ ID NO: 167350 - DNA, 13 bp, Artificial Sequence
  Oligonucleotide for detection of SNP TSC0041889
atttatatccata

SEQ ID NO: 167351 - DNA, 13 bp, Artificial Sequence
  Oligonucleotide for detection of SNP TSC0041890
ggttgatgatagt

SEQ ID NO: 167352 - DNA, 13 bp, Artificial Sequence
  Oligonucleotide for detection of SNP TSC0041890
actatcatcaacc

SEQ ID NO: 167353 - DNA, 13 bp, Artificial Sequence
  Oligonucleotide for detection of SNP TSC0041890
ggttgacgatagt

SEQ ID NO: 167354 - DNA, 13 bp, Artificial Sequence
  Oligonucleotide for detection of SNP TSC0041890
actatcgtcaacc

SEQ ID NO: 167355 - DNA, 13 bp, Artificial Sequence
  Oligonucleotide for detection of SNP TSC0041890
attgttgttaaty

SEQ ID NO: 167356 - DNA, 13 bp, Artificial Sequence
  Oligonucleotide for detection of SNP TSC0041890
rattaacaacaat

SEQ ID NO: 167357 - DNA, 13 bp, Artificial Sequence
  Oligonucleotide for detection of SNP TSC0041890
attgttattaaty

SEQ ID NO: 167358 - DNA, 13 bp, Artificial Sequence
  Oligonucleotide for detection of SNP TSC0041890
rattaataacaat

SEQ ID NO: 167359 - DNA, 13 bp, Artificial Sequence
  Oligonucleotide for detection of SNP TSC0041890
attgtcgttaaty

SEQ ID NO: 167360 - DNA, 13 bp, Artificial Sequence
  Oligonucleotide for detection of SNP TSC0041890
rattaacgacaat

SEQ ID NO: 167361 - DNA, 13 bp, Artificial Sequence
  Oligonucleotide for detection of SNP TSC0041891
aagagaaggaaaa

SEQ ID NO: 167362 - DNA, 13 bp, Artificial Sequence
  Oligonucleotide for detection of SNP TSC0041891
ttttccttctctt

SEQ ID NO: 167363 - DNA, 13 bp, Artificial Sequence
  Oligonucleotide for detection of SNP TSC0041891
aagagagggaaaa

SEQ ID NO: 167364 - DNA, 13 bp, Artificial Sequence
  Oligonucleotide for detection of SNP TSC0041891
ttttccctctctt

SEQ ID NO: 167365 - DNA, 13 bp, Artificial Sequence
  Oligonucleotide for detection of SNP TSC0041895
gaggttgtaaaty

SEQ ID NO: 167366 - DNA, 13 bp, Artificial Sequence
  Oligonucleotide for detection of SNP TSC0041895
ratttacaacctc

SEQ ID NO: 167367 - DNA, 13 bp, Artificial Sequence
  Oligonucleotide for detection of SNP TSC0041895
gaggttataaaty

SEQ ID NO: 167368 - DNA, 13 bp, Artificial Sequence
  Oligonucleotide for detection of SNP TSC0041895
ratttataacctc

SEQ ID NO: 167369 - DNA, 13 bp, Artificial Sequence
  Oligonucleotide for detection of SNP TSC0041896
gtgcgtgtatgta

SEQ ID NO: 167370 - DNA, 13 bp, Artificial Sequence
  Oligonucleotide for detection of SNP TSC0041896
tacatacacgcac

SEQ ID NO: 167371 - DNA, 13 bp, Artificial Sequence
  Oligonucleotide for detection of SNP TSC0041896
gtgcgtatatgta

SEQ ID NO: 167372 - DNA, 13 bp, Artificial Sequence
  Oligonucleotide for detection of SNP TSC0041896
tacatatacgcac

SEQ ID NO: 167373 - DNA, 13 bp, Artificial Sequence
  Oligonucleotide for detection of SNP TSC0041897
aaggaaattatty

SEQ ID NO: 167374 - DNA, 13 bp, Artificial Sequence
  Oligonucleotide for detection of SNP TSC0041897
raataatttcctt

SEQ ID NO: 167375 - DNA, 13 bp, Artificial Sequence
  Oligonucleotide for detection of SNP TSC0041897
aaggaagttatty

SEQ ID NO: 167376 - DNA, 13 bp, Artificial Sequence
  Oligonucleotide for detection of SNP TSC0041897
raataacttcctt

SEQ ID NO: 167377 - DNA, 13 bp, Artificial Sequence
  Oligonucleotide for detection of SNP TSC0041898
tttgttgttaaga

SEQ ID NO: 167378 - DNA, 13 bp, Artificial Sequence
  Oligonucleotide for detection of SNP TSC0041898
tcttaacaacaaa

SEQ ID NO: 167379 - DNA, 13 bp, Artificial Sequence
  Oligonucleotide for detection of SNP TSC0041898
tttgttattaaga

SEQ ID NO: 167380 - DNA, 13 bp, Artificial Sequence
  Oligonucleotide for detection of SNP TSC0041898
tcttaataacaaa

SEQ ID NO: 167381 - DNA, 13 bp, Artificial Sequence
  Oligonucleotide for detection of SNP TSC0041899
tatagggaagttt

SEQ ID NO: 167382 - DNA, 13 bp, Artificial Sequence
  Oligonucleotide for detection of SNP TSC0041899
aaacttccctata

SEQ ID NO: 167383 - DNA, 13 bp, Artificial Sequence
  Oligonucleotide for detection of SNP TSC0041899
tataggaaagttt

SEQ ID NO: 167384 - DNA, 13 bp, Artificial Sequence
  Oligonucleotide for detection of SNP TSC0041899
aaactttcctata

SEQ ID NO: 167385 - DNA, 13 bp, Artificial Sequence
  Oligonucleotide for detection of SNP TSC0041902
atttataggatgy

SEQ ID NO: 167386 - DNA, 13 bp, Artificial Sequence
  Oligonucleotide for detection of SNP TSC0041902
rcatcctataaat

SEQ ID NO: 167387 - DNA, 13 bp, Artificial Sequence
  Oligonucleotide for detection of SNP TSC0041902
atttattggatgy

SEQ ID NO: 167388 - DNA, 13 bp, Artificial Sequence
  Oligonucleotide for detection of SNP TSC0041902
rcatccaataaat

SEQ ID NO: 167389 - DNA, 13 bp, Artificial Sequence
  Oligonucleotide for detection of SNP TSC0041902
gtattttgtgggt

SEQ ID NO: 167390 - DNA, 13 bp, Artificial Sequence
  Oligonucleotide for detection of SNP TSC0041902
acccacaaaatac

SEQ ID NO: 167391 - DNA, 13 bp, Artificial Sequence
  Oligonucleotide for detection of SNP TSC0041902
gtatttagtgggt

SEQ ID NO: 167392 - DNA, 13 bp, Artificial Sequence
  Oligonucleotide for detection of SNP TSC0041902
acccactaaatac

SEQ ID NO: 167393 - DNA, 13 bp, Artificial Sequence
  Oligonucleotide for detection of SNP TSC0041905
aagatagtttgga

SEQ ID NO: 167394 - DNA, 13 bp, Artificial Sequence
  Oligonucleotide for detection of SNP TSC0041905
tccaaactatctt

SEQ ID NO: 167395 - DNA, 13 bp, Artificial Sequence
  Oligonucleotide for detection of SNP TSC0041905
aagataatttgga

SEQ ID NO: 167396 - DNA, 13 bp, Artificial Sequence
  Oligonucleotide for detection of SNP TSC0041905
tccaaattatctt

SEQ ID NO: 167397 - DNA, 13 bp, Artificial Sequence
  Oligonucleotide for detection of SNP TSC0041906
agtaaaatgtgay

SEQ ID NO: 167398 - DNA, 13 bp, Artificial Sequence
  Oligonucleotide for detection of SNP TSC0041906
rtcacattttact

SEQ ID NO: 167399 - DNA, 13 bp, Artificial Sequence
  Oligonucleotide for detection of SNP TSC0041906
agtaaagtgtgay

SEQ ID NO: 167400 - DNA, 13 bp, Artificial Sequence
  Oligonucleotide for detection of SNP TSC0041906
rtcacactttact

SEQ ID NO: 167401 - DNA, 13 bp, Artificial Sequence
  Oligonucleotide for detection of SNP TSC0041907
atatagggataaa

SEQ ID NO: 167402 - DNA, 13 bp, Artificial Sequence
  Oligonucleotide for detection of SNP TSC0041907
tttatccctatat

SEQ ID NO: 167403 - DNA, 13 bp, Artificial Sequence
  Oligonucleotide for detection of SNP TSC0041907
atatagagataaa

SEQ ID NO: 167404 - DNA, 13 bp, Artificial Sequence
  Oligonucleotide for detection of SNP TSC0041907
tttatctctatat

SEQ ID NO: 167405 - DNA, 13 bp, Artificial Sequence
  Oligonucleotide for detection of SNP TSC0006583
tagttaaattgaa

SEQ ID NO: 167406 - DNA, 13 bp, Artificial Sequence
  Oligonucleotide for detection of SNP TSC0006583
ttcaatttaacta

SEQ ID NO: 167407 - DNA, 13 bp, Artificial Sequence
  Oligonucleotide for detection of SNP TSC0006583
tagttagattgaa

SEQ ID NO: 167408 - DNA, 13 bp, Artificial Sequence
  Oligonucleotide for detection of SNP TSC0006583
ttcaatctaacta

SEQ ID NO: 167409 - DNA, 13 bp, Artificial Sequence
  Oligonucleotide for detection of SNP TSC0041911
aataagattaatt

SEQ ID NO: 167410 - DNA, 13 bp, Artificial Sequence
  Oligonucleotide for detection of SNP TSC0041911
aattaatcttatt

SEQ ID NO: 167411 - DNA, 13 bp, Artificial Sequence
  Oligonucleotide for detection of SNP TSC0041911
aataagtttaatt

SEQ ID NO: 167412 - DNA, 13 bp, Artificial Sequence
  Oligonucleotide for detection of SNP TSC0041911
aattaaacttatt

SEQ ID NO: 167413 - DNA, 13 bp, Artificial Sequence
  Oligonucleotide for detection of SNP TSC0041911
aattagttttgtt

SEQ ID NO: 167414 - DNA, 13 bp, Artificial Sequence
  Oligonucleotide for detection of SNP TSC0041911
aacaaaactaatt

SEQ ID NO: 167415 - DNA, 13 bp, Artificial Sequence
  Oligonucleotide for detection of SNP TSC0041911
aattaggtttgtt

SEQ ID NO: 167416 - DNA, 13 bp, Artificial Sequence
  Oligonucleotide for detection of SNP TSC0041911
aacaaacctaatt

SEQ ID NO: 167417 - DNA, 13 bp, Artificial Sequence
  Oligonucleotide for detection of SNP TSC0041912
aaagttggttatt

SEQ ID NO: 167418 - DNA, 13 bp, Artificial Sequence
  Oligonucleotide for detection of SNP TSC0041912
aataaccaacttt

SEQ ID NO: 167419 - DNA, 13 bp, Artificial Sequence
  Oligonucleotide for detection of SNP TSC0041912
aaagttagttatt

SEQ ID NO: 167420 - DNA, 13 bp, Artificial Sequence
  Oligonucleotide for detection of SNP TSC0041912
aataactaacttt

SEQ ID NO: 167421 - DNA, 13 bp, Artificial Sequence
  Oligonucleotide for detection of SNP TSC0041913
tttgggtggttay

SEQ ID NO: 167422 - DNA, 13 bp, Artificial Sequence
  Oligonucleotide for detection of SNP TSC0041913
rtaaccacccaaa

SEQ ID NO: 167423 - DNA, 13 bp, Artificial Sequence
  Oligonucleotide for detection of SNP TSC0041913
tttgggcggttay

SEQ ID NO: 167424 - DNA, 13 bp, Artificial Sequence
  Oligonucleotide for detection of SNP TSC0041913
rtaaccgcccaaa

SEQ ID NO: 167425 - DNA, 13 bp, Artificial Sequence
  Oligonucleotide for detection of SNP TSC0041913
gtgattgtttagg

SEQ ID NO: 167426 - DNA, 13 bp, Artificial Sequence
  Oligonucleotide for detection of SNP TSC0041913
cctaaacaatcac

SEQ ID NO: 167427 - DNA, 13 bp, Artificial Sequence
  Oligonucleotide for detection of SNP TSC0041913
gtgattatttagg

SEQ ID NO: 167428 - DNA, 13 bp, Artificial Sequence
  Oligonucleotide for detection of SNP TSC0041913
cctaaataatcac

SEQ ID NO: 167429 - DNA, 13 bp, Artificial Sequence
  Oligonucleotide for detection of SNP TSC0041913
gtgatcgtttagg

SEQ ID NO: 167430 - DNA, 13 bp, Artificial Sequence
  Oligonucleotide for detection of SNP TSC0041913
cctaaacgatcac

SEQ ID NO: 167431 - DNA, 13 bp, Artificial Sequence
  Oligonucleotide for detection of SNP TSC0041918
tggaatgtaaaat

SEQ ID NO: 167432 - DNA, 13 bp, Artificial Sequence
  Oligonucleotide for detection of SNP TSC0041918
attttacattcca

SEQ ID NO: 167433 - DNA, 13 bp, Artificial Sequence
  Oligonucleotide for detection of SNP TSC0041918
tggaatataaaat

SEQ ID NO: 167434 - DNA, 13 bp, Artificial Sequence
  Oligonucleotide for detection of SNP TSC0041918
attttatattcca

SEQ ID NO: 167435 - DNA, 13 bp, Artificial Sequence
  Oligonucleotide for detection of SNP TSC0041918
tggaacgtaaaat

SEQ ID NO: 167436 - DNA, 13 bp, Artificial Sequence
  Oligonucleotide for detection of SNP TSC0041918
attttacgttcca

SEQ ID NO: 167437 - DNA, 13 bp, Artificial Sequence
  Oligonucleotide for detection of SNP TSC0006389
tttaaatgggaga

SEQ ID NO: 167438 - DNA, 13 bp, Artificial Sequence
  Oligonucleotide for detection of SNP TSC0006389
tctcccatttaaa

SEQ ID NO: 167439 - DNA, 13 bp, Artificial Sequence
  Oligonucleotide for detection of SNP TSC0006389
tttaaaggggaga

SEQ ID NO: 167440 - DNA, 13 bp, Artificial Sequence
  Oligonucleotide for detection of SNP TSC0006389
tctcccctttaaa

SEQ ID NO: 167441 - DNA, 13 bp, Artificial Sequence
  Oligonucleotide for detection of SNP TSC0006389
tttaaacgggaga

SEQ ID NO: 167442 - DNA, 13 bp, Artificial Sequence
  Oligonucleotide for detection of SNP TSC0006389
tctcccgtttaaa

SEQ ID NO: 167443 - DNA, 13 bp, Artificial Sequence
  Oligonucleotide for detection of SNP TSC0006389
tttttcgtttgaa

SEQ ID NO: 167444 - DNA, 13 bp, Artificial Sequence
  Oligonucleotide for detection of SNP TSC0006389
ttcaaacgaaaaa

SEQ ID NO: 167445 - DNA, 13 bp, Artificial Sequence
  Oligonucleotide for detection of SNP TSC0006390
tgttatagaatty

SEQ ID NO: 167446 - DNA, 13 bp, Artificial Sequence
  Oligonucleotide for detection of SNP TSC0006390
raattctataaca

SEQ ID NO: 167447 - DNA, 13 bp, Artificial Sequence
  Oligonucleotide for detection of SNP TSC0006390
tgttatggaatty

SEQ ID NO: 167448 - DNA, 13 bp, Artificial Sequence
  Oligonucleotide for detection of SNP TSC0006390
raattccataaca

SEQ ID NO: 167449 - DNA, 13 bp, Artificial Sequence
  Oligonucleotide for detection of SNP TSC0041919
aaaaagaagtaty

SEQ ID NO: 167450 - DNA, 13 bp, Artificial Sequence
  Oligonucleotide for detection of SNP TSC0041919
ratacttcttttt

SEQ ID NO: 167451 - DNA, 13 bp, Artificial Sequence
  Oligonucleotide for detection of SNP TSC0041919
aaaaagtagtaty

SEQ ID NO: 167452 - DNA, 13 bp, Artificial Sequence
  Oligonucleotide for detection of SNP TSC0041919
ratactacttttt

SEQ ID NO: 167453 - DNA, 13 bp, Artificial Sequence
  Oligonucleotide for detection of SNP TSC0041919
gatattttttttt

SEQ ID NO: 167454 - DNA, 13 bp, Artificial Sequence
  Oligonucleotide for detection of SNP TSC0041919
aaaaaaaaatatc

SEQ ID NO: 167455 - DNA, 13 bp, Artificial Sequence
  Oligonucleotide for detection of SNP TSC0041920
atttataatgtta

SEQ ID NO: 167456 - DNA, 13 bp, Artificial Sequence
  Oligonucleotide for detection of SNP TSC0041920
taacattataaat

SEQ ID NO: 167457 - DNA, 13 bp, Artificial Sequence
  Oligonucleotide for detection of SNP TSC0041920
atttattatgtta

SEQ ID NO: 167458 - DNA, 13 bp, Artificial Sequence
  Oligonucleotide for detection of SNP TSC0041920
taacataataaat

SEQ ID NO: 167459 - DNA, 13 bp, Artificial Sequence
  Oligonucleotide for detection of SNP TSC0041920
tagtattataaat

SEQ ID NO: 167460 - DNA, 13 bp, Artificial Sequence
  Oligonucleotide for detection of SNP TSC0041920
atttataatacta

SEQ ID NO: 167461 - DNA, 13 bp, Artificial Sequence
  Oligonucleotide for detection of SNP TSC0041920
tagtatgataaat

SEQ ID NO: 167462 - DNA, 13 bp, Artificial Sequence
  Oligonucleotide for detection of SNP TSC0041920
atttatcatacta

SEQ ID NO: 167463 - DNA, 13 bp, Artificial Sequence
  Oligonucleotide for detection of SNP TSC0041921
tttttagagttat

SEQ ID NO: 167464 - DNA, 13 bp, Artificial Sequence
  Oligonucleotide for detection of SNP TSC0041921
ataactctaaaaa

SEQ ID NO: 167465 - DNA, 13 bp, Artificial Sequence
  Oligonucleotide for detection of SNP TSC0041921
ataattgtaagaa

SEQ ID NO: 167466 - DNA, 13 bp, Artificial Sequence
  Oligonucleotide for detection of SNP TSC0041921
ttcttacaattat

SEQ ID NO: 167467 - DNA, 13 bp, Artificial Sequence
  Oligonucleotide for detection of SNP TSC0041921
ataattttaagaa

SEQ ID NO: 167468 - DNA, 13 bp, Artificial Sequence
  Oligonucleotide for detection of SNP TSC0041921
ttcttaaaattat

SEQ ID NO: 167469 - DNA, 13 bp, Artificial Sequence
  Oligonucleotide for detection of SNP TSC0041922
attaaggtataaa

SEQ ID NO: 167470 - DNA, 13 bp, Artificial Sequence
  Oligonucleotide for detection of SNP TSC0041922
tttataccttaat

SEQ ID NO: 167471 - DNA, 13 bp, Artificial Sequence
  Oligonucleotide for detection of SNP TSC0041922
attaagatataaa

SEQ ID NO: 167472 - DNA, 13 bp, Artificial Sequence
  Oligonucleotide for detection of SNP TSC0041922
tttatatcttaat

SEQ ID NO: 167473 - DNA, 13 bp, Artificial Sequence
  Oligonucleotide for detection of SNP TSC0041923
aattaagtgatta

SEQ ID NO: 167474 - DNA, 13 bp, Artificial Sequence
  Oligonucleotide for detection of SNP TSC0041923
taatcacttaatt

SEQ ID NO: 167475 - DNA, 13 bp, Artificial Sequence
  Oligonucleotide for detection of SNP TSC0041923
tagttaattagtt

SEQ ID NO: 167476 - DNA, 13 bp, Artificial Sequence
  Oligonucleotide for detection of SNP TSC0041923
aactaattaacta

SEQ ID NO: 167477 - DNA, 13 bp, Artificial Sequence
  Oligonucleotide for detection of SNP TSC0041923
tagttatttagtt

SEQ ID NO: 167478 - DNA, 13 bp, Artificial Sequence
  Oligonucleotide for detection of SNP TSC0041923
aactaaataacta

SEQ ID NO: 167479 - DNA, 13 bp, Artificial Sequence
  Oligonucleotide for detection of SNP TSC0041924
agtaaatatagta

SEQ ID NO: 167480 - DNA, 13 bp, Artificial Sequence
  Oligonucleotide for detection of SNP TSC0041924
tactatatttact

SEQ ID NO: 167481 - DNA, 13 bp, Artificial Sequence
  Oligonucleotide for detection of SNP TSC0041924
agtaaagatagta

SEQ ID NO: 167482 - DNA, 13 bp, Artificial Sequence
  Oligonucleotide for detection of SNP TSC0041924
tactatctttact

SEQ ID NO: 167483 - DNA, 13 bp, Artificial Sequence
  Oligonucleotide for detection of SNP TSC0041924
tattatttttgtt

SEQ ID NO: 167484 - DNA, 13 bp, Artificial Sequence
  Oligonucleotide for detection of SNP TSC0041924
aacaaaaataata

SEQ ID NO: 167485 - DNA, 13 bp, Artificial Sequence
  Oligonucleotide for detection of SNP TSC0041925
ataatggtgatta

SEQ ID NO: 167486 - DNA, 13 bp, Artificial Sequence
  Oligonucleotide for detection of SNP TSC0041925
taatcaccattat

SEQ ID NO: 167487 - DNA, 13 bp, Artificial Sequence
  Oligonucleotide for detection of SNP TSC0041925
ataatgatgatta

SEQ ID NO: 167488 - DNA, 13 bp, Artificial Sequence
  Oligonucleotide for detection of SNP TSC0041925
taatcatcattat

SEQ ID NO: 167489 - DNA, 13 bp, Artificial Sequence
  Oligonucleotide for detection of SNP TSC0041925
ataatggcgatta

SEQ ID NO: 167490 - DNA, 13 bp, Artificial Sequence
  Oligonucleotide for detection of SNP TSC0041925
taatcgccattat

SEQ ID NO: 167491 - DNA, 13 bp, Artificial Sequence
  Oligonucleotide for detection of SNP TSC0041925
ataatgacgatta

SEQ ID NO: 167492 - DNA, 13 bp, Artificial Sequence
  Oligonucleotide for detection of SNP TSC0041925
taatcgtcattat

SEQ ID NO: 167493 - DNA, 13 bp, Artificial Sequence
  Oligonucleotide for detection of SNP TSC0041927
atataattagtta

SEQ ID NO: 167494 - DNA, 13 bp, Artificial Sequence
  Oligonucleotide for detection of SNP TSC0041927
taactaattatat

SEQ ID NO: 167495 - DNA, 13 bp, Artificial Sequence
  Oligonucleotide for detection of SNP TSC0041927
atataagtagtta

SEQ ID NO: 167496 - DNA, 13 bp, Artificial Sequence
  Oligonucleotide for detection of SNP TSC0041927
taactacttatat

SEQ ID NO: 167497 - DNA, 13 bp, Artificial Sequence
  Oligonucleotide for detection of SNP TSC0007477
ttttgttgattgt

SEQ ID NO: 167498 - DNA, 13 bp, Artificial Sequence
  Oligonucleotide for detection of SNP TSC0007477
acaatcaacaaaa

SEQ ID NO: 167499 - DNA, 13 bp, Artificial Sequence
  Oligonucleotide for detection of SNP TSC0007477
ttttgtcgattgt

SEQ ID NO: 167500 - DNA, 13 bp, Artificial Sequence
  Oligonucleotide for detection of SNP TSC0007477
acaatcgacaaaa

SEQ ID NO: 167501 - DNA, 13 bp, Artificial Sequence
  Oligonucleotide for detection of SNP TSC0007477
atagttggtaaaa

SEQ ID NO: 167502 - DNA, 13 bp, Artificial Sequence
  Oligonucleotide for detection of SNP TSC0007477
ttttaccaactat

SEQ ID NO: 167503 - DNA, 13 bp, Artificial Sequence
  Oligonucleotide for detection of SNP TSC0007477
atagttagtaaaa

SEQ ID NO: 167504 - DNA, 13 bp, Artificial Sequence
  Oligonucleotide for detection of SNP TSC0007477
ttttactaactat

SEQ ID NO: 167505 - DNA, 13 bp, Artificial Sequence
  Oligonucleotide for detection of SNP TSC0007477
atagtcggtaaaa

SEQ ID NO: 167506 - DNA, 13 bp, Artificial Sequence
  Oligonucleotide for detection of SNP TSC0007477
ttttaccgactat

SEQ ID NO: 167507 - DNA, 13 bp, Artificial Sequence
  Oligonucleotide for detection of SNP TSC0041929
ttgttcgttgttt

SEQ ID NO: 167508 - DNA, 13 bp, Artificial Sequence
  Oligonucleotide for detection of SNP TSC0041929
aaacaacgaacaa

SEQ ID NO: 167509 - DNA, 13 bp, Artificial Sequence
  Oligonucleotide for detection of SNP TSC0041929
aaataaggggtag

SEQ ID NO: 167510 - DNA, 13 bp, Artificial Sequence
  Oligonucleotide for detection of SNP TSC0041929
ctaccccttattt

SEQ ID NO: 167511 - DNA, 13 bp, Artificial Sequence
  Oligonucleotide for detection of SNP TSC0041929
aaataatgggtag

SEQ ID NO: 167512 - DNA, 13 bp, Artificial Sequence
  Oligonucleotide for detection of SNP TSC0041929
ctacccattattt

SEQ ID NO: 167513 - DNA, 13 bp, Artificial Sequence
  Oligonucleotide for detection of SNP TSC0041929
aaataacgggtag

SEQ ID NO: 167514 - DNA, 13 bp, Artificial Sequence
  Oligonucleotide for detection of SNP TSC0041929
ctacccgttattt

SEQ ID NO: 167515 - DNA, 13 bp, Artificial Sequence
  Oligonucleotide for detection of SNP TSC0041930
tttttaggaagag

SEQ ID NO: 167516 - DNA, 13 bp, Artificial Sequence
  Oligonucleotide for detection of SNP TSC0041930
ctcttcctaaaaa

SEQ ID NO: 167517 - DNA, 13 bp, Artificial Sequence
  Oligonucleotide for detection of SNP TSC0041930
tttttaagaagag

SEQ ID NO: 167518 - DNA, 13 bp, Artificial Sequence
  Oligonucleotide for detection of SNP TSC0041930
ctcttcttaaaaa

SEQ ID NO: 167519 - DNA, 13 bp, Artificial Sequence
  Oligonucleotide for detection of SNP TSC0041931
tttaagatggagt

SEQ ID NO: 167520 - DNA, 13 bp, Artificial Sequence
  Oligonucleotide for detection of SNP TSC0041931
actccatcttaaa

SEQ ID NO: 167521 - DNA, 13 bp, Artificial Sequence
  Oligonucleotide for detection of SNP TSC0041931
tttaagttggagt

SEQ ID NO: 167522 - DNA, 13 bp, Artificial Sequence
  Oligonucleotide for detection of SNP TSC0041931
actccaacttaaa

SEQ ID NO: 167523 - DNA, 13 bp, Artificial Sequence
  Oligonucleotide for detection of SNP TSC0041932
atttagtaggtag

SEQ ID NO: 167524 - DNA, 13 bp, Artificial Sequence
  Oligonucleotide for detection of SNP TSC0041932
ctacctactaaat

SEQ ID NO: 167525 - DNA, 13 bp, Artificial Sequence
  Oligonucleotide for detection of SNP TSC0041933
tagtggaatttta

SEQ ID NO: 167526 - DNA, 13 bp, Artificial Sequence
  Oligonucleotide for detection of SNP TSC0041933
taaaattccacta

SEQ ID NO: 167527 - DNA, 13 bp, Artificial Sequence
  Oligonucleotide for detection of SNP TSC0041933
tagtgggatttta

SEQ ID NO: 167528 - DNA, 13 bp, Artificial Sequence
  Oligonucleotide for detection of SNP TSC0041933
taaaatcccacta

SEQ ID NO: 167529 - DNA, 13 bp, Artificial Sequence
  Oligonucleotide for detection of SNP TSC0041934
tataaaataaagt

SEQ ID NO: 167530 - DNA, 13 bp, Artificial Sequence
  Oligonucleotide for detection of SNP TSC0041934
actttattttata

SEQ ID NO: 167531 - DNA, 13 bp, Artificial Sequence
  Oligonucleotide for detection of SNP TSC0041934
tataaagtaaagt

SEQ ID NO: 167532 - DNA, 13 bp, Artificial Sequence
  Oligonucleotide for detection of SNP TSC0041934
actttactttata

SEQ ID NO: 167533 - DNA, 13 bp, Artificial Sequence
  Oligonucleotide for detection of SNP TSC0041937
aatttttttagta

SEQ ID NO: 167534 - DNA, 13 bp, Artificial Sequence
  Oligonucleotide for detection of SNP TSC0041937
tactaaaaaaatt

SEQ ID NO: 167535 - DNA, 13 bp, Artificial Sequence
  Oligonucleotide for detection of SNP TSC0041937
tattgggaaggtt

SEQ ID NO: 167536 - DNA, 13 bp, Artificial Sequence
  Oligonucleotide for detection of SNP TSC0041937
aaccttcccaata

SEQ ID NO: 167537 - DNA, 13 bp, Artificial Sequence
  Oligonucleotide for detection of SNP TSC0041938
taataggtattta

SEQ ID NO: 167538 - DNA, 13 bp, Artificial Sequence
  Oligonucleotide for detection of SNP TSC0041938
taaatacctatta

SEQ ID NO: 167539 - DNA, 13 bp, Artificial Sequence
  Oligonucleotide for detection of SNP TSC0041938
taatagatattta

SEQ ID NO: 167540 - DNA, 13 bp, Artificial Sequence
  Oligonucleotide for detection of SNP TSC0041938
taaatatctatta

SEQ ID NO: 167541 - DNA, 13 bp, Artificial Sequence
  Oligonucleotide for detection of SNP TSC0041939
tgatattgtttga

SEQ ID NO: 167542 - DNA, 13 bp, Artificial Sequence
  Oligonucleotide for detection of SNP TSC0041939
tcaaacaatatca

SEQ ID NO: 167543 - DNA, 13 bp, Artificial Sequence
  Oligonucleotide for detection of SNP TSC0041939
tgatatcgtttga

SEQ ID NO: 167544 - DNA, 13 bp, Artificial Sequence
  Oligonucleotide for detection of SNP TSC0041939
tcaaacgatatca

SEQ ID NO: 167545 - DNA, 13 bp, Artificial Sequence
  Oligonucleotide for detection of SNP TSC0041939
ttaaatggtatta

SEQ ID NO: 167546 - DNA, 13 bp, Artificial Sequence
  Oligonucleotide for detection of SNP TSC0041939
taataccatttaa

SEQ ID NO: 167547 - DNA, 13 bp, Artificial Sequence
  Oligonucleotide for detection of SNP TSC0041939
ttaaatagtatta

SEQ ID NO: 167548 - DNA, 13 bp, Artificial Sequence
  Oligonucleotide for detection of SNP TSC0041939
taatactatttaa

SEQ ID NO: 167549 - DNA, 13 bp, Artificial Sequence
  Oligonucleotide for detection of SNP TSC0041939
ttaaacggtatta

SEQ ID NO: 167550 - DNA, 13 bp, Artificial Sequence
  Oligonucleotide for detection of SNP TSC0041939
taataccgtttaa

SEQ ID NO: 167551 - DNA, 13 bp, Artificial Sequence
  Oligonucleotide for detection of SNP TSC0041940
taaaatgtgtatt

SEQ ID NO: 167552 - DNA, 13 bp, Artificial Sequence
  Oligonucleotide for detection of SNP TSC0041940
aatacacatttta

SEQ ID NO: 167553 - DNA, 13 bp, Artificial Sequence
  Oligonucleotide for detection of SNP TSC0041940
taaaatatgtatt

SEQ ID NO: 167554 - DNA, 13 bp, Artificial Sequence
  Oligonucleotide for detection of SNP TSC0041940
aatacatatttta

SEQ ID NO: 167555 - DNA, 13 bp, Artificial Sequence
  Oligonucleotide for detection of SNP TSC0041941
ttgtttattagtt

SEQ ID NO: 167556 - DNA, 13 bp, Artificial Sequence
  Oligonucleotide for detection of SNP TSC0041941
aactaataaacaa

SEQ ID NO: 167557 - DNA, 13 bp, Artificial Sequence
  Oligonucleotide for detection of SNP TSC0041943
gaatatagatgtg

SEQ ID NO: 167558 - DNA, 13 bp, Artificial Sequence
  Oligonucleotide for detection of SNP TSC0041943
cacatctatattc

SEQ ID NO: 167559 - DNA, 13 bp, Artificial Sequence
  Oligonucleotide for detection of SNP TSC0041943
gaatattgatgtg

SEQ ID NO: 167560 - DNA, 13 bp, Artificial Sequence
  Oligonucleotide for detection of SNP TSC0041943
cacatcaatattc

SEQ ID NO: 167561 - DNA, 13 bp, Artificial Sequence
  Oligonucleotide for detection of SNP TSC0041943
gaatatcgatgtg

SEQ ID NO: 167562 - DNA, 13 bp, Artificial Sequence
  Oligonucleotide for detection of SNP TSC0041943
cacatcgatattc

SEQ ID NO: 167563 - DNA, 13 bp, Artificial Sequence
  Oligonucleotide for detection of SNP TSC0041943
tatattggtatty

SEQ ID NO: 167564 - DNA, 13 bp, Artificial Sequence
  Oligonucleotide for detection of SNP TSC0041943
raataccaatata

SEQ ID NO: 167565 - DNA, 13 bp, Artificial Sequence
  Oligonucleotide for detection of SNP TSC0041943
tatatcggtatty

SEQ ID NO: 167566 - DNA, 13 bp, Artificial Sequence
  Oligonucleotide for detection of SNP TSC0041943
raataccgatata

SEQ ID NO: 167567 - DNA, 13 bp, Artificial Sequence
  Oligonucleotide for detection of SNP TSC0041944
tgttaatgtatat

SEQ ID NO: 167568 - DNA, 13 bp, Artificial Sequence
  Oligonucleotide for detection of SNP TSC0041944
atatacattaaca

SEQ ID NO: 167569 - DNA, 13 bp, Artificial Sequence
  Oligonucleotide for detection of SNP TSC0041944
tgttaacgtatat

SEQ ID NO: 167570 - DNA, 13 bp, Artificial Sequence
  Oligonucleotide for detection of SNP TSC0041944
atatacgttaaca

SEQ ID NO: 167571 - DNA, 13 bp, Artificial Sequence
  Oligonucleotide for detection of SNP TSC0041944
atatatgttaata

SEQ ID NO: 167572 - DNA, 13 bp, Artificial Sequence
  Oligonucleotide for detection of SNP TSC0041944
tattaacatatat

SEQ ID NO: 167573 - DNA, 13 bp, Artificial Sequence
  Oligonucleotide for detection of SNP TSC0041944
atatatattaata

SEQ ID NO: 167574 - DNA, 13 bp, Artificial Sequence
  Oligonucleotide for detection of SNP TSC0041944
tattaatatatat

SEQ ID NO: 167575 - DNA, 13 bp, Artificial Sequence
  Oligonucleotide for detection of SNP TSC0041944
atatacgttaata

SEQ ID NO: 167576 - DNA, 13 bp, Artificial Sequence
  Oligonucleotide for detection of SNP TSC0041944
tattaacgtatat

SEQ ID NO: 167577 - DNA, 13 bp, Artificial Sequence
  Oligonucleotide for detection of SNP TSC0041945
tatataaaatgtt

SEQ ID NO: 167578 - DNA, 13 bp, Artificial Sequence
  Oligonucleotide for detection of SNP TSC0041945
aacattttatata

SEQ ID NO: 167579 - DNA, 13 bp, Artificial Sequence
  Oligonucleotide for detection of SNP TSC0041945
tatatataatgtt

SEQ ID NO: 167580 - DNA, 13 bp, Artificial Sequence
  Oligonucleotide for detection of SNP TSC0041945
aacattatatata

SEQ ID NO: 167581 - DNA, 13 bp, Artificial Sequence
  Oligonucleotide for detection of SNP TSC0041945
aatattttatatg

SEQ ID NO: 167582 - DNA, 13 bp, Artificial Sequence
  Oligonucleotide for detection of SNP TSC0041945
catataaaatatt

SEQ ID NO: 167583 - DNA, 13 bp, Artificial Sequence
  Oligonucleotide for detection of SNP TSC0041945
aatattatatatg

SEQ ID NO: 167584 - DNA, 13 bp, Artificial Sequence
  Oligonucleotide for detection of SNP TSC0041945
catatataatatt

SEQ ID NO: 167585 - DNA, 13 bp, Artificial Sequence
  Oligonucleotide for detection of SNP TSC0041946
aaaagaggtttta

SEQ ID NO: 167586 - DNA, 13 bp, Artificial Sequence
  Oligonucleotide for detection of SNP TSC0041946
taaaacctctttt

SEQ ID NO: 167587 - DNA, 13 bp, Artificial Sequence
  Oligonucleotide for detection of SNP TSC0041946
aaaagaagtttta

SEQ ID NO: 167588 - DNA, 13 bp, Artificial Sequence
  Oligonucleotide for detection of SNP TSC0041946
taaaacttctttt

SEQ ID NO: 167589 - DNA, 13 bp, Artificial Sequence
  Oligonucleotide for detection of SNP TSC0041948
tttttgaatttay

SEQ ID NO: 167590 - DNA, 13 bp, Artificial Sequence
  Oligonucleotide for detection of SNP TSC0041948
rtaaattcaaaaa

SEQ ID NO: 167591 - DNA, 13 bp, Artificial Sequence
  Oligonucleotide for detection of SNP TSC0041948
tttttgtatttay

SEQ ID NO: 167592 - DNA, 13 bp, Artificial Sequence
  Oligonucleotide for detection of SNP TSC0041948
rtaaatacaaaaa

SEQ ID NO: 167593 - DNA, 13 bp, Artificial Sequence
  Oligonucleotide for detection of SNP TSC0041948
gtaaatttaagag

SEQ ID NO: 167594 - DNA, 13 bp, Artificial Sequence
  Oligonucleotide for detection of SNP TSC0041948
ctcttaaatttac

SEQ ID NO: 167595 - DNA, 13 bp, Artificial Sequence
  Oligonucleotide for detection of SNP TSC0041948
gtaaatgtaagag

SEQ ID NO: 167596 - DNA, 13 bp, Artificial Sequence
  Oligonucleotide for detection of SNP TSC0041948
ctcttacatttac

SEQ ID NO: 167597 - DNA, 13 bp, Artificial Sequence
  Oligonucleotide for detection of SNP TSC0041949
aatgagtgtttag

SEQ ID NO: 167598 - DNA, 13 bp, Artificial Sequence
  Oligonucleotide for detection of SNP TSC0041949
ctaaacactcatt

SEQ ID NO: 167599 - DNA, 13 bp, Artificial Sequence
  Oligonucleotide for detection of SNP TSC0041949
aatgagggtttag

SEQ ID NO: 167600 - DNA, 13 bp, Artificial Sequence
  Oligonucleotide for detection of SNP TSC0041949
ctaaaccctcatt

SEQ ID NO: 167601 - DNA, 13 bp, Artificial Sequence
  Oligonucleotide for detection of SNP TSC0041949
aatgagcgtttag

SEQ ID NO: 167602 - DNA, 13 bp, Artificial Sequence
  Oligonucleotide for detection of SNP TSC0041949
ctaaacgctcatt

SEQ ID NO: 167603 - DNA, 13 bp, Artificial Sequence
  Oligonucleotide for detection of SNP TSC0041949
ttggatgtttatt

SEQ ID NO: 167604 - DNA, 13 bp, Artificial Sequence
  Oligonucleotide for detection of SNP TSC0041949
aataaacatccaa

SEQ ID NO: 167605 - DNA, 13 bp, Artificial Sequence
  Oligonucleotide for detection of SNP TSC0041949
ttggatttttatt

SEQ ID NO: 167606 - DNA, 13 bp, Artificial Sequence
  Oligonucleotide for detection of SNP TSC0041949
aataaaaatccaa

SEQ ID NO: 167607 - DNA, 13 bp, Artificial Sequence
  Oligonucleotide for detection of SNP TSC0041949
ttggacgtttatt

SEQ ID NO: 167608 - DNA, 13 bp, Artificial Sequence
  Oligonucleotide for detection of SNP TSC0041949
aataaacgtccaa

SEQ ID NO: 167609 - DNA, 13 bp, Artificial Sequence
  Oligonucleotide for detection of SNP TSC0041950
gtaagtttagtat

SEQ ID NO: 167610 - DNA, 13 bp, Artificial Sequence
  Oligonucleotide for detection of SNP TSC0041950
atactaaacttac

SEQ ID NO: 167611 - DNA, 13 bp, Artificial Sequence
  Oligonucleotide for detection of SNP TSC0041950
gtaagtatagtat

SEQ ID NO: 167612 - DNA, 13 bp, Artificial Sequence
  Oligonucleotide for detection of SNP TSC0041950
atactatacttac

SEQ ID NO: 167613 - DNA, 13 bp, Artificial Sequence
  Oligonucleotide for detection of SNP TSC0041951
ggaagaatggaaa

SEQ ID NO: 167614 - DNA, 13 bp, Artificial Sequence
  Oligonucleotide for detection of SNP TSC0041951
tttccattcttcc

SEQ ID NO: 167615 - DNA, 13 bp, Artificial Sequence
  Oligonucleotide for detection of SNP TSC0041951
ggaagagtggaaa

SEQ ID NO: 167616 - DNA, 13 bp, Artificial Sequence
  Oligonucleotide for detection of SNP TSC0041951
tttccactcttcc

SEQ ID NO: 167617 - DNA, 13 bp, Artificial Sequence
  Oligonucleotide for detection of SNP TSC0041952
taaggggtaaaga

SEQ ID NO: 167618 - DNA, 13 bp, Artificial Sequence
  Oligonucleotide for detection of SNP TSC0041952
tctttacccctta

SEQ ID NO: 167619 - DNA, 13 bp, Artificial Sequence
  Oligonucleotide for detection of SNP TSC0041952
taagggataaaga

SEQ ID NO: 167620 - DNA, 13 bp, Artificial Sequence
  Oligonucleotide for detection of SNP TSC0041952
tctttatccctta

SEQ ID NO: 167621 - DNA, 13 bp, Artificial Sequence
  Oligonucleotide for detection of SNP TSC0041953
gattttatgaaay

SEQ ID NO: 167622 - DNA, 13 bp, Artificial Sequence
  Oligonucleotide for detection of SNP TSC0041953
rtttcataaaatc

SEQ ID NO: 167623 - DNA, 13 bp, Artificial Sequence
  Oligonucleotide for detection of SNP TSC0041953
gattttttgaaay

SEQ ID NO: 167624 - DNA, 13 bp, Artificial Sequence
  Oligonucleotide for detection of SNP TSC0041953
rtttcaaaaaatc

SEQ ID NO: 167625 - DNA, 13 bp, Artificial Sequence
  Oligonucleotide for detection of SNP TSC0041953
gttttatggagty

SEQ ID NO: 167626 - DNA, 13 bp, Artificial Sequence
  Oligonucleotide for detection of SNP TSC0041953
ractccataaaac

SEQ ID NO: 167627 - DNA, 13 bp, Artificial Sequence
  Oligonucleotide for detection of SNP TSC0041953
gttttaaggagty

SEQ ID NO: 167628 - DNA, 13 bp, Artificial Sequence
  Oligonucleotide for detection of SNP TSC0041953
ractccttaaaac

SEQ ID NO: 167629 - DNA, 13 bp, Artificial Sequence
  Oligonucleotide for detection of SNP TSC0041954
ttttttgaataaa

SEQ ID NO: 167630 - DNA, 13 bp, Artificial Sequence
  Oligonucleotide for detection of SNP TSC0041954
tttattcaaaaaa

SEQ ID NO: 167631 - DNA, 13 bp, Artificial Sequence
  Oligonucleotide for detection of SNP TSC0041954
tttattaaaagag

SEQ ID NO: 167632 - DNA, 13 bp, Artificial Sequence
  Oligonucleotide for detection of SNP TSC0041954
ctcttttaataaa

SEQ ID NO: 167633 - DNA, 13 bp, Artificial Sequence
  Oligonucleotide for detection of SNP TSC0041954
tttatttaaagag

SEQ ID NO: 167634 - DNA, 13 bp, Artificial Sequence
  Oligonucleotide for detection of SNP TSC0041954
ctctttaaataaa

SEQ ID NO: 167635 - DNA, 13 bp, Artificial Sequence
  Oligonucleotide for detection of SNP TSC0041955
aggagaaggtttt

SEQ ID NO: 167636 - DNA, 13 bp, Artificial Sequence
  Oligonucleotide for detection of SNP TSC0041955
aaaaccttctcct

SEQ ID NO: 167637 - DNA, 13 bp, Artificial Sequence
  Oligonucleotide for detection of SNP TSC0041955
aggagatggtttt

SEQ ID NO: 167638 - DNA, 13 bp, Artificial Sequence
  Oligonucleotide for detection of SNP TSC0041955
aaaaccatctcct

SEQ ID NO: 167639 - DNA, 13 bp, Artificial Sequence
  Oligonucleotide for detection of SNP TSC0041956
tttgggatgtgty

SEQ ID NO: 167640 - DNA, 13 bp, Artificial Sequence
  Oligonucleotide for detection of SNP TSC0041956
racacatcccaaa

SEQ ID NO: 167641 - DNA, 13 bp, Artificial Sequence
  Oligonucleotide for detection of SNP TSC0041956
tttggggtgtgty

SEQ ID NO: 167642 - DNA, 13 bp, Artificial Sequence
  Oligonucleotide for detection of SNP TSC0041956
racacaccccaaa

SEQ ID NO: 167643 - DNA, 13 bp, Artificial Sequence
  Oligonucleotide for detection of SNP TSC0041956
ttcgggatgtgty

SEQ ID NO: 167644 - DNA, 13 bp, Artificial Sequence
  Oligonucleotide for detection of SNP TSC0041956
racacatcccgaa

SEQ ID NO: 167645 - DNA, 13 bp, Artificial Sequence
  Oligonucleotide for detection of SNP TSC0041956
ttcggggtgtgty

SEQ ID NO: 167646 - DNA, 13 bp, Artificial Sequence
  Oligonucleotide for detection of SNP TSC0041956
racacaccccgaa

SEQ ID NO: 167647 - DNA, 13 bp, Artificial Sequence
  Oligonucleotide for detection of SNP TSC0041957
atggatttatatg

SEQ ID NO: 167648 - DNA, 13 bp, Artificial Sequence
  Oligonucleotide for detection of SNP TSC0041957
catataaatccat

SEQ ID NO: 167649 - DNA, 13 bp, Artificial Sequence
  Oligonucleotide for detection of SNP TSC0041957
atggatgtatatg

SEQ ID NO: 167650 - DNA, 13 bp, Artificial Sequence
  Oligonucleotide for detection of SNP TSC0041957
catatacatccat

SEQ ID NO: 167651 - DNA, 13 bp, Artificial Sequence
  Oligonucleotide for detection of SNP TSC0041959
tagtttggggtag

SEQ ID NO: 167652 - DNA, 13 bp, Artificial Sequence
  Oligonucleotide for detection of SNP TSC0041959
ctaccccaaacta

SEQ ID NO: 167653 - DNA, 13 bp, Artificial Sequence
  Oligonucleotide for detection of SNP TSC0041959
tagtttagggtag

SEQ ID NO: 167654 - DNA, 13 bp, Artificial Sequence
  Oligonucleotide for detection of SNP TSC0041959
ctaccctaaacta

SEQ ID NO: 167655 - DNA, 13 bp, Artificial Sequence
  Oligonucleotide for detection of SNP TSC0041960
tagtatatattty

SEQ ID NO: 167656 - DNA, 13 bp, Artificial Sequence
  Oligonucleotide for detection of SNP TSC0041960
raaatatatacta

SEQ ID NO: 167657 - DNA, 13 bp, Artificial Sequence
  Oligonucleotide for detection of SNP TSC0041960
tagtatttattty

SEQ ID NO: 167658 - DNA, 13 bp, Artificial Sequence
  Oligonucleotide for detection of SNP TSC0041960
raaataaatacta

SEQ ID NO: 167659 - DNA, 13 bp, Artificial Sequence
  Oligonucleotide for detection of SNP TSC0041960
ggagtgtatgtta

SEQ ID NO: 167660 - DNA, 13 bp, Artificial Sequence
  Oligonucleotide for detection of SNP TSC0041960
taacatacactcc

SEQ ID NO: 167661 - DNA, 13 bp, Artificial Sequence
  Oligonucleotide for detection of SNP TSC0041960
ggagtggatgtta

SEQ ID NO: 167662 - DNA, 13 bp, Artificial Sequence
  Oligonucleotide for detection of SNP TSC0041960
taacatccactcc

SEQ ID NO: 167663 - DNA, 13 bp, Artificial Sequence
  Oligonucleotide for detection of SNP TSC0041961
taaattatttaty

SEQ ID NO: 167664 - DNA, 13 bp, Artificial Sequence
  Oligonucleotide for detection of SNP TSC0041961
rataaataattta

SEQ ID NO: 167665 - DNA, 13 bp, Artificial Sequence
  Oligonucleotide for detection of SNP TSC0041961
taaattgtttaty

SEQ ID NO: 167666 - DNA, 13 bp, Artificial Sequence
  Oligonucleotide for detection of SNP TSC0041961
rataaacaattta

SEQ ID NO: 167667 - DNA, 13 bp, Artificial Sequence
  Oligonucleotide for detection of SNP TSC0041961
taaatcgtttaty

SEQ ID NO: 167668 - DNA, 13 bp, Artificial Sequence
  Oligonucleotide for detection of SNP TSC0041961
rataaacgattta

SEQ ID NO: 167669 - DNA, 13 bp, Artificial Sequence
  Oligonucleotide for detection of SNP TSC0041961
gataagtggttta

SEQ ID NO: 167670 - DNA, 13 bp, Artificial Sequence
  Oligonucleotide for detection of SNP TSC0041961
taaaccacttatc

SEQ ID NO: 167671 - DNA, 13 bp, Artificial Sequence
  Oligonucleotide for detection of SNP TSC0041961
gataagcggttta

SEQ ID NO: 167672 - DNA, 13 bp, Artificial Sequence
  Oligonucleotide for detection of SNP TSC0041961
taaaccgcttatc

SEQ ID NO: 167673 - DNA, 13 bp, Artificial Sequence
  Oligonucleotide for detection of SNP TSC0041962
tttaatatttttt

SEQ ID NO: 167674 - DNA, 13 bp, Artificial Sequence
  Oligonucleotide for detection of SNP TSC0041962
aaaaaatattaaa

SEQ ID NO: 167675 - DNA, 13 bp, Artificial Sequence
  Oligonucleotide for detection of SNP TSC0041963
tggtaagggggty

SEQ ID NO: 167676 - DNA, 13 bp, Artificial Sequence
  Oligonucleotide for detection of SNP TSC0041963
racccccttacca

SEQ ID NO: 167677 - DNA, 13 bp, Artificial Sequence
  Oligonucleotide for detection of SNP TSC0041963
tggtaaaggggty

SEQ ID NO: 167678 - DNA, 13 bp, Artificial Sequence
  Oligonucleotide for detection of SNP TSC0041963
racccctttacca

SEQ ID NO: 167679 - DNA, 13 bp, Artificial Sequence
  Oligonucleotide for detection of SNP TSC0041967
gttggtagtgaay

SEQ ID NO: 167680 - DNA, 13 bp, Artificial Sequence
  Oligonucleotide for detection of SNP TSC0041967
rttcactaccaac

SEQ ID NO: 167681 - DNA, 13 bp, Artificial Sequence
  Oligonucleotide for detection of SNP TSC0041967
gttggttgtgaay

SEQ ID NO: 167682 - DNA, 13 bp, Artificial Sequence
  Oligonucleotide for detection of SNP TSC0041967
rttcacaaccaac

SEQ ID NO: 167683 - DNA, 13 bp, Artificial Sequence
  Oligonucleotide for detection of SNP TSC0041967
gttggtcgtgaay

SEQ ID NO: 167684 - DNA, 13 bp, Artificial Sequence
  Oligonucleotide for detection of SNP TSC0041967
rttcacgaccaac

SEQ ID NO: 167685 - DNA, 13 bp, Artificial Sequence
  Oligonucleotide for detection of SNP TSC0041967
gtttattattagy

SEQ ID NO: 167686 - DNA, 13 bp, Artificial Sequence
  Oligonucleotide for detection of SNP TSC0041967
rctaataataaac

SEQ ID NO: 167687 - DNA, 13 bp, Artificial Sequence
  Oligonucleotide for detection of SNP TSC0041967
gtttatgattagy

SEQ ID NO: 167688 - DNA, 13 bp, Artificial Sequence
  Oligonucleotide for detection of SNP TSC0041967
rctaatcataaac

SEQ ID NO: 167689 - DNA, 13 bp, Artificial Sequence
  Oligonucleotide for detection of SNP TSC0041967
gtttacgattagy

SEQ ID NO: 167690 - DNA, 13 bp, Artificial Sequence
  Oligonucleotide for detection of SNP TSC0041967
rctaatcgtaaac

SEQ ID NO: 167691 - DNA, 13 bp, Artificial Sequence
  Oligonucleotide for detection of SNP TSC0041968
agtaggtggtttt

SEQ ID NO: 167692 - DNA, 13 bp, Artificial Sequence
  Oligonucleotide for detection of SNP TSC0041968
aaaaccacctact

SEQ ID NO: 167693 - DNA, 13 bp, Artificial Sequence
  Oligonucleotide for detection of SNP TSC0041968
agtaggcggtttt

SEQ ID NO: 167694 - DNA, 13 bp, Artificial Sequence
  Oligonucleotide for detection of SNP TSC0041968
aaaaccgcctact

SEQ ID NO: 167695 - DNA, 13 bp, Artificial Sequence
  Oligonucleotide for detection of SNP TSC0041968
aaagttgtttgtt

SEQ ID NO: 167696 - DNA, 13 bp, Artificial Sequence
  Oligonucleotide for detection of SNP TSC0041968
aacaaacaacttt

SEQ ID NO: 167697 - DNA, 13 bp, Artificial Sequence
  Oligonucleotide for detection of SNP TSC0041968
aaagttatttgtt

SEQ ID NO: 167698 - DNA, 13 bp, Artificial Sequence
  Oligonucleotide for detection of SNP TSC0041968
aacaaataacttt

SEQ ID NO: 167699 - DNA, 13 bp, Artificial Sequence
  Oligonucleotide for detection of SNP TSC0041968
aaagtcgtttgtt

SEQ ID NO: 167700 - DNA, 13 bp, Artificial Sequence
  Oligonucleotide for detection of SNP TSC0041968
aacaaacgacttt

SEQ ID NO: 167701 - DNA, 13 bp, Artificial Sequence
  Oligonucleotide for detection of SNP TSC0041969
gtggatagtgtat

SEQ ID NO: 167702 - DNA, 13 bp, Artificial Sequence
  Oligonucleotide for detection of SNP TSC0041969
atacactatccac

SEQ ID NO: 167703 - DNA, 13 bp, Artificial Sequence
  Oligonucleotide for detection of SNP TSC0041969
gtggatggtgtat

SEQ ID NO: 167704 - DNA, 13 bp, Artificial Sequence
  Oligonucleotide for detection of SNP TSC0041969
atacaccatccac

SEQ ID NO: 167705 - DNA, 13 bp, Artificial Sequence
  Oligonucleotide for detection of SNP TSC0041970
tggtattgaatty

SEQ ID NO: 167706 - DNA, 13 bp, Artificial Sequence
  Oligonucleotide for detection of SNP TSC0041970
raattcaatacca

SEQ ID NO: 167707 - DNA, 13 bp, Artificial Sequence
  Oligonucleotide for detection of SNP TSC0041970
tggtatcgaatty

SEQ ID NO: 167708 - DNA, 13 bp, Artificial Sequence
  Oligonucleotide for detection of SNP TSC0041970
raattcgatacca

SEQ ID NO: 167709 - DNA, 13 bp, Artificial Sequence
  Oligonucleotide for detection of SNP TSC0041970
gggtttggtatta

SEQ ID NO: 167710 - DNA, 13 bp, Artificial Sequence
  Oligonucleotide for detection of SNP TSC0041970
taataccaaaccc

SEQ ID NO: 167711 - DNA, 13 bp, Artificial Sequence
  Oligonucleotide for detection of SNP TSC0041970
gggtttagtatta

SEQ ID NO: 167712 - DNA, 13 bp, Artificial Sequence
  Oligonucleotide for detection of SNP TSC0041970
taatactaaaccc

SEQ ID NO: 167713 - DNA, 13 bp, Artificial Sequence
  Oligonucleotide for detection of SNP TSC0041970
gggttcggtatta

SEQ ID NO: 167714 - DNA, 13 bp, Artificial Sequence
  Oligonucleotide for detection of SNP TSC0041970
taataccgaaccc

SEQ ID NO: 167715 - DNA, 13 bp, Artificial Sequence
  Oligonucleotide for detection of SNP TSC0041971
gggggaatagaty

SEQ ID NO: 167716 - DNA, 13 bp, Artificial Sequence
  Oligonucleotide for detection of SNP TSC0041971
ratctattccccc

SEQ ID NO: 167717 - DNA, 13 bp, Artificial Sequence
  Oligonucleotide for detection of SNP TSC0041971
gggggattagaty

SEQ ID NO: 167718 - DNA, 13 bp, Artificial Sequence
  Oligonucleotide for detection of SNP TSC0041971
ratctaatccccc

SEQ ID NO: 167719 - DNA, 13 bp, Artificial Sequence
  Oligonucleotide for detection of SNP TSC0041975
attgtagttaagg

SEQ ID NO: 167720 - DNA, 13 bp, Artificial Sequence
  Oligonucleotide for detection of SNP TSC0041975
ccttaactacaat

SEQ ID NO: 167721 - DNA, 13 bp, Artificial Sequence
  Oligonucleotide for detection of SNP TSC0041975
attgtaattaagg

SEQ ID NO: 167722 - DNA, 13 bp, Artificial Sequence
  Oligonucleotide for detection of SNP TSC0041975
ccttaattacaat

SEQ ID NO: 167723 - DNA, 13 bp, Artificial Sequence
  Oligonucleotide for detection of SNP TSC0041976
tttttatggtagy

SEQ ID NO: 167724 - DNA, 13 bp, Artificial Sequence
  Oligonucleotide for detection of SNP TSC0041976
rctaccataaaaa

SEQ ID NO: 167725 - DNA, 13 bp, Artificial Sequence
  Oligonucleotide for detection of SNP TSC0041976
tttttacggtagy

SEQ ID NO: 167726 - DNA, 13 bp, Artificial Sequence
  Oligonucleotide for detection of SNP TSC0041976
rctaccgtaaaaa

SEQ ID NO: 167727 - DNA, 13 bp, Artificial Sequence
  Oligonucleotide for detection of SNP TSC0041976
gttgttgtgagag

SEQ ID NO: 167728 - DNA, 13 bp, Artificial Sequence
  Oligonucleotide for detection of SNP TSC0041976
ctctcacaacaac

SEQ ID NO: 167729 - DNA, 13 bp, Artificial Sequence
  Oligonucleotide for detection of SNP TSC0041976
gttgttatgagag

SEQ ID NO: 167730 - DNA, 13 bp, Artificial Sequence
  Oligonucleotide for detection of SNP TSC0041976
ctctcataacaac

SEQ ID NO: 167731 - DNA, 13 bp, Artificial Sequence
  Oligonucleotide for detection of SNP TSC0041976
gttgtcgtgagag

SEQ ID NO: 167732 - DNA, 13 bp, Artificial Sequence
  Oligonucleotide for detection of SNP TSC0041976
ctctcacgacaac

SEQ ID NO: 167733 - DNA, 13 bp, Artificial Sequence
  Oligonucleotide for detection of SNP TSC0006817
aatgttataaaaa

SEQ ID NO: 167734 - DNA, 13 bp, Artificial Sequence
  Oligonucleotide for detection of SNP TSC0006817
tttttataacatt

SEQ ID NO: 167735 - DNA, 13 bp, Artificial Sequence
  Oligonucleotide for detection of SNP TSC0006817
aatgttgtaaaaa

SEQ ID NO: 167736 - DNA, 13 bp, Artificial Sequence
  Oligonucleotide for detection of SNP TSC0006817
tttttacaacatt

SEQ ID NO: 167737 - DNA, 13 bp, Artificial Sequence
  Oligonucleotide for detection of SNP TSC0006818
gaaagattataty

SEQ ID NO: 167738 - DNA, 13 bp, Artificial Sequence
  Oligonucleotide for detection of SNP TSC0006818
ratataatctttc

SEQ ID NO: 167739 - DNA, 13 bp, Artificial Sequence
  Oligonucleotide for detection of SNP TSC0006818
gaaagagtataty

SEQ ID NO: 167740 - DNA, 13 bp, Artificial Sequence
  Oligonucleotide for detection of SNP TSC0006818
ratatactctttc

SEQ ID NO: 167741 - DNA, 13 bp, Artificial Sequence
  Oligonucleotide for detection of SNP TSC0006818
gatgtgattttty

SEQ ID NO: 167742 - DNA, 13 bp, Artificial Sequence
  Oligonucleotide for detection of SNP TSC0006818
raaaaatcacatc

SEQ ID NO: 167743 - DNA, 13 bp, Artificial Sequence
  Oligonucleotide for detection of SNP TSC0006818
gatgtgtttttty

SEQ ID NO: 167744 - DNA, 13 bp, Artificial Sequence
  Oligonucleotide for detection of SNP TSC0006818
raaaaaacacatc

SEQ ID NO: 167745 - DNA, 13 bp, Artificial Sequence
  Oligonucleotide for detection of SNP TSC0006819
aggtgtaagattt

SEQ ID NO: 167746 - DNA, 13 bp, Artificial Sequence
  Oligonucleotide for detection of SNP TSC0006819
aaatcttacacct

SEQ ID NO: 167747 - DNA, 13 bp, Artificial Sequence
  Oligonucleotide for detection of SNP TSC0006819
aggtgtgagattt

SEQ ID NO: 167748 - DNA, 13 bp, Artificial Sequence
  Oligonucleotide for detection of SNP TSC0006819
aaatctcacacct

SEQ ID NO: 167749 - DNA, 13 bp, Artificial Sequence
  Oligonucleotide for detection of SNP TSC0006819
aggtgcgagattt

SEQ ID NO: 167750 - DNA, 13 bp, Artificial Sequence
  Oligonucleotide for detection of SNP TSC0006819
aaatctcgcacct

SEQ ID NO: 167751 - DNA, 13 bp, Artificial Sequence
  Oligonucleotide for detection of SNP TSC0006819
aagttttgtattt

SEQ ID NO: 167752 - DNA, 13 bp, Artificial Sequence
  Oligonucleotide for detection of SNP TSC0006819
aaatacaaaactt

SEQ ID NO: 167753 - DNA, 13 bp, Artificial Sequence
  Oligonucleotide for detection of SNP TSC0006819
aagtttcgtattt

SEQ ID NO: 167754 - DNA, 13 bp, Artificial Sequence
  Oligonucleotide for detection of SNP TSC0006819
aaatacgaaactt

SEQ ID NO: 167755 - DNA, 13 bp, Artificial Sequence
  Oligonucleotide for detection of SNP TSC0041982
gtttaagggttty

SEQ ID NO: 167756 - DNA, 13 bp, Artificial Sequence
  Oligonucleotide for detection of SNP TSC0041982
raaacccttaaac

SEQ ID NO: 167757 - DNA, 13 bp, Artificial Sequence
  Oligonucleotide for detection of SNP TSC0041982
gtttaaaggttty

SEQ ID NO: 167758 - DNA, 13 bp, Artificial Sequence
  Oligonucleotide for detection of SNP TSC0041982
raaacctttaaac

SEQ ID NO: 167759 - DNA, 13 bp, Artificial Sequence
  Oligonucleotide for detection of SNP TSC0041988
ggaattgtggtat

SEQ ID NO: 167760 - DNA, 13 bp, Artificial Sequence
  Oligonucleotide for detection of SNP TSC0041988
ataccacaattcc

SEQ ID NO: 167761 - DNA, 13 bp, Artificial Sequence
  Oligonucleotide for detection of SNP TSC0041988
ggaattatggtat

SEQ ID NO: 167762 - DNA, 13 bp, Artificial Sequence
  Oligonucleotide for detection of SNP TSC0041988
ataccataattcc

SEQ ID NO: 167763 - DNA, 13 bp, Artificial Sequence
  Oligonucleotide for detection of SNP TSC0007591
aaaattagtagta

SEQ ID NO: 167764 - DNA, 13 bp, Artificial Sequence
  Oligonucleotide for detection of SNP TSC0007591
tactactaatttt

SEQ ID NO: 167765 - DNA, 13 bp, Artificial Sequence
  Oligonucleotide for detection of SNP TSC0007591
aaaatttgtagta

SEQ ID NO: 167766 - DNA, 13 bp, Artificial Sequence
  Oligonucleotide for detection of SNP TSC0007591
tactacaaatttt

SEQ ID NO: 167767 - DNA, 13 bp, Artificial Sequence
  Oligonucleotide for detection of SNP TSC0007591
aaaattcgtagta

SEQ ID NO: 167768 - DNA, 13 bp, Artificial Sequence
  Oligonucleotide for detection of SNP TSC0007591
tactacgaatttt

SEQ ID NO: 167769 - DNA, 13 bp, Artificial Sequence
  Oligonucleotide for detection of SNP TSC0007591
tgttattgatttt

SEQ ID NO: 167770 - DNA, 13 bp, Artificial Sequence
  Oligonucleotide for detection of SNP TSC0007591
aaaatcaataaca

SEQ ID NO: 167771 - DNA, 13 bp, Artificial Sequence
  Oligonucleotide for detection of SNP TSC0007591
tgttatggatttt

SEQ ID NO: 167772 - DNA, 13 bp, Artificial Sequence
  Oligonucleotide for detection of SNP TSC0007591
aaaatccataaca

SEQ ID NO: 167773 - DNA, 13 bp, Artificial Sequence
  Oligonucleotide for detection of SNP TSC0007591
tgttacggatttt

SEQ ID NO: 167774 - DNA, 13 bp, Artificial Sequence
  Oligonucleotide for detection of SNP TSC0007591
aaaatccgtaaca

SEQ ID NO: 167775 - DNA, 13 bp, Artificial Sequence
  Oligonucleotide for detection of SNP TSC0007592
tttttaatttgga

SEQ ID NO: 167776 - DNA, 13 bp, Artificial Sequence
  Oligonucleotide for detection of SNP TSC0007592
tccaaattaaaaa

SEQ ID NO: 167777 - DNA, 13 bp, Artificial Sequence
  Oligonucleotide for detection of SNP TSC0041990
tgtaaggaaatty

SEQ ID NO: 167778 - DNA, 13 bp, Artificial Sequence
  Oligonucleotide for detection of SNP TSC0041990
raatttccttaca

SEQ ID NO: 167779 - DNA, 13 bp, Artificial Sequence
  Oligonucleotide for detection of SNP TSC0041990
tgtaagaaaatty

SEQ ID NO: 167780 - DNA, 13 bp, Artificial Sequence
  Oligonucleotide for detection of SNP TSC0041990
raattttcttaca

SEQ ID NO: 167781 - DNA, 13 bp, Artificial Sequence
  Oligonucleotide for detection of SNP TSC0010654
aggttgtagtttt

SEQ ID NO: 167782 - DNA, 13 bp, Artificial Sequence
  Oligonucleotide for detection of SNP TSC0010654
aaaactacaacct

SEQ ID NO: 167783 - DNA, 13 bp, Artificial Sequence
  Oligonucleotide for detection of SNP TSC0010654
aggttggagtttt

SEQ ID NO: 167784 - DNA, 13 bp, Artificial Sequence
  Oligonucleotide for detection of SNP TSC0010654
aaaactccaacct

SEQ ID NO: 167785 - DNA, 13 bp, Artificial Sequence
  Oligonucleotide for detection of SNP TSC0010654
agagttatagttt

SEQ ID NO: 167786 - DNA, 13 bp, Artificial Sequence
  Oligonucleotide for detection of SNP TSC0010654
aaactataactct

SEQ ID NO: 167787 - DNA, 13 bp, Artificial Sequence
  Oligonucleotide for detection of SNP TSC0010654
agagttttagttt

SEQ ID NO: 167788 - DNA, 13 bp, Artificial Sequence
  Oligonucleotide for detection of SNP TSC0010654
aaactaaaactct

SEQ ID NO: 167789 - DNA, 13 bp, Artificial Sequence
  Oligonucleotide for detection of SNP TSC0010655
tttgaatgttttg

SEQ ID NO: 167790 - DNA, 13 bp, Artificial Sequence
  Oligonucleotide for detection of SNP TSC0010655
caaaacattcaaa

SEQ ID NO: 167791 - DNA, 13 bp, Artificial Sequence
  Oligonucleotide for detection of SNP TSC0010655
tttgaacgttttg

SEQ ID NO: 167792 - DNA, 13 bp, Artificial Sequence
  Oligonucleotide for detection of SNP TSC0010655
caaaacgttcaaa

SEQ ID NO: 167793 - DNA, 13 bp, Artificial Sequence
  Oligonucleotide for detection of SNP TSC0010655
taaaatgtttaaa

SEQ ID NO: 167794 - DNA, 13 bp, Artificial Sequence
  Oligonucleotide for detection of SNP TSC0010655
tttaaacatttta

SEQ ID NO: 167795 - DNA, 13 bp, Artificial Sequence
  Oligonucleotide for detection of SNP TSC0010655
taaaacgtttaaa

SEQ ID NO: 167796 - DNA, 13 bp, Artificial Sequence
  Oligonucleotide for detection of SNP TSC0010655
tttaaacgtttta

SEQ ID NO: 167797 - DNA, 13 bp, Artificial Sequence
  Oligonucleotide for detection of SNP TSC0010656
tttaggaatgggt

SEQ ID NO: 167798 - DNA, 13 bp, Artificial Sequence
  Oligonucleotide for detection of SNP TSC0010656
acccattcctaaa

SEQ ID NO: 167799 - DNA, 13 bp, Artificial Sequence
  Oligonucleotide for detection of SNP TSC0010656
tttaggtatgggt

SEQ ID NO: 167800 - DNA, 13 bp, Artificial Sequence
  Oligonucleotide for detection of SNP TSC0010656
acccatacctaaa

SEQ ID NO: 167801 - DNA, 13 bp, Artificial Sequence
  Oligonucleotide for detection of SNP TSC0010656
atttatttttggg

SEQ ID NO: 167802 - DNA, 13 bp, Artificial Sequence
  Oligonucleotide for detection of SNP TSC0010656
cccaaaaataaat

SEQ ID NO: 167803 - DNA, 13 bp, Artificial Sequence
  Oligonucleotide for detection of SNP TSC0041991
tagtattttgtat

SEQ ID NO: 167804 - DNA, 13 bp, Artificial Sequence
  Oligonucleotide for detection of SNP TSC0041991
atacaaaatacta

SEQ ID NO: 167805 - DNA, 13 bp, Artificial Sequence
  Oligonucleotide for detection of SNP TSC0041991
tagtatgttgtat

SEQ ID NO: 167806 - DNA, 13 bp, Artificial Sequence
  Oligonucleotide for detection of SNP TSC0041991
atacaacatacta

SEQ ID NO: 167807 - DNA, 13 bp, Artificial Sequence
  Oligonucleotide for detection of SNP TSC0041991
tagtacgttgtat

SEQ ID NO: 167808 - DNA, 13 bp, Artificial Sequence
  Oligonucleotide for detection of SNP TSC0041991
atacaacgtacta

SEQ ID NO: 167809 - DNA, 13 bp, Artificial Sequence
  Oligonucleotide for detection of SNP TSC0041991
atatagcgtattg

SEQ ID NO: 167810 - DNA, 13 bp, Artificial Sequence
  Oligonucleotide for detection of SNP TSC0041991
caatacgctatat

SEQ ID NO: 167811 - DNA, 13 bp, Artificial Sequence
  Oligonucleotide for detection of SNP TSC0041992
atatttgtagttt

SEQ ID NO: 167812 - DNA, 13 bp, Artificial Sequence
  Oligonucleotide for detection of SNP TSC0041992
aaactacaaatat

SEQ ID NO: 167813 - DNA, 13 bp, Artificial Sequence
  Oligonucleotide for detection of SNP TSC0041992
atatttatagttt

SEQ ID NO: 167814 - DNA, 13 bp, Artificial Sequence
  Oligonucleotide for detection of SNP TSC0041992
aaactataaatat

SEQ ID NO: 167815 - DNA, 13 bp, Artificial Sequence
  Oligonucleotide for detection of SNP TSC0041993
aataaggtttaat

SEQ ID NO: 167816 - DNA, 13 bp, Artificial Sequence
  Oligonucleotide for detection of SNP TSC0041993
attaaaccttatt

SEQ ID NO: 167817 - DNA, 13 bp, Artificial Sequence
  Oligonucleotide for detection of SNP TSC0041993
aataagatttaat

SEQ ID NO: 167818 - DNA, 13 bp, Artificial Sequence
  Oligonucleotide for detection of SNP TSC0041993
attaaatcttatt

SEQ ID NO: 167819 - DNA, 13 bp, Artificial Sequence
  Oligonucleotide for detection of SNP TSC0041994
tagtaagtgaaat

SEQ ID NO: 167820 - DNA, 13 bp, Artificial Sequence
  Oligonucleotide for detection of SNP TSC0041994
atttcacttacta

SEQ ID NO: 167821 - DNA, 13 bp, Artificial Sequence
  Oligonucleotide for detection of SNP TSC0041994
tagtaaatgaaat

SEQ ID NO: 167822 - DNA, 13 bp, Artificial Sequence
  Oligonucleotide for detection of SNP TSC0041994
atttcatttacta

SEQ ID NO: 167823 - DNA, 13 bp, Artificial Sequence
  Oligonucleotide for detection of SNP TSC0041995
atggatagtttgt

SEQ ID NO: 167824 - DNA, 13 bp, Artificial Sequence
  Oligonucleotide for detection of SNP TSC0041995
acaaactatccat

SEQ ID NO: 167825 - DNA, 13 bp, Artificial Sequence
  Oligonucleotide for detection of SNP TSC0041995
atggatggtttgt

SEQ ID NO: 167826 - DNA, 13 bp, Artificial Sequence
  Oligonucleotide for detection of SNP TSC0041995
acaaaccatccat

SEQ ID NO: 167827 - DNA, 13 bp, Artificial Sequence
  Oligonucleotide for detection of SNP TSC0041999
tgggtaatttata

SEQ ID NO: 167828 - DNA, 13 bp, Artificial Sequence
  Oligonucleotide for detection of SNP TSC0041999
tataaattaccca

SEQ ID NO: 167829 - DNA, 13 bp, Artificial Sequence
  Oligonucleotide for detection of SNP TSC0041999
tgggtagtttata

SEQ ID NO: 167830 - DNA, 13 bp, Artificial Sequence
  Oligonucleotide for detection of SNP TSC0041999
tataaactaccca

SEQ ID NO: 167831 - DNA, 13 bp, Artificial Sequence
  Oligonucleotide for detection of SNP TSC0042000
aggtatattttay

SEQ ID NO: 167832 - DNA, 13 bp, Artificial Sequence
  Oligonucleotide for detection of SNP TSC0042000
rtaaaatatacct

SEQ ID NO: 167833 - DNA, 13 bp, Artificial Sequence
  Oligonucleotide for detection of SNP TSC0042000
aggtatgttttay

SEQ ID NO: 167834 - DNA, 13 bp, Artificial Sequence
  Oligonucleotide for detection of SNP TSC0042000
rtaaaacatacct

SEQ ID NO: 167835 - DNA, 13 bp, Artificial Sequence
  Oligonucleotide for detection of SNP TSC0042000
aggtacgttttay

SEQ ID NO: 167836 - DNA, 13 bp, Artificial Sequence
  Oligonucleotide for detection of SNP TSC0042000
rtaaaacgtacct

SEQ ID NO: 167837 - DNA, 13 bp, Artificial Sequence
  Oligonucleotide for detection of SNP TSC0042000
gtaagatgtgttt

SEQ ID NO: 167838 - DNA, 13 bp, Artificial Sequence
  Oligonucleotide for detection of SNP TSC0042000
aaacacatcttac

SEQ ID NO: 167839 - DNA, 13 bp, Artificial Sequence
  Oligonucleotide for detection of SNP TSC0042000
gtaagacgtgttt

SEQ ID NO: 167840 - DNA, 13 bp, Artificial Sequence
  Oligonucleotide for detection of SNP TSC0042000
aaacacgtcttac

SEQ ID NO: 167841 - DNA, 13 bp, Artificial Sequence
  Oligonucleotide for detection of SNP TSC0042001
gtgaatgagttty

SEQ ID NO: 167842 - DNA, 13 bp, Artificial Sequence
  Oligonucleotide for detection of SNP TSC0042001
raaactcattcac

SEQ ID NO: 167843 - DNA, 13 bp, Artificial Sequence
  Oligonucleotide for detection of SNP TSC0042001
gtgaataagttty

SEQ ID NO: 167844 - DNA, 13 bp, Artificial Sequence
  Oligonucleotide for detection of SNP TSC0042001
raaacttattcac

SEQ ID NO: 167845 - DNA, 13 bp, Artificial Sequence
  Oligonucleotide for detection of SNP TSC0042002
tttatagtaaaag

SEQ ID NO: 167846 - DNA, 13 bp, Artificial Sequence
  Oligonucleotide for detection of SNP TSC0042002
cttttactataaa

SEQ ID NO: 167847 - DNA, 13 bp, Artificial Sequence
  Oligonucleotide for detection of SNP TSC0042002
tttataataaaag

SEQ ID NO: 167848 - DNA, 13 bp, Artificial Sequence
  Oligonucleotide for detection of SNP TSC0042002
cttttattataaa

SEQ ID NO: 167849 - DNA, 13 bp, Artificial Sequence
  Oligonucleotide for detection of SNP TSC0009920
tgaataagtttgg

SEQ ID NO: 167850 - DNA, 13 bp, Artificial Sequence
  Oligonucleotide for detection of SNP TSC0009920
ccaaacttattca

SEQ ID NO: 167851 - DNA, 13 bp, Artificial Sequence
  Oligonucleotide for detection of SNP TSC0009920
tgaataggtttgg

SEQ ID NO: 167852 - DNA, 13 bp, Artificial Sequence
  Oligonucleotide for detection of SNP TSC0009920
ccaaacctattca

SEQ ID NO: 167853 - DNA, 13 bp, Artificial Sequence
  Oligonucleotide for detection of SNP TSC0042005
ttttttaaatgag

SEQ ID NO: 167854 - DNA, 13 bp, Artificial Sequence
  Oligonucleotide for detection of SNP TSC0042005
ctcatttaaaaaa

SEQ ID NO: 167855 - DNA, 13 bp, Artificial Sequence
  Oligonucleotide for detection of SNP TSC0042005
ttttttgaatgag

SEQ ID NO: 167856 - DNA, 13 bp, Artificial Sequence
  Oligonucleotide for detection of SNP TSC0042005
ctcattcaaaaaa

SEQ ID NO: 167857 - DNA, 13 bp, Artificial Sequence
  Oligonucleotide for detection of SNP TSC0042005
tttttcgaatgag

SEQ ID NO: 167858 - DNA, 13 bp, Artificial Sequence
  Oligonucleotide for detection of SNP TSC0042005
ctcattcgaaaaa

SEQ ID NO: 167859 - DNA, 13 bp, Artificial Sequence
  Oligonucleotide for detection of SNP TSC0042005
tttatttggagaa

SEQ ID NO: 167860 - DNA, 13 bp, Artificial Sequence
  Oligonucleotide for detection of SNP TSC0042005
ttctccaaataaa

SEQ ID NO: 167861 - DNA, 13 bp, Artificial Sequence
  Oligonucleotide for detection of SNP TSC0042005
tttattcggagaa

SEQ ID NO: 167862 - DNA, 13 bp, Artificial Sequence
  Oligonucleotide for detection of SNP TSC0042005
ttctccgaataaa

SEQ ID NO: 167863 - DNA, 13 bp, Artificial Sequence
  Oligonucleotide for detection of SNP TSC0042006
tattatggtttaa

SEQ ID NO: 167864 - DNA, 13 bp, Artificial Sequence
  Oligonucleotide for detection of SNP TSC0042006
ttaaaccataata

SEQ ID NO: 167865 - DNA, 13 bp, Artificial Sequence
  Oligonucleotide for detection of SNP TSC0042006
tattatagtttaa

SEQ ID NO: 167866 - DNA, 13 bp, Artificial Sequence
  Oligonucleotide for detection of SNP TSC0042006
ttaaactataata

SEQ ID NO: 167867 - DNA, 13 bp, Artificial Sequence
  Oligonucleotide for detection of SNP TSC0042007
aggattatagatt

SEQ ID NO: 167868 - DNA, 13 bp, Artificial Sequence
  Oligonucleotide for detection of SNP TSC0042007
aatctataatcct

SEQ ID NO: 167869 - DNA, 13 bp, Artificial Sequence
  Oligonucleotide for detection of SNP TSC0042007
aggattttagatt

SEQ ID NO: 167870 - DNA, 13 bp, Artificial Sequence
  Oligonucleotide for detection of SNP TSC0042007
aatctaaaatcct

SEQ ID NO: 167871 - DNA, 13 bp, Artificial Sequence
  Oligonucleotide for detection of SNP TSC0042007
agtttgtagtttt

SEQ ID NO: 167872 - DNA, 13 bp, Artificial Sequence
  Oligonucleotide for detection of SNP TSC0042007
aaaactacaaact

SEQ ID NO: 167873 - DNA, 13 bp, Artificial Sequence
  Oligonucleotide for detection of SNP TSC0042007
agtttggagtttt

SEQ ID NO: 167874 - DNA, 13 bp, Artificial Sequence
  Oligonucleotide for detection of SNP TSC0042007
aaaactccaaact

SEQ ID NO: 167875 - DNA, 13 bp, Artificial Sequence
  Oligonucleotide for detection of SNP TSC0006909
ttggttaggttgg

SEQ ID NO: 167876 - DNA, 13 bp, Artificial Sequence
  Oligonucleotide for detection of SNP TSC0006909
ccaacctaaccaa

SEQ ID NO: 167877 - DNA, 13 bp, Artificial Sequence
  Oligonucleotide for detection of SNP TSC0006909
ttggttgggttgg

SEQ ID NO: 167878 - DNA, 13 bp, Artificial Sequence
  Oligonucleotide for detection of SNP TSC0006909
ccaacccaaccaa

SEQ ID NO: 167879 - DNA, 13 bp, Artificial Sequence
  Oligonucleotide for detection of SNP TSC0006909
ttggtcgggttgg

SEQ ID NO: 167880 - DNA, 13 bp, Artificial Sequence
  Oligonucleotide for detection of SNP TSC0006909
ccaacccgaccaa

SEQ ID NO: 167881 - DNA, 13 bp, Artificial Sequence
  Oligonucleotide for detection of SNP TSC0006909
ttaatttggttaa

SEQ ID NO: 167882 - DNA, 13 bp, Artificial Sequence
  Oligonucleotide for detection of SNP TSC0006909
ttaaccaaattaa

SEQ ID NO: 167883 - DNA, 13 bp, Artificial Sequence
  Oligonucleotide for detection of SNP TSC0006909
ttaattcggttaa

SEQ ID NO: 167884 - DNA, 13 bp, Artificial Sequence
  Oligonucleotide for detection of SNP TSC0006909
ttaaccgaattaa

SEQ ID NO: 167885 - DNA, 13 bp, Artificial Sequence
  Oligonucleotide for detection of SNP TSC0042016
gatgaaataaaty

SEQ ID NO: 167886 - DNA, 13 bp, Artificial Sequence
  Oligonucleotide for detection of SNP TSC0042016
ratttatttcatc

SEQ ID NO: 167887 - DNA, 13 bp, Artificial Sequence
  Oligonucleotide for detection of SNP TSC0042016
gatgaattaaaty

SEQ ID NO: 167888 - DNA, 13 bp, Artificial Sequence
  Oligonucleotide for detection of SNP TSC0042016
ratttaattcatc

SEQ ID NO: 167889 - DNA, 13 bp, Artificial Sequence
  Oligonucleotide for detection of SNP TSC0042016
gatttgttttaty

SEQ ID NO: 167890 - DNA, 13 bp, Artificial Sequence
  Oligonucleotide for detection of SNP TSC0042016
rataaaacaaatc

SEQ ID NO: 167891 - DNA, 13 bp, Artificial Sequence
  Oligonucleotide for detection of SNP TSC0042016
gatttggtttaty

SEQ ID NO: 167892 - DNA, 13 bp, Artificial Sequence
  Oligonucleotide for detection of SNP TSC0042016
rataaaccaaatc

SEQ ID NO: 167893 - DNA, 13 bp, Artificial Sequence
  Oligonucleotide for detection of SNP TSC0042017
tggtggatttgta

SEQ ID NO: 167894 - DNA, 13 bp, Artificial Sequence
  Oligonucleotide for detection of SNP TSC0042017
tacaaatccacca

SEQ ID NO: 167895 - DNA, 13 bp, Artificial Sequence
  Oligonucleotide for detection of SNP TSC0042017
tggtggttttgta

SEQ ID NO: 167896 - DNA, 13 bp, Artificial Sequence
  Oligonucleotide for detection of SNP TSC0042017
tacaaaaccacca

SEQ ID NO: 167897 - DNA, 13 bp, Artificial Sequence
  Oligonucleotide for detection of SNP TSC0042017
tggcggatttgta

SEQ ID NO: 167898 - DNA, 13 bp, Artificial Sequence
  Oligonucleotide for detection of SNP TSC0042017
tacaaatccgcca

SEQ ID NO: 167899 - DNA, 13 bp, Artificial Sequence
  Oligonucleotide for detection of SNP TSC0042017
tggcggttttgta

SEQ ID NO: 167900 - DNA, 13 bp, Artificial Sequence
  Oligonucleotide for detection of SNP TSC0042017
tacaaaaccgcca

SEQ ID NO: 167901 - DNA, 13 bp, Artificial Sequence
  Oligonucleotide for detection of SNP TSC0042017
tgtaggtttgtta

SEQ ID NO: 167902 - DNA, 13 bp, Artificial Sequence
  Oligonucleotide for detection of SNP TSC0042017
taacaaacctaca

SEQ ID NO: 167903 - DNA, 13 bp, Artificial Sequence
  Oligonucleotide for detection of SNP TSC0042017
tgtaggattgtta

SEQ ID NO: 167904 - DNA, 13 bp, Artificial Sequence
  Oligonucleotide for detection of SNP TSC0042017
taacaatcctaca

SEQ ID NO: 167905 - DNA, 13 bp, Artificial Sequence
  Oligonucleotide for detection of SNP TSC0042017
tgtaggttcgtta

SEQ ID NO: 167906 - DNA, 13 bp, Artificial Sequence
  Oligonucleotide for detection of SNP TSC0042017
taacgaacctaca

SEQ ID NO: 167907 - DNA, 13 bp, Artificial Sequence
  Oligonucleotide for detection of SNP TSC0042017
tgtaggatcgtta

SEQ ID NO: 167908 - DNA, 13 bp, Artificial Sequence
  Oligonucleotide for detection of SNP TSC0042017
taacgatcctaca

SEQ ID NO: 167909 - DNA, 13 bp, Artificial Sequence
  Oligonucleotide for detection of SNP TSC0042018
ttgttttgatttt

SEQ ID NO: 167910 - DNA, 13 bp, Artificial Sequence
  Oligonucleotide for detection of SNP TSC0042018
aaaatcaaaacaa

SEQ ID NO: 167911 - DNA, 13 bp, Artificial Sequence
  Oligonucleotide for detection of SNP TSC0042018
tcgttttgatttt

SEQ ID NO: 167912 - DNA, 13 bp, Artificial Sequence
  Oligonucleotide for detection of SNP TSC0042018
aaaatcaaaacga

SEQ ID NO: 167913 - DNA, 13 bp, Artificial Sequence
  Oligonucleotide for detection of SNP TSC0042018
ttgtttcgatttt

SEQ ID NO: 167914 - DNA, 13 bp, Artificial Sequence
  Oligonucleotide for detection of SNP TSC0042018
aaaatcgaaacaa

SEQ ID NO: 167915 - DNA, 13 bp, Artificial Sequence
  Oligonucleotide for detection of SNP TSC0042018
tcgtttcgatttt

SEQ ID NO: 167916 - DNA, 13 bp, Artificial Sequence
  Oligonucleotide for detection of SNP TSC0042018
aaaatcgaaacga

SEQ ID NO: 167917 - DNA, 13 bp, Artificial Sequence
  Oligonucleotide for detection of SNP TSC0042018
agggttggaatgg

SEQ ID NO: 167918 - DNA, 13 bp, Artificial Sequence
  Oligonucleotide for detection of SNP TSC0042018
ccattccaaccct

SEQ ID NO: 167919 - DNA, 13 bp, Artificial Sequence
  Oligonucleotide for detection of SNP TSC0042018
agggttagaatgg

SEQ ID NO: 167920 - DNA, 13 bp, Artificial Sequence
  Oligonucleotide for detection of SNP TSC0042018
ccattctaaccct

SEQ ID NO: 167921 - DNA, 13 bp, Artificial Sequence
  Oligonucleotide for detection of SNP TSC0042018
agggtcggaatgg

SEQ ID NO: 167922 - DNA, 13 bp, Artificial Sequence
  Oligonucleotide for detection of SNP TSC0042018
ccattccgaccct

SEQ ID NO: 167923 - DNA, 13 bp, Artificial Sequence
  Oligonucleotide for detection of SNP TSC0042018
agggttagaacgg

SEQ ID NO: 167924 - DNA, 13 bp, Artificial Sequence
  Oligonucleotide for detection of SNP TSC0042018
ccgttctaaccct

SEQ ID NO: 167925 - DNA, 13 bp, Artificial Sequence
  Oligonucleotide for detection of SNP TSC0042018
agggttggaacgg

SEQ ID NO: 167926 - DNA, 13 bp, Artificial Sequence
  Oligonucleotide for detection of SNP TSC0042018
ccgttccaaccct

SEQ ID NO: 167927 - DNA, 13 bp, Artificial Sequence
  Oligonucleotide for detection of SNP TSC0042018
agggtcggaacgg

SEQ ID NO: 167928 - DNA, 13 bp, Artificial Sequence
  Oligonucleotide for detection of SNP TSC0042018
ccgttccgaccct

SEQ ID NO: 167929 - DNA, 13 bp, Artificial Sequence
  Oligonucleotide for detection of SNP TSC0042019
aagtggattagty

SEQ ID NO: 167930 - DNA, 13 bp, Artificial Sequence
  Oligonucleotide for detection of SNP TSC0042019
ractaatccactt

SEQ ID NO: 167931 - DNA, 13 bp, Artificial Sequence
  Oligonucleotide for detection of SNP TSC0042019
aagtgggttagty

SEQ ID NO: 167932 - DNA, 13 bp, Artificial Sequence
  Oligonucleotide for detection of SNP TSC0042019
ractaacccactt

SEQ ID NO: 167933 - DNA, 13 bp, Artificial Sequence
  Oligonucleotide for detection of SNP TSC0042020
ttgtatatgttat

SEQ ID NO: 167934 - DNA, 13 bp, Artificial Sequence
  Oligonucleotide for detection of SNP TSC0042020
ataacatatacaa

SEQ ID NO: 167935 - DNA, 13 bp, Artificial Sequence
  Oligonucleotide for detection of SNP TSC0042020
ttgtatttgttat

SEQ ID NO: 167936 - DNA, 13 bp, Artificial Sequence
  Oligonucleotide for detection of SNP TSC0042020
ataacaaatacaa

SEQ ID NO: 167937 - DNA, 13 bp, Artificial Sequence
  Oligonucleotide for detection of SNP TSC0042020
atagtatgtgtaa

SEQ ID NO: 167938 - DNA, 13 bp, Artificial Sequence
  Oligonucleotide for detection of SNP TSC0042020
ttacacatactat

SEQ ID NO: 167939 - DNA, 13 bp, Artificial Sequence
  Oligonucleotide for detection of SNP TSC0042020
atagtaggtgtaa

SEQ ID NO: 167940 - DNA, 13 bp, Artificial Sequence
  Oligonucleotide for detection of SNP TSC0042020
ttacacctactat

SEQ ID NO: 167941 - DNA, 13 bp, Artificial Sequence
  Oligonucleotide for detection of SNP TSC0042021
atagagtggggta

SEQ ID NO: 167942 - DNA, 13 bp, Artificial Sequence
  Oligonucleotide for detection of SNP TSC0042021
taccccactctat

SEQ ID NO: 167943 - DNA, 13 bp, Artificial Sequence
  Oligonucleotide for detection of SNP TSC0042021
atagagcggggta

SEQ ID NO: 167944 - DNA, 13 bp, Artificial Sequence
  Oligonucleotide for detection of SNP TSC0042021
taccccgctctat

SEQ ID NO: 167945 - DNA, 13 bp, Artificial Sequence
  Oligonucleotide for detection of SNP TSC0042021
tgtttcgttttgt

SEQ ID NO: 167946 - DNA, 13 bp, Artificial Sequence
  Oligonucleotide for detection of SNP TSC0042021
acaaaacgaaaca

SEQ ID NO: 167947 - DNA, 13 bp, Artificial Sequence
  Oligonucleotide for detection of SNP TSC0042022
ttgtatgagtttg

SEQ ID NO: 167948 - DNA, 13 bp, Artificial Sequence
  Oligonucleotide for detection of SNP TSC0042022
caaactcatacaa

SEQ ID NO: 167949 - DNA, 13 bp, Artificial Sequence
  Oligonucleotide for detection of SNP TSC0042023
gtatgggatagty

SEQ ID NO: 167950 - DNA, 13 bp, Artificial Sequence
  Oligonucleotide for detection of SNP TSC0042023
ractatcccatac

SEQ ID NO: 167951 - DNA, 13 bp, Artificial Sequence
  Oligonucleotide for detection of SNP TSC0042023
gtatggaatagty

SEQ ID NO: 167952 - DNA, 13 bp, Artificial Sequence
  Oligonucleotide for detection of SNP TSC0042023
ractattccatac

SEQ ID NO: 167953 - DNA, 13 bp, Artificial Sequence
  Oligonucleotide for detection of SNP TSC0042024
taagatataatat

SEQ ID NO: 167954 - DNA, 13 bp, Artificial Sequence
  Oligonucleotide for detection of SNP TSC0042024
atattatatctta

SEQ ID NO: 167955 - DNA, 13 bp, Artificial Sequence
  Oligonucleotide for detection of SNP TSC0042024
taagatgtaatat

SEQ ID NO: 167956 - DNA, 13 bp, Artificial Sequence
  Oligonucleotide for detection of SNP TSC0042024
atattacatctta

SEQ ID NO: 167957 - DNA, 13 bp, Artificial Sequence
  Oligonucleotide for detection of SNP TSC0042026
ttattatgtatag

SEQ ID NO: 167958 - DNA, 13 bp, Artificial Sequence
  Oligonucleotide for detection of SNP TSC0042026
ctatacataataa

SEQ ID NO: 167959 - DNA, 13 bp, Artificial Sequence
  Oligonucleotide for detection of SNP TSC0042026
ttattacgtatag

SEQ ID NO: 167960 - DNA, 13 bp, Artificial Sequence
  Oligonucleotide for detection of SNP TSC0042026
ctatacgtaataa

SEQ ID NO: 167961 - DNA, 13 bp, Artificial Sequence
  Oligonucleotide for detection of SNP TSC0042026
ttgtgtgtggtgg

SEQ ID NO: 167962 - DNA, 13 bp, Artificial Sequence
  Oligonucleotide for detection of SNP TSC0042026
ccaccacacacaa

SEQ ID NO: 167963 - DNA, 13 bp, Artificial Sequence
  Oligonucleotide for detection of SNP TSC0042026
ttgtgtatggtgg

SEQ ID NO: 167964 - DNA, 13 bp, Artificial Sequence
  Oligonucleotide for detection of SNP TSC0042026
ccaccatacacaa

SEQ ID NO: 167965 - DNA, 13 bp, Artificial Sequence
  Oligonucleotide for detection of SNP TSC0042026
ttgtgcgtggtgg

SEQ ID NO: 167966 - DNA, 13 bp, Artificial Sequence
  Oligonucleotide for detection of SNP TSC0042026
ccaccacgcacaa

SEQ ID NO: 167967 - DNA, 13 bp, Artificial Sequence
  Oligonucleotide for detection of SNP TSC0042027
atgttttttaaty

SEQ ID NO: 167968 - DNA, 13 bp, Artificial Sequence
  Oligonucleotide for detection of SNP TSC0042027
rattaaaaaacat

SEQ ID NO: 167969 - DNA, 13 bp, Artificial Sequence
  Oligonucleotide for detection of SNP TSC0042027
atgtttgttaaty

SEQ ID NO: 167970 - DNA, 13 bp, Artificial Sequence
  Oligonucleotide for detection of SNP TSC0042027
rattaacaaacat

SEQ ID NO: 167971 - DNA, 13 bp, Artificial Sequence
  Oligonucleotide for detection of SNP TSC0042027
gattgagaggtat

SEQ ID NO: 167972 - DNA, 13 bp, Artificial Sequence
  Oligonucleotide for detection of SNP TSC0042027
atacctctcaatc

SEQ ID NO: 167973 - DNA, 13 bp, Artificial Sequence
  Oligonucleotide for detection of SNP TSC0042027
gattgataggtat

SEQ ID NO: 167974 - DNA, 13 bp, Artificial Sequence
  Oligonucleotide for detection of SNP TSC0042027
atacctatcaatc

SEQ ID NO: 167975 - DNA, 13 bp, Artificial Sequence
  Oligonucleotide for detection of SNP TSC0008560
tattggagttgty

SEQ ID NO: 167976 - DNA, 13 bp, Artificial Sequence
  Oligonucleotide for detection of SNP TSC0008560
racaactccaata

SEQ ID NO: 167977 - DNA, 13 bp, Artificial Sequence
  Oligonucleotide for detection of SNP TSC0008560
tattggtgttgty

SEQ ID NO: 167978 - DNA, 13 bp, Artificial Sequence
  Oligonucleotide for detection of SNP TSC0008560
racaacaccaata

SEQ ID NO: 167979 - DNA, 13 bp, Artificial Sequence
  Oligonucleotide for detection of SNP TSC0008560
tattggggttgty

SEQ ID NO: 167980 - DNA, 13 bp, Artificial Sequence
  Oligonucleotide for detection of SNP TSC0008560
racaaccccaata

SEQ ID NO: 167981 - DNA, 13 bp, Artificial Sequence
  Oligonucleotide for detection of SNP TSC0008560
ggtagttttaatg

SEQ ID NO: 167982 - DNA, 13 bp, Artificial Sequence
  Oligonucleotide for detection of SNP TSC0008560
cattaaaactacc

SEQ ID NO: 167983 - DNA, 13 bp, Artificial Sequence
  Oligonucleotide for detection of SNP TSC0008560
ggtagtattaatg

SEQ ID NO: 167984 - DNA, 13 bp, Artificial Sequence
  Oligonucleotide for detection of SNP TSC0008560
cattaatactacc

SEQ ID NO: 167985 - DNA, 13 bp, Artificial Sequence
  Oligonucleotide for detection of SNP TSC0008561
ttgtgaattatgt

SEQ ID NO: 167986 - DNA, 13 bp, Artificial Sequence
  Oligonucleotide for detection of SNP TSC0008561
acataattcacaa

SEQ ID NO: 167987 - DNA, 13 bp, Artificial Sequence
  Oligonucleotide for detection of SNP TSC0008561
ttgtgatttatgt

SEQ ID NO: 167988 - DNA, 13 bp, Artificial Sequence
  Oligonucleotide for detection of SNP TSC0008561
acataaatcacaa

SEQ ID NO: 167989 - DNA, 13 bp, Artificial Sequence
  Oligonucleotide for detection of SNP TSC0008561
ttgtgagttatgt

SEQ ID NO: 167990 - DNA, 13 bp, Artificial Sequence
  Oligonucleotide for detection of SNP TSC0008561
acataactcacaa

SEQ ID NO: 167991 - DNA, 13 bp, Artificial Sequence
  Oligonucleotide for detection of SNP TSC0008561
atatgatttataa

SEQ ID NO: 167992 - DNA, 13 bp, Artificial Sequence
  Oligonucleotide for detection of SNP TSC0008561
ttataaatcatat

SEQ ID NO: 167993 - DNA, 13 bp, Artificial Sequence
  Oligonucleotide for detection of SNP TSC0008561
atatgagttataa

SEQ ID NO: 167994 - DNA, 13 bp, Artificial Sequence
  Oligonucleotide for detection of SNP TSC0008561
ttataactcatat

SEQ ID NO: 167995 - DNA, 13 bp, Artificial Sequence
  Oligonucleotide for detection of SNP TSC0008561
atatgaattataa

SEQ ID NO: 167996 - DNA, 13 bp, Artificial Sequence
  Oligonucleotide for detection of SNP TSC0008561
ttataattcatat

SEQ ID NO: 167997 - DNA, 13 bp, Artificial Sequence
  Oligonucleotide for detection of SNP TSC0005717
taaattggaaaty

SEQ ID NO: 167998 - DNA, 13 bp, Artificial Sequence
  Oligonucleotide for detection of SNP TSC0005717
ratttccaattta

SEQ ID NO: 167999 - DNA, 13 bp, Artificial Sequence
  Oligonucleotide for detection of SNP TSC0005717
taaattagaaaty

SEQ ID NO: 168000 - DNA, 13 bp, Artificial Sequence
  Oligonucleotide for detection of SNP TSC0005717
ratttctaattta

SEQ ID NO: 168001 - DNA, 13 bp, Artificial Sequence
  Oligonucleotide for detection of SNP TSC0042029
tatttgtggtaay

SEQ ID NO: 168002 - DNA, 13 bp, Artificial Sequence
  Oligonucleotide for detection of SNP TSC0042029
rttaccacaaata

SEQ ID NO: 168003 - DNA, 13 bp, Artificial Sequence
  Oligonucleotide for detection of SNP TSC0042029
tatttgcggtaay

SEQ ID NO: 168004 - DNA, 13 bp, Artificial Sequence
  Oligonucleotide for detection of SNP TSC0042029
rttaccgcaaata

SEQ ID NO: 168005 - DNA, 13 bp, Artificial Sequence
  Oligonucleotide for detection of SNP TSC0042029
gttgttgtaaatg

SEQ ID NO: 168006 - DNA, 13 bp, Artificial Sequence
  Oligonucleotide for detection of SNP TSC0042029
catttacaacaac

SEQ ID NO: 168007 - DNA, 13 bp, Artificial Sequence
  Oligonucleotide for detection of SNP TSC0042029
gttgttataaatg

SEQ ID NO: 168008 - DNA, 13 bp, Artificial Sequence
  Oligonucleotide for detection of SNP TSC0042029
catttataacaac

SEQ ID NO: 168009 - DNA, 13 bp, Artificial Sequence
  Oligonucleotide for detection of SNP TSC0042029
gttgtcgtaaatg

SEQ ID NO: 168010 - DNA, 13 bp, Artificial Sequence
  Oligonucleotide for detection of SNP TSC0042029
catttacgacaac

SEQ ID NO: 168011 - DNA, 13 bp, Artificial Sequence
  Oligonucleotide for detection of SNP TSC0042030
ttttgtagagatg

SEQ ID NO: 168012 - DNA, 13 bp, Artificial Sequence
  Oligonucleotide for detection of SNP TSC0042030
catctctacaaaa

SEQ ID NO: 168013 - DNA, 13 bp, Artificial Sequence
  Oligonucleotide for detection of SNP TSC0042030
ttttgttgagatg

SEQ ID NO: 168014 - DNA, 13 bp, Artificial Sequence
  Oligonucleotide for detection of SNP TSC0042030
catctcaacaaaa

SEQ ID NO: 168015 - DNA, 13 bp, Artificial Sequence
  Oligonucleotide for detection of SNP TSC0042030
ttttgtcgagatg

SEQ ID NO: 168016 - DNA, 13 bp, Artificial Sequence
  Oligonucleotide for detection of SNP TSC0042030
catctcgacaaaa

SEQ ID NO: 168017 - DNA, 13 bp, Artificial Sequence
  Oligonucleotide for detection of SNP TSC0042030
tatttttgtaaaa

SEQ ID NO: 168018 - DNA, 13 bp, Artificial Sequence
  Oligonucleotide for detection of SNP TSC0042030
ttttacaaaaata

SEQ ID NO: 168019 - DNA, 13 bp, Artificial Sequence
  Oligonucleotide for detection of SNP TSC0042030
tattttggtaaaa

SEQ ID NO: 168020 - DNA, 13 bp, Artificial Sequence
  Oligonucleotide for detection of SNP TSC0042030
ttttaccaaaata

SEQ ID NO: 168021 - DNA, 13 bp, Artificial Sequence
  Oligonucleotide for detection of SNP TSC0042030
tatttcggtaaaa

SEQ ID NO: 168022 - DNA, 13 bp, Artificial Sequence
  Oligonucleotide for detection of SNP TSC0042030
ttttaccgaaata

SEQ ID NO: 168023 - DNA, 13 bp, Artificial Sequence
  Oligonucleotide for detection of SNP TSC0042031
tttatagtaatgg

SEQ ID NO: 168024 - DNA, 13 bp, Artificial Sequence
  Oligonucleotide for detection of SNP TSC0042031
ccattactataaa

SEQ ID NO: 168025 - DNA, 13 bp, Artificial Sequence
  Oligonucleotide for detection of SNP TSC0042031
tttataataatgg

SEQ ID NO: 168026 - DNA, 13 bp, Artificial Sequence
  Oligonucleotide for detection of SNP TSC0042031
ccattattataaa

SEQ ID NO: 168027 - DNA, 13 bp, Artificial Sequence
  Oligonucleotide for detection of SNP TSC0042032
gtaaaggagaggt

SEQ ID NO: 168028 - DNA, 13 bp, Artificial Sequence
  Oligonucleotide for detection of SNP TSC0042032
acctctcctttac

SEQ ID NO: 168029 - DNA, 13 bp, Artificial Sequence
  Oligonucleotide for detection of SNP TSC0042032
gtaaagtagaggt

SEQ ID NO: 168030 - DNA, 13 bp, Artificial Sequence
  Oligonucleotide for detection of SNP TSC0042032
acctctactttac

SEQ ID NO: 168031 - DNA, 13 bp, Artificial Sequence
  Oligonucleotide for detection of SNP TSC0042034
taattttggatgg

SEQ ID NO: 168032 - DNA, 13 bp, Artificial Sequence
  Oligonucleotide for detection of SNP TSC0042034
ccatccaaaatta

SEQ ID NO: 168033 - DNA, 13 bp, Artificial Sequence
  Oligonucleotide for detection of SNP TSC0042034
taatttcggatgg

SEQ ID NO: 168034 - DNA, 13 bp, Artificial Sequence
  Oligonucleotide for detection of SNP TSC0042034
ccatccgaaatta

SEQ ID NO: 168035 - DNA, 13 bp, Artificial Sequence
  Oligonucleotide for detection of SNP TSC0042034
ttatttgggattg

SEQ ID NO: 168036 - DNA, 13 bp, Artificial Sequence
  Oligonucleotide for detection of SNP TSC0042034
caatcccaaataa

SEQ ID NO: 168037 - DNA, 13 bp, Artificial Sequence
  Oligonucleotide for detection of SNP TSC0042034
ttatttaggattg

SEQ ID NO: 168038 - DNA, 13 bp, Artificial Sequence
  Oligonucleotide for detection of SNP TSC0042034
caatcctaaataa

SEQ ID NO: 168039 - DNA, 13 bp, Artificial Sequence
  Oligonucleotide for detection of SNP TSC0042034
ttattcgggattg

SEQ ID NO: 168040 - DNA, 13 bp, Artificial Sequence
  Oligonucleotide for detection of SNP TSC0042034
caatcccgaataa

SEQ ID NO: 168041 - DNA, 13 bp, Artificial Sequence
  Oligonucleotide for detection of SNP TSC0042035
tatttatatattt

SEQ ID NO: 168042 - DNA, 13 bp, Artificial Sequence
  Oligonucleotide for detection of SNP TSC0042035
aaatatataaata

SEQ ID NO: 168043 - DNA, 13 bp, Artificial Sequence
  Oligonucleotide for detection of SNP TSC0042035
agatatataaatg

SEQ ID NO: 168044 - DNA, 13 bp, Artificial Sequence
  Oligonucleotide for detection of SNP TSC0042035
catttatatatct

SEQ ID NO: 168045 - DNA, 13 bp, Artificial Sequence
  Oligonucleotide for detection of SNP TSC0042036
agtttatgtggat

SEQ ID NO: 168046 - DNA, 13 bp, Artificial Sequence
  Oligonucleotide for detection of SNP TSC0042036
atccacataaact

SEQ ID NO: 168047 - DNA, 13 bp, Artificial Sequence
  Oligonucleotide for detection of SNP TSC0042036
agtttacgtggat

SEQ ID NO: 168048 - DNA, 13 bp, Artificial Sequence
  Oligonucleotide for detection of SNP TSC0042036
atccacgtaaact

SEQ ID NO: 168049 - DNA, 13 bp, Artificial Sequence
  Oligonucleotide for detection of SNP TSC0042036
atttatgtagatt

SEQ ID NO: 168050 - DNA, 13 bp, Artificial Sequence
  Oligonucleotide for detection of SNP TSC0042036
aatctacataaat

SEQ ID NO: 168051 - DNA, 13 bp, Artificial Sequence
  Oligonucleotide for detection of SNP TSC0042036
atttatatagatt

SEQ ID NO: 168052 - DNA, 13 bp, Artificial Sequence
  Oligonucleotide for detection of SNP TSC0042036
aatctatataaat

SEQ ID NO: 168053 - DNA, 13 bp, Artificial Sequence
  Oligonucleotide for detection of SNP TSC0042036
atttacgtagatt

SEQ ID NO: 168054 - DNA, 13 bp, Artificial Sequence
  Oligonucleotide for detection of SNP TSC0042036
aatctacgtaaat

SEQ ID NO: 168055 - DNA, 13 bp, Artificial Sequence
  Oligonucleotide for detection of SNP TSC0042037
atgtgtgtggaga

SEQ ID NO: 168056 - DNA, 13 bp, Artificial Sequence
  Oligonucleotide for detection of SNP TSC0042037
tctccacacacat

SEQ ID NO: 168057 - DNA, 13 bp, Artificial Sequence
  Oligonucleotide for detection of SNP TSC0042037
atgtgtatggaga

SEQ ID NO: 168058 - DNA, 13 bp, Artificial Sequence
  Oligonucleotide for detection of SNP TSC0042037
tctccatacacat

SEQ ID NO: 168059 - DNA, 13 bp, Artificial Sequence
  Oligonucleotide for detection of SNP TSC0042040
gtttatacggaaa

SEQ ID NO: 168060 - DNA, 13 bp, Artificial Sequence
  Oligonucleotide for detection of SNP TSC0042040
tttccgtataaac

SEQ ID NO: 168061 - DNA, 13 bp, Artificial Sequence
  Oligonucleotide for detection of SNP TSC0042040
gtttatgcggaaa

SEQ ID NO: 168062 - DNA, 13 bp, Artificial Sequence
  Oligonucleotide for detection of SNP TSC0042040
tttccgcataaac

SEQ ID NO: 168063 - DNA, 13 bp, Artificial Sequence
  Oligonucleotide for detection of SNP TSC0042040
gtttacgcggaaa

SEQ ID NO: 168064 - DNA, 13 bp, Artificial Sequence
  Oligonucleotide for detection of SNP TSC0042040
tttccgcgtaaac

SEQ ID NO: 168065 - DNA, 13 bp, Artificial Sequence
  Oligonucleotide for detection of SNP TSC0042040
tttttgtgtggay

SEQ ID NO: 168066 - DNA, 13 bp, Artificial Sequence
  Oligonucleotide for detection of SNP TSC0042040
rtccacacaaaaa

SEQ ID NO: 168067 - DNA, 13 bp, Artificial Sequence
  Oligonucleotide for detection of SNP TSC0042040
ttttcgtgtggay

SEQ ID NO: 168068 - DNA, 13 bp, Artificial Sequence
  Oligonucleotide for detection of SNP TSC0042040
rtccacacgaaaa

SEQ ID NO: 168069 - DNA, 13 bp, Artificial Sequence
  Oligonucleotide for detection of SNP TSC0042040
tttttgcgtggay

SEQ ID NO: 168070 - DNA, 13 bp, Artificial Sequence
  Oligonucleotide for detection of SNP TSC0042040
rtccacgcaaaaa

SEQ ID NO: 168071 - DNA, 13 bp, Artificial Sequence
  Oligonucleotide for detection of SNP TSC0042040
ttttcgcgtggay

SEQ ID NO: 168072 - DNA, 13 bp, Artificial Sequence
  Oligonucleotide for detection of SNP TSC0042040
rtccacgcgaaaa

SEQ ID NO: 168073 - DNA, 13 bp, Artificial Sequence
  Oligonucleotide for detection of SNP TSC0042041
atatatgtagttt

SEQ ID NO: 168074 - DNA, 13 bp, Artificial Sequence
  Oligonucleotide for detection of SNP TSC0042041
aaactacatatat

SEQ ID NO: 168075 - DNA, 13 bp, Artificial Sequence
  Oligonucleotide for detection of SNP TSC0042041
atatatatagttt

SEQ ID NO: 168076 - DNA, 13 bp, Artificial Sequence
  Oligonucleotide for detection of SNP TSC0042041
aaactatatatat

SEQ ID NO: 168077 - DNA, 13 bp, Artificial Sequence
  Oligonucleotide for detection of SNP TSC0042042
tttgttatatttt

SEQ ID NO: 168078 - DNA, 13 bp, Artificial Sequence
  Oligonucleotide for detection of SNP TSC0042042
aaaatataacaaa

SEQ ID NO: 168079 - DNA, 13 bp, Artificial Sequence
  Oligonucleotide for detection of SNP TSC0042042
aagatatgataga

SEQ ID NO: 168080 - DNA, 13 bp, Artificial Sequence
  Oligonucleotide for detection of SNP TSC0042042
tctatcatatctt

SEQ ID NO: 168081 - DNA, 13 bp, Artificial Sequence
  Oligonucleotide for detection of SNP TSC0042042
aagatacgataga

SEQ ID NO: 168082 - DNA, 13 bp, Artificial Sequence
  Oligonucleotide for detection of SNP TSC0042042
tctatcgtatctt

SEQ ID NO: 168083 - DNA, 13 bp, Artificial Sequence
  Oligonucleotide for detection of SNP TSC0042043
tttttatggttaa

SEQ ID NO: 168084 - DNA, 13 bp, Artificial Sequence
  Oligonucleotide for detection of SNP TSC0042043
ttaaccataaaaa

SEQ ID NO: 168085 - DNA, 13 bp, Artificial Sequence
  Oligonucleotide for detection of SNP TSC0042043
tttttacggttaa

SEQ ID NO: 168086 - DNA, 13 bp, Artificial Sequence
  Oligonucleotide for detection of SNP TSC0042043
ttaaccgtaaaaa

SEQ ID NO: 168087 - DNA, 13 bp, Artificial Sequence
  Oligonucleotide for detection of SNP TSC0042043
ttaattgtaaaaa

SEQ ID NO: 168088 - DNA, 13 bp, Artificial Sequence
  Oligonucleotide for detection of SNP TSC0042043
tttttacaattaa

SEQ ID NO: 168089 - DNA, 13 bp, Artificial Sequence
  Oligonucleotide for detection of SNP TSC0042043
ttaattataaaaa

SEQ ID NO: 168090 - DNA, 13 bp, Artificial Sequence
  Oligonucleotide for detection of SNP TSC0042043
tttttataattaa

SEQ ID NO: 168091 - DNA, 13 bp, Artificial Sequence
  Oligonucleotide for detection of SNP TSC0042043
ttaatcgtaaaaa

SEQ ID NO: 168092 - DNA, 13 bp, Artificial Sequence
  Oligonucleotide for detection of SNP TSC0042043
tttttacgattaa

SEQ ID NO: 168093 - DNA, 13 bp, Artificial Sequence
  Oligonucleotide for detection of SNP TSC0042044
attttttgagatt

SEQ ID NO: 168094 - DNA, 13 bp, Artificial Sequence
  Oligonucleotide for detection of SNP TSC0042044
aatctcaaaaaat

SEQ ID NO: 168095 - DNA, 13 bp, Artificial Sequence
  Oligonucleotide for detection of SNP TSC0042044
atttttggagatt

SEQ ID NO: 168096 - DNA, 13 bp, Artificial Sequence
  Oligonucleotide for detection of SNP TSC0042044
aatctccaaaaat

SEQ ID NO: 168097 - DNA, 13 bp, Artificial Sequence
  Oligonucleotide for detection of SNP TSC0042044
attttcggagatt

SEQ ID NO: 168098 - DNA, 13 bp, Artificial Sequence
  Oligonucleotide for detection of SNP TSC0042044
aatctccgaaaat

SEQ ID NO: 168099 - DNA, 13 bp, Artificial Sequence
  Oligonucleotide for detection of SNP TSC0042044
agttttagagagt

SEQ ID NO: 168100 - DNA, 13 bp, Artificial Sequence
  Oligonucleotide for detection of SNP TSC0042044
actctctaaaact

SEQ ID NO: 168101 - DNA, 13 bp, Artificial Sequence
  Oligonucleotide for detection of SNP TSC0042044
agtttttgagagt

SEQ ID NO: 168102 - DNA, 13 bp, Artificial Sequence
  Oligonucleotide for detection of SNP TSC0042044
actctcaaaaact

SEQ ID NO: 168103 - DNA, 13 bp, Artificial Sequence
  Oligonucleotide for detection of SNP TSC0042044
agttttcgagagt

SEQ ID NO: 168104 - DNA, 13 bp, Artificial Sequence
  Oligonucleotide for detection of SNP TSC0042044
actctcgaaaact

SEQ ID NO: 168105 - DNA, 13 bp, Artificial Sequence
  Oligonucleotide for detection of SNP TSC0007750
agtttttatttta

SEQ ID NO: 168106 - DNA, 13 bp, Artificial Sequence
  Oligonucleotide for detection of SNP TSC0007750
taaaataaaaact

SEQ ID NO: 168107 - DNA, 13 bp, Artificial Sequence
  Oligonucleotide for detection of SNP TSC0007750
agttttgatttta

SEQ ID NO: 168108 - DNA, 13 bp, Artificial Sequence
  Oligonucleotide for detection of SNP TSC0007750
taaaatcaaaact

SEQ ID NO: 168109 - DNA, 13 bp, Artificial Sequence
  Oligonucleotide for detection of SNP TSC0007750
tgaggtgaggatt

SEQ ID NO: 168110 - DNA, 13 bp, Artificial Sequence
  Oligonucleotide for detection of SNP TSC0007750
aatcctcacctca

SEQ ID NO: 168111 - DNA, 13 bp, Artificial Sequence
  Oligonucleotide for detection of SNP TSC0007750
tgaggttaggatt

SEQ ID NO: 168112 - DNA, 13 bp, Artificial Sequence
  Oligonucleotide for detection of SNP TSC0007750
aatcctaacctca

SEQ ID NO: 168113 - DNA, 13 bp, Artificial Sequence
  Oligonucleotide for detection of SNP TSC0042045
gggttggtggtgy

SEQ ID NO: 168114 - DNA, 13 bp, Artificial Sequence
  Oligonucleotide for detection of SNP TSC0042045
rcaccaccaaccc

SEQ ID NO: 168115 - DNA, 13 bp, Artificial Sequence
  Oligonucleotide for detection of SNP TSC0042045
gggttgatggtgy

SEQ ID NO: 168116 - DNA, 13 bp, Artificial Sequence
  Oligonucleotide for detection of SNP TSC0042045
rcaccatcaaccc

SEQ ID NO: 168117 - DNA, 13 bp, Artificial Sequence
  Oligonucleotide for detection of SNP TSC0042049
ttttatggttttt

SEQ ID NO: 168118 - DNA, 13 bp, Artificial Sequence
  Oligonucleotide for detection of SNP TSC0042049
aaaaaccataaaa

SEQ ID NO: 168119 - DNA, 13 bp, Artificial Sequence
  Oligonucleotide for detection of SNP TSC0042049
ttttacggttttt

SEQ ID NO: 168120 - DNA, 13 bp, Artificial Sequence
  Oligonucleotide for detection of SNP TSC0042049
aaaaaccgtaaaa

SEQ ID NO: 168121 - DNA, 13 bp, Artificial Sequence
  Oligonucleotide for detection of SNP TSC0042049
aaaggttgtagga

SEQ ID NO: 168122 - DNA, 13 bp, Artificial Sequence
  Oligonucleotide for detection of SNP TSC0042049
tcctacaaccttt

SEQ ID NO: 168123 - DNA, 13 bp, Artificial Sequence
  Oligonucleotide for detection of SNP TSC0042049
aaaggtcgtagga

SEQ ID NO: 168124 - DNA, 13 bp, Artificial Sequence
  Oligonucleotide for detection of SNP TSC0042049
tcctacgaccttt

SEQ ID NO: 168125 - DNA, 13 bp, Artificial Sequence
  Oligonucleotide for detection of SNP TSC0042052
tataattaatgay

SEQ ID NO: 168126 - DNA, 13 bp, Artificial Sequence
  Oligonucleotide for detection of SNP TSC0042052
rtcattaattata

SEQ ID NO: 168127 - DNA, 13 bp, Artificial Sequence
  Oligonucleotide for detection of SNP TSC0042052
tataatgaatgay

SEQ ID NO: 168128 - DNA, 13 bp, Artificial Sequence
  Oligonucleotide for detection of SNP TSC0042052
rtcattcattata

SEQ ID NO: 168129 - DNA, 13 bp, Artificial Sequence
  Oligonucleotide for detection of SNP TSC0042052
tataacgaatgay

SEQ ID NO: 168130 - DNA, 13 bp, Artificial Sequence
  Oligonucleotide for detection of SNP TSC0042052
rtcattcgttata

SEQ ID NO: 168131 - DNA, 13 bp, Artificial Sequence
  Oligonucleotide for detection of SNP TSC0042052
gttatttgttgta

SEQ ID NO: 168132 - DNA, 13 bp, Artificial Sequence
  Oligonucleotide for detection of SNP TSC0042052
tacaacaaataac

SEQ ID NO: 168133 - DNA, 13 bp, Artificial Sequence
  Oligonucleotide for detection of SNP TSC0042052
gttattcgttgta

SEQ ID NO: 168134 - DNA, 13 bp, Artificial Sequence
  Oligonucleotide for detection of SNP TSC0042052
tacaacgaataac

SEQ ID NO: 168135 - DNA, 13 bp, Artificial Sequence
  Oligonucleotide for detection of SNP TSC0042053
atgattataagtt

SEQ ID NO: 168136 - DNA, 13 bp, Artificial Sequence
  Oligonucleotide for detection of SNP TSC0042053
aacttataatcat

SEQ ID NO: 168137 - DNA, 13 bp, Artificial Sequence
  Oligonucleotide for detection of SNP TSC0042053
atgattgtaagtt

SEQ ID NO: 168138 - DNA, 13 bp, Artificial Sequence
  Oligonucleotide for detection of SNP TSC0042053
aacttacaatcat

SEQ ID NO: 168139 - DNA, 13 bp, Artificial Sequence
  Oligonucleotide for detection of SNP TSC0042054
tgaatagtttggg

SEQ ID NO: 168140 - DNA, 13 bp, Artificial Sequence
  Oligonucleotide for detection of SNP TSC0042054
cccaaactattca

SEQ ID NO: 168141 - DNA, 13 bp, Artificial Sequence
  Oligonucleotide for detection of SNP TSC0042054
tgaataatttggg

SEQ ID NO: 168142 - DNA, 13 bp, Artificial Sequence
  Oligonucleotide for detection of SNP TSC0042054
cccaaattattca

SEQ ID NO: 168143 - DNA, 13 bp, Artificial Sequence
  Oligonucleotide for detection of SNP TSC0042058
aggttaatagtgg

SEQ ID NO: 168144 - DNA, 13 bp, Artificial Sequence
  Oligonucleotide for detection of SNP TSC0042058
ccactattaacct

SEQ ID NO: 168145 - DNA, 13 bp, Artificial Sequence
  Oligonucleotide for detection of SNP TSC0042058
aggttattagtgg

SEQ ID NO: 168146 - DNA, 13 bp, Artificial Sequence
  Oligonucleotide for detection of SNP TSC0042058
ccactaataacct

SEQ ID NO: 168147 - DNA, 13 bp, Artificial Sequence
  Oligonucleotide for detection of SNP TSC0042058
aggttaatagcgg

SEQ ID NO: 168148 - DNA, 13 bp, Artificial Sequence
  Oligonucleotide for detection of SNP TSC0042058
ccgctattaacct

SEQ ID NO: 168149 - DNA, 13 bp, Artificial Sequence
  Oligonucleotide for detection of SNP TSC0042058
aggttattagcgg

SEQ ID NO: 168150 - DNA, 13 bp, Artificial Sequence
  Oligonucleotide for detection of SNP TSC0042058
ccgctaataacct

SEQ ID NO: 168151 - DNA, 13 bp, Artificial Sequence
  Oligonucleotide for detection of SNP TSC0042058
ttgttattagttt

SEQ ID NO: 168152 - DNA, 13 bp, Artificial Sequence
  Oligonucleotide for detection of SNP TSC0042058
aaactaataacaa

SEQ ID NO: 168153 - DNA, 13 bp, Artificial Sequence
  Oligonucleotide for detection of SNP TSC0042058
ttgttaatagttt

SEQ ID NO: 168154 - DNA, 13 bp, Artificial Sequence
  Oligonucleotide for detection of SNP TSC0042058
aaactattaacaa

SEQ ID NO: 168155 - DNA, 13 bp, Artificial Sequence
  Oligonucleotide for detection of SNP TSC0042058
tcgttattagttt

SEQ ID NO: 168156 - DNA, 13 bp, Artificial Sequence
  Oligonucleotide for detection of SNP TSC0042058
aaactaataacga

SEQ ID NO: 168157 - DNA, 13 bp, Artificial Sequence
  Oligonucleotide for detection of SNP TSC0042058
tcgttaatagttt

SEQ ID NO: 168158 - DNA, 13 bp, Artificial Sequence
  Oligonucleotide for detection of SNP TSC0042058
aaactattaacga

SEQ ID NO: 168159 - DNA, 13 bp, Artificial Sequence
  Oligonucleotide for detection of SNP TSC0042060
aagtgtagtttty

SEQ ID NO: 168160 - DNA, 13 bp, Artificial Sequence
  Oligonucleotide for detection of SNP TSC0042060
raaaactacactt

SEQ ID NO: 168161 - DNA, 13 bp, Artificial Sequence
  Oligonucleotide for detection of SNP TSC0042060
aagtgtggtttty

SEQ ID NO: 168162 - DNA, 13 bp, Artificial Sequence
  Oligonucleotide for detection of SNP TSC0042060
raaaaccacactt

SEQ ID NO: 168163 - DNA, 13 bp, Artificial Sequence
  Oligonucleotide for detection of SNP TSC0042060
aagtgcggtttty

SEQ ID NO: 168164 - DNA, 13 bp, Artificial Sequence
  Oligonucleotide for detection of SNP TSC0042060
raaaaccgcactt

SEQ ID NO: 168165 - DNA, 13 bp, Artificial Sequence
  Oligonucleotide for detection of SNP TSC0042060
gaagattgtattt

SEQ ID NO: 168166 - DNA, 13 bp, Artificial Sequence
  Oligonucleotide for detection of SNP TSC0042060
aaatacaatcttc

SEQ ID NO: 168167 - DNA, 13 bp, Artificial Sequence
  Oligonucleotide for detection of SNP TSC0042060
gaagatcgtattt

SEQ ID NO: 168168 - DNA, 13 bp, Artificial Sequence
  Oligonucleotide for detection of SNP TSC0042060
aaatacgatcttc

SEQ ID NO: 168169 - DNA, 13 bp, Artificial Sequence
  Oligonucleotide for detection of SNP TSC0042061
atgagaatgagta

SEQ ID NO: 168170 - DNA, 13 bp, Artificial Sequence
  Oligonucleotide for detection of SNP TSC0042061
tactcattctcat

SEQ ID NO: 168171 - DNA, 13 bp, Artificial Sequence
  Oligonucleotide for detection of SNP TSC0042061
atgagattgagta

SEQ ID NO: 168172 - DNA, 13 bp, Artificial Sequence
  Oligonucleotide for detection of SNP TSC0042061
tactcaatctcat

SEQ ID NO: 168173 - DNA, 13 bp, Artificial Sequence
  Oligonucleotide for detection of SNP TSC0042062
gggtttagtttta

SEQ ID NO: 168174 - DNA, 13 bp, Artificial Sequence
  Oligonucleotide for detection of SNP TSC0042062
taaaactaaaccc

SEQ ID NO: 168175 - DNA, 13 bp, Artificial Sequence
  Oligonucleotide for detection of SNP TSC0042062
gggttttgtttta

SEQ ID NO: 168176 - DNA, 13 bp, Artificial Sequence
  Oligonucleotide for detection of SNP TSC0042062
taaaacaaaaccc

SEQ ID NO: 168177 - DNA, 13 bp, Artificial Sequence
  Oligonucleotide for detection of SNP TSC0042062
tggaattggatty

SEQ ID NO: 168178 - DNA, 13 bp, Artificial Sequence
  Oligonucleotide for detection of SNP TSC0042062
raatccaattcca

SEQ ID NO: 168179 - DNA, 13 bp, Artificial Sequence
  Oligonucleotide for detection of SNP TSC0042062
tggaataggatty

SEQ ID NO: 168180 - DNA, 13 bp, Artificial Sequence
  Oligonucleotide for detection of SNP TSC0042062
raatcctattcca

SEQ ID NO: 168181 - DNA, 13 bp, Artificial Sequence
  Oligonucleotide for detection of SNP TSC0042068
ggaaaaagtttag

SEQ ID NO: 168182 - DNA, 13 bp, Artificial Sequence
  Oligonucleotide for detection of SNP TSC0042068
ctaaactttttcc

SEQ ID NO: 168183 - DNA, 13 bp, Artificial Sequence
  Oligonucleotide for detection of SNP TSC0042068
ggaaaaggtttag

SEQ ID NO: 168184 - DNA, 13 bp, Artificial Sequence
  Oligonucleotide for detection of SNP TSC0042068
ctaaaccttttcc

SEQ ID NO: 168185 - DNA, 13 bp, Artificial Sequence
  Oligonucleotide for detection of SNP TSC0042071
gttgttgaagtgy

SEQ ID NO: 168186 - DNA, 13 bp, Artificial Sequence
  Oligonucleotide for detection of SNP TSC0042071
rcacttcaacaac

SEQ ID NO: 168187 - DNA, 13 bp, Artificial Sequence
  Oligonucleotide for detection of SNP TSC0042071
gttgttaaagtgy

SEQ ID NO: 168188 - DNA, 13 bp, Artificial Sequence
  Oligonucleotide for detection of SNP TSC0042071
rcactttaacaac

SEQ ID NO: 168189 - DNA, 13 bp, Artificial Sequence
  Oligonucleotide for detection of SNP TSC0042071
gtcgttgaagtgy

SEQ ID NO: 168190 - DNA, 13 bp, Artificial Sequence
  Oligonucleotide for detection of SNP TSC0042071
rcacttcaacgac

SEQ ID NO: 168191 - DNA, 13 bp, Artificial Sequence
  Oligonucleotide for detection of SNP TSC0042071
gtcgttaaagtgy

SEQ ID NO: 168192 - DNA, 13 bp, Artificial Sequence
  Oligonucleotide for detection of SNP TSC0042071
rcactttaacgac

SEQ ID NO: 168193 - DNA, 13 bp, Artificial Sequence
  Oligonucleotide for detection of SNP TSC0042072
tatgtaaatagtt

SEQ ID NO: 168194 - DNA, 13 bp, Artificial Sequence
  Oligonucleotide for detection of SNP TSC0042072
aactatttacata

SEQ ID NO: 168195 - DNA, 13 bp, Artificial Sequence
  Oligonucleotide for detection of SNP TSC0042072
tatgtatatagtt

SEQ ID NO: 168196 - DNA, 13 bp, Artificial Sequence
  Oligonucleotide for detection of SNP TSC0042072
aactatatacata

SEQ ID NO: 168197 - DNA, 13 bp, Artificial Sequence
  Oligonucleotide for detection of SNP TSC0042072
aattatttatata

SEQ ID NO: 168198 - DNA, 13 bp, Artificial Sequence
  Oligonucleotide for detection of SNP TSC0042072
tatataaataatt

SEQ ID NO: 168199 - DNA, 13 bp, Artificial Sequence
  Oligonucleotide for detection of SNP TSC0042073
tttttttttggay

SEQ ID NO: 168200 - DNA, 13 bp, Artificial Sequence
  Oligonucleotide for detection of SNP TSC0042073
rtccaaaaaaaaa

SEQ ID NO: 168201 - DNA, 13 bp, Artificial Sequence
  Oligonucleotide for detection of SNP TSC0042073
ttttttgttggay

SEQ ID NO: 168202 - DNA, 13 bp, Artificial Sequence
  Oligonucleotide for detection of SNP TSC0042073
rtccaacaaaaaa

SEQ ID NO: 168203 - DNA, 13 bp, Artificial Sequence
  Oligonucleotide for detection of SNP TSC0042073
gtttaagaggaag

SEQ ID NO: 168204 - DNA, 13 bp, Artificial Sequence
  Oligonucleotide for detection of SNP TSC0042073
cttcctcttaaac

SEQ ID NO: 168205 - DNA, 13 bp, Artificial Sequence
  Oligonucleotide for detection of SNP TSC0042073
gtttaataggaag

SEQ ID NO: 168206 - DNA, 13 bp, Artificial Sequence
  Oligonucleotide for detection of SNP TSC0042073
cttcctattaaac

SEQ ID NO: 168207 - DNA, 13 bp, Artificial Sequence
  Oligonucleotide for detection of SNP TSC0042074
gggatgtgggggy

SEQ ID NO: 168208 - DNA, 13 bp, Artificial Sequence
  Oligonucleotide for detection of SNP TSC0042074
rcccccacatccc

SEQ ID NO: 168209 - DNA, 13 bp, Artificial Sequence
  Oligonucleotide for detection of SNP TSC0042074
gggatgggggggy

SEQ ID NO: 168210 - DNA, 13 bp, Artificial Sequence
  Oligonucleotide for detection of SNP TSC0042074
rcccccccatccc

SEQ ID NO: 168211 - DNA, 13 bp, Artificial Sequence
  Oligonucleotide for detection of SNP TSC0042074
gggatgcgggggy

SEQ ID NO: 168212 - DNA, 13 bp, Artificial Sequence
  Oligonucleotide for detection of SNP TSC0042074
rcccccgcatccc

SEQ ID NO: 168213 - DNA, 13 bp, Artificial Sequence
  Oligonucleotide for detection of SNP TSC0042074
gtttttgtattty

SEQ ID NO: 168214 - DNA, 13 bp, Artificial Sequence
  Oligonucleotide for detection of SNP TSC0042074
raaatacaaaaac

SEQ ID NO: 168215 - DNA, 13 bp, Artificial Sequence
  Oligonucleotide for detection of SNP TSC0042074
gtttttttattty

SEQ ID NO: 168216 - DNA, 13 bp, Artificial Sequence
  Oligonucleotide for detection of SNP TSC0042074
raaataaaaaaac

SEQ ID NO: 168217 - DNA, 13 bp, Artificial Sequence
  Oligonucleotide for detection of SNP TSC0042074
gttttcgtattty

SEQ ID NO: 168218 - DNA, 13 bp, Artificial Sequence
  Oligonucleotide for detection of SNP TSC0042074
raaatacgaaaac

SEQ ID NO: 168219 - DNA, 13 bp, Artificial Sequence
  Oligonucleotide for detection of SNP TSC0042075
tgtattaaataat

SEQ ID NO: 168220 - DNA, 13 bp, Artificial Sequence
  Oligonucleotide for detection of SNP TSC0042075
attatttaataca

SEQ ID NO: 168221 - DNA, 13 bp, Artificial Sequence
  Oligonucleotide for detection of SNP TSC0042075
tgtattgaataat

SEQ ID NO: 168222 - DNA, 13 bp, Artificial Sequence
  Oligonucleotide for detection of SNP TSC0042075
attattcaataca

SEQ ID NO: 168223 - DNA, 13 bp, Artificial Sequence
  Oligonucleotide for detection of SNP TSC0042076
atggtggaaggta

SEQ ID NO: 168224 - DNA, 13 bp, Artificial Sequence
  Oligonucleotide for detection of SNP TSC0042076
taccttccaccat

SEQ ID NO: 168225 - DNA, 13 bp, Artificial Sequence
  Oligonucleotide for detection of SNP TSC0042076
atggtgaaaggta

SEQ ID NO: 168226 - DNA, 13 bp, Artificial Sequence
  Oligonucleotide for detection of SNP TSC0042076
tacctttcaccat

SEQ ID NO: 168227 - DNA, 13 bp, Artificial Sequence
  Oligonucleotide for detection of SNP TSC0042076
acggtggaaggta

SEQ ID NO: 168228 - DNA, 13 bp, Artificial Sequence
  Oligonucleotide for detection of SNP TSC0042076
taccttccaccgt

SEQ ID NO: 168229 - DNA, 13 bp, Artificial Sequence
  Oligonucleotide for detection of SNP TSC0042076
acggtgaaaggta

SEQ ID NO: 168230 - DNA, 13 bp, Artificial Sequence
  Oligonucleotide for detection of SNP TSC0042076
tacctttcaccgt

SEQ ID NO: 168231 - DNA, 13 bp, Artificial Sequence
  Oligonucleotide for detection of SNP TSC0042081
gtaaggtgaggtt

SEQ ID NO: 168232 - DNA, 13 bp, Artificial Sequence
  Oligonucleotide for detection of SNP TSC0042081
aacctcaccttac

SEQ ID NO: 168233 - DNA, 13 bp, Artificial Sequence
  Oligonucleotide for detection of SNP TSC0042081
gtaaggcgaggtt

SEQ ID NO: 168234 - DNA, 13 bp, Artificial Sequence
  Oligonucleotide for detection of SNP TSC0042081
aacctcgccttac

SEQ ID NO: 168235 - DNA, 13 bp, Artificial Sequence
  Oligonucleotide for detection of SNP TSC0042081
agtttcgttttgy

SEQ ID NO: 168236 - DNA, 13 bp, Artificial Sequence
  Oligonucleotide for detection of SNP TSC0042081
rcaaaacgaaact

SEQ ID NO: 168237 - DNA, 13 bp, Artificial Sequence
  Oligonucleotide for detection of SNP TSC0042082
ggaaaaaaaaaay

SEQ ID NO: 168238 - DNA, 13 bp, Artificial Sequence
  Oligonucleotide for detection of SNP TSC0042082
rttttttttttcc

SEQ ID NO: 168239 - DNA, 13 bp, Artificial Sequence
  Oligonucleotide for detection of SNP TSC0042082
ggaaaataaaaay

SEQ ID NO: 168240 - DNA, 13 bp, Artificial Sequence
  Oligonucleotide for detection of SNP TSC0042082
rtttttattttcc

SEQ ID NO: 168241 - DNA, 13 bp, Artificial Sequence
  Oligonucleotide for detection of SNP TSC0042083
atattttaatttt

SEQ ID NO: 168242 - DNA, 13 bp, Artificial Sequence
  Oligonucleotide for detection of SNP TSC0042083
aaaattaaaatat

SEQ ID NO: 168243 - DNA, 13 bp, Artificial Sequence
  Oligonucleotide for detection of SNP TSC0042083
atatttgaatttt

SEQ ID NO: 168244 - DNA, 13 bp, Artificial Sequence
  Oligonucleotide for detection of SNP TSC0042083
aaaattcaaatat

SEQ ID NO: 168245 - DNA, 13 bp, Artificial Sequence
  Oligonucleotide for detection of SNP TSC0042083
aaaattgaaatgt

SEQ ID NO: 168246 - DNA, 13 bp, Artificial Sequence
  Oligonucleotide for detection of SNP TSC0042083
acatttcaatttt

SEQ ID NO: 168247 - DNA, 13 bp, Artificial Sequence
  Oligonucleotide for detection of SNP TSC0042083
aaaatttaaatgt

SEQ ID NO: 168248 - DNA, 13 bp, Artificial Sequence
  Oligonucleotide for detection of SNP TSC0042083
acatttaaatttt

SEQ ID NO: 168249 - DNA, 13 bp, Artificial Sequence
  Oligonucleotide for detection of SNP TSC0042084
tttaaattttgay

SEQ ID NO: 168250 - DNA, 13 bp, Artificial Sequence
  Oligonucleotide for detection of SNP TSC0042084
rtcaaaatttaaa

SEQ ID NO: 168251 - DNA, 13 bp, Artificial Sequence
  Oligonucleotide for detection of SNP TSC0042084
tttaaagtttgay

SEQ ID NO: 168252 - DNA, 13 bp, Artificial Sequence
  Oligonucleotide for detection of SNP TSC0042084
rtcaaactttaaa

SEQ ID NO: 168253 - DNA, 13 bp, Artificial Sequence
  Oligonucleotide for detection of SNP TSC0042084
gttaaaatttaaa

SEQ ID NO: 168254 - DNA, 13 bp, Artificial Sequence
  Oligonucleotide for detection of SNP TSC0042084
tttaaattttaac

SEQ ID NO: 168255 - DNA, 13 bp, Artificial Sequence
  Oligonucleotide for detection of SNP TSC0042084
gttaaattttaaa

SEQ ID NO: 168256 - DNA, 13 bp, Artificial Sequence
  Oligonucleotide for detection of SNP TSC0042084
tttaaaatttaac

SEQ ID NO: 168257 - DNA, 13 bp, Artificial Sequence
  Oligonucleotide for detection of SNP TSC0005463
ttgatgttattay

SEQ ID NO: 168258 - DNA, 13 bp, Artificial Sequence
  Oligonucleotide for detection of SNP TSC0005463
rtaataacatcaa

SEQ ID NO: 168259 - DNA, 13 bp, Artificial Sequence
  Oligonucleotide for detection of SNP TSC0005463
ttgatggtattay

SEQ ID NO: 168260 - DNA, 13 bp, Artificial Sequence
  Oligonucleotide for detection of SNP TSC0005463
rtaataccatcaa

SEQ ID NO: 168261 - DNA, 13 bp, Artificial Sequence
  Oligonucleotide for detection of SNP TSC0005463
gtaatagtattaa

SEQ ID NO: 168262 - DNA, 13 bp, Artificial Sequence
  Oligonucleotide for detection of SNP TSC0005463
ttaatactattac

SEQ ID NO: 168263 - DNA, 13 bp, Artificial Sequence
  Oligonucleotide for detection of SNP TSC0005463
gtaatattattaa

SEQ ID NO: 168264 - DNA, 13 bp, Artificial Sequence
  Oligonucleotide for detection of SNP TSC0005463
ttaataatattac

SEQ ID NO: 168265 - DNA, 13 bp, Artificial Sequence
  Oligonucleotide for detection of SNP TSC0005464
agtataatatatt

SEQ ID NO: 168266 - DNA, 13 bp, Artificial Sequence
  Oligonucleotide for detection of SNP TSC0005464
aatatattatact

SEQ ID NO: 168267 - DNA, 13 bp, Artificial Sequence
  Oligonucleotide for detection of SNP TSC0005464
agtatagtatatt

SEQ ID NO: 168268 - DNA, 13 bp, Artificial Sequence
  Oligonucleotide for detection of SNP TSC0005464
aatatactatact

SEQ ID NO: 168269 - DNA, 13 bp, Artificial Sequence
  Oligonucleotide for detection of SNP TSC0042087
gtagattggttgy

SEQ ID NO: 168270 - DNA, 13 bp, Artificial Sequence
  Oligonucleotide for detection of SNP TSC0042087
rcaaccaatctac

SEQ ID NO: 168271 - DNA, 13 bp, Artificial Sequence
  Oligonucleotide for detection of SNP TSC0042087
gtagatcggttgy

SEQ ID NO: 168272 - DNA, 13 bp, Artificial Sequence
  Oligonucleotide for detection of SNP TSC0042087
rcaaccgatctac

SEQ ID NO: 168273 - DNA, 13 bp, Artificial Sequence
  Oligonucleotide for detection of SNP TSC0042087
gtaattggtttgy

SEQ ID NO: 168274 - DNA, 13 bp, Artificial Sequence
  Oligonucleotide for detection of SNP TSC0042087
rcaaaccaattac

SEQ ID NO: 168275 - DNA, 13 bp, Artificial Sequence
  Oligonucleotide for detection of SNP TSC0042087
gtaattagtttgy

SEQ ID NO: 168276 - DNA, 13 bp, Artificial Sequence
  Oligonucleotide for detection of SNP TSC0042087
rcaaactaattac

SEQ ID NO: 168277 - DNA, 13 bp, Artificial Sequence
  Oligonucleotide for detection of SNP TSC0042087
gtaatcggtttgy

SEQ ID NO: 168278 - DNA, 13 bp, Artificial Sequence
  Oligonucleotide for detection of SNP TSC0042087
rcaaaccgattac

SEQ ID NO: 168279 - DNA, 13 bp, Artificial Sequence
  Oligonucleotide for detection of SNP TSC0042090
ttattttggtttt

SEQ ID NO: 168280 - DNA, 13 bp, Artificial Sequence
  Oligonucleotide for detection of SNP TSC0042090
aaaaccaaaataa

SEQ ID NO: 168281 - DNA, 13 bp, Artificial Sequence
  Oligonucleotide for detection of SNP TSC0042090
ttatttcggtttt

SEQ ID NO: 168282 - DNA, 13 bp, Artificial Sequence
  Oligonucleotide for detection of SNP TSC0042090
aaaaccgaaataa

SEQ ID NO: 168283 - DNA, 13 bp, Artificial Sequence
  Oligonucleotide for detection of SNP TSC0042090
agggttggggtga

SEQ ID NO: 168284 - DNA, 13 bp, Artificial Sequence
  Oligonucleotide for detection of SNP TSC0042090
tcaccccaaccct

SEQ ID NO: 168285 - DNA, 13 bp, Artificial Sequence
  Oligonucleotide for detection of SNP TSC0042090
agggttagggtga

SEQ ID NO: 168286 - DNA, 13 bp, Artificial Sequence
  Oligonucleotide for detection of SNP TSC0042090
tcaccctaaccct

SEQ ID NO: 168287 - DNA, 13 bp, Artificial Sequence
  Oligonucleotide for detection of SNP TSC0042090
agggtcggggtga

SEQ ID NO: 168288 - DNA, 13 bp, Artificial Sequence
  Oligonucleotide for detection of SNP TSC0042090
tcaccccgaccct

SEQ ID NO: 168289 - DNA, 13 bp, Artificial Sequence
  Oligonucleotide for detection of SNP TSC0042091
gaataggatatgt

SEQ ID NO: 168290 - DNA, 13 bp, Artificial Sequence
  Oligonucleotide for detection of SNP TSC0042091
acatatcctattc

SEQ ID NO: 168291 - DNA, 13 bp, Artificial Sequence
  Oligonucleotide for detection of SNP TSC0042091
gaatagaatatgt

SEQ ID NO: 168292 - DNA, 13 bp, Artificial Sequence
  Oligonucleotide for detection of SNP TSC0042091
acatattctattc

SEQ ID NO: 168293 - DNA, 13 bp, Artificial Sequence
  Oligonucleotide for detection of SNP TSC0042092
attaaagttttay

SEQ ID NO: 168294 - DNA, 13 bp, Artificial Sequence
  Oligonucleotide for detection of SNP TSC0042092
rtaaaactttaat

SEQ ID NO: 168295 - DNA, 13 bp, Artificial Sequence
  Oligonucleotide for detection of SNP TSC0042092
attaaaattttay

SEQ ID NO: 168296 - DNA, 13 bp, Artificial Sequence
  Oligonucleotide for detection of SNP TSC0042092
rtaaaattttaat

SEQ ID NO: 168297 - DNA, 13 bp, Artificial Sequence
  Oligonucleotide for detection of SNP TSC0005205
ttatggattttgg

SEQ ID NO: 168298 - DNA, 13 bp, Artificial Sequence
  Oligonucleotide for detection of SNP TSC0005205
ccaaaatccataa

SEQ ID NO: 168299 - DNA, 13 bp, Artificial Sequence
  Oligonucleotide for detection of SNP TSC0005205
ttatgggttttgg

SEQ ID NO: 168300 - DNA, 13 bp, Artificial Sequence
  Oligonucleotide for detection of SNP TSC0005205
ccaaaacccataa

SEQ ID NO: 168301 - DNA, 13 bp, Artificial Sequence
  Oligonucleotide for detection of SNP TSC0005205
ttatggatttcgg

SEQ ID NO: 168302 - DNA, 13 bp, Artificial Sequence
  Oligonucleotide for detection of SNP TSC0005205
ccgaaatccataa

SEQ ID NO: 168303 - DNA, 13 bp, Artificial Sequence
  Oligonucleotide for detection of SNP TSC0005205
ttatgggtttcgg

SEQ ID NO: 168304 - DNA, 13 bp, Artificial Sequence
  Oligonucleotide for detection of SNP TSC0005205
ccgaaacccataa

SEQ ID NO: 168305 - DNA, 13 bp, Artificial Sequence
  Oligonucleotide for detection of SNP TSC0042095
agtttaagtgtty

SEQ ID NO: 168306 - DNA, 13 bp, Artificial Sequence
  Oligonucleotide for detection of SNP TSC0042095
raacacttaaact

SEQ ID NO: 168307 - DNA, 13 bp, Artificial Sequence
  Oligonucleotide for detection of SNP TSC0042095
agtttaggtgtty

SEQ ID NO: 168308 - DNA, 13 bp, Artificial Sequence
  Oligonucleotide for detection of SNP TSC0042095
raacacctaaact

SEQ ID NO: 168309 - DNA, 13 bp, Artificial Sequence
  Oligonucleotide for detection of SNP TSC0042096
aagataggaaggg

SEQ ID NO: 168310 - DNA, 13 bp, Artificial Sequence
  Oligonucleotide for detection of SNP TSC0042096
cccttcctatctt

SEQ ID NO: 168311 - DNA, 13 bp, Artificial Sequence
  Oligonucleotide for detection of SNP TSC0042096
aagataagaaggg

SEQ ID NO: 168312 - DNA, 13 bp, Artificial Sequence
  Oligonucleotide for detection of SNP TSC0042096
cccttcttatctt

SEQ ID NO: 168313 - DNA, 13 bp, Artificial Sequence
  Oligonucleotide for detection of SNP TSC0005061
taatttattgtta

SEQ ID NO: 168314 - DNA, 13 bp, Artificial Sequence
  Oligonucleotide for detection of SNP TSC0005061
taacaataaatta

SEQ ID NO: 168315 - DNA, 13 bp, Artificial Sequence
  Oligonucleotide for detection of SNP TSC0005061
taatttgttgtta

SEQ ID NO: 168316 - DNA, 13 bp, Artificial Sequence
  Oligonucleotide for detection of SNP TSC0005061
taacaacaaatta

SEQ ID NO: 168317 - DNA, 13 bp, Artificial Sequence
  Oligonucleotide for detection of SNP TSC0005061
taattcgttgtta

SEQ ID NO: 168318 - DNA, 13 bp, Artificial Sequence
  Oligonucleotide for detection of SNP TSC0005061
taacaacgaatta

SEQ ID NO: 168319 - DNA, 13 bp, Artificial Sequence
  Oligonucleotide for detection of SNP TSC0005061
tgataatggatta

SEQ ID NO: 168320 - DNA, 13 bp, Artificial Sequence
  Oligonucleotide for detection of SNP TSC0005061
taatccattatca

SEQ ID NO: 168321 - DNA, 13 bp, Artificial Sequence
  Oligonucleotide for detection of SNP TSC0005061
tgataacggatta

SEQ ID NO: 168322 - DNA, 13 bp, Artificial Sequence
  Oligonucleotide for detection of SNP TSC0005061
taatccgttatca

SEQ ID NO: 168323 - DNA, 13 bp, Artificial Sequence
  Oligonucleotide for detection of SNP TSC0042097
tttatgtgtttty

SEQ ID NO: 168324 - DNA, 13 bp, Artificial Sequence
  Oligonucleotide for detection of SNP TSC0042097
raaaacacataaa

SEQ ID NO: 168325 - DNA, 13 bp, Artificial Sequence
  Oligonucleotide for detection of SNP TSC0042097
tttatgcgtttty

SEQ ID NO: 168326 - DNA, 13 bp, Artificial Sequence
  Oligonucleotide for detection of SNP TSC0042097
raaaacgcataaa

SEQ ID NO: 168327 - DNA, 13 bp, Artificial Sequence
  Oligonucleotide for detection of SNP TSC0042097
gaaaatgtataaa

SEQ ID NO: 168328 - DNA, 13 bp, Artificial Sequence
  Oligonucleotide for detection of SNP TSC0042097
tttatacattttc

SEQ ID NO: 168329 - DNA, 13 bp, Artificial Sequence
  Oligonucleotide for detection of SNP TSC0042097
gaaaatatataaa

SEQ ID NO: 168330 - DNA, 13 bp, Artificial Sequence
  Oligonucleotide for detection of SNP TSC0042097
tttatatattttc

SEQ ID NO: 168331 - DNA, 13 bp, Artificial Sequence
  Oligonucleotide for detection of SNP TSC0042097
gaaaacgtataaa

SEQ ID NO: 168332 - DNA, 13 bp, Artificial Sequence
  Oligonucleotide for detection of SNP TSC0042097
tttatacgttttc

SEQ ID NO: 168333 - DNA, 13 bp, Artificial Sequence
  Oligonucleotide for detection of SNP TSC0042098
aatttatagaaay

SEQ ID NO: 168334 - DNA, 13 bp, Artificial Sequence
  Oligonucleotide for detection of SNP TSC0042098
rtttctataaatt

SEQ ID NO: 168335 - DNA, 13 bp, Artificial Sequence
  Oligonucleotide for detection of SNP TSC0042098
aatttagagaaay

SEQ ID NO: 168336 - DNA, 13 bp, Artificial Sequence
  Oligonucleotide for detection of SNP TSC0042098
rtttctctaaatt

SEQ ID NO: 168337 - DNA, 13 bp, Artificial Sequence
  Oligonucleotide for detection of SNP TSC0042098
gtttttttaggtt

SEQ ID NO: 168338 - DNA, 13 bp, Artificial Sequence
  Oligonucleotide for detection of SNP TSC0042098
aacctaaaaaaac

SEQ ID NO: 168339 - DNA, 13 bp, Artificial Sequence
  Oligonucleotide for detection of SNP TSC0042100
taaaagtttgtga

SEQ ID NO: 168340 - DNA, 13 bp, Artificial Sequence
  Oligonucleotide for detection of SNP TSC0042100
tcacaaactttta

SEQ ID NO: 168341 - DNA, 13 bp, Artificial Sequence
  Oligonucleotide for detection of SNP TSC0042100
taaaaggttgtga

SEQ ID NO: 168342 - DNA, 13 bp, Artificial Sequence
  Oligonucleotide for detection of SNP TSC0042100
tcacaacctttta

SEQ ID NO: 168343 - DNA, 13 bp, Artificial Sequence
  Oligonucleotide for detection of SNP TSC0042101
atatgtaaaggaa

SEQ ID NO: 168344 - DNA, 13 bp, Artificial Sequence
  Oligonucleotide for detection of SNP TSC0042101
ttcctttacatat

SEQ ID NO: 168345 - DNA, 13 bp, Artificial Sequence
  Oligonucleotide for detection of SNP TSC0042101
atatgtgaaggaa

SEQ ID NO: 168346 - DNA, 13 bp, Artificial Sequence
  Oligonucleotide for detection of SNP TSC0042101
ttccttcacatat

SEQ ID NO: 168347 - DNA, 13 bp, Artificial Sequence
  Oligonucleotide for detection of SNP TSC0042102
tgtagttggggaa

SEQ ID NO: 168348 - DNA, 13 bp, Artificial Sequence
  Oligonucleotide for detection of SNP TSC0042102
ttccccaactaca

SEQ ID NO: 168349 - DNA, 13 bp, Artificial Sequence
  Oligonucleotide for detection of SNP TSC0042102
cgtagttggggaa

SEQ ID NO: 168350 - DNA, 13 bp, Artificial Sequence
  Oligonucleotide for detection of SNP TSC0042102
ttccccaactacg

SEQ ID NO: 168351 - DNA, 13 bp, Artificial Sequence
  Oligonucleotide for detection of SNP TSC0042102
tgtagtcggggaa

SEQ ID NO: 168352 - DNA, 13 bp, Artificial Sequence
  Oligonucleotide for detection of SNP TSC0042102
ttccccgactaca

SEQ ID NO: 168353 - DNA, 13 bp, Artificial Sequence
  Oligonucleotide for detection of SNP TSC0042102
cgtagtcggggaa

SEQ ID NO: 168354 - DNA, 13 bp, Artificial Sequence
  Oligonucleotide for detection of SNP TSC0042102
ttccccgactacg

SEQ ID NO: 168355 - DNA, 13 bp, Artificial Sequence
  Oligonucleotide for detection of SNP TSC0042102
ttttttgattgtg

SEQ ID NO: 168356 - DNA, 13 bp, Artificial Sequence
  Oligonucleotide for detection of SNP TSC0042102
cacaatcaaaaaa

SEQ ID NO: 168357 - DNA, 13 bp, Artificial Sequence
  Oligonucleotide for detection of SNP TSC0042102
ttttttaattgtg

SEQ ID NO: 168358 - DNA, 13 bp, Artificial Sequence
  Oligonucleotide for detection of SNP TSC0042102
cacaattaaaaaa

SEQ ID NO: 168359 - DNA, 13 bp, Artificial Sequence
  Oligonucleotide for detection of SNP TSC0042102
tttttcgattgtg

SEQ ID NO: 168360 - DNA, 13 bp, Artificial Sequence
  Oligonucleotide for detection of SNP TSC0042102
cacaatcgaaaaa

SEQ ID NO: 168361 - DNA, 13 bp, Artificial Sequence
  Oligonucleotide for detection of SNP TSC0042102
ttttttaattgcg

SEQ ID NO: 168362 - DNA, 13 bp, Artificial Sequence
  Oligonucleotide for detection of SNP TSC0042102
cgcaattaaaaaa

SEQ ID NO: 168363 - DNA, 13 bp, Artificial Sequence
  Oligonucleotide for detection of SNP TSC0042102
ttttttgattgcg

SEQ ID NO: 168364 - DNA, 13 bp, Artificial Sequence
  Oligonucleotide for detection of SNP TSC0042102
cgcaatcaaaaaa

SEQ ID NO: 168365 - DNA, 13 bp, Artificial Sequence
  Oligonucleotide for detection of SNP TSC0042102
tttttcgattgcg

SEQ ID NO: 168366 - DNA, 13 bp, Artificial Sequence
  Oligonucleotide for detection of SNP TSC0042102
cgcaatcgaaaaa

SEQ ID NO: 168367 - DNA, 13 bp, Artificial Sequence
  Oligonucleotide for detection of SNP TSC0042103
taataagaagaat

SEQ ID NO: 168368 - DNA, 13 bp, Artificial Sequence
  Oligonucleotide for detection of SNP TSC0042103
attcttcttatta

SEQ ID NO: 168369 - DNA, 13 bp, Artificial Sequence
  Oligonucleotide for detection of SNP TSC0042103
taataaaaagaat

SEQ ID NO: 168370 - DNA, 13 bp, Artificial Sequence
  Oligonucleotide for detection of SNP TSC0042103
attctttttatta

SEQ ID NO: 168371 - DNA, 13 bp, Artificial Sequence
  Oligonucleotide for detection of SNP TSC0042104
ttaagaggtttta

SEQ ID NO: 168372 - DNA, 13 bp, Artificial Sequence
  Oligonucleotide for detection of SNP TSC0042104
taaaacctcttaa

SEQ ID NO: 168373 - DNA, 13 bp, Artificial Sequence
  Oligonucleotide for detection of SNP TSC0042104
ttaagaagtttta

SEQ ID NO: 168374 - DNA, 13 bp, Artificial Sequence
  Oligonucleotide for detection of SNP TSC0042104
taaaacttcttaa

SEQ ID NO: 168375 - DNA, 13 bp, Artificial Sequence
  Oligonucleotide for detection of SNP TSC0042105
ttatgtatttcgt

SEQ ID NO: 168376 - DNA, 13 bp, Artificial Sequence
  Oligonucleotide for detection of SNP TSC0042105
acgaaatacataa

SEQ ID NO: 168377 - DNA, 13 bp, Artificial Sequence
  Oligonucleotide for detection of SNP TSC0042105
ttatgtgtttcgt

SEQ ID NO: 168378 - DNA, 13 bp, Artificial Sequence
  Oligonucleotide for detection of SNP TSC0042105
acgaaacacataa

SEQ ID NO: 168379 - DNA, 13 bp, Artificial Sequence
  Oligonucleotide for detection of SNP TSC0005059
tagtggaaaatta

SEQ ID NO: 168380 - DNA, 13 bp, Artificial Sequence
  Oligonucleotide for detection of SNP TSC0005059
taattttccacta

SEQ ID NO: 168381 - DNA, 13 bp, Artificial Sequence
  Oligonucleotide for detection of SNP TSC0005059
tagtgggaaatta

SEQ ID NO: 168382 - DNA, 13 bp, Artificial Sequence
  Oligonucleotide for detection of SNP TSC0005059
taatttcccacta

SEQ ID NO: 168383 - DNA, 13 bp, Artificial Sequence
  Oligonucleotide for detection of SNP TSC0005060
gtgggatgaaaty

SEQ ID NO: 168384 - DNA, 13 bp, Artificial Sequence
  Oligonucleotide for detection of SNP TSC0005060
ratttcatcccac

SEQ ID NO: 168385 - DNA, 13 bp, Artificial Sequence
  Oligonucleotide for detection of SNP TSC0005060
gtgggacgaaaty

SEQ ID NO: 168386 - DNA, 13 bp, Artificial Sequence
  Oligonucleotide for detection of SNP TSC0005060
ratttcgtcccac

SEQ ID NO: 168387 - DNA, 13 bp, Artificial Sequence
  Oligonucleotide for detection of SNP TSC0042109
taattatgggtty

SEQ ID NO: 168388 - DNA, 13 bp, Artificial Sequence
  Oligonucleotide for detection of SNP TSC0042109
raacccataatta

SEQ ID NO: 168389 - DNA, 13 bp, Artificial Sequence
  Oligonucleotide for detection of SNP TSC0042109
taattaggggtty

SEQ ID NO: 168390 - DNA, 13 bp, Artificial Sequence
  Oligonucleotide for detection of SNP TSC0042109
raacccctaatta

SEQ ID NO: 168391 - DNA, 13 bp, Artificial Sequence
  Oligonucleotide for detection of SNP TSC0042109
taattacgggtty

SEQ ID NO: 168392 - DNA, 13 bp, Artificial Sequence
  Oligonucleotide for detection of SNP TSC0042109
raacccgtaatta

SEQ ID NO: 168393 - DNA, 13 bp, Artificial Sequence
  Oligonucleotide for detection of SNP TSC0042109
gaatttgtaatta

SEQ ID NO: 168394 - DNA, 13 bp, Artificial Sequence
  Oligonucleotide for detection of SNP TSC0042109
taattacaaattc

SEQ ID NO: 168395 - DNA, 13 bp, Artificial Sequence
  Oligonucleotide for detection of SNP TSC0042109
gaatttttaatta

SEQ ID NO: 168396 - DNA, 13 bp, Artificial Sequence
  Oligonucleotide for detection of SNP TSC0042109
taattaaaaattc

SEQ ID NO: 168397 - DNA, 13 bp, Artificial Sequence
  Oligonucleotide for detection of SNP TSC0042109
gaattcgtaatta

SEQ ID NO: 168398 - DNA, 13 bp, Artificial Sequence
  Oligonucleotide for detection of SNP TSC0042109
taattacgaattc

SEQ ID NO: 168399 - DNA, 13 bp, Artificial Sequence
  Oligonucleotide for detection of SNP TSC0042110
tttgatggttagt

SEQ ID NO: 168400 - DNA, 13 bp, Artificial Sequence
  Oligonucleotide for detection of SNP TSC0042110
actaaccatcaaa

SEQ ID NO: 168401 - DNA, 13 bp, Artificial Sequence
  Oligonucleotide for detection of SNP TSC0042110
tttgatagttagt

SEQ ID NO: 168402 - DNA, 13 bp, Artificial Sequence
  Oligonucleotide for detection of SNP TSC0042110
actaactatcaaa

SEQ ID NO: 168403 - DNA, 13 bp, Artificial Sequence
  Oligonucleotide for detection of SNP TSC0042111
agaaatattatta

SEQ ID NO: 168404 - DNA, 13 bp, Artificial Sequence
  Oligonucleotide for detection of SNP TSC0042111
taataatatttct

SEQ ID NO: 168405 - DNA, 13 bp, Artificial Sequence
  Oligonucleotide for detection of SNP TSC0042111
agaaatgttatta

SEQ ID NO: 168406 - DNA, 13 bp, Artificial Sequence
  Oligonucleotide for detection of SNP TSC0042111
taataacatttct

SEQ ID NO: 168407 - DNA, 13 bp, Artificial Sequence
  Oligonucleotide for detection of SNP TSC0042111
agaaacgttatta

SEQ ID NO: 168408 - DNA, 13 bp, Artificial Sequence
  Oligonucleotide for detection of SNP TSC0042111
taataacgtttct

SEQ ID NO: 168409 - DNA, 13 bp, Artificial Sequence
  Oligonucleotide for detection of SNP TSC0042111
tagtagtgttttt

SEQ ID NO: 168410 - DNA, 13 bp, Artificial Sequence
  Oligonucleotide for detection of SNP TSC0042111
aaaaacactacta

SEQ ID NO: 168411 - DNA, 13 bp, Artificial Sequence
  Oligonucleotide for detection of SNP TSC0042111
tagtagcgttttt

SEQ ID NO: 168412 - DNA, 13 bp, Artificial Sequence
  Oligonucleotide for detection of SNP TSC0042111
aaaaacgctacta

SEQ ID NO: 168413 - DNA, 13 bp, Artificial Sequence
  Oligonucleotide for detection of SNP TSC0042112
attgttagtatgt

SEQ ID NO: 168414 - DNA, 13 bp, Artificial Sequence
  Oligonucleotide for detection of SNP TSC0042112
acatactaacaat

SEQ ID NO: 168415 - DNA, 13 bp, Artificial Sequence
  Oligonucleotide for detection of SNP TSC0042112
attgtttgtatgt

SEQ ID NO: 168416 - DNA, 13 bp, Artificial Sequence
  Oligonucleotide for detection of SNP TSC0042112
acatacaaacaat

SEQ ID NO: 168417 - DNA, 13 bp, Artificial Sequence
  Oligonucleotide for detection of SNP TSC0042112
attgttcgtatgt

SEQ ID NO: 168418 - DNA, 13 bp, Artificial Sequence
  Oligonucleotide for detection of SNP TSC0042112
acatacgaacaat

SEQ ID NO: 168419 - DNA, 13 bp, Artificial Sequence
  Oligonucleotide for detection of SNP TSC0042112
atatgttaatagt

SEQ ID NO: 168420 - DNA, 13 bp, Artificial Sequence
  Oligonucleotide for detection of SNP TSC0042112
actattaacatat

SEQ ID NO: 168421 - DNA, 13 bp, Artificial Sequence
  Oligonucleotide for detection of SNP TSC0042112
atatgtgaatagt

SEQ ID NO: 168422 - DNA, 13 bp, Artificial Sequence
  Oligonucleotide for detection of SNP TSC0042112
actattcacatat

SEQ ID NO: 168423 - DNA, 13 bp, Artificial Sequence
  Oligonucleotide for detection of SNP TSC0042112
atatgcgaatagt

SEQ ID NO: 168424 - DNA, 13 bp, Artificial Sequence
  Oligonucleotide for detection of SNP TSC0042112
actattcgcatat

SEQ ID NO: 168425 - DNA, 13 bp, Artificial Sequence
  Oligonucleotide for detection of SNP TSC0042118
aggagatggatta

SEQ ID NO: 168426 - DNA, 13 bp, Artificial Sequence
  Oligonucleotide for detection of SNP TSC0042118
taatccatctcct

SEQ ID NO: 168427 - DNA, 13 bp, Artificial Sequence
  Oligonucleotide for detection of SNP TSC0042118
aggagagggatta

SEQ ID NO: 168428 - DNA, 13 bp, Artificial Sequence
  Oligonucleotide for detection of SNP TSC0042118
taatccctctcct

SEQ ID NO: 168429 - DNA, 13 bp, Artificial Sequence
  Oligonucleotide for detection of SNP TSC0042118
aggagacggatta

SEQ ID NO: 168430 - DNA, 13 bp, Artificial Sequence
  Oligonucleotide for detection of SNP TSC0042118
taatccgtctcct

SEQ ID NO: 168431 - DNA, 13 bp, Artificial Sequence
  Oligonucleotide for detection of SNP TSC0042119
taggaggaggggg

SEQ ID NO: 168432 - DNA, 13 bp, Artificial Sequence
  Oligonucleotide for detection of SNP TSC0042119
ccccctcctccta

SEQ ID NO: 168433 - DNA, 13 bp, Artificial Sequence
  Oligonucleotide for detection of SNP TSC0042119
taggagtaggggg

SEQ ID NO: 168434 - DNA, 13 bp, Artificial Sequence
  Oligonucleotide for detection of SNP TSC0042119
ccccctactccta

SEQ ID NO: 168435 - DNA, 13 bp, Artificial Sequence
  Oligonucleotide for detection of SNP TSC0042120
ttattcgtttata

SEQ ID NO: 168436 - DNA, 13 bp, Artificial Sequence
  Oligonucleotide for detection of SNP TSC0042120
tataaacgaataa

SEQ ID NO: 168437 - DNA, 13 bp, Artificial Sequence
  Oligonucleotide for detection of SNP TSC0042120
tgtgagtgggtgg

SEQ ID NO: 168438 - DNA, 13 bp, Artificial Sequence
  Oligonucleotide for detection of SNP TSC0042120
ccacccactcaca

SEQ ID NO: 168439 - DNA, 13 bp, Artificial Sequence
  Oligonucleotide for detection of SNP TSC0042120
tgtgagcgggtgg

SEQ ID NO: 168440 - DNA, 13 bp, Artificial Sequence
  Oligonucleotide for detection of SNP TSC0042120
ccacccgctcaca

SEQ ID NO: 168441 - DNA, 13 bp, Artificial Sequence
  Oligonucleotide for detection of SNP TSC0042125
tttggtattaaaa

SEQ ID NO: 168442 - DNA, 13 bp, Artificial Sequence
  Oligonucleotide for detection of SNP TSC0042125
ttttaataccaaa

SEQ ID NO: 168443 - DNA, 13 bp, Artificial Sequence
  Oligonucleotide for detection of SNP TSC0042125
tttggtgttaaaa

SEQ ID NO: 168444 - DNA, 13 bp, Artificial Sequence
  Oligonucleotide for detection of SNP TSC0042125
ttttaacaccaaa

SEQ ID NO: 168445 - DNA, 13 bp, Artificial Sequence
  Oligonucleotide for detection of SNP TSC0042125
tttggcgttaaaa

SEQ ID NO: 168446 - DNA, 13 bp, Artificial Sequence
  Oligonucleotide for detection of SNP TSC0042125
ttttaacgccaaa

SEQ ID NO: 168447 - DNA, 13 bp, Artificial Sequence
  Oligonucleotide for detection of SNP TSC0042125
ttttaatgttagg

SEQ ID NO: 168448 - DNA, 13 bp, Artificial Sequence
  Oligonucleotide for detection of SNP TSC0042125
cctaacattaaaa

SEQ ID NO: 168449 - DNA, 13 bp, Artificial Sequence
  Oligonucleotide for detection of SNP TSC0042125
ttttaacgttagg

SEQ ID NO: 168450 - DNA, 13 bp, Artificial Sequence
  Oligonucleotide for detection of SNP TSC0042125
cctaacgttaaaa

SEQ ID NO: 168451 - DNA, 13 bp, Artificial Sequence
  Oligonucleotide for detection of SNP TSC0042131
taattggtttaag

SEQ ID NO: 168452 - DNA, 13 bp, Artificial Sequence
  Oligonucleotide for detection of SNP TSC0042131
cttaaaccaatta

SEQ ID NO: 168453 - DNA, 13 bp, Artificial Sequence
  Oligonucleotide for detection of SNP TSC0008742
taggtatttaggy

SEQ ID NO: 168454 - DNA, 13 bp, Artificial Sequence
  Oligonucleotide for detection of SNP TSC0008742
rcctaaataccta

SEQ ID NO: 168455 - DNA, 13 bp, Artificial Sequence
  Oligonucleotide for detection of SNP TSC0008742
taggtagttaggy

SEQ ID NO: 168456 - DNA, 13 bp, Artificial Sequence
  Oligonucleotide for detection of SNP TSC0008742
rcctaactaccta

SEQ ID NO: 168457 - DNA, 13 bp, Artificial Sequence
  Oligonucleotide for detection of SNP TSC0008742
gtttgagtgttta

SEQ ID NO: 168458 - DNA, 13 bp, Artificial Sequence
  Oligonucleotide for detection of SNP TSC0008742
taaacactcaaac

SEQ ID NO: 168459 - DNA, 13 bp, Artificial Sequence
  Oligonucleotide for detection of SNP TSC0008742
gtttgattgttta

SEQ ID NO: 168460 - DNA, 13 bp, Artificial Sequence
  Oligonucleotide for detection of SNP TSC0008742
taaacaatcaaac

SEQ ID NO: 168461 - DNA, 13 bp, Artificial Sequence
  Oligonucleotide for detection of SNP TSC0008743
ttgggtatataaa

SEQ ID NO: 168462 - DNA, 13 bp, Artificial Sequence
  Oligonucleotide for detection of SNP TSC0008743
tttatatacccaa

SEQ ID NO: 168463 - DNA, 13 bp, Artificial Sequence
  Oligonucleotide for detection of SNP TSC0008743
ttgggtgtataaa

SEQ ID NO: 168464 - DNA, 13 bp, Artificial Sequence
  Oligonucleotide for detection of SNP TSC0008743
tttatacacccaa

SEQ ID NO: 168465 - DNA, 13 bp, Artificial Sequence
  Oligonucleotide for detection of SNP TSC0008743
tcgggtatataaa

SEQ ID NO: 168466 - DNA, 13 bp, Artificial Sequence
  Oligonucleotide for detection of SNP TSC0008743
tttatatacccga

SEQ ID NO: 168467 - DNA, 13 bp, Artificial Sequence
  Oligonucleotide for detection of SNP TSC0008743
tcgggtgtataaa

SEQ ID NO: 168468 - DNA, 13 bp, Artificial Sequence
  Oligonucleotide for detection of SNP TSC0008743
tttatacacccga

SEQ ID NO: 168469 - DNA, 13 bp, Artificial Sequence
  Oligonucleotide for detection of SNP TSC0008744
tttaattttttgt

SEQ ID NO: 168470 - DNA, 13 bp, Artificial Sequence
  Oligonucleotide for detection of SNP TSC0008744
acaaaaaattaaa

SEQ ID NO: 168471 - DNA, 13 bp, Artificial Sequence
  Oligonucleotide for detection of SNP TSC0008744
tttaatgttttgt

SEQ ID NO: 168472 - DNA, 13 bp, Artificial Sequence
  Oligonucleotide for detection of SNP TSC0008744
acaaaacattaaa

SEQ ID NO: 168473 - DNA, 13 bp, Artificial Sequence
  Oligonucleotide for detection of SNP TSC0008744
tttaacgttttgt

SEQ ID NO: 168474 - DNA, 13 bp, Artificial Sequence
  Oligonucleotide for detection of SNP TSC0008744
acaaaacgttaaa

SEQ ID NO: 168475 - DNA, 13 bp, Artificial Sequence
  Oligonucleotide for detection of SNP TSC0008744
atagaaagttaaa

SEQ ID NO: 168476 - DNA, 13 bp, Artificial Sequence
  Oligonucleotide for detection of SNP TSC0008744
tttaactttctat

SEQ ID NO: 168477 - DNA, 13 bp, Artificial Sequence
  Oligonucleotide for detection of SNP TSC0008744
atagaatgttaaa

SEQ ID NO: 168478 - DNA, 13 bp, Artificial Sequence
  Oligonucleotide for detection of SNP TSC0008744
tttaacattctat

SEQ ID NO: 168479 - DNA, 13 bp, Artificial Sequence
  Oligonucleotide for detection of SNP TSC0008744
atagaacgttaaa

SEQ ID NO: 168480 - DNA, 13 bp, Artificial Sequence
  Oligonucleotide for detection of SNP TSC0008744
tttaacgttctat

SEQ ID NO: 168481 - DNA, 13 bp, Artificial Sequence
  Oligonucleotide for detection of SNP TSC0042136
agtgttagaagta

SEQ ID NO: 168482 - DNA, 13 bp, Artificial Sequence
  Oligonucleotide for detection of SNP TSC0042136
tacttctaacact

SEQ ID NO: 168483 - DNA, 13 bp, Artificial Sequence
  Oligonucleotide for detection of SNP TSC0042136
agtgttggaagta

SEQ ID NO: 168484 - DNA, 13 bp, Artificial Sequence
  Oligonucleotide for detection of SNP TSC0042136
tacttccaacact

SEQ ID NO: 168485 - DNA, 13 bp, Artificial Sequence
  Oligonucleotide for detection of SNP TSC0042136
agtgtcggaagta

SEQ ID NO: 168486 - DNA, 13 bp, Artificial Sequence
  Oligonucleotide for detection of SNP TSC0042136
tacttccgacact

SEQ ID NO: 168487 - DNA, 13 bp, Artificial Sequence
  Oligonucleotide for detection of SNP TSC0042136
tgtttttggtatt

SEQ ID NO: 168488 - DNA, 13 bp, Artificial Sequence
  Oligonucleotide for detection of SNP TSC0042136
aataccaaaaaca

SEQ ID NO: 168489 - DNA, 13 bp, Artificial Sequence
  Oligonucleotide for detection of SNP TSC0042136
tgttttcggtatt

SEQ ID NO: 168490 - DNA, 13 bp, Artificial Sequence
  Oligonucleotide for detection of SNP TSC0042136
aataccgaaaaca

SEQ ID NO: 168491 - DNA, 13 bp, Artificial Sequence
  Oligonucleotide for detection of SNP TSC0042137
agagagagttaag

SEQ ID NO: 168492 - DNA, 13 bp, Artificial Sequence
  Oligonucleotide for detection of SNP TSC0042137
cttaactctctct

SEQ ID NO: 168493 - DNA, 13 bp, Artificial Sequence
  Oligonucleotide for detection of SNP TSC0042137
agagagtgttaag

SEQ ID NO: 168494 - DNA, 13 bp, Artificial Sequence
  Oligonucleotide for detection of SNP TSC0042137
cttaacactctct

SEQ ID NO: 168495 - DNA, 13 bp, Artificial Sequence
  Oligonucleotide for detection of SNP TSC0042138
agttttgtgagga

SEQ ID NO: 168496 - DNA, 13 bp, Artificial Sequence
  Oligonucleotide for detection of SNP TSC0042138
tcctcacaaaact

SEQ ID NO: 168497 - DNA, 13 bp, Artificial Sequence
  Oligonucleotide for detection of SNP TSC0042138
agttttatgagga

SEQ ID NO: 168498 - DNA, 13 bp, Artificial Sequence
  Oligonucleotide for detection of SNP TSC0042138
tcctcataaaact

SEQ ID NO: 168499 - DNA, 13 bp, Artificial Sequence
  Oligonucleotide for detection of SNP TSC0042139
tttttaagatttt

SEQ ID NO: 168500 - DNA, 13 bp, Artificial Sequence
  Oligonucleotide for detection of SNP TSC0042139
aaaatcttaaaaa

SEQ ID NO: 168501 - DNA, 13 bp, Artificial Sequence
  Oligonucleotide for detection of SNP TSC0042139
tttttaggatttt

SEQ ID NO: 168502 - DNA, 13 bp, Artificial Sequence
  Oligonucleotide for detection of SNP TSC0042139
aaaatcctaaaaa

SEQ ID NO: 168503 - DNA, 13 bp, Artificial Sequence
  Oligonucleotide for detection of SNP TSC0042141
tttagtagaatat

SEQ ID NO: 168504 - DNA, 13 bp, Artificial Sequence
  Oligonucleotide for detection of SNP TSC0042141
atattctactaaa

SEQ ID NO: 168505 - DNA, 13 bp, Artificial Sequence
  Oligonucleotide for detection of SNP TSC0042141
tttagtggaatat

SEQ ID NO: 168506 - DNA, 13 bp, Artificial Sequence
  Oligonucleotide for detection of SNP TSC0042141
atattccactaaa

SEQ ID NO: 168507 - DNA, 13 bp, Artificial Sequence
  Oligonucleotide for detection of SNP TSC0042142
tatttattattaa

SEQ ID NO: 168508 - DNA, 13 bp, Artificial Sequence
  Oligonucleotide for detection of SNP TSC0042142
ttaataataaata

SEQ ID NO: 168509 - DNA, 13 bp, Artificial Sequence
  Oligonucleotide for detection of SNP TSC0042142
tatttagtattaa

SEQ ID NO: 168510 - DNA, 13 bp, Artificial Sequence
  Oligonucleotide for detection of SNP TSC0042142
ttaatactaaata

SEQ ID NO: 168511 - DNA, 13 bp, Artificial Sequence
  Oligonucleotide for detection of SNP TSC0042142
ttagtagtaaata

SEQ ID NO: 168512 - DNA, 13 bp, Artificial Sequence
  Oligonucleotide for detection of SNP TSC0042142
tatttactactaa

SEQ ID NO: 168513 - DNA, 13 bp, Artificial Sequence
  Oligonucleotide for detection of SNP TSC0042142
ttagtattaaata

SEQ ID NO: 168514 - DNA, 13 bp, Artificial Sequence
  Oligonucleotide for detection of SNP TSC0042142
tatttaatactaa

SEQ ID NO: 168515 - DNA, 13 bp, Artificial Sequence
  Oligonucleotide for detection of SNP TSC0042143
aagattggaaagt

SEQ ID NO: 168516 - DNA, 13 bp, Artificial Sequence
  Oligonucleotide for detection of SNP TSC0042143
actttccaatctt

SEQ ID NO: 168517 - DNA, 13 bp, Artificial Sequence
  Oligonucleotide for detection of SNP TSC0042143
aagattagaaagt

SEQ ID NO: 168518 - DNA, 13 bp, Artificial Sequence
  Oligonucleotide for detection of SNP TSC0042143
actttctaatctt

SEQ ID NO: 168519 - DNA, 13 bp, Artificial Sequence
  Oligonucleotide for detection of SNP TSC0042143
aagatcggaaagt

SEQ ID NO: 168520 - DNA, 13 bp, Artificial Sequence
  Oligonucleotide for detection of SNP TSC0042143
actttccgatctt

SEQ ID NO: 168521 - DNA, 13 bp, Artificial Sequence
  Oligonucleotide for detection of SNP TSC0006517
tgtgatatatgaa

SEQ ID NO: 168522 - DNA, 13 bp, Artificial Sequence
  Oligonucleotide for detection of SNP TSC0006517
ttcatatatcaca

SEQ ID NO: 168523 - DNA, 13 bp, Artificial Sequence
  Oligonucleotide for detection of SNP TSC0006517
tgtgatttatgaa

SEQ ID NO: 168524 - DNA, 13 bp, Artificial Sequence
  Oligonucleotide for detection of SNP TSC0006517
ttcataaatcaca

SEQ ID NO: 168525 - DNA, 13 bp, Artificial Sequence
  Oligonucleotide for detection of SNP TSC0006517
tttataagttata

SEQ ID NO: 168526 - DNA, 13 bp, Artificial Sequence
  Oligonucleotide for detection of SNP TSC0006517
tataacttataaa

SEQ ID NO: 168527 - DNA, 13 bp, Artificial Sequence
  Oligonucleotide for detection of SNP TSC0042147
atttgaatagtag

SEQ ID NO: 168528 - DNA, 13 bp, Artificial Sequence
  Oligonucleotide for detection of SNP TSC0042147
ctactattcaaat

SEQ ID NO: 168529 - DNA, 13 bp, Artificial Sequence
  Oligonucleotide for detection of SNP TSC0042147
atttgagtagtag

SEQ ID NO: 168530 - DNA, 13 bp, Artificial Sequence
  Oligonucleotide for detection of SNP TSC0042147
ctactactcaaat

SEQ ID NO: 168531 - DNA, 13 bp, Artificial Sequence
  Oligonucleotide for detection of SNP TSC0042147
attcgaatagtag

SEQ ID NO: 168532 - DNA, 13 bp, Artificial Sequence
  Oligonucleotide for detection of SNP TSC0042147
ctactattcgaat

SEQ ID NO: 168533 - DNA, 13 bp, Artificial Sequence
  Oligonucleotide for detection of SNP TSC0042147
attcgagtagtag

SEQ ID NO: 168534 - DNA, 13 bp, Artificial Sequence
  Oligonucleotide for detection of SNP TSC0042147
ctactactcgaat

SEQ ID NO: 168535 - DNA, 13 bp, Artificial Sequence
  Oligonucleotide for detection of SNP TSC0042149
agtttgtttaata

SEQ ID NO: 168536 - DNA, 13 bp, Artificial Sequence
  Oligonucleotide for detection of SNP TSC0042149
tattaaacaaact

SEQ ID NO: 168537 - DNA, 13 bp, Artificial Sequence
  Oligonucleotide for detection of SNP TSC0042149
tattggttaggtt

SEQ ID NO: 168538 - DNA, 13 bp, Artificial Sequence
  Oligonucleotide for detection of SNP TSC0042149
aacctaaccaata

SEQ ID NO: 168539 - DNA, 13 bp, Artificial Sequence
  Oligonucleotide for detection of SNP TSC0042149
tattgggtaggtt

SEQ ID NO: 168540 - DNA, 13 bp, Artificial Sequence
  Oligonucleotide for detection of SNP TSC0042149
aacctacccaata

SEQ ID NO: 168541 - DNA, 13 bp, Artificial Sequence
  Oligonucleotide for detection of SNP TSC0042150
tatggtaggtaat

SEQ ID NO: 168542 - DNA, 13 bp, Artificial Sequence
  Oligonucleotide for detection of SNP TSC0042150
attacctaccata

SEQ ID NO: 168543 - DNA, 13 bp, Artificial Sequence
  Oligonucleotide for detection of SNP TSC0042150
tatggtgggtaat

SEQ ID NO: 168544 - DNA, 13 bp, Artificial Sequence
  Oligonucleotide for detection of SNP TSC0042150
attacccaccata

SEQ ID NO: 168545 - DNA, 13 bp, Artificial Sequence
  Oligonucleotide for detection of SNP TSC0042152
ggaatttaaataa

SEQ ID NO: 168546 - DNA, 13 bp, Artificial Sequence
  Oligonucleotide for detection of SNP TSC0042152
ttatttaaattcc

SEQ ID NO: 168547 - DNA, 13 bp, Artificial Sequence
  Oligonucleotide for detection of SNP TSC0042152
ggaattgaaataa

SEQ ID NO: 168548 - DNA, 13 bp, Artificial Sequence
  Oligonucleotide for detection of SNP TSC0042152
ttatttcaattcc

SEQ ID NO: 168549 - DNA, 13 bp, Artificial Sequence
  Oligonucleotide for detection of SNP TSC0042152
ttgtttgaattty

SEQ ID NO: 168550 - DNA, 13 bp, Artificial Sequence
  Oligonucleotide for detection of SNP TSC0042152
raaattcaaacaa

SEQ ID NO: 168551 - DNA, 13 bp, Artificial Sequence
  Oligonucleotide for detection of SNP TSC0042153
taaattggtagga

SEQ ID NO: 168552 - DNA, 13 bp, Artificial Sequence
  Oligonucleotide for detection of SNP TSC0042153
tcctaccaattta

SEQ ID NO: 168553 - DNA, 13 bp, Artificial Sequence
  Oligonucleotide for detection of SNP TSC0042153
taaattagtagga

SEQ ID NO: 168554 - DNA, 13 bp, Artificial Sequence
  Oligonucleotide for detection of SNP TSC0042153
tcctactaattta

SEQ ID NO: 168555 - DNA, 13 bp, Artificial Sequence
  Oligonucleotide for detection of SNP TSC0042154
gattatatttata

SEQ ID NO: 168556 - DNA, 13 bp, Artificial Sequence
  Oligonucleotide for detection of SNP TSC0042154
tataaatataatc

SEQ ID NO: 168557 - DNA, 13 bp, Artificial Sequence
  Oligonucleotide for detection of SNP TSC0042154
gattatgtttata

SEQ ID NO: 168558 - DNA, 13 bp, Artificial Sequence
  Oligonucleotide for detection of SNP TSC0042154
tataaacataatc

SEQ ID NO: 168559 - DNA, 13 bp, Artificial Sequence
  Oligonucleotide for detection of SNP TSC0004554
tgaatttatttty

SEQ ID NO: 168560 - DNA, 13 bp, Artificial Sequence
  Oligonucleotide for detection of SNP TSC0004554
raaaataaattca

SEQ ID NO: 168561 - DNA, 13 bp, Artificial Sequence
  Oligonucleotide for detection of SNP TSC0004554
tgaattgatttty

SEQ ID NO: 168562 - DNA, 13 bp, Artificial Sequence
  Oligonucleotide for detection of SNP TSC0004554
raaaatcaattca

SEQ ID NO: 168563 - DNA, 13 bp, Artificial Sequence
  Oligonucleotide for detection of SNP TSC0004554
gggagtaaattta

SEQ ID NO: 168564 - DNA, 13 bp, Artificial Sequence
  Oligonucleotide for detection of SNP TSC0004554
taaatttactccc

SEQ ID NO: 168565 - DNA, 13 bp, Artificial Sequence
  Oligonucleotide for detection of SNP TSC0004554
gggagttaattta

SEQ ID NO: 168566 - DNA, 13 bp, Artificial Sequence
  Oligonucleotide for detection of SNP TSC0004554
taaattaactccc

SEQ ID NO: 168567 - DNA, 13 bp, Artificial Sequence
  Oligonucleotide for detection of SNP TSC0042155
agatttggaagtg

SEQ ID NO: 168568 - DNA, 13 bp, Artificial Sequence
  Oligonucleotide for detection of SNP TSC0042155
cacttccaaatct

SEQ ID NO: 168569 - DNA, 13 bp, Artificial Sequence
  Oligonucleotide for detection of SNP TSC0042155
agatttagaagtg

SEQ ID NO: 168570 - DNA, 13 bp, Artificial Sequence
  Oligonucleotide for detection of SNP TSC0042155
cacttctaaatct

SEQ ID NO: 168571 - DNA, 13 bp, Artificial Sequence
  Oligonucleotide for detection of SNP TSC0004862
agaagaattgtty

SEQ ID NO: 168572 - DNA, 13 bp, Artificial Sequence
  Oligonucleotide for detection of SNP TSC0004862
raacaattcttct

SEQ ID NO: 168573 - DNA, 13 bp, Artificial Sequence
  Oligonucleotide for detection of SNP TSC0004862
agaagatttgtty

SEQ ID NO: 168574 - DNA, 13 bp, Artificial Sequence
  Oligonucleotide for detection of SNP TSC0004862
raacaaatcttct

SEQ ID NO: 168575 - DNA, 13 bp, Artificial Sequence
  Oligonucleotide for detection of SNP TSC0004862
agaagaatcgtty

SEQ ID NO: 168576 - DNA, 13 bp, Artificial Sequence
  Oligonucleotide for detection of SNP TSC0004862
raacgattcttct

SEQ ID NO: 168577 - DNA, 13 bp, Artificial Sequence
  Oligonucleotide for detection of SNP TSC0004862
agaagattcgtty

SEQ ID NO: 168578 - DNA, 13 bp, Artificial Sequence
  Oligonucleotide for detection of SNP TSC0004862
raacgaatcttct

SEQ ID NO: 168579 - DNA, 13 bp, Artificial Sequence
  Oligonucleotide for detection of SNP TSC0004862
gagtgattttttt

SEQ ID NO: 168580 - DNA, 13 bp, Artificial Sequence
  Oligonucleotide for detection of SNP TSC0004862
aaaaaaatcactc

SEQ ID NO: 168581 - DNA, 13 bp, Artificial Sequence
  Oligonucleotide for detection of SNP TSC0004862
gagtgagtttttt

SEQ ID NO: 168582 - DNA, 13 bp, Artificial Sequence
  Oligonucleotide for detection of SNP TSC0004862
aaaaaactcactc

SEQ ID NO: 168583 - DNA, 13 bp, Artificial Sequence
  Oligonucleotide for detection of SNP TSC0004862
gagcgattttttt

SEQ ID NO: 168584 - DNA, 13 bp, Artificial Sequence
  Oligonucleotide for detection of SNP TSC0004862
aaaaaaatcgctc

SEQ ID NO: 168585 - DNA, 13 bp, Artificial Sequence
  Oligonucleotide for detection of SNP TSC0004862
gagcgagtttttt

SEQ ID NO: 168586 - DNA, 13 bp, Artificial Sequence
  Oligonucleotide for detection of SNP TSC0004862
aaaaaactcgctc

SEQ ID NO: 168587 - DNA, 13 bp, Artificial Sequence
  Oligonucleotide for detection of SNP TSC0042159
gatggtgtaagtg

SEQ ID NO: 168588 - DNA, 13 bp, Artificial Sequence
  Oligonucleotide for detection of SNP TSC0042159
cacttacaccatc

SEQ ID NO: 168589 - DNA, 13 bp, Artificial Sequence
  Oligonucleotide for detection of SNP TSC0042159
gatggtataagtg

SEQ ID NO: 168590 - DNA, 13 bp, Artificial Sequence
  Oligonucleotide for detection of SNP TSC0042159
cacttataccatc

SEQ ID NO: 168591 - DNA, 13 bp, Artificial Sequence
  Oligonucleotide for detection of SNP TSC0042160
tttggagggatga

SEQ ID NO: 168592 - DNA, 13 bp, Artificial Sequence
  Oligonucleotide for detection of SNP TSC0042160
tcatccctccaaa

SEQ ID NO: 168593 - DNA, 13 bp, Artificial Sequence
  Oligonucleotide for detection of SNP TSC0042160
tttggaaggatga

SEQ ID NO: 168594 - DNA, 13 bp, Artificial Sequence
  Oligonucleotide for detection of SNP TSC0042160
tcatccttccaaa

SEQ ID NO: 168595 - DNA, 13 bp, Artificial Sequence
  Oligonucleotide for detection of SNP TSC0042161
tttgttgtgatta

SEQ ID NO: 168596 - DNA, 13 bp, Artificial Sequence
  Oligonucleotide for detection of SNP TSC0042161
taatcacaacaaa

SEQ ID NO: 168597 - DNA, 13 bp, Artificial Sequence
  Oligonucleotide for detection of SNP TSC0042161
tttgttatgatta

SEQ ID NO: 168598 - DNA, 13 bp, Artificial Sequence
  Oligonucleotide for detection of SNP TSC0042161
taatcataacaaa

SEQ ID NO: 168599 - DNA, 13 bp, Artificial Sequence
  Oligonucleotide for detection of SNP TSC0042161
tttgtcgtgatta

SEQ ID NO: 168600 - DNA, 13 bp, Artificial Sequence
  Oligonucleotide for detection of SNP TSC0042161
taatcacgacaaa

SEQ ID NO: 168601 - DNA, 13 bp, Artificial Sequence
  Oligonucleotide for detection of SNP TSC0042163
gtatttatgtttt

SEQ ID NO: 168602 - DNA, 13 bp, Artificial Sequence
  Oligonucleotide for detection of SNP TSC0042163
aaaacataaatac

SEQ ID NO: 168603 - DNA, 13 bp, Artificial Sequence
  Oligonucleotide for detection of SNP TSC0042163
gtatttttgtttt

SEQ ID NO: 168604 - DNA, 13 bp, Artificial Sequence
  Oligonucleotide for detection of SNP TSC0042163
aaaacaaaaatac

SEQ ID NO: 168605 - DNA, 13 bp, Artificial Sequence
  Oligonucleotide for detection of SNP TSC0042163
agagtataagtgy

SEQ ID NO: 168606 - DNA, 13 bp, Artificial Sequence
  Oligonucleotide for detection of SNP TSC0042163
rcacttatactct

SEQ ID NO: 168607 - DNA, 13 bp, Artificial Sequence
  Oligonucleotide for detection of SNP TSC0042163
agagtagaagtgy

SEQ ID NO: 168608 - DNA, 13 bp, Artificial Sequence
  Oligonucleotide for detection of SNP TSC0042163
rcacttctactct

SEQ ID NO: 168609 - DNA, 13 bp, Artificial Sequence
  Oligonucleotide for detection of SNP TSC0042164
atggtggatggtg

SEQ ID NO: 168610 - DNA, 13 bp, Artificial Sequence
  Oligonucleotide for detection of SNP TSC0042164
caccatccaccat

SEQ ID NO: 168611 - DNA, 13 bp, Artificial Sequence
  Oligonucleotide for detection of SNP TSC0042164
atggtgaatggtg

SEQ ID NO: 168612 - DNA, 13 bp, Artificial Sequence
  Oligonucleotide for detection of SNP TSC0042164
caccattcaccat

SEQ ID NO: 168613 - DNA, 13 bp, Artificial Sequence
  Oligonucleotide for detection of SNP TSC0008285
taaagtaaaaaat

SEQ ID NO: 168614 - DNA, 13 bp, Artificial Sequence
  Oligonucleotide for detection of SNP TSC0008285
attttttacttta

SEQ ID NO: 168615 - DNA, 13 bp, Artificial Sequence
  Oligonucleotide for detection of SNP TSC0008285
taaagttaaaaat

SEQ ID NO: 168616 - DNA, 13 bp, Artificial Sequence
  Oligonucleotide for detection of SNP TSC0008285
atttttaacttta

SEQ ID NO: 168617 - DNA, 13 bp, Artificial Sequence
  Oligonucleotide for detection of SNP TSC0042165
tttttaaaaaaag

SEQ ID NO: 168618 - DNA, 13 bp, Artificial Sequence
  Oligonucleotide for detection of SNP TSC0042165
ctttttttaaaaa

SEQ ID NO: 168619 - DNA, 13 bp, Artificial Sequence
  Oligonucleotide for detection of SNP TSC0042165
tttttagaaaaag

SEQ ID NO: 168620 - DNA, 13 bp, Artificial Sequence
  Oligonucleotide for detection of SNP TSC0042165
ctttttctaaaaa

SEQ ID NO: 168621 - DNA, 13 bp, Artificial Sequence
  Oligonucleotide for detection of SNP TSC0042167
ttaggaaataatt

SEQ ID NO: 168622 - DNA, 13 bp, Artificial Sequence
  Oligonucleotide for detection of SNP TSC0042167
aattatttcctaa

SEQ ID NO: 168623 - DNA, 13 bp, Artificial Sequence
  Oligonucleotide for detection of SNP TSC0042167
ttaggagataatt

SEQ ID NO: 168624 - DNA, 13 bp, Artificial Sequence
  Oligonucleotide for detection of SNP TSC0042167
aattatctcctaa

SEQ ID NO: 168625 - DNA, 13 bp, Artificial Sequence
  Oligonucleotide for detection of SNP TSC0042169
tggattatgaggt

SEQ ID NO: 168626 - DNA, 13 bp, Artificial Sequence
  Oligonucleotide for detection of SNP TSC0042169
acctcataatcca

SEQ ID NO: 168627 - DNA, 13 bp, Artificial Sequence
  Oligonucleotide for detection of SNP TSC0042169
tggattgtgaggt

SEQ ID NO: 168628 - DNA, 13 bp, Artificial Sequence
  Oligonucleotide for detection of SNP TSC0042169
acctcacaatcca

SEQ ID NO: 168629 - DNA, 13 bp, Artificial Sequence
  Oligonucleotide for detection of SNP TSC0042169
cggattatgaggt

SEQ ID NO: 168630 - DNA, 13 bp, Artificial Sequence
  Oligonucleotide for detection of SNP TSC0042169
acctcataatccg

SEQ ID NO: 168631 - DNA, 13 bp, Artificial Sequence
  Oligonucleotide for detection of SNP TSC0042169
cggattgtgaggt

SEQ ID NO: 168632 - DNA, 13 bp, Artificial Sequence
  Oligonucleotide for detection of SNP TSC0042169
acctcacaatccg

SEQ ID NO: 168633 - DNA, 13 bp, Artificial Sequence
  Oligonucleotide for detection of SNP TSC0042169
tggattacgaggt

SEQ ID NO: 168634 - DNA, 13 bp, Artificial Sequence
  Oligonucleotide for detection of SNP TSC0042169
acctcgtaatcca

SEQ ID NO: 168635 - DNA, 13 bp, Artificial Sequence
  Oligonucleotide for detection of SNP TSC0042169
tggatcgtgaggt

SEQ ID NO: 168636 - DNA, 13 bp, Artificial Sequence
  Oligonucleotide for detection of SNP TSC0042169
acctcacgatcca

SEQ ID NO: 168637 - DNA, 13 bp, Artificial Sequence
  Oligonucleotide for detection of SNP TSC0042169
cggattacgaggt

SEQ ID NO: 168638 - DNA, 13 bp, Artificial Sequence
  Oligonucleotide for detection of SNP TSC0042169
acctcgtaatccg

SEQ ID NO: 168639 - DNA, 13 bp, Artificial Sequence
  Oligonucleotide for detection of SNP TSC0042169
tggattgcgaggt

SEQ ID NO: 168640 - DNA, 13 bp, Artificial Sequence
  Oligonucleotide for detection of SNP TSC0042169
acctcgcaatcca

SEQ ID NO: 168641 - DNA, 13 bp, Artificial Sequence
  Oligonucleotide for detection of SNP TSC0042169
cggatcgtgaggt

SEQ ID NO: 168642 - DNA, 13 bp, Artificial Sequence
  Oligonucleotide for detection of SNP TSC0042169
acctcacgatccg

SEQ ID NO: 168643 - DNA, 13 bp, Artificial Sequence
  Oligonucleotide for detection of SNP TSC0042169
cggattgcgaggt

SEQ ID NO: 168644 - DNA, 13 bp, Artificial Sequence
  Oligonucleotide for detection of SNP TSC0042169
acctcgcaatccg

SEQ ID NO: 168645 - DNA, 13 bp, Artificial Sequence
  Oligonucleotide for detection of SNP TSC0042169
tggatcgcgaggt

SEQ ID NO: 168646 - DNA, 13 bp, Artificial Sequence
  Oligonucleotide for detection of SNP TSC0042169
acctcgcgatcca

SEQ ID NO: 168647 - DNA, 13 bp, Artificial Sequence
  Oligonucleotide for detection of SNP TSC0042169
cggatcgcgaggt

SEQ ID NO: 168648 - DNA, 13 bp, Artificial Sequence
  Oligonucleotide for detection of SNP TSC0042169
acctcgcgatccg

SEQ ID NO: 168649 - DNA, 13 bp, Artificial Sequence
  Oligonucleotide for detection of SNP TSC0042169
attttgcgatttg

SEQ ID NO: 168650 - DNA, 13 bp, Artificial Sequence
  Oligonucleotide for detection of SNP TSC0042169
caaatcgcaaaat

SEQ ID NO: 168651 - DNA, 13 bp, Artificial Sequence
  Oligonucleotide for detection of SNP TSC0042169
atttcgtgattcg

SEQ ID NO: 168652 - DNA, 13 bp, Artificial Sequence
  Oligonucleotide for detection of SNP TSC0042169
cgaatcacgaaat

SEQ ID NO: 168653 - DNA, 13 bp, Artificial Sequence
  Oligonucleotide for detection of SNP TSC0042169
atttcgcgatttg

SEQ ID NO: 168654 - DNA, 13 bp, Artificial Sequence
  Oligonucleotide for detection of SNP TSC0042169
caaatcgcgaaat

SEQ ID NO: 168655 - DNA, 13 bp, Artificial Sequence
  Oligonucleotide for detection of SNP TSC0042169
attttgcgattcg

SEQ ID NO: 168656 - DNA, 13 bp, Artificial Sequence
  Oligonucleotide for detection of SNP TSC0042169
cgaatcgcaaaat

SEQ ID NO: 168657 - DNA, 13 bp, Artificial Sequence
  Oligonucleotide for detection of SNP TSC0042169
atttcgcgattcg

SEQ ID NO: 168658 - DNA, 13 bp, Artificial Sequence
  Oligonucleotide for detection of SNP TSC0042169
cgaatcgcgaaat

SEQ ID NO: 168659 - DNA, 13 bp, Artificial Sequence
  Oligonucleotide for detection of SNP TSC0042170
gtaggtagagttt

SEQ ID NO: 168660 - DNA, 13 bp, Artificial Sequence
  Oligonucleotide for detection of SNP TSC0042170
aaactctacctac

SEQ ID NO: 168661 - DNA, 13 bp, Artificial Sequence
  Oligonucleotide for detection of SNP TSC0042170
gtaggtggagttt

SEQ ID NO: 168662 - DNA, 13 bp, Artificial Sequence
  Oligonucleotide for detection of SNP TSC0042170
aaactccacctac

SEQ ID NO: 168663 - DNA, 13 bp, Artificial Sequence
  Oligonucleotide for detection of SNP TSC0042170
gtaggcggagttt

SEQ ID NO: 168664 - DNA, 13 bp, Artificial Sequence
  Oligonucleotide for detection of SNP TSC0042170
aaactccgcctac

SEQ ID NO: 168665 - DNA, 13 bp, Artificial Sequence
  Oligonucleotide for detection of SNP TSC0042170
aaattttgtttay

SEQ ID NO: 168666 - DNA, 13 bp, Artificial Sequence
  Oligonucleotide for detection of SNP TSC0042170
rtaaacaaaattt

SEQ ID NO: 168667 - DNA, 13 bp, Artificial Sequence
  Oligonucleotide for detection of SNP TSC0042170
aaatttcgtttay

SEQ ID NO: 168668 - DNA, 13 bp, Artificial Sequence
  Oligonucleotide for detection of SNP TSC0042170
rtaaacgaaattt

SEQ ID NO: 168669 - DNA, 13 bp, Artificial Sequence
  Oligonucleotide for detection of SNP TSC0042176
agagttattattg

SEQ ID NO: 168670 - DNA, 13 bp, Artificial Sequence
  Oligonucleotide for detection of SNP TSC0042176
caataataactct

SEQ ID NO: 168671 - DNA, 13 bp, Artificial Sequence
  Oligonucleotide for detection of SNP TSC0042176
agagttgttattg

SEQ ID NO: 168672 - DNA, 13 bp, Artificial Sequence
  Oligonucleotide for detection of SNP TSC0042176
caataacaactct

SEQ ID NO: 168673 - DNA, 13 bp, Artificial Sequence
  Oligonucleotide for detection of SNP TSC0042176
agagtcgttattg

SEQ ID NO: 168674 - DNA, 13 bp, Artificial Sequence
  Oligonucleotide for detection of SNP TSC0042176
caataacgactct

SEQ ID NO: 168675 - DNA, 13 bp, Artificial Sequence
  Oligonucleotide for detection of SNP TSC0042176
taatgatgatttt

SEQ ID NO: 168676 - DNA, 13 bp, Artificial Sequence
  Oligonucleotide for detection of SNP TSC0042176
aaaatcatcatta

SEQ ID NO: 168677 - DNA, 13 bp, Artificial Sequence
  Oligonucleotide for detection of SNP TSC0042176
taatgacgatttt

SEQ ID NO: 168678 - DNA, 13 bp, Artificial Sequence
  Oligonucleotide for detection of SNP TSC0042176
aaaatcgtcatta

SEQ ID NO: 168679 - DNA, 13 bp, Artificial Sequence
  Oligonucleotide for detection of SNP TSC0042177
gaaaaatatagag

SEQ ID NO: 168680 - DNA, 13 bp, Artificial Sequence
  Oligonucleotide for detection of SNP TSC0042177
ctctatatttttc

SEQ ID NO: 168681 - DNA, 13 bp, Artificial Sequence
  Oligonucleotide for detection of SNP TSC0042177
gaaaaaaatagag

SEQ ID NO: 168682 - DNA, 13 bp, Artificial Sequence
  Oligonucleotide for detection of SNP TSC0042177
ctctatttttttc

SEQ ID NO: 168683 - DNA, 13 bp, Artificial Sequence
  Oligonucleotide for detection of SNP TSC0042182
tgaagattgtttt

SEQ ID NO: 168684 - DNA, 13 bp, Artificial Sequence
  Oligonucleotide for detection of SNP TSC0042182
aaaacaatcttca

SEQ ID NO: 168685 - DNA, 13 bp, Artificial Sequence
  Oligonucleotide for detection of SNP TSC0042182
tgaagagtgtttt

SEQ ID NO: 168686 - DNA, 13 bp, Artificial Sequence
  Oligonucleotide for detection of SNP TSC0042182
aaaacactcttca

SEQ ID NO: 168687 - DNA, 13 bp, Artificial Sequence
  Oligonucleotide for detection of SNP TSC0042182
cgaagattgtttt

SEQ ID NO: 168688 - DNA, 13 bp, Artificial Sequence
  Oligonucleotide for detection of SNP TSC0042182
aaaacaatcttcg

SEQ ID NO: 168689 - DNA, 13 bp, Artificial Sequence
  Oligonucleotide for detection of SNP TSC0042182
cgaagagtgtttt

SEQ ID NO: 168690 - DNA, 13 bp, Artificial Sequence
  Oligonucleotide for detection of SNP TSC0042182
aaaacactcttcg

SEQ ID NO: 168691 - DNA, 13 bp, Artificial Sequence
  Oligonucleotide for detection of SNP TSC0042182
aaaatagtttttg

SEQ ID NO: 168692 - DNA, 13 bp, Artificial Sequence
  Oligonucleotide for detection of SNP TSC0042182
caaaaactatttt

SEQ ID NO: 168693 - DNA, 13 bp, Artificial Sequence
  Oligonucleotide for detection of SNP TSC0042182
aaaatattttttg

SEQ ID NO: 168694 - DNA, 13 bp, Artificial Sequence
  Oligonucleotide for detection of SNP TSC0042182
caaaaaatatttt

SEQ ID NO: 168695 - DNA, 13 bp, Artificial Sequence
  Oligonucleotide for detection of SNP TSC0042182
aaaatagttttcg

SEQ ID NO: 168696 - DNA, 13 bp, Artificial Sequence
  Oligonucleotide for detection of SNP TSC0042182
cgaaaactatttt

SEQ ID NO: 168697 - DNA, 13 bp, Artificial Sequence
  Oligonucleotide for detection of SNP TSC0042182
aaaatatttttcg

SEQ ID NO: 168698 - DNA, 13 bp, Artificial Sequence
  Oligonucleotide for detection of SNP TSC0042182
cgaaaaatatttt

SEQ ID NO: 168699 - DNA, 13 bp, Artificial Sequence
  Oligonucleotide for detection of SNP TSC0042183
agttgtagggtgy

SEQ ID NO: 168700 - DNA, 13 bp, Artificial Sequence
  Oligonucleotide for detection of SNP TSC0042183
rcaccctacaact

SEQ ID NO: 168701 - DNA, 13 bp, Artificial Sequence
  Oligonucleotide for detection of SNP TSC0042183
agttgttgggtgy

SEQ ID NO: 168702 - DNA, 13 bp, Artificial Sequence
  Oligonucleotide for detection of SNP TSC0042183
rcacccaacaact

SEQ ID NO: 168703 - DNA, 13 bp, Artificial Sequence
  Oligonucleotide for detection of SNP TSC0042183
agttgtcgggtgy

SEQ ID NO: 168704 - DNA, 13 bp, Artificial Sequence
  Oligonucleotide for detection of SNP TSC0042183
rcacccgacaact

SEQ ID NO: 168705 - DNA, 13 bp, Artificial Sequence
  Oligonucleotide for detection of SNP TSC0042183
gtatttggtagtt

SEQ ID NO: 168706 - DNA, 13 bp, Artificial Sequence
  Oligonucleotide for detection of SNP TSC0042183
aactaccaaatac

SEQ ID NO: 168707 - DNA, 13 bp, Artificial Sequence
  Oligonucleotide for detection of SNP TSC0042183
gtattcggtagtt

SEQ ID NO: 168708 - DNA, 13 bp, Artificial Sequence
  Oligonucleotide for detection of SNP TSC0042183
aactaccgaatac

SEQ ID NO: 168709 - DNA, 13 bp, Artificial Sequence
  Oligonucleotide for detection of SNP TSC0007566
ttgagtatttata

SEQ ID NO: 168710 - DNA, 13 bp, Artificial Sequence
  Oligonucleotide for detection of SNP TSC0007566
tataaatactcaa

SEQ ID NO: 168711 - DNA, 13 bp, Artificial Sequence
  Oligonucleotide for detection of SNP TSC0007566
ttgagtgtttata

SEQ ID NO: 168712 - DNA, 13 bp, Artificial Sequence
  Oligonucleotide for detection of SNP TSC0007566
tataaacactcaa

SEQ ID NO: 168713 - DNA, 13 bp, Artificial Sequence
  Oligonucleotide for detection of SNP TSC0007567
ttaagtagtttty

SEQ ID NO: 168714 - DNA, 13 bp, Artificial Sequence
  Oligonucleotide for detection of SNP TSC0007567
raaaactacttaa

SEQ ID NO: 168715 - DNA, 13 bp, Artificial Sequence
  Oligonucleotide for detection of SNP TSC0007567
ttaagtggtttty

SEQ ID NO: 168716 - DNA, 13 bp, Artificial Sequence
  Oligonucleotide for detection of SNP TSC0007567
raaaaccacttaa

SEQ ID NO: 168717 - DNA, 13 bp, Artificial Sequence
  Oligonucleotide for detection of SNP TSC0042184
agggattttagtg

SEQ ID NO: 168718 - DNA, 13 bp, Artificial Sequence
  Oligonucleotide for detection of SNP TSC0042184
cactaaaatccct

SEQ ID NO: 168719 - DNA, 13 bp, Artificial Sequence
  Oligonucleotide for detection of SNP TSC0042184
agggatgttagtg

SEQ ID NO: 168720 - DNA, 13 bp, Artificial Sequence
  Oligonucleotide for detection of SNP TSC0042184
cactaacatccct

SEQ ID NO: 168721 - DNA, 13 bp, Artificial Sequence
  Oligonucleotide for detection of SNP TSC0042184
tattggtattttt

SEQ ID NO: 168722 - DNA, 13 bp, Artificial Sequence
  Oligonucleotide for detection of SNP TSC0042184
aaaaataccaata

SEQ ID NO: 168723 - DNA, 13 bp, Artificial Sequence
  Oligonucleotide for detection of SNP TSC0042185
attcggaaggttg

SEQ ID NO: 168724 - DNA, 13 bp, Artificial Sequence
  Oligonucleotide for detection of SNP TSC0042185
caaccttccgaat

SEQ ID NO: 168725 - DNA, 13 bp, Artificial Sequence
  Oligonucleotide for detection of SNP TSC0042185
attcgggaggttg

SEQ ID NO: 168726 - DNA, 13 bp, Artificial Sequence
  Oligonucleotide for detection of SNP TSC0042185
caacctcccgaat

SEQ ID NO: 168727 - DNA, 13 bp, Artificial Sequence
  Oligonucleotide for detection of SNP TSC0042189
gtaaaggattttt

SEQ ID NO: 168728 - DNA, 13 bp, Artificial Sequence
  Oligonucleotide for detection of SNP TSC0042189
aaaaatcctttac

SEQ ID NO: 168729 - DNA, 13 bp, Artificial Sequence
  Oligonucleotide for detection of SNP TSC0042189
gtaaagaattttt

SEQ ID NO: 168730 - DNA, 13 bp, Artificial Sequence
  Oligonucleotide for detection of SNP TSC0042189
aaaaattctttac

SEQ ID NO: 168731 - DNA, 13 bp, Artificial Sequence
  Oligonucleotide for detection of SNP TSC0042190
atattttgttgty

SEQ ID NO: 168732 - DNA, 13 bp, Artificial Sequence
  Oligonucleotide for detection of SNP TSC0042190
racaacaaaatat

SEQ ID NO: 168733 - DNA, 13 bp, Artificial Sequence
  Oligonucleotide for detection of SNP TSC0042190
atatttcgttgty

SEQ ID NO: 168734 - DNA, 13 bp, Artificial Sequence
  Oligonucleotide for detection of SNP TSC0042190
racaacgaaatat

SEQ ID NO: 168735 - DNA, 13 bp, Artificial Sequence
  Oligonucleotide for detection of SNP TSC0042190
gatagtggagtgt

SEQ ID NO: 168736 - DNA, 13 bp, Artificial Sequence
  Oligonucleotide for detection of SNP TSC0042190
acactccactatc

SEQ ID NO: 168737 - DNA, 13 bp, Artificial Sequence
  Oligonucleotide for detection of SNP TSC0042190
gatagtagagtgt

SEQ ID NO: 168738 - DNA, 13 bp, Artificial Sequence
  Oligonucleotide for detection of SNP TSC0042190
acactctactatc

SEQ ID NO: 168739 - DNA, 13 bp, Artificial Sequence
  Oligonucleotide for detection of SNP TSC0042190
gatagcggagtgt

SEQ ID NO: 168740 - DNA, 13 bp, Artificial Sequence
  Oligonucleotide for detection of SNP TSC0042190
acactccgctatc

SEQ ID NO: 168741 - DNA, 13 bp, Artificial Sequence
  Oligonucleotide for detection of SNP TSC0042193
aagaggatagatg

SEQ ID NO: 168742 - DNA, 13 bp, Artificial Sequence
  Oligonucleotide for detection of SNP TSC0042193
catctatcctctt

SEQ ID NO: 168743 - DNA, 13 bp, Artificial Sequence
  Oligonucleotide for detection of SNP TSC0042193
aagaggttagatg

SEQ ID NO: 168744 - DNA, 13 bp, Artificial Sequence
  Oligonucleotide for detection of SNP TSC0042193
catctaacctctt

SEQ ID NO: 168745 - DNA, 13 bp, Artificial Sequence
  Oligonucleotide for detection of SNP TSC0042193
aagaggatagacg

SEQ ID NO: 168746 - DNA, 13 bp, Artificial Sequence
  Oligonucleotide for detection of SNP TSC0042193
cgtctatcctctt

SEQ ID NO: 168747 - DNA, 13 bp, Artificial Sequence
  Oligonucleotide for detection of SNP TSC0042193
aagaggttagacg

SEQ ID NO: 168748 - DNA, 13 bp, Artificial Sequence
  Oligonucleotide for detection of SNP TSC0042193
cgtctaacctctt

SEQ ID NO: 168749 - DNA, 13 bp, Artificial Sequence
  Oligonucleotide for detection of SNP TSC0042193
cgtttattttttt

SEQ ID NO: 168750 - DNA, 13 bp, Artificial Sequence
  Oligonucleotide for detection of SNP TSC0042193
aaaaaaataaacg

SEQ ID NO: 168751 - DNA, 13 bp, Artificial Sequence
  Oligonucleotide for detection of SNP TSC0042193
cgtttaatttttt

SEQ ID NO: 168752 - DNA, 13 bp, Artificial Sequence
  Oligonucleotide for detection of SNP TSC0042193
aaaaaattaaacg

SEQ ID NO: 168753 - DNA, 13 bp, Artificial Sequence
  Oligonucleotide for detection of SNP TSC0042194
tggggatgaatta

SEQ ID NO: 168754 - DNA, 13 bp, Artificial Sequence
  Oligonucleotide for detection of SNP TSC0042194
taattcatcccca

SEQ ID NO: 168755 - DNA, 13 bp, Artificial Sequence
  Oligonucleotide for detection of SNP TSC0042194
tggggaggaatta

SEQ ID NO: 168756 - DNA, 13 bp, Artificial Sequence
  Oligonucleotide for detection of SNP TSC0042194
taattcctcccca

SEQ ID NO: 168757 - DNA, 13 bp, Artificial Sequence
  Oligonucleotide for detection of SNP TSC0042194
tggggacgaatta

SEQ ID NO: 168758 - DNA, 13 bp, Artificial Sequence
  Oligonucleotide for detection of SNP TSC0042194
taattcgtcccca

SEQ ID NO: 168759 - DNA, 13 bp, Artificial Sequence
  Oligonucleotide for detection of SNP TSC0042194
tgatttgttttta

SEQ ID NO: 168760 - DNA, 13 bp, Artificial Sequence
  Oligonucleotide for detection of SNP TSC0042194
taaaaacaaatca

SEQ ID NO: 168761 - DNA, 13 bp, Artificial Sequence
  Oligonucleotide for detection of SNP TSC0042194
tgattttttttta

SEQ ID NO: 168762 - DNA, 13 bp, Artificial Sequence
  Oligonucleotide for detection of SNP TSC0042194
taaaaaaaaatca

SEQ ID NO: 168763 - DNA, 13 bp, Artificial Sequence
  Oligonucleotide for detection of SNP TSC0042194
tgattcgttttta

SEQ ID NO: 168764 - DNA, 13 bp, Artificial Sequence
  Oligonucleotide for detection of SNP TSC0042194
taaaaacgaatca

SEQ ID NO: 168765 - DNA, 13 bp, Artificial Sequence
  Oligonucleotide for detection of SNP TSC0042195
tttaaatgattgg

SEQ ID NO: 168766 - DNA, 13 bp, Artificial Sequence
  Oligonucleotide for detection of SNP TSC0042195
ccaatcatttaaa

SEQ ID NO: 168767 - DNA, 13 bp, Artificial Sequence
  Oligonucleotide for detection of SNP TSC0042195
tttaaacgattgg

SEQ ID NO: 168768 - DNA, 13 bp, Artificial Sequence
  Oligonucleotide for detection of SNP TSC0042195
ccaatcgtttaaa

SEQ ID NO: 168769 - DNA, 13 bp, Artificial Sequence
  Oligonucleotide for detection of SNP TSC0042195
ttagttgtttgaa

SEQ ID NO: 168770 - DNA, 13 bp, Artificial Sequence
  Oligonucleotide for detection of SNP TSC0042195
ttcaaacaactaa

SEQ ID NO: 168771 - DNA, 13 bp, Artificial Sequence
  Oligonucleotide for detection of SNP TSC0042195
ttagttatttgaa

SEQ ID NO: 168772 - DNA, 13 bp, Artificial Sequence
  Oligonucleotide for detection of SNP TSC0042195
ttcaaataactaa

SEQ ID NO: 168773 - DNA, 13 bp, Artificial Sequence
  Oligonucleotide for detection of SNP TSC0042195
ttagtcgtttgaa

SEQ ID NO: 168774 - DNA, 13 bp, Artificial Sequence
  Oligonucleotide for detection of SNP TSC0042195
ttcaaacgactaa

SEQ ID NO: 168775 - DNA, 13 bp, Artificial Sequence
  Oligonucleotide for detection of SNP TSC0042196
gtatatgtttttt

SEQ ID NO: 168776 - DNA, 13 bp, Artificial Sequence
  Oligonucleotide for detection of SNP TSC0042196
aaaaaacatatac

SEQ ID NO: 168777 - DNA, 13 bp, Artificial Sequence
  Oligonucleotide for detection of SNP TSC0042196
gtatatatttttt

SEQ ID NO: 168778 - DNA, 13 bp, Artificial Sequence
  Oligonucleotide for detection of SNP TSC0042196
aaaaaatatatac

SEQ ID NO: 168779 - DNA, 13 bp, Artificial Sequence
  Oligonucleotide for detection of SNP TSC0042197
gtggtgatttttg

SEQ ID NO: 168780 - DNA, 13 bp, Artificial Sequence
  Oligonucleotide for detection of SNP TSC0042197
caaaaatcaccac

SEQ ID NO: 168781 - DNA, 13 bp, Artificial Sequence
  Oligonucleotide for detection of SNP TSC0042197
gtggtggtttttg

SEQ ID NO: 168782 - DNA, 13 bp, Artificial Sequence
  Oligonucleotide for detection of SNP TSC0042197
caaaaaccaccac

SEQ ID NO: 168783 - DNA, 13 bp, Artificial Sequence
  Oligonucleotide for detection of SNP TSC0005148
ttgaatgttttgt

SEQ ID NO: 168784 - DNA, 13 bp, Artificial Sequence
  Oligonucleotide for detection of SNP TSC0005148
acaaaacattcaa

SEQ ID NO: 168785 - DNA, 13 bp, Artificial Sequence
  Oligonucleotide for detection of SNP TSC0005148
ttgaatattttgt

SEQ ID NO: 168786 - DNA, 13 bp, Artificial Sequence
  Oligonucleotide for detection of SNP TSC0005148
acaaaatattcaa

SEQ ID NO: 168787 - DNA, 13 bp, Artificial Sequence
  Oligonucleotide for detection of SNP TSC0004797
taatttgtaattt

SEQ ID NO: 168788 - DNA, 13 bp, Artificial Sequence
  Oligonucleotide for detection of SNP TSC0004797
aaattacaaatta

SEQ ID NO: 168789 - DNA, 13 bp, Artificial Sequence
  Oligonucleotide for detection of SNP TSC0004797
aaattaaaaattg

SEQ ID NO: 168790 - DNA, 13 bp, Artificial Sequence
  Oligonucleotide for detection of SNP TSC0004797
caatttttaattt

SEQ ID NO: 168791 - DNA, 13 bp, Artificial Sequence
  Oligonucleotide for detection of SNP TSC0004797
aaattataaattg

SEQ ID NO: 168792 - DNA, 13 bp, Artificial Sequence
  Oligonucleotide for detection of SNP TSC0004797
caatttataattt

SEQ ID NO: 168793 - DNA, 13 bp, Artificial Sequence
  Oligonucleotide for detection of SNP TSC0042199
tattttagatttt

SEQ ID NO: 168794 - DNA, 13 bp, Artificial Sequence
  Oligonucleotide for detection of SNP TSC0042199
aaaatctaaaata

SEQ ID NO: 168795 - DNA, 13 bp, Artificial Sequence
  Oligonucleotide for detection of SNP TSC0042199
tattttggatttt

SEQ ID NO: 168796 - DNA, 13 bp, Artificial Sequence
  Oligonucleotide for detection of SNP TSC0042199
aaaatccaaaata

SEQ ID NO: 168797 - DNA, 13 bp, Artificial Sequence
  Oligonucleotide for detection of SNP TSC0042200
gaatttatgttty

SEQ ID NO: 168798 - DNA, 13 bp, Artificial Sequence
  Oligonucleotide for detection of SNP TSC0042200
raaacataaattc

SEQ ID NO: 168799 - DNA, 13 bp, Artificial Sequence
  Oligonucleotide for detection of SNP TSC0042200
gaatttgtgttty

SEQ ID NO: 168800 - DNA, 13 bp, Artificial Sequence
  Oligonucleotide for detection of SNP TSC0042200
raaacacaaattc

SEQ ID NO: 168801 - DNA, 13 bp, Artificial Sequence
  Oligonucleotide for detection of SNP TSC0042200
gaattcgtgttty

SEQ ID NO: 168802 - DNA, 13 bp, Artificial Sequence
  Oligonucleotide for detection of SNP TSC0042200
raaacacgaattc

SEQ ID NO: 168803 - DNA, 13 bp, Artificial Sequence
  Oligonucleotide for detection of SNP TSC0042200
gaagtatgaatty

SEQ ID NO: 168804 - DNA, 13 bp, Artificial Sequence
  Oligonucleotide for detection of SNP TSC0042200
raattcatacttc

SEQ ID NO: 168805 - DNA, 13 bp, Artificial Sequence
  Oligonucleotide for detection of SNP TSC0042200
gaagtacgaatty

SEQ ID NO: 168806 - DNA, 13 bp, Artificial Sequence
  Oligonucleotide for detection of SNP TSC0042200
raattcgtacttc

SEQ ID NO: 168807 - DNA, 13 bp, Artificial Sequence
  Oligonucleotide for detection of SNP TSC0042201
ggggtataatgtt

SEQ ID NO: 168808 - DNA, 13 bp, Artificial Sequence
  Oligonucleotide for detection of SNP TSC0042201
aacattatacccc

SEQ ID NO: 168809 - DNA, 13 bp, Artificial Sequence
  Oligonucleotide for detection of SNP TSC0042201
ggggtagaatgtt

SEQ ID NO: 168810 - DNA, 13 bp, Artificial Sequence
  Oligonucleotide for detection of SNP TSC0042201
aacattctacccc

SEQ ID NO: 168811 - DNA, 13 bp, Artificial Sequence
  Oligonucleotide for detection of SNP TSC0042201
agtattgtgttty

SEQ ID NO: 168812 - DNA, 13 bp, Artificial Sequence
  Oligonucleotide for detection of SNP TSC0042201
raaacacaatact

SEQ ID NO: 168813 - DNA, 13 bp, Artificial Sequence
  Oligonucleotide for detection of SNP TSC0042201
agtattttgttty

SEQ ID NO: 168814 - DNA, 13 bp, Artificial Sequence
  Oligonucleotide for detection of SNP TSC0042201
raaacaaaatact

SEQ ID NO: 168815 - DNA, 13 bp, Artificial Sequence
  Oligonucleotide for detection of SNP TSC0042204
tttattaaaaaty

SEQ ID NO: 168816 - DNA, 13 bp, Artificial Sequence
  Oligonucleotide for detection of SNP TSC0042204
ratttttaataaa

SEQ ID NO: 168817 - DNA, 13 bp, Artificial Sequence
  Oligonucleotide for detection of SNP TSC0042204
tttattgaaaaty

SEQ ID NO: 168818 - DNA, 13 bp, Artificial Sequence
  Oligonucleotide for detection of SNP TSC0042204
rattttcaataaa

SEQ ID NO: 168819 - DNA, 13 bp, Artificial Sequence
  Oligonucleotide for detection of SNP TSC0042205
gaatttgaggagt

SEQ ID NO: 168820 - DNA, 13 bp, Artificial Sequence
  Oligonucleotide for detection of SNP TSC0042205
actcctcaaattc

SEQ ID NO: 168821 - DNA, 13 bp, Artificial Sequence
  Oligonucleotide for detection of SNP TSC0042205
gaatttaaggagt

SEQ ID NO: 168822 - DNA, 13 bp, Artificial Sequence
  Oligonucleotide for detection of SNP TSC0042205
actccttaaattc

SEQ ID NO: 168823 - DNA, 13 bp, Artificial Sequence
  Oligonucleotide for detection of SNP TSC0042206
atagaggttattt

SEQ ID NO: 168824 - DNA, 13 bp, Artificial Sequence
  Oligonucleotide for detection of SNP TSC0042206
aaataacctctat

SEQ ID NO: 168825 - DNA, 13 bp, Artificial Sequence
  Oligonucleotide for detection of SNP TSC0042206
atagagattattt

SEQ ID NO: 168826 - DNA, 13 bp, Artificial Sequence
  Oligonucleotide for detection of SNP TSC0042206
aaataatctctat

SEQ ID NO: 168827 - DNA, 13 bp, Artificial Sequence
  Oligonucleotide for detection of SNP TSC0042207
tgtaaaggtaata

SEQ ID NO: 168828 - DNA, 13 bp, Artificial Sequence
  Oligonucleotide for detection of SNP TSC0042207
tattacctttaca

SEQ ID NO: 168829 - DNA, 13 bp, Artificial Sequence
  Oligonucleotide for detection of SNP TSC0042207
tgtaaaagtaata

SEQ ID NO: 168830 - DNA, 13 bp, Artificial Sequence
  Oligonucleotide for detection of SNP TSC0042207
tattacttttaca

SEQ ID NO: 168831 - DNA, 13 bp, Artificial Sequence
  Oligonucleotide for detection of SNP TSC0007369
attatcgtagttt

SEQ ID NO: 168832 - DNA, 13 bp, Artificial Sequence
  Oligonucleotide for detection of SNP TSC0007369
aaactacgataat

SEQ ID NO: 168833 - DNA, 13 bp, Artificial Sequence
  Oligonucleotide for detection of SNP TSC0007369
aagttatgatgat

SEQ ID NO: 168834 - DNA, 13 bp, Artificial Sequence
  Oligonucleotide for detection of SNP TSC0007369
atcatcataactt

SEQ ID NO: 168835 - DNA, 13 bp, Artificial Sequence
  Oligonucleotide for detection of SNP TSC0007369
aagttacgatgat

SEQ ID NO: 168836 - DNA, 13 bp, Artificial Sequence
  Oligonucleotide for detection of SNP TSC0007369
atcatcgtaactt

SEQ ID NO: 168837 - DNA, 13 bp, Artificial Sequence
  Oligonucleotide for detection of SNP TSC0042211
tatgtgttaatat

SEQ ID NO: 168838 - DNA, 13 bp, Artificial Sequence
  Oligonucleotide for detection of SNP TSC0042211
atattaacacata

SEQ ID NO: 168839 - DNA, 13 bp, Artificial Sequence
  Oligonucleotide for detection of SNP TSC0042211
tatgtggtaatat

SEQ ID NO: 168840 - DNA, 13 bp, Artificial Sequence
  Oligonucleotide for detection of SNP TSC0042211
atattaccacata

SEQ ID NO: 168841 - DNA, 13 bp, Artificial Sequence
  Oligonucleotide for detection of SNP TSC0042211
atattggtatata

SEQ ID NO: 168842 - DNA, 13 bp, Artificial Sequence
  Oligonucleotide for detection of SNP TSC0042211
tatataccaatat

SEQ ID NO: 168843 - DNA, 13 bp, Artificial Sequence
  Oligonucleotide for detection of SNP TSC0042211
atattgttatata

SEQ ID NO: 168844 - DNA, 13 bp, Artificial Sequence
  Oligonucleotide for detection of SNP TSC0042211
tatataacaatat

SEQ ID NO: 168845 - DNA, 13 bp, Artificial Sequence
  Oligonucleotide for detection of SNP TSC0042212
atgttaggtagay

SEQ ID NO: 168846 - DNA, 13 bp, Artificial Sequence
  Oligonucleotide for detection of SNP TSC0042212
rtctacctaacat

SEQ ID NO: 168847 - DNA, 13 bp, Artificial Sequence
  Oligonucleotide for detection of SNP TSC0042212
atgttaagtagay

SEQ ID NO: 168848 - DNA, 13 bp, Artificial Sequence
  Oligonucleotide for detection of SNP TSC0042212
rtctacttaacat

SEQ ID NO: 168849 - DNA, 13 bp, Artificial Sequence
  Oligonucleotide for detection of SNP TSC0042217
aagaataaaaagy

SEQ ID NO: 168850 - DNA, 13 bp, Artificial Sequence
  Oligonucleotide for detection of SNP TSC0042217
rctttttattctt

SEQ ID NO: 168851 - DNA, 13 bp, Artificial Sequence
  Oligonucleotide for detection of SNP TSC0042217
aagaattaaaagy

SEQ ID NO: 168852 - DNA, 13 bp, Artificial Sequence
  Oligonucleotide for detection of SNP TSC0042217
rcttttaattctt

SEQ ID NO: 168853 - DNA, 13 bp, Artificial Sequence
  Oligonucleotide for detection of SNP TSC0042218
aagtatataataa

SEQ ID NO: 168854 - DNA, 13 bp, Artificial Sequence
  Oligonucleotide for detection of SNP TSC0042218
ttattatatactt

SEQ ID NO: 168855 - DNA, 13 bp, Artificial Sequence
  Oligonucleotide for detection of SNP TSC0042218
aagtatgtaataa

SEQ ID NO: 168856 - DNA, 13 bp, Artificial Sequence
  Oligonucleotide for detection of SNP TSC0042218
ttattacatactt

SEQ ID NO: 168857 - DNA, 13 bp, Artificial Sequence
  Oligonucleotide for detection of SNP TSC0042218
aagtacgtaataa

SEQ ID NO: 168858 - DNA, 13 bp, Artificial Sequence
  Oligonucleotide for detection of SNP TSC0042218
ttattacgtactt

SEQ ID NO: 168859 - DNA, 13 bp, Artificial Sequence
  Oligonucleotide for detection of SNP TSC0042218
ttattgtgtattt

SEQ ID NO: 168860 - DNA, 13 bp, Artificial Sequence
  Oligonucleotide for detection of SNP TSC0042218
aaatacacaataa

SEQ ID NO: 168861 - DNA, 13 bp, Artificial Sequence
  Oligonucleotide for detection of SNP TSC0042218
ttattgcgtattt

SEQ ID NO: 168862 - DNA, 13 bp, Artificial Sequence
  Oligonucleotide for detection of SNP TSC0042218
aaatacgcaataa

SEQ ID NO: 168863 - DNA, 13 bp, Artificial Sequence
  Oligonucleotide for detection of SNP TSC0042219
gatatgtggtagt

SEQ ID NO: 168864 - DNA, 13 bp, Artificial Sequence
  Oligonucleotide for detection of SNP TSC0042219
actaccacatatc

SEQ ID NO: 168865 - DNA, 13 bp, Artificial Sequence
  Oligonucleotide for detection of SNP TSC0042219
gatatgcggtagt

SEQ ID NO: 168866 - DNA, 13 bp, Artificial Sequence
  Oligonucleotide for detection of SNP TSC0042219
actaccgcatatc

SEQ ID NO: 168867 - DNA, 13 bp, Artificial Sequence
  Oligonucleotide for detection of SNP TSC0042219
attatcgtataty

SEQ ID NO: 168868 - DNA, 13 bp, Artificial Sequence
  Oligonucleotide for detection of SNP TSC0042219
ratatacgataat

SEQ ID NO: 168869 - DNA, 13 bp, Artificial Sequence
  Oligonucleotide for detection of SNP TSC0042220
aatataagttaaa

SEQ ID NO: 168870 - DNA, 13 bp, Artificial Sequence
  Oligonucleotide for detection of SNP TSC0042220
tttaacttatatt

SEQ ID NO: 168871 - DNA, 13 bp, Artificial Sequence
  Oligonucleotide for detection of SNP TSC0042220
aatataggttaaa

SEQ ID NO: 168872 - DNA, 13 bp, Artificial Sequence
  Oligonucleotide for detection of SNP TSC0042220
tttaacctatatt

SEQ ID NO: 168873 - DNA, 13 bp, Artificial Sequence
  Oligonucleotide for detection of SNP TSC0042221
gttgataagatta

SEQ ID NO: 168874 - DNA, 13 bp, Artificial Sequence
  Oligonucleotide for detection of SNP TSC0042221
taatcttatcaac

SEQ ID NO: 168875 - DNA, 13 bp, Artificial Sequence
  Oligonucleotide for detection of SNP TSC0042221
gttgatgagatta

SEQ ID NO: 168876 - DNA, 13 bp, Artificial Sequence
  Oligonucleotide for detection of SNP TSC0042221
taatctcatcaac

SEQ ID NO: 168877 - DNA, 13 bp, Artificial Sequence
  Oligonucleotide for detection of SNP TSC0042221
gttgacgagatta

SEQ ID NO: 168878 - DNA, 13 bp, Artificial Sequence
  Oligonucleotide for detection of SNP TSC0042221
taatctcgtcaac

SEQ ID NO: 168879 - DNA, 13 bp, Artificial Sequence
  Oligonucleotide for detection of SNP TSC0042221
tagttttgttagy

SEQ ID NO: 168880 - DNA, 13 bp, Artificial Sequence
  Oligonucleotide for detection of SNP TSC0042221
rctaacaaaacta

SEQ ID NO: 168881 - DNA, 13 bp, Artificial Sequence
  Oligonucleotide for detection of SNP TSC0042221
tagtttcgttagy

SEQ ID NO: 168882 - DNA, 13 bp, Artificial Sequence
  Oligonucleotide for detection of SNP TSC0042221
rctaacgaaacta

SEQ ID NO: 168883 - DNA, 13 bp, Artificial Sequence
  Oligonucleotide for detection of SNP TSC0042222
gggtttagttttg

SEQ ID NO: 168884 - DNA, 13 bp, Artificial Sequence
  Oligonucleotide for detection of SNP TSC0042222
caaaactaaaccc

SEQ ID NO: 168885 - DNA, 13 bp, Artificial Sequence
  Oligonucleotide for detection of SNP TSC0042222
gggtttggttttg

SEQ ID NO: 168886 - DNA, 13 bp, Artificial Sequence
  Oligonucleotide for detection of SNP TSC0042222
caaaaccaaaccc

SEQ ID NO: 168887 - DNA, 13 bp, Artificial Sequence
  Oligonucleotide for detection of SNP TSC0042223
gttatgtgaaatt

SEQ ID NO: 168888 - DNA, 13 bp, Artificial Sequence
  Oligonucleotide for detection of SNP TSC0042223
aatttcacataac

SEQ ID NO: 168889 - DNA, 13 bp, Artificial Sequence
  Oligonucleotide for detection of SNP TSC0042223
gttatgcgaaatt

SEQ ID NO: 168890 - DNA, 13 bp, Artificial Sequence
  Oligonucleotide for detection of SNP TSC0042223
aatttcgcataac

SEQ ID NO: 168891 - DNA, 13 bp, Artificial Sequence
  Oligonucleotide for detection of SNP TSC0042223
aattttgtatggy

SEQ ID NO: 168892 - DNA, 13 bp, Artificial Sequence
  Oligonucleotide for detection of SNP TSC0042223
rccatacaaaatt

SEQ ID NO: 168893 - DNA, 13 bp, Artificial Sequence
  Oligonucleotide for detection of SNP TSC0042223
aattttatatggy

SEQ ID NO: 168894 - DNA, 13 bp, Artificial Sequence
  Oligonucleotide for detection of SNP TSC0042223
rccatataaaatt

SEQ ID NO: 168895 - DNA, 13 bp, Artificial Sequence
  Oligonucleotide for detection of SNP TSC0042223
aatttcgtatggy

SEQ ID NO: 168896 - DNA, 13 bp, Artificial Sequence
  Oligonucleotide for detection of SNP TSC0042223
rccatacgaaatt

SEQ ID NO: 168897 - DNA, 13 bp, Artificial Sequence
  Oligonucleotide for detection of SNP TSC0005063
taatatatgttga

SEQ ID NO: 168898 - DNA, 13 bp, Artificial Sequence
  Oligonucleotide for detection of SNP TSC0005063
tcaacatatatta

SEQ ID NO: 168899 - DNA, 13 bp, Artificial Sequence
  Oligonucleotide for detection of SNP TSC0005063
taatatgtgttga

SEQ ID NO: 168900 - DNA, 13 bp, Artificial Sequence
  Oligonucleotide for detection of SNP TSC0005063
tcaacacatatta

SEQ ID NO: 168901 - DNA, 13 bp, Artificial Sequence
  Oligonucleotide for detection of SNP TSC0042224
tttaatgtgttag

SEQ ID NO: 168902 - DNA, 13 bp, Artificial Sequence
  Oligonucleotide for detection of SNP TSC0042224
ctaacacattaaa

SEQ ID NO: 168903 - DNA, 13 bp, Artificial Sequence
  Oligonucleotide for detection of SNP TSC0042224
tttaatatgttag

SEQ ID NO: 168904 - DNA, 13 bp, Artificial Sequence
  Oligonucleotide for detection of SNP TSC0042224
ctaacatattaaa

SEQ ID NO: 168905 - DNA, 13 bp, Artificial Sequence
  Oligonucleotide for detection of SNP TSC0009209
tttgtttgtgtgt

SEQ ID NO: 168906 - DNA, 13 bp, Artificial Sequence
  Oligonucleotide for detection of SNP TSC0009209
acacacaaacaaa

SEQ ID NO: 168907 - DNA, 13 bp, Artificial Sequence
  Oligonucleotide for detection of SNP TSC0009209
tttgttcgtgtgt

SEQ ID NO: 168908 - DNA, 13 bp, Artificial Sequence
  Oligonucleotide for detection of SNP TSC0009209
acacacgaacaaa

SEQ ID NO: 168909 - DNA, 13 bp, Artificial Sequence
  Oligonucleotide for detection of SNP TSC0042225
tttggtttgtgag

SEQ ID NO: 168910 - DNA, 13 bp, Artificial Sequence
  Oligonucleotide for detection of SNP TSC0042225
ctcacaaaccaaa

SEQ ID NO: 168911 - DNA, 13 bp, Artificial Sequence
  Oligonucleotide for detection of SNP TSC0042225
tttggtgtgtgag

SEQ ID NO: 168912 - DNA, 13 bp, Artificial Sequence
  Oligonucleotide for detection of SNP TSC0042225
ctcacacaccaaa

SEQ ID NO: 168913 - DNA, 13 bp, Artificial Sequence
  Oligonucleotide for detection of SNP TSC0042225
tttggcgtgtgag

SEQ ID NO: 168914 - DNA, 13 bp, Artificial Sequence
  Oligonucleotide for detection of SNP TSC0042225
ctcacacgccaaa

SEQ ID NO: 168915 - DNA, 13 bp, Artificial Sequence
  Oligonucleotide for detection of SNP TSC0042225
tttataggttaaa

SEQ ID NO: 168916 - DNA, 13 bp, Artificial Sequence
  Oligonucleotide for detection of SNP TSC0042225
tttaacctataaa

SEQ ID NO: 168917 - DNA, 13 bp, Artificial Sequence
  Oligonucleotide for detection of SNP TSC0042225
tttatatgttaaa

SEQ ID NO: 168918 - DNA, 13 bp, Artificial Sequence
  Oligonucleotide for detection of SNP TSC0042225
tttaacatataaa

SEQ ID NO: 168919 - DNA, 13 bp, Artificial Sequence
  Oligonucleotide for detection of SNP TSC0042225
tttatacgttaaa

SEQ ID NO: 168920 - DNA, 13 bp, Artificial Sequence
  Oligonucleotide for detection of SNP TSC0042225
tttaacgtataaa

SEQ ID NO: 168921 - DNA, 13 bp, Artificial Sequence
  Oligonucleotide for detection of SNP TSC0042226
attttagtaaatt

SEQ ID NO: 168922 - DNA, 13 bp, Artificial Sequence
  Oligonucleotide for detection of SNP TSC0042226
aatttactaaaat

SEQ ID NO: 168923 - DNA, 13 bp, Artificial Sequence
  Oligonucleotide for detection of SNP TSC0042226
attttaataaatt

SEQ ID NO: 168924 - DNA, 13 bp, Artificial Sequence
  Oligonucleotide for detection of SNP TSC0042226
aatttattaaaat

SEQ ID NO: 168925 - DNA, 13 bp, Artificial Sequence
  Oligonucleotide for detection of SNP TSC0008427
tttattataagty

SEQ ID NO: 168926 - DNA, 13 bp, Artificial Sequence
  Oligonucleotide for detection of SNP TSC0008427
racttataataaa

SEQ ID NO: 168927 - DNA, 13 bp, Artificial Sequence
  Oligonucleotide for detection of SNP TSC0008427
tttattgtaagty

SEQ ID NO: 168928 - DNA, 13 bp, Artificial Sequence
  Oligonucleotide for detection of SNP TSC0008427
racttacaataaa

SEQ ID NO: 168929 - DNA, 13 bp, Artificial Sequence
  Oligonucleotide for detection of SNP TSC0008427
tttatcgtaagty

SEQ ID NO: 168930 - DNA, 13 bp, Artificial Sequence
  Oligonucleotide for detection of SNP TSC0008427
racttacgataaa

SEQ ID NO: 168931 - DNA, 13 bp, Artificial Sequence
  Oligonucleotide for detection of SNP TSC0008427
gatttatgatagg

SEQ ID NO: 168932 - DNA, 13 bp, Artificial Sequence
  Oligonucleotide for detection of SNP TSC0008427
cctatcataaatc

SEQ ID NO: 168933 - DNA, 13 bp, Artificial Sequence
  Oligonucleotide for detection of SNP TSC0008427
gatttacgatagg

SEQ ID NO: 168934 - DNA, 13 bp, Artificial Sequence
  Oligonucleotide for detection of SNP TSC0008427
cctatcgtaaatc

SEQ ID NO: 168935 - DNA, 13 bp, Artificial Sequence
  Oligonucleotide for detection of SNP TSC0008428
agttttatgggtt

SEQ ID NO: 168936 - DNA, 13 bp, Artificial Sequence
  Oligonucleotide for detection of SNP TSC0008428
aacccataaaact

SEQ ID NO: 168937 - DNA, 13 bp, Artificial Sequence
  Oligonucleotide for detection of SNP TSC0008428
agttttgtgggtt

SEQ ID NO: 168938 - DNA, 13 bp, Artificial Sequence
  Oligonucleotide for detection of SNP TSC0008428
aacccacaaaact

SEQ ID NO: 168939 - DNA, 13 bp, Artificial Sequence
  Oligonucleotide for detection of SNP TSC0042227
tatatagataatg

SEQ ID NO: 168940 - DNA, 13 bp, Artificial Sequence
  Oligonucleotide for detection of SNP TSC0042227
cattatctatata

SEQ ID NO: 168941 - DNA, 13 bp, Artificial Sequence
  Oligonucleotide for detection of SNP TSC0042227
tatataaataatg

SEQ ID NO: 168942 - DNA, 13 bp, Artificial Sequence
  Oligonucleotide for detection of SNP TSC0042227
cattatttatata

SEQ ID NO: 168943 - DNA, 13 bp, Artificial Sequence
  Oligonucleotide for detection of SNP TSC0042227
tatatagataacg

SEQ ID NO: 168944 - DNA, 13 bp, Artificial Sequence
  Oligonucleotide for detection of SNP TSC0042227
cgttatctatata

SEQ ID NO: 168945 - DNA, 13 bp, Artificial Sequence
  Oligonucleotide for detection of SNP TSC0042227
tatataaataacg

SEQ ID NO: 168946 - DNA, 13 bp, Artificial Sequence
  Oligonucleotide for detection of SNP TSC0042227
cgttatttatata

SEQ ID NO: 168947 - DNA, 13 bp, Artificial Sequence
  Oligonucleotide for detection of SNP TSC0042228
tatagagagaaag

SEQ ID NO: 168948 - DNA, 13 bp, Artificial Sequence
  Oligonucleotide for detection of SNP TSC0042228
ctttctctctata

SEQ ID NO: 168949 - DNA, 13 bp, Artificial Sequence
  Oligonucleotide for detection of SNP TSC0042228
tatagatagaaag

SEQ ID NO: 168950 - DNA, 13 bp, Artificial Sequence
  Oligonucleotide for detection of SNP TSC0042228
ctttctatctata

SEQ ID NO: 168951 - DNA, 13 bp, Artificial Sequence
  Oligonucleotide for detection of SNP TSC0042229
tttggttgtgatg

SEQ ID NO: 168952 - DNA, 13 bp, Artificial Sequence
  Oligonucleotide for detection of SNP TSC0042229
catcacaaccaaa

SEQ ID NO: 168953 - DNA, 13 bp, Artificial Sequence
  Oligonucleotide for detection of SNP TSC0042229
tttggtcgtgatg

SEQ ID NO: 168954 - DNA, 13 bp, Artificial Sequence
  Oligonucleotide for detection of SNP TSC0042229
catcacgaccaaa

SEQ ID NO: 168955 - DNA, 13 bp, Artificial Sequence
  Oligonucleotide for detection of SNP TSC0042229
tattatggttaaa

SEQ ID NO: 168956 - DNA, 13 bp, Artificial Sequence
  Oligonucleotide for detection of SNP TSC0042229
tttaaccataata

SEQ ID NO: 168957 - DNA, 13 bp, Artificial Sequence
  Oligonucleotide for detection of SNP TSC0042229
tattatagttaaa

SEQ ID NO: 168958 - DNA, 13 bp, Artificial Sequence
  Oligonucleotide for detection of SNP TSC0042229
tttaactataata

SEQ ID NO: 168959 - DNA, 13 bp, Artificial Sequence
  Oligonucleotide for detection of SNP TSC0042229
tattacggttaaa

SEQ ID NO: 168960 - DNA, 13 bp, Artificial Sequence
  Oligonucleotide for detection of SNP TSC0042229
tttaaccgtaata

SEQ ID NO: 168961 - DNA, 13 bp, Artificial Sequence
  Oligonucleotide for detection of SNP TSC0006496
tagaatatgaaaa

SEQ ID NO: 168962 - DNA, 13 bp, Artificial Sequence
  Oligonucleotide for detection of SNP TSC0006496
ttttcatattcta

SEQ ID NO: 168963 - DNA, 13 bp, Artificial Sequence
  Oligonucleotide for detection of SNP TSC0006496
tagaatgtgaaaa

SEQ ID NO: 168964 - DNA, 13 bp, Artificial Sequence
  Oligonucleotide for detection of SNP TSC0006496
ttttcacattcta

SEQ ID NO: 168965 - DNA, 13 bp, Artificial Sequence
  Oligonucleotide for detection of SNP TSC0006496
tagaacgtgaaaa

SEQ ID NO: 168966 - DNA, 13 bp, Artificial Sequence
  Oligonucleotide for detection of SNP TSC0006496
ttttcacgttcta

SEQ ID NO: 168967 - DNA, 13 bp, Artificial Sequence
  Oligonucleotide for detection of SNP TSC0042231
ttgaatatgaata

SEQ ID NO: 168968 - DNA, 13 bp, Artificial Sequence
  Oligonucleotide for detection of SNP TSC0042231
tattcatattcaa

SEQ ID NO: 168969 - DNA, 13 bp, Artificial Sequence
  Oligonucleotide for detection of SNP TSC0042231
ttgaatgtgaata

SEQ ID NO: 168970 - DNA, 13 bp, Artificial Sequence
  Oligonucleotide for detection of SNP TSC0042231
tattcacattcaa

SEQ ID NO: 168971 - DNA, 13 bp, Artificial Sequence
  Oligonucleotide for detection of SNP TSC0042232
tatggatgtggty

SEQ ID NO: 168972 - DNA, 13 bp, Artificial Sequence
  Oligonucleotide for detection of SNP TSC0042232
raccacatccata

SEQ ID NO: 168973 - DNA, 13 bp, Artificial Sequence
  Oligonucleotide for detection of SNP TSC0042232
tatggacgtggty

SEQ ID NO: 168974 - DNA, 13 bp, Artificial Sequence
  Oligonucleotide for detection of SNP TSC0042232
raccacgtccata

SEQ ID NO: 168975 - DNA, 13 bp, Artificial Sequence
  Oligonucleotide for detection of SNP TSC0042232
ggttatgtttatg

SEQ ID NO: 168976 - DNA, 13 bp, Artificial Sequence
  Oligonucleotide for detection of SNP TSC0042232
cataaacataacc

SEQ ID NO: 168977 - DNA, 13 bp, Artificial Sequence
  Oligonucleotide for detection of SNP TSC0042232
ggttatatttatg

SEQ ID NO: 168978 - DNA, 13 bp, Artificial Sequence
  Oligonucleotide for detection of SNP TSC0042232
cataaatataacc

SEQ ID NO: 168979 - DNA, 13 bp, Artificial Sequence
  Oligonucleotide for detection of SNP TSC0042232
ggttacgtttatg

SEQ ID NO: 168980 - DNA, 13 bp, Artificial Sequence
  Oligonucleotide for detection of SNP TSC0042232
cataaacgtaacc

SEQ ID NO: 168981 - DNA, 13 bp, Artificial Sequence
  Oligonucleotide for detection of SNP TSC0042233
taataaaatgttt

SEQ ID NO: 168982 - DNA, 13 bp, Artificial Sequence
  Oligonucleotide for detection of SNP TSC0042233
aaacattttatta

SEQ ID NO: 168983 - DNA, 13 bp, Artificial Sequence
  Oligonucleotide for detection of SNP TSC0042233
taataatatgttt

SEQ ID NO: 168984 - DNA, 13 bp, Artificial Sequence
  Oligonucleotide for detection of SNP TSC0042233
aaacatattatta

SEQ ID NO: 168985 - DNA, 13 bp, Artificial Sequence
  Oligonucleotide for detection of SNP TSC0042233
agatattttgttg

SEQ ID NO: 168986 - DNA, 13 bp, Artificial Sequence
  Oligonucleotide for detection of SNP TSC0042233
caacaaaatatct

SEQ ID NO: 168987 - DNA, 13 bp, Artificial Sequence
  Oligonucleotide for detection of SNP TSC0042233
agatatgttgttg

SEQ ID NO: 168988 - DNA, 13 bp, Artificial Sequence
  Oligonucleotide for detection of SNP TSC0042233
caacaacatatct

SEQ ID NO: 168989 - DNA, 13 bp, Artificial Sequence
  Oligonucleotide for detection of SNP TSC0010628
agggggttatggg

SEQ ID NO: 168990 - DNA, 13 bp, Artificial Sequence
  Oligonucleotide for detection of SNP TSC0010628
cccataaccccct

SEQ ID NO: 168991 - DNA, 13 bp, Artificial Sequence
  Oligonucleotide for detection of SNP TSC0010628
agggggatatggg

SEQ ID NO: 168992 - DNA, 13 bp, Artificial Sequence
  Oligonucleotide for detection of SNP TSC0010628
cccatatccccct

SEQ ID NO: 168993 - DNA, 13 bp, Artificial Sequence
  Oligonucleotide for detection of SNP TSC0006582
ttgatttattgtt

SEQ ID NO: 168994 - DNA, 13 bp, Artificial Sequence
  Oligonucleotide for detection of SNP TSC0006582
aacaataaatcaa

SEQ ID NO: 168995 - DNA, 13 bp, Artificial Sequence
  Oligonucleotide for detection of SNP TSC0006582
ttgattgattgtt

SEQ ID NO: 168996 - DNA, 13 bp, Artificial Sequence
  Oligonucleotide for detection of SNP TSC0006582
aacaatcaatcaa

SEQ ID NO: 168997 - DNA, 13 bp, Artificial Sequence
  Oligonucleotide for detection of SNP TSC0006582
agtagtgagttaa

SEQ ID NO: 168998 - DNA, 13 bp, Artificial Sequence
  Oligonucleotide for detection of SNP TSC0006582
ttaactcactact

SEQ ID NO: 168999 - DNA, 13 bp, Artificial Sequence
  Oligonucleotide for detection of SNP TSC0006582
agtagttagttaa

SEQ ID NO: 169000 - DNA, 13 bp, Artificial Sequence
  Oligonucleotide for detection of SNP TSC0006582
ttaactaactact

SEQ ID NO: 169001 - DNA, 13 bp, Artificial Sequence
  Oligonucleotide for detection of SNP TSC0008391
tattaagaagaaa

SEQ ID NO: 169002 - DNA, 13 bp, Artificial Sequence
  Oligonucleotide for detection of SNP TSC0008391
tttcttcttaata

SEQ ID NO: 169003 - DNA, 13 bp, Artificial Sequence
  Oligonucleotide for detection of SNP TSC0008391
tattaataagaaa

SEQ ID NO: 169004 - DNA, 13 bp, Artificial Sequence
  Oligonucleotide for detection of SNP TSC0008391
tttcttattaata

SEQ ID NO: 169005 - DNA, 13 bp, Artificial Sequence
  Oligonucleotide for detection of SNP TSC0042236
atgatgtgtaggg

SEQ ID NO: 169006 - DNA, 13 bp, Artificial Sequence
  Oligonucleotide for detection of SNP TSC0042236
ccctacacatcat

SEQ ID NO: 169007 - DNA, 13 bp, Artificial Sequence
  Oligonucleotide for detection of SNP TSC0042236
atgatgcgtaggg

SEQ ID NO: 169008 - DNA, 13 bp, Artificial Sequence
  Oligonucleotide for detection of SNP TSC0042236
ccctacgcatcat

SEQ ID NO: 169009 - DNA, 13 bp, Artificial Sequence
  Oligonucleotide for detection of SNP TSC0042237
taatgatgagaga

SEQ ID NO: 169010 - DNA, 13 bp, Artificial Sequence
  Oligonucleotide for detection of SNP TSC0042237
tctctcatcatta

SEQ ID NO: 169011 - DNA, 13 bp, Artificial Sequence
  Oligonucleotide for detection of SNP TSC0042237
taatgacgagaga

SEQ ID NO: 169012 - DNA, 13 bp, Artificial Sequence
  Oligonucleotide for detection of SNP TSC0042237
tctctcgtcatta

SEQ ID NO: 169013 - DNA, 13 bp, Artificial Sequence
  Oligonucleotide for detection of SNP TSC0042238
aatggatgtgtta

SEQ ID NO: 169014 - DNA, 13 bp, Artificial Sequence
  Oligonucleotide for detection of SNP TSC0042238
taacacatccatt

SEQ ID NO: 169015 - DNA, 13 bp, Artificial Sequence
  Oligonucleotide for detection of SNP TSC0042238
aatggaggtgtta

SEQ ID NO: 169016 - DNA, 13 bp, Artificial Sequence
  Oligonucleotide for detection of SNP TSC0042238
taacacctccatt

SEQ ID NO: 169017 - DNA, 13 bp, Artificial Sequence
  Oligonucleotide for detection of SNP TSC0042238
aatggacgtgtta

SEQ ID NO: 169018 - DNA, 13 bp, Artificial Sequence
  Oligonucleotide for detection of SNP TSC0042238
taacacgtccatt

SEQ ID NO: 169019 - DNA, 13 bp, Artificial Sequence
  Oligonucleotide for detection of SNP TSC0042238
tgatatgtttatt

SEQ ID NO: 169020 - DNA, 13 bp, Artificial Sequence
  Oligonucleotide for detection of SNP TSC0042238
aataaacatatca

SEQ ID NO: 169021 - DNA, 13 bp, Artificial Sequence
  Oligonucleotide for detection of SNP TSC0042238
tgatatttttatt

SEQ ID NO: 169022 - DNA, 13 bp, Artificial Sequence
  Oligonucleotide for detection of SNP TSC0042238
aataaaaatatca

SEQ ID NO: 169023 - DNA, 13 bp, Artificial Sequence
  Oligonucleotide for detection of SNP TSC0042238
tgatacgtttatt

SEQ ID NO: 169024 - DNA, 13 bp, Artificial Sequence
  Oligonucleotide for detection of SNP TSC0042238
aataaacgtatca

SEQ ID NO: 169025 - DNA, 13 bp, Artificial Sequence
  Oligonucleotide for detection of SNP TSC0042240
aagaggtttaatg

SEQ ID NO: 169026 - DNA, 13 bp, Artificial Sequence
  Oligonucleotide for detection of SNP TSC0042240
cattaaacctctt

SEQ ID NO: 169027 - DNA, 13 bp, Artificial Sequence
  Oligonucleotide for detection of SNP TSC0042240
aagagggttaatg

SEQ ID NO: 169028 - DNA, 13 bp, Artificial Sequence
  Oligonucleotide for detection of SNP TSC0042240
cattaaccctctt

SEQ ID NO: 169029 - DNA, 13 bp, Artificial Sequence
  Oligonucleotide for detection of SNP TSC0042243
taattaaattagt

SEQ ID NO: 169030 - DNA, 13 bp, Artificial Sequence
  Oligonucleotide for detection of SNP TSC0042243
actaatttaatta

SEQ ID NO: 169031 - DNA, 13 bp, Artificial Sequence
  Oligonucleotide for detection of SNP TSC0042243
taattagattagt

SEQ ID NO: 169032 - DNA, 13 bp, Artificial Sequence
  Oligonucleotide for detection of SNP TSC0042243
actaatctaatta

SEQ ID NO: 169033 - DNA, 13 bp, Artificial Sequence
  Oligonucleotide for detection of SNP TSC0042244
aggtatgaggaag

SEQ ID NO: 169034 - DNA, 13 bp, Artificial Sequence
  Oligonucleotide for detection of SNP TSC0042244
cttcctcatacct

SEQ ID NO: 169035 - DNA, 13 bp, Artificial Sequence
  Oligonucleotide for detection of SNP TSC0042244
aggtataaggaag

SEQ ID NO: 169036 - DNA, 13 bp, Artificial Sequence
  Oligonucleotide for detection of SNP TSC0042244
cttccttatacct

SEQ ID NO: 169037 - DNA, 13 bp, Artificial Sequence
  Oligonucleotide for detection of SNP TSC0042244
aggtacgaggaag

SEQ ID NO: 169038 - DNA, 13 bp, Artificial Sequence
  Oligonucleotide for detection of SNP TSC0042244
cttcctcgtacct

SEQ ID NO: 169039 - DNA, 13 bp, Artificial Sequence
  Oligonucleotide for detection of SNP TSC0042245
aagaatatatgta

SEQ ID NO: 169040 - DNA, 13 bp, Artificial Sequence
  Oligonucleotide for detection of SNP TSC0042245
tacatatattctt

SEQ ID NO: 169041 - DNA, 13 bp, Artificial Sequence
  Oligonucleotide for detection of SNP TSC0042245
aagaatgtatgta

SEQ ID NO: 169042 - DNA, 13 bp, Artificial Sequence
  Oligonucleotide for detection of SNP TSC0042245
tacatacattctt

SEQ ID NO: 169043 - DNA, 13 bp, Artificial Sequence
  Oligonucleotide for detection of SNP TSC0042247
ttggagagtttaa

SEQ ID NO: 169044 - DNA, 13 bp, Artificial Sequence
  Oligonucleotide for detection of SNP TSC0042247
ttaaactctccaa

SEQ ID NO: 169045 - DNA, 13 bp, Artificial Sequence
  Oligonucleotide for detection of SNP TSC0042247
ttggagggtttaa

SEQ ID NO: 169046 - DNA, 13 bp, Artificial Sequence
  Oligonucleotide for detection of SNP TSC0042247
ttaaaccctccaa

SEQ ID NO: 169047 - DNA, 13 bp, Artificial Sequence
  Oligonucleotide for detection of SNP TSC0009163
attttaataatty

SEQ ID NO: 169048 - DNA, 13 bp, Artificial Sequence
  Oligonucleotide for detection of SNP TSC0009163
raattattaaaat

SEQ ID NO: 169049 - DNA, 13 bp, Artificial Sequence
  Oligonucleotide for detection of SNP TSC0009164
gttagtgtgatgg

SEQ ID NO: 169050 - DNA, 13 bp, Artificial Sequence
  Oligonucleotide for detection of SNP TSC0009164
ccatcacactaac

SEQ ID NO: 169051 - DNA, 13 bp, Artificial Sequence
  Oligonucleotide for detection of SNP TSC0009164
gttagtatgatgg

SEQ ID NO: 169052 - DNA, 13 bp, Artificial Sequence
  Oligonucleotide for detection of SNP TSC0009164
ccatcatactaac

SEQ ID NO: 169053 - DNA, 13 bp, Artificial Sequence
  Oligonucleotide for detection of SNP TSC0042250
aagttttggattt

SEQ ID NO: 169054 - DNA, 13 bp, Artificial Sequence
  Oligonucleotide for detection of SNP TSC0042250
aaatccaaaactt

SEQ ID NO: 169055 - DNA, 13 bp, Artificial Sequence
  Oligonucleotide for detection of SNP TSC0042250
aagtttcggattt

SEQ ID NO: 169056 - DNA, 13 bp, Artificial Sequence
  Oligonucleotide for detection of SNP TSC0042250
aaatccgaaactt

SEQ ID NO: 169057 - DNA, 13 bp, Artificial Sequence
  Oligonucleotide for detection of SNP TSC0042250
aagtttggggttt

SEQ ID NO: 169058 - DNA, 13 bp, Artificial Sequence
  Oligonucleotide for detection of SNP TSC0042250
aaaccccaaactt

SEQ ID NO: 169059 - DNA, 13 bp, Artificial Sequence
  Oligonucleotide for detection of SNP TSC0042250
aagtttagggttt

SEQ ID NO: 169060 - DNA, 13 bp, Artificial Sequence
  Oligonucleotide for detection of SNP TSC0042250
aaaccctaaactt

SEQ ID NO: 169061 - DNA, 13 bp, Artificial Sequence
  Oligonucleotide for detection of SNP TSC0042250
aagttcggggttt

SEQ ID NO: 169062 - DNA, 13 bp, Artificial Sequence
  Oligonucleotide for detection of SNP TSC0042250
aaaccccgaactt

SEQ ID NO: 169063 - DNA, 13 bp, Artificial Sequence
  Oligonucleotide for detection of SNP TSC0042251
tataataaaaata

SEQ ID NO: 169064 - DNA, 13 bp, Artificial Sequence
  Oligonucleotide for detection of SNP TSC0042251
tatttttattata

SEQ ID NO: 169065 - DNA, 13 bp, Artificial Sequence
  Oligonucleotide for detection of SNP TSC0042251
tataatgaaaata

SEQ ID NO: 169066 - DNA, 13 bp, Artificial Sequence
  Oligonucleotide for detection of SNP TSC0042251
tattttcattata

SEQ ID NO: 169067 - DNA, 13 bp, Artificial Sequence
  Oligonucleotide for detection of SNP TSC0042251
tataacgaaaata

SEQ ID NO: 169068 - DNA, 13 bp, Artificial Sequence
  Oligonucleotide for detection of SNP TSC0042251
tattttcgttata

SEQ ID NO: 169069 - DNA, 13 bp, Artificial Sequence
  Oligonucleotide for detection of SNP TSC0042251
tatttttgttata

SEQ ID NO: 169070 - DNA, 13 bp, Artificial Sequence
  Oligonucleotide for detection of SNP TSC0042251
tataacaaaaata

SEQ ID NO: 169071 - DNA, 13 bp, Artificial Sequence
  Oligonucleotide for detection of SNP TSC0005942
tagtaatgagatg

SEQ ID NO: 169072 - DNA, 13 bp, Artificial Sequence
  Oligonucleotide for detection of SNP TSC0005942
catctcattacta

SEQ ID NO: 169073 - DNA, 13 bp, Artificial Sequence
  Oligonucleotide for detection of SNP TSC0005942
tagtaacgagatg

SEQ ID NO: 169074 - DNA, 13 bp, Artificial Sequence
  Oligonucleotide for detection of SNP TSC0005942
catctcgttacta

SEQ ID NO: 169075 - DNA, 13 bp, Artificial Sequence
  Oligonucleotide for detection of SNP TSC0042252
tattttgaaatta

SEQ ID NO: 169076 - DNA, 13 bp, Artificial Sequence
  Oligonucleotide for detection of SNP TSC0042252
taatttcaaaata

SEQ ID NO: 169077 - DNA, 13 bp, Artificial Sequence
  Oligonucleotide for detection of SNP TSC0042252
tattttaaaatta

SEQ ID NO: 169078 - DNA, 13 bp, Artificial Sequence
  Oligonucleotide for detection of SNP TSC0042252
taattttaaaata

SEQ ID NO: 169079 - DNA, 13 bp, Artificial Sequence
  Oligonucleotide for detection of SNP TSC0042253
gtatgtatattag

SEQ ID NO: 169080 - DNA, 13 bp, Artificial Sequence
  Oligonucleotide for detection of SNP TSC0042253
ctaatatacatac

SEQ ID NO: 169081 - DNA, 13 bp, Artificial Sequence
  Oligonucleotide for detection of SNP TSC0042253
gtatgtgtattag

SEQ ID NO: 169082 - DNA, 13 bp, Artificial Sequence
  Oligonucleotide for detection of SNP TSC0042253
ctaatacacatac

SEQ ID NO: 169083 - DNA, 13 bp, Artificial Sequence
  Oligonucleotide for detection of SNP TSC0010498
tggtgagttttaa

SEQ ID NO: 169084 - DNA, 13 bp, Artificial Sequence
  Oligonucleotide for detection of SNP TSC0010498
ttaaaactcacca

SEQ ID NO: 169085 - DNA, 13 bp, Artificial Sequence
  Oligonucleotide for detection of SNP TSC0010498
tggtgaattttaa

SEQ ID NO: 169086 - DNA, 13 bp, Artificial Sequence
  Oligonucleotide for detection of SNP TSC0010498
ttaaaattcacca

SEQ ID NO: 169087 - DNA, 13 bp, Artificial Sequence
  Oligonucleotide for detection of SNP TSC0010499
ttattatgtttta

SEQ ID NO: 169088 - DNA, 13 bp, Artificial Sequence
  Oligonucleotide for detection of SNP TSC0010499
taaaacataataa

SEQ ID NO: 169089 - DNA, 13 bp, Artificial Sequence
  Oligonucleotide for detection of SNP TSC0010499
ttattacgtttta

SEQ ID NO: 169090 - DNA, 13 bp, Artificial Sequence
  Oligonucleotide for detection of SNP TSC0010499
taaaacgtaataa

SEQ ID NO: 169091 - DNA, 13 bp, Artificial Sequence
  Oligonucleotide for detection of SNP TSC0010499
taaggtgtgatgg

SEQ ID NO: 169092 - DNA, 13 bp, Artificial Sequence
  Oligonucleotide for detection of SNP TSC0010499
ccatcacacctta

SEQ ID NO: 169093 - DNA, 13 bp, Artificial Sequence
  Oligonucleotide for detection of SNP TSC0010499
taaggtatgatgg

SEQ ID NO: 169094 - DNA, 13 bp, Artificial Sequence
  Oligonucleotide for detection of SNP TSC0010499
ccatcatacctta

SEQ ID NO: 169095 - DNA, 13 bp, Artificial Sequence
  Oligonucleotide for detection of SNP TSC0010499
taaggcgtgatgg

SEQ ID NO: 169096 - DNA, 13 bp, Artificial Sequence
  Oligonucleotide for detection of SNP TSC0010499
ccatcacgcctta

SEQ ID NO: 169097 - DNA, 13 bp, Artificial Sequence
  Oligonucleotide for detection of SNP TSC0010244
tgtattatggaga

SEQ ID NO: 169098 - DNA, 13 bp, Artificial Sequence
  Oligonucleotide for detection of SNP TSC0010244
tctccataataca

SEQ ID NO: 169099 - DNA, 13 bp, Artificial Sequence
  Oligonucleotide for detection of SNP TSC0010244
tgtattgtggaga

SEQ ID NO: 169100 - DNA, 13 bp, Artificial Sequence
  Oligonucleotide for detection of SNP TSC0010244
tctccacaataca

SEQ ID NO: 169101 - DNA, 13 bp, Artificial Sequence
  Oligonucleotide for detection of SNP TSC0010244
tgtatcgtggaga

SEQ ID NO: 169102 - DNA, 13 bp, Artificial Sequence
  Oligonucleotide for detection of SNP TSC0010244
tctccacgataca

SEQ ID NO: 169103 - DNA, 13 bp, Artificial Sequence
  Oligonucleotide for detection of SNP TSC0010244
tttttatggtata

SEQ ID NO: 169104 - DNA, 13 bp, Artificial Sequence
  Oligonucleotide for detection of SNP TSC0010244
tataccataaaaa

SEQ ID NO: 169105 - DNA, 13 bp, Artificial Sequence
  Oligonucleotide for detection of SNP TSC0010244
tttttacggtata

SEQ ID NO: 169106 - DNA, 13 bp, Artificial Sequence
  Oligonucleotide for detection of SNP TSC0010244
tataccgtaaaaa

SEQ ID NO: 169107 - DNA, 13 bp, Artificial Sequence
  Oligonucleotide for detection of SNP TSC0042259
ttatgtattatay

SEQ ID NO: 169108 - DNA, 13 bp, Artificial Sequence
  Oligonucleotide for detection of SNP TSC0042259
rtataatacataa

SEQ ID NO: 169109 - DNA, 13 bp, Artificial Sequence
  Oligonucleotide for detection of SNP TSC0042259
ttatgtgttatay

SEQ ID NO: 169110 - DNA, 13 bp, Artificial Sequence
  Oligonucleotide for detection of SNP TSC0042259
rtataacacataa

SEQ ID NO: 169111 - DNA, 13 bp, Artificial Sequence
  Oligonucleotide for detection of SNP TSC0042259
ttatgcgttatay

SEQ ID NO: 169112 - DNA, 13 bp, Artificial Sequence
  Oligonucleotide for detection of SNP TSC0042259
rtataacgcataa

SEQ ID NO: 169113 - DNA, 13 bp, Artificial Sequence
  Oligonucleotide for detection of SNP TSC0042259
gtgtgatgtataa

SEQ ID NO: 169114 - DNA, 13 bp, Artificial Sequence
  Oligonucleotide for detection of SNP TSC0042259
ttatacatcacac

SEQ ID NO: 169115 - DNA, 13 bp, Artificial Sequence
  Oligonucleotide for detection of SNP TSC0042259
gtgtgacgtataa

SEQ ID NO: 169116 - DNA, 13 bp, Artificial Sequence
  Oligonucleotide for detection of SNP TSC0042259
ttatacgtcacac

SEQ ID NO: 169117 - DNA, 13 bp, Artificial Sequence
  Oligonucleotide for detection of SNP TSC0042260
tattataagttgt

SEQ ID NO: 169118 - DNA, 13 bp, Artificial Sequence
  Oligonucleotide for detection of SNP TSC0042260
acaacttataata

SEQ ID NO: 169119 - DNA, 13 bp, Artificial Sequence
  Oligonucleotide for detection of SNP TSC0042260
tattatgagttgt

SEQ ID NO: 169120 - DNA, 13 bp, Artificial Sequence
  Oligonucleotide for detection of SNP TSC0042260
acaactcataata

SEQ ID NO: 169121 - DNA, 13 bp, Artificial Sequence
  Oligonucleotide for detection of SNP TSC0042260
tattataagtcgt

SEQ ID NO: 169122 - DNA, 13 bp, Artificial Sequence
  Oligonucleotide for detection of SNP TSC0042260
acgacttataata

SEQ ID NO: 169123 - DNA, 13 bp, Artificial Sequence
  Oligonucleotide for detection of SNP TSC0042260
tattacgagttgt

SEQ ID NO: 169124 - DNA, 13 bp, Artificial Sequence
  Oligonucleotide for detection of SNP TSC0042260
acaactcgtaata

SEQ ID NO: 169125 - DNA, 13 bp, Artificial Sequence
  Oligonucleotide for detection of SNP TSC0042260
tattatgagtcgt

SEQ ID NO: 169126 - DNA, 13 bp, Artificial Sequence
  Oligonucleotide for detection of SNP TSC0042260
acgactcataata

SEQ ID NO: 169127 - DNA, 13 bp, Artificial Sequence
  Oligonucleotide for detection of SNP TSC0042260
tattacgagtcgt

SEQ ID NO: 169128 - DNA, 13 bp, Artificial Sequence
  Oligonucleotide for detection of SNP TSC0042260
acgactcgtaata

SEQ ID NO: 169129 - DNA, 13 bp, Artificial Sequence
  Oligonucleotide for detection of SNP TSC0042260
atggtttgtaata

SEQ ID NO: 169130 - DNA, 13 bp, Artificial Sequence
  Oligonucleotide for detection of SNP TSC0042260
tattacaaaccat

SEQ ID NO: 169131 - DNA, 13 bp, Artificial Sequence
  Oligonucleotide for detection of SNP TSC0042260
acggtttgtaata

SEQ ID NO: 169132 - DNA, 13 bp, Artificial Sequence
  Oligonucleotide for detection of SNP TSC0042260
tattacaaaccgt

SEQ ID NO: 169133 - DNA, 13 bp, Artificial Sequence
  Oligonucleotide for detection of SNP TSC0042260
atggttcgtaata

SEQ ID NO: 169134 - DNA, 13 bp, Artificial Sequence
  Oligonucleotide for detection of SNP TSC0042260
tattacgaaccat

SEQ ID NO: 169135 - DNA, 13 bp, Artificial Sequence
  Oligonucleotide for detection of SNP TSC0042260
acggttcgtaata

SEQ ID NO: 169136 - DNA, 13 bp, Artificial Sequence
  Oligonucleotide for detection of SNP TSC0042260
tattacgaaccgt

SEQ ID NO: 169137 - DNA, 13 bp, Artificial Sequence
  Oligonucleotide for detection of SNP TSC0042261
tatgatataatgy

SEQ ID NO: 169138 - DNA, 13 bp, Artificial Sequence
  Oligonucleotide for detection of SNP TSC0042261
rcattatatcata

SEQ ID NO: 169139 - DNA, 13 bp, Artificial Sequence
  Oligonucleotide for detection of SNP TSC0042261
tatgatttaatgy

SEQ ID NO: 169140 - DNA, 13 bp, Artificial Sequence
  Oligonucleotide for detection of SNP TSC0042261
rcattaaatcata

SEQ ID NO: 169141 - DNA, 13 bp, Artificial Sequence
  Oligonucleotide for detection of SNP TSC0042261
gtattgtattata

SEQ ID NO: 169142 - DNA, 13 bp, Artificial Sequence
  Oligonucleotide for detection of SNP TSC0042261
tataatacaatac

SEQ ID NO: 169143 - DNA, 13 bp, Artificial Sequence
  Oligonucleotide for detection of SNP TSC0042261
gtattggattata

SEQ ID NO: 169144 - DNA, 13 bp, Artificial Sequence
  Oligonucleotide for detection of SNP TSC0042261
tataatccaatac

SEQ ID NO: 169145 - DNA, 13 bp, Artificial Sequence
  Oligonucleotide for detection of SNP TSC0042266
tatgaaagagtty

SEQ ID NO: 169146 - DNA, 13 bp, Artificial Sequence
  Oligonucleotide for detection of SNP TSC0042266
raactctttcata

SEQ ID NO: 169147 - DNA, 13 bp, Artificial Sequence
  Oligonucleotide for detection of SNP TSC0042266
tatgaaggagtty

SEQ ID NO: 169148 - DNA, 13 bp, Artificial Sequence
  Oligonucleotide for detection of SNP TSC0042266
raactccttcata

SEQ ID NO: 169149 - DNA, 13 bp, Artificial Sequence
  Oligonucleotide for detection of SNP TSC0042266
tacgaaagagtty

SEQ ID NO: 169150 - DNA, 13 bp, Artificial Sequence
  Oligonucleotide for detection of SNP TSC0042266
raactctttcgta

SEQ ID NO: 169151 - DNA, 13 bp, Artificial Sequence
  Oligonucleotide for detection of SNP TSC0042266
tacgaaggagtty

SEQ ID NO: 169152 - DNA, 13 bp, Artificial Sequence
  Oligonucleotide for detection of SNP TSC0042266
raactccttcgta

SEQ ID NO: 169153 - DNA, 13 bp, Artificial Sequence
  Oligonucleotide for detection of SNP TSC0009793
aaatgttgtagag

SEQ ID NO: 169154 - DNA, 13 bp, Artificial Sequence
  Oligonucleotide for detection of SNP TSC0009793
ctctacaacattt

SEQ ID NO: 169155 - DNA, 13 bp, Artificial Sequence
  Oligonucleotide for detection of SNP TSC0009793
aaatgtagtagag

SEQ ID NO: 169156 - DNA, 13 bp, Artificial Sequence
  Oligonucleotide for detection of SNP TSC0009793
ctctactacattt

SEQ ID NO: 169157 - DNA, 13 bp, Artificial Sequence
  Oligonucleotide for detection of SNP TSC0009794
ttttatgaagtty

SEQ ID NO: 169158 - DNA, 13 bp, Artificial Sequence
  Oligonucleotide for detection of SNP TSC0009794
raacttcataaaa

SEQ ID NO: 169159 - DNA, 13 bp, Artificial Sequence
  Oligonucleotide for detection of SNP TSC0042268
ttagaatgttgtg

SEQ ID NO: 169160 - DNA, 13 bp, Artificial Sequence
  Oligonucleotide for detection of SNP TSC0042268
cacaacattctaa

SEQ ID NO: 169161 - DNA, 13 bp, Artificial Sequence
  Oligonucleotide for detection of SNP TSC0042268
ttagaacgttgtg

SEQ ID NO: 169162 - DNA, 13 bp, Artificial Sequence
  Oligonucleotide for detection of SNP TSC0042268
cacaacgttctaa

SEQ ID NO: 169163 - DNA, 13 bp, Artificial Sequence
  Oligonucleotide for detection of SNP TSC0042268
tatagtgttttaa

SEQ ID NO: 169164 - DNA, 13 bp, Artificial Sequence
  Oligonucleotide for detection of SNP TSC0042268
ttaaaacactata

SEQ ID NO: 169165 - DNA, 13 bp, Artificial Sequence
  Oligonucleotide for detection of SNP TSC0042268
tatagtattttaa

SEQ ID NO: 169166 - DNA, 13 bp, Artificial Sequence
  Oligonucleotide for detection of SNP TSC0042268
ttaaaatactata

SEQ ID NO: 169167 - DNA, 13 bp, Artificial Sequence
  Oligonucleotide for detection of SNP TSC0042268
tatagcgttttaa

SEQ ID NO: 169168 - DNA, 13 bp, Artificial Sequence
  Oligonucleotide for detection of SNP TSC0042268
ttaaaacgctata

SEQ ID NO: 169169 - DNA, 13 bp, Artificial Sequence
  Oligonucleotide for detection of SNP TSC0042269
tggtatagttgta

SEQ ID NO: 169170 - DNA, 13 bp, Artificial Sequence
  Oligonucleotide for detection of SNP TSC0042269
tacaactatacca

SEQ ID NO: 169171 - DNA, 13 bp, Artificial Sequence
  Oligonucleotide for detection of SNP TSC0042269
tggtattgttgta

SEQ ID NO: 169172 - DNA, 13 bp, Artificial Sequence
  Oligonucleotide for detection of SNP TSC0042269
tacaacaatacca

SEQ ID NO: 169173 - DNA, 13 bp, Artificial Sequence
  Oligonucleotide for detection of SNP TSC0042269
tgtagttgtgtta

SEQ ID NO: 169174 - DNA, 13 bp, Artificial Sequence
  Oligonucleotide for detection of SNP TSC0042269
taacacaactaca

SEQ ID NO: 169175 - DNA, 13 bp, Artificial Sequence
  Oligonucleotide for detection of SNP TSC0042273
atttaaatagtay

SEQ ID NO: 169176 - DNA, 13 bp, Artificial Sequence
  Oligonucleotide for detection of SNP TSC0042273
rtactatttaaat

SEQ ID NO: 169177 - DNA, 13 bp, Artificial Sequence
  Oligonucleotide for detection of SNP TSC0042273
atttaattagtay

SEQ ID NO: 169178 - DNA, 13 bp, Artificial Sequence
  Oligonucleotide for detection of SNP TSC0042273
rtactaattaaat

SEQ ID NO: 169179 - DNA, 13 bp, Artificial Sequence
  Oligonucleotide for detection of SNP TSC0042273
gtattatttaaat

SEQ ID NO: 169180 - DNA, 13 bp, Artificial Sequence
  Oligonucleotide for detection of SNP TSC0042273
atttaaataatac

SEQ ID NO: 169181 - DNA, 13 bp, Artificial Sequence
  Oligonucleotide for detection of SNP TSC0042273
gtattagttaaat

SEQ ID NO: 169182 - DNA, 13 bp, Artificial Sequence
  Oligonucleotide for detection of SNP TSC0042273
atttaactaatac

SEQ ID NO: 169183 - DNA, 13 bp, Artificial Sequence
  Oligonucleotide for detection of SNP TSC0008340
tttaagatagaga

SEQ ID NO: 169184 - DNA, 13 bp, Artificial Sequence
  Oligonucleotide for detection of SNP TSC0008340
tctctatcttaaa

SEQ ID NO: 169185 - DNA, 13 bp, Artificial Sequence
  Oligonucleotide for detection of SNP TSC0008340
tttaagttagaga

SEQ ID NO: 169186 - DNA, 13 bp, Artificial Sequence
  Oligonucleotide for detection of SNP TSC0008340
tctctaacttaaa

SEQ ID NO: 169187 - DNA, 13 bp, Artificial Sequence
  Oligonucleotide for detection of SNP TSC0042274
gggatagaaaatt

SEQ ID NO: 169188 - DNA, 13 bp, Artificial Sequence
  Oligonucleotide for detection of SNP TSC0042274
aattttctatccc

SEQ ID NO: 169189 - DNA, 13 bp, Artificial Sequence
  Oligonucleotide for detection of SNP TSC0042274
gggataaaaaatt

SEQ ID NO: 169190 - DNA, 13 bp, Artificial Sequence
  Oligonucleotide for detection of SNP TSC0042274
aattttttatccc

SEQ ID NO: 169191 - DNA, 13 bp, Artificial Sequence
  Oligonucleotide for detection of SNP TSC0042280
tattaaatattaa

SEQ ID NO: 169192 - DNA, 13 bp, Artificial Sequence
  Oligonucleotide for detection of SNP TSC0042280
ttaatatttaata

SEQ ID NO: 169193 - DNA, 13 bp, Artificial Sequence
  Oligonucleotide for detection of SNP TSC0042280
tattaagtattaa

SEQ ID NO: 169194 - DNA, 13 bp, Artificial Sequence
  Oligonucleotide for detection of SNP TSC0042280
ttaatacttaata

SEQ ID NO: 169195 - DNA, 13 bp, Artificial Sequence
  Oligonucleotide for detection of SNP TSC0042281
atgttgagatagt

SEQ ID NO: 169196 - DNA, 13 bp, Artificial Sequence
  Oligonucleotide for detection of SNP TSC0042281
actatctcaacat

SEQ ID NO: 169197 - DNA, 13 bp, Artificial Sequence
  Oligonucleotide for detection of SNP TSC0042281
atgttgggatagt

SEQ ID NO: 169198 - DNA, 13 bp, Artificial Sequence
  Oligonucleotide for detection of SNP TSC0042281
actatcccaacat

SEQ ID NO: 169199 - DNA, 13 bp, Artificial Sequence
  Oligonucleotide for detection of SNP TSC0042282
ttggggaggagat

SEQ ID NO: 169200 - DNA, 13 bp, Artificial Sequence
  Oligonucleotide for detection of SNP TSC0042282
atctcctccccaa

SEQ ID NO: 169201 - DNA, 13 bp, Artificial Sequence
  Oligonucleotide for detection of SNP TSC0042282
ttggggtggagat

SEQ ID NO: 169202 - DNA, 13 bp, Artificial Sequence
  Oligonucleotide for detection of SNP TSC0042282
atctccaccccaa

SEQ ID NO: 169203 - DNA, 13 bp, Artificial Sequence
  Oligonucleotide for detection of SNP TSC0042283
ggataaggaagga

SEQ ID NO: 169204 - DNA, 13 bp, Artificial Sequence
  Oligonucleotide for detection of SNP TSC0042283
tccttccttatcc

SEQ ID NO: 169205 - DNA, 13 bp, Artificial Sequence
  Oligonucleotide for detection of SNP TSC0042283
ggataaagaagga

SEQ ID NO: 169206 - DNA, 13 bp, Artificial Sequence
  Oligonucleotide for detection of SNP TSC0042283
tccttctttatcc

SEQ ID NO: 169207 - DNA, 13 bp, Artificial Sequence
  Oligonucleotide for detection of SNP TSC0042284
agtaggaaagtta

SEQ ID NO: 169208 - DNA, 13 bp, Artificial Sequence
  Oligonucleotide for detection of SNP TSC0042284
taactttcctact

SEQ ID NO: 169209 - DNA, 13 bp, Artificial Sequence
  Oligonucleotide for detection of SNP TSC0042284
agtaggtaagtta

SEQ ID NO: 169210 - DNA, 13 bp, Artificial Sequence
  Oligonucleotide for detection of SNP TSC0042284
taacttacctact

SEQ ID NO: 169211 - DNA, 13 bp, Artificial Sequence
  Oligonucleotide for detection of SNP TSC0042284
tgatttgtttgtt

SEQ ID NO: 169212 - DNA, 13 bp, Artificial Sequence
  Oligonucleotide for detection of SNP TSC0042284
aacaaacaaatca

SEQ ID NO: 169213 - DNA, 13 bp, Artificial Sequence
  Oligonucleotide for detection of SNP TSC0042286
ttgttcggtttag

SEQ ID NO: 169214 - DNA, 13 bp, Artificial Sequence
  Oligonucleotide for detection of SNP TSC0042286
ctaaaccgaacaa

SEQ ID NO: 169215 - DNA, 13 bp, Artificial Sequence
  Oligonucleotide for detection of SNP TSC0042286
ttaggttgggtag

SEQ ID NO: 169216 - DNA, 13 bp, Artificial Sequence
  Oligonucleotide for detection of SNP TSC0042286
ctacccaacctaa

SEQ ID NO: 169217 - DNA, 13 bp, Artificial Sequence
  Oligonucleotide for detection of SNP TSC0042286
ttaggtcgggtag

SEQ ID NO: 169218 - DNA, 13 bp, Artificial Sequence
  Oligonucleotide for detection of SNP TSC0042286
ctacccgacctaa

SEQ ID NO: 169219 - DNA, 13 bp, Artificial Sequence
  Oligonucleotide for detection of SNP TSC0005375
gggttttgttgty

SEQ ID NO: 169220 - DNA, 13 bp, Artificial Sequence
  Oligonucleotide for detection of SNP TSC0005375
racaacaaaaccc

SEQ ID NO: 169221 - DNA, 13 bp, Artificial Sequence
  Oligonucleotide for detection of SNP TSC0005375
gggtttcgttgty

SEQ ID NO: 169222 - DNA, 13 bp, Artificial Sequence
  Oligonucleotide for detection of SNP TSC0005375
racaacgaaaccc

SEQ ID NO: 169223 - DNA, 13 bp, Artificial Sequence
  Oligonucleotide for detection of SNP TSC0005375
ggtaatgaaatty

SEQ ID NO: 169224 - DNA, 13 bp, Artificial Sequence
  Oligonucleotide for detection of SNP TSC0005375
raatttcattacc

SEQ ID NO: 169225 - DNA, 13 bp, Artificial Sequence
  Oligonucleotide for detection of SNP TSC0005375
ggtaataaaatty

SEQ ID NO: 169226 - DNA, 13 bp, Artificial Sequence
  Oligonucleotide for detection of SNP TSC0005375
raattttattacc

SEQ ID NO: 169227 - DNA, 13 bp, Artificial Sequence
  Oligonucleotide for detection of SNP TSC0005375
ggtaacgaaatty

SEQ ID NO: 169228 - DNA, 13 bp, Artificial Sequence
  Oligonucleotide for detection of SNP TSC0005375
raatttcgttacc

SEQ ID NO: 169229 - DNA, 13 bp, Artificial Sequence
  Oligonucleotide for detection of SNP TSC0042287
aaaaattggaaay

SEQ ID NO: 169230 - DNA, 13 bp, Artificial Sequence
  Oligonucleotide for detection of SNP TSC0042287
rtttccaattttt

SEQ ID NO: 169231 - DNA, 13 bp, Artificial Sequence
  Oligonucleotide for detection of SNP TSC0042287
aaaaatgggaaay

SEQ ID NO: 169232 - DNA, 13 bp, Artificial Sequence
  Oligonucleotide for detection of SNP TSC0042287
rtttcccattttt

SEQ ID NO: 169233 - DNA, 13 bp, Artificial Sequence
  Oligonucleotide for detection of SNP TSC0042287
aaaaacgggaaay

SEQ ID NO: 169234 - DNA, 13 bp, Artificial Sequence
  Oligonucleotide for detection of SNP TSC0042287
rtttcccgttttt

SEQ ID NO: 169235 - DNA, 13 bp, Artificial Sequence
  Oligonucleotide for detection of SNP TSC0042289
aaagttttgatat

SEQ ID NO: 169236 - DNA, 13 bp, Artificial Sequence
  Oligonucleotide for detection of SNP TSC0042289
atatcaaaacttt

SEQ ID NO: 169237 - DNA, 13 bp, Artificial Sequence
  Oligonucleotide for detection of SNP TSC0042289
aaagttgtgatat

SEQ ID NO: 169238 - DNA, 13 bp, Artificial Sequence
  Oligonucleotide for detection of SNP TSC0042289
atatcacaacttt

SEQ ID NO: 169239 - DNA, 13 bp, Artificial Sequence
  Oligonucleotide for detection of SNP TSC0042289
atgttatagtttt

SEQ ID NO: 169240 - DNA, 13 bp, Artificial Sequence
  Oligonucleotide for detection of SNP TSC0042289
aaaactataacat

SEQ ID NO: 169241 - DNA, 13 bp, Artificial Sequence
  Oligonucleotide for detection of SNP TSC0042290
gttattgattatt

SEQ ID NO: 169242 - DNA, 13 bp, Artificial Sequence
  Oligonucleotide for detection of SNP TSC0042290
aataatcaataac

SEQ ID NO: 169243 - DNA, 13 bp, Artificial Sequence
  Oligonucleotide for detection of SNP TSC0042290
gttattaattatt

SEQ ID NO: 169244 - DNA, 13 bp, Artificial Sequence
  Oligonucleotide for detection of SNP TSC0042290
aataattaataac

SEQ ID NO: 169245 - DNA, 13 bp, Artificial Sequence
  Oligonucleotide for detection of SNP TSC0042291
attattaaagtta

SEQ ID NO: 169246 - DNA, 13 bp, Artificial Sequence
  Oligonucleotide for detection of SNP TSC0042291
taactttaataat

SEQ ID NO: 169247 - DNA, 13 bp, Artificial Sequence
  Oligonucleotide for detection of SNP TSC0042292
ttagataaggata

SEQ ID NO: 169248 - DNA, 13 bp, Artificial Sequence
  Oligonucleotide for detection of SNP TSC0042292
tatccttatctaa

SEQ ID NO: 169249 - DNA, 13 bp, Artificial Sequence
  Oligonucleotide for detection of SNP TSC0042292
ttagatgaggata

SEQ ID NO: 169250 - DNA, 13 bp, Artificial Sequence
  Oligonucleotide for detection of SNP TSC0042292
tatcctcatctaa

SEQ ID NO: 169251 - DNA, 13 bp, Artificial Sequence
  Oligonucleotide for detection of SNP TSC0042293
ataaatatgttat

SEQ ID NO: 169252 - DNA, 13 bp, Artificial Sequence
  Oligonucleotide for detection of SNP TSC0042293
ataacatatttat

SEQ ID NO: 169253 - DNA, 13 bp, Artificial Sequence
  Oligonucleotide for detection of SNP TSC0042293
ataaatgtgttat

SEQ ID NO: 169254 - DNA, 13 bp, Artificial Sequence
  Oligonucleotide for detection of SNP TSC0042293
ataacacatttat

SEQ ID NO: 169255 - DNA, 13 bp, Artificial Sequence
  Oligonucleotide for detection of SNP TSC0042293
ataaacgtgttat

SEQ ID NO: 169256 - DNA, 13 bp, Artificial Sequence
  Oligonucleotide for detection of SNP TSC0042293
ataacacgtttat

SEQ ID NO: 169257 - DNA, 13 bp, Artificial Sequence
  Oligonucleotide for detection of SNP TSC0042293
ataatatgtttat

SEQ ID NO: 169258 - DNA, 13 bp, Artificial Sequence
  Oligonucleotide for detection of SNP TSC0042293
ataaacatattat

SEQ ID NO: 169259 - DNA, 13 bp, Artificial Sequence
  Oligonucleotide for detection of SNP TSC0042293
ataatacgtttat

SEQ ID NO: 169260 - DNA, 13 bp, Artificial Sequence
  Oligonucleotide for detection of SNP TSC0042293
ataaacgtattat

SEQ ID NO: 169261 - DNA, 13 bp, Artificial Sequence
  Oligonucleotide for detection of SNP TSC0042294
taagatattttag

SEQ ID NO: 169262 - DNA, 13 bp, Artificial Sequence
  Oligonucleotide for detection of SNP TSC0042294
ctaaaatatctta

SEQ ID NO: 169263 - DNA, 13 bp, Artificial Sequence
  Oligonucleotide for detection of SNP TSC0042294
taagatgttttag

SEQ ID NO: 169264 - DNA, 13 bp, Artificial Sequence
  Oligonucleotide for detection of SNP TSC0042294
ctaaaacatctta

SEQ ID NO: 169265 - DNA, 13 bp, Artificial Sequence
  Oligonucleotide for detection of SNP TSC0042295
aataaatgatgga

SEQ ID NO: 169266 - DNA, 13 bp, Artificial Sequence
  Oligonucleotide for detection of SNP TSC0042295
tccatcatttatt

SEQ ID NO: 169267 - DNA, 13 bp, Artificial Sequence
  Oligonucleotide for detection of SNP TSC0042295
aataaaggatgga

SEQ ID NO: 169268 - DNA, 13 bp, Artificial Sequence
  Oligonucleotide for detection of SNP TSC0042295
tccatcctttatt

SEQ ID NO: 169269 - DNA, 13 bp, Artificial Sequence
  Oligonucleotide for detection of SNP TSC0042297
tttgataagttga

SEQ ID NO: 169270 - DNA, 13 bp, Artificial Sequence
  Oligonucleotide for detection of SNP TSC0042297
tcaacttatcaaa

SEQ ID NO: 169271 - DNA, 13 bp, Artificial Sequence
  Oligonucleotide for detection of SNP TSC0042297
tttgatgagttga

SEQ ID NO: 169272 - DNA, 13 bp, Artificial Sequence
  Oligonucleotide for detection of SNP TSC0042297
tcaactcatcaaa

SEQ ID NO: 169273 - DNA, 13 bp, Artificial Sequence
  Oligonucleotide for detection of SNP TSC0042298
taaagtaagttty

SEQ ID NO: 169274 - DNA, 13 bp, Artificial Sequence
  Oligonucleotide for detection of SNP TSC0042298
raaacttacttta

SEQ ID NO: 169275 - DNA, 13 bp, Artificial Sequence
  Oligonucleotide for detection of SNP TSC0042298
taaagtgagttty

SEQ ID NO: 169276 - DNA, 13 bp, Artificial Sequence
  Oligonucleotide for detection of SNP TSC0042298
raaactcacttta

SEQ ID NO: 169277 - DNA, 13 bp, Artificial Sequence
  Oligonucleotide for detection of SNP TSC0042299
agagttggaataa

SEQ ID NO: 169278 - DNA, 13 bp, Artificial Sequence
  Oligonucleotide for detection of SNP TSC0042299
ttattccaactct

SEQ ID NO: 169279 - DNA, 13 bp, Artificial Sequence
  Oligonucleotide for detection of SNP TSC0042299
agagttagaataa

SEQ ID NO: 169280 - DNA, 13 bp, Artificial Sequence
  Oligonucleotide for detection of SNP TSC0042299
ttattctaactct

SEQ ID NO: 169281 - DNA, 13 bp, Artificial Sequence
  Oligonucleotide for detection of SNP TSC0042299
agagtcggaataa

SEQ ID NO: 169282 - DNA, 13 bp, Artificial Sequence
  Oligonucleotide for detection of SNP TSC0042299
ttattccgactct

SEQ ID NO: 169283 - DNA, 13 bp, Artificial Sequence
  Oligonucleotide for detection of SNP TSC0042300
aatattagtttaa

SEQ ID NO: 169284 - DNA, 13 bp, Artificial Sequence
  Oligonucleotide for detection of SNP TSC0042300
ttaaactaatatt

SEQ ID NO: 169285 - DNA, 13 bp, Artificial Sequence
  Oligonucleotide for detection of SNP TSC0042300
aatatttgtttaa

SEQ ID NO: 169286 - DNA, 13 bp, Artificial Sequence
  Oligonucleotide for detection of SNP TSC0042300
ttaaacaaatatt

SEQ ID NO: 169287 - DNA, 13 bp, Artificial Sequence
  Oligonucleotide for detection of SNP TSC0042300
ttagattagtatt

SEQ ID NO: 169288 - DNA, 13 bp, Artificial Sequence
  Oligonucleotide for detection of SNP TSC0042300
aatactaatctaa

SEQ ID NO: 169289 - DNA, 13 bp, Artificial Sequence
  Oligonucleotide for detection of SNP TSC0042300
ttagataagtatt

SEQ ID NO: 169290 - DNA, 13 bp, Artificial Sequence
  Oligonucleotide for detection of SNP TSC0042300
aatacttatctaa

SEQ ID NO: 169291 - DNA, 13 bp, Artificial Sequence
  Oligonucleotide for detection of SNP TSC0042301
aagtttatgggat

SEQ ID NO: 169292 - DNA, 13 bp, Artificial Sequence
  Oligonucleotide for detection of SNP TSC0042301
atcccataaactt

SEQ ID NO: 169293 - DNA, 13 bp, Artificial Sequence
  Oligonucleotide for detection of SNP TSC0042301
aagtttgtgggat

SEQ ID NO: 169294 - DNA, 13 bp, Artificial Sequence
  Oligonucleotide for detection of SNP TSC0042301
atcccacaaactt

SEQ ID NO: 169295 - DNA, 13 bp, Artificial Sequence
  Oligonucleotide for detection of SNP TSC0042302
aggaagtttgtta

SEQ ID NO: 169296 - DNA, 13 bp, Artificial Sequence
  Oligonucleotide for detection of SNP TSC0042302
taacaaacttcct

SEQ ID NO: 169297 - DNA, 13 bp, Artificial Sequence
  Oligonucleotide for detection of SNP TSC0042302
aggaaggttgtta

SEQ ID NO: 169298 - DNA, 13 bp, Artificial Sequence
  Oligonucleotide for detection of SNP TSC0042302
taacaaccttcct

SEQ ID NO: 169299 - DNA, 13 bp, Artificial Sequence
  Oligonucleotide for detection of SNP TSC0042302
tgataaatttttt

SEQ ID NO: 169300 - DNA, 13 bp, Artificial Sequence
  Oligonucleotide for detection of SNP TSC0042302
aaaaaatttatca

SEQ ID NO: 169301 - DNA, 13 bp, Artificial Sequence
  Oligonucleotide for detection of SNP TSC0042302
tgataattttttt

SEQ ID NO: 169302 - DNA, 13 bp, Artificial Sequence
  Oligonucleotide for detection of SNP TSC0042302
aaaaaaattatca

SEQ ID NO: 169303 - DNA, 13 bp, Artificial Sequence
  Oligonucleotide for detection of SNP TSC0042303
ttaagatagttta

SEQ ID NO: 169304 - DNA, 13 bp, Artificial Sequence
  Oligonucleotide for detection of SNP TSC0042303
taaactatcttaa

SEQ ID NO: 169305 - DNA, 13 bp, Artificial Sequence
  Oligonucleotide for detection of SNP TSC0042303
tggattattttga

SEQ ID NO: 169306 - DNA, 13 bp, Artificial Sequence
  Oligonucleotide for detection of SNP TSC0042303
tcaaaataatcca

SEQ ID NO: 169307 - DNA, 13 bp, Artificial Sequence
  Oligonucleotide for detection of SNP TSC0042304
tagaaataattgg

SEQ ID NO: 169308 - DNA, 13 bp, Artificial Sequence
  Oligonucleotide for detection of SNP TSC0042304
ccaattatttcta

SEQ ID NO: 169309 - DNA, 13 bp, Artificial Sequence
  Oligonucleotide for detection of SNP TSC0042304
tagaaaaaattgg

SEQ ID NO: 169310 - DNA, 13 bp, Artificial Sequence
  Oligonucleotide for detection of SNP TSC0042304
ccaattttttcta

SEQ ID NO: 169311 - DNA, 13 bp, Artificial Sequence
  Oligonucleotide for detection of SNP TSC0042305
tattaattttgay

SEQ ID NO: 169312 - DNA, 13 bp, Artificial Sequence
  Oligonucleotide for detection of SNP TSC0042305
rtcaaaattaata

SEQ ID NO: 169313 - DNA, 13 bp, Artificial Sequence
  Oligonucleotide for detection of SNP TSC0042305
tattaagtttgay

SEQ ID NO: 169314 - DNA, 13 bp, Artificial Sequence
  Oligonucleotide for detection of SNP TSC0042305
rtcaaacttaata

SEQ ID NO: 169315 - DNA, 13 bp, Artificial Sequence
  Oligonucleotide for detection of SNP TSC0042306
gtatggagtgtat

SEQ ID NO: 169316 - DNA, 13 bp, Artificial Sequence
  Oligonucleotide for detection of SNP TSC0042306
atacactccatac

SEQ ID NO: 169317 - DNA, 13 bp, Artificial Sequence
  Oligonucleotide for detection of SNP TSC0042306
gtatggtgtgtat

SEQ ID NO: 169318 - DNA, 13 bp, Artificial Sequence
  Oligonucleotide for detection of SNP TSC0042306
atacacaccatac

SEQ ID NO: 169319 - DNA, 13 bp, Artificial Sequence
  Oligonucleotide for detection of SNP TSC0042306
atatattttatgy

SEQ ID NO: 169320 - DNA, 13 bp, Artificial Sequence
  Oligonucleotide for detection of SNP TSC0042306
rcataaaatatat

SEQ ID NO: 169321 - DNA, 13 bp, Artificial Sequence
  Oligonucleotide for detection of SNP TSC0042306
atatatattatgy

SEQ ID NO: 169322 - DNA, 13 bp, Artificial Sequence
  Oligonucleotide for detection of SNP TSC0042306
rcataatatatat

SEQ ID NO: 169323 - DNA, 13 bp, Artificial Sequence
  Oligonucleotide for detection of SNP TSC0042307
atgttgatatata

SEQ ID NO: 169324 - DNA, 13 bp, Artificial Sequence
  Oligonucleotide for detection of SNP TSC0042307
tatatatcaacat

SEQ ID NO: 169325 - DNA, 13 bp, Artificial Sequence
  Oligonucleotide for detection of SNP TSC0042307
atgttgttatata

SEQ ID NO: 169326 - DNA, 13 bp, Artificial Sequence
  Oligonucleotide for detection of SNP TSC0042307
tatataacaacat

SEQ ID NO: 169327 - DNA, 13 bp, Artificial Sequence
  Oligonucleotide for detection of SNP TSC0042307
acgttgatatata

SEQ ID NO: 169328 - DNA, 13 bp, Artificial Sequence
  Oligonucleotide for detection of SNP TSC0042307
tatatatcaacgt

SEQ ID NO: 169329 - DNA, 13 bp, Artificial Sequence
  Oligonucleotide for detection of SNP TSC0042307
acgttgttatata

SEQ ID NO: 169330 - DNA, 13 bp, Artificial Sequence
  Oligonucleotide for detection of SNP TSC0042307
tatataacaacgt

SEQ ID NO: 169331 - DNA, 13 bp, Artificial Sequence
  Oligonucleotide for detection of SNP TSC0042307
tgtatgttagtgt

SEQ ID NO: 169332 - DNA, 13 bp, Artificial Sequence
  Oligonucleotide for detection of SNP TSC0042307
acactaacataca

SEQ ID NO: 169333 - DNA, 13 bp, Artificial Sequence
  Oligonucleotide for detection of SNP TSC0042307
tgtatgatagtgt

SEQ ID NO: 169334 - DNA, 13 bp, Artificial Sequence
  Oligonucleotide for detection of SNP TSC0042307
acactatcataca

SEQ ID NO: 169335 - DNA, 13 bp, Artificial Sequence
  Oligonucleotide for detection of SNP TSC0042307
tgtatgttagcgt

SEQ ID NO: 169336 - DNA, 13 bp, Artificial Sequence
  Oligonucleotide for detection of SNP TSC0042307
acgctaacataca

SEQ ID NO: 169337 - DNA, 13 bp, Artificial Sequence
  Oligonucleotide for detection of SNP TSC0042307
tgtatgatagcgt

SEQ ID NO: 169338 - DNA, 13 bp, Artificial Sequence
  Oligonucleotide for detection of SNP TSC0042307
acgctatcataca

SEQ ID NO: 169339 - DNA, 13 bp, Artificial Sequence
  Oligonucleotide for detection of SNP TSC0042309
tagtttagtatta

SEQ ID NO: 169340 - DNA, 13 bp, Artificial Sequence
  Oligonucleotide for detection of SNP TSC0042309
taatactaaacta

SEQ ID NO: 169341 - DNA, 13 bp, Artificial Sequence
  Oligonucleotide for detection of SNP TSC0042309
tagtttggtatta

SEQ ID NO: 169342 - DNA, 13 bp, Artificial Sequence
  Oligonucleotide for detection of SNP TSC0042309
taataccaaacta

SEQ ID NO: 169343 - DNA, 13 bp, Artificial Sequence
  Oligonucleotide for detection of SNP TSC0042310
ttttatgtaataa

SEQ ID NO: 169344 - DNA, 13 bp, Artificial Sequence
  Oligonucleotide for detection of SNP TSC0042310
ttattacataaaa

SEQ ID NO: 169345 - DNA, 13 bp, Artificial Sequence
  Oligonucleotide for detection of SNP TSC0042310
ttttatataataa

SEQ ID NO: 169346 - DNA, 13 bp, Artificial Sequence
  Oligonucleotide for detection of SNP TSC0042310
ttattatataaaa

SEQ ID NO: 169347 - DNA, 13 bp, Artificial Sequence
  Oligonucleotide for detection of SNP TSC0042311
ttttttttggtta

SEQ ID NO: 169348 - DNA, 13 bp, Artificial Sequence
  Oligonucleotide for detection of SNP TSC0042311
taaccaaaaaaaa

SEQ ID NO: 169349 - DNA, 13 bp, Artificial Sequence
  Oligonucleotide for detection of SNP TSC0042311
ttttttacggtta

SEQ ID NO: 169350 - DNA, 13 bp, Artificial Sequence
  Oligonucleotide for detection of SNP TSC0042311
taaccgtaaaaaa

SEQ ID NO: 169351 - DNA, 13 bp, Artificial Sequence
  Oligonucleotide for detection of SNP TSC0042311
tttttttcggtta

SEQ ID NO: 169352 - DNA, 13 bp, Artificial Sequence
  Oligonucleotide for detection of SNP TSC0042311
taaccgaaaaaaa

SEQ ID NO: 169353 - DNA, 13 bp, Artificial Sequence
  Oligonucleotide for detection of SNP TSC0042311
tgattgtgaagag

SEQ ID NO: 169354 - DNA, 13 bp, Artificial Sequence
  Oligonucleotide for detection of SNP TSC0042311
ctcttcacaatca

SEQ ID NO: 169355 - DNA, 13 bp, Artificial Sequence
  Oligonucleotide for detection of SNP TSC0042311
tgattgggaagag

SEQ ID NO: 169356 - DNA, 13 bp, Artificial Sequence
  Oligonucleotide for detection of SNP TSC0042311
ctcttcccaatca

SEQ ID NO: 169357 - DNA, 13 bp, Artificial Sequence
  Oligonucleotide for detection of SNP TSC0042311
tgatcgtgaagag

SEQ ID NO: 169358 - DNA, 13 bp, Artificial Sequence
  Oligonucleotide for detection of SNP TSC0042311
ctcttcacgatca

SEQ ID NO: 169359 - DNA, 13 bp, Artificial Sequence
  Oligonucleotide for detection of SNP TSC0042311
tgatcgggaagag

SEQ ID NO: 169360 - DNA, 13 bp, Artificial Sequence
  Oligonucleotide for detection of SNP TSC0042311
ctcttcccgatca

SEQ ID NO: 169361 - DNA, 13 bp, Artificial Sequence
  Oligonucleotide for detection of SNP TSC0042312
atggtgtttttat

SEQ ID NO: 169362 - DNA, 13 bp, Artificial Sequence
  Oligonucleotide for detection of SNP TSC0042312
ataaaaacaccat

SEQ ID NO: 169363 - DNA, 13 bp, Artificial Sequence
  Oligonucleotide for detection of SNP TSC0042312
atggtggttttat

SEQ ID NO: 169364 - DNA, 13 bp, Artificial Sequence
  Oligonucleotide for detection of SNP TSC0042312
ataaaaccaccat

SEQ ID NO: 169365 - DNA, 13 bp, Artificial Sequence
  Oligonucleotide for detection of SNP TSC0042312
ataggagtattat

SEQ ID NO: 169366 - DNA, 13 bp, Artificial Sequence
  Oligonucleotide for detection of SNP TSC0042312
ataatactcctat

SEQ ID NO: 169367 - DNA, 13 bp, Artificial Sequence
  Oligonucleotide for detection of SNP TSC0042312
ataggattattat

SEQ ID NO: 169368 - DNA, 13 bp, Artificial Sequence
  Oligonucleotide for detection of SNP TSC0042312
ataataatcctat

SEQ ID NO: 169369 - DNA, 13 bp, Artificial Sequence
  Oligonucleotide for detection of SNP TSC0042313
ttgtgggtaggay

SEQ ID NO: 169370 - DNA, 13 bp, Artificial Sequence
  Oligonucleotide for detection of SNP TSC0042313
rtcctacccacaa

SEQ ID NO: 169371 - DNA, 13 bp, Artificial Sequence
  Oligonucleotide for detection of SNP TSC0042313
ttgtggataggay

SEQ ID NO: 169372 - DNA, 13 bp, Artificial Sequence
  Oligonucleotide for detection of SNP TSC0042313
rtcctatccacaa

SEQ ID NO: 169373 - DNA, 13 bp, Artificial Sequence
  Oligonucleotide for detection of SNP TSC0042314
ttttttagttagy

SEQ ID NO: 169374 - DNA, 13 bp, Artificial Sequence
  Oligonucleotide for detection of SNP TSC0042314
rctaactaaaaaa

SEQ ID NO: 169375 - DNA, 13 bp, Artificial Sequence
  Oligonucleotide for detection of SNP TSC0042314
ttttttggttagy

SEQ ID NO: 169376 - DNA, 13 bp, Artificial Sequence
  Oligonucleotide for detection of SNP TSC0042314
rctaaccaaaaaa

SEQ ID NO: 169377 - DNA, 13 bp, Artificial Sequence
  Oligonucleotide for detection of SNP TSC0042314
tttttcggttagy

SEQ ID NO: 169378 - DNA, 13 bp, Artificial Sequence
  Oligonucleotide for detection of SNP TSC0042314
rctaaccgaaaaa

SEQ ID NO: 169379 - DNA, 13 bp, Artificial Sequence
  Oligonucleotide for detection of SNP TSC0042314
gttgattgggaag

SEQ ID NO: 169380 - DNA, 13 bp, Artificial Sequence
  Oligonucleotide for detection of SNP TSC0042314
cttcccaatcaac

SEQ ID NO: 169381 - DNA, 13 bp, Artificial Sequence
  Oligonucleotide for detection of SNP TSC0042314
gttgatcgggaag

SEQ ID NO: 169382 - DNA, 13 bp, Artificial Sequence
  Oligonucleotide for detection of SNP TSC0042314
cttcccgatcaac

SEQ ID NO: 169383 - DNA, 13 bp, Artificial Sequence
  Oligonucleotide for detection of SNP TSC0042315
tgggagtggtggg

SEQ ID NO: 169384 - DNA, 13 bp, Artificial Sequence
  Oligonucleotide for detection of SNP TSC0042315
cccaccactccca

SEQ ID NO: 169385 - DNA, 13 bp, Artificial Sequence
  Oligonucleotide for detection of SNP TSC0042315
tgggaggggtggg

SEQ ID NO: 169386 - DNA, 13 bp, Artificial Sequence
  Oligonucleotide for detection of SNP TSC0042315
cccacccctccca

SEQ ID NO: 169387 - DNA, 13 bp, Artificial Sequence
  Oligonucleotide for detection of SNP TSC0042316
ttttgtaaattat

SEQ ID NO: 169388 - DNA, 13 bp, Artificial Sequence
  Oligonucleotide for detection of SNP TSC0042316
ataatttacaaaa

SEQ ID NO: 169389 - DNA, 13 bp, Artificial Sequence
  Oligonucleotide for detection of SNP TSC0042316
ttttgttaattat

SEQ ID NO: 169390 - DNA, 13 bp, Artificial Sequence
  Oligonucleotide for detection of SNP TSC0042316
ataattaacaaaa

SEQ ID NO: 169391 - DNA, 13 bp, Artificial Sequence
  Oligonucleotide for detection of SNP TSC0042316
tttcgtaaattat

SEQ ID NO: 169392 - DNA, 13 bp, Artificial Sequence
  Oligonucleotide for detection of SNP TSC0042316
ataatttacgaaa

SEQ ID NO: 169393 - DNA, 13 bp, Artificial Sequence
  Oligonucleotide for detection of SNP TSC0042316
tttcgttaattat

SEQ ID NO: 169394 - DNA, 13 bp, Artificial Sequence
  Oligonucleotide for detection of SNP TSC0042316
ataattaacgaaa

SEQ ID NO: 169395 - DNA, 13 bp, Artificial Sequence
  Oligonucleotide for detection of SNP TSC0042316
atagtttgtgaag

SEQ ID NO: 169396 - DNA, 13 bp, Artificial Sequence
  Oligonucleotide for detection of SNP TSC0042316
cttcacaaactat

SEQ ID NO: 169397 - DNA, 13 bp, Artificial Sequence
  Oligonucleotide for detection of SNP TSC0042316
atagttggtgaag

SEQ ID NO: 169398 - DNA, 13 bp, Artificial Sequence
  Oligonucleotide for detection of SNP TSC0042316
cttcaccaactat

SEQ ID NO: 169399 - DNA, 13 bp, Artificial Sequence
  Oligonucleotide for detection of SNP TSC0042316
atagtttgcgaag

SEQ ID NO: 169400 - DNA, 13 bp, Artificial Sequence
  Oligonucleotide for detection of SNP TSC0042316
cttcgcaaactat

SEQ ID NO: 169401 - DNA, 13 bp, Artificial Sequence
  Oligonucleotide for detection of SNP TSC0042316
atagttggcgaag

SEQ ID NO: 169402 - DNA, 13 bp, Artificial Sequence
  Oligonucleotide for detection of SNP TSC0042316
cttcgccaactat

SEQ ID NO: 169403 - DNA, 13 bp, Artificial Sequence
  Oligonucleotide for detection of SNP TSC0042317
taaaaaaagatat

SEQ ID NO: 169404 - DNA, 13 bp, Artificial Sequence
  Oligonucleotide for detection of SNP TSC0042317
atatcttttttta

SEQ ID NO: 169405 - DNA, 13 bp, Artificial Sequence
  Oligonucleotide for detection of SNP TSC0042317
taaaaatagatat

SEQ ID NO: 169406 - DNA, 13 bp, Artificial Sequence
  Oligonucleotide for detection of SNP TSC0042317
atatctattttta

SEQ ID NO: 169407 - DNA, 13 bp, Artificial Sequence
  Oligonucleotide for detection of SNP TSC0042317
atgtttttttttg

SEQ ID NO: 169408 - DNA, 13 bp, Artificial Sequence
  Oligonucleotide for detection of SNP TSC0042317
caaaaaaaaacat

SEQ ID NO: 169409 - DNA, 13 bp, Artificial Sequence
  Oligonucleotide for detection of SNP TSC0042318
aaatttttgattt

SEQ ID NO: 169410 - DNA, 13 bp, Artificial Sequence
  Oligonucleotide for detection of SNP TSC0042318
aaatcaaaaattt

SEQ ID NO: 169411 - DNA, 13 bp, Artificial Sequence
  Oligonucleotide for detection of SNP TSC0042318
aaatttgtgattt

SEQ ID NO: 169412 - DNA, 13 bp, Artificial Sequence
  Oligonucleotide for detection of SNP TSC0042318
aaatcacaaattt

SEQ ID NO: 169413 - DNA, 13 bp, Artificial Sequence
  Oligonucleotide for detection of SNP TSC0042318
aaattagaaattt

SEQ ID NO: 169414 - DNA, 13 bp, Artificial Sequence
  Oligonucleotide for detection of SNP TSC0042318
aaatttctaattt

SEQ ID NO: 169415 - DNA, 13 bp, Artificial Sequence
  Oligonucleotide for detection of SNP TSC0042319
ataaaaatagggt

SEQ ID NO: 169416 - DNA, 13 bp, Artificial Sequence
  Oligonucleotide for detection of SNP TSC0042319
accctatttttat

SEQ ID NO: 169417 - DNA, 13 bp, Artificial Sequence
  Oligonucleotide for detection of SNP TSC0042319
ataaaattagggt

SEQ ID NO: 169418 - DNA, 13 bp, Artificial Sequence
  Oligonucleotide for detection of SNP TSC0042319
accctaattttat

SEQ ID NO: 169419 - DNA, 13 bp, Artificial Sequence
  Oligonucleotide for detection of SNP TSC0042319
attttagttttat

SEQ ID NO: 169420 - DNA, 13 bp, Artificial Sequence
  Oligonucleotide for detection of SNP TSC0042319
ataaaactaaaat

SEQ ID NO: 169421 - DNA, 13 bp, Artificial Sequence
  Oligonucleotide for detection of SNP TSC0042320
gttatgattaggy

SEQ ID NO: 169422 - DNA, 13 bp, Artificial Sequence
  Oligonucleotide for detection of SNP TSC0042320
rcctaatcataac

SEQ ID NO: 169423 - DNA, 13 bp, Artificial Sequence
  Oligonucleotide for detection of SNP TSC0042320
gttatggttaggy

SEQ ID NO: 169424 - DNA, 13 bp, Artificial Sequence
  Oligonucleotide for detection of SNP TSC0042320
rcctaaccataac

SEQ ID NO: 169425 - DNA, 13 bp, Artificial Sequence
  Oligonucleotide for detection of SNP TSC0042321
atgttatggaagy

SEQ ID NO: 169426 - DNA, 13 bp, Artificial Sequence
  Oligonucleotide for detection of SNP TSC0042321
rcttccataacat

SEQ ID NO: 169427 - DNA, 13 bp, Artificial Sequence
  Oligonucleotide for detection of SNP TSC0042321
atgttacggaagy

SEQ ID NO: 169428 - DNA, 13 bp, Artificial Sequence
  Oligonucleotide for detection of SNP TSC0042321
rcttccgtaacat

SEQ ID NO: 169429 - DNA, 13 bp, Artificial Sequence
  Oligonucleotide for detection of SNP TSC0042321
gtttttgtaatat

SEQ ID NO: 169430 - DNA, 13 bp, Artificial Sequence
  Oligonucleotide for detection of SNP TSC0042321
atattacaaaaac

SEQ ID NO: 169431 - DNA, 13 bp, Artificial Sequence
  Oligonucleotide for detection of SNP TSC0042321
gtttttataatat

SEQ ID NO: 169432 - DNA, 13 bp, Artificial Sequence
  Oligonucleotide for detection of SNP TSC0042321
atattataaaaac

SEQ ID NO: 169433 - DNA, 13 bp, Artificial Sequence
  Oligonucleotide for detection of SNP TSC0042321
gttttcgtaatat

SEQ ID NO: 169434 - DNA, 13 bp, Artificial Sequence
  Oligonucleotide for detection of SNP TSC0042321
atattacgaaaac

SEQ ID NO: 169435 - DNA, 13 bp, Artificial Sequence
  Oligonucleotide for detection of SNP TSC0042324
aaattttggggay

SEQ ID NO: 169436 - DNA, 13 bp, Artificial Sequence
  Oligonucleotide for detection of SNP TSC0042324
rtccccaaaattt

SEQ ID NO: 169437 - DNA, 13 bp, Artificial Sequence
  Oligonucleotide for detection of SNP TSC0042324
aaatttaggggay

SEQ ID NO: 169438 - DNA, 13 bp, Artificial Sequence
  Oligonucleotide for detection of SNP TSC0042324
rtcccctaaattt

SEQ ID NO: 169439 - DNA, 13 bp, Artificial Sequence
  Oligonucleotide for detection of SNP TSC0042326
ttttaaagtttga

SEQ ID NO: 169440 - DNA, 13 bp, Artificial Sequence
  Oligonucleotide for detection of SNP TSC0042326
tcaaactttaaaa

SEQ ID NO: 169441 - DNA, 13 bp, Artificial Sequence
  Oligonucleotide for detection of SNP TSC0042326
ttttaatgtttga

SEQ ID NO: 169442 - DNA, 13 bp, Artificial Sequence
  Oligonucleotide for detection of SNP TSC0042326
tcaaacattaaaa

SEQ ID NO: 169443 - DNA, 13 bp, Artificial Sequence
  Oligonucleotide for detection of SNP TSC0042326
ttaaattttaaaa

SEQ ID NO: 169444 - DNA, 13 bp, Artificial Sequence
  Oligonucleotide for detection of SNP TSC0042326
ttttaaaatttaa

SEQ ID NO: 169445 - DNA, 13 bp, Artificial Sequence
  Oligonucleotide for detection of SNP TSC0042326
ttaaatattaaaa

SEQ ID NO: 169446 - DNA, 13 bp, Artificial Sequence
  Oligonucleotide for detection of SNP TSC0042326
ttttaatatttaa

SEQ ID NO: 169447 - DNA, 13 bp, Artificial Sequence
  Oligonucleotide for detection of SNP TSC0042327
gtttgattatttt

SEQ ID NO: 169448 - DNA, 13 bp, Artificial Sequence
  Oligonucleotide for detection of SNP TSC0042327
aaaataatcaaac

SEQ ID NO: 169449 - DNA, 13 bp, Artificial Sequence
  Oligonucleotide for detection of SNP TSC0042327
aaagtatttaggy

SEQ ID NO: 169450 - DNA, 13 bp, Artificial Sequence
  Oligonucleotide for detection of SNP TSC0042327
rcctaaatacttt

SEQ ID NO: 169451 - DNA, 13 bp, Artificial Sequence
  Oligonucleotide for detection of SNP TSC0042327
aaagtaattaggy

SEQ ID NO: 169452 - DNA, 13 bp, Artificial Sequence
  Oligonucleotide for detection of SNP TSC0042327
rcctaattacttt

SEQ ID NO: 169453 - DNA, 13 bp, Artificial Sequence
  Oligonucleotide for detection of SNP TSC0042329
gtattatgataaa

SEQ ID NO: 169454 - DNA, 13 bp, Artificial Sequence
  Oligonucleotide for detection of SNP TSC0042329
tttatcataatac

SEQ ID NO: 169455 - DNA, 13 bp, Artificial Sequence
  Oligonucleotide for detection of SNP TSC0042329
gtattaggataaa

SEQ ID NO: 169456 - DNA, 13 bp, Artificial Sequence
  Oligonucleotide for detection of SNP TSC0042329
tttatcctaatac

SEQ ID NO: 169457 - DNA, 13 bp, Artificial Sequence
  Oligonucleotide for detection of SNP TSC0042329
gtattacgataaa

SEQ ID NO: 169458 - DNA, 13 bp, Artificial Sequence
  Oligonucleotide for detection of SNP TSC0042329
tttatcgtaatac

SEQ ID NO: 169459 - DNA, 13 bp, Artificial Sequence
  Oligonucleotide for detection of SNP TSC0042329
tttgttgtaatgy

SEQ ID NO: 169460 - DNA, 13 bp, Artificial Sequence
  Oligonucleotide for detection of SNP TSC0042329
rcattacaacaaa

SEQ ID NO: 169461 - DNA, 13 bp, Artificial Sequence
  Oligonucleotide for detection of SNP TSC0042329
tttgttttaatgy

SEQ ID NO: 169462 - DNA, 13 bp, Artificial Sequence
  Oligonucleotide for detection of SNP TSC0042329
rcattaaaacaaa

SEQ ID NO: 169463 - DNA, 13 bp, Artificial Sequence
  Oligonucleotide for detection of SNP TSC0042329
tttgtcgtaatgy

SEQ ID NO: 169464 - DNA, 13 bp, Artificial Sequence
  Oligonucleotide for detection of SNP TSC0042329
rcattacgacaaa

SEQ ID NO: 169465 - DNA, 13 bp, Artificial Sequence
  Oligonucleotide for detection of SNP TSC0042330
tttttattaaaat

SEQ ID NO: 169466 - DNA, 13 bp, Artificial Sequence
  Oligonucleotide for detection of SNP TSC0042330
attttaataaaaa

SEQ ID NO: 169467 - DNA, 13 bp, Artificial Sequence
  Oligonucleotide for detection of SNP TSC0042330
attttgttgaaga

SEQ ID NO: 169468 - DNA, 13 bp, Artificial Sequence
  Oligonucleotide for detection of SNP TSC0042330
tcttcaacaaaat

SEQ ID NO: 169469 - DNA, 13 bp, Artificial Sequence
  Oligonucleotide for detection of SNP TSC0042330
attttggtgaaga

SEQ ID NO: 169470 - DNA, 13 bp, Artificial Sequence
  Oligonucleotide for detection of SNP TSC0042330
tcttcaccaaaat

SEQ ID NO: 169471 - DNA, 13 bp, Artificial Sequence
  Oligonucleotide for detection of SNP TSC0042331
tttttagggtgat

SEQ ID NO: 169472 - DNA, 13 bp, Artificial Sequence
  Oligonucleotide for detection of SNP TSC0042331
atcaccctaaaaa

SEQ ID NO: 169473 - DNA, 13 bp, Artificial Sequence
  Oligonucleotide for detection of SNP TSC0042331
tttttagggcgat

SEQ ID NO: 169474 - DNA, 13 bp, Artificial Sequence
  Oligonucleotide for detection of SNP TSC0042331
atcgccctaaaaa

SEQ ID NO: 169475 - DNA, 13 bp, Artificial Sequence
  Oligonucleotide for detection of SNP TSC0042331
tttttaaggcgat

SEQ ID NO: 169476 - DNA, 13 bp, Artificial Sequence
  Oligonucleotide for detection of SNP TSC0042331
atcgccttaaaaa

SEQ ID NO: 169477 - DNA, 13 bp, Artificial Sequence
  Oligonucleotide for detection of SNP TSC0042332
agtaagatattgg

SEQ ID NO: 169478 - DNA, 13 bp, Artificial Sequence
  Oligonucleotide for detection of SNP TSC0042332
ccaatatcttact

SEQ ID NO: 169479 - DNA, 13 bp, Artificial Sequence
  Oligonucleotide for detection of SNP TSC0042332
agtaagttattgg

SEQ ID NO: 169480 - DNA, 13 bp, Artificial Sequence
  Oligonucleotide for detection of SNP TSC0042332
ccaataacttact

SEQ ID NO: 169481 - DNA, 13 bp, Artificial Sequence
  Oligonucleotide for detection of SNP TSC0042332
ttagtgttttgtt

SEQ ID NO: 169482 - DNA, 13 bp, Artificial Sequence
  Oligonucleotide for detection of SNP TSC0042332
aacaaaacactaa

SEQ ID NO: 169483 - DNA, 13 bp, Artificial Sequence
  Oligonucleotide for detection of SNP TSC0042332
ttagtgatttgtt

SEQ ID NO: 169484 - DNA, 13 bp, Artificial Sequence
  Oligonucleotide for detection of SNP TSC0042332
aacaaatcactaa

SEQ ID NO: 169485 - DNA, 13 bp, Artificial Sequence
  Oligonucleotide for detection of SNP TSC0042337
attaagatatggt

SEQ ID NO: 169486 - DNA, 13 bp, Artificial Sequence
  Oligonucleotide for detection of SNP TSC0042337
accatatcttaat

SEQ ID NO: 169487 - DNA, 13 bp, Artificial Sequence
  Oligonucleotide for detection of SNP TSC0042337
attaaggtatggt

SEQ ID NO: 169488 - DNA, 13 bp, Artificial Sequence
  Oligonucleotide for detection of SNP TSC0042337
accataccttaat

SEQ ID NO: 169489 - DNA, 13 bp, Artificial Sequence
  Oligonucleotide for detection of SNP TSC0042339
gattaggaaggtt

SEQ ID NO: 169490 - DNA, 13 bp, Artificial Sequence
  Oligonucleotide for detection of SNP TSC0042339
aaccttcctaatc

SEQ ID NO: 169491 - DNA, 13 bp, Artificial Sequence
  Oligonucleotide for detection of SNP TSC0042339
gattagaaaggtt

SEQ ID NO: 169492 - DNA, 13 bp, Artificial Sequence
  Oligonucleotide for detection of SNP TSC0042339
aacctttctaatc

SEQ ID NO: 169493 - DNA, 13 bp, Artificial Sequence
  Oligonucleotide for detection of SNP TSC0042340
ggttttaaaattt

SEQ ID NO: 169494 - DNA, 13 bp, Artificial Sequence
  Oligonucleotide for detection of SNP TSC0042340
aaattttaaaacc

SEQ ID NO: 169495 - DNA, 13 bp, Artificial Sequence
  Oligonucleotide for detection of SNP TSC0042340
aggttttggaaty

SEQ ID NO: 169496 - DNA, 13 bp, Artificial Sequence
  Oligonucleotide for detection of SNP TSC0042340
rattccaaaacct

SEQ ID NO: 169497 - DNA, 13 bp, Artificial Sequence
  Oligonucleotide for detection of SNP TSC0042340
aggtttcggaaty

SEQ ID NO: 169498 - DNA, 13 bp, Artificial Sequence
  Oligonucleotide for detection of SNP TSC0042340
rattccgaaacct

SEQ ID NO: 169499 - DNA, 13 bp, Artificial Sequence
  Oligonucleotide for detection of SNP TSC0042341
gtttttgtaattg

SEQ ID NO: 169500 - DNA, 13 bp, Artificial Sequence
  Oligonucleotide for detection of SNP TSC0042341
caattacaaaaac

SEQ ID NO: 169501 - DNA, 13 bp, Artificial Sequence
  Oligonucleotide for detection of SNP TSC0042341
gtttttataattg

SEQ ID NO: 169502 - DNA, 13 bp, Artificial Sequence
  Oligonucleotide for detection of SNP TSC0042341
caattataaaaac

SEQ ID NO: 169503 - DNA, 13 bp, Artificial Sequence
  Oligonucleotide for detection of SNP TSC0042342
agattaaggtttg

SEQ ID NO: 169504 - DNA, 13 bp, Artificial Sequence
  Oligonucleotide for detection of SNP TSC0042342
caaaccttaatct

SEQ ID NO: 169505 - DNA, 13 bp, Artificial Sequence
  Oligonucleotide for detection of SNP TSC0042342
agattagggtttg

SEQ ID NO: 169506 - DNA, 13 bp, Artificial Sequence
  Oligonucleotide for detection of SNP TSC0042342
caaaccctaatct

SEQ ID NO: 169507 - DNA, 13 bp, Artificial Sequence
  Oligonucleotide for detection of SNP TSC0042344
ggagttggaggtt

SEQ ID NO: 169508 - DNA, 13 bp, Artificial Sequence
  Oligonucleotide for detection of SNP TSC0042344
aacctccaactcc

SEQ ID NO: 169509 - DNA, 13 bp, Artificial Sequence
  Oligonucleotide for detection of SNP TSC0042344
ggagttagaggtt

SEQ ID NO: 169510 - DNA, 13 bp, Artificial Sequence
  Oligonucleotide for detection of SNP TSC0042344
aacctctaactcc

SEQ ID NO: 169511 - DNA, 13 bp, Artificial Sequence
  Oligonucleotide for detection of SNP TSC0042349
ggaaaatggaaga

SEQ ID NO: 169512 - DNA, 13 bp, Artificial Sequence
  Oligonucleotide for detection of SNP TSC0042349
tcttccattttcc

SEQ ID NO: 169513 - DNA, 13 bp, Artificial Sequence
  Oligonucleotide for detection of SNP TSC0042349
ggaaaacggaaga

SEQ ID NO: 169514 - DNA, 13 bp, Artificial Sequence
  Oligonucleotide for detection of SNP TSC0042349
tcttccgttttcc

SEQ ID NO: 169515 - DNA, 13 bp, Artificial Sequence
  Oligonucleotide for detection of SNP TSC0042350
attaataatgaaa

SEQ ID NO: 169516 - DNA, 13 bp, Artificial Sequence
  Oligonucleotide for detection of SNP TSC0042350
tttcattattaat

SEQ ID NO: 169517 - DNA, 13 bp, Artificial Sequence
  Oligonucleotide for detection of SNP TSC0042350
attaatgatgaaa

SEQ ID NO: 169518 - DNA, 13 bp, Artificial Sequence
  Oligonucleotide for detection of SNP TSC0042350
tttcatcattaat

SEQ ID NO: 169519 - DNA, 13 bp, Artificial Sequence
  Oligonucleotide for detection of SNP TSC0042350
attaacgatgaaa

SEQ ID NO: 169520 - DNA, 13 bp, Artificial Sequence
  Oligonucleotide for detection of SNP TSC0042350
tttcatcgttaat

SEQ ID NO: 169521 - DNA, 13 bp, Artificial Sequence
  Oligonucleotide for detection of SNP TSC0042351
atatagtgtaatt

SEQ ID NO: 169522 - DNA, 13 bp, Artificial Sequence
  Oligonucleotide for detection of SNP TSC0042351
aattacactatat

SEQ ID NO: 169523 - DNA, 13 bp, Artificial Sequence
  Oligonucleotide for detection of SNP TSC0042351
atatagcgtaatt

SEQ ID NO: 169524 - DNA, 13 bp, Artificial Sequence
  Oligonucleotide for detection of SNP TSC0042351
aattacgctatat

SEQ ID NO: 169525 - DNA, 13 bp, Artificial Sequence
  Oligonucleotide for detection of SNP TSC0042351
agttatgttgtgt

SEQ ID NO: 169526 - DNA, 13 bp, Artificial Sequence
  Oligonucleotide for detection of SNP TSC0042351
acacaacataact

SEQ ID NO: 169527 - DNA, 13 bp, Artificial Sequence
  Oligonucleotide for detection of SNP TSC0042351
agttatattgtgt

SEQ ID NO: 169528 - DNA, 13 bp, Artificial Sequence
  Oligonucleotide for detection of SNP TSC0042351
acacaatataact

SEQ ID NO: 169529 - DNA, 13 bp, Artificial Sequence
  Oligonucleotide for detection of SNP TSC0042351
agttacgttgtgt

SEQ ID NO: 169530 - DNA, 13 bp, Artificial Sequence
  Oligonucleotide for detection of SNP TSC0042351
acacaacgtaact

SEQ ID NO: 169531 - DNA, 13 bp, Artificial Sequence
  Oligonucleotide for detection of SNP TSC0042352
atagttatgaatt

SEQ ID NO: 169532 - DNA, 13 bp, Artificial Sequence
  Oligonucleotide for detection of SNP TSC0042352
aattcataactat

SEQ ID NO: 169533 - DNA, 13 bp, Artificial Sequence
  Oligonucleotide for detection of SNP TSC0042352
atagttgtgaatt

SEQ ID NO: 169534 - DNA, 13 bp, Artificial Sequence
  Oligonucleotide for detection of SNP TSC0042352
aattcacaactat

SEQ ID NO: 169535 - DNA, 13 bp, Artificial Sequence
  Oligonucleotide for detection of SNP TSC0042352
atagtcgtgaatt

SEQ ID NO: 169536 - DNA, 13 bp, Artificial Sequence
  Oligonucleotide for detection of SNP TSC0042352
aattcacgactat

SEQ ID NO: 169537 - DNA, 13 bp, Artificial Sequence
  Oligonucleotide for detection of SNP TSC0042352
aatttatggttat

SEQ ID NO: 169538 - DNA, 13 bp, Artificial Sequence
  Oligonucleotide for detection of SNP TSC0042352
ataaccataaatt

SEQ ID NO: 169539 - DNA, 13 bp, Artificial Sequence
  Oligonucleotide for detection of SNP TSC0042352
aatttacggttat

SEQ ID NO: 169540 - DNA, 13 bp, Artificial Sequence
  Oligonucleotide for detection of SNP TSC0042352
ataaccgtaaatt

SEQ ID NO: 169541 - DNA, 13 bp, Artificial Sequence
  Oligonucleotide for detection of SNP TSC0005206
ggaagatgtattt

SEQ ID NO: 169542 - DNA, 13 bp, Artificial Sequence
  Oligonucleotide for detection of SNP TSC0005206
aaatacatcttcc

SEQ ID NO: 169543 - DNA, 13 bp, Artificial Sequence
  Oligonucleotide for detection of SNP TSC0005206
ggaagacgtattt

SEQ ID NO: 169544 - DNA, 13 bp, Artificial Sequence
  Oligonucleotide for detection of SNP TSC0005206
aaatacgtcttcc

SEQ ID NO: 169545 - DNA, 13 bp, Artificial Sequence
  Oligonucleotide for detection of SNP TSC0005206
aaatgtattttty

SEQ ID NO: 169546 - DNA, 13 bp, Artificial Sequence
  Oligonucleotide for detection of SNP TSC0005206
raaaaatacattt

SEQ ID NO: 169547 - DNA, 13 bp, Artificial Sequence
  Oligonucleotide for detection of SNP TSC0005206
aaatgcgttttty

SEQ ID NO: 169548 - DNA, 13 bp, Artificial Sequence
  Oligonucleotide for detection of SNP TSC0005206
raaaaacgcattt

SEQ ID NO: 169549 - DNA, 13 bp, Artificial Sequence
  Oligonucleotide for detection of SNP TSC0005207
ataggtaaataga

SEQ ID NO: 169550 - DNA, 13 bp, Artificial Sequence
  Oligonucleotide for detection of SNP TSC0005207
tctatttacctat

SEQ ID NO: 169551 - DNA, 13 bp, Artificial Sequence
  Oligonucleotide for detection of SNP TSC0005207
ataggtgaataga

SEQ ID NO: 169552 - DNA, 13 bp, Artificial Sequence
  Oligonucleotide for detection of SNP TSC0005207
tctattcacctat

SEQ ID NO: 169553 - DNA, 13 bp, Artificial Sequence
  Oligonucleotide for detection of SNP TSC0005208
agtgtgaaagatg

SEQ ID NO: 169554 - DNA, 13 bp, Artificial Sequence
  Oligonucleotide for detection of SNP TSC0005208
catctttcacact

SEQ ID NO: 169555 - DNA, 13 bp, Artificial Sequence
  Oligonucleotide for detection of SNP TSC0005208
agtgtggaagatg

SEQ ID NO: 169556 - DNA, 13 bp, Artificial Sequence
  Oligonucleotide for detection of SNP TSC0005208
catcttccacact

SEQ ID NO: 169557 - DNA, 13 bp, Artificial Sequence
  Oligonucleotide for detection of SNP TSC0042360
tttataaggtaga

SEQ ID NO: 169558 - DNA, 13 bp, Artificial Sequence
  Oligonucleotide for detection of SNP TSC0042360
tctaccttataaa

SEQ ID NO: 169559 - DNA, 13 bp, Artificial Sequence
  Oligonucleotide for detection of SNP TSC0042360
tttatatggtaga

SEQ ID NO: 169560 - DNA, 13 bp, Artificial Sequence
  Oligonucleotide for detection of SNP TSC0042360
tctaccatataaa

SEQ ID NO: 169561 - DNA, 13 bp, Artificial Sequence
  Oligonucleotide for detection of SNP TSC0042360
tttattttataaa

SEQ ID NO: 169562 - DNA, 13 bp, Artificial Sequence
  Oligonucleotide for detection of SNP TSC0042360
tttataaaataaa

SEQ ID NO: 169563 - DNA, 13 bp, Artificial Sequence
  Oligonucleotide for detection of SNP TSC0007871
aaaaaaagaatag

SEQ ID NO: 169564 - DNA, 13 bp, Artificial Sequence
  Oligonucleotide for detection of SNP TSC0007871
ctattcttttttt

SEQ ID NO: 169565 - DNA, 13 bp, Artificial Sequence
  Oligonucleotide for detection of SNP TSC0007871
aaaaaatgaatag

SEQ ID NO: 169566 - DNA, 13 bp, Artificial Sequence
  Oligonucleotide for detection of SNP TSC0007871
ctattcatttttt

SEQ ID NO: 169567 - DNA, 13 bp, Artificial Sequence
  Oligonucleotide for detection of SNP TSC0042362
aggtttatgatta

SEQ ID NO: 169568 - DNA, 13 bp, Artificial Sequence
  Oligonucleotide for detection of SNP TSC0042362
taatcataaacct

SEQ ID NO: 169569 - DNA, 13 bp, Artificial Sequence
  Oligonucleotide for detection of SNP TSC0042362
aggtttttgatta

SEQ ID NO: 169570 - DNA, 13 bp, Artificial Sequence
  Oligonucleotide for detection of SNP TSC0042362
taatcaaaaacct

SEQ ID NO: 169571 - DNA, 13 bp, Artificial Sequence
  Oligonucleotide for detection of SNP TSC0042362
taattaggagttt

SEQ ID NO: 169572 - DNA, 13 bp, Artificial Sequence
  Oligonucleotide for detection of SNP TSC0042362
aaactcctaatta

SEQ ID NO: 169573 - DNA, 13 bp, Artificial Sequence
  Oligonucleotide for detection of SNP TSC0042363
attttattttgta

SEQ ID NO: 169574 - DNA, 13 bp, Artificial Sequence
  Oligonucleotide for detection of SNP TSC0042363
tacaaaataaaat

SEQ ID NO: 169575 - DNA, 13 bp, Artificial Sequence
  Oligonucleotide for detection of SNP TSC0042363
attttagtttgta

SEQ ID NO: 169576 - DNA, 13 bp, Artificial Sequence
  Oligonucleotide for detection of SNP TSC0042363
tacaaactaaaat

SEQ ID NO: 169577 - DNA, 13 bp, Artificial Sequence
  Oligonucleotide for detection of SNP TSC0042363
attttatttcgta

SEQ ID NO: 169578 - DNA, 13 bp, Artificial Sequence
  Oligonucleotide for detection of SNP TSC0042363
tacgaaataaaat

SEQ ID NO: 169579 - DNA, 13 bp, Artificial Sequence
  Oligonucleotide for detection of SNP TSC0042363
attttagttcgta

SEQ ID NO: 169580 - DNA, 13 bp, Artificial Sequence
  Oligonucleotide for detection of SNP TSC0042363
tacgaactaaaat

SEQ ID NO: 169581 - DNA, 13 bp, Artificial Sequence
  Oligonucleotide for detection of SNP TSC0042363
tgtggggtggggt

SEQ ID NO: 169582 - DNA, 13 bp, Artificial Sequence
  Oligonucleotide for detection of SNP TSC0042363
accccaccccaca

SEQ ID NO: 169583 - DNA, 13 bp, Artificial Sequence
  Oligonucleotide for detection of SNP TSC0042363
tgtgggttggggt

SEQ ID NO: 169584 - DNA, 13 bp, Artificial Sequence
  Oligonucleotide for detection of SNP TSC0042363
accccaacccaca

SEQ ID NO: 169585 - DNA, 13 bp, Artificial Sequence
  Oligonucleotide for detection of SNP TSC0042363
tgcggggtggggt

SEQ ID NO: 169586 - DNA, 13 bp, Artificial Sequence
  Oligonucleotide for detection of SNP TSC0042363
accccaccccgca

SEQ ID NO: 169587 - DNA, 13 bp, Artificial Sequence
  Oligonucleotide for detection of SNP TSC0042363
tgcgggttggggt

SEQ ID NO: 169588 - DNA, 13 bp, Artificial Sequence
  Oligonucleotide for detection of SNP TSC0042363
accccaacccgca

SEQ ID NO: 169589 - DNA, 13 bp, Artificial Sequence
  Oligonucleotide for detection of SNP TSC0042364
tggtataagtttt

SEQ ID NO: 169590 - DNA, 13 bp, Artificial Sequence
  Oligonucleotide for detection of SNP TSC0042364
aaaacttatacca

SEQ ID NO: 169591 - DNA, 13 bp, Artificial Sequence
  Oligonucleotide for detection of SNP TSC0042364
tggtatgagtttt

SEQ ID NO: 169592 - DNA, 13 bp, Artificial Sequence
  Oligonucleotide for detection of SNP TSC0042364
aaaactcatacca

SEQ ID NO: 169593 - DNA, 13 bp, Artificial Sequence
  Oligonucleotide for detection of SNP TSC0042365
attgttgttgaga

SEQ ID NO: 169594 - DNA, 13 bp, Artificial Sequence
  Oligonucleotide for detection of SNP TSC0042365
tctcaacaacaat

SEQ ID NO: 169595 - DNA, 13 bp, Artificial Sequence
  Oligonucleotide for detection of SNP TSC0042365
attgttattgaga

SEQ ID NO: 169596 - DNA, 13 bp, Artificial Sequence
  Oligonucleotide for detection of SNP TSC0042365
tctcaataacaat

SEQ ID NO: 169597 - DNA, 13 bp, Artificial Sequence
  Oligonucleotide for detection of SNP TSC0042366
tgattatggttty

SEQ ID NO: 169598 - DNA, 13 bp, Artificial Sequence
  Oligonucleotide for detection of SNP TSC0042366
raaaccataatca

SEQ ID NO: 169599 - DNA, 13 bp, Artificial Sequence
  Oligonucleotide for detection of SNP TSC0042366
tgattacggttty

SEQ ID NO: 169600 - DNA, 13 bp, Artificial Sequence
  Oligonucleotide for detection of SNP TSC0042366
raaaccgtaatca

SEQ ID NO: 169601 - DNA, 13 bp, Artificial Sequence
  Oligonucleotide for detection of SNP TSC0042366
ggagttgtgatta

SEQ ID NO: 169602 - DNA, 13 bp, Artificial Sequence
  Oligonucleotide for detection of SNP TSC0042366
taatcacaactcc

SEQ ID NO: 169603 - DNA, 13 bp, Artificial Sequence
  Oligonucleotide for detection of SNP TSC0042366
ggagttatgatta

SEQ ID NO: 169604 - DNA, 13 bp, Artificial Sequence
  Oligonucleotide for detection of SNP TSC0042366
taatcataactcc

SEQ ID NO: 169605 - DNA, 13 bp, Artificial Sequence
  Oligonucleotide for detection of SNP TSC0042366
ggagtcgtgatta

SEQ ID NO: 169606 - DNA, 13 bp, Artificial Sequence
  Oligonucleotide for detection of SNP TSC0042366
taatcacgactcc

SEQ ID NO: 169607 - DNA, 13 bp, Artificial Sequence
  Oligonucleotide for detection of SNP TSC0042367
agagatcggtagg

SEQ ID NO: 169608 - DNA, 13 bp, Artificial Sequence
  Oligonucleotide for detection of SNP TSC0042367
cctaccgatctct

SEQ ID NO: 169609 - DNA, 13 bp, Artificial Sequence
  Oligonucleotide for detection of SNP TSC0042367
tttgttagttttt

SEQ ID NO: 169610 - DNA, 13 bp, Artificial Sequence
  Oligonucleotide for detection of SNP TSC0042367
aaaaactaacaaa

SEQ ID NO: 169611 - DNA, 13 bp, Artificial Sequence
  Oligonucleotide for detection of SNP TSC0042368
ataattgtatttt

SEQ ID NO: 169612 - DNA, 13 bp, Artificial Sequence
  Oligonucleotide for detection of SNP TSC0042368
aaaatacaattat

SEQ ID NO: 169613 - DNA, 13 bp, Artificial Sequence
  Oligonucleotide for detection of SNP TSC0042368
ataattatatttt

SEQ ID NO: 169614 - DNA, 13 bp, Artificial Sequence
  Oligonucleotide for detection of SNP TSC0042368
aaaatataattat

SEQ ID NO: 169615 - DNA, 13 bp, Artificial Sequence
  Oligonucleotide for detection of SNP TSC0042369
gatatatgggtaa

SEQ ID NO: 169616 - DNA, 13 bp, Artificial Sequence
  Oligonucleotide for detection of SNP TSC0042369
ttacccatatatc

SEQ ID NO: 169617 - DNA, 13 bp, Artificial Sequence
  Oligonucleotide for detection of SNP TSC0042369
gatatacgggtaa

SEQ ID NO: 169618 - DNA, 13 bp, Artificial Sequence
  Oligonucleotide for detection of SNP TSC0042369
ttacccgtatatc

SEQ ID NO: 169619 - DNA, 13 bp, Artificial Sequence
  Oligonucleotide for detection of SNP TSC0042369
ttatttatataty

SEQ ID NO: 169620 - DNA, 13 bp, Artificial Sequence
  Oligonucleotide for detection of SNP TSC0042369
ratatataaataa

SEQ ID NO: 169621 - DNA, 13 bp, Artificial Sequence
  Oligonucleotide for detection of SNP TSC0042369
ttattcgtataty

SEQ ID NO: 169622 - DNA, 13 bp, Artificial Sequence
  Oligonucleotide for detection of SNP TSC0042369
ratatacgaataa

SEQ ID NO: 169623 - DNA, 13 bp, Artificial Sequence
  Oligonucleotide for detection of SNP TSC0042370
tgggtttgtttgg

SEQ ID NO: 169624 - DNA, 13 bp, Artificial Sequence
  Oligonucleotide for detection of SNP TSC0042370
ccaaacaaaccca

SEQ ID NO: 169625 - DNA, 13 bp, Artificial Sequence
  Oligonucleotide for detection of SNP TSC0042370
tgggttcgtttgg

SEQ ID NO: 169626 - DNA, 13 bp, Artificial Sequence
  Oligonucleotide for detection of SNP TSC0042370
ccaaacgaaccca

SEQ ID NO: 169627 - DNA, 13 bp, Artificial Sequence
  Oligonucleotide for detection of SNP TSC0042370
ttagatggattta

SEQ ID NO: 169628 - DNA, 13 bp, Artificial Sequence
  Oligonucleotide for detection of SNP TSC0042370
taaatccatctaa

SEQ ID NO: 169629 - DNA, 13 bp, Artificial Sequence
  Oligonucleotide for detection of SNP TSC0042370
ttagatagattta

SEQ ID NO: 169630 - DNA, 13 bp, Artificial Sequence
  Oligonucleotide for detection of SNP TSC0042370
taaatctatctaa

SEQ ID NO: 169631 - DNA, 13 bp, Artificial Sequence
  Oligonucleotide for detection of SNP TSC0042370
ttagacggattta

SEQ ID NO: 169632 - DNA, 13 bp, Artificial Sequence
  Oligonucleotide for detection of SNP TSC0042370
taaatccgtctaa

SEQ ID NO: 169633 - DNA, 13 bp, Artificial Sequence
  Oligonucleotide for detection of SNP TSC0042371
taggagaagtagg

SEQ ID NO: 169634 - DNA, 13 bp, Artificial Sequence
  Oligonucleotide for detection of SNP TSC0042371
cctacttctccta

SEQ ID NO: 169635 - DNA, 13 bp, Artificial Sequence
  Oligonucleotide for detection of SNP TSC0042371
taggagtagtagg

SEQ ID NO: 169636 - DNA, 13 bp, Artificial Sequence
  Oligonucleotide for detection of SNP TSC0042371
cctactactccta

SEQ ID NO: 169637 - DNA, 13 bp, Artificial Sequence
  Oligonucleotide for detection of SNP TSC0004935
agataaaaaaggg

SEQ ID NO: 169638 - DNA, 13 bp, Artificial Sequence
  Oligonucleotide for detection of SNP TSC0004935
cccttttttatct

SEQ ID NO: 169639 - DNA, 13 bp, Artificial Sequence
  Oligonucleotide for detection of SNP TSC0004935
agataagaaaggg

SEQ ID NO: 169640 - DNA, 13 bp, Artificial Sequence
  Oligonucleotide for detection of SNP TSC0004935
ccctttcttatct

SEQ ID NO: 169641 - DNA, 13 bp, Artificial Sequence
  Oligonucleotide for detection of SNP TSC0042373
atggaaatgtaag

SEQ ID NO: 169642 - DNA, 13 bp, Artificial Sequence
  Oligonucleotide for detection of SNP TSC0042373
cttacatttccat

SEQ ID NO: 169643 - DNA, 13 bp, Artificial Sequence
  Oligonucleotide for detection of SNP TSC0042373
atggaattgtaag

SEQ ID NO: 169644 - DNA, 13 bp, Artificial Sequence
  Oligonucleotide for detection of SNP TSC0042373
cttacaattccat

SEQ ID NO: 169645 - DNA, 13 bp, Artificial Sequence
  Oligonucleotide for detection of SNP TSC0042373
tttatatttttat

SEQ ID NO: 169646 - DNA, 13 bp, Artificial Sequence
  Oligonucleotide for detection of SNP TSC0042373
ataaaaatataaa

SEQ ID NO: 169647 - DNA, 13 bp, Artificial Sequence
  Oligonucleotide for detection of SNP TSC0042373
tttatagttttat

SEQ ID NO: 169648 - DNA, 13 bp, Artificial Sequence
  Oligonucleotide for detection of SNP TSC0042373
ataaaactataaa

SEQ ID NO: 169649 - DNA, 13 bp, Artificial Sequence
  Oligonucleotide for detection of SNP TSC0042381
atatttatatttt

SEQ ID NO: 169650 - DNA, 13 bp, Artificial Sequence
  Oligonucleotide for detection of SNP TSC0042381
aaaatataaatat

SEQ ID NO: 169651 - DNA, 13 bp, Artificial Sequence
  Oligonucleotide for detection of SNP TSC0042381
atatttttatttt

SEQ ID NO: 169652 - DNA, 13 bp, Artificial Sequence
  Oligonucleotide for detection of SNP TSC0042381
aaaataaaaatat

SEQ ID NO: 169653 - DNA, 13 bp, Artificial Sequence
  Oligonucleotide for detection of SNP TSC0042382
ggtttgttttttt

SEQ ID NO: 169654 - DNA, 13 bp, Artificial Sequence
  Oligonucleotide for detection of SNP TSC0042382
aaaaaaacaaacc

SEQ ID NO: 169655 - DNA, 13 bp, Artificial Sequence
  Oligonucleotide for detection of SNP TSC0042382
agaggaatagaty

SEQ ID NO: 169656 - DNA, 13 bp, Artificial Sequence
  Oligonucleotide for detection of SNP TSC0042382
ratctattcctct

SEQ ID NO: 169657 - DNA, 13 bp, Artificial Sequence
  Oligonucleotide for detection of SNP TSC0042382
agaggattagaty

SEQ ID NO: 169658 - DNA, 13 bp, Artificial Sequence
  Oligonucleotide for detection of SNP TSC0042382
ratctaatcctct

SEQ ID NO: 169659 - DNA, 13 bp, Artificial Sequence
  Oligonucleotide for detection of SNP TSC0042383
atgataataatay

SEQ ID NO: 169660 - DNA, 13 bp, Artificial Sequence
  Oligonucleotide for detection of SNP TSC0042383
rtattattatcat

SEQ ID NO: 169661 - DNA, 13 bp, Artificial Sequence
  Oligonucleotide for detection of SNP TSC0042383
atgatattaatay

SEQ ID NO: 169662 - DNA, 13 bp, Artificial Sequence
  Oligonucleotide for detection of SNP TSC0042383
rtattaatatcat

SEQ ID NO: 169663 - DNA, 13 bp, Artificial Sequence
  Oligonucleotide for detection of SNP TSC0042383
gtgttattattat

SEQ ID NO: 169664 - DNA, 13 bp, Artificial Sequence
  Oligonucleotide for detection of SNP TSC0042383
ataataataacac

SEQ ID NO: 169665 - DNA, 13 bp, Artificial Sequence
  Oligonucleotide for detection of SNP TSC0042383
gtgttaatattat

SEQ ID NO: 169666 - DNA, 13 bp, Artificial Sequence
  Oligonucleotide for detection of SNP TSC0042383
ataatattaacac

SEQ ID NO: 169667 - DNA, 13 bp, Artificial Sequence
  Oligonucleotide for detection of SNP TSC0042384
aatgatattaata

SEQ ID NO: 169668 - DNA, 13 bp, Artificial Sequence
  Oligonucleotide for detection of SNP TSC0042384
tattaatatcatt

SEQ ID NO: 169669 - DNA, 13 bp, Artificial Sequence
  Oligonucleotide for detection of SNP TSC0042384
aatgatgttaata

SEQ ID NO: 169670 - DNA, 13 bp, Artificial Sequence
  Oligonucleotide for detection of SNP TSC0042384
tattaacatcatt

SEQ ID NO: 169671 - DNA, 13 bp, Artificial Sequence
  Oligonucleotide for detection of SNP TSC0006269
gaatgagtaatty

SEQ ID NO: 169672 - DNA, 13 bp, Artificial Sequence
  Oligonucleotide for detection of SNP TSC0006269
raattactcattc

SEQ ID NO: 169673 - DNA, 13 bp, Artificial Sequence
  Oligonucleotide for detection of SNP TSC0006269
gaatgaataatty

SEQ ID NO: 169674 - DNA, 13 bp, Artificial Sequence
  Oligonucleotide for detection of SNP TSC0006269
raattattcattc

SEQ ID NO: 169675 - DNA, 13 bp, Artificial Sequence
  Oligonucleotide for detection of SNP TSC0010535
tttagaagtgtta

SEQ ID NO: 169676 - DNA, 13 bp, Artificial Sequence
  Oligonucleotide for detection of SNP TSC0010535
taacacttctaaa

SEQ ID NO: 169677 - DNA, 13 bp, Artificial Sequence
  Oligonucleotide for detection of SNP TSC0010535
tttagaggtgtta

SEQ ID NO: 169678 - DNA, 13 bp, Artificial Sequence
  Oligonucleotide for detection of SNP TSC0010535
taacacctctaaa

SEQ ID NO: 169679 - DNA, 13 bp, Artificial Sequence
  Oligonucleotide for detection of SNP TSC0004798
ttgagattaattg

SEQ ID NO: 169680 - DNA, 13 bp, Artificial Sequence
  Oligonucleotide for detection of SNP TSC0004798
caattaatctcaa

SEQ ID NO: 169681 - DNA, 13 bp, Artificial Sequence
  Oligonucleotide for detection of SNP TSC0004798
ttgagagtaattg

SEQ ID NO: 169682 - DNA, 13 bp, Artificial Sequence
  Oligonucleotide for detection of SNP TSC0004798
caattactctcaa

SEQ ID NO: 169683 - DNA, 13 bp, Artificial Sequence
  Oligonucleotide for detection of SNP TSC0004798
tagttagttttag

SEQ ID NO: 169684 - DNA, 13 bp, Artificial Sequence
  Oligonucleotide for detection of SNP TSC0004798
ctaaaactaacta

SEQ ID NO: 169685 - DNA, 13 bp, Artificial Sequence
  Oligonucleotide for detection of SNP TSC0004799
gtttattgtaagg

SEQ ID NO: 169686 - DNA, 13 bp, Artificial Sequence
  Oligonucleotide for detection of SNP TSC0004799
ccttacaataaac

SEQ ID NO: 169687 - DNA, 13 bp, Artificial Sequence
  Oligonucleotide for detection of SNP TSC0004799
gtttatggtaagg

SEQ ID NO: 169688 - DNA, 13 bp, Artificial Sequence
  Oligonucleotide for detection of SNP TSC0004799
ccttaccataaac

SEQ ID NO: 169689 - DNA, 13 bp, Artificial Sequence
  Oligonucleotide for detection of SNP TSC0004799
ttttgtaatgaay

SEQ ID NO: 169690 - DNA, 13 bp, Artificial Sequence
  Oligonucleotide for detection of SNP TSC0004799
rttcattacaaaa

SEQ ID NO: 169691 - DNA, 13 bp, Artificial Sequence
  Oligonucleotide for detection of SNP TSC0004799
ttttgttatgaay

SEQ ID NO: 169692 - DNA, 13 bp, Artificial Sequence
  Oligonucleotide for detection of SNP TSC0004799
rttcataacaaaa

SEQ ID NO: 169693 - DNA, 13 bp, Artificial Sequence
  Oligonucleotide for detection of SNP TSC0004777
ggtggttgaatgt

SEQ ID NO: 169694 - DNA, 13 bp, Artificial Sequence
  Oligonucleotide for detection of SNP TSC0004777
acattcaaccacc

SEQ ID NO: 169695 - DNA, 13 bp, Artificial Sequence
  Oligonucleotide for detection of SNP TSC0004777
ggtggtcgaatgt

SEQ ID NO: 169696 - DNA, 13 bp, Artificial Sequence
  Oligonucleotide for detection of SNP TSC0004777
acattcgaccacc

SEQ ID NO: 169697 - DNA, 13 bp, Artificial Sequence
  Oligonucleotide for detection of SNP TSC0004777
atatttggttaty

SEQ ID NO: 169698 - DNA, 13 bp, Artificial Sequence
  Oligonucleotide for detection of SNP TSC0004777
rataaccaaatat

SEQ ID NO: 169699 - DNA, 13 bp, Artificial Sequence
  Oligonucleotide for detection of SNP TSC0004777
atatttagttaty

SEQ ID NO: 169700 - DNA, 13 bp, Artificial Sequence
  Oligonucleotide for detection of SNP TSC0004777
rataactaaatat

SEQ ID NO: 169701 - DNA, 13 bp, Artificial Sequence
  Oligonucleotide for detection of SNP TSC0004777
atattcggttaty

SEQ ID NO: 169702 - DNA, 13 bp, Artificial Sequence
  Oligonucleotide for detection of SNP TSC0004777
rataaccgaatat

SEQ ID NO: 169703 - DNA, 13 bp, Artificial Sequence
  Oligonucleotide for detection of SNP TSC0007737
aatgttgtatgtt

SEQ ID NO: 169704 - DNA, 13 bp, Artificial Sequence
  Oligonucleotide for detection of SNP TSC0007737
aacatacaacatt

SEQ ID NO: 169705 - DNA, 13 bp, Artificial Sequence
  Oligonucleotide for detection of SNP TSC0007737
aatgttatatgtt

SEQ ID NO: 169706 - DNA, 13 bp, Artificial Sequence
  Oligonucleotide for detection of SNP TSC0007737
aacatataacatt

SEQ ID NO: 169707 - DNA, 13 bp, Artificial Sequence
  Oligonucleotide for detection of SNP TSC0042389
aaaaatatagtgt

SEQ ID NO: 169708 - DNA, 13 bp, Artificial Sequence
  Oligonucleotide for detection of SNP TSC0042389
acactatattttt

SEQ ID NO: 169709 - DNA, 13 bp, Artificial Sequence
  Oligonucleotide for detection of SNP TSC0042389
aaaaatgtagtgt

SEQ ID NO: 169710 - DNA, 13 bp, Artificial Sequence
  Oligonucleotide for detection of SNP TSC0042389
acactacattttt

SEQ ID NO: 169711 - DNA, 13 bp, Artificial Sequence
  Oligonucleotide for detection of SNP TSC0042389
aaaaacgtagtgt

SEQ ID NO: 169712 - DNA, 13 bp, Artificial Sequence
  Oligonucleotide for detection of SNP TSC0042389
acactacgttttt

SEQ ID NO: 169713 - DNA, 13 bp, Artificial Sequence
  Oligonucleotide for detection of SNP TSC0042389
atattacgttttt

SEQ ID NO: 169714 - DNA, 13 bp, Artificial Sequence
  Oligonucleotide for detection of SNP TSC0042389
aaaaacgtaatat

SEQ ID NO: 169715 - DNA, 13 bp, Artificial Sequence
  Oligonucleotide for detection of SNP TSC0042390
ggtagagtttagy

SEQ ID NO: 169716 - DNA, 13 bp, Artificial Sequence
  Oligonucleotide for detection of SNP TSC0042390
rctaaactctacc

SEQ ID NO: 169717 - DNA, 13 bp, Artificial Sequence
  Oligonucleotide for detection of SNP TSC0042390
ggtagaatttagy

SEQ ID NO: 169718 - DNA, 13 bp, Artificial Sequence
  Oligonucleotide for detection of SNP TSC0042390
rctaaattctacc

SEQ ID NO: 169719 - DNA, 13 bp, Artificial Sequence
  Oligonucleotide for detection of SNP TSC0042392
tttgtttgttaat

SEQ ID NO: 169720 - DNA, 13 bp, Artificial Sequence
  Oligonucleotide for detection of SNP TSC0042392
attaacaaacaaa

SEQ ID NO: 169721 - DNA, 13 bp, Artificial Sequence
  Oligonucleotide for detection of SNP TSC0042392
tttgttggttaat

SEQ ID NO: 169722 - DNA, 13 bp, Artificial Sequence
  Oligonucleotide for detection of SNP TSC0042392
attaaccaacaaa

SEQ ID NO: 169723 - DNA, 13 bp, Artificial Sequence
  Oligonucleotide for detection of SNP TSC0042392
attaataagtaaa

SEQ ID NO: 169724 - DNA, 13 bp, Artificial Sequence
  Oligonucleotide for detection of SNP TSC0042392
tttacttattaat

SEQ ID NO: 169725 - DNA, 13 bp, Artificial Sequence
  Oligonucleotide for detection of SNP TSC0042392
attaattagtaaa

SEQ ID NO: 169726 - DNA, 13 bp, Artificial Sequence
  Oligonucleotide for detection of SNP TSC0042392
tttactaattaat

SEQ ID NO: 169727 - DNA, 13 bp, Artificial Sequence
  Oligonucleotide for detection of SNP TSC0042393
attttatttaatt

SEQ ID NO: 169728 - DNA, 13 bp, Artificial Sequence
  Oligonucleotide for detection of SNP TSC0042393
aattaaataaaat

SEQ ID NO: 169729 - DNA, 13 bp, Artificial Sequence
  Oligonucleotide for detection of SNP TSC0042393
attttagttaatt

SEQ ID NO: 169730 - DNA, 13 bp, Artificial Sequence
  Oligonucleotide for detection of SNP TSC0042393
aattaactaaaat

SEQ ID NO: 169731 - DNA, 13 bp, Artificial Sequence
  Oligonucleotide for detection of SNP TSC0042393
aattagatggggt

SEQ ID NO: 169732 - DNA, 13 bp, Artificial Sequence
  Oligonucleotide for detection of SNP TSC0042393
accccatctaatt

SEQ ID NO: 169733 - DNA, 13 bp, Artificial Sequence
  Oligonucleotide for detection of SNP TSC0042393
aattagttggggt

SEQ ID NO: 169734 - DNA, 13 bp, Artificial Sequence
  Oligonucleotide for detection of SNP TSC0042393
accccaactaatt

SEQ ID NO: 169735 - DNA, 13 bp, Artificial Sequence
  Oligonucleotide for detection of SNP TSC0042394
taaaataaaaaay

SEQ ID NO: 169736 - DNA, 13 bp, Artificial Sequence
  Oligonucleotide for detection of SNP TSC0042394
rttttttatttta

SEQ ID NO: 169737 - DNA, 13 bp, Artificial Sequence
  Oligonucleotide for detection of SNP TSC0042394
taaaattaaaaay

SEQ ID NO: 169738 - DNA, 13 bp, Artificial Sequence
  Oligonucleotide for detection of SNP TSC0042394
rtttttaatttta

SEQ ID NO: 169739 - DNA, 13 bp, Artificial Sequence
  Oligonucleotide for detection of SNP TSC0042395
aagttaaattgaa

SEQ ID NO: 169740 - DNA, 13 bp, Artificial Sequence
  Oligonucleotide for detection of SNP TSC0042395
ttcaatttaactt

SEQ ID NO: 169741 - DNA, 13 bp, Artificial Sequence
  Oligonucleotide for detection of SNP TSC0042395
aagttatattgaa

SEQ ID NO: 169742 - DNA, 13 bp, Artificial Sequence
  Oligonucleotide for detection of SNP TSC0042395
ttcaatataactt

SEQ ID NO: 169743 - DNA, 13 bp, Artificial Sequence
  Oligonucleotide for detection of SNP TSC0042395
tttaatttagttt

SEQ ID NO: 169744 - DNA, 13 bp, Artificial Sequence
  Oligonucleotide for detection of SNP TSC0042395
aaactaaattaaa

SEQ ID NO: 169745 - DNA, 13 bp, Artificial Sequence
  Oligonucleotide for detection of SNP TSC0042395
tttaatatagttt

SEQ ID NO: 169746 - DNA, 13 bp, Artificial Sequence
  Oligonucleotide for detection of SNP TSC0042395
aaactatattaaa

SEQ ID NO: 169747 - DNA, 13 bp, Artificial Sequence
  Oligonucleotide for detection of SNP TSC0042397
atttttgggtagg

SEQ ID NO: 169748 - DNA, 13 bp, Artificial Sequence
  Oligonucleotide for detection of SNP TSC0042397
cctacccaaaaat

SEQ ID NO: 169749 - DNA, 13 bp, Artificial Sequence
  Oligonucleotide for detection of SNP TSC0042397
atttttaggtagg

SEQ ID NO: 169750 - DNA, 13 bp, Artificial Sequence
  Oligonucleotide for detection of SNP TSC0042397
cctacctaaaaat

SEQ ID NO: 169751 - DNA, 13 bp, Artificial Sequence
  Oligonucleotide for detection of SNP TSC0042397
attttcgggtagg

SEQ ID NO: 169752 - DNA, 13 bp, Artificial Sequence
  Oligonucleotide for detection of SNP TSC0042397
cctacccgaaaat

SEQ ID NO: 169753 - DNA, 13 bp, Artificial Sequence
  Oligonucleotide for detection of SNP TSC0042398
ttaattttataty

SEQ ID NO: 169754 - DNA, 13 bp, Artificial Sequence
  Oligonucleotide for detection of SNP TSC0042398
ratataaaattaa

SEQ ID NO: 169755 - DNA, 13 bp, Artificial Sequence
  Oligonucleotide for detection of SNP TSC0042398
ttaattgtataty

SEQ ID NO: 169756 - DNA, 13 bp, Artificial Sequence
  Oligonucleotide for detection of SNP TSC0042398
ratatacaattaa

SEQ ID NO: 169757 - DNA, 13 bp, Artificial Sequence
  Oligonucleotide for detection of SNP TSC0042398
ttaatcgtataty

SEQ ID NO: 169758 - DNA, 13 bp, Artificial Sequence
  Oligonucleotide for detection of SNP TSC0042398
ratatacgattaa

SEQ ID NO: 169759 - DNA, 13 bp, Artificial Sequence
  Oligonucleotide for detection of SNP TSC0042398
gatgtggggttga

SEQ ID NO: 169760 - DNA, 13 bp, Artificial Sequence
  Oligonucleotide for detection of SNP TSC0042398
tcaaccccacatc

SEQ ID NO: 169761 - DNA, 13 bp, Artificial Sequence
  Oligonucleotide for detection of SNP TSC0042398
gatgtgtggttga

SEQ ID NO: 169762 - DNA, 13 bp, Artificial Sequence
  Oligonucleotide for detection of SNP TSC0042398
tcaaccacacatc

SEQ ID NO: 169763 - DNA, 13 bp, Artificial Sequence
  Oligonucleotide for detection of SNP TSC0042398
gatgtgcggttga

SEQ ID NO: 169764 - DNA, 13 bp, Artificial Sequence
  Oligonucleotide for detection of SNP TSC0042398
tcaaccgcacatc

SEQ ID NO: 169765 - DNA, 13 bp, Artificial Sequence
  Oligonucleotide for detection of SNP TSC0042399
tttgtttaaggag

SEQ ID NO: 169766 - DNA, 13 bp, Artificial Sequence
  Oligonucleotide for detection of SNP TSC0042399
ctccttaaacaaa

SEQ ID NO: 169767 - DNA, 13 bp, Artificial Sequence
  Oligonucleotide for detection of SNP TSC0042399
tttgttgaaggag

SEQ ID NO: 169768 - DNA, 13 bp, Artificial Sequence
  Oligonucleotide for detection of SNP TSC0042399
ctccttcaacaaa

SEQ ID NO: 169769 - DNA, 13 bp, Artificial Sequence
  Oligonucleotide for detection of SNP TSC0009466
aaatgatagaaga

SEQ ID NO: 169770 - DNA, 13 bp, Artificial Sequence
  Oligonucleotide for detection of SNP TSC0009466
tcttctatcattt

SEQ ID NO: 169771 - DNA, 13 bp, Artificial Sequence
  Oligonucleotide for detection of SNP TSC0009466
aaatgagagaaga

SEQ ID NO: 169772 - DNA, 13 bp, Artificial Sequence
  Oligonucleotide for detection of SNP TSC0009466
tcttctctcattt

SEQ ID NO: 169773 - DNA, 13 bp, Artificial Sequence
  Oligonucleotide for detection of SNP TSC0042402
ttagaaggaggga

SEQ ID NO: 169774 - DNA, 13 bp, Artificial Sequence
  Oligonucleotide for detection of SNP TSC0042402
tccctccttctaa

SEQ ID NO: 169775 - DNA, 13 bp, Artificial Sequence
  Oligonucleotide for detection of SNP TSC0042402
ttagaaagaggga

SEQ ID NO: 169776 - DNA, 13 bp, Artificial Sequence
  Oligonucleotide for detection of SNP TSC0042402
tccctctttctaa

SEQ ID NO: 169777 - DNA, 13 bp, Artificial Sequence
  Oligonucleotide for detection of SNP TSC0042403
gtttggttaatat

SEQ ID NO: 169778 - DNA, 13 bp, Artificial Sequence
  Oligonucleotide for detection of SNP TSC0042403
atattaaccaaac

SEQ ID NO: 169779 - DNA, 13 bp, Artificial Sequence
  Oligonucleotide for detection of SNP TSC0042403
atgttgtttaggy

SEQ ID NO: 169780 - DNA, 13 bp, Artificial Sequence
  Oligonucleotide for detection of SNP TSC0042403
rcctaaacaacat

SEQ ID NO: 169781 - DNA, 13 bp, Artificial Sequence
  Oligonucleotide for detection of SNP TSC0042403
atgttggttaggy

SEQ ID NO: 169782 - DNA, 13 bp, Artificial Sequence
  Oligonucleotide for detection of SNP TSC0042403
rcctaaccaacat

SEQ ID NO: 169783 - DNA, 13 bp, Artificial Sequence
  Oligonucleotide for detection of SNP TSC0042404
attgaagtgtgta

SEQ ID NO: 169784 - DNA, 13 bp, Artificial Sequence
  Oligonucleotide for detection of SNP TSC0042404
tacacacttcaat

SEQ ID NO: 169785 - DNA, 13 bp, Artificial Sequence
  Oligonucleotide for detection of SNP TSC0042404
attgaaatgtgta

SEQ ID NO: 169786 - DNA, 13 bp, Artificial Sequence
  Oligonucleotide for detection of SNP TSC0042404
tacacatttcaat

SEQ ID NO: 169787 - DNA, 13 bp, Artificial Sequence
  Oligonucleotide for detection of SNP TSC0042405
gatatgtagatat

SEQ ID NO: 169788 - DNA, 13 bp, Artificial Sequence
  Oligonucleotide for detection of SNP TSC0042405
atatctacatatc

SEQ ID NO: 169789 - DNA, 13 bp, Artificial Sequence
  Oligonucleotide for detection of SNP TSC0042405
gatatggagatat

SEQ ID NO: 169790 - DNA, 13 bp, Artificial Sequence
  Oligonucleotide for detection of SNP TSC0042405
atatctccatatc

SEQ ID NO: 169791 - DNA, 13 bp, Artificial Sequence
  Oligonucleotide for detection of SNP TSC0042405
atatttatatgty

SEQ ID NO: 169792 - DNA, 13 bp, Artificial Sequence
  Oligonucleotide for detection of SNP TSC0042405
racatataaatat

SEQ ID NO: 169793 - DNA, 13 bp, Artificial Sequence
  Oligonucleotide for detection of SNP TSC0042405
atatttttatgty

SEQ ID NO: 169794 - DNA, 13 bp, Artificial Sequence
  Oligonucleotide for detection of SNP TSC0042405
racataaaaatat

SEQ ID NO: 169795 - DNA, 13 bp, Artificial Sequence
  Oligonucleotide for detection of SNP TSC0042406
aaaattgaaaaga

SEQ ID NO: 169796 - DNA, 13 bp, Artificial Sequence
  Oligonucleotide for detection of SNP TSC0042406
tcttttcaatttt

SEQ ID NO: 169797 - DNA, 13 bp, Artificial Sequence
  Oligonucleotide for detection of SNP TSC0042407
tttaatatgtggt

SEQ ID NO: 169798 - DNA, 13 bp, Artificial Sequence
  Oligonucleotide for detection of SNP TSC0042407
accacatattaaa

SEQ ID NO: 169799 - DNA, 13 bp, Artificial Sequence
  Oligonucleotide for detection of SNP TSC0042407
tttaatgtgtggt

SEQ ID NO: 169800 - DNA, 13 bp, Artificial Sequence
  Oligonucleotide for detection of SNP TSC0042407
accacacattaaa

SEQ ID NO: 169801 - DNA, 13 bp, Artificial Sequence
  Oligonucleotide for detection of SNP TSC0042410
tgggtgagtattg

SEQ ID NO: 169802 - DNA, 13 bp, Artificial Sequence
  Oligonucleotide for detection of SNP TSC0042410
caatactcaccca

SEQ ID NO: 169803 - DNA, 13 bp, Artificial Sequence
  Oligonucleotide for detection of SNP TSC0042410
tgggtgggtattg

SEQ ID NO: 169804 - DNA, 13 bp, Artificial Sequence
  Oligonucleotide for detection of SNP TSC0042410
caatacccaccca

SEQ ID NO: 169805 - DNA, 13 bp, Artificial Sequence
  Oligonucleotide for detection of SNP TSC0042411
atggttgtattaa

SEQ ID NO: 169806 - DNA, 13 bp, Artificial Sequence
  Oligonucleotide for detection of SNP TSC0042411
ttaatacaaccat

SEQ ID NO: 169807 - DNA, 13 bp, Artificial Sequence
  Oligonucleotide for detection of SNP TSC0042411
atggttatattaa

SEQ ID NO: 169808 - DNA, 13 bp, Artificial Sequence
  Oligonucleotide for detection of SNP TSC0042411
ttaatataaccat

SEQ ID NO: 169809 - DNA, 13 bp, Artificial Sequence
  Oligonucleotide for detection of SNP TSC0042412
tttaggtgggatg

SEQ ID NO: 169810 - DNA, 13 bp, Artificial Sequence
  Oligonucleotide for detection of SNP TSC0042412
catcccacctaaa

SEQ ID NO: 169811 - DNA, 13 bp, Artificial Sequence
  Oligonucleotide for detection of SNP TSC0042412
tttaggcgggatg

SEQ ID NO: 169812 - DNA, 13 bp, Artificial Sequence
  Oligonucleotide for detection of SNP TSC0042412
catcccgcctaaa

SEQ ID NO: 169813 - DNA, 13 bp, Artificial Sequence
  Oligonucleotide for detection of SNP TSC0042413
taggaatgggtag

SEQ ID NO: 169814 - DNA, 13 bp, Artificial Sequence
  Oligonucleotide for detection of SNP TSC0042413
ctacccattccta

SEQ ID NO: 169815 - DNA, 13 bp, Artificial Sequence
  Oligonucleotide for detection of SNP TSC0042413
taggaacgggtag

SEQ ID NO: 169816 - DNA, 13 bp, Artificial Sequence
  Oligonucleotide for detection of SNP TSC0042413
ctacccgttccta

SEQ ID NO: 169817 - DNA, 13 bp, Artificial Sequence
  Oligonucleotide for detection of SNP TSC0042414
taatggaggaata

SEQ ID NO: 169818 - DNA, 13 bp, Artificial Sequence
  Oligonucleotide for detection of SNP TSC0042414
tattcctccatta

SEQ ID NO: 169819 - DNA, 13 bp, Artificial Sequence
  Oligonucleotide for detection of SNP TSC0042414
taatggtggaata

SEQ ID NO: 169820 - DNA, 13 bp, Artificial Sequence
  Oligonucleotide for detection of SNP TSC0042414
tattccaccatta

SEQ ID NO: 169821 - DNA, 13 bp, Artificial Sequence
  Oligonucleotide for detection of SNP TSC0042414
taacggaggaata

SEQ ID NO: 169822 - DNA, 13 bp, Artificial Sequence
  Oligonucleotide for detection of SNP TSC0042414
tattcctccgtta

SEQ ID NO: 169823 - DNA, 13 bp, Artificial Sequence
  Oligonucleotide for detection of SNP TSC0042414
taacggtggaata

SEQ ID NO: 169824 - DNA, 13 bp, Artificial Sequence
  Oligonucleotide for detection of SNP TSC0042414
tattccaccgtta

SEQ ID NO: 169825 - DNA, 13 bp, Artificial Sequence
  Oligonucleotide for detection of SNP TSC0042414
tgtttttttgttg

SEQ ID NO: 169826 - DNA, 13 bp, Artificial Sequence
  Oligonucleotide for detection of SNP TSC0042414
caacaaaaaaaca

SEQ ID NO: 169827 - DNA, 13 bp, Artificial Sequence
  Oligonucleotide for detection of SNP TSC0042414
tgttttattgttg

SEQ ID NO: 169828 - DNA, 13 bp, Artificial Sequence
  Oligonucleotide for detection of SNP TSC0042414
caacaataaaaca

SEQ ID NO: 169829 - DNA, 13 bp, Artificial Sequence
  Oligonucleotide for detection of SNP TSC0042414
tgttttttcgttg

SEQ ID NO: 169830 - DNA, 13 bp, Artificial Sequence
  Oligonucleotide for detection of SNP TSC0042414
caacgaaaaaaca

SEQ ID NO: 169831 - DNA, 13 bp, Artificial Sequence
  Oligonucleotide for detection of SNP TSC0042414
tgttttatcgttg

SEQ ID NO: 169832 - DNA, 13 bp, Artificial Sequence
  Oligonucleotide for detection of SNP TSC0042414
caacgataaaaca

SEQ ID NO: 169833 - DNA, 13 bp, Artificial Sequence
  Oligonucleotide for detection of SNP TSC0005168
taatgaattttta

SEQ ID NO: 169834 - DNA, 13 bp, Artificial Sequence
  Oligonucleotide for detection of SNP TSC0005168
taaaaattcatta

SEQ ID NO: 169835 - DNA, 13 bp, Artificial Sequence
  Oligonucleotide for detection of SNP TSC0005168
taatgatttttta

SEQ ID NO: 169836 - DNA, 13 bp, Artificial Sequence
  Oligonucleotide for detection of SNP TSC0005168
taaaaaatcatta

SEQ ID NO: 169837 - DNA, 13 bp, Artificial Sequence
  Oligonucleotide for detection of SNP TSC0005168
taacgaattttta

SEQ ID NO: 169838 - DNA, 13 bp, Artificial Sequence
  Oligonucleotide for detection of SNP TSC0005168
taaaaattcgtta

SEQ ID NO: 169839 - DNA, 13 bp, Artificial Sequence
  Oligonucleotide for detection of SNP TSC0005168
taacgatttttta

SEQ ID NO: 169840 - DNA, 13 bp, Artificial Sequence
  Oligonucleotide for detection of SNP TSC0005168
taaaaaatcgtta

SEQ ID NO: 169841 - DNA, 13 bp, Artificial Sequence
  Oligonucleotide for detection of SNP TSC0005168
taaaagtttgtta

SEQ ID NO: 169842 - DNA, 13 bp, Artificial Sequence
  Oligonucleotide for detection of SNP TSC0005168
taacaaactttta

SEQ ID NO: 169843 - DNA, 13 bp, Artificial Sequence
  Oligonucleotide for detection of SNP TSC0005168
taaaaggttgtta

SEQ ID NO: 169844 - DNA, 13 bp, Artificial Sequence
  Oligonucleotide for detection of SNP TSC0005168
taacaacctttta

SEQ ID NO: 169845 - DNA, 13 bp, Artificial Sequence
  Oligonucleotide for detection of SNP TSC0005168
taaaagttcgtta

SEQ ID NO: 169846 - DNA, 13 bp, Artificial Sequence
  Oligonucleotide for detection of SNP TSC0005168
taacgaactttta

SEQ ID NO: 169847 - DNA, 13 bp, Artificial Sequence
  Oligonucleotide for detection of SNP TSC0005168
taaaaggtcgtta

SEQ ID NO: 169848 - DNA, 13 bp, Artificial Sequence
  Oligonucleotide for detection of SNP TSC0005168
taacgacctttta

SEQ ID NO: 169849 - DNA, 13 bp, Artificial Sequence
  Oligonucleotide for detection of SNP TSC0042415
ttatttagttttt

SEQ ID NO: 169850 - DNA, 13 bp, Artificial Sequence
  Oligonucleotide for detection of SNP TSC0042415
aaaaactaaataa

SEQ ID NO: 169851 - DNA, 13 bp, Artificial Sequence
  Oligonucleotide for detection of SNP TSC0042415
ttatttggttttt

SEQ ID NO: 169852 - DNA, 13 bp, Artificial Sequence
  Oligonucleotide for detection of SNP TSC0042415
aaaaaccaaataa

SEQ ID NO: 169853 - DNA, 13 bp, Artificial Sequence
  Oligonucleotide for detection of SNP TSC0042415
ttattcggttttt

SEQ ID NO: 169854 - DNA, 13 bp, Artificial Sequence
  Oligonucleotide for detection of SNP TSC0042415
aaaaaccgaataa

SEQ ID NO: 169855 - DNA, 13 bp, Artificial Sequence
  Oligonucleotide for detection of SNP TSC0042415
agaaattgaatag

SEQ ID NO: 169856 - DNA, 13 bp, Artificial Sequence
  Oligonucleotide for detection of SNP TSC0042415
ctattcaatttct

SEQ ID NO: 169857 - DNA, 13 bp, Artificial Sequence
  Oligonucleotide for detection of SNP TSC0042415
agaaatcgaatag

SEQ ID NO: 169858 - DNA, 13 bp, Artificial Sequence
  Oligonucleotide for detection of SNP TSC0042415
ctattcgatttct

SEQ ID NO: 169859 - DNA, 13 bp, Artificial Sequence
  Oligonucleotide for detection of SNP TSC0042416
ggtgatgggggta

SEQ ID NO: 169860 - DNA, 13 bp, Artificial Sequence
  Oligonucleotide for detection of SNP TSC0042416
tacccccatcacc

SEQ ID NO: 169861 - DNA, 13 bp, Artificial Sequence
  Oligonucleotide for detection of SNP TSC0042416
ggtgataggggta

SEQ ID NO: 169862 - DNA, 13 bp, Artificial Sequence
  Oligonucleotide for detection of SNP TSC0042416
tacccctatcacc

SEQ ID NO: 169863 - DNA, 13 bp, Artificial Sequence
  Oligonucleotide for detection of SNP TSC0042417
gtggtgttatata

SEQ ID NO: 169864 - DNA, 13 bp, Artificial Sequence
  Oligonucleotide for detection of SNP TSC0042417
tatataacaccac

SEQ ID NO: 169865 - DNA, 13 bp, Artificial Sequence
  Oligonucleotide for detection of SNP TSC0042417
gtggtggtatata

SEQ ID NO: 169866 - DNA, 13 bp, Artificial Sequence
  Oligonucleotide for detection of SNP TSC0042417
tatataccaccac

SEQ ID NO: 169867 - DNA, 13 bp, Artificial Sequence
  Oligonucleotide for detection of SNP TSC0042417
tgtgtgttattay

SEQ ID NO: 169868 - DNA, 13 bp, Artificial Sequence
  Oligonucleotide for detection of SNP TSC0042417
rtaataacacaca

SEQ ID NO: 169869 - DNA, 13 bp, Artificial Sequence
  Oligonucleotide for detection of SNP TSC0042418
aaggtggaaattg

SEQ ID NO: 169870 - DNA, 13 bp, Artificial Sequence
  Oligonucleotide for detection of SNP TSC0042418
caatttccacctt

SEQ ID NO: 169871 - DNA, 13 bp, Artificial Sequence
  Oligonucleotide for detection of SNP TSC0042418
aaggtgaaaattg

SEQ ID NO: 169872 - DNA, 13 bp, Artificial Sequence
  Oligonucleotide for detection of SNP TSC0042418
caattttcacctt

SEQ ID NO: 169873 - DNA, 13 bp, Artificial Sequence
  Oligonucleotide for detection of SNP TSC0042419
ggttatatgttgg

SEQ ID NO: 169874 - DNA, 13 bp, Artificial Sequence
  Oligonucleotide for detection of SNP TSC0042419
ccaacatataacc

SEQ ID NO: 169875 - DNA, 13 bp, Artificial Sequence
  Oligonucleotide for detection of SNP TSC0042419
ggttatgtgttgg

SEQ ID NO: 169876 - DNA, 13 bp, Artificial Sequence
  Oligonucleotide for detection of SNP TSC0042419
ccaacacataacc

SEQ ID NO: 169877 - DNA, 13 bp, Artificial Sequence
  Oligonucleotide for detection of SNP TSC0042419
ggttacgtgttgg

SEQ ID NO: 169878 - DNA, 13 bp, Artificial Sequence
  Oligonucleotide for detection of SNP TSC0042419
ccaacacgtaacc

SEQ ID NO: 169879 - DNA, 13 bp, Artificial Sequence
  Oligonucleotide for detection of SNP TSC0042419
ttaatatgtagty

SEQ ID NO: 169880 - DNA, 13 bp, Artificial Sequence
  Oligonucleotide for detection of SNP TSC0042419
ractacatattaa

SEQ ID NO: 169881 - DNA, 13 bp, Artificial Sequence
  Oligonucleotide for detection of SNP TSC0042419
ttaatacgtagty

SEQ ID NO: 169882 - DNA, 13 bp, Artificial Sequence
  Oligonucleotide for detection of SNP TSC0042419
ractacgtattaa

SEQ ID NO: 169883 - DNA, 13 bp, Artificial Sequence
  Oligonucleotide for detection of SNP TSC0010408
agagatggtgttt

SEQ ID NO: 169884 - DNA, 13 bp, Artificial Sequence
  Oligonucleotide for detection of SNP TSC0010408
aaacaccatctct

SEQ ID NO: 169885 - DNA, 13 bp, Artificial Sequence
  Oligonucleotide for detection of SNP TSC0010408
agagatagtgttt

SEQ ID NO: 169886 - DNA, 13 bp, Artificial Sequence
  Oligonucleotide for detection of SNP TSC0010408
aaacactatctct

SEQ ID NO: 169887 - DNA, 13 bp, Artificial Sequence
  Oligonucleotide for detection of SNP TSC0007036
ttttataagttty

SEQ ID NO: 169888 - DNA, 13 bp, Artificial Sequence
  Oligonucleotide for detection of SNP TSC0007036
raaacttataaaa

SEQ ID NO: 169889 - DNA, 13 bp, Artificial Sequence
  Oligonucleotide for detection of SNP TSC0007036
ttttatgagttty

SEQ ID NO: 169890 - DNA, 13 bp, Artificial Sequence
  Oligonucleotide for detection of SNP TSC0007036
raaactcataaaa

SEQ ID NO: 169891 - DNA, 13 bp, Artificial Sequence
  Oligonucleotide for detection of SNP TSC0007036
ttttacgagttty

SEQ ID NO: 169892 - DNA, 13 bp, Artificial Sequence
  Oligonucleotide for detection of SNP TSC0007036
raaactcgtaaaa

SEQ ID NO: 169893 - DNA, 13 bp, Artificial Sequence
  Oligonucleotide for detection of SNP TSC0007036
gaaatttgtagaa

SEQ ID NO: 169894 - DNA, 13 bp, Artificial Sequence
  Oligonucleotide for detection of SNP TSC0007036
ttctacaaatttc

SEQ ID NO: 169895 - DNA, 13 bp, Artificial Sequence
  Oligonucleotide for detection of SNP TSC0007036
gaaattcgtagaa

SEQ ID NO: 169896 - DNA, 13 bp, Artificial Sequence
  Oligonucleotide for detection of SNP TSC0007036
ttctacgaatttc

SEQ ID NO: 169897 - DNA, 13 bp, Artificial Sequence
  Oligonucleotide for detection of SNP TSC0007037
attaaagaagggy

SEQ ID NO: 169898 - DNA, 13 bp, Artificial Sequence
  Oligonucleotide for detection of SNP TSC0007037
rcccttctttaat

SEQ ID NO: 169899 - DNA, 13 bp, Artificial Sequence
  Oligonucleotide for detection of SNP TSC0007037
attaaaaaagggy

SEQ ID NO: 169900 - DNA, 13 bp, Artificial Sequence
  Oligonucleotide for detection of SNP TSC0007037
rcccttttttaat

SEQ ID NO: 169901 - DNA, 13 bp, Artificial Sequence
  Oligonucleotide for detection of SNP TSC0042422
ggaggaaattgty

SEQ ID NO: 169902 - DNA, 13 bp, Artificial Sequence
  Oligonucleotide for detection of SNP TSC0042422
racaatttcctcc

SEQ ID NO: 169903 - DNA, 13 bp, Artificial Sequence
  Oligonucleotide for detection of SNP TSC0042422
ggaggagattgty

SEQ ID NO: 169904 - DNA, 13 bp, Artificial Sequence
  Oligonucleotide for detection of SNP TSC0042422
racaatctcctcc

SEQ ID NO: 169905 - DNA, 13 bp, Artificial Sequence
  Oligonucleotide for detection of SNP TSC0006579
ggtagagaagaaa

SEQ ID NO: 169906 - DNA, 13 bp, Artificial Sequence
  Oligonucleotide for detection of SNP TSC0006579
tttcttctctacc

SEQ ID NO: 169907 - DNA, 13 bp, Artificial Sequence
  Oligonucleotide for detection of SNP TSC0006579
ggtagaaaagaaa

SEQ ID NO: 169908 - DNA, 13 bp, Artificial Sequence
  Oligonucleotide for detection of SNP TSC0006579
tttcttttctacc

SEQ ID NO: 169909 - DNA, 13 bp, Artificial Sequence
  Oligonucleotide for detection of SNP TSC0006580
atataagtgtttg

SEQ ID NO: 169910 - DNA, 13 bp, Artificial Sequence
  Oligonucleotide for detection of SNP TSC0006580
caaacacttatat

SEQ ID NO: 169911 - DNA, 13 bp, Artificial Sequence
  Oligonucleotide for detection of SNP TSC0006580
atataagcgtttg

SEQ ID NO: 169912 - DNA, 13 bp, Artificial Sequence
  Oligonucleotide for detection of SNP TSC0006580
caaacgcttatat

SEQ ID NO: 169913 - DNA, 13 bp, Artificial Sequence
  Oligonucleotide for detection of SNP TSC0006580
atataaacgtttg

SEQ ID NO: 169914 - DNA, 13 bp, Artificial Sequence
  Oligonucleotide for detection of SNP TSC0006580
caaacgtttatat

SEQ ID NO: 169915 - DNA, 13 bp, Artificial Sequence
  Oligonucleotide for detection of SNP TSC0004659
gttaagggatagg

SEQ ID NO: 169916 - DNA, 13 bp, Artificial Sequence
  Oligonucleotide for detection of SNP TSC0004659
cctatcccttaac

SEQ ID NO: 169917 - DNA, 13 bp, Artificial Sequence
  Oligonucleotide for detection of SNP TSC0004659
gttaagagatagg

SEQ ID NO: 169918 - DNA, 13 bp, Artificial Sequence
  Oligonucleotide for detection of SNP TSC0004659
cctatctcttaac

SEQ ID NO: 169919 - DNA, 13 bp, Artificial Sequence
  Oligonucleotide for detection of SNP TSC0004660
gggataatattag

SEQ ID NO: 169920 - DNA, 13 bp, Artificial Sequence
  Oligonucleotide for detection of SNP TSC0004660
ctaatattatccc

SEQ ID NO: 169921 - DNA, 13 bp, Artificial Sequence
  Oligonucleotide for detection of SNP TSC0004660
ttggtgttgttty

SEQ ID NO: 169922 - DNA, 13 bp, Artificial Sequence
  Oligonucleotide for detection of SNP TSC0004660
raaacaacaccaa

SEQ ID NO: 169923 - DNA, 13 bp, Artificial Sequence
  Oligonucleotide for detection of SNP TSC0004660
ttggtggtgttty

SEQ ID NO: 169924 - DNA, 13 bp, Artificial Sequence
  Oligonucleotide for detection of SNP TSC0004660
raaacaccaccaa

SEQ ID NO: 169925 - DNA, 13 bp, Artificial Sequence
  Oligonucleotide for detection of SNP TSC0006683
taagtgtattaaa

SEQ ID NO: 169926 - DNA, 13 bp, Artificial Sequence
  Oligonucleotide for detection of SNP TSC0006683
tttaatacactta

SEQ ID NO: 169927 - DNA, 13 bp, Artificial Sequence
  Oligonucleotide for detection of SNP TSC0006683
taagtggattaaa

SEQ ID NO: 169928 - DNA, 13 bp, Artificial Sequence
  Oligonucleotide for detection of SNP TSC0006683
tttaatccactta

SEQ ID NO: 169929 - DNA, 13 bp, Artificial Sequence
  Oligonucleotide for detection of SNP TSC0006683
tttaatgtatttg

SEQ ID NO: 169930 - DNA, 13 bp, Artificial Sequence
  Oligonucleotide for detection of SNP TSC0006683
caaatacattaaa

SEQ ID NO: 169931 - DNA, 13 bp, Artificial Sequence
  Oligonucleotide for detection of SNP TSC0006683
tttaatttatttg

SEQ ID NO: 169932 - DNA, 13 bp, Artificial Sequence
  Oligonucleotide for detection of SNP TSC0006683
caaataaattaaa

SEQ ID NO: 169933 - DNA, 13 bp, Artificial Sequence
  Oligonucleotide for detection of SNP TSC0042431
gttattattgttg

SEQ ID NO: 169934 - DNA, 13 bp, Artificial Sequence
  Oligonucleotide for detection of SNP TSC0042431
caacaataataac

SEQ ID NO: 169935 - DNA, 13 bp, Artificial Sequence
  Oligonucleotide for detection of SNP TSC0042431
gttattgttgttg

SEQ ID NO: 169936 - DNA, 13 bp, Artificial Sequence
  Oligonucleotide for detection of SNP TSC0042431
caacaacaataac

SEQ ID NO: 169937 - DNA, 13 bp, Artificial Sequence
  Oligonucleotide for detection of SNP TSC0042431
gttatcgttgttg

SEQ ID NO: 169938 - DNA, 13 bp, Artificial Sequence
  Oligonucleotide for detection of SNP TSC0042431
caacaacgataac

SEQ ID NO: 169939 - DNA, 13 bp, Artificial Sequence
  Oligonucleotide for detection of SNP TSC0042431
taatagtggtgay

SEQ ID NO: 169940 - DNA, 13 bp, Artificial Sequence
  Oligonucleotide for detection of SNP TSC0042431
rtcaccactatta

SEQ ID NO: 169941 - DNA, 13 bp, Artificial Sequence
  Oligonucleotide for detection of SNP TSC0042431
taatagcggtgay

SEQ ID NO: 169942 - DNA, 13 bp, Artificial Sequence
  Oligonucleotide for detection of SNP TSC0042431
rtcaccgctatta

SEQ ID NO: 169943 - DNA, 13 bp, Artificial Sequence
  Oligonucleotide for detection of SNP TSC0042432
gaaagatagatag

SEQ ID NO: 169944 - DNA, 13 bp, Artificial Sequence
  Oligonucleotide for detection of SNP TSC0042432
ctatctatctttc

SEQ ID NO: 169945 - DNA, 13 bp, Artificial Sequence
  Oligonucleotide for detection of SNP TSC0042432
gaaagaaagatag

SEQ ID NO: 169946 - DNA, 13 bp, Artificial Sequence
  Oligonucleotide for detection of SNP TSC0042432
ctatctttctttc

SEQ ID NO: 169947 - DNA, 13 bp, Artificial Sequence
  Oligonucleotide for detection of SNP TSC0042433
tttaatggttaag

SEQ ID NO: 169948 - DNA, 13 bp, Artificial Sequence
  Oligonucleotide for detection of SNP TSC0042433
cttaaccattaaa

SEQ ID NO: 169949 - DNA, 13 bp, Artificial Sequence
  Oligonucleotide for detection of SNP TSC0042433
tttaatagttaag

SEQ ID NO: 169950 - DNA, 13 bp, Artificial Sequence
  Oligonucleotide for detection of SNP TSC0042433
cttaactattaaa

SEQ ID NO: 169951 - DNA, 13 bp, Artificial Sequence
  Oligonucleotide for detection of SNP TSC0042435
agtatgagaatat

SEQ ID NO: 169952 - DNA, 13 bp, Artificial Sequence
  Oligonucleotide for detection of SNP TSC0042435
atattctcatact

SEQ ID NO: 169953 - DNA, 13 bp, Artificial Sequence
  Oligonucleotide for detection of SNP TSC0042435
agtatgggaatat

SEQ ID NO: 169954 - DNA, 13 bp, Artificial Sequence
  Oligonucleotide for detection of SNP TSC0042435
atattcccatact

SEQ ID NO: 169955 - DNA, 13 bp, Artificial Sequence
  Oligonucleotide for detection of SNP TSC0042437
taggataagatta

SEQ ID NO: 169956 - DNA, 13 bp, Artificial Sequence
  Oligonucleotide for detection of SNP TSC0042437
taatcttatccta

SEQ ID NO: 169957 - DNA, 13 bp, Artificial Sequence
  Oligonucleotide for detection of SNP TSC0042437
taggatgagatta

SEQ ID NO: 169958 - DNA, 13 bp, Artificial Sequence
  Oligonucleotide for detection of SNP TSC0042437
taatctcatccta

SEQ ID NO: 169959 - DNA, 13 bp, Artificial Sequence
  Oligonucleotide for detection of SNP TSC0042438
ggggttagaatay

SEQ ID NO: 169960 - DNA, 13 bp, Artificial Sequence
  Oligonucleotide for detection of SNP TSC0042438
rtattctaacccc

SEQ ID NO: 169961 - DNA, 13 bp, Artificial Sequence
  Oligonucleotide for detection of SNP TSC0042438
ggggttggaatay

SEQ ID NO: 169962 - DNA, 13 bp, Artificial Sequence
  Oligonucleotide for detection of SNP TSC0042438
rtattccaacccc

SEQ ID NO: 169963 - DNA, 13 bp, Artificial Sequence
  Oligonucleotide for detection of SNP TSC0042439
gtaattattatta

SEQ ID NO: 169964 - DNA, 13 bp, Artificial Sequence
  Oligonucleotide for detection of SNP TSC0042439
taataataattac

SEQ ID NO: 169965 - DNA, 13 bp, Artificial Sequence
  Oligonucleotide for detection of SNP TSC0042439
gtaattgttatta

SEQ ID NO: 169966 - DNA, 13 bp, Artificial Sequence
  Oligonucleotide for detection of SNP TSC0042439
taataacaattac

SEQ ID NO: 169967 - DNA, 13 bp, Artificial Sequence
  Oligonucleotide for detection of SNP TSC0042439
gtaatcgttatta

SEQ ID NO: 169968 - DNA, 13 bp, Artificial Sequence
  Oligonucleotide for detection of SNP TSC0042439
taataacgattac

SEQ ID NO: 169969 - DNA, 13 bp, Artificial Sequence
  Oligonucleotide for detection of SNP TSC0042439
tggtgatggttay

SEQ ID NO: 169970 - DNA, 13 bp, Artificial Sequence
  Oligonucleotide for detection of SNP TSC0042439
rtaaccatcacca

SEQ ID NO: 169971 - DNA, 13 bp, Artificial Sequence
  Oligonucleotide for detection of SNP TSC0042439
tggtgacggttay

SEQ ID NO: 169972 - DNA, 13 bp, Artificial Sequence
  Oligonucleotide for detection of SNP TSC0042439
rtaaccgtcacca

SEQ ID NO: 169973 - DNA, 13 bp, Artificial Sequence
  Oligonucleotide for detection of SNP TSC0042444
atgtagattgtaa

SEQ ID NO: 169974 - DNA, 13 bp, Artificial Sequence
  Oligonucleotide for detection of SNP TSC0042444
ttacaatctacat

SEQ ID NO: 169975 - DNA, 13 bp, Artificial Sequence
  Oligonucleotide for detection of SNP TSC0042444
atgtaggttgtaa

SEQ ID NO: 169976 - DNA, 13 bp, Artificial Sequence
  Oligonucleotide for detection of SNP TSC0042444
ttacaacctacat

SEQ ID NO: 169977 - DNA, 13 bp, Artificial Sequence
  Oligonucleotide for detection of SNP TSC0042445
aaagaatgtaaty

SEQ ID NO: 169978 - DNA, 13 bp, Artificial Sequence
  Oligonucleotide for detection of SNP TSC0042445
rattacattcttt

SEQ ID NO: 169979 - DNA, 13 bp, Artificial Sequence
  Oligonucleotide for detection of SNP TSC0042445
aaagaacgtaaty

SEQ ID NO: 169980 - DNA, 13 bp, Artificial Sequence
  Oligonucleotide for detection of SNP TSC0042445
rattacgttcttt

SEQ ID NO: 169981 - DNA, 13 bp, Artificial Sequence
  Oligonucleotide for detection of SNP TSC0042445
ggttatgtttttt

SEQ ID NO: 169982 - DNA, 13 bp, Artificial Sequence
  Oligonucleotide for detection of SNP TSC0042445
aaaaaacataacc

SEQ ID NO: 169983 - DNA, 13 bp, Artificial Sequence
  Oligonucleotide for detection of SNP TSC0042445
ggttatatttttt

SEQ ID NO: 169984 - DNA, 13 bp, Artificial Sequence
  Oligonucleotide for detection of SNP TSC0042445
aaaaaatataacc

SEQ ID NO: 169985 - DNA, 13 bp, Artificial Sequence
  Oligonucleotide for detection of SNP TSC0042445
ggttacgtttttt

SEQ ID NO: 169986 - DNA, 13 bp, Artificial Sequence
  Oligonucleotide for detection of SNP TSC0042445
aaaaaacgtaacc

SEQ ID NO: 169987 - DNA, 13 bp, Artificial Sequence
  Oligonucleotide for detection of SNP TSC0042446
atattagttgata

SEQ ID NO: 169988 - DNA, 13 bp, Artificial Sequence
  Oligonucleotide for detection of SNP TSC0042446
tatcaactaatat

SEQ ID NO: 169989 - DNA, 13 bp, Artificial Sequence
  Oligonucleotide for detection of SNP TSC0042446
atattaattgata

SEQ ID NO: 169990 - DNA, 13 bp, Artificial Sequence
  Oligonucleotide for detection of SNP TSC0042446
tatcaattaatat

SEQ ID NO: 169991 - DNA, 13 bp, Artificial Sequence
  Oligonucleotide for detection of SNP TSC0042446
atattagtcgata

SEQ ID NO: 169992 - DNA, 13 bp, Artificial Sequence
  Oligonucleotide for detection of SNP TSC0042446
tatcgactaatat

SEQ ID NO: 169993 - DNA, 13 bp, Artificial Sequence
  Oligonucleotide for detection of SNP TSC0042446
atattaatcgata

SEQ ID NO: 169994 - DNA, 13 bp, Artificial Sequence
  Oligonucleotide for detection of SNP TSC0042446
tatcgattaatat

SEQ ID NO: 169995 - DNA, 13 bp, Artificial Sequence
  Oligonucleotide for detection of SNP TSC0042447
aaaatttgaagtt

SEQ ID NO: 169996 - DNA, 13 bp, Artificial Sequence
  Oligonucleotide for detection of SNP TSC0042447
aacttcaaatttt

SEQ ID NO: 169997 - DNA, 13 bp, Artificial Sequence
  Oligonucleotide for detection of SNP TSC0042447
aaaattcgaagtt

SEQ ID NO: 169998 - DNA, 13 bp, Artificial Sequence
  Oligonucleotide for detection of SNP TSC0042447
aacttcgaatttt

SEQ ID NO: 169999 - DNA, 13 bp, Artificial Sequence
  Oligonucleotide for detection of SNP TSC0042447
agttttgggtttt

SEQ ID NO: 170000 - DNA, 13 bp, Artificial Sequence
  Oligonucleotide for detection of SNP TSC0042447
aaaacccaaaact

SEQ ID NO: 170001 - DNA, 13 bp, Artificial Sequence
  Oligonucleotide for detection of SNP TSC0042447
agttttaggtttt

SEQ ID NO: 170002 - DNA, 13 bp, Artificial Sequence
  Oligonucleotide for detection of SNP TSC0042447
aaaacctaaaact

SEQ ID NO: 170003 - DNA, 13 bp, Artificial Sequence
  Oligonucleotide for detection of SNP TSC0042447
agtttcgggtttt

SEQ ID NO: 170004 - DNA, 13 bp, Artificial Sequence
  Oligonucleotide for detection of SNP TSC0042447
aaaacccgaaact

SEQ ID NO: 170005 - DNA, 13 bp, Artificial Sequence
  Oligonucleotide for detection of SNP TSC0004959
tagtttggattay

SEQ ID NO: 170006 - DNA, 13 bp, Artificial Sequence
  Oligonucleotide for detection of SNP TSC0004959
rtaatccaaacta

SEQ ID NO: 170007 - DNA, 13 bp, Artificial Sequence
  Oligonucleotide for detection of SNP TSC0004959
gtagttaaagtta

SEQ ID NO: 170008 - DNA, 13 bp, Artificial Sequence
  Oligonucleotide for detection of SNP TSC0004959
taactttaactac

SEQ ID NO: 170009 - DNA, 13 bp, Artificial Sequence
  Oligonucleotide for detection of SNP TSC0004959
gtagtttaagtta

SEQ ID NO: 170010 - DNA, 13 bp, Artificial Sequence
  Oligonucleotide for detection of SNP TSC0004959
taacttaaactac

SEQ ID NO: 170011 - DNA, 13 bp, Artificial Sequence
  Oligonucleotide for detection of SNP TSC0007578
tttggtgtagaag

SEQ ID NO: 170012 - DNA, 13 bp, Artificial Sequence
  Oligonucleotide for detection of SNP TSC0007578
cttctacaccaaa

SEQ ID NO: 170013 - DNA, 13 bp, Artificial Sequence
  Oligonucleotide for detection of SNP TSC0007578
tttggtatagaag

SEQ ID NO: 170014 - DNA, 13 bp, Artificial Sequence
  Oligonucleotide for detection of SNP TSC0007578
cttctataccaaa

SEQ ID NO: 170015 - DNA, 13 bp, Artificial Sequence
  Oligonucleotide for detection of SNP TSC0042449
aaatatataattt

SEQ ID NO: 170016 - DNA, 13 bp, Artificial Sequence
  Oligonucleotide for detection of SNP TSC0042449
aaattatatattt

SEQ ID NO: 170017 - DNA, 13 bp, Artificial Sequence
  Oligonucleotide for detection of SNP TSC0042449
aaatatgtaattt

SEQ ID NO: 170018 - DNA, 13 bp, Artificial Sequence
  Oligonucleotide for detection of SNP TSC0042449
aaattacatattt

SEQ ID NO: 170019 - DNA, 13 bp, Artificial Sequence
  Oligonucleotide for detection of SNP TSC0042449
aaatacgtaattt

SEQ ID NO: 170020 - DNA, 13 bp, Artificial Sequence
  Oligonucleotide for detection of SNP TSC0042449
aaattacgtattt

SEQ ID NO: 170021 - DNA, 13 bp, Artificial Sequence
  Oligonucleotide for detection of SNP TSC0042449
aaattgtgtgttt

SEQ ID NO: 170022 - DNA, 13 bp, Artificial Sequence
  Oligonucleotide for detection of SNP TSC0042449
aaacacacaattt

SEQ ID NO: 170023 - DNA, 13 bp, Artificial Sequence
  Oligonucleotide for detection of SNP TSC0042449
aaattgcgtgttt

SEQ ID NO: 170024 - DNA, 13 bp, Artificial Sequence
  Oligonucleotide for detection of SNP TSC0042449
aaacacgcaattt

SEQ ID NO: 170025 - DNA, 13 bp, Artificial Sequence
  Oligonucleotide for detection of SNP TSC0042450
aagtggaggtgtt

SEQ ID NO: 170026 - DNA, 13 bp, Artificial Sequence
  Oligonucleotide for detection of SNP TSC0042450
aacacctccactt

SEQ ID NO: 170027 - DNA, 13 bp, Artificial Sequence
  Oligonucleotide for detection of SNP TSC0042450
aagtgggggtgtt

SEQ ID NO: 170028 - DNA, 13 bp, Artificial Sequence
  Oligonucleotide for detection of SNP TSC0042450
aacacccccactt

SEQ ID NO: 170029 - DNA, 13 bp, Artificial Sequence
  Oligonucleotide for detection of SNP TSC0006858
aatatgatgttag

SEQ ID NO: 170030 - DNA, 13 bp, Artificial Sequence
  Oligonucleotide for detection of SNP TSC0006858
ctaacatcatatt

SEQ ID NO: 170031 - DNA, 13 bp, Artificial Sequence
  Oligonucleotide for detection of SNP TSC0006858
aatatggtgttag

SEQ ID NO: 170032 - DNA, 13 bp, Artificial Sequence
  Oligonucleotide for detection of SNP TSC0006858
ctaacaccatatt

SEQ ID NO: 170033 - DNA, 13 bp, Artificial Sequence
  Oligonucleotide for detection of SNP TSC0006858
aatacgatgttag

SEQ ID NO: 170034 - DNA, 13 bp, Artificial Sequence
  Oligonucleotide for detection of SNP TSC0006858
ctaacatcgtatt

SEQ ID NO: 170035 - DNA, 13 bp, Artificial Sequence
  Oligonucleotide for detection of SNP TSC0006858
aatacggtgttag

SEQ ID NO: 170036 - DNA, 13 bp, Artificial Sequence
  Oligonucleotide for detection of SNP TSC0006858
ctaacaccgtatt

SEQ ID NO: 170037 - DNA, 13 bp, Artificial Sequence
  Oligonucleotide for detection of SNP TSC0042452
tatgatgttttta

SEQ ID NO: 170038 - DNA, 13 bp, Artificial Sequence
  Oligonucleotide for detection of SNP TSC0042452
taaaaacatcata

SEQ ID NO: 170039 - DNA, 13 bp, Artificial Sequence
  Oligonucleotide for detection of SNP TSC0042452
tagagaaattata

SEQ ID NO: 170040 - DNA, 13 bp, Artificial Sequence
  Oligonucleotide for detection of SNP TSC0042452
tataatttctcta

SEQ ID NO: 170041 - DNA, 13 bp, Artificial Sequence
  Oligonucleotide for detection of SNP TSC0042452
tagagatattata

SEQ ID NO: 170042 - DNA, 13 bp, Artificial Sequence
  Oligonucleotide for detection of SNP TSC0042452
tataatatctcta

SEQ ID NO: 170043 - DNA, 13 bp, Artificial Sequence
  Oligonucleotide for detection of SNP TSC0042456
tggaaagtatatt

SEQ ID NO: 170044 - DNA, 13 bp, Artificial Sequence
  Oligonucleotide for detection of SNP TSC0042456
aatatactttcca

SEQ ID NO: 170045 - DNA, 13 bp, Artificial Sequence
  Oligonucleotide for detection of SNP TSC0042456
tggaaaatatatt

SEQ ID NO: 170046 - DNA, 13 bp, Artificial Sequence
  Oligonucleotide for detection of SNP TSC0042456
aatatattttcca

SEQ ID NO: 170047 - DNA, 13 bp, Artificial Sequence
  Oligonucleotide for detection of SNP TSC0042457
agtttggggaaga

SEQ ID NO: 170048 - DNA, 13 bp, Artificial Sequence
  Oligonucleotide for detection of SNP TSC0042457
tcttccccaaact

SEQ ID NO: 170049 - DNA, 13 bp, Artificial Sequence
  Oligonucleotide for detection of SNP TSC0042457
agtttgaggaaga

SEQ ID NO: 170050 - DNA, 13 bp, Artificial Sequence
  Oligonucleotide for detection of SNP TSC0042457
tcttcctcaaact

SEQ ID NO: 170051 - DNA, 13 bp, Artificial Sequence
  Oligonucleotide for detection of SNP TSC0007271
aaaatttgttggg

SEQ ID NO: 170052 - DNA, 13 bp, Artificial Sequence
  Oligonucleotide for detection of SNP TSC0007271
cccaacaaatttt

SEQ ID NO: 170053 - DNA, 13 bp, Artificial Sequence
  Oligonucleotide for detection of SNP TSC0007271
aaaattagttggg

SEQ ID NO: 170054 - DNA, 13 bp, Artificial Sequence
  Oligonucleotide for detection of SNP TSC0007271
cccaactaatttt

SEQ ID NO: 170055 - DNA, 13 bp, Artificial Sequence
  Oligonucleotide for detection of SNP TSC0007272
ggtatatggttay

SEQ ID NO: 170056 - DNA, 13 bp, Artificial Sequence
  Oligonucleotide for detection of SNP TSC0007272
rtaaccatatacc

SEQ ID NO: 170057 - DNA, 13 bp, Artificial Sequence
  Oligonucleotide for detection of SNP TSC0007272
ggtatacggttay

SEQ ID NO: 170058 - DNA, 13 bp, Artificial Sequence
  Oligonucleotide for detection of SNP TSC0007272
rtaaccgtatacc

SEQ ID NO: 170059 - DNA, 13 bp, Artificial Sequence
  Oligonucleotide for detection of SNP TSC0007272
gtgattgtatgty

SEQ ID NO: 170060 - DNA, 13 bp, Artificial Sequence
  Oligonucleotide for detection of SNP TSC0007272
racatacaatcac

SEQ ID NO: 170061 - DNA, 13 bp, Artificial Sequence
  Oligonucleotide for detection of SNP TSC0007272
gtgattatatgty

SEQ ID NO: 170062 - DNA, 13 bp, Artificial Sequence
  Oligonucleotide for detection of SNP TSC0007272
racatataatcac

SEQ ID NO: 170063 - DNA, 13 bp, Artificial Sequence
  Oligonucleotide for detection of SNP TSC0007272
gtgatcgtatgty

SEQ ID NO: 170064 - DNA, 13 bp, Artificial Sequence
  Oligonucleotide for detection of SNP TSC0007272
racatacgatcac

SEQ ID NO: 170065 - DNA, 13 bp, Artificial Sequence
  Oligonucleotide for detection of SNP TSC0007273
gagagatgatgty

SEQ ID NO: 170066 - DNA, 13 bp, Artificial Sequence
  Oligonucleotide for detection of SNP TSC0007273
racatcatctctc

SEQ ID NO: 170067 - DNA, 13 bp, Artificial Sequence
  Oligonucleotide for detection of SNP TSC0007273
gagagacgatgty

SEQ ID NO: 170068 - DNA, 13 bp, Artificial Sequence
  Oligonucleotide for detection of SNP TSC0007273
racatcgtctctc

SEQ ID NO: 170069 - DNA, 13 bp, Artificial Sequence
  Oligonucleotide for detection of SNP TSC0007273
ggtattgttttty

SEQ ID NO: 170070 - DNA, 13 bp, Artificial Sequence
  Oligonucleotide for detection of SNP TSC0007273
raaaaacaatacc

SEQ ID NO: 170071 - DNA, 13 bp, Artificial Sequence
  Oligonucleotide for detection of SNP TSC0007273
ggtattattttty

SEQ ID NO: 170072 - DNA, 13 bp, Artificial Sequence
  Oligonucleotide for detection of SNP TSC0007273
raaaaataatacc

SEQ ID NO: 170073 - DNA, 13 bp, Artificial Sequence
  Oligonucleotide for detection of SNP TSC0007273
ggtatcgttttty

SEQ ID NO: 170074 - DNA, 13 bp, Artificial Sequence
  Oligonucleotide for detection of SNP TSC0007273
raaaaacgatacc

SEQ ID NO: 170075 - DNA, 13 bp, Artificial Sequence
  Oligonucleotide for detection of SNP TSC0007274
agatagattttty

SEQ ID NO: 170076 - DNA, 13 bp, Artificial Sequence
  Oligonucleotide for detection of SNP TSC0007274
raaaaatctatct

SEQ ID NO: 170077 - DNA, 13 bp, Artificial Sequence
  Oligonucleotide for detection of SNP TSC0007274
agataggttttty

SEQ ID NO: 170078 - DNA, 13 bp, Artificial Sequence
  Oligonucleotide for detection of SNP TSC0007274
raaaaacctatct

SEQ ID NO: 170079 - DNA, 13 bp, Artificial Sequence
  Oligonucleotide for detection of SNP TSC0042458
gttttattttgtt

SEQ ID NO: 170080 - DNA, 13 bp, Artificial Sequence
  Oligonucleotide for detection of SNP TSC0042458
aacaaaataaaac

SEQ ID NO: 170081 - DNA, 13 bp, Artificial Sequence
  Oligonucleotide for detection of SNP TSC0042458
gttttagtttgtt

SEQ ID NO: 170082 - DNA, 13 bp, Artificial Sequence
  Oligonucleotide for detection of SNP TSC0042458
aacaaactaaaac

SEQ ID NO: 170083 - DNA, 13 bp, Artificial Sequence
  Oligonucleotide for detection of SNP TSC0042458
aataaagtgaggy

SEQ ID NO: 170084 - DNA, 13 bp, Artificial Sequence
  Oligonucleotide for detection of SNP TSC0042458
rcctcactttatt

SEQ ID NO: 170085 - DNA, 13 bp, Artificial Sequence
  Oligonucleotide for detection of SNP TSC0042458
aataaattgaggy

SEQ ID NO: 170086 - DNA, 13 bp, Artificial Sequence
  Oligonucleotide for detection of SNP TSC0042458
rcctcaatttatt

SEQ ID NO: 170087 - DNA, 13 bp, Artificial Sequence
  Oligonucleotide for detection of SNP TSC0042460
tttttagattggg

SEQ ID NO: 170088 - DNA, 13 bp, Artificial Sequence
  Oligonucleotide for detection of SNP TSC0042460
cccaatctaaaaa

SEQ ID NO: 170089 - DNA, 13 bp, Artificial Sequence
  Oligonucleotide for detection of SNP TSC0042460
tttttaaattggg

SEQ ID NO: 170090 - DNA, 13 bp, Artificial Sequence
  Oligonucleotide for detection of SNP TSC0042460
cccaatttaaaaa

SEQ ID NO: 170091 - DNA, 13 bp, Artificial Sequence
  Oligonucleotide for detection of SNP TSC0006805
tattttaggttay

SEQ ID NO: 170092 - DNA, 13 bp, Artificial Sequence
  Oligonucleotide for detection of SNP TSC0006805
rtaacctaaaata

SEQ ID NO: 170093 - DNA, 13 bp, Artificial Sequence
  Oligonucleotide for detection of SNP TSC0006805
tatttttggttay

SEQ ID NO: 170094 - DNA, 13 bp, Artificial Sequence
  Oligonucleotide for detection of SNP TSC0006805
rtaaccaaaaata

SEQ ID NO: 170095 - DNA, 13 bp, Artificial Sequence
  Oligonucleotide for detection of SNP TSC0006805
gtggtttgaggtg

SEQ ID NO: 170096 - DNA, 13 bp, Artificial Sequence
  Oligonucleotide for detection of SNP TSC0006805
cacctcaaaccac

SEQ ID NO: 170097 - DNA, 13 bp, Artificial Sequence
  Oligonucleotide for detection of SNP TSC0006805
gtggttagaggtg

SEQ ID NO: 170098 - DNA, 13 bp, Artificial Sequence
  Oligonucleotide for detection of SNP TSC0006805
cacctctaaccac

SEQ ID NO: 170099 - DNA, 13 bp, Artificial Sequence
  Oligonucleotide for detection of SNP TSC0006806
aatataattttta

SEQ ID NO: 170100 - DNA, 13 bp, Artificial Sequence
  Oligonucleotide for detection of SNP TSC0006806
taaaaattatatt

SEQ ID NO: 170101 - DNA, 13 bp, Artificial Sequence
  Oligonucleotide for detection of SNP TSC0006806
aatatatttttta

SEQ ID NO: 170102 - DNA, 13 bp, Artificial Sequence
  Oligonucleotide for detection of SNP TSC0006806
taaaaaatatatt

SEQ ID NO: 170103 - DNA, 13 bp, Artificial Sequence
  Oligonucleotide for detection of SNP TSC0006806
tgggagttatatt

SEQ ID NO: 170104 - DNA, 13 bp, Artificial Sequence
  Oligonucleotide for detection of SNP TSC0006806
aatataactccca

SEQ ID NO: 170105 - DNA, 13 bp, Artificial Sequence
  Oligonucleotide for detection of SNP TSC0006806
tgggagatatatt

SEQ ID NO: 170106 - DNA, 13 bp, Artificial Sequence
  Oligonucleotide for detection of SNP TSC0006806
aatatatctccca

SEQ ID NO: 170107 - DNA, 13 bp, Artificial Sequence
  Oligonucleotide for detection of SNP TSC0042464
tttaggagattaa

SEQ ID NO: 170108 - DNA, 13 bp, Artificial Sequence
  Oligonucleotide for detection of SNP TSC0042464
ttaatctcctaaa

SEQ ID NO: 170109 - DNA, 13 bp, Artificial Sequence
  Oligonucleotide for detection of SNP TSC0042464
tttaggggattaa

SEQ ID NO: 170110 - DNA, 13 bp, Artificial Sequence
  Oligonucleotide for detection of SNP TSC0042464
ttaatcccctaaa

SEQ ID NO: 170111 - DNA, 13 bp, Artificial Sequence
  Oligonucleotide for detection of SNP TSC0042465
attgggggttggt

SEQ ID NO: 170112 - DNA, 13 bp, Artificial Sequence
  Oligonucleotide for detection of SNP TSC0042465
accaacccccaat

SEQ ID NO: 170113 - DNA, 13 bp, Artificial Sequence
  Oligonucleotide for detection of SNP TSC0042465
attgggagttggt

SEQ ID NO: 170114 - DNA, 13 bp, Artificial Sequence
  Oligonucleotide for detection of SNP TSC0042465
accaactcccaat

SEQ ID NO: 170115 - DNA, 13 bp, Artificial Sequence
  Oligonucleotide for detection of SNP TSC0042466
taaattgggtagy

SEQ ID NO: 170116 - DNA, 13 bp, Artificial Sequence
  Oligonucleotide for detection of SNP TSC0042466
rctacccaattta

SEQ ID NO: 170117 - DNA, 13 bp, Artificial Sequence
  Oligonucleotide for detection of SNP TSC0042466
taaattaggtagy

SEQ ID NO: 170118 - DNA, 13 bp, Artificial Sequence
  Oligonucleotide for detection of SNP TSC0042466
rctacctaattta

SEQ ID NO: 170119 - DNA, 13 bp, Artificial Sequence
  Oligonucleotide for detection of SNP TSC0042467
attaatgtattgt

SEQ ID NO: 170120 - DNA, 13 bp, Artificial Sequence
  Oligonucleotide for detection of SNP TSC0042467
acaatacattaat

SEQ ID NO: 170121 - DNA, 13 bp, Artificial Sequence
  Oligonucleotide for detection of SNP TSC0042467
attaatatattgt

SEQ ID NO: 170122 - DNA, 13 bp, Artificial Sequence
  Oligonucleotide for detection of SNP TSC0042467
acaatatattaat

SEQ ID NO: 170123 - DNA, 13 bp, Artificial Sequence
  Oligonucleotide for detection of SNP TSC0042468
ttgaagaaaaaag

SEQ ID NO: 170124 - DNA, 13 bp, Artificial Sequence
  Oligonucleotide for detection of SNP TSC0042468
cttttttcttcaa

SEQ ID NO: 170125 - DNA, 13 bp, Artificial Sequence
  Oligonucleotide for detection of SNP TSC0042468
ttgaagtaaaaag

SEQ ID NO: 170126 - DNA, 13 bp, Artificial Sequence
  Oligonucleotide for detection of SNP TSC0042468
ctttttacttcaa

SEQ ID NO: 170127 - DNA, 13 bp, Artificial Sequence
  Oligonucleotide for detection of SNP TSC0042469
atatacgtatgta

SEQ ID NO: 170128 - DNA, 13 bp, Artificial Sequence
  Oligonucleotide for detection of SNP TSC0042469
tacatacgtatat

SEQ ID NO: 170129 - DNA, 13 bp, Artificial Sequence
  Oligonucleotide for detection of SNP TSC0042472
tttgtgatattty

SEQ ID NO: 170130 - DNA, 13 bp, Artificial Sequence
  Oligonucleotide for detection of SNP TSC0042472
raaatatcacaaa

SEQ ID NO: 170131 - DNA, 13 bp, Artificial Sequence
  Oligonucleotide for detection of SNP TSC0042472
tttgtggtattty

SEQ ID NO: 170132 - DNA, 13 bp, Artificial Sequence
  Oligonucleotide for detection of SNP TSC0042472
raaataccacaaa

SEQ ID NO: 170133 - DNA, 13 bp, Artificial Sequence
  Oligonucleotide for detection of SNP TSC0042473
aaggttggttggt

SEQ ID NO: 170134 - DNA, 13 bp, Artificial Sequence
  Oligonucleotide for detection of SNP TSC0042473
accaaccaacctt

SEQ ID NO: 170135 - DNA, 13 bp, Artificial Sequence
  Oligonucleotide for detection of SNP TSC0042473
aaggttagttggt

SEQ ID NO: 170136 - DNA, 13 bp, Artificial Sequence
  Oligonucleotide for detection of SNP TSC0042473
accaactaacctt

SEQ ID NO: 170137 - DNA, 13 bp, Artificial Sequence
  Oligonucleotide for detection of SNP TSC0042474
agtaatttatgat

SEQ ID NO: 170138 - DNA, 13 bp, Artificial Sequence
  Oligonucleotide for detection of SNP TSC0042474
atcataaattact

SEQ ID NO: 170139 - DNA, 13 bp, Artificial Sequence
  Oligonucleotide for detection of SNP TSC0042474
agtaatatatgat

SEQ ID NO: 170140 - DNA, 13 bp, Artificial Sequence
  Oligonucleotide for detection of SNP TSC0042474
atcatatattact

SEQ ID NO: 170141 - DNA, 13 bp, Artificial Sequence
  Oligonucleotide for detection of SNP TSC0042475
tgatttattttaa

SEQ ID NO: 170142 - DNA, 13 bp, Artificial Sequence
  Oligonucleotide for detection of SNP TSC0042475
ttaaaataaatca

SEQ ID NO: 170143 - DNA, 13 bp, Artificial Sequence
  Oligonucleotide for detection of SNP TSC0042475
tgatttgttttaa

SEQ ID NO: 170144 - DNA, 13 bp, Artificial Sequence
  Oligonucleotide for detection of SNP TSC0042475
ttaaaacaaatca

SEQ ID NO: 170145 - DNA, 13 bp, Artificial Sequence
  Oligonucleotide for detection of SNP TSC0042479
ggtaaggaggaty

SEQ ID NO: 170146 - DNA, 13 bp, Artificial Sequence
  Oligonucleotide for detection of SNP TSC0042479
ratcctccttacc

SEQ ID NO: 170147 - DNA, 13 bp, Artificial Sequence
  Oligonucleotide for detection of SNP TSC0042479
ggtaagaaggaty

SEQ ID NO: 170148 - DNA, 13 bp, Artificial Sequence
  Oligonucleotide for detection of SNP TSC0042479
ratccttcttacc

SEQ ID NO: 170149 - DNA, 13 bp, Artificial Sequence
  Oligonucleotide for detection of SNP TSC0042480
ttttaatgtatgt

SEQ ID NO: 170150 - DNA, 13 bp, Artificial Sequence
  Oligonucleotide for detection of SNP TSC0042480
acatacattaaaa

SEQ ID NO: 170151 - DNA, 13 bp, Artificial Sequence
  Oligonucleotide for detection of SNP TSC0042480
ttttaacgtatgt

SEQ ID NO: 170152 - DNA, 13 bp, Artificial Sequence
  Oligonucleotide for detection of SNP TSC0042480
acatacgttaaaa

SEQ ID NO: 170153 - DNA, 13 bp, Artificial Sequence
  Oligonucleotide for detection of SNP TSC0042480
atatatgttgaaa

SEQ ID NO: 170154 - DNA, 13 bp, Artificial Sequence
  Oligonucleotide for detection of SNP TSC0042480
tttcaacatatat

SEQ ID NO: 170155 - DNA, 13 bp, Artificial Sequence
  Oligonucleotide for detection of SNP TSC0042480
atatatattgaaa

SEQ ID NO: 170156 - DNA, 13 bp, Artificial Sequence
  Oligonucleotide for detection of SNP TSC0042480
tttcaatatatat

SEQ ID NO: 170157 - DNA, 13 bp, Artificial Sequence
  Oligonucleotide for detection of SNP TSC0042480
atatacgttgaaa

SEQ ID NO: 170158 - DNA, 13 bp, Artificial Sequence
  Oligonucleotide for detection of SNP TSC0042480
tttcaacgtatat

SEQ ID NO: 170159 - DNA, 13 bp, Artificial Sequence
  Oligonucleotide for detection of SNP TSC0042482
gttagggttgtta

SEQ ID NO: 170160 - DNA, 13 bp, Artificial Sequence
  Oligonucleotide for detection of SNP TSC0042482
taacaaccctaac

SEQ ID NO: 170161 - DNA, 13 bp, Artificial Sequence
  Oligonucleotide for detection of SNP TSC0042482
gttaggattgtta

SEQ ID NO: 170162 - DNA, 13 bp, Artificial Sequence
  Oligonucleotide for detection of SNP TSC0042482
taacaatcctaac

SEQ ID NO: 170163 - DNA, 13 bp, Artificial Sequence
  Oligonucleotide for detection of SNP TSC0006031
taaattggaagag

SEQ ID NO: 170164 - DNA, 13 bp, Artificial Sequence
  Oligonucleotide for detection of SNP TSC0006031
ctcttccaattta

SEQ ID NO: 170165 - DNA, 13 bp, Artificial Sequence
  Oligonucleotide for detection of SNP TSC0006031
taaattagaagag

SEQ ID NO: 170166 - DNA, 13 bp, Artificial Sequence
  Oligonucleotide for detection of SNP TSC0006031
ctcttctaattta

SEQ ID NO: 170167 - DNA, 13 bp, Artificial Sequence
  Oligonucleotide for detection of SNP TSC0009903
ttatatatttgga

SEQ ID NO: 170168 - DNA, 13 bp, Artificial Sequence
  Oligonucleotide for detection of SNP TSC0009903
tccaaatatataa

SEQ ID NO: 170169 - DNA, 13 bp, Artificial Sequence
  Oligonucleotide for detection of SNP TSC0009903
ttatatgtttgga

SEQ ID NO: 170170 - DNA, 13 bp, Artificial Sequence
  Oligonucleotide for detection of SNP TSC0009903
tccaaacatataa

SEQ ID NO: 170171 - DNA, 13 bp, Artificial Sequence
  Oligonucleotide for detection of SNP TSC0042487
tttgaatggagta

SEQ ID NO: 170172 - DNA, 13 bp, Artificial Sequence
  Oligonucleotide for detection of SNP TSC0042487
tactccattcaaa

SEQ ID NO: 170173 - DNA, 13 bp, Artificial Sequence
  Oligonucleotide for detection of SNP TSC0042487
tttgaacggagta

SEQ ID NO: 170174 - DNA, 13 bp, Artificial Sequence
  Oligonucleotide for detection of SNP TSC0042487
tactccgttcaaa

SEQ ID NO: 170175 - DNA, 13 bp, Artificial Sequence
  Oligonucleotide for detection of SNP TSC0042488
tatgatggattgg

SEQ ID NO: 170176 - DNA, 13 bp, Artificial Sequence
  Oligonucleotide for detection of SNP TSC0042488
ccaatccatcata

SEQ ID NO: 170177 - DNA, 13 bp, Artificial Sequence
  Oligonucleotide for detection of SNP TSC0042488
tatgatagattgg

SEQ ID NO: 170178 - DNA, 13 bp, Artificial Sequence
  Oligonucleotide for detection of SNP TSC0042488
ccaatctatcata

SEQ ID NO: 170179 - DNA, 13 bp, Artificial Sequence
  Oligonucleotide for detection of SNP TSC0042489
ttttttaaaatga

SEQ ID NO: 170180 - DNA, 13 bp, Artificial Sequence
  Oligonucleotide for detection of SNP TSC0042489
tcattttaaaaaa

SEQ ID NO: 170181 - DNA, 13 bp, Artificial Sequence
  Oligonucleotide for detection of SNP TSC0042489
tttttttaaatga

SEQ ID NO: 170182 - DNA, 13 bp, Artificial Sequence
  Oligonucleotide for detection of SNP TSC0042489
tcatttaaaaaaa

SEQ ID NO: 170183 - DNA, 13 bp, Artificial Sequence
  Oligonucleotide for detection of SNP TSC0007298
atataatgttggt

SEQ ID NO: 170184 - DNA, 13 bp, Artificial Sequence
  Oligonucleotide for detection of SNP TSC0007298
accaacattatat

SEQ ID NO: 170185 - DNA, 13 bp, Artificial Sequence
  Oligonucleotide for detection of SNP TSC0007298
atataaggttggt

SEQ ID NO: 170186 - DNA, 13 bp, Artificial Sequence
  Oligonucleotide for detection of SNP TSC0007298
accaaccttatat

SEQ ID NO: 170187 - DNA, 13 bp, Artificial Sequence
  Oligonucleotide for detection of SNP TSC0007298
attaatattatgt

SEQ ID NO: 170188 - DNA, 13 bp, Artificial Sequence
  Oligonucleotide for detection of SNP TSC0007298
acataatattaat

SEQ ID NO: 170189 - DNA, 13 bp, Artificial Sequence
  Oligonucleotide for detection of SNP TSC0007298
attaattttatgt

SEQ ID NO: 170190 - DNA, 13 bp, Artificial Sequence
  Oligonucleotide for detection of SNP TSC0007298
acataaaattaat

SEQ ID NO: 170191 - DNA, 13 bp, Artificial Sequence
  Oligonucleotide for detection of SNP TSC0042491
aatgtatatgttt

SEQ ID NO: 170192 - DNA, 13 bp, Artificial Sequence
  Oligonucleotide for detection of SNP TSC0042491
aaacatatacatt

SEQ ID NO: 170193 - DNA, 13 bp, Artificial Sequence
  Oligonucleotide for detection of SNP TSC0042491
aatgtagatgttt

SEQ ID NO: 170194 - DNA, 13 bp, Artificial Sequence
  Oligonucleotide for detection of SNP TSC0042491
aaacatctacatt

SEQ ID NO: 170195 - DNA, 13 bp, Artificial Sequence
  Oligonucleotide for detection of SNP TSC0042491
agatatatatatt

SEQ ID NO: 170196 - DNA, 13 bp, Artificial Sequence
  Oligonucleotide for detection of SNP TSC0042491
aatatatatatct

SEQ ID NO: 170197 - DNA, 13 bp, Artificial Sequence
  Oligonucleotide for detection of SNP TSC0042491
agatatttatatt

SEQ ID NO: 170198 - DNA, 13 bp, Artificial Sequence
  Oligonucleotide for detection of SNP TSC0042491
aatataaatatct

SEQ ID NO: 170199 - DNA, 13 bp, Artificial Sequence
  Oligonucleotide for detection of SNP TSC0008487
gaaaaaggggaag

SEQ ID NO: 170200 - DNA, 13 bp, Artificial Sequence
  Oligonucleotide for detection of SNP TSC0008487
cttcccctttttc

SEQ ID NO: 170201 - DNA, 13 bp, Artificial Sequence
  Oligonucleotide for detection of SNP TSC0008487
gaaaaatgggaag

SEQ ID NO: 170202 - DNA, 13 bp, Artificial Sequence
  Oligonucleotide for detection of SNP TSC0008487
cttcccatttttc

SEQ ID NO: 170203 - DNA, 13 bp, Artificial Sequence
  Oligonucleotide for detection of SNP TSC0008487
gaaaaacgggaag

SEQ ID NO: 170204 - DNA, 13 bp, Artificial Sequence
  Oligonucleotide for detection of SNP TSC0008487
cttcccgtttttc

SEQ ID NO: 170205 - DNA, 13 bp, Artificial Sequence
  Oligonucleotide for detection of SNP TSC0010807
tatatattagagt

SEQ ID NO: 170206 - DNA, 13 bp, Artificial Sequence
  Oligonucleotide for detection of SNP TSC0010807
actctaatatata

SEQ ID NO: 170207 - DNA, 13 bp, Artificial Sequence
  Oligonucleotide for detection of SNP TSC0010807
tatatagtagagt

SEQ ID NO: 170208 - DNA, 13 bp, Artificial Sequence
  Oligonucleotide for detection of SNP TSC0010807
actctactatata

SEQ ID NO: 170209 - DNA, 13 bp, Artificial Sequence
  Oligonucleotide for detection of SNP TSC0010807
attttggtgtgta

SEQ ID NO: 170210 - DNA, 13 bp, Artificial Sequence
  Oligonucleotide for detection of SNP TSC0010807
tacacaccaaaat

SEQ ID NO: 170211 - DNA, 13 bp, Artificial Sequence
  Oligonucleotide for detection of SNP TSC0010807
attttgttgtgta

SEQ ID NO: 170212 - DNA, 13 bp, Artificial Sequence
  Oligonucleotide for detection of SNP TSC0010807
tacacaacaaaat

SEQ ID NO: 170213 - DNA, 13 bp, Artificial Sequence
  Oligonucleotide for detection of SNP TSC0010808
ttttttttggggy

SEQ ID NO: 170214 - DNA, 13 bp, Artificial Sequence
  Oligonucleotide for detection of SNP TSC0010808
rccccaaaaaaaa

SEQ ID NO: 170215 - DNA, 13 bp, Artificial Sequence
  Oligonucleotide for detection of SNP TSC0010808
ttttttgtggggy

SEQ ID NO: 170216 - DNA, 13 bp, Artificial Sequence
  Oligonucleotide for detection of SNP TSC0010808
rccccacaaaaaa

SEQ ID NO: 170217 - DNA, 13 bp, Artificial Sequence
  Oligonucleotide for detection of SNP TSC0010808
tttttcgtggggy

SEQ ID NO: 170218 - DNA, 13 bp, Artificial Sequence
  Oligonucleotide for detection of SNP TSC0010808
rccccacgaaaaa

SEQ ID NO: 170219 - DNA, 13 bp, Artificial Sequence
  Oligonucleotide for detection of SNP TSC0010808
gttttagggagga

SEQ ID NO: 170220 - DNA, 13 bp, Artificial Sequence
  Oligonucleotide for detection of SNP TSC0010808
tcctccctaaaac

SEQ ID NO: 170221 - DNA, 13 bp, Artificial Sequence
  Oligonucleotide for detection of SNP TSC0010808
gttttatggagga

SEQ ID NO: 170222 - DNA, 13 bp, Artificial Sequence
  Oligonucleotide for detection of SNP TSC0010808
tcctccataaaac

SEQ ID NO: 170223 - DNA, 13 bp, Artificial Sequence
  Oligonucleotide for detection of SNP TSC0010808
gttttacggagga

SEQ ID NO: 170224 - DNA, 13 bp, Artificial Sequence
  Oligonucleotide for detection of SNP TSC0010808
tcctccgtaaaac

SEQ ID NO: 170225 - DNA, 13 bp, Artificial Sequence
  Oligonucleotide for detection of SNP TSC0042500
gtgaagaggtaty

SEQ ID NO: 170226 - DNA, 13 bp, Artificial Sequence
  Oligonucleotide for detection of SNP TSC0042500
ratacctcttcac

SEQ ID NO: 170227 - DNA, 13 bp, Artificial Sequence
  Oligonucleotide for detection of SNP TSC0042500
gtgaagtggtaty

SEQ ID NO: 170228 - DNA, 13 bp, Artificial Sequence
  Oligonucleotide for detection of SNP TSC0042500
rataccacttcac

SEQ ID NO: 170229 - DNA, 13 bp, Artificial Sequence
  Oligonucleotide for detection of SNP TSC0042500
gtgaagcggtaty

SEQ ID NO: 170230 - DNA, 13 bp, Artificial Sequence
  Oligonucleotide for detection of SNP TSC0042500
rataccgcttcac

SEQ ID NO: 170231 - DNA, 13 bp, Artificial Sequence
  Oligonucleotide for detection of SNP TSC0042500
ggtgtttttttay

SEQ ID NO: 170232 - DNA, 13 bp, Artificial Sequence
  Oligonucleotide for detection of SNP TSC0042500
rtaaaaaaacacc

SEQ ID NO: 170233 - DNA, 13 bp, Artificial Sequence
  Oligonucleotide for detection of SNP TSC0042500
ggtgttgttttay

SEQ ID NO: 170234 - DNA, 13 bp, Artificial Sequence
  Oligonucleotide for detection of SNP TSC0042500
rtaaaacaacacc

SEQ ID NO: 170235 - DNA, 13 bp, Artificial Sequence
  Oligonucleotide for detection of SNP TSC0042500
ggtgtcgttttay

SEQ ID NO: 170236 - DNA, 13 bp, Artificial Sequence
  Oligonucleotide for detection of SNP TSC0042500
rtaaaacgacacc

SEQ ID NO: 170237 - DNA, 13 bp, Artificial Sequence
  Oligonucleotide for detection of SNP TSC0042501
tagattagaagag

SEQ ID NO: 170238 - DNA, 13 bp, Artificial Sequence
  Oligonucleotide for detection of SNP TSC0042501
ctcttctaatcta

SEQ ID NO: 170239 - DNA, 13 bp, Artificial Sequence
  Oligonucleotide for detection of SNP TSC0042501
tagattggaagag

SEQ ID NO: 170240 - DNA, 13 bp, Artificial Sequence
  Oligonucleotide for detection of SNP TSC0042501
ctcttccaatcta

SEQ ID NO: 170241 - DNA, 13 bp, Artificial Sequence
  Oligonucleotide for detection of SNP TSC0042501
tagatcggaagag

SEQ ID NO: 170242 - DNA, 13 bp, Artificial Sequence
  Oligonucleotide for detection of SNP TSC0042501
ctcttccgatcta

SEQ ID NO: 170243 - DNA, 13 bp, Artificial Sequence
  Oligonucleotide for detection of SNP TSC0042501
ttttttcggtttg

SEQ ID NO: 170244 - DNA, 13 bp, Artificial Sequence
  Oligonucleotide for detection of SNP TSC0042501
caaaccgaaaaaa

SEQ ID NO: 170245 - DNA, 13 bp, Artificial Sequence
  Oligonucleotide for detection of SNP TSC0007396
tgttatataagat

SEQ ID NO: 170246 - DNA, 13 bp, Artificial Sequence
  Oligonucleotide for detection of SNP TSC0007396
atcttatataaca

SEQ ID NO: 170247 - DNA, 13 bp, Artificial Sequence
  Oligonucleotide for detection of SNP TSC0007396
tgttatgtaagat

SEQ ID NO: 170248 - DNA, 13 bp, Artificial Sequence
  Oligonucleotide for detection of SNP TSC0007396
atcttacataaca

SEQ ID NO: 170249 - DNA, 13 bp, Artificial Sequence
  Oligonucleotide for detection of SNP TSC0007397
ttattaaaatata

SEQ ID NO: 170250 - DNA, 13 bp, Artificial Sequence
  Oligonucleotide for detection of SNP TSC0007397
tatattttaataa

SEQ ID NO: 170251 - DNA, 13 bp, Artificial Sequence
  Oligonucleotide for detection of SNP TSC0007397
ttattagaatata

SEQ ID NO: 170252 - DNA, 13 bp, Artificial Sequence
  Oligonucleotide for detection of SNP TSC0007397
tatattctaataa

SEQ ID NO: 170253 - DNA, 13 bp, Artificial Sequence
  Oligonucleotide for detection of SNP TSC0042502
aagttatttaaty

SEQ ID NO: 170254 - DNA, 13 bp, Artificial Sequence
  Oligonucleotide for detection of SNP TSC0042502
rattaaataactt

SEQ ID NO: 170255 - DNA, 13 bp, Artificial Sequence
  Oligonucleotide for detection of SNP TSC0042502
aagttagttaaty

SEQ ID NO: 170256 - DNA, 13 bp, Artificial Sequence
  Oligonucleotide for detection of SNP TSC0042502
rattaactaactt

SEQ ID NO: 170257 - DNA, 13 bp, Artificial Sequence
  Oligonucleotide for detection of SNP TSC0042502
ggttaagtgattt

SEQ ID NO: 170258 - DNA, 13 bp, Artificial Sequence
  Oligonucleotide for detection of SNP TSC0042502
aaatcacttaacc

SEQ ID NO: 170259 - DNA, 13 bp, Artificial Sequence
  Oligonucleotide for detection of SNP TSC0042502
ggttaattgattt

SEQ ID NO: 170260 - DNA, 13 bp, Artificial Sequence
  Oligonucleotide for detection of SNP TSC0042502
aaatcaattaacc

SEQ ID NO: 170261 - DNA, 13 bp, Artificial Sequence
  Oligonucleotide for detection of SNP TSC0042503
gtttgtagtgtgt

SEQ ID NO: 170262 - DNA, 13 bp, Artificial Sequence
  Oligonucleotide for detection of SNP TSC0042503
acacactacaaac

SEQ ID NO: 170263 - DNA, 13 bp, Artificial Sequence
  Oligonucleotide for detection of SNP TSC0042503
gtttgtggtgtgt

SEQ ID NO: 170264 - DNA, 13 bp, Artificial Sequence
  Oligonucleotide for detection of SNP TSC0042503
acacaccacaaac

SEQ ID NO: 170265 - DNA, 13 bp, Artificial Sequence
  Oligonucleotide for detection of SNP TSC0042504
aaaattgcgaaaa

SEQ ID NO: 170266 - DNA, 13 bp, Artificial Sequence
  Oligonucleotide for detection of SNP TSC0042504
ttttcgcaatttt

SEQ ID NO: 170267 - DNA, 13 bp, Artificial Sequence
  Oligonucleotide for detection of SNP TSC0042504
aaaattacgaaaa

SEQ ID NO: 170268 - DNA, 13 bp, Artificial Sequence
  Oligonucleotide for detection of SNP TSC0042504
ttttcgtaatttt

SEQ ID NO: 170269 - DNA, 13 bp, Artificial Sequence
  Oligonucleotide for detection of SNP TSC0006994
tattttgttaggy

SEQ ID NO: 170270 - DNA, 13 bp, Artificial Sequence
  Oligonucleotide for detection of SNP TSC0006994
rcctaacaaaata

SEQ ID NO: 170271 - DNA, 13 bp, Artificial Sequence
  Oligonucleotide for detection of SNP TSC0006994
tattttattaggy

SEQ ID NO: 170272 - DNA, 13 bp, Artificial Sequence
  Oligonucleotide for detection of SNP TSC0006994
rcctaataaaata

SEQ ID NO: 170273 - DNA, 13 bp, Artificial Sequence
  Oligonucleotide for detection of SNP TSC0008613
gaattaatgtaty

SEQ ID NO: 170274 - DNA, 13 bp, Artificial Sequence
  Oligonucleotide for detection of SNP TSC0008613
ratacattaattc

SEQ ID NO: 170275 - DNA, 13 bp, Artificial Sequence
  Oligonucleotide for detection of SNP TSC0008613
gaattagtgtaty

SEQ ID NO: 170276 - DNA, 13 bp, Artificial Sequence
  Oligonucleotide for detection of SNP TSC0008613
ratacactaattc

SEQ ID NO: 170277 - DNA, 13 bp, Artificial Sequence
  Oligonucleotide for detection of SNP TSC0005745
ggttttaataatt

SEQ ID NO: 170278 - DNA, 13 bp, Artificial Sequence
  Oligonucleotide for detection of SNP TSC0005745
aattattaaaacc

SEQ ID NO: 170279 - DNA, 13 bp, Artificial Sequence
  Oligonucleotide for detection of SNP TSC0005745
ggttttgataatt

SEQ ID NO: 170280 - DNA, 13 bp, Artificial Sequence
  Oligonucleotide for detection of SNP TSC0005745
aattatcaaaacc

SEQ ID NO: 170281 - DNA, 13 bp, Artificial Sequence
  Oligonucleotide for detection of SNP TSC0000342
gattatgtaatgt

SEQ ID NO: 170282 - DNA, 13 bp, Artificial Sequence
  Oligonucleotide for detection of SNP TSC0000342
acattacataatc

SEQ ID NO: 170283 - DNA, 13 bp, Artificial Sequence
  Oligonucleotide for detection of SNP TSC0000342
gattatataatgt

SEQ ID NO: 170284 - DNA, 13 bp, Artificial Sequence
  Oligonucleotide for detection of SNP TSC0000342
acattatataatc

SEQ ID NO: 170285 - DNA, 13 bp, Artificial Sequence
  Oligonucleotide for detection of SNP TSC0000343
agtttgaagtgty

SEQ ID NO: 170286 - DNA, 13 bp, Artificial Sequence
  Oligonucleotide for detection of SNP TSC0000343
racacttcaaact

SEQ ID NO: 170287 - DNA, 13 bp, Artificial Sequence
  Oligonucleotide for detection of SNP TSC0000343
agtttggagtgty

SEQ ID NO: 170288 - DNA, 13 bp, Artificial Sequence
  Oligonucleotide for detection of SNP TSC0000343
racactccaaact

SEQ ID NO: 170289 - DNA, 13 bp, Artificial Sequence
  Oligonucleotide for detection of SNP TSC0000343
agtttgaagcgty

SEQ ID NO: 170290 - DNA, 13 bp, Artificial Sequence
  Oligonucleotide for detection of SNP TSC0000343
racgcttcaaact

SEQ ID NO: 170291 - DNA, 13 bp, Artificial Sequence
  Oligonucleotide for detection of SNP TSC0000343
agtttggagcgty

SEQ ID NO: 170292 - DNA, 13 bp, Artificial Sequence
  Oligonucleotide for detection of SNP TSC0000343
racgctccaaact

SEQ ID NO: 170293 - DNA, 13 bp, Artificial Sequence
  Oligonucleotide for detection of SNP TSC0042505
gtgagttttttag

SEQ ID NO: 170294 - DNA, 13 bp, Artificial Sequence
  Oligonucleotide for detection of SNP TSC0042505
ctaaaaaactcac

SEQ ID NO: 170295 - DNA, 13 bp, Artificial Sequence
  Oligonucleotide for detection of SNP TSC0042505
gtgagtgttttag

SEQ ID NO: 170296 - DNA, 13 bp, Artificial Sequence
  Oligonucleotide for detection of SNP TSC0042505
ctaaaacactcac

SEQ ID NO: 170297 - DNA, 13 bp, Artificial Sequence
  Oligonucleotide for detection of SNP TSC0042505
ttgagaaatttay

SEQ ID NO: 170298 - DNA, 13 bp, Artificial Sequence
  Oligonucleotide for detection of SNP TSC0042505
rtaaatttctcaa

SEQ ID NO: 170299 - DNA, 13 bp, Artificial Sequence
  Oligonucleotide for detection of SNP TSC0042505
ttgagatatttay

SEQ ID NO: 170300 - DNA, 13 bp, Artificial Sequence
  Oligonucleotide for detection of SNP TSC0042505
rtaaatatctcaa

SEQ ID NO: 170301 - DNA, 13 bp, Artificial Sequence
  Oligonucleotide for detection of SNP TSC0042506
tatatacgtaagt

SEQ ID NO: 170302 - DNA, 13 bp, Artificial Sequence
  Oligonucleotide for detection of SNP TSC0042506
acttacgtatata

SEQ ID NO: 170303 - DNA, 13 bp, Artificial Sequence
  Oligonucleotide for detection of SNP TSC0042506
atttgtgtgtgtg

SEQ ID NO: 170304 - DNA, 13 bp, Artificial Sequence
  Oligonucleotide for detection of SNP TSC0042506
cacacacacaaat

SEQ ID NO: 170305 - DNA, 13 bp, Artificial Sequence
  Oligonucleotide for detection of SNP TSC0042506
atttgtatgtgtg

SEQ ID NO: 170306 - DNA, 13 bp, Artificial Sequence
  Oligonucleotide for detection of SNP TSC0042506
cacacatacaaat

SEQ ID NO: 170307 - DNA, 13 bp, Artificial Sequence
  Oligonucleotide for detection of SNP TSC0042506
atttgcgtgtgtg

SEQ ID NO: 170308 - DNA, 13 bp, Artificial Sequence
  Oligonucleotide for detection of SNP TSC0042506
cacacacgcaaat

SEQ ID NO: 170309 - DNA, 13 bp, Artificial Sequence
  Oligonucleotide for detection of SNP TSC0042508
tatttgaataagg

SEQ ID NO: 170310 - DNA, 13 bp, Artificial Sequence
  Oligonucleotide for detection of SNP TSC0042508
ccttattcaaata

SEQ ID NO: 170311 - DNA, 13 bp, Artificial Sequence
  Oligonucleotide for detection of SNP TSC0042508
tatttgtataagg

SEQ ID NO: 170312 - DNA, 13 bp, Artificial Sequence
  Oligonucleotide for detection of SNP TSC0042508
ccttatacaaata

SEQ ID NO: 170313 - DNA, 13 bp, Artificial Sequence
  Oligonucleotide for detection of SNP TSC0042509
taagaggaggagy

SEQ ID NO: 170314 - DNA, 13 bp, Artificial Sequence
  Oligonucleotide for detection of SNP TSC0042509
rctcctcctctta

SEQ ID NO: 170315 - DNA, 13 bp, Artificial Sequence
  Oligonucleotide for detection of SNP TSC0042509
taagagaaggagy

SEQ ID NO: 170316 - DNA, 13 bp, Artificial Sequence
  Oligonucleotide for detection of SNP TSC0042509
rctccttctctta

SEQ ID NO: 170317 - DNA, 13 bp, Artificial Sequence
  Oligonucleotide for detection of SNP TSC0009070
tgttgtatagaat

SEQ ID NO: 170318 - DNA, 13 bp, Artificial Sequence
  Oligonucleotide for detection of SNP TSC0009070
attctatacaaca

SEQ ID NO: 170319 - DNA, 13 bp, Artificial Sequence
  Oligonucleotide for detection of SNP TSC0009070
tgttgtgtagaat

SEQ ID NO: 170320 - DNA, 13 bp, Artificial Sequence
  Oligonucleotide for detection of SNP TSC0009070
attctacacaaca

SEQ ID NO: 170321 - DNA, 13 bp, Artificial Sequence
  Oligonucleotide for detection of SNP TSC0042510
ttaaagtgggaga

SEQ ID NO: 170322 - DNA, 13 bp, Artificial Sequence
  Oligonucleotide for detection of SNP TSC0042510
tctcccactttaa

SEQ ID NO: 170323 - DNA, 13 bp, Artificial Sequence
  Oligonucleotide for detection of SNP TSC0042510
ttaaagcgggaga

SEQ ID NO: 170324 - DNA, 13 bp, Artificial Sequence
  Oligonucleotide for detection of SNP TSC0042510
tctcccgctttaa

SEQ ID NO: 170325 - DNA, 13 bp, Artificial Sequence
  Oligonucleotide for detection of SNP TSC0007455
ttaagaatttttt

SEQ ID NO: 170326 - DNA, 13 bp, Artificial Sequence
  Oligonucleotide for detection of SNP TSC0007455
aaaaaattcttaa

SEQ ID NO: 170327 - DNA, 13 bp, Artificial Sequence
  Oligonucleotide for detection of SNP TSC0007455
ttaagagtttttt

SEQ ID NO: 170328 - DNA, 13 bp, Artificial Sequence
  Oligonucleotide for detection of SNP TSC0007455
aaaaaactcttaa

SEQ ID NO: 170329 - DNA, 13 bp, Artificial Sequence
  Oligonucleotide for detection of SNP TSC0001573
agtatatgaaagt

SEQ ID NO: 170330 - DNA, 13 bp, Artificial Sequence
  Oligonucleotide for detection of SNP TSC0001573
actttcatatact

SEQ ID NO: 170331 - DNA, 13 bp, Artificial Sequence
  Oligonucleotide for detection of SNP TSC0001573
agtatacgaaagt

SEQ ID NO: 170332 - DNA, 13 bp, Artificial Sequence
  Oligonucleotide for detection of SNP TSC0001573
actttcgtatact

SEQ ID NO: 170333 - DNA, 13 bp, Artificial Sequence
  Oligonucleotide for detection of SNP TSC0001573
atttttgtatgtt

SEQ ID NO: 170334 - DNA, 13 bp, Artificial Sequence
  Oligonucleotide for detection of SNP TSC0001573
aacatacaaaaat

SEQ ID NO: 170335 - DNA, 13 bp, Artificial Sequence
  Oligonucleotide for detection of SNP TSC0001573
atttttatatgtt

SEQ ID NO: 170336 - DNA, 13 bp, Artificial Sequence
  Oligonucleotide for detection of SNP TSC0001573
aacatataaaaat

SEQ ID NO: 170337 - DNA, 13 bp, Artificial Sequence
  Oligonucleotide for detection of SNP TSC0001573
attttcgtatgtt

SEQ ID NO: 170338 - DNA, 13 bp, Artificial Sequence
  Oligonucleotide for detection of SNP TSC0001573
aacatacgaaaat

SEQ ID NO: 170339 - DNA, 13 bp, Artificial Sequence
  Oligonucleotide for detection of SNP TSC0001574
gaggttatgggag

SEQ ID NO: 170340 - DNA, 13 bp, Artificial Sequence
  Oligonucleotide for detection of SNP TSC0001574
ctcccataacctc

SEQ ID NO: 170341 - DNA, 13 bp, Artificial Sequence
  Oligonucleotide for detection of SNP TSC0001574
gaggttgtgggag

SEQ ID NO: 170342 - DNA, 13 bp, Artificial Sequence
  Oligonucleotide for detection of SNP TSC0001574
ctcccacaacctc

SEQ ID NO: 170343 - DNA, 13 bp, Artificial Sequence
  Oligonucleotide for detection of SNP TSC0042513
ttaaatagtgatt

SEQ ID NO: 170344 - DNA, 13 bp, Artificial Sequence
  Oligonucleotide for detection of SNP TSC0042513
aatcactatttaa

SEQ ID NO: 170345 - DNA, 13 bp, Artificial Sequence
  Oligonucleotide for detection of SNP TSC0042513
ttaaatggtgatt

SEQ ID NO: 170346 - DNA, 13 bp, Artificial Sequence
  Oligonucleotide for detection of SNP TSC0042513
aatcaccatttaa

SEQ ID NO: 170347 - DNA, 13 bp, Artificial Sequence
  Oligonucleotide for detection of SNP TSC0042513
ttaaacggtgatt

SEQ ID NO: 170348 - DNA, 13 bp, Artificial Sequence
  Oligonucleotide for detection of SNP TSC0042513
aatcaccgtttaa

SEQ ID NO: 170349 - DNA, 13 bp, Artificial Sequence
  Oligonucleotide for detection of SNP TSC0042513
agttattgtttgg

SEQ ID NO: 170350 - DNA, 13 bp, Artificial Sequence
  Oligonucleotide for detection of SNP TSC0042513
ccaaacaataact

SEQ ID NO: 170351 - DNA, 13 bp, Artificial Sequence
  Oligonucleotide for detection of SNP TSC0042513
agttatcgtttgg

SEQ ID NO: 170352 - DNA, 13 bp, Artificial Sequence
  Oligonucleotide for detection of SNP TSC0042513
ccaaacgataact

SEQ ID NO: 170353 - DNA, 13 bp, Artificial Sequence
  Oligonucleotide for detection of SNP TSC0042517
aagagagggagga

SEQ ID NO: 170354 - DNA, 13 bp, Artificial Sequence
  Oligonucleotide for detection of SNP TSC0042517
tcctccctctctt

SEQ ID NO: 170355 - DNA, 13 bp, Artificial Sequence
  Oligonucleotide for detection of SNP TSC0042517
aagagaaggagga

SEQ ID NO: 170356 - DNA, 13 bp, Artificial Sequence
  Oligonucleotide for detection of SNP TSC0042517
tcctccttctctt

SEQ ID NO: 170357 - DNA, 13 bp, Artificial Sequence
  Oligonucleotide for detection of SNP TSC0042518
ttgttaaaataga

SEQ ID NO: 170358 - DNA, 13 bp, Artificial Sequence
  Oligonucleotide for detection of SNP TSC0042518
tctattttaacaa

SEQ ID NO: 170359 - DNA, 13 bp, Artificial Sequence
  Oligonucleotide for detection of SNP TSC0042518
ttgttagaataga

SEQ ID NO: 170360 - DNA, 13 bp, Artificial Sequence
  Oligonucleotide for detection of SNP TSC0042518
tctattctaacaa

SEQ ID NO: 170361 - DNA, 13 bp, Artificial Sequence
  Oligonucleotide for detection of SNP TSC0042518
tcgttaaaataga

SEQ ID NO: 170362 - DNA, 13 bp, Artificial Sequence
  Oligonucleotide for detection of SNP TSC0042518
tctattttaacga

SEQ ID NO: 170363 - DNA, 13 bp, Artificial Sequence
  Oligonucleotide for detection of SNP TSC0042518
tcgttagaataga

SEQ ID NO: 170364 - DNA, 13 bp, Artificial Sequence
  Oligonucleotide for detection of SNP TSC0042518
tctattctaacga

SEQ ID NO: 170365 - DNA, 13 bp, Artificial Sequence
  Oligonucleotide for detection of SNP TSC0042519
ggttatgagaagy

SEQ ID NO: 170366 - DNA, 13 bp, Artificial Sequence
  Oligonucleotide for detection of SNP TSC0042519
rcttctcataacc

SEQ ID NO: 170367 - DNA, 13 bp, Artificial Sequence
  Oligonucleotide for detection of SNP TSC0042519
ggttataagaagy

SEQ ID NO: 170368 - DNA, 13 bp, Artificial Sequence
  Oligonucleotide for detection of SNP TSC0042519
rcttcttataacc

SEQ ID NO: 170369 - DNA, 13 bp, Artificial Sequence
  Oligonucleotide for detection of SNP TSC0042520
atatttagtagaa

SEQ ID NO: 170370 - DNA, 13 bp, Artificial Sequence
  Oligonucleotide for detection of SNP TSC0042520
ttctactaaatat

SEQ ID NO: 170371 - DNA, 13 bp, Artificial Sequence
  Oligonucleotide for detection of SNP TSC0042520
atatttggtagaa

SEQ ID NO: 170372 - DNA, 13 bp, Artificial Sequence
  Oligonucleotide for detection of SNP TSC0042520
ttctaccaaatat

SEQ ID NO: 170373 - DNA, 13 bp, Artificial Sequence
  Oligonucleotide for detection of SNP TSC0042520
atattcggtagaa

SEQ ID NO: 170374 - DNA, 13 bp, Artificial Sequence
  Oligonucleotide for detection of SNP TSC0042520
ttctaccgaatat

SEQ ID NO: 170375 - DNA, 13 bp, Artificial Sequence
  Oligonucleotide for detection of SNP TSC0042520
ttttgttgagtgt

SEQ ID NO: 170376 - DNA, 13 bp, Artificial Sequence
  Oligonucleotide for detection of SNP TSC0042520
acactcaacaaaa

SEQ ID NO: 170377 - DNA, 13 bp, Artificial Sequence
  Oligonucleotide for detection of SNP TSC0042520
ttttgtcgagtgt

SEQ ID NO: 170378 - DNA, 13 bp, Artificial Sequence
  Oligonucleotide for detection of SNP TSC0042520
acactcgacaaaa

SEQ ID NO: 170379 - DNA, 13 bp, Artificial Sequence
  Oligonucleotide for detection of SNP TSC0042525
atagattgaatgg

SEQ ID NO: 170380 - DNA, 13 bp, Artificial Sequence
  Oligonucleotide for detection of SNP TSC0042525
ccattcaatctat

SEQ ID NO: 170381 - DNA, 13 bp, Artificial Sequence
  Oligonucleotide for detection of SNP TSC0042525
atagatcgaatgg

SEQ ID NO: 170382 - DNA, 13 bp, Artificial Sequence
  Oligonucleotide for detection of SNP TSC0042525
ccattcgatctat

SEQ ID NO: 170383 - DNA, 13 bp, Artificial Sequence
  Oligonucleotide for detection of SNP TSC0042525
ttatttgatttgt

SEQ ID NO: 170384 - DNA, 13 bp, Artificial Sequence
  Oligonucleotide for detection of SNP TSC0042525
acaaatcaaataa

SEQ ID NO: 170385 - DNA, 13 bp, Artificial Sequence
  Oligonucleotide for detection of SNP TSC0042525
ttatttaatttgt

SEQ ID NO: 170386 - DNA, 13 bp, Artificial Sequence
  Oligonucleotide for detection of SNP TSC0042525
acaaattaaataa

SEQ ID NO: 170387 - DNA, 13 bp, Artificial Sequence
  Oligonucleotide for detection of SNP TSC0042525
ttattcgatttgt

SEQ ID NO: 170388 - DNA, 13 bp, Artificial Sequence
  Oligonucleotide for detection of SNP TSC0042525
acaaatcgaataa

SEQ ID NO: 170389 - DNA, 13 bp, Artificial Sequence
  Oligonucleotide for detection of SNP TSC0042526
tttttaaaaagta

SEQ ID NO: 170390 - DNA, 13 bp, Artificial Sequence
  Oligonucleotide for detection of SNP TSC0042526
tactttttaaaaa

SEQ ID NO: 170391 - DNA, 13 bp, Artificial Sequence
  Oligonucleotide for detection of SNP TSC0042526
tttttagaaagta

SEQ ID NO: 170392 - DNA, 13 bp, Artificial Sequence
  Oligonucleotide for detection of SNP TSC0042526
tactttctaaaaa

SEQ ID NO: 170393 - DNA, 13 bp, Artificial Sequence
  Oligonucleotide for detection of SNP TSC0042527
tgttgtatgaggg

SEQ ID NO: 170394 - DNA, 13 bp, Artificial Sequence
  Oligonucleotide for detection of SNP TSC0042527
ccctcatacaaca

SEQ ID NO: 170395 - DNA, 13 bp, Artificial Sequence
  Oligonucleotide for detection of SNP TSC0042527
tgttgtgtgaggg

SEQ ID NO: 170396 - DNA, 13 bp, Artificial Sequence
  Oligonucleotide for detection of SNP TSC0042527
ccctcacacaaca

SEQ ID NO: 170397 - DNA, 13 bp, Artificial Sequence
  Oligonucleotide for detection of SNP TSC0042527
tgttgcgtgaggg

SEQ ID NO: 170398 - DNA, 13 bp, Artificial Sequence
  Oligonucleotide for detection of SNP TSC0042527
ccctcacgcaaca

SEQ ID NO: 170399 - DNA, 13 bp, Artificial Sequence
  Oligonucleotide for detection of SNP TSC0042528
atgataatttgta

SEQ ID NO: 170400 - DNA, 13 bp, Artificial Sequence
  Oligonucleotide for detection of SNP TSC0042528
tacaaattatcat

SEQ ID NO: 170401 - DNA, 13 bp, Artificial Sequence
  Oligonucleotide for detection of SNP TSC0042528
atgatattttgta

SEQ ID NO: 170402 - DNA, 13 bp, Artificial Sequence
  Oligonucleotide for detection of SNP TSC0042528
tacaaaatatcat

SEQ ID NO: 170403 - DNA, 13 bp, Artificial Sequence
  Oligonucleotide for detection of SNP TSC0042528
tataaattattat

SEQ ID NO: 170404 - DNA, 13 bp, Artificial Sequence
  Oligonucleotide for detection of SNP TSC0042528
ataataatttata

SEQ ID NO: 170405 - DNA, 13 bp, Artificial Sequence
  Oligonucleotide for detection of SNP TSC0042528
tataaagtattat

SEQ ID NO: 170406 - DNA, 13 bp, Artificial Sequence
  Oligonucleotide for detection of SNP TSC0042528
ataatactttata

SEQ ID NO: 170407 - DNA, 13 bp, Artificial Sequence
  Oligonucleotide for detection of SNP TSC0042529
gaaggtatttttg

SEQ ID NO: 170408 - DNA, 13 bp, Artificial Sequence
  Oligonucleotide for detection of SNP TSC0042529
caaaaataccttc

SEQ ID NO: 170409 - DNA, 13 bp, Artificial Sequence
  Oligonucleotide for detection of SNP TSC0042529
gaaggtttttttg

SEQ ID NO: 170410 - DNA, 13 bp, Artificial Sequence
  Oligonucleotide for detection of SNP TSC0042529
caaaaaaaccttc

SEQ ID NO: 170411 - DNA, 13 bp, Artificial Sequence
  Oligonucleotide for detection of SNP TSC0042529
taaaaatatttty

SEQ ID NO: 170412 - DNA, 13 bp, Artificial Sequence
  Oligonucleotide for detection of SNP TSC0042529
raaaatattttta

SEQ ID NO: 170413 - DNA, 13 bp, Artificial Sequence
  Oligonucleotide for detection of SNP TSC0042529
taaaaaaatttty

SEQ ID NO: 170414 - DNA, 13 bp, Artificial Sequence
  Oligonucleotide for detection of SNP TSC0042529
raaaattttttta

SEQ ID NO: 170415 - DNA, 13 bp, Artificial Sequence
  Oligonucleotide for detection of SNP TSC0042530
tataatgattaty

SEQ ID NO: 170416 - DNA, 13 bp, Artificial Sequence
  Oligonucleotide for detection of SNP TSC0042530
rataatcattata

SEQ ID NO: 170417 - DNA, 13 bp, Artificial Sequence
  Oligonucleotide for detection of SNP TSC0042530
tataataattaty

SEQ ID NO: 170418 - DNA, 13 bp, Artificial Sequence
  Oligonucleotide for detection of SNP TSC0042530
rataattattata

SEQ ID NO: 170419 - DNA, 13 bp, Artificial Sequence
  Oligonucleotide for detection of SNP TSC0042531
gtattatgtagay

SEQ ID NO: 170420 - DNA, 13 bp, Artificial Sequence
  Oligonucleotide for detection of SNP TSC0042531
rtctacataatac

SEQ ID NO: 170421 - DNA, 13 bp, Artificial Sequence
  Oligonucleotide for detection of SNP TSC0042531
gtattacgtagay

SEQ ID NO: 170422 - DNA, 13 bp, Artificial Sequence
  Oligonucleotide for detection of SNP TSC0042531
rtctacgtaatac

SEQ ID NO: 170423 - DNA, 13 bp, Artificial Sequence
  Oligonucleotide for detection of SNP TSC0042531
gtttatgtaatay

SEQ ID NO: 170424 - DNA, 13 bp, Artificial Sequence
  Oligonucleotide for detection of SNP TSC0042531
rtattacataaac

SEQ ID NO: 170425 - DNA, 13 bp, Artificial Sequence
  Oligonucleotide for detection of SNP TSC0042531
gtttatataatay

SEQ ID NO: 170426 - DNA, 13 bp, Artificial Sequence
  Oligonucleotide for detection of SNP TSC0042531
rtattatataaac

SEQ ID NO: 170427 - DNA, 13 bp, Artificial Sequence
  Oligonucleotide for detection of SNP TSC0042531
gtttacgtaatay

SEQ ID NO: 170428 - DNA, 13 bp, Artificial Sequence
  Oligonucleotide for detection of SNP TSC0042531
rtattacgtaaac

SEQ ID NO: 170429 - DNA, 13 bp, Artificial Sequence
  Oligonucleotide for detection of SNP TSC0042532
attttatgtataa

SEQ ID NO: 170430 - DNA, 13 bp, Artificial Sequence
  Oligonucleotide for detection of SNP TSC0042532
ttatacataaaat

SEQ ID NO: 170431 - DNA, 13 bp, Artificial Sequence
  Oligonucleotide for detection of SNP TSC0042532
attttacgtataa

SEQ ID NO: 170432 - DNA, 13 bp, Artificial Sequence
  Oligonucleotide for detection of SNP TSC0042532
ttatacgtaaaat

SEQ ID NO: 170433 - DNA, 13 bp, Artificial Sequence
  Oligonucleotide for detection of SNP TSC0042532
ttatatgtgaaat

SEQ ID NO: 170434 - DNA, 13 bp, Artificial Sequence
  Oligonucleotide for detection of SNP TSC0042532
atttcacatataa

SEQ ID NO: 170435 - DNA, 13 bp, Artificial Sequence
  Oligonucleotide for detection of SNP TSC0042532
ttatatatgaaat

SEQ ID NO: 170436 - DNA, 13 bp, Artificial Sequence
  Oligonucleotide for detection of SNP TSC0042532
atttcatatataa

SEQ ID NO: 170437 - DNA, 13 bp, Artificial Sequence
  Oligonucleotide for detection of SNP TSC0042532
ttatacgtgaaat

SEQ ID NO: 170438 - DNA, 13 bp, Artificial Sequence
  Oligonucleotide for detection of SNP TSC0042532
atttcacgtataa

SEQ ID NO: 170439 - DNA, 13 bp, Artificial Sequence
  Oligonucleotide for detection of SNP TSC0042533
agaatatgtgtgy

SEQ ID NO: 170440 - DNA, 13 bp, Artificial Sequence
  Oligonucleotide for detection of SNP TSC0042533
rcacacatattct

SEQ ID NO: 170441 - DNA, 13 bp, Artificial Sequence
  Oligonucleotide for detection of SNP TSC0042533
agaatacgtgtgy

SEQ ID NO: 170442 - DNA, 13 bp, Artificial Sequence
  Oligonucleotide for detection of SNP TSC0042533
rcacacgtattct

SEQ ID NO: 170443 - DNA, 13 bp, Artificial Sequence
  Oligonucleotide for detection of SNP TSC0042533
gtatatgtgtttt

SEQ ID NO: 170444 - DNA, 13 bp, Artificial Sequence
  Oligonucleotide for detection of SNP TSC0042533
aaaacacatatac

SEQ ID NO: 170445 - DNA, 13 bp, Artificial Sequence
  Oligonucleotide for detection of SNP TSC0042533
gtatatatgtttt

SEQ ID NO: 170446 - DNA, 13 bp, Artificial Sequence
  Oligonucleotide for detection of SNP TSC0042533
aaaacatatatac

SEQ ID NO: 170447 - DNA, 13 bp, Artificial Sequence
  Oligonucleotide for detection of SNP TSC0042533
gtatacgtgtttt

SEQ ID NO: 170448 - DNA, 13 bp, Artificial Sequence
  Oligonucleotide for detection of SNP TSC0042533
aaaacacgtatac

SEQ ID NO: 170449 - DNA, 13 bp, Artificial Sequence
  Oligonucleotide for detection of SNP TSC0042534
atatagatattty

SEQ ID NO: 170450 - DNA, 13 bp, Artificial Sequence
  Oligonucleotide for detection of SNP TSC0042534
raaatatctatat

SEQ ID NO: 170451 - DNA, 13 bp, Artificial Sequence
  Oligonucleotide for detection of SNP TSC0042534
atataggtattty

SEQ ID NO: 170452 - DNA, 13 bp, Artificial Sequence
  Oligonucleotide for detection of SNP TSC0042534
raaatacctatat

SEQ ID NO: 170453 - DNA, 13 bp, Artificial Sequence
  Oligonucleotide for detection of SNP TSC0042535
ttattgtgtgtaa

SEQ ID NO: 170454 - DNA, 13 bp, Artificial Sequence
  Oligonucleotide for detection of SNP TSC0042535
ttacacacaataa

SEQ ID NO: 170455 - DNA, 13 bp, Artificial Sequence
  Oligonucleotide for detection of SNP TSC0042535
ttattgcgtgtaa

SEQ ID NO: 170456 - DNA, 13 bp, Artificial Sequence
  Oligonucleotide for detection of SNP TSC0042535
ttacacgcaataa

SEQ ID NO: 170457 - DNA, 13 bp, Artificial Sequence
  Oligonucleotide for detection of SNP TSC0042535
ttgtatgtagtag

SEQ ID NO: 170458 - DNA, 13 bp, Artificial Sequence
  Oligonucleotide for detection of SNP TSC0042535
ctactacatacaa

SEQ ID NO: 170459 - DNA, 13 bp, Artificial Sequence
  Oligonucleotide for detection of SNP TSC0042535
ttgtatatagtag

SEQ ID NO: 170460 - DNA, 13 bp, Artificial Sequence
  Oligonucleotide for detection of SNP TSC0042535
ctactatatacaa

SEQ ID NO: 170461 - DNA, 13 bp, Artificial Sequence
  Oligonucleotide for detection of SNP TSC0042535
ttgtacgtagtag

SEQ ID NO: 170462 - DNA, 13 bp, Artificial Sequence
  Oligonucleotide for detection of SNP TSC0042535
ctactacgtacaa

SEQ ID NO: 170463 - DNA, 13 bp, Artificial Sequence
  Oligonucleotide for detection of SNP TSC0042536
aaagaagtttaay

SEQ ID NO: 170464 - DNA, 13 bp, Artificial Sequence
  Oligonucleotide for detection of SNP TSC0042536
rttaaacttcttt

SEQ ID NO: 170465 - DNA, 13 bp, Artificial Sequence
  Oligonucleotide for detection of SNP TSC0042536
aaagaaatttaay

SEQ ID NO: 170466 - DNA, 13 bp, Artificial Sequence
  Oligonucleotide for detection of SNP TSC0042536
rttaaatttcttt

SEQ ID NO: 170467 - DNA, 13 bp, Artificial Sequence
  Oligonucleotide for detection of SNP TSC0042537
cgttttgtagtty

SEQ ID NO: 170468 - DNA, 13 bp, Artificial Sequence
  Oligonucleotide for detection of SNP TSC0042537
raactacaaaacg

SEQ ID NO: 170469 - DNA, 13 bp, Artificial Sequence
  Oligonucleotide for detection of SNP TSC0042537
cgttttatagtty

SEQ ID NO: 170470 - DNA, 13 bp, Artificial Sequence
  Oligonucleotide for detection of SNP TSC0042537
raactataaaacg

SEQ ID NO: 170471 - DNA, 13 bp, Artificial Sequence
  Oligonucleotide for detection of SNP TSC0042539
tgttatggtattt

SEQ ID NO: 170472 - DNA, 13 bp, Artificial Sequence
  Oligonucleotide for detection of SNP TSC0042539
aaataccataaca

SEQ ID NO: 170473 - DNA, 13 bp, Artificial Sequence
  Oligonucleotide for detection of SNP TSC0042539
tgttacggtattt

SEQ ID NO: 170474 - DNA, 13 bp, Artificial Sequence
  Oligonucleotide for detection of SNP TSC0042539
aaataccgtaaca

SEQ ID NO: 170475 - DNA, 13 bp, Artificial Sequence
  Oligonucleotide for detection of SNP TSC0042539
aggtgttgtaata

SEQ ID NO: 170476 - DNA, 13 bp, Artificial Sequence
  Oligonucleotide for detection of SNP TSC0042539
tattacaacacct

SEQ ID NO: 170477 - DNA, 13 bp, Artificial Sequence
  Oligonucleotide for detection of SNP TSC0042539
aggtgtcgtaata

SEQ ID NO: 170478 - DNA, 13 bp, Artificial Sequence
  Oligonucleotide for detection of SNP TSC0042539
tattacgacacct

SEQ ID NO: 170479 - DNA, 13 bp, Artificial Sequence
  Oligonucleotide for detection of SNP TSC0042540
aattgttgagtaa

SEQ ID NO: 170480 - DNA, 13 bp, Artificial Sequence
  Oligonucleotide for detection of SNP TSC0042540
ttactcaacaatt

SEQ ID NO: 170481 - DNA, 13 bp, Artificial Sequence
  Oligonucleotide for detection of SNP TSC0042540
aatcgttgagtaa

SEQ ID NO: 170482 - DNA, 13 bp, Artificial Sequence
  Oligonucleotide for detection of SNP TSC0042540
ttactcaacgatt

SEQ ID NO: 170483 - DNA, 13 bp, Artificial Sequence
  Oligonucleotide for detection of SNP TSC0042540
aattgtcgagtaa

SEQ ID NO: 170484 - DNA, 13 bp, Artificial Sequence
  Oligonucleotide for detection of SNP TSC0042540
ttactcgacaatt

SEQ ID NO: 170485 - DNA, 13 bp, Artificial Sequence
  Oligonucleotide for detection of SNP TSC0042540
aatcgtcgagtaa

SEQ ID NO: 170486 - DNA, 13 bp, Artificial Sequence
  Oligonucleotide for detection of SNP TSC0042540
ttactcgacgatt

SEQ ID NO: 170487 - DNA, 13 bp, Artificial Sequence
  Oligonucleotide for detection of SNP TSC0042540
ttgttcggtggtt

SEQ ID NO: 170488 - DNA, 13 bp, Artificial Sequence
  Oligonucleotide for detection of SNP TSC0042540
aaccaccgaacaa

SEQ ID NO: 170489 - DNA, 13 bp, Artificial Sequence
  Oligonucleotide for detection of SNP TSC0042540
ttgtttagcggtt

SEQ ID NO: 170490 - DNA, 13 bp, Artificial Sequence
  Oligonucleotide for detection of SNP TSC0042540
aaccgctaaacaa

SEQ ID NO: 170491 - DNA, 13 bp, Artificial Sequence
  Oligonucleotide for detection of SNP TSC0042540
ttgtttggcggtt

SEQ ID NO: 170492 - DNA, 13 bp, Artificial Sequence
  Oligonucleotide for detection of SNP TSC0042540
aaccgccaaacaa

SEQ ID NO: 170493 - DNA, 13 bp, Artificial Sequence
  Oligonucleotide for detection of SNP TSC0042540
ttgttcggcggtt

SEQ ID NO: 170494 - DNA, 13 bp, Artificial Sequence
  Oligonucleotide for detection of SNP TSC0042540
aaccgccgaacaa

SEQ ID NO: 170495 - DNA, 13 bp, Artificial Sequence
  Oligonucleotide for detection of SNP TSC0042543
taagaatgtaatg

SEQ ID NO: 170496 - DNA, 13 bp, Artificial Sequence
  Oligonucleotide for detection of SNP TSC0042543
cattacattctta

SEQ ID NO: 170497 - DNA, 13 bp, Artificial Sequence
  Oligonucleotide for detection of SNP TSC0042543
taagaacgtaatg

SEQ ID NO: 170498 - DNA, 13 bp, Artificial Sequence
  Oligonucleotide for detection of SNP TSC0042543
cattacgttctta

SEQ ID NO: 170499 - DNA, 13 bp, Artificial Sequence
  Oligonucleotide for detection of SNP TSC0042544
tatttaaatgtty

SEQ ID NO: 170500 - DNA, 13 bp, Artificial Sequence
  Oligonucleotide for detection of SNP TSC0042544
raacatttaaata

SEQ ID NO: 170501 - DNA, 13 bp, Artificial Sequence
  Oligonucleotide for detection of SNP TSC0042547
agttagataataa

SEQ ID NO: 170502 - DNA, 13 bp, Artificial Sequence
  Oligonucleotide for detection of SNP TSC0042547
ttattatctaact

SEQ ID NO: 170503 - DNA, 13 bp, Artificial Sequence
  Oligonucleotide for detection of SNP TSC0042547
agttagttaataa

SEQ ID NO: 170504 - DNA, 13 bp, Artificial Sequence
  Oligonucleotide for detection of SNP TSC0042547
ttattaactaact

SEQ ID NO: 170505 - DNA, 13 bp, Artificial Sequence
  Oligonucleotide for detection of SNP TSC0042547
ttattagttagtt

SEQ ID NO: 170506 - DNA, 13 bp, Artificial Sequence
  Oligonucleotide for detection of SNP TSC0042547
aactaactaataa

SEQ ID NO: 170507 - DNA, 13 bp, Artificial Sequence
  Oligonucleotide for detection of SNP TSC0042548
tgtattgtatttt

SEQ ID NO: 170508 - DNA, 13 bp, Artificial Sequence
  Oligonucleotide for detection of SNP TSC0042548
aaaatacaataca

SEQ ID NO: 170509 - DNA, 13 bp, Artificial Sequence
  Oligonucleotide for detection of SNP TSC0042548
cgtattatatttt

SEQ ID NO: 170510 - DNA, 13 bp, Artificial Sequence
  Oligonucleotide for detection of SNP TSC0042548
aaaatataatacg

SEQ ID NO: 170511 - DNA, 13 bp, Artificial Sequence
  Oligonucleotide for detection of SNP TSC0042548
cgtattgtatttt

SEQ ID NO: 170512 - DNA, 13 bp, Artificial Sequence
  Oligonucleotide for detection of SNP TSC0042548
aaaatacaatacg

SEQ ID NO: 170513 - DNA, 13 bp, Artificial Sequence
  Oligonucleotide for detection of SNP TSC0042549
ttgaggataaaay

SEQ ID NO: 170514 - DNA, 13 bp, Artificial Sequence
  Oligonucleotide for detection of SNP TSC0042549
rttttatcctcaa

SEQ ID NO: 170515 - DNA, 13 bp, Artificial Sequence
  Oligonucleotide for detection of SNP TSC0042549
ttgagggtaaaay

SEQ ID NO: 170516 - DNA, 13 bp, Artificial Sequence
  Oligonucleotide for detection of SNP TSC0042549
rttttaccctcaa

SEQ ID NO: 170517 - DNA, 13 bp, Artificial Sequence
  Oligonucleotide for detection of SNP TSC0042550
agaagtgtgtgaa

SEQ ID NO: 170518 - DNA, 13 bp, Artificial Sequence
  Oligonucleotide for detection of SNP TSC0042550
ttcacacacttct

SEQ ID NO: 170519 - DNA, 13 bp, Artificial Sequence
  Oligonucleotide for detection of SNP TSC0042550
agaagtatgtgaa

SEQ ID NO: 170520 - DNA, 13 bp, Artificial Sequence
  Oligonucleotide for detection of SNP TSC0042550
ttcacatacttct

SEQ ID NO: 170521 - DNA, 13 bp, Artificial Sequence
  Oligonucleotide for detection of SNP TSC0042551
tatttatggttty

SEQ ID NO: 170522 - DNA, 13 bp, Artificial Sequence
  Oligonucleotide for detection of SNP TSC0042551
raaaccataaata

SEQ ID NO: 170523 - DNA, 13 bp, Artificial Sequence
  Oligonucleotide for detection of SNP TSC0042551
tatttacggttty

SEQ ID NO: 170524 - DNA, 13 bp, Artificial Sequence
  Oligonucleotide for detection of SNP TSC0042551
raaaccgtaaata

SEQ ID NO: 170525 - DNA, 13 bp, Artificial Sequence
  Oligonucleotide for detection of SNP TSC0042551
gaagttgtaagtg

SEQ ID NO: 170526 - DNA, 13 bp, Artificial Sequence
  Oligonucleotide for detection of SNP TSC0042551
cacttacaacttc

SEQ ID NO: 170527 - DNA, 13 bp, Artificial Sequence
  Oligonucleotide for detection of SNP TSC0042551
gaagttataagtg

SEQ ID NO: 170528 - DNA, 13 bp, Artificial Sequence
  Oligonucleotide for detection of SNP TSC0042551
cacttataacttc

SEQ ID NO: 170529 - DNA, 13 bp, Artificial Sequence
  Oligonucleotide for detection of SNP TSC0042551
gaagtcgtaagtg

SEQ ID NO: 170530 - DNA, 13 bp, Artificial Sequence
  Oligonucleotide for detection of SNP TSC0042551
cacttacgacttc

SEQ ID NO: 170531 - DNA, 13 bp, Artificial Sequence
  Oligonucleotide for detection of SNP TSC0005014
gtttttttttgaa

SEQ ID NO: 170532 - DNA, 13 bp, Artificial Sequence
  Oligonucleotide for detection of SNP TSC0005014
ttcaaaaaaaaac

SEQ ID NO: 170533 - DNA, 13 bp, Artificial Sequence
  Oligonucleotide for detection of SNP TSC0005014
tttaggggaaggy

SEQ ID NO: 170534 - DNA, 13 bp, Artificial Sequence
  Oligonucleotide for detection of SNP TSC0005014
rccttcccctaaa

SEQ ID NO: 170535 - DNA, 13 bp, Artificial Sequence
  Oligonucleotide for detection of SNP TSC0005014
tttaggtgaaggy

SEQ ID NO: 170536 - DNA, 13 bp, Artificial Sequence
  Oligonucleotide for detection of SNP TSC0005014
rccttcacctaaa

SEQ ID NO: 170537 - DNA, 13 bp, Artificial Sequence
  Oligonucleotide for detection of SNP TSC0005014
tttaggcgaaggy

SEQ ID NO: 170538 - DNA, 13 bp, Artificial Sequence
  Oligonucleotide for detection of SNP TSC0005014
rccttcgcctaaa

SEQ ID NO: 170539 - DNA, 13 bp, Artificial Sequence
  Oligonucleotide for detection of SNP TSC0005015
gggtttaagatag

SEQ ID NO: 170540 - DNA, 13 bp, Artificial Sequence
  Oligonucleotide for detection of SNP TSC0005015
ctatcttaaaccc

SEQ ID NO: 170541 - DNA, 13 bp, Artificial Sequence
  Oligonucleotide for detection of SNP TSC0005015
gggtttgagatag

SEQ ID NO: 170542 - DNA, 13 bp, Artificial Sequence
  Oligonucleotide for detection of SNP TSC0005015
ctatctcaaaccc

SEQ ID NO: 170543 - DNA, 13 bp, Artificial Sequence
  Oligonucleotide for detection of SNP TSC0042553
gttatatgaattt

SEQ ID NO: 170544 - DNA, 13 bp, Artificial Sequence
  Oligonucleotide for detection of SNP TSC0042553
aaattcatataac

SEQ ID NO: 170545 - DNA, 13 bp, Artificial Sequence
  Oligonucleotide for detection of SNP TSC0042553
gttatacgaattt

SEQ ID NO: 170546 - DNA, 13 bp, Artificial Sequence
  Oligonucleotide for detection of SNP TSC0042553
aaattcgtataac

SEQ ID NO: 170547 - DNA, 13 bp, Artificial Sequence
  Oligonucleotide for detection of SNP TSC0042553
aaatttgtgtgay

SEQ ID NO: 170548 - DNA, 13 bp, Artificial Sequence
  Oligonucleotide for detection of SNP TSC0042553
rtcacacaaattt

SEQ ID NO: 170549 - DNA, 13 bp, Artificial Sequence
  Oligonucleotide for detection of SNP TSC0042553
aaatttatgtgay

SEQ ID NO: 170550 - DNA, 13 bp, Artificial Sequence
  Oligonucleotide for detection of SNP TSC0042553
rtcacataaattt

SEQ ID NO: 170551 - DNA, 13 bp, Artificial Sequence
  Oligonucleotide for detection of SNP TSC0042553
aaattcgtgtgay

SEQ ID NO: 170552 - DNA, 13 bp, Artificial Sequence
  Oligonucleotide for detection of SNP TSC0042553
rtcacacgaattt

SEQ ID NO: 170553 - DNA, 13 bp, Artificial Sequence
  Oligonucleotide for detection of SNP TSC0009568
aaataagtttttt

SEQ ID NO: 170554 - DNA, 13 bp, Artificial Sequence
  Oligonucleotide for detection of SNP TSC0009568
aaaaaacttattt

SEQ ID NO: 170555 - DNA, 13 bp, Artificial Sequence
  Oligonucleotide for detection of SNP TSC0042554
gaaatgaatatty

SEQ ID NO: 170556 - DNA, 13 bp, Artificial Sequence
  Oligonucleotide for detection of SNP TSC0042554
raatattcatttc

SEQ ID NO: 170557 - DNA, 13 bp, Artificial Sequence
  Oligonucleotide for detection of SNP TSC0042554
gaaatggatatty

SEQ ID NO: 170558 - DNA, 13 bp, Artificial Sequence
  Oligonucleotide for detection of SNP TSC0042554
raatatccatttc

SEQ ID NO: 170559 - DNA, 13 bp, Artificial Sequence
  Oligonucleotide for detection of SNP TSC0042556
ttaaaagtataaa

SEQ ID NO: 170560 - DNA, 13 bp, Artificial Sequence
  Oligonucleotide for detection of SNP TSC0042556
tttatacttttaa

SEQ ID NO: 170561 - DNA, 13 bp, Artificial Sequence
  Oligonucleotide for detection of SNP TSC0042556
ttaaaattataaa

SEQ ID NO: 170562 - DNA, 13 bp, Artificial Sequence
  Oligonucleotide for detection of SNP TSC0042556
tttataattttaa

SEQ ID NO: 170563 - DNA, 13 bp, Artificial Sequence
  Oligonucleotide for detection of SNP TSC0042557
tagttatgatgaa

SEQ ID NO: 170564 - DNA, 13 bp, Artificial Sequence
  Oligonucleotide for detection of SNP TSC0042557
ttcatcataacta

SEQ ID NO: 170565 - DNA, 13 bp, Artificial Sequence
  Oligonucleotide for detection of SNP TSC0042557
tagttacgatgaa

SEQ ID NO: 170566 - DNA, 13 bp, Artificial Sequence
  Oligonucleotide for detection of SNP TSC0042557
ttcatcgtaacta

SEQ ID NO: 170567 - DNA, 13 bp, Artificial Sequence
  Oligonucleotide for detection of SNP TSC0042557
tttattgtgattg

SEQ ID NO: 170568 - DNA, 13 bp, Artificial Sequence
  Oligonucleotide for detection of SNP TSC0042557
caatcacaataaa

SEQ ID NO: 170569 - DNA, 13 bp, Artificial Sequence
  Oligonucleotide for detection of SNP TSC0042557
tttattatgattg

SEQ ID NO: 170570 - DNA, 13 bp, Artificial Sequence
  Oligonucleotide for detection of SNP TSC0042557
caatcataataaa

SEQ ID NO: 170571 - DNA, 13 bp, Artificial Sequence
  Oligonucleotide for detection of SNP TSC0042557
tttatcgtgattg

SEQ ID NO: 170572 - DNA, 13 bp, Artificial Sequence
  Oligonucleotide for detection of SNP TSC0042557
caatcacgataaa

SEQ ID NO: 170573 - DNA, 13 bp, Artificial Sequence
  Oligonucleotide for detection of SNP TSC0042558
taataagttgttt

SEQ ID NO: 170574 - DNA, 13 bp, Artificial Sequence
  Oligonucleotide for detection of SNP TSC0042558
aaacaacttatta

SEQ ID NO: 170575 - DNA, 13 bp, Artificial Sequence
  Oligonucleotide for detection of SNP TSC0042558
taataaattgttt

SEQ ID NO: 170576 - DNA, 13 bp, Artificial Sequence
  Oligonucleotide for detection of SNP TSC0042558
aaacaatttatta

SEQ ID NO: 170577 - DNA, 13 bp, Artificial Sequence
  Oligonucleotide for detection of SNP TSC0042559
ttagaagttatta

SEQ ID NO: 170578 - DNA, 13 bp, Artificial Sequence
  Oligonucleotide for detection of SNP TSC0042559
taataacttctaa

SEQ ID NO: 170579 - DNA, 13 bp, Artificial Sequence
  Oligonucleotide for detection of SNP TSC0042559
ttagaaattatta

SEQ ID NO: 170580 - DNA, 13 bp, Artificial Sequence
  Oligonucleotide for detection of SNP TSC0042559
taataatttctaa

SEQ ID NO: 170581 - DNA, 13 bp, Artificial Sequence
  Oligonucleotide for detection of SNP TSC0042562
tagtgggttttta

SEQ ID NO: 170582 - DNA, 13 bp, Artificial Sequence
  Oligonucleotide for detection of SNP TSC0042562
taaaaacccacta

SEQ ID NO: 170583 - DNA, 13 bp, Artificial Sequence
  Oligonucleotide for detection of SNP TSC0042562
tagtggattttta

SEQ ID NO: 170584 - DNA, 13 bp, Artificial Sequence
  Oligonucleotide for detection of SNP TSC0042562
taaaaatccacta

SEQ ID NO: 170585 - DNA, 13 bp, Artificial Sequence
  Oligonucleotide for detection of SNP TSC0042564
ggattatatgtta

SEQ ID NO: 170586 - DNA, 13 bp, Artificial Sequence
  Oligonucleotide for detection of SNP TSC0042564
taacatataatcc

SEQ ID NO: 170587 - DNA, 13 bp, Artificial Sequence
  Oligonucleotide for detection of SNP TSC0042564
ggattagatgtta

SEQ ID NO: 170588 - DNA, 13 bp, Artificial Sequence
  Oligonucleotide for detection of SNP TSC0042564
taacatctaatcc

SEQ ID NO: 170589 - DNA, 13 bp, Artificial Sequence
  Oligonucleotide for detection of SNP TSC0042564
tggtatatagtty

SEQ ID NO: 170590 - DNA, 13 bp, Artificial Sequence
  Oligonucleotide for detection of SNP TSC0042564
raactatatacca

SEQ ID NO: 170591 - DNA, 13 bp, Artificial Sequence
  Oligonucleotide for detection of SNP TSC0042564
tggtatttagtty

SEQ ID NO: 170592 - DNA, 13 bp, Artificial Sequence
  Oligonucleotide for detection of SNP TSC0042564
raactaaatacca

SEQ ID NO: 170593 - DNA, 13 bp, Artificial Sequence
  Oligonucleotide for detection of SNP TSC0042566
aattatatgttgt

SEQ ID NO: 170594 - DNA, 13 bp, Artificial Sequence
  Oligonucleotide for detection of SNP TSC0042566
acaacatataatt

SEQ ID NO: 170595 - DNA, 13 bp, Artificial Sequence
  Oligonucleotide for detection of SNP TSC0042566
aattatgtgttgt

SEQ ID NO: 170596 - DNA, 13 bp, Artificial Sequence
  Oligonucleotide for detection of SNP TSC0042566
acaacacataatt

SEQ ID NO: 170597 - DNA, 13 bp, Artificial Sequence
  Oligonucleotide for detection of SNP TSC0042566
aattacgtgttgt

SEQ ID NO: 170598 - DNA, 13 bp, Artificial Sequence
  Oligonucleotide for detection of SNP TSC0042566
acaacacgtaatt

SEQ ID NO: 170599 - DNA, 13 bp, Artificial Sequence
  Oligonucleotide for detection of SNP TSC0042566
ataatatgtaatt

SEQ ID NO: 170600 - DNA, 13 bp, Artificial Sequence
  Oligonucleotide for detection of SNP TSC0042566
aattacatattat

SEQ ID NO: 170601 - DNA, 13 bp, Artificial Sequence
  Oligonucleotide for detection of SNP TSC0042566
ataatacgtaatt

SEQ ID NO: 170602 - DNA, 13 bp, Artificial Sequence
  Oligonucleotide for detection of SNP TSC0042566
aattacgtattat

SEQ ID NO: 170603 - DNA, 13 bp, Artificial Sequence
  Oligonucleotide for detection of SNP TSC0042567
tgggatgtataay

SEQ ID NO: 170604 - DNA, 13 bp, Artificial Sequence
  Oligonucleotide for detection of SNP TSC0042567
rttatacatccca

SEQ ID NO: 170605 - DNA, 13 bp, Artificial Sequence
  Oligonucleotide for detection of SNP TSC0042567
tgggatatataay

SEQ ID NO: 170606 - DNA, 13 bp, Artificial Sequence
  Oligonucleotide for detection of SNP TSC0042567
rttatatatccca

SEQ ID NO: 170607 - DNA, 13 bp, Artificial Sequence
  Oligonucleotide for detection of SNP TSC0008411
tgtatagatgtgt

SEQ ID NO: 170608 - DNA, 13 bp, Artificial Sequence
  Oligonucleotide for detection of SNP TSC0008411
acacatctataca

SEQ ID NO: 170609 - DNA, 13 bp, Artificial Sequence
  Oligonucleotide for detection of SNP TSC0008411
tgtataaatgtgt

SEQ ID NO: 170610 - DNA, 13 bp, Artificial Sequence
  Oligonucleotide for detection of SNP TSC0008411
acacatttataca

SEQ ID NO: 170611 - DNA, 13 bp, Artificial Sequence
  Oligonucleotide for detection of SNP TSC0007598
gtaagttggtaag

SEQ ID NO: 170612 - DNA, 13 bp, Artificial Sequence
  Oligonucleotide for detection of SNP TSC0007598
cttaccaacttac

SEQ ID NO: 170613 - DNA, 13 bp, Artificial Sequence
  Oligonucleotide for detection of SNP TSC0007598
gtaagtcggtaag

SEQ ID NO: 170614 - DNA, 13 bp, Artificial Sequence
  Oligonucleotide for detection of SNP TSC0007598
cttaccgacttac

SEQ ID NO: 170615 - DNA, 13 bp, Artificial Sequence
  Oligonucleotide for detection of SNP TSC0007598
tttgttggtttgy

SEQ ID NO: 170616 - DNA, 13 bp, Artificial Sequence
  Oligonucleotide for detection of SNP TSC0007598
rcaaaccaacaaa

SEQ ID NO: 170617 - DNA, 13 bp, Artificial Sequence
  Oligonucleotide for detection of SNP TSC0007598
tttgttagtttgy

SEQ ID NO: 170618 - DNA, 13 bp, Artificial Sequence
  Oligonucleotide for detection of SNP TSC0007598
rcaaactaacaaa

SEQ ID NO: 170619 - DNA, 13 bp, Artificial Sequence
  Oligonucleotide for detection of SNP TSC0007598
tttgtcggtttgy

SEQ ID NO: 170620 - DNA, 13 bp, Artificial Sequence
  Oligonucleotide for detection of SNP TSC0007598
rcaaaccgacaaa

SEQ ID NO: 170621 - DNA, 13 bp, Artificial Sequence
  Oligonucleotide for detection of SNP TSC0042568
cgggtatggtggy

SEQ ID NO: 170622 - DNA, 13 bp, Artificial Sequence
  Oligonucleotide for detection of SNP TSC0042568
rccaccatacccg

SEQ ID NO: 170623 - DNA, 13 bp, Artificial Sequence
  Oligonucleotide for detection of SNP TSC0042568
cgggtacggtggy

SEQ ID NO: 170624 - DNA, 13 bp, Artificial Sequence
  Oligonucleotide for detection of SNP TSC0042568
rccaccgtacccg

SEQ ID NO: 170625 - DNA, 13 bp, Artificial Sequence
  Oligonucleotide for detection of SNP TSC0042569
tgtatatgtaaag

SEQ ID NO: 170626 - DNA, 13 bp, Artificial Sequence
  Oligonucleotide for detection of SNP TSC0042569
ctttacatataca

SEQ ID NO: 170627 - DNA, 13 bp, Artificial Sequence
  Oligonucleotide for detection of SNP TSC0042569
tgtataggtaaag

SEQ ID NO: 170628 - DNA, 13 bp, Artificial Sequence
  Oligonucleotide for detection of SNP TSC0042569
ctttacctataca

SEQ ID NO: 170629 - DNA, 13 bp, Artificial Sequence
  Oligonucleotide for detection of SNP TSC0042569
ttttatttgtgta

SEQ ID NO: 170630 - DNA, 13 bp, Artificial Sequence
  Oligonucleotide for detection of SNP TSC0042569
tacacaaataaaa

SEQ ID NO: 170631 - DNA, 13 bp, Artificial Sequence
  Oligonucleotide for detection of SNP TSC0042570
ggttgggttttag

SEQ ID NO: 170632 - DNA, 13 bp, Artificial Sequence
  Oligonucleotide for detection of SNP TSC0042570
ctaaaacccaacc

SEQ ID NO: 170633 - DNA, 13 bp, Artificial Sequence
  Oligonucleotide for detection of SNP TSC0042570
ggttggattttag

SEQ ID NO: 170634 - DNA, 13 bp, Artificial Sequence
  Oligonucleotide for detection of SNP TSC0042570
ctaaaatccaacc

SEQ ID NO: 170635 - DNA, 13 bp, Artificial Sequence
  Oligonucleotide for detection of SNP TSC0042571
aataaatggaaga

SEQ ID NO: 170636 - DNA, 13 bp, Artificial Sequence
  Oligonucleotide for detection of SNP TSC0042571
tcttccatttatt

SEQ ID NO: 170637 - DNA, 13 bp, Artificial Sequence
  Oligonucleotide for detection of SNP TSC0042571
aataaacggaaga

SEQ ID NO: 170638 - DNA, 13 bp, Artificial Sequence
  Oligonucleotide for detection of SNP TSC0042571
tcttccgtttatt

SEQ ID NO: 170639 - DNA, 13 bp, Artificial Sequence
  Oligonucleotide for detection of SNP TSC0042574
aatattttgtagt

SEQ ID NO: 170640 - DNA, 13 bp, Artificial Sequence
  Oligonucleotide for detection of SNP TSC0042574
actacaaaatatt

SEQ ID NO: 170641 - DNA, 13 bp, Artificial Sequence
  Oligonucleotide for detection of SNP TSC0042574
aatattgtgtagt

SEQ ID NO: 170642 - DNA, 13 bp, Artificial Sequence
  Oligonucleotide for detection of SNP TSC0042574
actacacaatatt

SEQ ID NO: 170643 - DNA, 13 bp, Artificial Sequence
  Oligonucleotide for detection of SNP TSC0042574
attgtaaaatatt

SEQ ID NO: 170644 - DNA, 13 bp, Artificial Sequence
  Oligonucleotide for detection of SNP TSC0042574
aatattttacaat

SEQ ID NO: 170645 - DNA, 13 bp, Artificial Sequence
  Oligonucleotide for detection of SNP TSC0042574
attgtataatatt

SEQ ID NO: 170646 - DNA, 13 bp, Artificial Sequence
  Oligonucleotide for detection of SNP TSC0042574
aatattatacaat

SEQ ID NO: 170647 - DNA, 13 bp, Artificial Sequence
  Oligonucleotide for detection of SNP TSC0042575
ttattggatttgt

SEQ ID NO: 170648 - DNA, 13 bp, Artificial Sequence
  Oligonucleotide for detection of SNP TSC0042575
acaaatccaataa

SEQ ID NO: 170649 - DNA, 13 bp, Artificial Sequence
  Oligonucleotide for detection of SNP TSC0042575
ttattgaatttgt

SEQ ID NO: 170650 - DNA, 13 bp, Artificial Sequence
  Oligonucleotide for detection of SNP TSC0042575
acaaattcaataa

SEQ ID NO: 170651 - DNA, 13 bp, Artificial Sequence
  Oligonucleotide for detection of SNP TSC0042576
tataattgttttt

SEQ ID NO: 170652 - DNA, 13 bp, Artificial Sequence
  Oligonucleotide for detection of SNP TSC0042576
aaaaacaattata

SEQ ID NO: 170653 - DNA, 13 bp, Artificial Sequence
  Oligonucleotide for detection of SNP TSC0042576
tataatcgttttt

SEQ ID NO: 170654 - DNA, 13 bp, Artificial Sequence
  Oligonucleotide for detection of SNP TSC0042576
aaaaacgattata

SEQ ID NO: 170655 - DNA, 13 bp, Artificial Sequence
  Oligonucleotide for detection of SNP TSC0042576
aaaagtgattatg

SEQ ID NO: 170656 - DNA, 13 bp, Artificial Sequence
  Oligonucleotide for detection of SNP TSC0042576
cataatcactttt

SEQ ID NO: 170657 - DNA, 13 bp, Artificial Sequence
  Oligonucleotide for detection of SNP TSC0042576
aaaagtaattatg

SEQ ID NO: 170658 - DNA, 13 bp, Artificial Sequence
  Oligonucleotide for detection of SNP TSC0042576
cataattactttt

SEQ ID NO: 170659 - DNA, 13 bp, Artificial Sequence
  Oligonucleotide for detection of SNP TSC0042576
aaaagcgattatg

SEQ ID NO: 170660 - DNA, 13 bp, Artificial Sequence
  Oligonucleotide for detection of SNP TSC0042576
cataatcgctttt

SEQ ID NO: 170661 - DNA, 13 bp, Artificial Sequence
  Oligonucleotide for detection of SNP TSC0042577
agtgattggtttt

SEQ ID NO: 170662 - DNA, 13 bp, Artificial Sequence
  Oligonucleotide for detection of SNP TSC0042577
aaaaccaatcact

SEQ ID NO: 170663 - DNA, 13 bp, Artificial Sequence
  Oligonucleotide for detection of SNP TSC0042577
agcgattggtttt

SEQ ID NO: 170664 - DNA, 13 bp, Artificial Sequence
  Oligonucleotide for detection of SNP TSC0042577
aaaaccaatcgct

SEQ ID NO: 170665 - DNA, 13 bp, Artificial Sequence
  Oligonucleotide for detection of SNP TSC0042577
agtgatcggtttt

SEQ ID NO: 170666 - DNA, 13 bp, Artificial Sequence
  Oligonucleotide for detection of SNP TSC0042577
aaaaccgatcact

SEQ ID NO: 170667 - DNA, 13 bp, Artificial Sequence
  Oligonucleotide for detection of SNP TSC0042577
agcgatcggtttt

SEQ ID NO: 170668 - DNA, 13 bp, Artificial Sequence
  Oligonucleotide for detection of SNP TSC0042577
aaaaccgatcgct

SEQ ID NO: 170669 - DNA, 13 bp, Artificial Sequence
  Oligonucleotide for detection of SNP TSC0042577
aaaattggttgtt

SEQ ID NO: 170670 - DNA, 13 bp, Artificial Sequence
  Oligonucleotide for detection of SNP TSC0042577
aacaaccaatttt

SEQ ID NO: 170671 - DNA, 13 bp, Artificial Sequence
  Oligonucleotide for detection of SNP TSC0042577
aaaattagttgtt

SEQ ID NO: 170672 - DNA, 13 bp, Artificial Sequence
  Oligonucleotide for detection of SNP TSC0042577
aacaactaatttt

SEQ ID NO: 170673 - DNA, 13 bp, Artificial Sequence
  Oligonucleotide for detection of SNP TSC0042577
aaaatcggttgtt

SEQ ID NO: 170674 - DNA, 13 bp, Artificial Sequence
  Oligonucleotide for detection of SNP TSC0042577
aacaaccgatttt

SEQ ID NO: 170675 - DNA, 13 bp, Artificial Sequence
  Oligonucleotide for detection of SNP TSC0042577
aaaattagtcgtt

SEQ ID NO: 170676 - DNA, 13 bp, Artificial Sequence
  Oligonucleotide for detection of SNP TSC0042577
aacgactaatttt

SEQ ID NO: 170677 - DNA, 13 bp, Artificial Sequence
  Oligonucleotide for detection of SNP TSC0042577
aaaattggtcgtt

SEQ ID NO: 170678 - DNA, 13 bp, Artificial Sequence
  Oligonucleotide for detection of SNP TSC0042577
aacgaccaatttt

SEQ ID NO: 170679 - DNA, 13 bp, Artificial Sequence
  Oligonucleotide for detection of SNP TSC0042577
aaaatcggtcgtt

SEQ ID NO: 170680 - DNA, 13 bp, Artificial Sequence
  Oligonucleotide for detection of SNP TSC0042577
aacgaccgatttt

SEQ ID NO: 170681 - DNA, 13 bp, Artificial Sequence
  Oligonucleotide for detection of SNP TSC0042583
gttatatgtgtgt

SEQ ID NO: 170682 - DNA, 13 bp, Artificial Sequence
  Oligonucleotide for detection of SNP TSC0042583
acacacatataac

SEQ ID NO: 170683 - DNA, 13 bp, Artificial Sequence
  Oligonucleotide for detection of SNP TSC0042583
gttatacgtgtgt

SEQ ID NO: 170684 - DNA, 13 bp, Artificial Sequence
  Oligonucleotide for detection of SNP TSC0042583
acacacgtataac

SEQ ID NO: 170685 - DNA, 13 bp, Artificial Sequence
  Oligonucleotide for detection of SNP TSC0042583
atatatgtataay

SEQ ID NO: 170686 - DNA, 13 bp, Artificial Sequence
  Oligonucleotide for detection of SNP TSC0042583
rttatacatatat

SEQ ID NO: 170687 - DNA, 13 bp, Artificial Sequence
  Oligonucleotide for detection of SNP TSC0042583
atatatatataay

SEQ ID NO: 170688 - DNA, 13 bp, Artificial Sequence
  Oligonucleotide for detection of SNP TSC0042583
rttatatatatat

SEQ ID NO: 170689 - DNA, 13 bp, Artificial Sequence
  Oligonucleotide for detection of SNP TSC0042583
atatacgtataay

SEQ ID NO: 170690 - DNA, 13 bp, Artificial Sequence
  Oligonucleotide for detection of SNP TSC0042583
rttatacgtatat

SEQ ID NO: 170691 - DNA, 13 bp, Artificial Sequence
  Oligonucleotide for detection of SNP TSC0042584
gtatttattgtaa

SEQ ID NO: 170692 - DNA, 13 bp, Artificial Sequence
  Oligonucleotide for detection of SNP TSC0042584
ttacaataaatac

SEQ ID NO: 170693 - DNA, 13 bp, Artificial Sequence
  Oligonucleotide for detection of SNP TSC0042584
gtatttgttgtaa

SEQ ID NO: 170694 - DNA, 13 bp, Artificial Sequence
  Oligonucleotide for detection of SNP TSC0042584
ttacaacaaatac

SEQ ID NO: 170695 - DNA, 13 bp, Artificial Sequence
  Oligonucleotide for detection of SNP TSC0042584
gtattcgttgtaa

SEQ ID NO: 170696 - DNA, 13 bp, Artificial Sequence
  Oligonucleotide for detection of SNP TSC0042584
ttacaacgaatac

SEQ ID NO: 170697 - DNA, 13 bp, Artificial Sequence
  Oligonucleotide for detection of SNP TSC0042584
ttgtaatgagtay

SEQ ID NO: 170698 - DNA, 13 bp, Artificial Sequence
  Oligonucleotide for detection of SNP TSC0042584
rtactcattacaa

SEQ ID NO: 170699 - DNA, 13 bp, Artificial Sequence
  Oligonucleotide for detection of SNP TSC0042584
ttgtaacgagtay

SEQ ID NO: 170700 - DNA, 13 bp, Artificial Sequence
  Oligonucleotide for detection of SNP TSC0042584
rtactcgttacaa

SEQ ID NO: 170701 - DNA, 13 bp, Artificial Sequence
  Oligonucleotide for detection of SNP TSC0042585
tttattatatagt

SEQ ID NO: 170702 - DNA, 13 bp, Artificial Sequence
  Oligonucleotide for detection of SNP TSC0042585
actatataataaa

SEQ ID NO: 170703 - DNA, 13 bp, Artificial Sequence
  Oligonucleotide for detection of SNP TSC0042585
tttattgtatagt

SEQ ID NO: 170704 - DNA, 13 bp, Artificial Sequence
  Oligonucleotide for detection of SNP TSC0042585
actatacaataaa

SEQ ID NO: 170705 - DNA, 13 bp, Artificial Sequence
  Oligonucleotide for detection of SNP TSC0042585
tttatcgtatagt

SEQ ID NO: 170706 - DNA, 13 bp, Artificial Sequence
  Oligonucleotide for detection of SNP TSC0042585
actatacgataaa

SEQ ID NO: 170707 - DNA, 13 bp, Artificial Sequence
  Oligonucleotide for detection of SNP TSC0042585
attatatggtgaa

SEQ ID NO: 170708 - DNA, 13 bp, Artificial Sequence
  Oligonucleotide for detection of SNP TSC0042585
ttcaccatataat

SEQ ID NO: 170709 - DNA, 13 bp, Artificial Sequence
  Oligonucleotide for detection of SNP TSC0042585
attatacggtgaa

SEQ ID NO: 170710 - DNA, 13 bp, Artificial Sequence
  Oligonucleotide for detection of SNP TSC0042585
ttcaccgtataat

SEQ ID NO: 170711 - DNA, 13 bp, Artificial Sequence
  Oligonucleotide for detection of SNP TSC0005562
gtaagttttttgg

SEQ ID NO: 170712 - DNA, 13 bp, Artificial Sequence
  Oligonucleotide for detection of SNP TSC0005562
ccaaaaaacttac

SEQ ID NO: 170713 - DNA, 13 bp, Artificial Sequence
  Oligonucleotide for detection of SNP TSC0005562
gtaagtgttttgg

SEQ ID NO: 170714 - DNA, 13 bp, Artificial Sequence
  Oligonucleotide for detection of SNP TSC0005562
ccaaaacacttac

SEQ ID NO: 170715 - DNA, 13 bp, Artificial Sequence
  Oligonucleotide for detection of SNP TSC0005562
gtaagcgttttgg

SEQ ID NO: 170716 - DNA, 13 bp, Artificial Sequence
  Oligonucleotide for detection of SNP TSC0005562
ccaaaacgcttac

SEQ ID NO: 170717 - DNA, 13 bp, Artificial Sequence
  Oligonucleotide for detection of SNP TSC0005562
ttagggagtttgy

SEQ ID NO: 170718 - DNA, 13 bp, Artificial Sequence
  Oligonucleotide for detection of SNP TSC0005562
rcaaactccctaa

SEQ ID NO: 170719 - DNA, 13 bp, Artificial Sequence
  Oligonucleotide for detection of SNP TSC0005562
ttagggtgtttgy

SEQ ID NO: 170720 - DNA, 13 bp, Artificial Sequence
  Oligonucleotide for detection of SNP TSC0005562
rcaaacaccctaa

SEQ ID NO: 170721 - DNA, 13 bp, Artificial Sequence
  Oligonucleotide for detection of SNP TSC0005562
ttagggcgtttgy

SEQ ID NO: 170722 - DNA, 13 bp, Artificial Sequence
  Oligonucleotide for detection of SNP TSC0005562
rcaaacgccctaa

SEQ ID NO: 170723 - DNA, 13 bp, Artificial Sequence
  Oligonucleotide for detection of SNP TSC0042589
agttatataagta

SEQ ID NO: 170724 - DNA, 13 bp, Artificial Sequence
  Oligonucleotide for detection of SNP TSC0042589
tacttatataact

SEQ ID NO: 170725 - DNA, 13 bp, Artificial Sequence
  Oligonucleotide for detection of SNP TSC0042589
agttatgtaagta

SEQ ID NO: 170726 - DNA, 13 bp, Artificial Sequence
  Oligonucleotide for detection of SNP TSC0042589
tacttacataact

SEQ ID NO: 170727 - DNA, 13 bp, Artificial Sequence
  Oligonucleotide for detection of SNP TSC0042589
agttacgtaagta

SEQ ID NO: 170728 - DNA, 13 bp, Artificial Sequence
  Oligonucleotide for detection of SNP TSC0042589
tacttacgtaact

SEQ ID NO: 170729 - DNA, 13 bp, Artificial Sequence
  Oligonucleotide for detection of SNP TSC0042589
tatttgtgtgatt

SEQ ID NO: 170730 - DNA, 13 bp, Artificial Sequence
  Oligonucleotide for detection of SNP TSC0042589
aatcacacaaata

SEQ ID NO: 170731 - DNA, 13 bp, Artificial Sequence
  Oligonucleotide for detection of SNP TSC0042589
tatttgcgtgatt

SEQ ID NO: 170732 - DNA, 13 bp, Artificial Sequence
  Oligonucleotide for detection of SNP TSC0042589
aatcacgcaaata

SEQ ID NO: 170733 - DNA, 13 bp, Artificial Sequence
  Oligonucleotide for detection of SNP TSC0042590
ttagatgtgatty

SEQ ID NO: 170734 - DNA, 13 bp, Artificial Sequence
  Oligonucleotide for detection of SNP TSC0042590
raatcacatctaa

SEQ ID NO: 170735 - DNA, 13 bp, Artificial Sequence
  Oligonucleotide for detection of SNP TSC0042590
ttagatatgatty

SEQ ID NO: 170736 - DNA, 13 bp, Artificial Sequence
  Oligonucleotide for detection of SNP TSC0042590
raatcatatctaa

SEQ ID NO: 170737 - DNA, 13 bp, Artificial Sequence
  Oligonucleotide for detection of SNP TSC0042591
agttagggttttg

SEQ ID NO: 170738 - DNA, 13 bp, Artificial Sequence
  Oligonucleotide for detection of SNP TSC0042591
caaaaccctaact

SEQ ID NO: 170739 - DNA, 13 bp, Artificial Sequence
  Oligonucleotide for detection of SNP TSC0042591
agttagagttttg

SEQ ID NO: 170740 - DNA, 13 bp, Artificial Sequence
  Oligonucleotide for detection of SNP TSC0042591
caaaactctaact

SEQ ID NO: 170741 - DNA, 13 bp, Artificial Sequence
  Oligonucleotide for detection of SNP TSC0042592
ttttataaaagat

SEQ ID NO: 170742 - DNA, 13 bp, Artificial Sequence
  Oligonucleotide for detection of SNP TSC0042592
atcttttataaaa

SEQ ID NO: 170743 - DNA, 13 bp, Artificial Sequence
  Oligonucleotide for detection of SNP TSC0042592
ttttatgaaagat

SEQ ID NO: 170744 - DNA, 13 bp, Artificial Sequence
  Oligonucleotide for detection of SNP TSC0042592
atctttcataaaa

SEQ ID NO: 170745 - DNA, 13 bp, Artificial Sequence
  Oligonucleotide for detection of SNP TSC0042592
ttttacgaaagat

SEQ ID NO: 170746 - DNA, 13 bp, Artificial Sequence
  Oligonucleotide for detection of SNP TSC0042592
atctttcgtaaaa

SEQ ID NO: 170747 - DNA, 13 bp, Artificial Sequence
  Oligonucleotide for detection of SNP TSC0042592
attttttgtgagg

SEQ ID NO: 170748 - DNA, 13 bp, Artificial Sequence
  Oligonucleotide for detection of SNP TSC0042592
cctcacaaaaaat

SEQ ID NO: 170749 - DNA, 13 bp, Artificial Sequence
  Oligonucleotide for detection of SNP TSC0042592
atttttcgtgagg

SEQ ID NO: 170750 - DNA, 13 bp, Artificial Sequence
  Oligonucleotide for detection of SNP TSC0042592
cctcacgaaaaat

SEQ ID NO: 170751 - DNA, 13 bp, Artificial Sequence
  Oligonucleotide for detection of SNP TSC0042593
atgtgtaatgata

SEQ ID NO: 170752 - DNA, 13 bp, Artificial Sequence
  Oligonucleotide for detection of SNP TSC0042593
tatcattacacat

SEQ ID NO: 170753 - DNA, 13 bp, Artificial Sequence
  Oligonucleotide for detection of SNP TSC0042593
atgtgtgatgata

SEQ ID NO: 170754 - DNA, 13 bp, Artificial Sequence
  Oligonucleotide for detection of SNP TSC0042593
tatcatcacacat

SEQ ID NO: 170755 - DNA, 13 bp, Artificial Sequence
  Oligonucleotide for detection of SNP TSC0042594
tgtatggtattat

SEQ ID NO: 170756 - DNA, 13 bp, Artificial Sequence
  Oligonucleotide for detection of SNP TSC0042594
ataataccataca

SEQ ID NO: 170757 - DNA, 13 bp, Artificial Sequence
  Oligonucleotide for detection of SNP TSC0042595
aaaaattgtatat

SEQ ID NO: 170758 - DNA, 13 bp, Artificial Sequence
  Oligonucleotide for detection of SNP TSC0042595
atatacaattttt

SEQ ID NO: 170759 - DNA, 13 bp, Artificial Sequence
  Oligonucleotide for detection of SNP TSC0042595
aaaaatggtatat

SEQ ID NO: 170760 - DNA, 13 bp, Artificial Sequence
  Oligonucleotide for detection of SNP TSC0042595
atataccattttt

SEQ ID NO: 170761 - DNA, 13 bp, Artificial Sequence
  Oligonucleotide for detection of SNP TSC0042595
atatataattttt

SEQ ID NO: 170762 - DNA, 13 bp, Artificial Sequence
  Oligonucleotide for detection of SNP TSC0042595
aaaaattatatat

SEQ ID NO: 170763 - DNA, 13 bp, Artificial Sequence
  Oligonucleotide for detection of SNP TSC0042595
atatattattttt

SEQ ID NO: 170764 - DNA, 13 bp, Artificial Sequence
  Oligonucleotide for detection of SNP TSC0042595
aaaaataatatat

SEQ ID NO: 170765 - DNA, 13 bp, Artificial Sequence
  Oligonucleotide for detection of SNP TSC0042596
tatagtttataat

SEQ ID NO: 170766 - DNA, 13 bp, Artificial Sequence
  Oligonucleotide for detection of SNP TSC0042596
attataaactata

SEQ ID NO: 170767 - DNA, 13 bp, Artificial Sequence
  Oligonucleotide for detection of SNP TSC0042596
tatagtatataat

SEQ ID NO: 170768 - DNA, 13 bp, Artificial Sequence
  Oligonucleotide for detection of SNP TSC0042596
attatatactata

SEQ ID NO: 170769 - DNA, 13 bp, Artificial Sequence
  Oligonucleotide for detection of SNP TSC0042597
aaataatgataaa

SEQ ID NO: 170770 - DNA, 13 bp, Artificial Sequence
  Oligonucleotide for detection of SNP TSC0042597
tttatcattattt

SEQ ID NO: 170771 - DNA, 13 bp, Artificial Sequence
  Oligonucleotide for detection of SNP TSC0042601
attttaagtagag

SEQ ID NO: 170772 - DNA, 13 bp, Artificial Sequence
  Oligonucleotide for detection of SNP TSC0042601
ctctacttaaaat

SEQ ID NO: 170773 - DNA, 13 bp, Artificial Sequence
  Oligonucleotide for detection of SNP TSC0042601
attttatgtagag

SEQ ID NO: 170774 - DNA, 13 bp, Artificial Sequence
  Oligonucleotide for detection of SNP TSC0042601
ctctacataaaat

SEQ ID NO: 170775 - DNA, 13 bp, Artificial Sequence
  Oligonucleotide for detection of SNP TSC0042601
ttttatttggggt

SEQ ID NO: 170776 - DNA, 13 bp, Artificial Sequence
  Oligonucleotide for detection of SNP TSC0042601
accccaaataaaa

SEQ ID NO: 170777 - DNA, 13 bp, Artificial Sequence
  Oligonucleotide for detection of SNP TSC0042601
ttttatatggggt

SEQ ID NO: 170778 - DNA, 13 bp, Artificial Sequence
  Oligonucleotide for detection of SNP TSC0042601
accccatataaaa

SEQ ID NO: 170779 - DNA, 13 bp, Artificial Sequence
  Oligonucleotide for detection of SNP TSC0042602
atgatgaagtatt

SEQ ID NO: 170780 - DNA, 13 bp, Artificial Sequence
  Oligonucleotide for detection of SNP TSC0042602
aatacttcatcat

SEQ ID NO: 170781 - DNA, 13 bp, Artificial Sequence
  Oligonucleotide for detection of SNP TSC0042602
atgatggagtatt

SEQ ID NO: 170782 - DNA, 13 bp, Artificial Sequence
  Oligonucleotide for detection of SNP TSC0042602
aatactccatcat

SEQ ID NO: 170783 - DNA, 13 bp, Artificial Sequence
  Oligonucleotide for detection of SNP TSC0042605
gattaggttgtaa

SEQ ID NO: 170784 - DNA, 13 bp, Artificial Sequence
  Oligonucleotide for detection of SNP TSC0042605
ttacaacctaatc

SEQ ID NO: 170785 - DNA, 13 bp, Artificial Sequence
  Oligonucleotide for detection of SNP TSC0042605
gattagattgtaa

SEQ ID NO: 170786 - DNA, 13 bp, Artificial Sequence
  Oligonucleotide for detection of SNP TSC0042605
ttacaatctaatc

SEQ ID NO: 170787 - DNA, 13 bp, Artificial Sequence
  Oligonucleotide for detection of SNP TSC0042606
gtatttaatagat

SEQ ID NO: 170788 - DNA, 13 bp, Artificial Sequence
  Oligonucleotide for detection of SNP TSC0042606
atctattaaatac

SEQ ID NO: 170789 - DNA, 13 bp, Artificial Sequence
  Oligonucleotide for detection of SNP TSC0042606
gtattttatagat

SEQ ID NO: 170790 - DNA, 13 bp, Artificial Sequence
  Oligonucleotide for detection of SNP TSC0042606
atctataaaatac

SEQ ID NO: 170791 - DNA, 13 bp, Artificial Sequence
  Oligonucleotide for detection of SNP TSC0042606
atttattagatgy

SEQ ID NO: 170792 - DNA, 13 bp, Artificial Sequence
  Oligonucleotide for detection of SNP TSC0042606
rcatctaataaat

SEQ ID NO: 170793 - DNA, 13 bp, Artificial Sequence
  Oligonucleotide for detection of SNP TSC0042606
atttatgagatgy

SEQ ID NO: 170794 - DNA, 13 bp, Artificial Sequence
  Oligonucleotide for detection of SNP TSC0042606
rcatctcataaat

SEQ ID NO: 170795 - DNA, 13 bp, Artificial Sequence
  Oligonucleotide for detection of SNP TSC0042607
atttaatgtagta

SEQ ID NO: 170796 - DNA, 13 bp, Artificial Sequence
  Oligonucleotide for detection of SNP TSC0042607
tactacattaaat

SEQ ID NO: 170797 - DNA, 13 bp, Artificial Sequence
  Oligonucleotide for detection of SNP TSC0042607
atttaacgtagta

SEQ ID NO: 170798 - DNA, 13 bp, Artificial Sequence
  Oligonucleotide for detection of SNP TSC0042607
tactacgttaaat

SEQ ID NO: 170799 - DNA, 13 bp, Artificial Sequence
  Oligonucleotide for detection of SNP TSC0008832
atgttagtaatat

SEQ ID NO: 170800 - DNA, 13 bp, Artificial Sequence
  Oligonucleotide for detection of SNP TSC0008832
atattactaacat

SEQ ID NO: 170801 - DNA, 13 bp, Artificial Sequence
  Oligonucleotide for detection of SNP TSC0008832
atgttaataatat

SEQ ID NO: 170802 - DNA, 13 bp, Artificial Sequence
  Oligonucleotide for detection of SNP TSC0008832
atattattaacat

SEQ ID NO: 170803 - DNA, 13 bp, Artificial Sequence
  Oligonucleotide for detection of SNP TSC0042608
aggagatggtgta

SEQ ID NO: 170804 - DNA, 13 bp, Artificial Sequence
  Oligonucleotide for detection of SNP TSC0042608
tacaccatctcct

SEQ ID NO: 170805 - DNA, 13 bp, Artificial Sequence
  Oligonucleotide for detection of SNP TSC0042608
aggagacggtgta

SEQ ID NO: 170806 - DNA, 13 bp, Artificial Sequence
  Oligonucleotide for detection of SNP TSC0042608
tacaccgtctcct

SEQ ID NO: 170807 - DNA, 13 bp, Artificial Sequence
  Oligonucleotide for detection of SNP TSC0042608
aggagatggcgta

SEQ ID NO: 170808 - DNA, 13 bp, Artificial Sequence
  Oligonucleotide for detection of SNP TSC0042608
tacgccatctcct

SEQ ID NO: 170809 - DNA, 13 bp, Artificial Sequence
  Oligonucleotide for detection of SNP TSC0042608
aggagacggcgta

SEQ ID NO: 170810 - DNA, 13 bp, Artificial Sequence
  Oligonucleotide for detection of SNP TSC0042608
tacgccgtctcct

SEQ ID NO: 170811 - DNA, 13 bp, Artificial Sequence
  Oligonucleotide for detection of SNP TSC0042608
tgcgttgtttttt

SEQ ID NO: 170812 - DNA, 13 bp, Artificial Sequence
  Oligonucleotide for detection of SNP TSC0042608
aaaaaacaacgca

SEQ ID NO: 170813 - DNA, 13 bp, Artificial Sequence
  Oligonucleotide for detection of SNP TSC0042608
tgcgttatttttt

SEQ ID NO: 170814 - DNA, 13 bp, Artificial Sequence
  Oligonucleotide for detection of SNP TSC0042608
aaaaaataacgca

SEQ ID NO: 170815 - DNA, 13 bp, Artificial Sequence
  Oligonucleotide for detection of SNP TSC0042608
tgtgtcgtttttt

SEQ ID NO: 170816 - DNA, 13 bp, Artificial Sequence
  Oligonucleotide for detection of SNP TSC0042608
aaaaaacgacaca

SEQ ID NO: 170817 - DNA, 13 bp, Artificial Sequence
  Oligonucleotide for detection of SNP TSC0042608
tgcgtcgtttttt

SEQ ID NO: 170818 - DNA, 13 bp, Artificial Sequence
  Oligonucleotide for detection of SNP TSC0042608
aaaaaacgacgca

SEQ ID NO: 170819 - DNA, 13 bp, Artificial Sequence
  Oligonucleotide for detection of SNP TSC0042609
ttataagtatatt

SEQ ID NO: 170820 - DNA, 13 bp, Artificial Sequence
  Oligonucleotide for detection of SNP TSC0042609
aatatacttataa

SEQ ID NO: 170821 - DNA, 13 bp, Artificial Sequence
  Oligonucleotide for detection of SNP TSC0042609
ttataaatatatt

SEQ ID NO: 170822 - DNA, 13 bp, Artificial Sequence
  Oligonucleotide for detection of SNP TSC0042609
aatatatttataa

SEQ ID NO: 170823 - DNA, 13 bp, Artificial Sequence
  Oligonucleotide for detection of SNP TSC0042610
ggggagtggggga

SEQ ID NO: 170824 - DNA, 13 bp, Artificial Sequence
  Oligonucleotide for detection of SNP TSC0042610
tcccccactcccc

SEQ ID NO: 170825 - DNA, 13 bp, Artificial Sequence
  Oligonucleotide for detection of SNP TSC0042610
ggggaggggggga

SEQ ID NO: 170826 - DNA, 13 bp, Artificial Sequence
  Oligonucleotide for detection of SNP TSC0042610
tccccccctcccc

SEQ ID NO: 170827 - DNA, 13 bp, Artificial Sequence
  Oligonucleotide for detection of SNP TSC0042611
ataatattattag

SEQ ID NO: 170828 - DNA, 13 bp, Artificial Sequence
  Oligonucleotide for detection of SNP TSC0042611
ctaataatattat

SEQ ID NO: 170829 - DNA, 13 bp, Artificial Sequence
  Oligonucleotide for detection of SNP TSC0042611
ttaatattgttat

SEQ ID NO: 170830 - DNA, 13 bp, Artificial Sequence
  Oligonucleotide for detection of SNP TSC0042611
ataacaatattaa

SEQ ID NO: 170831 - DNA, 13 bp, Artificial Sequence
  Oligonucleotide for detection of SNP TSC0042611
ttaatagtgttat

SEQ ID NO: 170832 - DNA, 13 bp, Artificial Sequence
  Oligonucleotide for detection of SNP TSC0042611
ataacactattaa

SEQ ID NO: 170833 - DNA, 13 bp, Artificial Sequence
  Oligonucleotide for detection of SNP TSC0042613
gaatagaagtagt

SEQ ID NO: 170834 - DNA, 13 bp, Artificial Sequence
  Oligonucleotide for detection of SNP TSC0042613
actacttctattc

SEQ ID NO: 170835 - DNA, 13 bp, Artificial Sequence
  Oligonucleotide for detection of SNP TSC0042613
gaatagtagtagt

SEQ ID NO: 170836 - DNA, 13 bp, Artificial Sequence
  Oligonucleotide for detection of SNP TSC0042613
actactactattc

SEQ ID NO: 170837 - DNA, 13 bp, Artificial Sequence
  Oligonucleotide for detection of SNP TSC0042616
ggtgtatgttata

SEQ ID NO: 170838 - DNA, 13 bp, Artificial Sequence
  Oligonucleotide for detection of SNP TSC0042616
tataacatacacc

SEQ ID NO: 170839 - DNA, 13 bp, Artificial Sequence
  Oligonucleotide for detection of SNP TSC0042616
ggtgtacgttata

SEQ ID NO: 170840 - DNA, 13 bp, Artificial Sequence
  Oligonucleotide for detection of SNP TSC0042616
tataacgtacacc

SEQ ID NO: 170841 - DNA, 13 bp, Artificial Sequence
  Oligonucleotide for detection of SNP TSC0042616
tgtggtgtataty

SEQ ID NO: 170842 - DNA, 13 bp, Artificial Sequence
  Oligonucleotide for detection of SNP TSC0042616
ratatacaccaca

SEQ ID NO: 170843 - DNA, 13 bp, Artificial Sequence
  Oligonucleotide for detection of SNP TSC0042616
tgtggtatataty

SEQ ID NO: 170844 - DNA, 13 bp, Artificial Sequence
  Oligonucleotide for detection of SNP TSC0042616
ratatataccaca

SEQ ID NO: 170845 - DNA, 13 bp, Artificial Sequence
  Oligonucleotide for detection of SNP TSC0042616
tgtggcgtataty

SEQ ID NO: 170846 - DNA, 13 bp, Artificial Sequence
  Oligonucleotide for detection of SNP TSC0042616
ratatacgccaca

SEQ ID NO: 170847 - DNA, 13 bp, Artificial Sequence
  Oligonucleotide for detection of SNP TSC0042617
gaaggtaaggggg

SEQ ID NO: 170848 - DNA, 13 bp, Artificial Sequence
  Oligonucleotide for detection of SNP TSC0042617
cccccttaccttc

SEQ ID NO: 170849 - DNA, 13 bp, Artificial Sequence
  Oligonucleotide for detection of SNP TSC0042617
gaaggtgaggggg

SEQ ID NO: 170850 - DNA, 13 bp, Artificial Sequence
  Oligonucleotide for detection of SNP TSC0042617
ccccctcaccttc

SEQ ID NO: 170851 - DNA, 13 bp, Artificial Sequence
  Oligonucleotide for detection of SNP TSC0042617
gaaggcgaggggg

SEQ ID NO: 170852 - DNA, 13 bp, Artificial Sequence
  Oligonucleotide for detection of SNP TSC0042617
ccccctcgccttc

SEQ ID NO: 170853 - DNA, 13 bp, Artificial Sequence
  Oligonucleotide for detection of SNP TSC0042618
gttttcgttgttg

SEQ ID NO: 170854 - DNA, 13 bp, Artificial Sequence
  Oligonucleotide for detection of SNP TSC0042618
caacaacgaaaac

SEQ ID NO: 170855 - DNA, 13 bp, Artificial Sequence
  Oligonucleotide for detection of SNP TSC0042618
tagtagtgaagay

SEQ ID NO: 170856 - DNA, 13 bp, Artificial Sequence
  Oligonucleotide for detection of SNP TSC0042618
rtcttcactacta

SEQ ID NO: 170857 - DNA, 13 bp, Artificial Sequence
  Oligonucleotide for detection of SNP TSC0042618
tagtagcgaagay

SEQ ID NO: 170858 - DNA, 13 bp, Artificial Sequence
  Oligonucleotide for detection of SNP TSC0042618
rtcttcgctacta

SEQ ID NO: 170859 - DNA, 13 bp, Artificial Sequence
  Oligonucleotide for detection of SNP TSC0042619
agtggagggttag

SEQ ID NO: 170860 - DNA, 13 bp, Artificial Sequence
  Oligonucleotide for detection of SNP TSC0042619
ctaaccctccact

SEQ ID NO: 170861 - DNA, 13 bp, Artificial Sequence
  Oligonucleotide for detection of SNP TSC0042619
agtggaaggttag

SEQ ID NO: 170862 - DNA, 13 bp, Artificial Sequence
  Oligonucleotide for detection of SNP TSC0042619
ctaaccttccact

SEQ ID NO: 170863 - DNA, 13 bp, Artificial Sequence
  Oligonucleotide for detection of SNP TSC0042620
tgaaataaatagy

SEQ ID NO: 170864 - DNA, 13 bp, Artificial Sequence
  Oligonucleotide for detection of SNP TSC0042620
rctatttatttca

SEQ ID NO: 170865 - DNA, 13 bp, Artificial Sequence
  Oligonucleotide for detection of SNP TSC0042620
tgaaatgaatagy

SEQ ID NO: 170866 - DNA, 13 bp, Artificial Sequence
  Oligonucleotide for detection of SNP TSC0042620
rctattcatttca

SEQ ID NO: 170867 - DNA, 13 bp, Artificial Sequence
  Oligonucleotide for detection of SNP TSC0042621
gtagagtgttgga

SEQ ID NO: 170868 - DNA, 13 bp, Artificial Sequence
  Oligonucleotide for detection of SNP TSC0042621
tccaacactctac

SEQ ID NO: 170869 - DNA, 13 bp, Artificial Sequence
  Oligonucleotide for detection of SNP TSC0042621
gtagagcgttgga

SEQ ID NO: 170870 - DNA, 13 bp, Artificial Sequence
  Oligonucleotide for detection of SNP TSC0042621
tccaacgctctac

SEQ ID NO: 170871 - DNA, 13 bp, Artificial Sequence
  Oligonucleotide for detection of SNP TSC0042628
gtttatatagtta

SEQ ID NO: 170872 - DNA, 13 bp, Artificial Sequence
  Oligonucleotide for detection of SNP TSC0042628
taactatataaac

SEQ ID NO: 170873 - DNA, 13 bp, Artificial Sequence
  Oligonucleotide for detection of SNP TSC0042628
gtttatgtagtta

SEQ ID NO: 170874 - DNA, 13 bp, Artificial Sequence
  Oligonucleotide for detection of SNP TSC0042628
taactacataaac

SEQ ID NO: 170875 - DNA, 13 bp, Artificial Sequence
  Oligonucleotide for detection of SNP TSC0042628
gtttacgtagtta

SEQ ID NO: 170876 - DNA, 13 bp, Artificial Sequence
  Oligonucleotide for detection of SNP TSC0042628
taactacgtaaac

SEQ ID NO: 170877 - DNA, 13 bp, Artificial Sequence
  Oligonucleotide for detection of SNP TSC0042628
tggttgtgtaagy

SEQ ID NO: 170878 - DNA, 13 bp, Artificial Sequence
  Oligonucleotide for detection of SNP TSC0042628
rcttacacaacca

SEQ ID NO: 170879 - DNA, 13 bp, Artificial Sequence
  Oligonucleotide for detection of SNP TSC0042628
tggttgcgtaagy

SEQ ID NO: 170880 - DNA, 13 bp, Artificial Sequence
  Oligonucleotide for detection of SNP TSC0042628
rcttacgcaacca

SEQ ID NO: 170881 - DNA, 13 bp, Artificial Sequence
  Oligonucleotide for detection of SNP TSC0042629
gaagaatatatgt

SEQ ID NO: 170882 - DNA, 13 bp, Artificial Sequence
  Oligonucleotide for detection of SNP TSC0042629
acatatattcttc

SEQ ID NO: 170883 - DNA, 13 bp, Artificial Sequence
  Oligonucleotide for detection of SNP TSC0042629
gaagaagatatgt

SEQ ID NO: 170884 - DNA, 13 bp, Artificial Sequence
  Oligonucleotide for detection of SNP TSC0042629
acatatcttcttc

SEQ ID NO: 170885 - DNA, 13 bp, Artificial Sequence
  Oligonucleotide for detection of SNP TSC0042629
atatatattttty

SEQ ID NO: 170886 - DNA, 13 bp, Artificial Sequence
  Oligonucleotide for detection of SNP TSC0042629
raaaaatatatat

SEQ ID NO: 170887 - DNA, 13 bp, Artificial Sequence
  Oligonucleotide for detection of SNP TSC0042629
atatattttttty

SEQ ID NO: 170888 - DNA, 13 bp, Artificial Sequence
  Oligonucleotide for detection of SNP TSC0042629
raaaaaaatatat

SEQ ID NO: 170889 - DNA, 13 bp, Artificial Sequence
  Oligonucleotide for detection of SNP TSC0042632
aaggaaggaagga

SEQ ID NO: 170890 - DNA, 13 bp, Artificial Sequence
  Oligonucleotide for detection of SNP TSC0042632
tccttccttcctt

SEQ ID NO: 170891 - DNA, 13 bp, Artificial Sequence
  Oligonucleotide for detection of SNP TSC0042632
aaggaaagaagga

SEQ ID NO: 170892 - DNA, 13 bp, Artificial Sequence
  Oligonucleotide for detection of SNP TSC0042632
tccttctttcctt

SEQ ID NO: 170893 - DNA, 13 bp, Artificial Sequence
  Oligonucleotide for detection of SNP TSC0042633
gagtaatgaggaa

SEQ ID NO: 170894 - DNA, 13 bp, Artificial Sequence
  Oligonucleotide for detection of SNP TSC0042633
ttcctcattactc

SEQ ID NO: 170895 - DNA, 13 bp, Artificial Sequence
  Oligonucleotide for detection of SNP TSC0042633
gagtaacgaggaa

SEQ ID NO: 170896 - DNA, 13 bp, Artificial Sequence
  Oligonucleotide for detection of SNP TSC0042633
ttcctcgttactc

SEQ ID NO: 170897 - DNA, 13 bp, Artificial Sequence
  Oligonucleotide for detection of SNP TSC0042634
tgttatattgttt

SEQ ID NO: 170898 - DNA, 13 bp, Artificial Sequence
  Oligonucleotide for detection of SNP TSC0042634
aaacaatataaca

SEQ ID NO: 170899 - DNA, 13 bp, Artificial Sequence
  Oligonucleotide for detection of SNP TSC0042634
tgttattttgttt

SEQ ID NO: 170900 - DNA, 13 bp, Artificial Sequence
  Oligonucleotide for detection of SNP TSC0042634
aaacaaaataaca

SEQ ID NO: 170901 - DNA, 13 bp, Artificial Sequence
  Oligonucleotide for detection of SNP TSC0042634
cgttatattgttt

SEQ ID NO: 170902 - DNA, 13 bp, Artificial Sequence
  Oligonucleotide for detection of SNP TSC0042634
aaacaatataacg

SEQ ID NO: 170903 - DNA, 13 bp, Artificial Sequence
  Oligonucleotide for detection of SNP TSC0042634
cgttattttgttt

SEQ ID NO: 170904 - DNA, 13 bp, Artificial Sequence
  Oligonucleotide for detection of SNP TSC0042634
aaacaaaataacg

SEQ ID NO: 170905 - DNA, 13 bp, Artificial Sequence
  Oligonucleotide for detection of SNP TSC0042634
agataatgtaatg

SEQ ID NO: 170906 - DNA, 13 bp, Artificial Sequence
  Oligonucleotide for detection of SNP TSC0042634
cattacattatct

SEQ ID NO: 170907 - DNA, 13 bp, Artificial Sequence
  Oligonucleotide for detection of SNP TSC0042634
agataaggtaatg

SEQ ID NO: 170908 - DNA, 13 bp, Artificial Sequence
  Oligonucleotide for detection of SNP TSC0042634
cattaccttatct

SEQ ID NO: 170909 - DNA, 13 bp, Artificial Sequence
  Oligonucleotide for detection of SNP TSC0042634
agataatgtaacg

SEQ ID NO: 170910 - DNA, 13 bp, Artificial Sequence
  Oligonucleotide for detection of SNP TSC0042634
cgttacattatct

SEQ ID NO: 170911 - DNA, 13 bp, Artificial Sequence
  Oligonucleotide for detection of SNP TSC0042634
agataaggtaacg

SEQ ID NO: 170912 - DNA, 13 bp, Artificial Sequence
  Oligonucleotide for detection of SNP TSC0042634
cgttaccttatct

SEQ ID NO: 170913 - DNA, 13 bp, Artificial Sequence
  Oligonucleotide for detection of SNP TSC0042638
gttttgagttgtt

SEQ ID NO: 170914 - DNA, 13 bp, Artificial Sequence
  Oligonucleotide for detection of SNP TSC0042638
aacaactcaaaac

SEQ ID NO: 170915 - DNA, 13 bp, Artificial Sequence
  Oligonucleotide for detection of SNP TSC0042638
gttttgggttgtt

SEQ ID NO: 170916 - DNA, 13 bp, Artificial Sequence
  Oligonucleotide for detection of SNP TSC0042638
aacaacccaaaac

SEQ ID NO: 170917 - DNA, 13 bp, Artificial Sequence
  Oligonucleotide for detection of SNP TSC0042640
atggagaggaaay

SEQ ID NO: 170918 - DNA, 13 bp, Artificial Sequence
  Oligonucleotide for detection of SNP TSC0042640
rtttcctctccat

SEQ ID NO: 170919 - DNA, 13 bp, Artificial Sequence
  Oligonucleotide for detection of SNP TSC0042640
atggaggggaaay

SEQ ID NO: 170920 - DNA, 13 bp, Artificial Sequence
  Oligonucleotide for detection of SNP TSC0042640
rtttcccctccat

SEQ ID NO: 170921 - DNA, 13 bp, Artificial Sequence
  Oligonucleotide for detection of SNP TSC0042641
agtgagtggagat

SEQ ID NO: 170922 - DNA, 13 bp, Artificial Sequence
  Oligonucleotide for detection of SNP TSC0042641
atctccactcact

SEQ ID NO: 170923 - DNA, 13 bp, Artificial Sequence
  Oligonucleotide for detection of SNP TSC0042641
agtgaggggagat

SEQ ID NO: 170924 - DNA, 13 bp, Artificial Sequence
  Oligonucleotide for detection of SNP TSC0042641
atctcccctcact

SEQ ID NO: 170925 - DNA, 13 bp, Artificial Sequence
  Oligonucleotide for detection of SNP TSC0042642
ttttttatatgat

SEQ ID NO: 170926 - DNA, 13 bp, Artificial Sequence
  Oligonucleotide for detection of SNP TSC0042642
atcatataaaaaa

SEQ ID NO: 170927 - DNA, 13 bp, Artificial Sequence
  Oligonucleotide for detection of SNP TSC0042642
ttttttgtatgat

SEQ ID NO: 170928 - DNA, 13 bp, Artificial Sequence
  Oligonucleotide for detection of SNP TSC0042642
atcatacaaaaaa

SEQ ID NO: 170929 - DNA, 13 bp, Artificial Sequence
  Oligonucleotide for detection of SNP TSC0042643
tattaaaaatata

SEQ ID NO: 170930 - DNA, 13 bp, Artificial Sequence
  Oligonucleotide for detection of SNP TSC0042643
tatatttttaata

SEQ ID NO: 170931 - DNA, 13 bp, Artificial Sequence
  Oligonucleotide for detection of SNP TSC0042643
tgtatttttagta

SEQ ID NO: 170932 - DNA, 13 bp, Artificial Sequence
  Oligonucleotide for detection of SNP TSC0042643
tactaaaaataca

SEQ ID NO: 170933 - DNA, 13 bp, Artificial Sequence
  Oligonucleotide for detection of SNP TSC0042643
tgtattgttagta

SEQ ID NO: 170934 - DNA, 13 bp, Artificial Sequence
  Oligonucleotide for detection of SNP TSC0042643
tactaacaataca

SEQ ID NO: 170935 - DNA, 13 bp, Artificial Sequence
  Oligonucleotide for detection of SNP TSC0042646
tattttagtttta

SEQ ID NO: 170936 - DNA, 13 bp, Artificial Sequence
  Oligonucleotide for detection of SNP TSC0042646
taaaactaaaata

SEQ ID NO: 170937 - DNA, 13 bp, Artificial Sequence
  Oligonucleotide for detection of SNP TSC0042646
tattttggtttta

SEQ ID NO: 170938 - DNA, 13 bp, Artificial Sequence
  Oligonucleotide for detection of SNP TSC0042646
taaaaccaaaata

SEQ ID NO: 170939 - DNA, 13 bp, Artificial Sequence
  Oligonucleotide for detection of SNP TSC0042646
tatttcggtttta

SEQ ID NO: 170940 - DNA, 13 bp, Artificial Sequence
  Oligonucleotide for detection of SNP TSC0042646
taaaaccgaaata

SEQ ID NO: 170941 - DNA, 13 bp, Artificial Sequence
  Oligonucleotide for detection of SNP TSC0042646
taaagttggagta

SEQ ID NO: 170942 - DNA, 13 bp, Artificial Sequence
  Oligonucleotide for detection of SNP TSC0042646
tactccaacttta

SEQ ID NO: 170943 - DNA, 13 bp, Artificial Sequence
  Oligonucleotide for detection of SNP TSC0042646
taaagtcggagta

SEQ ID NO: 170944 - DNA, 13 bp, Artificial Sequence
  Oligonucleotide for detection of SNP TSC0042646
tactccgacttta

SEQ ID NO: 170945 - DNA, 13 bp, Artificial Sequence
  Oligonucleotide for detection of SNP TSC0042647
atgtataaaagaa

SEQ ID NO: 170946 - DNA, 13 bp, Artificial Sequence
  Oligonucleotide for detection of SNP TSC0042647
ttcttttatacat

SEQ ID NO: 170947 - DNA, 13 bp, Artificial Sequence
  Oligonucleotide for detection of SNP TSC0042647
atgtatgaaagaa

SEQ ID NO: 170948 - DNA, 13 bp, Artificial Sequence
  Oligonucleotide for detection of SNP TSC0042647
ttctttcatacat

SEQ ID NO: 170949 - DNA, 13 bp, Artificial Sequence
  Oligonucleotide for detection of SNP TSC0042648
atatatatattgt

SEQ ID NO: 170950 - DNA, 13 bp, Artificial Sequence
  Oligonucleotide for detection of SNP TSC0042648
acaatatatatat

SEQ ID NO: 170951 - DNA, 13 bp, Artificial Sequence
  Oligonucleotide for detection of SNP TSC0042648
atatatgtattgt

SEQ ID NO: 170952 - DNA, 13 bp, Artificial Sequence
  Oligonucleotide for detection of SNP TSC0042648
acaatacatatat

SEQ ID NO: 170953 - DNA, 13 bp, Artificial Sequence
  Oligonucleotide for detection of SNP TSC0042648
atatacgtattgt

SEQ ID NO: 170954 - DNA, 13 bp, Artificial Sequence
  Oligonucleotide for detection of SNP TSC0042648
acaatacgtatat

SEQ ID NO: 170955 - DNA, 13 bp, Artificial Sequence
  Oligonucleotide for detection of SNP TSC0042648
atagtatgtgtgt

SEQ ID NO: 170956 - DNA, 13 bp, Artificial Sequence
  Oligonucleotide for detection of SNP TSC0042648
acacacatactat

SEQ ID NO: 170957 - DNA, 13 bp, Artificial Sequence
  Oligonucleotide for detection of SNP TSC0042648
atagtacgtgtgt

SEQ ID NO: 170958 - DNA, 13 bp, Artificial Sequence
  Oligonucleotide for detection of SNP TSC0042648
acacacgtactat

SEQ ID NO: 170959 - DNA, 13 bp, Artificial Sequence
  Oligonucleotide for detection of SNP TSC0004719
ttttaaggagata

SEQ ID NO: 170960 - DNA, 13 bp, Artificial Sequence
  Oligonucleotide for detection of SNP TSC0004719
tatctccttaaaa

SEQ ID NO: 170961 - DNA, 13 bp, Artificial Sequence
  Oligonucleotide for detection of SNP TSC0004719
ttttaaagagata

SEQ ID NO: 170962 - DNA, 13 bp, Artificial Sequence
  Oligonucleotide for detection of SNP TSC0004719
tatctctttaaaa

SEQ ID NO: 170963 - DNA, 13 bp, Artificial Sequence
  Oligonucleotide for detection of SNP TSC0010690
ttatatagtttta

SEQ ID NO: 170964 - DNA, 13 bp, Artificial Sequence
  Oligonucleotide for detection of SNP TSC0010690
taaaactatataa

SEQ ID NO: 170965 - DNA, 13 bp, Artificial Sequence
  Oligonucleotide for detection of SNP TSC0010690
ttatattgtttta

SEQ ID NO: 170966 - DNA, 13 bp, Artificial Sequence
  Oligonucleotide for detection of SNP TSC0010690
taaaacaatataa

SEQ ID NO: 170967 - DNA, 13 bp, Artificial Sequence
  Oligonucleotide for detection of SNP TSC0010690
ttatatcgtttta

SEQ ID NO: 170968 - DNA, 13 bp, Artificial Sequence
  Oligonucleotide for detection of SNP TSC0010690
taaaacgatataa

SEQ ID NO: 170969 - DNA, 13 bp, Artificial Sequence
  Oligonucleotide for detection of SNP TSC0010690
tagagttatataa

SEQ ID NO: 170970 - DNA, 13 bp, Artificial Sequence
  Oligonucleotide for detection of SNP TSC0010690
ttatataactcta

SEQ ID NO: 170971 - DNA, 13 bp, Artificial Sequence
  Oligonucleotide for detection of SNP TSC0010690
tagagtgatataa

SEQ ID NO: 170972 - DNA, 13 bp, Artificial Sequence
  Oligonucleotide for detection of SNP TSC0010690
ttatatcactcta

SEQ ID NO: 170973 - DNA, 13 bp, Artificial Sequence
  Oligonucleotide for detection of SNP TSC0010690
tagagcgatataa

SEQ ID NO: 170974 - DNA, 13 bp, Artificial Sequence
  Oligonucleotide for detection of SNP TSC0010690
ttatatcgctcta

SEQ ID NO: 170975 - DNA, 13 bp, Artificial Sequence
  Oligonucleotide for detection of SNP TSC0005681
tagagaaggagta

SEQ ID NO: 170976 - DNA, 13 bp, Artificial Sequence
  Oligonucleotide for detection of SNP TSC0005681
tactccttctcta

SEQ ID NO: 170977 - DNA, 13 bp, Artificial Sequence
  Oligonucleotide for detection of SNP TSC0005681
tagagagggagta

SEQ ID NO: 170978 - DNA, 13 bp, Artificial Sequence
  Oligonucleotide for detection of SNP TSC0005681
tactccctctcta

SEQ ID NO: 170979 - DNA, 13 bp, Artificial Sequence
  Oligonucleotide for detection of SNP TSC0042653
ataaataaattta

SEQ ID NO: 170980 - DNA, 13 bp, Artificial Sequence
  Oligonucleotide for detection of SNP TSC0042653
taaatttatttat

SEQ ID NO: 170981 - DNA, 13 bp, Artificial Sequence
  Oligonucleotide for detection of SNP TSC0042653
ataaattaattta

SEQ ID NO: 170982 - DNA, 13 bp, Artificial Sequence
  Oligonucleotide for detection of SNP TSC0042653
taaattaatttat

SEQ ID NO: 170983 - DNA, 13 bp, Artificial Sequence
  Oligonucleotide for detection of SNP TSC0042653
tggatttatttat

SEQ ID NO: 170984 - DNA, 13 bp, Artificial Sequence
  Oligonucleotide for detection of SNP TSC0042653
ataaataaatcca

SEQ ID NO: 170985 - DNA, 13 bp, Artificial Sequence
  Oligonucleotide for detection of SNP TSC0042653
tggattgatttat

SEQ ID NO: 170986 - DNA, 13 bp, Artificial Sequence
  Oligonucleotide for detection of SNP TSC0042653
ataaatcaatcca

SEQ ID NO: 170987 - DNA, 13 bp, Artificial Sequence
  Oligonucleotide for detection of SNP TSC0008320
gtaaatatgggay

SEQ ID NO: 170988 - DNA, 13 bp, Artificial Sequence
  Oligonucleotide for detection of SNP TSC0008320
rtcccatatttac

SEQ ID NO: 170989 - DNA, 13 bp, Artificial Sequence
  Oligonucleotide for detection of SNP TSC0008320
gtaaatttgggay

SEQ ID NO: 170990 - DNA, 13 bp, Artificial Sequence
  Oligonucleotide for detection of SNP TSC0008320
rtcccaaatttac

SEQ ID NO: 170991 - DNA, 13 bp, Artificial Sequence
  Oligonucleotide for detection of SNP TSC0008320
gttttatatttgy

SEQ ID NO: 170992 - DNA, 13 bp, Artificial Sequence
  Oligonucleotide for detection of SNP TSC0008320
rcaaatataaaac

SEQ ID NO: 170993 - DNA, 13 bp, Artificial Sequence
  Oligonucleotide for detection of SNP TSC0008321
aaattagttatgt

SEQ ID NO: 170994 - DNA, 13 bp, Artificial Sequence
  Oligonucleotide for detection of SNP TSC0008321
acataactaattt

SEQ ID NO: 170995 - DNA, 13 bp, Artificial Sequence
  Oligonucleotide for detection of SNP TSC0008321
aaattaattatgt

SEQ ID NO: 170996 - DNA, 13 bp, Artificial Sequence
  Oligonucleotide for detection of SNP TSC0008321
acataattaattt

SEQ ID NO: 170997 - DNA, 13 bp, Artificial Sequence
  Oligonucleotide for detection of SNP TSC0007584
aatgtgtgtgatg

SEQ ID NO: 170998 - DNA, 13 bp, Artificial Sequence
  Oligonucleotide for detection of SNP TSC0007584
catcacacacatt

SEQ ID NO: 170999 - DNA, 13 bp, Artificial Sequence
  Oligonucleotide for detection of SNP TSC0007584
aatgtgcgtgatg

SEQ ID NO: 171000 - DNA, 13 bp, Artificial Sequence
  Oligonucleotide for detection of SNP TSC0007584
catcacgcacatt

SEQ ID NO: 171001 - DNA, 13 bp, Artificial Sequence
  Oligonucleotide for detection of SNP TSC0007584
tattacgtatatt

SEQ ID NO: 171002 - DNA, 13 bp, Artificial Sequence
  Oligonucleotide for detection of SNP TSC0007584
aatatacgtaata

SEQ ID NO: 171003 - DNA, 13 bp, Artificial Sequence
  Oligonucleotide for detection of SNP TSC0042657
ttatggttagggg

SEQ ID NO: 171004 - DNA, 13 bp, Artificial Sequence
  Oligonucleotide for detection of SNP TSC0042657
cccctaaccataa

SEQ ID NO: 171005 - DNA, 13 bp, Artificial Sequence
  Oligonucleotide for detection of SNP TSC0042657
ttatgggtagggg

SEQ ID NO: 171006 - DNA, 13 bp, Artificial Sequence
  Oligonucleotide for detection of SNP TSC0042657
cccctacccataa

SEQ ID NO: 171007 - DNA, 13 bp, Artificial Sequence
  Oligonucleotide for detection of SNP TSC0042657
tttttggttatga

SEQ ID NO: 171008 - DNA, 13 bp, Artificial Sequence
  Oligonucleotide for detection of SNP TSC0042657
tcataaccaaaaa

SEQ ID NO: 171009 - DNA, 13 bp, Artificial Sequence
  Oligonucleotide for detection of SNP TSC0042657
tttttgtttatga

SEQ ID NO: 171010 - DNA, 13 bp, Artificial Sequence
  Oligonucleotide for detection of SNP TSC0042657
tcataaacaaaaa

SEQ ID NO: 171011 - DNA, 13 bp, Artificial Sequence
  Oligonucleotide for detection of SNP TSC0042658
taaaatagtttga

SEQ ID NO: 171012 - DNA, 13 bp, Artificial Sequence
  Oligonucleotide for detection of SNP TSC0042658
tcaaactatttta

SEQ ID NO: 171013 - DNA, 13 bp, Artificial Sequence
  Oligonucleotide for detection of SNP TSC0042658
ttaggttatttta

SEQ ID NO: 171014 - DNA, 13 bp, Artificial Sequence
  Oligonucleotide for detection of SNP TSC0042658
taaaataacctaa

SEQ ID NO: 171015 - DNA, 13 bp, Artificial Sequence
  Oligonucleotide for detection of SNP TSC0042658
ttaggtaatttta

SEQ ID NO: 171016 - DNA, 13 bp, Artificial Sequence
  Oligonucleotide for detection of SNP TSC0042658
taaaattacctaa

SEQ ID NO: 171017 - DNA, 13 bp, Artificial Sequence
  Oligonucleotide for detection of SNP TSC0042660
ttgttagtttttg

SEQ ID NO: 171018 - DNA, 13 bp, Artificial Sequence
  Oligonucleotide for detection of SNP TSC0042660
caaaaactaacaa

SEQ ID NO: 171019 - DNA, 13 bp, Artificial Sequence
  Oligonucleotide for detection of SNP TSC0042660
ttgttaatttttg

SEQ ID NO: 171020 - DNA, 13 bp, Artificial Sequence
  Oligonucleotide for detection of SNP TSC0042660
caaaaattaacaa

SEQ ID NO: 171021 - DNA, 13 bp, Artificial Sequence
  Oligonucleotide for detection of SNP TSC0042660
tcgttagtttttg

SEQ ID NO: 171022 - DNA, 13 bp, Artificial Sequence
  Oligonucleotide for detection of SNP TSC0042660
caaaaactaacga

SEQ ID NO: 171023 - DNA, 13 bp, Artificial Sequence
  Oligonucleotide for detection of SNP TSC0042660
tcgttaatttttg

SEQ ID NO: 171024 - DNA, 13 bp, Artificial Sequence
  Oligonucleotide for detection of SNP TSC0042660
caaaaattaacga

SEQ ID NO: 171025 - DNA, 13 bp, Artificial Sequence
  Oligonucleotide for detection of SNP TSC0042661
ttaattatagttt

SEQ ID NO: 171026 - DNA, 13 bp, Artificial Sequence
  Oligonucleotide for detection of SNP TSC0042661
aaactataattaa

SEQ ID NO: 171027 - DNA, 13 bp, Artificial Sequence
  Oligonucleotide for detection of SNP TSC0042661
ttaattgtagttt

SEQ ID NO: 171028 - DNA, 13 bp, Artificial Sequence
  Oligonucleotide for detection of SNP TSC0042661
aaactacaattaa

SEQ ID NO: 171029 - DNA, 13 bp, Artificial Sequence
  Oligonucleotide for detection of SNP TSC0042662
tatttaagtttta

SEQ ID NO: 171030 - DNA, 13 bp, Artificial Sequence
  Oligonucleotide for detection of SNP TSC0042662
taaaacttaaata

SEQ ID NO: 171031 - DNA, 13 bp, Artificial Sequence
  Oligonucleotide for detection of SNP TSC0042663
taaaagatattga

SEQ ID NO: 171032 - DNA, 13 bp, Artificial Sequence
  Oligonucleotide for detection of SNP TSC0042663
tcaatatctttta

SEQ ID NO: 171033 - DNA, 13 bp, Artificial Sequence
  Oligonucleotide for detection of SNP TSC0042663
taaaaggtattga

SEQ ID NO: 171034 - DNA, 13 bp, Artificial Sequence
  Oligonucleotide for detection of SNP TSC0042663
tcaatacctttta

SEQ ID NO: 171035 - DNA, 13 bp, Artificial Sequence
  Oligonucleotide for detection of SNP TSC0010757
ggaaggtgaaagy

SEQ ID NO: 171036 - DNA, 13 bp, Artificial Sequence
  Oligonucleotide for detection of SNP TSC0010757
rctttcaccttcc

SEQ ID NO: 171037 - DNA, 13 bp, Artificial Sequence
  Oligonucleotide for detection of SNP TSC0010757
ggaaggagaaagy

SEQ ID NO: 171038 - DNA, 13 bp, Artificial Sequence
  Oligonucleotide for detection of SNP TSC0010757
rctttctccttcc

SEQ ID NO: 171039 - DNA, 13 bp, Artificial Sequence
  Oligonucleotide for detection of SNP TSC0010757
ggaaggcgaaagy

SEQ ID NO: 171040 - DNA, 13 bp, Artificial Sequence
  Oligonucleotide for detection of SNP TSC0010757
rctttcgccttcc

SEQ ID NO: 171041 - DNA, 13 bp, Artificial Sequence
  Oligonucleotide for detection of SNP TSC0010758
tggttggggaggy

SEQ ID NO: 171042 - DNA, 13 bp, Artificial Sequence
  Oligonucleotide for detection of SNP TSC0010758
rcctccccaacca

SEQ ID NO: 171043 - DNA, 13 bp, Artificial Sequence
  Oligonucleotide for detection of SNP TSC0010758
tggttgaggaggy

SEQ ID NO: 171044 - DNA, 13 bp, Artificial Sequence
  Oligonucleotide for detection of SNP TSC0010758
rcctcctcaacca

SEQ ID NO: 171045 - DNA, 13 bp, Artificial Sequence
  Oligonucleotide for detection of SNP TSC0042664
gaaggagaaagta

SEQ ID NO: 171046 - DNA, 13 bp, Artificial Sequence
  Oligonucleotide for detection of SNP TSC0042664
tactttctccttc

SEQ ID NO: 171047 - DNA, 13 bp, Artificial Sequence
  Oligonucleotide for detection of SNP TSC0042664
gaaggaaaaagta

SEQ ID NO: 171048 - DNA, 13 bp, Artificial Sequence
  Oligonucleotide for detection of SNP TSC0042664
tactttttccttc

SEQ ID NO: 171049 - DNA, 13 bp, Artificial Sequence
  Oligonucleotide for detection of SNP TSC0042665
tttgttaaaaata

SEQ ID NO: 171050 - DNA, 13 bp, Artificial Sequence
  Oligonucleotide for detection of SNP TSC0042665
tatttttaacaaa

SEQ ID NO: 171051 - DNA, 13 bp, Artificial Sequence
  Oligonucleotide for detection of SNP TSC0042665
tttgtttaaaata

SEQ ID NO: 171052 - DNA, 13 bp, Artificial Sequence
  Oligonucleotide for detection of SNP TSC0042665
tattttaaacaaa

SEQ ID NO: 171053 - DNA, 13 bp, Artificial Sequence
  Oligonucleotide for detection of SNP TSC0042665
tatttttagtaaa

SEQ ID NO: 171054 - DNA, 13 bp, Artificial Sequence
  Oligonucleotide for detection of SNP TSC0042665
tttactaaaaata

SEQ ID NO: 171055 - DNA, 13 bp, Artificial Sequence
  Oligonucleotide for detection of SNP TSC0042665
tattttgagtaaa

SEQ ID NO: 171056 - DNA, 13 bp, Artificial Sequence
  Oligonucleotide for detection of SNP TSC0042665
tttactcaaaata

SEQ ID NO: 171057 - DNA, 13 bp, Artificial Sequence
  Oligonucleotide for detection of SNP TSC0010536
gaatttaggagay

SEQ ID NO: 171058 - DNA, 13 bp, Artificial Sequence
  Oligonucleotide for detection of SNP TSC0010536
rtctcctaaattc

SEQ ID NO: 171059 - DNA, 13 bp, Artificial Sequence
  Oligonucleotide for detection of SNP TSC0010536
gaatttgggagay

SEQ ID NO: 171060 - DNA, 13 bp, Artificial Sequence
  Oligonucleotide for detection of SNP TSC0010536
rtctcccaaattc

SEQ ID NO: 171061 - DNA, 13 bp, Artificial Sequence
  Oligonucleotide for detection of SNP TSC0010536
gaattcgggagay

SEQ ID NO: 171062 - DNA, 13 bp, Artificial Sequence
  Oligonucleotide for detection of SNP TSC0010536
rtctcccgaattc

SEQ ID NO: 171063 - DNA, 13 bp, Artificial Sequence
  Oligonucleotide for detection of SNP TSC0042666
gggagaattaagt

SEQ ID NO: 171064 - DNA, 13 bp, Artificial Sequence
  Oligonucleotide for detection of SNP TSC0042666
acttaattctccc

SEQ ID NO: 171065 - DNA, 13 bp, Artificial Sequence
  Oligonucleotide for detection of SNP TSC0042666
gggagagttaagt

SEQ ID NO: 171066 - DNA, 13 bp, Artificial Sequence
  Oligonucleotide for detection of SNP TSC0042666
acttaactctccc

SEQ ID NO: 171067 - DNA, 13 bp, Artificial Sequence
  Oligonucleotide for detection of SNP TSC0007008
atatggagttata

SEQ ID NO: 171068 - DNA, 13 bp, Artificial Sequence
  Oligonucleotide for detection of SNP TSC0007008
tataactccatat

SEQ ID NO: 171069 - DNA, 13 bp, Artificial Sequence
  Oligonucleotide for detection of SNP TSC0007008
atatggtgttata

SEQ ID NO: 171070 - DNA, 13 bp, Artificial Sequence
  Oligonucleotide for detection of SNP TSC0007008
tataacaccatat

SEQ ID NO: 171071 - DNA, 13 bp, Artificial Sequence
  Oligonucleotide for detection of SNP TSC0007008
atacggagttata

SEQ ID NO: 171072 - DNA, 13 bp, Artificial Sequence
  Oligonucleotide for detection of SNP TSC0007008
tataactccgtat

SEQ ID NO: 171073 - DNA, 13 bp, Artificial Sequence
  Oligonucleotide for detection of SNP TSC0007008
atacggtgttata

SEQ ID NO: 171074 - DNA, 13 bp, Artificial Sequence
  Oligonucleotide for detection of SNP TSC0007008
tataacaccgtat

SEQ ID NO: 171075 - DNA, 13 bp, Artificial Sequence
  Oligonucleotide for detection of SNP TSC0007008
tatgattttgtat

SEQ ID NO: 171076 - DNA, 13 bp, Artificial Sequence
  Oligonucleotide for detection of SNP TSC0007008
atacaaaatcata

SEQ ID NO: 171077 - DNA, 13 bp, Artificial Sequence
  Oligonucleotide for detection of SNP TSC0007008
tatgatttcgtat

SEQ ID NO: 171078 - DNA, 13 bp, Artificial Sequence
  Oligonucleotide for detection of SNP TSC0007008
atacgaaatcata

SEQ ID NO: 171079 - DNA, 13 bp, Artificial Sequence
  Oligonucleotide for detection of SNP TSC0007008
tatgatatcgtat

SEQ ID NO: 171080 - DNA, 13 bp, Artificial Sequence
  Oligonucleotide for detection of SNP TSC0007008
atacgatatcata

SEQ ID NO: 171081 - DNA, 13 bp, Artificial Sequence
  Oligonucleotide for detection of SNP TSC0042668
tttaaaggttaaa

SEQ ID NO: 171082 - DNA, 13 bp, Artificial Sequence
  Oligonucleotide for detection of SNP TSC0042668
tttaacctttaaa

SEQ ID NO: 171083 - DNA, 13 bp, Artificial Sequence
  Oligonucleotide for detection of SNP TSC0042668
tttaaaagttaaa

SEQ ID NO: 171084 - DNA, 13 bp, Artificial Sequence
  Oligonucleotide for detection of SNP TSC0042668
tttaacttttaaa

SEQ ID NO: 171085 - DNA, 13 bp, Artificial Sequence
  Oligonucleotide for detection of SNP TSC0010812
ttaaatatattaa

SEQ ID NO: 171086 - DNA, 13 bp, Artificial Sequence
  Oligonucleotide for detection of SNP TSC0010812
ttaatatatttaa

SEQ ID NO: 171087 - DNA, 13 bp, Artificial Sequence
  Oligonucleotide for detection of SNP TSC0010812
ttaaatgtattaa

SEQ ID NO: 171088 - DNA, 13 bp, Artificial Sequence
  Oligonucleotide for detection of SNP TSC0010812
ttaatacatttaa

SEQ ID NO: 171089 - DNA, 13 bp, Artificial Sequence
  Oligonucleotide for detection of SNP TSC0010812
ttaaacgtattaa

SEQ ID NO: 171090 - DNA, 13 bp, Artificial Sequence
  Oligonucleotide for detection of SNP TSC0010812
ttaatacgtttaa

SEQ ID NO: 171091 - DNA, 13 bp, Artificial Sequence
  Oligonucleotide for detection of SNP TSC0010812
ttagtatgtttgg

SEQ ID NO: 171092 - DNA, 13 bp, Artificial Sequence
  Oligonucleotide for detection of SNP TSC0010812
ccaaacatactaa

SEQ ID NO: 171093 - DNA, 13 bp, Artificial Sequence
  Oligonucleotide for detection of SNP TSC0010812
ttagtacgtttgg

SEQ ID NO: 171094 - DNA, 13 bp, Artificial Sequence
  Oligonucleotide for detection of SNP TSC0010812
ccaaacgtactaa

SEQ ID NO: 171095 - DNA, 13 bp, Artificial Sequence
  Oligonucleotide for detection of SNP TSC0042672
tgagattaagatg

SEQ ID NO: 171096 - DNA, 13 bp, Artificial Sequence
  Oligonucleotide for detection of SNP TSC0042672
catcttaatctca

SEQ ID NO: 171097 - DNA, 13 bp, Artificial Sequence
  Oligonucleotide for detection of SNP TSC0042672
tgagatgaagatg

SEQ ID NO: 171098 - DNA, 13 bp, Artificial Sequence
  Oligonucleotide for detection of SNP TSC0042672
catcttcatctca

SEQ ID NO: 171099 - DNA, 13 bp, Artificial Sequence
  Oligonucleotide for detection of SNP TSC0042673
tatttatgaaaat

SEQ ID NO: 171100 - DNA, 13 bp, Artificial Sequence
  Oligonucleotide for detection of SNP TSC0042673
attttcataaata

SEQ ID NO: 171101 - DNA, 13 bp, Artificial Sequence
  Oligonucleotide for detection of SNP TSC0042673
tatttacgaaaat

SEQ ID NO: 171102 - DNA, 13 bp, Artificial Sequence
  Oligonucleotide for detection of SNP TSC0042673
attttcgtaaata

SEQ ID NO: 171103 - DNA, 13 bp, Artificial Sequence
  Oligonucleotide for detection of SNP TSC0042675
gaagaggtaggta

SEQ ID NO: 171104 - DNA, 13 bp, Artificial Sequence
  Oligonucleotide for detection of SNP TSC0042675
tacctacctcttc

SEQ ID NO: 171105 - DNA, 13 bp, Artificial Sequence
  Oligonucleotide for detection of SNP TSC0042675
gaagagttaggta

SEQ ID NO: 171106 - DNA, 13 bp, Artificial Sequence
  Oligonucleotide for detection of SNP TSC0042675
tacctaactcttc

SEQ ID NO: 171107 - DNA, 13 bp, Artificial Sequence
  Oligonucleotide for detection of SNP TSC0042676
ttataagggtgag

SEQ ID NO: 171108 - DNA, 13 bp, Artificial Sequence
  Oligonucleotide for detection of SNP TSC0042676
ctcacccttataa

SEQ ID NO: 171109 - DNA, 13 bp, Artificial Sequence
  Oligonucleotide for detection of SNP TSC0042676
ttataaaggtgag

SEQ ID NO: 171110 - DNA, 13 bp, Artificial Sequence
  Oligonucleotide for detection of SNP TSC0042676
ctcacctttataa

SEQ ID NO: 171111 - DNA, 13 bp, Artificial Sequence
  Oligonucleotide for detection of SNP TSC0042677
ttgttaaaagagt

SEQ ID NO: 171112 - DNA, 13 bp, Artificial Sequence
  Oligonucleotide for detection of SNP TSC0042677
actcttttaacaa

SEQ ID NO: 171113 - DNA, 13 bp, Artificial Sequence
  Oligonucleotide for detection of SNP TSC0042677
ttgttagaagagt

SEQ ID NO: 171114 - DNA, 13 bp, Artificial Sequence
  Oligonucleotide for detection of SNP TSC0042677
actcttctaacaa

SEQ ID NO: 171115 - DNA, 13 bp, Artificial Sequence
  Oligonucleotide for detection of SNP TSC0042678
gatataggaataa

SEQ ID NO: 171116 - DNA, 13 bp, Artificial Sequence
  Oligonucleotide for detection of SNP TSC0042678
ttattcctatatc

SEQ ID NO: 171117 - DNA, 13 bp, Artificial Sequence
  Oligonucleotide for detection of SNP TSC0042678
gatataagaataa

SEQ ID NO: 171118 - DNA, 13 bp, Artificial Sequence
  Oligonucleotide for detection of SNP TSC0042678
ttattcttatatc

SEQ ID NO: 171119 - DNA, 13 bp, Artificial Sequence
  Oligonucleotide for detection of SNP TSC0042679
atattatgttgta

SEQ ID NO: 171120 - DNA, 13 bp, Artificial Sequence
  Oligonucleotide for detection of SNP TSC0042679
tacaacataatat

SEQ ID NO: 171121 - DNA, 13 bp, Artificial Sequence
  Oligonucleotide for detection of SNP TSC0042679
atattaggttgta

SEQ ID NO: 171122 - DNA, 13 bp, Artificial Sequence
  Oligonucleotide for detection of SNP TSC0042679
tacaacctaatat

SEQ ID NO: 171123 - DNA, 13 bp, Artificial Sequence
  Oligonucleotide for detection of SNP TSC0042679
atattatgtcgta

SEQ ID NO: 171124 - DNA, 13 bp, Artificial Sequence
  Oligonucleotide for detection of SNP TSC0042679
tacgacataatat

SEQ ID NO: 171125 - DNA, 13 bp, Artificial Sequence
  Oligonucleotide for detection of SNP TSC0042679
atattaggtcgta

SEQ ID NO: 171126 - DNA, 13 bp, Artificial Sequence
  Oligonucleotide for detection of SNP TSC0042679
tacgacctaatat

SEQ ID NO: 171127 - DNA, 13 bp, Artificial Sequence
  Oligonucleotide for detection of SNP TSC0042679
tatgatatagtgt

SEQ ID NO: 171128 - DNA, 13 bp, Artificial Sequence
  Oligonucleotide for detection of SNP TSC0042679
acactatatcata

SEQ ID NO: 171129 - DNA, 13 bp, Artificial Sequence
  Oligonucleotide for detection of SNP TSC0042679
tatgatttagtgt

SEQ ID NO: 171130 - DNA, 13 bp, Artificial Sequence
  Oligonucleotide for detection of SNP TSC0042679
acactaaatcata

SEQ ID NO: 171131 - DNA, 13 bp, Artificial Sequence
  Oligonucleotide for detection of SNP TSC0042679
tacgatatagtgt

SEQ ID NO: 171132 - DNA, 13 bp, Artificial Sequence
  Oligonucleotide for detection of SNP TSC0042679
acactatatcgta

SEQ ID NO: 171133 - DNA, 13 bp, Artificial Sequence
  Oligonucleotide for detection of SNP TSC0042679
tacgatttagtgt

SEQ ID NO: 171134 - DNA, 13 bp, Artificial Sequence
  Oligonucleotide for detection of SNP TSC0042679
acactaaatcgta

SEQ ID NO: 171135 - DNA, 13 bp, Artificial Sequence
  Oligonucleotide for detection of SNP TSC0042680
ggtaatatatagg

SEQ ID NO: 171136 - DNA, 13 bp, Artificial Sequence
  Oligonucleotide for detection of SNP TSC0042680
cctatatattacc

SEQ ID NO: 171137 - DNA, 13 bp, Artificial Sequence
  Oligonucleotide for detection of SNP TSC0042680
ggtaatgtatagg

SEQ ID NO: 171138 - DNA, 13 bp, Artificial Sequence
  Oligonucleotide for detection of SNP TSC0042680
cctatacattacc

SEQ ID NO: 171139 - DNA, 13 bp, Artificial Sequence
  Oligonucleotide for detection of SNP TSC0042680
ggtaacgtatagg

SEQ ID NO: 171140 - DNA, 13 bp, Artificial Sequence
  Oligonucleotide for detection of SNP TSC0042680
cctatacgttacc

SEQ ID NO: 171141 - DNA, 13 bp, Artificial Sequence
  Oligonucleotide for detection of SNP TSC0042680
tttgtatgttaty

SEQ ID NO: 171142 - DNA, 13 bp, Artificial Sequence
  Oligonucleotide for detection of SNP TSC0042680
rataacatacaaa

SEQ ID NO: 171143 - DNA, 13 bp, Artificial Sequence
  Oligonucleotide for detection of SNP TSC0042680
tttgtacgttaty

SEQ ID NO: 171144 - DNA, 13 bp, Artificial Sequence
  Oligonucleotide for detection of SNP TSC0042680
rataacgtacaaa

SEQ ID NO: 171145 - DNA, 13 bp, Artificial Sequence
  Oligonucleotide for detection of SNP TSC0042681
tttttttaaatay

SEQ ID NO: 171146 - DNA, 13 bp, Artificial Sequence
  Oligonucleotide for detection of SNP TSC0042681
rtatttaaaaaaa

SEQ ID NO: 171147 - DNA, 13 bp, Artificial Sequence
  Oligonucleotide for detection of SNP TSC0042681
gtgttttaaaaaa

SEQ ID NO: 171148 - DNA, 13 bp, Artificial Sequence
  Oligonucleotide for detection of SNP TSC0042681
ttttttaaaacac

SEQ ID NO: 171149 - DNA, 13 bp, Artificial Sequence
  Oligonucleotide for detection of SNP TSC0042681
gtgtttaaaaaaa

SEQ ID NO: 171150 - DNA, 13 bp, Artificial Sequence
  Oligonucleotide for detection of SNP TSC0042681
tttttttaaacac

SEQ ID NO: 171151 - DNA, 13 bp, Artificial Sequence
  Oligonucleotide for detection of SNP TSC0009084
tttaggaagagga

SEQ ID NO: 171152 - DNA, 13 bp, Artificial Sequence
  Oligonucleotide for detection of SNP TSC0009084
tcctcttcctaaa

SEQ ID NO: 171153 - DNA, 13 bp, Artificial Sequence
  Oligonucleotide for detection of SNP TSC0009084
tttaggtagagga

SEQ ID NO: 171154 - DNA, 13 bp, Artificial Sequence
  Oligonucleotide for detection of SNP TSC0009084
tcctctacctaaa

SEQ ID NO: 171155 - DNA, 13 bp, Artificial Sequence
  Oligonucleotide for detection of SNP TSC0042683
atgttatggtgag

SEQ ID NO: 171156 - DNA, 13 bp, Artificial Sequence
  Oligonucleotide for detection of SNP TSC0042683
ctcaccataacat

SEQ ID NO: 171157 - DNA, 13 bp, Artificial Sequence
  Oligonucleotide for detection of SNP TSC0042683
atgttacggtgag

SEQ ID NO: 171158 - DNA, 13 bp, Artificial Sequence
  Oligonucleotide for detection of SNP TSC0042683
ctcaccgtaacat

SEQ ID NO: 171159 - DNA, 13 bp, Artificial Sequence
  Oligonucleotide for detection of SNP TSC0010280
tgttattagatat

SEQ ID NO: 171160 - DNA, 13 bp, Artificial Sequence
  Oligonucleotide for detection of SNP TSC0010280
atatctaataaca

SEQ ID NO: 171161 - DNA, 13 bp, Artificial Sequence
  Oligonucleotide for detection of SNP TSC0010280
tgttatgagatat

SEQ ID NO: 171162 - DNA, 13 bp, Artificial Sequence
  Oligonucleotide for detection of SNP TSC0010280
atatctcataaca

SEQ ID NO: 171163 - DNA, 13 bp, Artificial Sequence
  Oligonucleotide for detection of SNP TSC0010280
tgttacgagatat

SEQ ID NO: 171164 - DNA, 13 bp, Artificial Sequence
  Oligonucleotide for detection of SNP TSC0010280
atatctcgtaaca

SEQ ID NO: 171165 - DNA, 13 bp, Artificial Sequence
  Oligonucleotide for detection of SNP TSC0010280
atgtttggtgata

SEQ ID NO: 171166 - DNA, 13 bp, Artificial Sequence
  Oligonucleotide for detection of SNP TSC0010280
tatcaccaaacat

SEQ ID NO: 171167 - DNA, 13 bp, Artificial Sequence
  Oligonucleotide for detection of SNP TSC0010280
atgttttgtgata

SEQ ID NO: 171168 - DNA, 13 bp, Artificial Sequence
  Oligonucleotide for detection of SNP TSC0010280
tatcacaaaacat

SEQ ID NO: 171169 - DNA, 13 bp, Artificial Sequence
  Oligonucleotide for detection of SNP TSC0010280
atgtttcgtgata

SEQ ID NO: 171170 - DNA, 13 bp, Artificial Sequence
  Oligonucleotide for detection of SNP TSC0010280
tatcacgaaacat

SEQ ID NO: 171171 - DNA, 13 bp, Artificial Sequence
  Oligonucleotide for detection of SNP TSC0010801
attaaatgtgagy

SEQ ID NO: 171172 - DNA, 13 bp, Artificial Sequence
  Oligonucleotide for detection of SNP TSC0010801
rctcacatttaat

SEQ ID NO: 171173 - DNA, 13 bp, Artificial Sequence
  Oligonucleotide for detection of SNP TSC0010801
attaaacgtgagy

SEQ ID NO: 171174 - DNA, 13 bp, Artificial Sequence
  Oligonucleotide for detection of SNP TSC0010801
rctcacgtttaat

SEQ ID NO: 171175 - DNA, 13 bp, Artificial Sequence
  Oligonucleotide for detection of SNP TSC0010801
attaaatgcgagy

SEQ ID NO: 171176 - DNA, 13 bp, Artificial Sequence
  Oligonucleotide for detection of SNP TSC0010801
rctcgcatttaat

SEQ ID NO: 171177 - DNA, 13 bp, Artificial Sequence
  Oligonucleotide for detection of SNP TSC0010801
attaaacgcgagy

SEQ ID NO: 171178 - DNA, 13 bp, Artificial Sequence
  Oligonucleotide for detection of SNP TSC0010801
rctcgcgtttaat

SEQ ID NO: 171179 - DNA, 13 bp, Artificial Sequence
  Oligonucleotide for detection of SNP TSC0010801
gtttgtgtttagt

SEQ ID NO: 171180 - DNA, 13 bp, Artificial Sequence
  Oligonucleotide for detection of SNP TSC0010801
actaaacacaaac

SEQ ID NO: 171181 - DNA, 13 bp, Artificial Sequence
  Oligonucleotide for detection of SNP TSC0010801
gtttgtatttagt

SEQ ID NO: 171182 - DNA, 13 bp, Artificial Sequence
  Oligonucleotide for detection of SNP TSC0010801
actaaatacaaac

SEQ ID NO: 171183 - DNA, 13 bp, Artificial Sequence
  Oligonucleotide for detection of SNP TSC0010801
gttcgtgtttagt

SEQ ID NO: 171184 - DNA, 13 bp, Artificial Sequence
  Oligonucleotide for detection of SNP TSC0010801
actaaacacgaac

SEQ ID NO: 171185 - DNA, 13 bp, Artificial Sequence
  Oligonucleotide for detection of SNP TSC0010801
gttcgtatttagt

SEQ ID NO: 171186 - DNA, 13 bp, Artificial Sequence
  Oligonucleotide for detection of SNP TSC0010801
actaaatacgaac

SEQ ID NO: 171187 - DNA, 13 bp, Artificial Sequence
  Oligonucleotide for detection of SNP TSC0010801
gtttgcgtttagt

SEQ ID NO: 171188 - DNA, 13 bp, Artificial Sequence
  Oligonucleotide for detection of SNP TSC0010801
actaaacgcaaac

SEQ ID NO: 171189 - DNA, 13 bp, Artificial Sequence
  Oligonucleotide for detection of SNP TSC0010801
gttcgcgtttagt

SEQ ID NO: 171190 - DNA, 13 bp, Artificial Sequence
  Oligonucleotide for detection of SNP TSC0010801
actaaacgcgaac

SEQ ID NO: 171191 - DNA, 13 bp, Artificial Sequence
  Oligonucleotide for detection of SNP TSC0042687
aaattatttaaty

SEQ ID NO: 171192 - DNA, 13 bp, Artificial Sequence
  Oligonucleotide for detection of SNP TSC0042687
rattaaataattt

SEQ ID NO: 171193 - DNA, 13 bp, Artificial Sequence
  Oligonucleotide for detection of SNP TSC0042687
aaattagttaaty

SEQ ID NO: 171194 - DNA, 13 bp, Artificial Sequence
  Oligonucleotide for detection of SNP TSC0042687
rattaactaattt

SEQ ID NO: 171195 - DNA, 13 bp, Artificial Sequence
  Oligonucleotide for detection of SNP TSC0042687
gattgggtaattt

SEQ ID NO: 171196 - DNA, 13 bp, Artificial Sequence
  Oligonucleotide for detection of SNP TSC0042687
aaattacccaatc

SEQ ID NO: 171197 - DNA, 13 bp, Artificial Sequence
  Oligonucleotide for detection of SNP TSC0042687
gattggttaattt

SEQ ID NO: 171198 - DNA, 13 bp, Artificial Sequence
  Oligonucleotide for detection of SNP TSC0042687
aaattaaccaatc

SEQ ID NO: 171199 - DNA, 13 bp, Artificial Sequence
  Oligonucleotide for detection of SNP TSC0042689
tttttaaaaatta

SEQ ID NO: 171200 - DNA, 13 bp, Artificial Sequence
  Oligonucleotide for detection of SNP TSC0042689
taatttttaaaaa

SEQ ID NO: 171201 - DNA, 13 bp, Artificial Sequence
  Oligonucleotide for detection of SNP TSC0042690
tttatgatggttt

SEQ ID NO: 171202 - DNA, 13 bp, Artificial Sequence
  Oligonucleotide for detection of SNP TSC0042690
aaaccatcataaa

SEQ ID NO: 171203 - DNA, 13 bp, Artificial Sequence
  Oligonucleotide for detection of SNP TSC0042690
tttatgttggttt

SEQ ID NO: 171204 - DNA, 13 bp, Artificial Sequence
  Oligonucleotide for detection of SNP TSC0042690
aaaccaacataaa

SEQ ID NO: 171205 - DNA, 13 bp, Artificial Sequence
  Oligonucleotide for detection of SNP TSC0042690
aggttattatgag

SEQ ID NO: 171206 - DNA, 13 bp, Artificial Sequence
  Oligonucleotide for detection of SNP TSC0042690
ctcataataacct

SEQ ID NO: 171207 - DNA, 13 bp, Artificial Sequence
  Oligonucleotide for detection of SNP TSC0042690
aggttaatatgag

SEQ ID NO: 171208 - DNA, 13 bp, Artificial Sequence
  Oligonucleotide for detection of SNP TSC0042690
ctcatattaacct

SEQ ID NO: 171209 - DNA, 13 bp, Artificial Sequence
  Oligonucleotide for detection of SNP TSC0042691
ttggtagattttt

SEQ ID NO: 171210 - DNA, 13 bp, Artificial Sequence
  Oligonucleotide for detection of SNP TSC0042691
aaaaatctaccaa

SEQ ID NO: 171211 - DNA, 13 bp, Artificial Sequence
  Oligonucleotide for detection of SNP TSC0042691
ttggtaaattttt

SEQ ID NO: 171212 - DNA, 13 bp, Artificial Sequence
  Oligonucleotide for detection of SNP TSC0042691
aaaaatttaccaa

SEQ ID NO: 171213 - DNA, 13 bp, Artificial Sequence
  Oligonucleotide for detection of SNP TSC0042692
atataaggttgtt

SEQ ID NO: 171214 - DNA, 13 bp, Artificial Sequence
  Oligonucleotide for detection of SNP TSC0042692
aacaaccttatat

SEQ ID NO: 171215 - DNA, 13 bp, Artificial Sequence
  Oligonucleotide for detection of SNP TSC0042692
atataaagttgtt

SEQ ID NO: 171216 - DNA, 13 bp, Artificial Sequence
  Oligonucleotide for detection of SNP TSC0042692
aacaactttatat

SEQ ID NO: 171217 - DNA, 13 bp, Artificial Sequence
  Oligonucleotide for detection of SNP TSC0008740
taagttatgttgt

SEQ ID NO: 171218 - DNA, 13 bp, Artificial Sequence
  Oligonucleotide for detection of SNP TSC0008740
acaacataactta

SEQ ID NO: 171219 - DNA, 13 bp, Artificial Sequence
  Oligonucleotide for detection of SNP TSC0008740
taagttttgttgt

SEQ ID NO: 171220 - DNA, 13 bp, Artificial Sequence
  Oligonucleotide for detection of SNP TSC0008740
acaacaaaactta

SEQ ID NO: 171221 - DNA, 13 bp, Artificial Sequence
  Oligonucleotide for detection of SNP TSC0008740
ataatataatttg

SEQ ID NO: 171222 - DNA, 13 bp, Artificial Sequence
  Oligonucleotide for detection of SNP TSC0008740
caaattatattat

SEQ ID NO: 171223 - DNA, 13 bp, Artificial Sequence
  Oligonucleotide for detection of SNP TSC0006645
gaatttatgggga

SEQ ID NO: 171224 - DNA, 13 bp, Artificial Sequence
  Oligonucleotide for detection of SNP TSC0006645
tccccataaattc

SEQ ID NO: 171225 - DNA, 13 bp, Artificial Sequence
  Oligonucleotide for detection of SNP TSC0006645
gaatttttgggga

SEQ ID NO: 171226 - DNA, 13 bp, Artificial Sequence
  Oligonucleotide for detection of SNP TSC0006645
tccccaaaaattc

SEQ ID NO: 171227 - DNA, 13 bp, Artificial Sequence
  Oligonucleotide for detection of SNP TSC0006645
tttttagagatty

SEQ ID NO: 171228 - DNA, 13 bp, Artificial Sequence
  Oligonucleotide for detection of SNP TSC0006645
raatctctaaaaa

SEQ ID NO: 171229 - DNA, 13 bp, Artificial Sequence
  Oligonucleotide for detection of SNP TSC0006646
attggtaagggtt

SEQ ID NO: 171230 - DNA, 13 bp, Artificial Sequence
  Oligonucleotide for detection of SNP TSC0006646
aacccttaccaat

SEQ ID NO: 171231 - DNA, 13 bp, Artificial Sequence
  Oligonucleotide for detection of SNP TSC0006646
attggttagggtt

SEQ ID NO: 171232 - DNA, 13 bp, Artificial Sequence
  Oligonucleotide for detection of SNP TSC0006646
aaccctaaccaat

SEQ ID NO: 171233 - DNA, 13 bp, Artificial Sequence
  Oligonucleotide for detection of SNP TSC0006646
agtttttgttagt

SEQ ID NO: 171234 - DNA, 13 bp, Artificial Sequence
  Oligonucleotide for detection of SNP TSC0006646
actaacaaaaact

SEQ ID NO: 171235 - DNA, 13 bp, Artificial Sequence
  Oligonucleotide for detection of SNP TSC0006646
agttttggttagt

SEQ ID NO: 171236 - DNA, 13 bp, Artificial Sequence
  Oligonucleotide for detection of SNP TSC0006646
actaaccaaaact

SEQ ID NO: 171237 - DNA, 13 bp, Artificial Sequence
  Oligonucleotide for detection of SNP TSC0042695
aaggttatattta

SEQ ID NO: 171238 - DNA, 13 bp, Artificial Sequence
  Oligonucleotide for detection of SNP TSC0042695
taaatataacctt

SEQ ID NO: 171239 - DNA, 13 bp, Artificial Sequence
  Oligonucleotide for detection of SNP TSC0042695
aaggttgtattta

SEQ ID NO: 171240 - DNA, 13 bp, Artificial Sequence
  Oligonucleotide for detection of SNP TSC0042695
taaatacaacctt

SEQ ID NO: 171241 - DNA, 13 bp, Artificial Sequence
  Oligonucleotide for detection of SNP TSC0042695
aaggtcgtattta

SEQ ID NO: 171242 - DNA, 13 bp, Artificial Sequence
  Oligonucleotide for detection of SNP TSC0042695
taaatacgacctt

SEQ ID NO: 171243 - DNA, 13 bp, Artificial Sequence
  Oligonucleotide for detection of SNP TSC0042695
tgaatgtggtttt

SEQ ID NO: 171244 - DNA, 13 bp, Artificial Sequence
  Oligonucleotide for detection of SNP TSC0042695
aaaaccacattca

SEQ ID NO: 171245 - DNA, 13 bp, Artificial Sequence
  Oligonucleotide for detection of SNP TSC0042695
tgaatgcggtttt

SEQ ID NO: 171246 - DNA, 13 bp, Artificial Sequence
  Oligonucleotide for detection of SNP TSC0042695
aaaaccgcattca

SEQ ID NO: 171247 - DNA, 13 bp, Artificial Sequence
  Oligonucleotide for detection of SNP TSC0042696
ttatttgtgtaty

SEQ ID NO: 171248 - DNA, 13 bp, Artificial Sequence
  Oligonucleotide for detection of SNP TSC0042696
ratacacaaataa

SEQ ID NO: 171249 - DNA, 13 bp, Artificial Sequence
  Oligonucleotide for detection of SNP TSC0042698
gggagatagttgg

SEQ ID NO: 171250 - DNA, 13 bp, Artificial Sequence
  Oligonucleotide for detection of SNP TSC0042698
ccaactatctccc

SEQ ID NO: 171251 - DNA, 13 bp, Artificial Sequence
  Oligonucleotide for detection of SNP TSC0042698
gggagagagttgg

SEQ ID NO: 171252 - DNA, 13 bp, Artificial Sequence
  Oligonucleotide for detection of SNP TSC0042698
ccaactctctccc

SEQ ID NO: 171253 - DNA, 13 bp, Artificial Sequence
  Oligonucleotide for detection of SNP TSC0008856
aaatgtgtaagtg

SEQ ID NO: 171254 - DNA, 13 bp, Artificial Sequence
  Oligonucleotide for detection of SNP TSC0008856
cacttacacattt

SEQ ID NO: 171255 - DNA, 13 bp, Artificial Sequence
  Oligonucleotide for detection of SNP TSC0008856
aaatgtataagtg

SEQ ID NO: 171256 - DNA, 13 bp, Artificial Sequence
  Oligonucleotide for detection of SNP TSC0008856
cacttatacattt

SEQ ID NO: 171257 - DNA, 13 bp, Artificial Sequence
  Oligonucleotide for detection of SNP TSC0042699
taatgtatgaagy

SEQ ID NO: 171258 - DNA, 13 bp, Artificial Sequence
  Oligonucleotide for detection of SNP TSC0042699
rcttcatacatta

SEQ ID NO: 171259 - DNA, 13 bp, Artificial Sequence
  Oligonucleotide for detection of SNP TSC0042699
taatgtgtgaagy

SEQ ID NO: 171260 - DNA, 13 bp, Artificial Sequence
  Oligonucleotide for detection of SNP TSC0042699
rcttcacacatta

SEQ ID NO: 171261 - DNA, 13 bp, Artificial Sequence
  Oligonucleotide for detection of SNP TSC0042699
taatgcgtgaagy

SEQ ID NO: 171262 - DNA, 13 bp, Artificial Sequence
  Oligonucleotide for detection of SNP TSC0042699
rcttcacgcatta

SEQ ID NO: 171263 - DNA, 13 bp, Artificial Sequence
  Oligonucleotide for detection of SNP TSC0042699
gttttatgtatta

SEQ ID NO: 171264 - DNA, 13 bp, Artificial Sequence
  Oligonucleotide for detection of SNP TSC0042699
taatacataaaac

SEQ ID NO: 171265 - DNA, 13 bp, Artificial Sequence
  Oligonucleotide for detection of SNP TSC0042699
gttttacgtatta

SEQ ID NO: 171266 - DNA, 13 bp, Artificial Sequence
  Oligonucleotide for detection of SNP TSC0042699
taatacgtaaaac

SEQ ID NO: 171267 - DNA, 13 bp, Artificial Sequence
  Oligonucleotide for detection of SNP TSC0042701
tagtgggattagg

SEQ ID NO: 171268 - DNA, 13 bp, Artificial Sequence
  Oligonucleotide for detection of SNP TSC0042701
cctaatcccacta

SEQ ID NO: 171269 - DNA, 13 bp, Artificial Sequence
  Oligonucleotide for detection of SNP TSC0042701
tagtggaattagg

SEQ ID NO: 171270 - DNA, 13 bp, Artificial Sequence
  Oligonucleotide for detection of SNP TSC0042701
cctaattccacta

SEQ ID NO: 171271 - DNA, 13 bp, Artificial Sequence
  Oligonucleotide for detection of SNP TSC0042707
ggatgatggaaga

SEQ ID NO: 171272 - DNA, 13 bp, Artificial Sequence
  Oligonucleotide for detection of SNP TSC0042707
tcttccatcatcc

SEQ ID NO: 171273 - DNA, 13 bp, Artificial Sequence
  Oligonucleotide for detection of SNP TSC0042707
ggatgacggaaga

SEQ ID NO: 171274 - DNA, 13 bp, Artificial Sequence
  Oligonucleotide for detection of SNP TSC0042707
tcttccgtcatcc

SEQ ID NO: 171275 - DNA, 13 bp, Artificial Sequence
  Oligonucleotide for detection of SNP TSC0042708
gttttatggtggg

SEQ ID NO: 171276 - DNA, 13 bp, Artificial Sequence
  Oligonucleotide for detection of SNP TSC0042708
cccaccataaaac

SEQ ID NO: 171277 - DNA, 13 bp, Artificial Sequence
  Oligonucleotide for detection of SNP TSC0042708
gttttacggtggg

SEQ ID NO: 171278 - DNA, 13 bp, Artificial Sequence
  Oligonucleotide for detection of SNP TSC0042708
cccaccgtaaaac

SEQ ID NO: 171279 - DNA, 13 bp, Artificial Sequence
  Oligonucleotide for detection of SNP TSC0042708
gttttatggcggg

SEQ ID NO: 171280 - DNA, 13 bp, Artificial Sequence
  Oligonucleotide for detection of SNP TSC0042708
cccgccataaaac

SEQ ID NO: 171281 - DNA, 13 bp, Artificial Sequence
  Oligonucleotide for detection of SNP TSC0042708
gttttacggcggg

SEQ ID NO: 171282 - DNA, 13 bp, Artificial Sequence
  Oligonucleotide for detection of SNP TSC0042708
cccgccgtaaaac

SEQ ID NO: 171283 - DNA, 13 bp, Artificial Sequence
  Oligonucleotide for detection of SNP TSC0042708
tttgttgtggaay

SEQ ID NO: 171284 - DNA, 13 bp, Artificial Sequence
  Oligonucleotide for detection of SNP TSC0042708
rttccacaacaaa

SEQ ID NO: 171285 - DNA, 13 bp, Artificial Sequence
  Oligonucleotide for detection of SNP TSC0042708
tttgttatggaay

SEQ ID NO: 171286 - DNA, 13 bp, Artificial Sequence
  Oligonucleotide for detection of SNP TSC0042708
rttccataacaaa

SEQ ID NO: 171287 - DNA, 13 bp, Artificial Sequence
  Oligonucleotide for detection of SNP TSC0042708
ttcgttgtggaay

SEQ ID NO: 171288 - DNA, 13 bp, Artificial Sequence
  Oligonucleotide for detection of SNP TSC0042708
rttccacaacgaa

SEQ ID NO: 171289 - DNA, 13 bp, Artificial Sequence
  Oligonucleotide for detection of SNP TSC0042708
ttcgttatggaay

SEQ ID NO: 171290 - DNA, 13 bp, Artificial Sequence
  Oligonucleotide for detection of SNP TSC0042708
rttccataacgaa

SEQ ID NO: 171291 - DNA, 13 bp, Artificial Sequence
  Oligonucleotide for detection of SNP TSC0042708
tttgtcgtggaay

SEQ ID NO: 171292 - DNA, 13 bp, Artificial Sequence
  Oligonucleotide for detection of SNP TSC0042708
rttccacgacaaa

SEQ ID NO: 171293 - DNA, 13 bp, Artificial Sequence
  Oligonucleotide for detection of SNP TSC0042708
ttcgtcgtggaay

SEQ ID NO: 171294 - DNA, 13 bp, Artificial Sequence
  Oligonucleotide for detection of SNP TSC0042708
rttccacgacgaa

SEQ ID NO: 171295 - DNA, 13 bp, Artificial Sequence
  Oligonucleotide for detection of SNP TSC0042709
ttattgagtgttt

SEQ ID NO: 171296 - DNA, 13 bp, Artificial Sequence
  Oligonucleotide for detection of SNP TSC0042709
aaacactcaataa

SEQ ID NO: 171297 - DNA, 13 bp, Artificial Sequence
  Oligonucleotide for detection of SNP TSC0042709
ttattgtgtgttt

SEQ ID NO: 171298 - DNA, 13 bp, Artificial Sequence
  Oligonucleotide for detection of SNP TSC0042709
aaacacacaataa

SEQ ID NO: 171299 - DNA, 13 bp, Artificial Sequence
  Oligonucleotide for detection of SNP TSC0042709
agatatttagtaa

SEQ ID NO: 171300 - DNA, 13 bp, Artificial Sequence
  Oligonucleotide for detection of SNP TSC0042709
ttactaaatatct

SEQ ID NO: 171301 - DNA, 13 bp, Artificial Sequence
  Oligonucleotide for detection of SNP TSC0042709
agatatatagtaa

SEQ ID NO: 171302 - DNA, 13 bp, Artificial Sequence
  Oligonucleotide for detection of SNP TSC0042709
ttactatatatct

SEQ ID NO: 171303 - DNA, 13 bp, Artificial Sequence
  Oligonucleotide for detection of SNP TSC0005025
aaagattgatgtg

SEQ ID NO: 171304 - DNA, 13 bp, Artificial Sequence
  Oligonucleotide for detection of SNP TSC0005025
cacatcaatcttt

SEQ ID NO: 171305 - DNA, 13 bp, Artificial Sequence
  Oligonucleotide for detection of SNP TSC0005025
aaagatggatgtg

SEQ ID NO: 171306 - DNA, 13 bp, Artificial Sequence
  Oligonucleotide for detection of SNP TSC0005025
cacatccatcttt

SEQ ID NO: 171307 - DNA, 13 bp, Artificial Sequence
  Oligonucleotide for detection of SNP TSC0005025
aaagatcgatgtg

SEQ ID NO: 171308 - DNA, 13 bp, Artificial Sequence
  Oligonucleotide for detection of SNP TSC0005025
cacatcgatcttt

SEQ ID NO: 171309 - DNA, 13 bp, Artificial Sequence
  Oligonucleotide for detection of SNP TSC0005025
tatattgattttt

SEQ ID NO: 171310 - DNA, 13 bp, Artificial Sequence
  Oligonucleotide for detection of SNP TSC0005025
aaaaatcaatata

SEQ ID NO: 171311 - DNA, 13 bp, Artificial Sequence
  Oligonucleotide for detection of SNP TSC0005025
tatatcgattttt

SEQ ID NO: 171312 - DNA, 13 bp, Artificial Sequence
  Oligonucleotide for detection of SNP TSC0005025
aaaaatcgatata

SEQ ID NO: 171313 - DNA, 13 bp, Artificial Sequence
  Oligonucleotide for detection of SNP TSC0005026
tattttgtcgtty

SEQ ID NO: 171314 - DNA, 13 bp, Artificial Sequence
  Oligonucleotide for detection of SNP TSC0005026
raacgacaaaata

SEQ ID NO: 171315 - DNA, 13 bp, Artificial Sequence
  Oligonucleotide for detection of SNP TSC0005026
tattttatcgtty

SEQ ID NO: 171316 - DNA, 13 bp, Artificial Sequence
  Oligonucleotide for detection of SNP TSC0005026
raacgataaaata

SEQ ID NO: 171317 - DNA, 13 bp, Artificial Sequence
  Oligonucleotide for detection of SNP TSC0005027
agattaatttgay

SEQ ID NO: 171318 - DNA, 13 bp, Artificial Sequence
  Oligonucleotide for detection of SNP TSC0005027
rtcaaattaatct

SEQ ID NO: 171319 - DNA, 13 bp, Artificial Sequence
  Oligonucleotide for detection of SNP TSC0005027
agattagtttgay

SEQ ID NO: 171320 - DNA, 13 bp, Artificial Sequence
  Oligonucleotide for detection of SNP TSC0005027
rtcaaactaatct

SEQ ID NO: 171321 - DNA, 13 bp, Artificial Sequence
  Oligonucleotide for detection of SNP TSC0042710
aggttgtttttga

SEQ ID NO: 171322 - DNA, 13 bp, Artificial Sequence
  Oligonucleotide for detection of SNP TSC0042710
tcaaaaacaacct

SEQ ID NO: 171323 - DNA, 13 bp, Artificial Sequence
  Oligonucleotide for detection of SNP TSC0042710
aggttgttttcga

SEQ ID NO: 171324 - DNA, 13 bp, Artificial Sequence
  Oligonucleotide for detection of SNP TSC0042710
tcgaaaacaacct

SEQ ID NO: 171325 - DNA, 13 bp, Artificial Sequence
  Oligonucleotide for detection of SNP TSC0042710
aggttggtttcga

SEQ ID NO: 171326 - DNA, 13 bp, Artificial Sequence
  Oligonucleotide for detection of SNP TSC0042710
tcgaaaccaacct

SEQ ID NO: 171327 - DNA, 13 bp, Artificial Sequence
  Oligonucleotide for detection of SNP TSC0042710
ttgagagtagttt

SEQ ID NO: 171328 - DNA, 13 bp, Artificial Sequence
  Oligonucleotide for detection of SNP TSC0042710
aaactactctcaa

SEQ ID NO: 171329 - DNA, 13 bp, Artificial Sequence
  Oligonucleotide for detection of SNP TSC0042710
ttgagattagttt

SEQ ID NO: 171330 - DNA, 13 bp, Artificial Sequence
  Oligonucleotide for detection of SNP TSC0042710
aaactaatctcaa

SEQ ID NO: 171331 - DNA, 13 bp, Artificial Sequence
  Oligonucleotide for detection of SNP TSC0042710
tcgagagtagttt

SEQ ID NO: 171332 - DNA, 13 bp, Artificial Sequence
  Oligonucleotide for detection of SNP TSC0042710
aaactactctcga

SEQ ID NO: 171333 - DNA, 13 bp, Artificial Sequence
  Oligonucleotide for detection of SNP TSC0042710
tcgagattagttt

SEQ ID NO: 171334 - DNA, 13 bp, Artificial Sequence
  Oligonucleotide for detection of SNP TSC0042710
aaactaatctcga

SEQ ID NO: 171335 - DNA, 13 bp, Artificial Sequence
  Oligonucleotide for detection of SNP TSC0042711
ttaaggttagtta

SEQ ID NO: 171336 - DNA, 13 bp, Artificial Sequence
  Oligonucleotide for detection of SNP TSC0042711
taactaaccttaa

SEQ ID NO: 171337 - DNA, 13 bp, Artificial Sequence
  Oligonucleotide for detection of SNP TSC0042711
ttaagggtagtta

SEQ ID NO: 171338 - DNA, 13 bp, Artificial Sequence
  Oligonucleotide for detection of SNP TSC0042711
taactacccttaa

SEQ ID NO: 171339 - DNA, 13 bp, Artificial Sequence
  Oligonucleotide for detection of SNP TSC0042711
tggttggttttaa

SEQ ID NO: 171340 - DNA, 13 bp, Artificial Sequence
  Oligonucleotide for detection of SNP TSC0042711
ttaaaaccaacca

SEQ ID NO: 171341 - DNA, 13 bp, Artificial Sequence
  Oligonucleotide for detection of SNP TSC0042711
tggttgtttttaa

SEQ ID NO: 171342 - DNA, 13 bp, Artificial Sequence
  Oligonucleotide for detection of SNP TSC0042711
ttaaaaacaacca

SEQ ID NO: 171343 - DNA, 13 bp, Artificial Sequence
  Oligonucleotide for detection of SNP TSC0042717
gaatagagtttag

SEQ ID NO: 171344 - DNA, 13 bp, Artificial Sequence
  Oligonucleotide for detection of SNP TSC0042717
ctaaactctattc

SEQ ID NO: 171345 - DNA, 13 bp, Artificial Sequence
  Oligonucleotide for detection of SNP TSC0042717
gaatagtgtttag

SEQ ID NO: 171346 - DNA, 13 bp, Artificial Sequence
  Oligonucleotide for detection of SNP TSC0042717
ctaaacactattc

SEQ ID NO: 171347 - DNA, 13 bp, Artificial Sequence
  Oligonucleotide for detection of SNP TSC0042717
gaatagcgtttag

SEQ ID NO: 171348 - DNA, 13 bp, Artificial Sequence
  Oligonucleotide for detection of SNP TSC0042717
ctaaacgctattc

SEQ ID NO: 171349 - DNA, 13 bp, Artificial Sequence
  Oligonucleotide for detection of SNP TSC0042717
ttaaattttatty

SEQ ID NO: 171350 - DNA, 13 bp, Artificial Sequence
  Oligonucleotide for detection of SNP TSC0042717
raataaaatttaa

SEQ ID NO: 171351 - DNA, 13 bp, Artificial Sequence
  Oligonucleotide for detection of SNP TSC0042717
ttaaatgttatty

SEQ ID NO: 171352 - DNA, 13 bp, Artificial Sequence
  Oligonucleotide for detection of SNP TSC0042717
raataacatttaa

SEQ ID NO: 171353 - DNA, 13 bp, Artificial Sequence
  Oligonucleotide for detection of SNP TSC0042717
ttaaacgttatty

SEQ ID NO: 171354 - DNA, 13 bp, Artificial Sequence
  Oligonucleotide for detection of SNP TSC0042717
raataacgtttaa

SEQ ID NO: 171355 - DNA, 13 bp, Artificial Sequence
  Oligonucleotide for detection of SNP TSC0042718
gttgatatttaty

SEQ ID NO: 171356 - DNA, 13 bp, Artificial Sequence
  Oligonucleotide for detection of SNP TSC0042718
rataaatatcaac

SEQ ID NO: 171357 - DNA, 13 bp, Artificial Sequence
  Oligonucleotide for detection of SNP TSC0042718
gttgatgtttaty

SEQ ID NO: 171358 - DNA, 13 bp, Artificial Sequence
  Oligonucleotide for detection of SNP TSC0042718
rataaacatcaac

SEQ ID NO: 171359 - DNA, 13 bp, Artificial Sequence
  Oligonucleotide for detection of SNP TSC0042718
gttgacgtttaty

SEQ ID NO: 171360 - DNA, 13 bp, Artificial Sequence
  Oligonucleotide for detection of SNP TSC0042718
rataaacgtcaac

SEQ ID NO: 171361 - DNA, 13 bp, Artificial Sequence
  Oligonucleotide for detection of SNP TSC0042718
gatggatgttaay

SEQ ID NO: 171362 - DNA, 13 bp, Artificial Sequence
  Oligonucleotide for detection of SNP TSC0042718
rttaacatccatc

SEQ ID NO: 171363 - DNA, 13 bp, Artificial Sequence
  Oligonucleotide for detection of SNP TSC0042718
gatggacgttaay

SEQ ID NO: 171364 - DNA, 13 bp, Artificial Sequence
  Oligonucleotide for detection of SNP TSC0042718
rttaacgtccatc

SEQ ID NO: 171365 - DNA, 13 bp, Artificial Sequence
  Oligonucleotide for detection of SNP TSC0042719
tttaaaaatttat

SEQ ID NO: 171366 - DNA, 13 bp, Artificial Sequence
  Oligonucleotide for detection of SNP TSC0042719
ataaatttttaaa

SEQ ID NO: 171367 - DNA, 13 bp, Artificial Sequence
  Oligonucleotide for detection of SNP TSC0042719
ataggtttttgaa

SEQ ID NO: 171368 - DNA, 13 bp, Artificial Sequence
  Oligonucleotide for detection of SNP TSC0042719
ttcaaaaacctat

SEQ ID NO: 171369 - DNA, 13 bp, Artificial Sequence
  Oligonucleotide for detection of SNP TSC0042719
ataggtgtttgaa

SEQ ID NO: 171370 - DNA, 13 bp, Artificial Sequence
  Oligonucleotide for detection of SNP TSC0042719
ttcaaacacctat

SEQ ID NO: 171371 - DNA, 13 bp, Artificial Sequence
  Oligonucleotide for detection of SNP TSC0042720
gagtatttaatag

SEQ ID NO: 171372 - DNA, 13 bp, Artificial Sequence
  Oligonucleotide for detection of SNP TSC0042720
ctattaaatactc

SEQ ID NO: 171373 - DNA, 13 bp, Artificial Sequence
  Oligonucleotide for detection of SNP TSC0042720
gagtatgtaatag

SEQ ID NO: 171374 - DNA, 13 bp, Artificial Sequence
  Oligonucleotide for detection of SNP TSC0042720
ctattacatactc

SEQ ID NO: 171375 - DNA, 13 bp, Artificial Sequence
  Oligonucleotide for detection of SNP TSC0042720
gagtacgtaatag

SEQ ID NO: 171376 - DNA, 13 bp, Artificial Sequence
  Oligonucleotide for detection of SNP TSC0042720
ctattacgtactc

SEQ ID NO: 171377 - DNA, 13 bp, Artificial Sequence
  Oligonucleotide for detection of SNP TSC0042720
ttgttaggtgtty

SEQ ID NO: 171378 - DNA, 13 bp, Artificial Sequence
  Oligonucleotide for detection of SNP TSC0042720
raacacctaacaa

SEQ ID NO: 171379 - DNA, 13 bp, Artificial Sequence
  Oligonucleotide for detection of SNP TSC0042721
tttttttgaagtt

SEQ ID NO: 171380 - DNA, 13 bp, Artificial Sequence
  Oligonucleotide for detection of SNP TSC0042721
aacttcaaaaaaa

SEQ ID NO: 171381 - DNA, 13 bp, Artificial Sequence
  Oligonucleotide for detection of SNP TSC0042721
aatttttaaaaaa

SEQ ID NO: 171382 - DNA, 13 bp, Artificial Sequence
  Oligonucleotide for detection of SNP TSC0042721
ttttttaaaaatt

SEQ ID NO: 171383 - DNA, 13 bp, Artificial Sequence
  Oligonucleotide for detection of SNP TSC0042721
aattttaaaaaaa

SEQ ID NO: 171384 - DNA, 13 bp, Artificial Sequence
  Oligonucleotide for detection of SNP TSC0042721
tttttttaaaatt

SEQ ID NO: 171385 - DNA, 13 bp, Artificial Sequence
  Oligonucleotide for detection of SNP TSC0005871
aataaatttttgt

SEQ ID NO: 171386 - DNA, 13 bp, Artificial Sequence
  Oligonucleotide for detection of SNP TSC0005871
acaaaaatttatt

SEQ ID NO: 171387 - DNA, 13 bp, Artificial Sequence
  Oligonucleotide for detection of SNP TSC0005871
aataaagttttgt

SEQ ID NO: 171388 - DNA, 13 bp, Artificial Sequence
  Oligonucleotide for detection of SNP TSC0005871
acaaaactttatt

SEQ ID NO: 171389 - DNA, 13 bp, Artificial Sequence
  Oligonucleotide for detection of SNP TSC0005871
ataaagatttatt

SEQ ID NO: 171390 - DNA, 13 bp, Artificial Sequence
  Oligonucleotide for detection of SNP TSC0005871
aataaatctttat

SEQ ID NO: 171391 - DNA, 13 bp, Artificial Sequence
  Oligonucleotide for detection of SNP TSC0005871
ataaagttttatt

SEQ ID NO: 171392 - DNA, 13 bp, Artificial Sequence
  Oligonucleotide for detection of SNP TSC0005871
aataaaactttat

SEQ ID NO: 171393 - DNA, 13 bp, Artificial Sequence
  Oligonucleotide for detection of SNP TSC0005872
tggggtgtagtgg

SEQ ID NO: 171394 - DNA, 13 bp, Artificial Sequence
  Oligonucleotide for detection of SNP TSC0005872
ccactacacccca

SEQ ID NO: 171395 - DNA, 13 bp, Artificial Sequence
  Oligonucleotide for detection of SNP TSC0005872
tggggtatagtgg

SEQ ID NO: 171396 - DNA, 13 bp, Artificial Sequence
  Oligonucleotide for detection of SNP TSC0005872
ccactatacccca

SEQ ID NO: 171397 - DNA, 13 bp, Artificial Sequence
  Oligonucleotide for detection of SNP TSC0005872
tggggcgtagtgg

SEQ ID NO: 171398 - DNA, 13 bp, Artificial Sequence
  Oligonucleotide for detection of SNP TSC0005872
ccactacgcccca

SEQ ID NO: 171399 - DNA, 13 bp, Artificial Sequence
  Oligonucleotide for detection of SNP TSC0042724
tattagggttaty

SEQ ID NO: 171400 - DNA, 13 bp, Artificial Sequence
  Oligonucleotide for detection of SNP TSC0042724
rataaccctaata

SEQ ID NO: 171401 - DNA, 13 bp, Artificial Sequence
  Oligonucleotide for detection of SNP TSC0042724
tattagagttaty

SEQ ID NO: 171402 - DNA, 13 bp, Artificial Sequence
  Oligonucleotide for detection of SNP TSC0042724
rataactctaata

SEQ ID NO: 171403 - DNA, 13 bp, Artificial Sequence
  Oligonucleotide for detection of SNP TSC0042725
tgtaaaagaggta

SEQ ID NO: 171404 - DNA, 13 bp, Artificial Sequence
  Oligonucleotide for detection of SNP TSC0042725
tacctcttttaca

SEQ ID NO: 171405 - DNA, 13 bp, Artificial Sequence
  Oligonucleotide for detection of SNP TSC0042725
tgtaaaggaggta

SEQ ID NO: 171406 - DNA, 13 bp, Artificial Sequence
  Oligonucleotide for detection of SNP TSC0042725
tacctcctttaca

SEQ ID NO: 171407 - DNA, 13 bp, Artificial Sequence
  Oligonucleotide for detection of SNP TSC0042726
aaaaatgttttaa

SEQ ID NO: 171408 - DNA, 13 bp, Artificial Sequence
  Oligonucleotide for detection of SNP TSC0042726
ttaaaacattttt

SEQ ID NO: 171409 - DNA, 13 bp, Artificial Sequence
  Oligonucleotide for detection of SNP TSC0042726
aaaaatattttaa

SEQ ID NO: 171410 - DNA, 13 bp, Artificial Sequence
  Oligonucleotide for detection of SNP TSC0042726
ttaaaatattttt

SEQ ID NO: 171411 - DNA, 13 bp, Artificial Sequence
  Oligonucleotide for detection of SNP TSC0042727
tttttcgtaagty

SEQ ID NO: 171412 - DNA, 13 bp, Artificial Sequence
  Oligonucleotide for detection of SNP TSC0042727
racttacgaaaaa

SEQ ID NO: 171413 - DNA, 13 bp, Artificial Sequence
  Oligonucleotide for detection of SNP TSC0004555
tgttatagtgtta

SEQ ID NO: 171414 - DNA, 13 bp, Artificial Sequence
  Oligonucleotide for detection of SNP TSC0004555
taacactataaca

SEQ ID NO: 171415 - DNA, 13 bp, Artificial Sequence
  Oligonucleotide for detection of SNP TSC0004555
tgttattgtgtta

SEQ ID NO: 171416 - DNA, 13 bp, Artificial Sequence
  Oligonucleotide for detection of SNP TSC0004555
taacacaataaca

SEQ ID NO: 171417 - DNA, 13 bp, Artificial Sequence
  Oligonucleotide for detection of SNP TSC0004555
tgttatcgtgtta

SEQ ID NO: 171418 - DNA, 13 bp, Artificial Sequence
  Oligonucleotide for detection of SNP TSC0004555
taacacgataaca

SEQ ID NO: 171419 - DNA, 13 bp, Artificial Sequence
  Oligonucleotide for detection of SNP TSC0004555
tggtattgtggta

SEQ ID NO: 171420 - DNA, 13 bp, Artificial Sequence
  Oligonucleotide for detection of SNP TSC0004555
taccacaatacca

SEQ ID NO: 171421 - DNA, 13 bp, Artificial Sequence
  Oligonucleotide for detection of SNP TSC0004555
tggtatggtggta

SEQ ID NO: 171422 - DNA, 13 bp, Artificial Sequence
  Oligonucleotide for detection of SNP TSC0004555
taccaccatacca

SEQ ID NO: 171423 - DNA, 13 bp, Artificial Sequence
  Oligonucleotide for detection of SNP TSC0004555
tggtacggtggta

SEQ ID NO: 171424 - DNA, 13 bp, Artificial Sequence
  Oligonucleotide for detection of SNP TSC0004555
taccaccgtacca

SEQ ID NO: 171425 - DNA, 13 bp, Artificial Sequence
  Oligonucleotide for detection of SNP TSC0004989
aaaaatgaattaa

SEQ ID NO: 171426 - DNA, 13 bp, Artificial Sequence
  Oligonucleotide for detection of SNP TSC0004989
ttaattcattttt

SEQ ID NO: 171427 - DNA, 13 bp, Artificial Sequence
  Oligonucleotide for detection of SNP TSC0008910
aagtatgttaaat

SEQ ID NO: 171428 - DNA, 13 bp, Artificial Sequence
  Oligonucleotide for detection of SNP TSC0008910
atttaacatactt

SEQ ID NO: 171429 - DNA, 13 bp, Artificial Sequence
  Oligonucleotide for detection of SNP TSC0008910
aagtatattaaat

SEQ ID NO: 171430 - DNA, 13 bp, Artificial Sequence
  Oligonucleotide for detection of SNP TSC0008910
atttaatatactt

SEQ ID NO: 171431 - DNA, 13 bp, Artificial Sequence
  Oligonucleotide for detection of SNP TSC0008911
tagatttgatgtt

SEQ ID NO: 171432 - DNA, 13 bp, Artificial Sequence
  Oligonucleotide for detection of SNP TSC0008911
aacatcaaatcta

SEQ ID NO: 171433 - DNA, 13 bp, Artificial Sequence
  Oligonucleotide for detection of SNP TSC0008911
tagattcgatgtt

SEQ ID NO: 171434 - DNA, 13 bp, Artificial Sequence
  Oligonucleotide for detection of SNP TSC0008911
aacatcgaatcta

SEQ ID NO: 171435 - DNA, 13 bp, Artificial Sequence
  Oligonucleotide for detection of SNP TSC0008911
aatattgggtttg

SEQ ID NO: 171436 - DNA, 13 bp, Artificial Sequence
  Oligonucleotide for detection of SNP TSC0008911
caaacccaatatt

SEQ ID NO: 171437 - DNA, 13 bp, Artificial Sequence
  Oligonucleotide for detection of SNP TSC0008911
aatattaggtttg

SEQ ID NO: 171438 - DNA, 13 bp, Artificial Sequence
  Oligonucleotide for detection of SNP TSC0008911
caaacctaatatt

SEQ ID NO: 171439 - DNA, 13 bp, Artificial Sequence
  Oligonucleotide for detection of SNP TSC0008911
aatatcgggtttg

SEQ ID NO: 171440 - DNA, 13 bp, Artificial Sequence
  Oligonucleotide for detection of SNP TSC0008911
caaacccgatatt

SEQ ID NO: 171441 - DNA, 13 bp, Artificial Sequence
  Oligonucleotide for detection of SNP TSC0042729
agatttataaggg

SEQ ID NO: 171442 - DNA, 13 bp, Artificial Sequence
  Oligonucleotide for detection of SNP TSC0042729
cccttataaatct

SEQ ID NO: 171443 - DNA, 13 bp, Artificial Sequence
  Oligonucleotide for detection of SNP TSC0042729
agatttgtaaggg

SEQ ID NO: 171444 - DNA, 13 bp, Artificial Sequence
  Oligonucleotide for detection of SNP TSC0042729
cccttacaaatct

SEQ ID NO: 171445 - DNA, 13 bp, Artificial Sequence
  Oligonucleotide for detection of SNP TSC0042729
agattcgtaaggg

SEQ ID NO: 171446 - DNA, 13 bp, Artificial Sequence
  Oligonucleotide for detection of SNP TSC0042729
cccttacgaatct

SEQ ID NO: 171447 - DNA, 13 bp, Artificial Sequence
  Oligonucleotide for detection of SNP TSC0042729
tttttatgagttt

SEQ ID NO: 171448 - DNA, 13 bp, Artificial Sequence
  Oligonucleotide for detection of SNP TSC0042729
aaactcataaaaa

SEQ ID NO: 171449 - DNA, 13 bp, Artificial Sequence
  Oligonucleotide for detection of SNP TSC0042729
tttttacgagttt

SEQ ID NO: 171450 - DNA, 13 bp, Artificial Sequence
  Oligonucleotide for detection of SNP TSC0042729
aaactcgtaaaaa

SEQ ID NO: 171451 - DNA, 13 bp, Artificial Sequence
  Oligonucleotide for detection of SNP TSC0042730
tttttatgtagaa

SEQ ID NO: 171452 - DNA, 13 bp, Artificial Sequence
  Oligonucleotide for detection of SNP TSC0042730
ttctacataaaaa

SEQ ID NO: 171453 - DNA, 13 bp, Artificial Sequence
  Oligonucleotide for detection of SNP TSC0042730
tttttacgtagaa

SEQ ID NO: 171454 - DNA, 13 bp, Artificial Sequence
  Oligonucleotide for detection of SNP TSC0042730
ttctacgtaaaaa

SEQ ID NO: 171455 - DNA, 13 bp, Artificial Sequence
  Oligonucleotide for detection of SNP TSC0042731
aggttgtggtggg

SEQ ID NO: 171456 - DNA, 13 bp, Artificial Sequence
  Oligonucleotide for detection of SNP TSC0042731
cccaccacaacct

SEQ ID NO: 171457 - DNA, 13 bp, Artificial Sequence
  Oligonucleotide for detection of SNP TSC0042731
aggttgcggtggg

SEQ ID NO: 171458 - DNA, 13 bp, Artificial Sequence
  Oligonucleotide for detection of SNP TSC0042731
cccaccgcaacct

SEQ ID NO: 171459 - DNA, 13 bp, Artificial Sequence
  Oligonucleotide for detection of SNP TSC0042731
tttatcgtagttt

SEQ ID NO: 171460 - DNA, 13 bp, Artificial Sequence
  Oligonucleotide for detection of SNP TSC0042731
aaactacgataaa

SEQ ID NO: 171461 - DNA, 13 bp, Artificial Sequence
  Oligonucleotide for detection of SNP TSC0042732
ttgtagatgattt

SEQ ID NO: 171462 - DNA, 13 bp, Artificial Sequence
  Oligonucleotide for detection of SNP TSC0042732
aaatcatctacaa

SEQ ID NO: 171463 - DNA, 13 bp, Artificial Sequence
  Oligonucleotide for detection of SNP TSC0042732
ttgtaggtgattt

SEQ ID NO: 171464 - DNA, 13 bp, Artificial Sequence
  Oligonucleotide for detection of SNP TSC0042732
aaatcacctacaa

SEQ ID NO: 171465 - DNA, 13 bp, Artificial Sequence
  Oligonucleotide for detection of SNP TSC0042736
aaagtggtaaaat

SEQ ID NO: 171466 - DNA, 13 bp, Artificial Sequence
  Oligonucleotide for detection of SNP TSC0042736
attttaccacttt

SEQ ID NO: 171467 - DNA, 13 bp, Artificial Sequence
  Oligonucleotide for detection of SNP TSC0042736
aaagtgataaaat

SEQ ID NO: 171468 - DNA, 13 bp, Artificial Sequence
  Oligonucleotide for detection of SNP TSC0042736
attttatcacttt

SEQ ID NO: 171469 - DNA, 13 bp, Artificial Sequence
  Oligonucleotide for detection of SNP TSC0042737
agtgttattaaga

SEQ ID NO: 171470 - DNA, 13 bp, Artificial Sequence
  Oligonucleotide for detection of SNP TSC0042737
tcttaataacact

SEQ ID NO: 171471 - DNA, 13 bp, Artificial Sequence
  Oligonucleotide for detection of SNP TSC0042737
agtgttgttaaga

SEQ ID NO: 171472 - DNA, 13 bp, Artificial Sequence
  Oligonucleotide for detection of SNP TSC0042737
tcttaacaacact

SEQ ID NO: 171473 - DNA, 13 bp, Artificial Sequence
  Oligonucleotide for detection of SNP TSC0042737
agtgtcgttaaga

SEQ ID NO: 171474 - DNA, 13 bp, Artificial Sequence
  Oligonucleotide for detection of SNP TSC0042737
tcttaacgacact

SEQ ID NO: 171475 - DNA, 13 bp, Artificial Sequence
  Oligonucleotide for detection of SNP TSC0042737
ttttggtggtatt

SEQ ID NO: 171476 - DNA, 13 bp, Artificial Sequence
  Oligonucleotide for detection of SNP TSC0042737
aataccaccaaaa

SEQ ID NO: 171477 - DNA, 13 bp, Artificial Sequence
  Oligonucleotide for detection of SNP TSC0042737
ttttggcggtatt

SEQ ID NO: 171478 - DNA, 13 bp, Artificial Sequence
  Oligonucleotide for detection of SNP TSC0042737
aataccgccaaaa

SEQ ID NO: 171479 - DNA, 13 bp, Artificial Sequence
  Oligonucleotide for detection of SNP TSC0042739
tgtggatgggagg

SEQ ID NO: 171480 - DNA, 13 bp, Artificial Sequence
  Oligonucleotide for detection of SNP TSC0042739
cctcccatccaca

SEQ ID NO: 171481 - DNA, 13 bp, Artificial Sequence
  Oligonucleotide for detection of SNP TSC0042739
tgtggacgggagg

SEQ ID NO: 171482 - DNA, 13 bp, Artificial Sequence
  Oligonucleotide for detection of SNP TSC0042739
cctcccgtccaca

SEQ ID NO: 171483 - DNA, 13 bp, Artificial Sequence
  Oligonucleotide for detection of SNP TSC0042740
ttagattttgttt

SEQ ID NO: 171484 - DNA, 13 bp, Artificial Sequence
  Oligonucleotide for detection of SNP TSC0042740
aaacaaaatctaa

SEQ ID NO: 171485 - DNA, 13 bp, Artificial Sequence
  Oligonucleotide for detection of SNP TSC0042740
ttagatgttgttt

SEQ ID NO: 171486 - DNA, 13 bp, Artificial Sequence
  Oligonucleotide for detection of SNP TSC0042740
aaacaacatctaa

SEQ ID NO: 171487 - DNA, 13 bp, Artificial Sequence
  Oligonucleotide for detection of SNP TSC0042740
aagtaggatttaa

SEQ ID NO: 171488 - DNA, 13 bp, Artificial Sequence
  Oligonucleotide for detection of SNP TSC0042740
ttaaatcctactt

SEQ ID NO: 171489 - DNA, 13 bp, Artificial Sequence
  Oligonucleotide for detection of SNP TSC0042740
aagtagtatttaa

SEQ ID NO: 171490 - DNA, 13 bp, Artificial Sequence
  Oligonucleotide for detection of SNP TSC0042740
ttaaatactactt

SEQ ID NO: 171491 - DNA, 13 bp, Artificial Sequence
  Oligonucleotide for detection of SNP TSC0042744
tagataagatagg

SEQ ID NO: 171492 - DNA, 13 bp, Artificial Sequence
  Oligonucleotide for detection of SNP TSC0042744
cctatcttatcta

SEQ ID NO: 171493 - DNA, 13 bp, Artificial Sequence
  Oligonucleotide for detection of SNP TSC0042744
tagatatgatagg

SEQ ID NO: 171494 - DNA, 13 bp, Artificial Sequence
  Oligonucleotide for detection of SNP TSC0042744
cctatcatatcta

SEQ ID NO: 171495 - DNA, 13 bp, Artificial Sequence
  Oligonucleotide for detection of SNP TSC0042744
tttgttttgtttg

SEQ ID NO: 171496 - DNA, 13 bp, Artificial Sequence
  Oligonucleotide for detection of SNP TSC0042744
caaacaaaacaaa

SEQ ID NO: 171497 - DNA, 13 bp, Artificial Sequence
  Oligonucleotide for detection of SNP TSC0042744
tttgttatgtttg

SEQ ID NO: 171498 - DNA, 13 bp, Artificial Sequence
  Oligonucleotide for detection of SNP TSC0042744
caaacataacaaa

SEQ ID NO: 171499 - DNA, 13 bp, Artificial Sequence
  Oligonucleotide for detection of SNP TSC0042745
tttgtttgtaagg

SEQ ID NO: 171500 - DNA, 13 bp, Artificial Sequence
  Oligonucleotide for detection of SNP TSC0042745
ccttacaaacaaa

SEQ ID NO: 171501 - DNA, 13 bp, Artificial Sequence
  Oligonucleotide for detection of SNP TSC0042745
tttgttcgtaagg

SEQ ID NO: 171502 - DNA, 13 bp, Artificial Sequence
  Oligonucleotide for detection of SNP TSC0042745
ccttacgaacaaa

SEQ ID NO: 171503 - DNA, 13 bp, Artificial Sequence
  Oligonucleotide for detection of SNP TSC0042745
ttttatgagtaga

SEQ ID NO: 171504 - DNA, 13 bp, Artificial Sequence
  Oligonucleotide for detection of SNP TSC0042745
tctactcataaaa

SEQ ID NO: 171505 - DNA, 13 bp, Artificial Sequence
  Oligonucleotide for detection of SNP TSC0042745
ttttataagtaga

SEQ ID NO: 171506 - DNA, 13 bp, Artificial Sequence
  Oligonucleotide for detection of SNP TSC0042745
tctacttataaaa

SEQ ID NO: 171507 - DNA, 13 bp, Artificial Sequence
  Oligonucleotide for detection of SNP TSC0042745
ttttacgagtaga

SEQ ID NO: 171508 - DNA, 13 bp, Artificial Sequence
  Oligonucleotide for detection of SNP TSC0042745
tctactcgtaaaa

SEQ ID NO: 171509 - DNA, 13 bp, Artificial Sequence
  Oligonucleotide for detection of SNP TSC0042746
aggaaataaaaaa

SEQ ID NO: 171510 - DNA, 13 bp, Artificial Sequence
  Oligonucleotide for detection of SNP TSC0042746
ttttttatttcct

SEQ ID NO: 171511 - DNA, 13 bp, Artificial Sequence
  Oligonucleotide for detection of SNP TSC0042746
aggaaagaaaaaa

SEQ ID NO: 171512 - DNA, 13 bp, Artificial Sequence
  Oligonucleotide for detection of SNP TSC0042746
ttttttctttcct

SEQ ID NO: 171513 - DNA, 13 bp, Artificial Sequence
  Oligonucleotide for detection of SNP TSC0042747
atagaggttttty

SEQ ID NO: 171514 - DNA, 13 bp, Artificial Sequence
  Oligonucleotide for detection of SNP TSC0042747
raaaaacctctat

SEQ ID NO: 171515 - DNA, 13 bp, Artificial Sequence
  Oligonucleotide for detection of SNP TSC0042747
atagagattttty

SEQ ID NO: 171516 - DNA, 13 bp, Artificial Sequence
  Oligonucleotide for detection of SNP TSC0042747
raaaaatctctat

SEQ ID NO: 171517 - DNA, 13 bp, Artificial Sequence
  Oligonucleotide for detection of SNP TSC0042748
aagtaggttttat

SEQ ID NO: 171518 - DNA, 13 bp, Artificial Sequence
  Oligonucleotide for detection of SNP TSC0042748
ataaaacctactt

SEQ ID NO: 171519 - DNA, 13 bp, Artificial Sequence
  Oligonucleotide for detection of SNP TSC0042748
aagtagattttat

SEQ ID NO: 171520 - DNA, 13 bp, Artificial Sequence
  Oligonucleotide for detection of SNP TSC0042748
ataaaatctactt

SEQ ID NO: 171521 - DNA, 13 bp, Artificial Sequence
  Oligonucleotide for detection of SNP TSC0042749
tatttaattattt

SEQ ID NO: 171522 - DNA, 13 bp, Artificial Sequence
  Oligonucleotide for detection of SNP TSC0042749
aaataattaaata

SEQ ID NO: 171523 - DNA, 13 bp, Artificial Sequence
  Oligonucleotide for detection of SNP TSC0042749
aggtagttagata

SEQ ID NO: 171524 - DNA, 13 bp, Artificial Sequence
  Oligonucleotide for detection of SNP TSC0042749
tatctaactacct

SEQ ID NO: 171525 - DNA, 13 bp, Artificial Sequence
  Oligonucleotide for detection of SNP TSC0042749
aggtaggtagata

SEQ ID NO: 171526 - DNA, 13 bp, Artificial Sequence
  Oligonucleotide for detection of SNP TSC0042749
tatctacctacct

SEQ ID NO: 171527 - DNA, 13 bp, Artificial Sequence
  Oligonucleotide for detection of SNP TSC0042761
tttaggattaaga

SEQ ID NO: 171528 - DNA, 13 bp, Artificial Sequence
  Oligonucleotide for detection of SNP TSC0042761
tcttaatcctaaa

SEQ ID NO: 171529 - DNA, 13 bp, Artificial Sequence
  Oligonucleotide for detection of SNP TSC0042761
tttagggttaaga

SEQ ID NO: 171530 - DNA, 13 bp, Artificial Sequence
  Oligonucleotide for detection of SNP TSC0042761
tcttaaccctaaa

SEQ ID NO: 171531 - DNA, 13 bp, Artificial Sequence
  Oligonucleotide for detection of SNP TSC0042762
agaaggggtatty

SEQ ID NO: 171532 - DNA, 13 bp, Artificial Sequence
  Oligonucleotide for detection of SNP TSC0042762
raataccccttct

SEQ ID NO: 171533 - DNA, 13 bp, Artificial Sequence
  Oligonucleotide for detection of SNP TSC0042762
agaaggagtatty

SEQ ID NO: 171534 - DNA, 13 bp, Artificial Sequence
  Oligonucleotide for detection of SNP TSC0042762
raatactccttct

SEQ ID NO: 171535 - DNA, 13 bp, Artificial Sequence
  Oligonucleotide for detection of SNP TSC0042763
atagaggttggty

SEQ ID NO: 171536 - DNA, 13 bp, Artificial Sequence
  Oligonucleotide for detection of SNP TSC0042763
raccaacctctat

SEQ ID NO: 171537 - DNA, 13 bp, Artificial Sequence
  Oligonucleotide for detection of SNP TSC0042763
atagagattggty

SEQ ID NO: 171538 - DNA, 13 bp, Artificial Sequence
  Oligonucleotide for detection of SNP TSC0042763
raccaatctctat

SEQ ID NO: 171539 - DNA, 13 bp, Artificial Sequence
  Oligonucleotide for detection of SNP TSC0042764
gggagtataggga

SEQ ID NO: 171540 - DNA, 13 bp, Artificial Sequence
  Oligonucleotide for detection of SNP TSC0042764
tccctatactccc

SEQ ID NO: 171541 - DNA, 13 bp, Artificial Sequence
  Oligonucleotide for detection of SNP TSC0042764
gggagtgtaggga

SEQ ID NO: 171542 - DNA, 13 bp, Artificial Sequence
  Oligonucleotide for detection of SNP TSC0042764
tccctacactccc

SEQ ID NO: 171543 - DNA, 13 bp, Artificial Sequence
  Oligonucleotide for detection of SNP TSC0042764
gggagcgtaggga

SEQ ID NO: 171544 - DNA, 13 bp, Artificial Sequence
  Oligonucleotide for detection of SNP TSC0042764
tccctacgctccc

SEQ ID NO: 171545 - DNA, 13 bp, Artificial Sequence
  Oligonucleotide for detection of SNP TSC0042765
ttatagagtatta

SEQ ID NO: 171546 - DNA, 13 bp, Artificial Sequence
  Oligonucleotide for detection of SNP TSC0042765
taatactctataa

SEQ ID NO: 171547 - DNA, 13 bp, Artificial Sequence
  Oligonucleotide for detection of SNP TSC0042765
ttatagggtatta

SEQ ID NO: 171548 - DNA, 13 bp, Artificial Sequence
  Oligonucleotide for detection of SNP TSC0042765
taataccctataa

SEQ ID NO: 171549 - DNA, 13 bp, Artificial Sequence
  Oligonucleotide for detection of SNP TSC0042766
tttttggtgatgy

SEQ ID NO: 171550 - DNA, 13 bp, Artificial Sequence
  Oligonucleotide for detection of SNP TSC0042766
rcatcaccaaaaa

SEQ ID NO: 171551 - DNA, 13 bp, Artificial Sequence
  Oligonucleotide for detection of SNP TSC0042766
tttttgatgatgy

SEQ ID NO: 171552 - DNA, 13 bp, Artificial Sequence
  Oligonucleotide for detection of SNP TSC0042766
rcatcatcaaaaa

SEQ ID NO: 171553 - DNA, 13 bp, Artificial Sequence
  Oligonucleotide for detection of SNP TSC0042768
aagatgtgagaay

SEQ ID NO: 171554 - DNA, 13 bp, Artificial Sequence
  Oligonucleotide for detection of SNP TSC0042768
rttctcacatctt

SEQ ID NO: 171555 - DNA, 13 bp, Artificial Sequence
  Oligonucleotide for detection of SNP TSC0042768
aagatgggagaay

SEQ ID NO: 171556 - DNA, 13 bp, Artificial Sequence
  Oligonucleotide for detection of SNP TSC0042768
rttctcccatctt

SEQ ID NO: 171557 - DNA, 13 bp, Artificial Sequence
  Oligonucleotide for detection of SNP TSC0042768
aagatgcgagaay

SEQ ID NO: 171558 - DNA, 13 bp, Artificial Sequence
  Oligonucleotide for detection of SNP TSC0042768
rttctcgcatctt

SEQ ID NO: 171559 - DNA, 13 bp, Artificial Sequence
  Oligonucleotide for detection of SNP TSC0042769
tttataagatttt

SEQ ID NO: 171560 - DNA, 13 bp, Artificial Sequence
  Oligonucleotide for detection of SNP TSC0042769
aaaatcttataaa

SEQ ID NO: 171561 - DNA, 13 bp, Artificial Sequence
  Oligonucleotide for detection of SNP TSC0042769
tttatatgatttt

SEQ ID NO: 171562 - DNA, 13 bp, Artificial Sequence
  Oligonucleotide for detection of SNP TSC0042769
aaaatcatataaa

SEQ ID NO: 171563 - DNA, 13 bp, Artificial Sequence
  Oligonucleotide for detection of SNP TSC0042769
tttatacgatttt

SEQ ID NO: 171564 - DNA, 13 bp, Artificial Sequence
  Oligonucleotide for detection of SNP TSC0042769
aaaatcgtataaa

SEQ ID NO: 171565 - DNA, 13 bp, Artificial Sequence
  Oligonucleotide for detection of SNP TSC0042769
aaagttttataga

SEQ ID NO: 171566 - DNA, 13 bp, Artificial Sequence
  Oligonucleotide for detection of SNP TSC0042769
tctataaaacttt

SEQ ID NO: 171567 - DNA, 13 bp, Artificial Sequence
  Oligonucleotide for detection of SNP TSC0042769
aaagttgtataga

SEQ ID NO: 171568 - DNA, 13 bp, Artificial Sequence
  Oligonucleotide for detection of SNP TSC0042769
tctatacaacttt

SEQ ID NO: 171569 - DNA, 13 bp, Artificial Sequence
  Oligonucleotide for detection of SNP TSC0042769
aaagtcgtataga

SEQ ID NO: 171570 - DNA, 13 bp, Artificial Sequence
  Oligonucleotide for detection of SNP TSC0042769
tctatacgacttt

SEQ ID NO: 171571 - DNA, 13 bp, Artificial Sequence
  Oligonucleotide for detection of SNP TSC0042773
tttagggagtgtt

SEQ ID NO: 171572 - DNA, 13 bp, Artificial Sequence
  Oligonucleotide for detection of SNP TSC0042773
aacactccctaaa

SEQ ID NO: 171573 - DNA, 13 bp, Artificial Sequence
  Oligonucleotide for detection of SNP TSC0042773
tttaggaagtgtt

SEQ ID NO: 171574 - DNA, 13 bp, Artificial Sequence
  Oligonucleotide for detection of SNP TSC0042773
aacacttcctaaa

SEQ ID NO: 171575 - DNA, 13 bp, Artificial Sequence
  Oligonucleotide for detection of SNP TSC0042773
tttagggagcgtt

SEQ ID NO: 171576 - DNA, 13 bp, Artificial Sequence
  Oligonucleotide for detection of SNP TSC0042773
aacgctccctaaa

SEQ ID NO: 171577 - DNA, 13 bp, Artificial Sequence
  Oligonucleotide for detection of SNP TSC0042773
tttaggaagcgtt

SEQ ID NO: 171578 - DNA, 13 bp, Artificial Sequence
  Oligonucleotide for detection of SNP TSC0042773
aacgcttcctaaa

SEQ ID NO: 171579 - DNA, 13 bp, Artificial Sequence
  Oligonucleotide for detection of SNP TSC0042774
gatgtaaaaggag

SEQ ID NO: 171580 - DNA, 13 bp, Artificial Sequence
  Oligonucleotide for detection of SNP TSC0042774
ctccttttacatc

SEQ ID NO: 171581 - DNA, 13 bp, Artificial Sequence
  Oligonucleotide for detection of SNP TSC0042774
gatgtataaggag

SEQ ID NO: 171582 - DNA, 13 bp, Artificial Sequence
  Oligonucleotide for detection of SNP TSC0042774
ctccttatacatc

SEQ ID NO: 171583 - DNA, 13 bp, Artificial Sequence
  Oligonucleotide for detection of SNP TSC0042775
aatagttaatgat

SEQ ID NO: 171584 - DNA, 13 bp, Artificial Sequence
  Oligonucleotide for detection of SNP TSC0042775
atcattaactatt

SEQ ID NO: 171585 - DNA, 13 bp, Artificial Sequence
  Oligonucleotide for detection of SNP TSC0042775
aatagtgaatgat

SEQ ID NO: 171586 - DNA, 13 bp, Artificial Sequence
  Oligonucleotide for detection of SNP TSC0042775
atcattcactatt

SEQ ID NO: 171587 - DNA, 13 bp, Artificial Sequence
  Oligonucleotide for detection of SNP TSC0042775
attattgattgtt

SEQ ID NO: 171588 - DNA, 13 bp, Artificial Sequence
  Oligonucleotide for detection of SNP TSC0042775
aacaatcaataat

SEQ ID NO: 171589 - DNA, 13 bp, Artificial Sequence
  Oligonucleotide for detection of SNP TSC0042775
attatttattgtt

SEQ ID NO: 171590 - DNA, 13 bp, Artificial Sequence
  Oligonucleotide for detection of SNP TSC0042775
aacaataaataat

SEQ ID NO: 171591 - DNA, 13 bp, Artificial Sequence
  Oligonucleotide for detection of SNP TSC0042776
atgagttgttaaa

SEQ ID NO: 171592 - DNA, 13 bp, Artificial Sequence
  Oligonucleotide for detection of SNP TSC0042776
tttaacaactcat

SEQ ID NO: 171593 - DNA, 13 bp, Artificial Sequence
  Oligonucleotide for detection of SNP TSC0042776
acgagttgttaaa

SEQ ID NO: 171594 - DNA, 13 bp, Artificial Sequence
  Oligonucleotide for detection of SNP TSC0042776
tttaacaactcgt

SEQ ID NO: 171595 - DNA, 13 bp, Artificial Sequence
  Oligonucleotide for detection of SNP TSC0042776
atgagtcgttaaa

SEQ ID NO: 171596 - DNA, 13 bp, Artificial Sequence
  Oligonucleotide for detection of SNP TSC0042776
tttaacgactcat

SEQ ID NO: 171597 - DNA, 13 bp, Artificial Sequence
  Oligonucleotide for detection of SNP TSC0042776
acgagtcgttaaa

SEQ ID NO: 171598 - DNA, 13 bp, Artificial Sequence
  Oligonucleotide for detection of SNP TSC0042776
tttaacgactcgt

SEQ ID NO: 171599 - DNA, 13 bp, Artificial Sequence
  Oligonucleotide for detection of SNP TSC0042776
tttaatgatttgt

SEQ ID NO: 171600 - DNA, 13 bp, Artificial Sequence
  Oligonucleotide for detection of SNP TSC0042776
acaaatcattaaa

SEQ ID NO: 171601 - DNA, 13 bp, Artificial Sequence
  Oligonucleotide for detection of SNP TSC0042776
tttaataatttgt

SEQ ID NO: 171602 - DNA, 13 bp, Artificial Sequence
  Oligonucleotide for detection of SNP TSC0042776
acaaattattaaa

SEQ ID NO: 171603 - DNA, 13 bp, Artificial Sequence
  Oligonucleotide for detection of SNP TSC0042776
tttaacgatttgt

SEQ ID NO: 171604 - DNA, 13 bp, Artificial Sequence
  Oligonucleotide for detection of SNP TSC0042776
acaaatcgttaaa

SEQ ID NO: 171605 - DNA, 13 bp, Artificial Sequence
  Oligonucleotide for detection of SNP TSC0042776
tttaataattcgt

SEQ ID NO: 171606 - DNA, 13 bp, Artificial Sequence
  Oligonucleotide for detection of SNP TSC0042776
acgaattattaaa

SEQ ID NO: 171607 - DNA, 13 bp, Artificial Sequence
  Oligonucleotide for detection of SNP TSC0042776
tttaatgattcgt

SEQ ID NO: 171608 - DNA, 13 bp, Artificial Sequence
  Oligonucleotide for detection of SNP TSC0042776
acgaatcattaaa

SEQ ID NO: 171609 - DNA, 13 bp, Artificial Sequence
  Oligonucleotide for detection of SNP TSC0042776
tttaacgattcgt

SEQ ID NO: 171610 - DNA, 13 bp, Artificial Sequence
  Oligonucleotide for detection of SNP TSC0042776
acgaatcgttaaa

SEQ ID NO: 171611 - DNA, 13 bp, Artificial Sequence
  Oligonucleotide for detection of SNP TSC0042780
gaatatagtttty

SEQ ID NO: 171612 - DNA, 13 bp, Artificial Sequence
  Oligonucleotide for detection of SNP TSC0042780
raaaactatattc

SEQ ID NO: 171613 - DNA, 13 bp, Artificial Sequence
  Oligonucleotide for detection of SNP TSC0042780
gaatatggtttty

SEQ ID NO: 171614 - DNA, 13 bp, Artificial Sequence
  Oligonucleotide for detection of SNP TSC0042780
raaaaccatattc

SEQ ID NO: 171615 - DNA, 13 bp, Artificial Sequence
  Oligonucleotide for detection of SNP TSC0042781
gtatatatagtag

SEQ ID NO: 171616 - DNA, 13 bp, Artificial Sequence
  Oligonucleotide for detection of SNP TSC0042781
ctactatatatac

SEQ ID NO: 171617 - DNA, 13 bp, Artificial Sequence
  Oligonucleotide for detection of SNP TSC0042781
gtatatgtagtag

SEQ ID NO: 171618 - DNA, 13 bp, Artificial Sequence
  Oligonucleotide for detection of SNP TSC0042781
ctactacatatac

SEQ ID NO: 171619 - DNA, 13 bp, Artificial Sequence
  Oligonucleotide for detection of SNP TSC0042781
gtatacgtagtag

SEQ ID NO: 171620 - DNA, 13 bp, Artificial Sequence
  Oligonucleotide for detection of SNP TSC0042781
ctactacgtatac

SEQ ID NO: 171621 - DNA, 13 bp, Artificial Sequence
  Oligonucleotide for detection of SNP TSC0042781
ttgttatgtatgy

SEQ ID NO: 171622 - DNA, 13 bp, Artificial Sequence
  Oligonucleotide for detection of SNP TSC0042781
rcatacataacaa

SEQ ID NO: 171623 - DNA, 13 bp, Artificial Sequence
  Oligonucleotide for detection of SNP TSC0042781
ttgttacgtatgy

SEQ ID NO: 171624 - DNA, 13 bp, Artificial Sequence
  Oligonucleotide for detection of SNP TSC0042781
rcatacgtaacaa

SEQ ID NO: 171625 - DNA, 13 bp, Artificial Sequence
  Oligonucleotide for detection of SNP TSC0042782
ttagattatttta

SEQ ID NO: 171626 - DNA, 13 bp, Artificial Sequence
  Oligonucleotide for detection of SNP TSC0042782
taaaataatctaa

SEQ ID NO: 171627 - DNA, 13 bp, Artificial Sequence
  Oligonucleotide for detection of SNP TSC0042782
ttagatgatttta

SEQ ID NO: 171628 - DNA, 13 bp, Artificial Sequence
  Oligonucleotide for detection of SNP TSC0042782
taaaatcatctaa

SEQ ID NO: 171629 - DNA, 13 bp, Artificial Sequence
  Oligonucleotide for detection of SNP TSC0042782
taggataatttga

SEQ ID NO: 171630 - DNA, 13 bp, Artificial Sequence
  Oligonucleotide for detection of SNP TSC0042782
tcaaattatccta

SEQ ID NO: 171631 - DNA, 13 bp, Artificial Sequence
  Oligonucleotide for detection of SNP TSC0042782
taggattatttga

SEQ ID NO: 171632 - DNA, 13 bp, Artificial Sequence
  Oligonucleotide for detection of SNP TSC0042782
tcaaataatccta

SEQ ID NO: 171633 - DNA, 13 bp, Artificial Sequence
  Oligonucleotide for detection of SNP TSC0042783
agattggtgttaa

SEQ ID NO: 171634 - DNA, 13 bp, Artificial Sequence
  Oligonucleotide for detection of SNP TSC0042783
ttaacaccaatct

SEQ ID NO: 171635 - DNA, 13 bp, Artificial Sequence
  Oligonucleotide for detection of SNP TSC0042783
agattgatgttaa

SEQ ID NO: 171636 - DNA, 13 bp, Artificial Sequence
  Oligonucleotide for detection of SNP TSC0042783
ttaacatcaatct

SEQ ID NO: 171637 - DNA, 13 bp, Artificial Sequence
  Oligonucleotide for detection of SNP TSC0042785
tatagaattatag

SEQ ID NO: 171638 - DNA, 13 bp, Artificial Sequence
  Oligonucleotide for detection of SNP TSC0042785
ctataattctata

SEQ ID NO: 171639 - DNA, 13 bp, Artificial Sequence
  Oligonucleotide for detection of SNP TSC0042785
tatagagttatag

SEQ ID NO: 171640 - DNA, 13 bp, Artificial Sequence
  Oligonucleotide for detection of SNP TSC0042785
ctataactctata

SEQ ID NO: 171641 - DNA, 13 bp, Artificial Sequence
  Oligonucleotide for detection of SNP TSC0042786
atttttgtgtttg

SEQ ID NO: 171642 - DNA, 13 bp, Artificial Sequence
  Oligonucleotide for detection of SNP TSC0042786
caaacacaaaaat

SEQ ID NO: 171643 - DNA, 13 bp, Artificial Sequence
  Oligonucleotide for detection of SNP TSC0042786
atttttacgtttg

SEQ ID NO: 171644 - DNA, 13 bp, Artificial Sequence
  Oligonucleotide for detection of SNP TSC0042786
caaacgtaaaaat

SEQ ID NO: 171645 - DNA, 13 bp, Artificial Sequence
  Oligonucleotide for detection of SNP TSC0042786
atttttgcgtttg

SEQ ID NO: 171646 - DNA, 13 bp, Artificial Sequence
  Oligonucleotide for detection of SNP TSC0042786
caaacgcaaaaat

SEQ ID NO: 171647 - DNA, 13 bp, Artificial Sequence
  Oligonucleotide for detection of SNP TSC0042787
aaaattttagtty

SEQ ID NO: 171648 - DNA, 13 bp, Artificial Sequence
  Oligonucleotide for detection of SNP TSC0042787
raactaaaatttt

SEQ ID NO: 171649 - DNA, 13 bp, Artificial Sequence
  Oligonucleotide for detection of SNP TSC0042787
aaaattgtagtty

SEQ ID NO: 171650 - DNA, 13 bp, Artificial Sequence
  Oligonucleotide for detection of SNP TSC0042787
raactacaatttt

SEQ ID NO: 171651 - DNA, 13 bp, Artificial Sequence
  Oligonucleotide for detection of SNP TSC0042787
gagttgaagtttt

SEQ ID NO: 171652 - DNA, 13 bp, Artificial Sequence
  Oligonucleotide for detection of SNP TSC0042787
aaaacttcaactc

SEQ ID NO: 171653 - DNA, 13 bp, Artificial Sequence
  Oligonucleotide for detection of SNP TSC0042787
gagttgtagtttt

SEQ ID NO: 171654 - DNA, 13 bp, Artificial Sequence
  Oligonucleotide for detection of SNP TSC0042787
aaaactacaactc

SEQ ID NO: 171655 - DNA, 13 bp, Artificial Sequence
  Oligonucleotide for detection of SNP TSC0042788
aaattagtgttga

SEQ ID NO: 171656 - DNA, 13 bp, Artificial Sequence
  Oligonucleotide for detection of SNP TSC0042788
tcaacactaattt

SEQ ID NO: 171657 - DNA, 13 bp, Artificial Sequence
  Oligonucleotide for detection of SNP TSC0042788
aaattaatgttga

SEQ ID NO: 171658 - DNA, 13 bp, Artificial Sequence
  Oligonucleotide for detection of SNP TSC0042788
tcaacattaattt

SEQ ID NO: 171659 - DNA, 13 bp, Artificial Sequence
  Oligonucleotide for detection of SNP TSC0042789
tgtgtatttgtta

SEQ ID NO: 171660 - DNA, 13 bp, Artificial Sequence
  Oligonucleotide for detection of SNP TSC0042789
taacaaatacaca

SEQ ID NO: 171661 - DNA, 13 bp, Artificial Sequence
  Oligonucleotide for detection of SNP TSC0042789
tgtgtagttgtta

SEQ ID NO: 171662 - DNA, 13 bp, Artificial Sequence
  Oligonucleotide for detection of SNP TSC0042789
taacaactacaca

SEQ ID NO: 171663 - DNA, 13 bp, Artificial Sequence
  Oligonucleotide for detection of SNP TSC0042789
tagtagatatata

SEQ ID NO: 171664 - DNA, 13 bp, Artificial Sequence
  Oligonucleotide for detection of SNP TSC0042789
tatatatctacta

SEQ ID NO: 171665 - DNA, 13 bp, Artificial Sequence
  Oligonucleotide for detection of SNP TSC0042789
tagtagttatata

SEQ ID NO: 171666 - DNA, 13 bp, Artificial Sequence
  Oligonucleotide for detection of SNP TSC0042789
tatataactacta

SEQ ID NO: 171667 - DNA, 13 bp, Artificial Sequence
  Oligonucleotide for detection of SNP TSC0042790
tttaagattatag

SEQ ID NO: 171668 - DNA, 13 bp, Artificial Sequence
  Oligonucleotide for detection of SNP TSC0042790
ctataatcttaaa

SEQ ID NO: 171669 - DNA, 13 bp, Artificial Sequence
  Oligonucleotide for detection of SNP TSC0042790
tttaaggttatag

SEQ ID NO: 171670 - DNA, 13 bp, Artificial Sequence
  Oligonucleotide for detection of SNP TSC0042790
ctataaccttaaa

SEQ ID NO: 171671 - DNA, 13 bp, Artificial Sequence
  Oligonucleotide for detection of SNP TSC0042792
ttttatgtattat

SEQ ID NO: 171672 - DNA, 13 bp, Artificial Sequence
  Oligonucleotide for detection of SNP TSC0042792
ataatacataaaa

SEQ ID NO: 171673 - DNA, 13 bp, Artificial Sequence
  Oligonucleotide for detection of SNP TSC0042792
ttttacgtattat

SEQ ID NO: 171674 - DNA, 13 bp, Artificial Sequence
  Oligonucleotide for detection of SNP TSC0042792
ataatacgtaaaa

SEQ ID NO: 171675 - DNA, 13 bp, Artificial Sequence
  Oligonucleotide for detection of SNP TSC0042792
atgatgtgtggag

SEQ ID NO: 171676 - DNA, 13 bp, Artificial Sequence
  Oligonucleotide for detection of SNP TSC0042792
ctccacacatcat

SEQ ID NO: 171677 - DNA, 13 bp, Artificial Sequence
  Oligonucleotide for detection of SNP TSC0042792
atgatgcgtggag

SEQ ID NO: 171678 - DNA, 13 bp, Artificial Sequence
  Oligonucleotide for detection of SNP TSC0042792
ctccacgcatcat

SEQ ID NO: 171679 - DNA, 13 bp, Artificial Sequence
  Oligonucleotide for detection of SNP TSC0042793
gtttatgtgtagy

SEQ ID NO: 171680 - DNA, 13 bp, Artificial Sequence
  Oligonucleotide for detection of SNP TSC0042793
rctacacataaac

SEQ ID NO: 171681 - DNA, 13 bp, Artificial Sequence
  Oligonucleotide for detection of SNP TSC0042793
gtttatatgtagy

SEQ ID NO: 171682 - DNA, 13 bp, Artificial Sequence
  Oligonucleotide for detection of SNP TSC0042793
rctacatataaac

SEQ ID NO: 171683 - DNA, 13 bp, Artificial Sequence
  Oligonucleotide for detection of SNP TSC0007038
aaattagaagaty

SEQ ID NO: 171684 - DNA, 13 bp, Artificial Sequence
  Oligonucleotide for detection of SNP TSC0007038
ratcttctaattt

SEQ ID NO: 171685 - DNA, 13 bp, Artificial Sequence
  Oligonucleotide for detection of SNP TSC0007038
aaattaaaagaty

SEQ ID NO: 171686 - DNA, 13 bp, Artificial Sequence
  Oligonucleotide for detection of SNP TSC0007038
ratcttttaattt

SEQ ID NO: 171687 - DNA, 13 bp, Artificial Sequence
  Oligonucleotide for detection of SNP TSC0042794
atataagtagaat

SEQ ID NO: 171688 - DNA, 13 bp, Artificial Sequence
  Oligonucleotide for detection of SNP TSC0042794
attctacttatat

SEQ ID NO: 171689 - DNA, 13 bp, Artificial Sequence
  Oligonucleotide for detection of SNP TSC0042794
atataaatagaat

SEQ ID NO: 171690 - DNA, 13 bp, Artificial Sequence
  Oligonucleotide for detection of SNP TSC0042794
attctatttatat

SEQ ID NO: 171691 - DNA, 13 bp, Artificial Sequence
  Oligonucleotide for detection of SNP TSC0042796
aaaagtatataay

SEQ ID NO: 171692 - DNA, 13 bp, Artificial Sequence
  Oligonucleotide for detection of SNP TSC0042796
rttatatactttt

SEQ ID NO: 171693 - DNA, 13 bp, Artificial Sequence
  Oligonucleotide for detection of SNP TSC0042796
aaaagtttataay

SEQ ID NO: 171694 - DNA, 13 bp, Artificial Sequence
  Oligonucleotide for detection of SNP TSC0042796
rttataaactttt

SEQ ID NO: 171695 - DNA, 13 bp, Artificial Sequence
  Oligonucleotide for detection of SNP TSC0042796
gttgtatattttt

SEQ ID NO: 171696 - DNA, 13 bp, Artificial Sequence
  Oligonucleotide for detection of SNP TSC0042796
aaaaatatacaac

SEQ ID NO: 171697 - DNA, 13 bp, Artificial Sequence
  Oligonucleotide for detection of SNP TSC0042796
gttgtaaattttt

SEQ ID NO: 171698 - DNA, 13 bp, Artificial Sequence
  Oligonucleotide for detection of SNP TSC0042796
aaaaatttacaac

SEQ ID NO: 171699 - DNA, 13 bp, Artificial Sequence
  Oligonucleotide for detection of SNP TSC0042797
ggggagttgagga

SEQ ID NO: 171700 - DNA, 13 bp, Artificial Sequence
  Oligonucleotide for detection of SNP TSC0042797
tcctcaactcccc

SEQ ID NO: 171701 - DNA, 13 bp, Artificial Sequence
  Oligonucleotide for detection of SNP TSC0042797
ggggagatgagga

SEQ ID NO: 171702 - DNA, 13 bp, Artificial Sequence
  Oligonucleotide for detection of SNP TSC0042797
tcctcatctcccc

SEQ ID NO: 171703 - DNA, 13 bp, Artificial Sequence
  Oligonucleotide for detection of SNP TSC0042797
ggggagtcgagga

SEQ ID NO: 171704 - DNA, 13 bp, Artificial Sequence
  Oligonucleotide for detection of SNP TSC0042797
tcctcgactcccc

SEQ ID NO: 171705 - DNA, 13 bp, Artificial Sequence
  Oligonucleotide for detection of SNP TSC0042797
ggggagacgagga

SEQ ID NO: 171706 - DNA, 13 bp, Artificial Sequence
  Oligonucleotide for detection of SNP TSC0042797
tcctcgtctcccc

SEQ ID NO: 171707 - DNA, 13 bp, Artificial Sequence
  Oligonucleotide for detection of SNP TSC0042802
gaggataattgat

SEQ ID NO: 171708 - DNA, 13 bp, Artificial Sequence
  Oligonucleotide for detection of SNP TSC0042802
atcaattatcctc

SEQ ID NO: 171709 - DNA, 13 bp, Artificial Sequence
  Oligonucleotide for detection of SNP TSC0042802
gaggattattgat

SEQ ID NO: 171710 - DNA, 13 bp, Artificial Sequence
  Oligonucleotide for detection of SNP TSC0042802
atcaataatcctc

SEQ ID NO: 171711 - DNA, 13 bp, Artificial Sequence
  Oligonucleotide for detection of SNP TSC0042802
attagtggtttty

SEQ ID NO: 171712 - DNA, 13 bp, Artificial Sequence
  Oligonucleotide for detection of SNP TSC0042802
raaaaccactaat

SEQ ID NO: 171713 - DNA, 13 bp, Artificial Sequence
  Oligonucleotide for detection of SNP TSC0042804
ggaggaaggggag

SEQ ID NO: 171714 - DNA, 13 bp, Artificial Sequence
  Oligonucleotide for detection of SNP TSC0042804
ctccccttcctcc

SEQ ID NO: 171715 - DNA, 13 bp, Artificial Sequence
  Oligonucleotide for detection of SNP TSC0042804
ggaggagggggag

SEQ ID NO: 171716 - DNA, 13 bp, Artificial Sequence
  Oligonucleotide for detection of SNP TSC0042804
ctccccctcctcc

SEQ ID NO: 171717 - DNA, 13 bp, Artificial Sequence
  Oligonucleotide for detection of SNP TSC0042805
gggtggaggaagg

SEQ ID NO: 171718 - DNA, 13 bp, Artificial Sequence
  Oligonucleotide for detection of SNP TSC0042805
ccttcctccaccc

SEQ ID NO: 171719 - DNA, 13 bp, Artificial Sequence
  Oligonucleotide for detection of SNP TSC0042805
gggtgggggaagg

SEQ ID NO: 171720 - DNA, 13 bp, Artificial Sequence
  Oligonucleotide for detection of SNP TSC0042805
ccttcccccaccc

SEQ ID NO: 171721 - DNA, 13 bp, Artificial Sequence
  Oligonucleotide for detection of SNP TSC0042806
gggattttaatat

SEQ ID NO: 171722 - DNA, 13 bp, Artificial Sequence
  Oligonucleotide for detection of SNP TSC0042806
atattaaaatccc

SEQ ID NO: 171723 - DNA, 13 bp, Artificial Sequence
  Oligonucleotide for detection of SNP TSC0042806
gggattgtaatat

SEQ ID NO: 171724 - DNA, 13 bp, Artificial Sequence
  Oligonucleotide for detection of SNP TSC0042806
atattacaatccc

SEQ ID NO: 171725 - DNA, 13 bp, Artificial Sequence
  Oligonucleotide for detection of SNP TSC0042806
atgttggaattty

SEQ ID NO: 171726 - DNA, 13 bp, Artificial Sequence
  Oligonucleotide for detection of SNP TSC0042806
raaattccaacat

SEQ ID NO: 171727 - DNA, 13 bp, Artificial Sequence
  Oligonucleotide for detection of SNP TSC0042806
atgttgtaattty

SEQ ID NO: 171728 - DNA, 13 bp, Artificial Sequence
  Oligonucleotide for detection of SNP TSC0042806
raaattacaacat

SEQ ID NO: 171729 - DNA, 13 bp, Artificial Sequence
  Oligonucleotide for detection of SNP TSC0042809
tgtattatttagy

SEQ ID NO: 171730 - DNA, 13 bp, Artificial Sequence
  Oligonucleotide for detection of SNP TSC0042809
rctaaataataca

SEQ ID NO: 171731 - DNA, 13 bp, Artificial Sequence
  Oligonucleotide for detection of SNP TSC0042809
tgtattttttagy

SEQ ID NO: 171732 - DNA, 13 bp, Artificial Sequence
  Oligonucleotide for detection of SNP TSC0042809
rctaaaaaataca

SEQ ID NO: 171733 - DNA, 13 bp, Artificial Sequence
  Oligonucleotide for detection of SNP TSC0042809
gttaggtgatgta

SEQ ID NO: 171734 - DNA, 13 bp, Artificial Sequence
  Oligonucleotide for detection of SNP TSC0042809
tacatcacctaac

SEQ ID NO: 171735 - DNA, 13 bp, Artificial Sequence
  Oligonucleotide for detection of SNP TSC0042809
gttaggagatgta

SEQ ID NO: 171736 - DNA, 13 bp, Artificial Sequence
  Oligonucleotide for detection of SNP TSC0042809
tacatctcctaac

SEQ ID NO: 171737 - DNA, 13 bp, Artificial Sequence
  Oligonucleotide for detection of SNP TSC0042810
ttaagtatttata

SEQ ID NO: 171738 - DNA, 13 bp, Artificial Sequence
  Oligonucleotide for detection of SNP TSC0042810
tataaatacttaa

SEQ ID NO: 171739 - DNA, 13 bp, Artificial Sequence
  Oligonucleotide for detection of SNP TSC0042810
ttaagtgtttata

SEQ ID NO: 171740 - DNA, 13 bp, Artificial Sequence
  Oligonucleotide for detection of SNP TSC0042810
tataaacacttaa

SEQ ID NO: 171741 - DNA, 13 bp, Artificial Sequence
  Oligonucleotide for detection of SNP TSC0042814
atttttaaaaaag

SEQ ID NO: 171742 - DNA, 13 bp, Artificial Sequence
  Oligonucleotide for detection of SNP TSC0042814
cttttttaaaaat

SEQ ID NO: 171743 - DNA, 13 bp, Artificial Sequence
  Oligonucleotide for detection of SNP TSC0042815
ggaatagagagag

SEQ ID NO: 171744 - DNA, 13 bp, Artificial Sequence
  Oligonucleotide for detection of SNP TSC0042815
ctctctctattcc

SEQ ID NO: 171745 - DNA, 13 bp, Artificial Sequence
  Oligonucleotide for detection of SNP TSC0042815
ggaatatagagag

SEQ ID NO: 171746 - DNA, 13 bp, Artificial Sequence
  Oligonucleotide for detection of SNP TSC0042815
ctctctatattcc

SEQ ID NO: 171747 - DNA, 13 bp, Artificial Sequence
  Oligonucleotide for detection of SNP TSC0042816
ggagggagggaga

SEQ ID NO: 171748 - DNA, 13 bp, Artificial Sequence
  Oligonucleotide for detection of SNP TSC0042816
tctccctccctcc

SEQ ID NO: 171749 - DNA, 13 bp, Artificial Sequence
  Oligonucleotide for detection of SNP TSC0042816
ggagggtgggaga

SEQ ID NO: 171750 - DNA, 13 bp, Artificial Sequence
  Oligonucleotide for detection of SNP TSC0042816
tctcccaccctcc

SEQ ID NO: 171751 - DNA, 13 bp, Artificial Sequence
  Oligonucleotide for detection of SNP TSC0042816
ggagggcgggaga

SEQ ID NO: 171752 - DNA, 13 bp, Artificial Sequence
  Oligonucleotide for detection of SNP TSC0042816
tctcccgccctcc

SEQ ID NO: 171753 - DNA, 13 bp, Artificial Sequence
  Oligonucleotide for detection of SNP TSC0042818
ttggtttgggatg

SEQ ID NO: 171754 - DNA, 13 bp, Artificial Sequence
  Oligonucleotide for detection of SNP TSC0042818
catcccaaaccaa

SEQ ID NO: 171755 - DNA, 13 bp, Artificial Sequence
  Oligonucleotide for detection of SNP TSC0042818
ttggttcgggatg

SEQ ID NO: 171756 - DNA, 13 bp, Artificial Sequence
  Oligonucleotide for detection of SNP TSC0042818
catcccgaaccaa

SEQ ID NO: 171757 - DNA, 13 bp, Artificial Sequence
  Oligonucleotide for detection of SNP TSC0042818
tattttggattaa

SEQ ID NO: 171758 - DNA, 13 bp, Artificial Sequence
  Oligonucleotide for detection of SNP TSC0042818
ttaatccaaaata

SEQ ID NO: 171759 - DNA, 13 bp, Artificial Sequence
  Oligonucleotide for detection of SNP TSC0042818
tattttagattaa

SEQ ID NO: 171760 - DNA, 13 bp, Artificial Sequence
  Oligonucleotide for detection of SNP TSC0042818
ttaatctaaaata

SEQ ID NO: 171761 - DNA, 13 bp, Artificial Sequence
  Oligonucleotide for detection of SNP TSC0042818
tatttcggattaa

SEQ ID NO: 171762 - DNA, 13 bp, Artificial Sequence
  Oligonucleotide for detection of SNP TSC0042818
ttaatccgaaata

SEQ ID NO: 171763 - DNA, 13 bp, Artificial Sequence
  Oligonucleotide for detection of SNP TSC0042819
gggattataaaat

SEQ ID NO: 171764 - DNA, 13 bp, Artificial Sequence
  Oligonucleotide for detection of SNP TSC0042819
attttataatccc

SEQ ID NO: 171765 - DNA, 13 bp, Artificial Sequence
  Oligonucleotide for detection of SNP TSC0042819
gggattgtaaaat

SEQ ID NO: 171766 - DNA, 13 bp, Artificial Sequence
  Oligonucleotide for detection of SNP TSC0042819
attttacaatccc

SEQ ID NO: 171767 - DNA, 13 bp, Artificial Sequence
  Oligonucleotide for detection of SNP TSC0042820
gttagtaggtttt

SEQ ID NO: 171768 - DNA, 13 bp, Artificial Sequence
  Oligonucleotide for detection of SNP TSC0042820
aaaacctactaac

SEQ ID NO: 171769 - DNA, 13 bp, Artificial Sequence
  Oligonucleotide for detection of SNP TSC0042820
gttagttggtttt

SEQ ID NO: 171770 - DNA, 13 bp, Artificial Sequence
  Oligonucleotide for detection of SNP TSC0042820
aaaaccaactaac

SEQ ID NO: 171771 - DNA, 13 bp, Artificial Sequence
  Oligonucleotide for detection of SNP TSC0042820
gttagtcggtttt

SEQ ID NO: 171772 - DNA, 13 bp, Artificial Sequence
  Oligonucleotide for detection of SNP TSC0042820
aaaaccgactaac

SEQ ID NO: 171773 - DNA, 13 bp, Artificial Sequence
  Oligonucleotide for detection of SNP TSC0042820
aagatttattggy

SEQ ID NO: 171774 - DNA, 13 bp, Artificial Sequence
  Oligonucleotide for detection of SNP TSC0042820
rccaataaatctt

SEQ ID NO: 171775 - DNA, 13 bp, Artificial Sequence
  Oligonucleotide for detection of SNP TSC0042820
aagattgattggy

SEQ ID NO: 171776 - DNA, 13 bp, Artificial Sequence
  Oligonucleotide for detection of SNP TSC0042820
rccaatcaatctt

SEQ ID NO: 171777 - DNA, 13 bp, Artificial Sequence
  Oligonucleotide for detection of SNP TSC0042820
aagatcgattggy

SEQ ID NO: 171778 - DNA, 13 bp, Artificial Sequence
  Oligonucleotide for detection of SNP TSC0042820
rccaatcgatctt

SEQ ID NO: 171779 - DNA, 13 bp, Artificial Sequence
  Oligonucleotide for detection of SNP TSC0042821
ggatagagttgat

SEQ ID NO: 171780 - DNA, 13 bp, Artificial Sequence
  Oligonucleotide for detection of SNP TSC0042821
atcaactctatcc

SEQ ID NO: 171781 - DNA, 13 bp, Artificial Sequence
  Oligonucleotide for detection of SNP TSC0042821
ggatagggttgat

SEQ ID NO: 171782 - DNA, 13 bp, Artificial Sequence
  Oligonucleotide for detection of SNP TSC0042821
atcaaccctatcc

SEQ ID NO: 171783 - DNA, 13 bp, Artificial Sequence
  Oligonucleotide for detection of SNP TSC0042822
atttttaaatata

SEQ ID NO: 171784 - DNA, 13 bp, Artificial Sequence
  Oligonucleotide for detection of SNP TSC0042822
tatatttaaaaat

SEQ ID NO: 171785 - DNA, 13 bp, Artificial Sequence
  Oligonucleotide for detection of SNP TSC0042822
atttttgaatata

SEQ ID NO: 171786 - DNA, 13 bp, Artificial Sequence
  Oligonucleotide for detection of SNP TSC0042822
tatattcaaaaat

SEQ ID NO: 171787 - DNA, 13 bp, Artificial Sequence
  Oligonucleotide for detection of SNP TSC0042822
attttcgaatata

SEQ ID NO: 171788 - DNA, 13 bp, Artificial Sequence
  Oligonucleotide for detection of SNP TSC0042822
tatattcgaaaat

SEQ ID NO: 171789 - DNA, 13 bp, Artificial Sequence
  Oligonucleotide for detection of SNP TSC0042822
tatatttgggggt

SEQ ID NO: 171790 - DNA, 13 bp, Artificial Sequence
  Oligonucleotide for detection of SNP TSC0042822
acccccaaatata

SEQ ID NO: 171791 - DNA, 13 bp, Artificial Sequence
  Oligonucleotide for detection of SNP TSC0042822
tatattcgggggt

SEQ ID NO: 171792 - DNA, 13 bp, Artificial Sequence
  Oligonucleotide for detection of SNP TSC0042822
acccccgaatata

SEQ ID NO: 171793 - DNA, 13 bp, Artificial Sequence
  Oligonucleotide for detection of SNP TSC0042825
tagtgagtttgaa

SEQ ID NO: 171794 - DNA, 13 bp, Artificial Sequence
  Oligonucleotide for detection of SNP TSC0042825
ttcaaactcacta

SEQ ID NO: 171795 - DNA, 13 bp, Artificial Sequence
  Oligonucleotide for detection of SNP TSC0042825
tagtgaatttgaa

SEQ ID NO: 171796 - DNA, 13 bp, Artificial Sequence
  Oligonucleotide for detection of SNP TSC0042825
ttcaaattcacta

SEQ ID NO: 171797 - DNA, 13 bp, Artificial Sequence
  Oligonucleotide for detection of SNP TSC0007830
aataaatgttggg

SEQ ID NO: 171798 - DNA, 13 bp, Artificial Sequence
  Oligonucleotide for detection of SNP TSC0007830
cccaacatttatt

SEQ ID NO: 171799 - DNA, 13 bp, Artificial Sequence
  Oligonucleotide for detection of SNP TSC0007830
aataaacgttggg

SEQ ID NO: 171800 - DNA, 13 bp, Artificial Sequence
  Oligonucleotide for detection of SNP TSC0007830
cccaacgtttatt

SEQ ID NO: 171801 - DNA, 13 bp, Artificial Sequence
  Oligonucleotide for detection of SNP TSC0005162
agtattgttatgt

SEQ ID NO: 171802 - DNA, 13 bp, Artificial Sequence
  Oligonucleotide for detection of SNP TSC0005162
acataacaatact

SEQ ID NO: 171803 - DNA, 13 bp, Artificial Sequence
  Oligonucleotide for detection of SNP TSC0005162
agtattattatgt

SEQ ID NO: 171804 - DNA, 13 bp, Artificial Sequence
  Oligonucleotide for detection of SNP TSC0005162
acataataatact

SEQ ID NO: 171805 - DNA, 13 bp, Artificial Sequence
  Oligonucleotide for detection of SNP TSC0010186
gatgattaattta

SEQ ID NO: 171806 - DNA, 13 bp, Artificial Sequence
  Oligonucleotide for detection of SNP TSC0010186
taaattaatcatc

SEQ ID NO: 171807 - DNA, 13 bp, Artificial Sequence
  Oligonucleotide for detection of SNP TSC0010186
gatgatgaattta

SEQ ID NO: 171808 - DNA, 13 bp, Artificial Sequence
  Oligonucleotide for detection of SNP TSC0010186
taaattcatcatc

SEQ ID NO: 171809 - DNA, 13 bp, Artificial Sequence
  Oligonucleotide for detection of SNP TSC0010186
gatgacgaattta

SEQ ID NO: 171810 - DNA, 13 bp, Artificial Sequence
  Oligonucleotide for detection of SNP TSC0010186
taaattcgtcatc

SEQ ID NO: 171811 - DNA, 13 bp, Artificial Sequence
  Oligonucleotide for detection of SNP TSC0010186
tggattggttaty

SEQ ID NO: 171812 - DNA, 13 bp, Artificial Sequence
  Oligonucleotide for detection of SNP TSC0010186
rataaccaatcca

SEQ ID NO: 171813 - DNA, 13 bp, Artificial Sequence
  Oligonucleotide for detection of SNP TSC0010186
tggatttgttaty

SEQ ID NO: 171814 - DNA, 13 bp, Artificial Sequence
  Oligonucleotide for detection of SNP TSC0010186
rataacaaatcca

SEQ ID NO: 171815 - DNA, 13 bp, Artificial Sequence
  Oligonucleotide for detection of SNP TSC0010186
tggattcgttaty

SEQ ID NO: 171816 - DNA, 13 bp, Artificial Sequence
  Oligonucleotide for detection of SNP TSC0010186
rataacgaatcca

SEQ ID NO: 171817 - DNA, 13 bp, Artificial Sequence
  Oligonucleotide for detection of SNP TSC0010187
gaattataaatgy

SEQ ID NO: 171818 - DNA, 13 bp, Artificial Sequence
  Oligonucleotide for detection of SNP TSC0010187
rcatttataattc

SEQ ID NO: 171819 - DNA, 13 bp, Artificial Sequence
  Oligonucleotide for detection of SNP TSC0010187
gaattagaaatgy

SEQ ID NO: 171820 - DNA, 13 bp, Artificial Sequence
  Oligonucleotide for detection of SNP TSC0010187
rcatttctaattc

SEQ ID NO: 171821 - DNA, 13 bp, Artificial Sequence
  Oligonucleotide for detection of SNP TSC0010187
gtatttgtaatty

SEQ ID NO: 171822 - DNA, 13 bp, Artificial Sequence
  Oligonucleotide for detection of SNP TSC0010187
raattacaaatac

SEQ ID NO: 171823 - DNA, 13 bp, Artificial Sequence
  Oligonucleotide for detection of SNP TSC0010187
gtatttttaatty

SEQ ID NO: 171824 - DNA, 13 bp, Artificial Sequence
  Oligonucleotide for detection of SNP TSC0010187
raattaaaaatac

SEQ ID NO: 171825 - DNA, 13 bp, Artificial Sequence
  Oligonucleotide for detection of SNP TSC0042830
ggtattgttatty

SEQ ID NO: 171826 - DNA, 13 bp, Artificial Sequence
  Oligonucleotide for detection of SNP TSC0042830
raataacaatacc

SEQ ID NO: 171827 - DNA, 13 bp, Artificial Sequence
  Oligonucleotide for detection of SNP TSC0042830
ggtattattatty

SEQ ID NO: 171828 - DNA, 13 bp, Artificial Sequence
  Oligonucleotide for detection of SNP TSC0042830
raataataatacc

SEQ ID NO: 171829 - DNA, 13 bp, Artificial Sequence
  Oligonucleotide for detection of SNP TSC0042831
aataatattaatg

SEQ ID NO: 171830 - DNA, 13 bp, Artificial Sequence
  Oligonucleotide for detection of SNP TSC0042831
cattaatattatt

SEQ ID NO: 171831 - DNA, 13 bp, Artificial Sequence
  Oligonucleotide for detection of SNP TSC0042831
aataattttaatg

SEQ ID NO: 171832 - DNA, 13 bp, Artificial Sequence
  Oligonucleotide for detection of SNP TSC0042831
cattaaaattatt

SEQ ID NO: 171833 - DNA, 13 bp, Artificial Sequence
  Oligonucleotide for detection of SNP TSC0042832
attattaggggaa

SEQ ID NO: 171834 - DNA, 13 bp, Artificial Sequence
  Oligonucleotide for detection of SNP TSC0042832
ttcccctaataat

SEQ ID NO: 171835 - DNA, 13 bp, Artificial Sequence
  Oligonucleotide for detection of SNP TSC0042832
attattgggggaa

SEQ ID NO: 171836 - DNA, 13 bp, Artificial Sequence
  Oligonucleotide for detection of SNP TSC0042832
ttcccccaataat

SEQ ID NO: 171837 - DNA, 13 bp, Artificial Sequence
  Oligonucleotide for detection of SNP TSC0042832
attatcgggggaa

SEQ ID NO: 171838 - DNA, 13 bp, Artificial Sequence
  Oligonucleotide for detection of SNP TSC0042832
ttcccccgataat

SEQ ID NO: 171839 - DNA, 13 bp, Artificial Sequence
  Oligonucleotide for detection of SNP TSC0042832
tttttttgatggt

SEQ ID NO: 171840 - DNA, 13 bp, Artificial Sequence
  Oligonucleotide for detection of SNP TSC0042832
accatcaaaaaaa

SEQ ID NO: 171841 - DNA, 13 bp, Artificial Sequence
  Oligonucleotide for detection of SNP TSC0042832
ttttttcgatggt

SEQ ID NO: 171842 - DNA, 13 bp, Artificial Sequence
  Oligonucleotide for detection of SNP TSC0042832
accatcgaaaaaa

SEQ ID NO: 171843 - DNA, 13 bp, Artificial Sequence
  Oligonucleotide for detection of SNP TSC0042835
ataattatatgaa

SEQ ID NO: 171844 - DNA, 13 bp, Artificial Sequence
  Oligonucleotide for detection of SNP TSC0042835
ttcatataattat

SEQ ID NO: 171845 - DNA, 13 bp, Artificial Sequence
  Oligonucleotide for detection of SNP TSC0042835
ataattttatgaa

SEQ ID NO: 171846 - DNA, 13 bp, Artificial Sequence
  Oligonucleotide for detection of SNP TSC0042835
ttcataaaattat

SEQ ID NO: 171847 - DNA, 13 bp, Artificial Sequence
  Oligonucleotide for detection of SNP TSC0042835
tttatgtagttgt

SEQ ID NO: 171848 - DNA, 13 bp, Artificial Sequence
  Oligonucleotide for detection of SNP TSC0042835
acaactacataaa

SEQ ID NO: 171849 - DNA, 13 bp, Artificial Sequence
  Oligonucleotide for detection of SNP TSC0042835
tttatgaagttgt

SEQ ID NO: 171850 - DNA, 13 bp, Artificial Sequence
  Oligonucleotide for detection of SNP TSC0042835
acaacttcataaa

SEQ ID NO: 171851 - DNA, 13 bp, Artificial Sequence
  Oligonucleotide for detection of SNP TSC0042836
aaaatgtggaaag

SEQ ID NO: 171852 - DNA, 13 bp, Artificial Sequence
  Oligonucleotide for detection of SNP TSC0042836
ctttccacatttt

SEQ ID NO: 171853 - DNA, 13 bp, Artificial Sequence
  Oligonucleotide for detection of SNP TSC0042836
aaaatgcggaaag

SEQ ID NO: 171854 - DNA, 13 bp, Artificial Sequence
  Oligonucleotide for detection of SNP TSC0042836
ctttccgcatttt

SEQ ID NO: 171855 - DNA, 13 bp, Artificial Sequence
  Oligonucleotide for detection of SNP TSC0042837
ttaaaattgttag

SEQ ID NO: 171856 - DNA, 13 bp, Artificial Sequence
  Oligonucleotide for detection of SNP TSC0042837
ctaacaattttaa

SEQ ID NO: 171857 - DNA, 13 bp, Artificial Sequence
  Oligonucleotide for detection of SNP TSC0042837
ttaaaagtgttag

SEQ ID NO: 171858 - DNA, 13 bp, Artificial Sequence
  Oligonucleotide for detection of SNP TSC0042837
ctaacacttttaa

SEQ ID NO: 171859 - DNA, 13 bp, Artificial Sequence
  Oligonucleotide for detection of SNP TSC0042837
ttaataattttag

SEQ ID NO: 171860 - DNA, 13 bp, Artificial Sequence
  Oligonucleotide for detection of SNP TSC0042837
ctaaaattattaa

SEQ ID NO: 171861 - DNA, 13 bp, Artificial Sequence
  Oligonucleotide for detection of SNP TSC0042837
ttaatatttttag

SEQ ID NO: 171862 - DNA, 13 bp, Artificial Sequence
  Oligonucleotide for detection of SNP TSC0042837
ctaaaaatattaa

SEQ ID NO: 171863 - DNA, 13 bp, Artificial Sequence
  Oligonucleotide for detection of SNP TSC0042838
attgtaatataay

SEQ ID NO: 171864 - DNA, 13 bp, Artificial Sequence
  Oligonucleotide for detection of SNP TSC0042838
rttatattacaat

SEQ ID NO: 171865 - DNA, 13 bp, Artificial Sequence
  Oligonucleotide for detection of SNP TSC0042838
attgtagtataay

SEQ ID NO: 171866 - DNA, 13 bp, Artificial Sequence
  Oligonucleotide for detection of SNP TSC0042838
rttatactacaat

SEQ ID NO: 171867 - DNA, 13 bp, Artificial Sequence
  Oligonucleotide for detection of SNP TSC0042839
agaataaaagtgg

SEQ ID NO: 171868 - DNA, 13 bp, Artificial Sequence
  Oligonucleotide for detection of SNP TSC0042839
ccacttttattct

SEQ ID NO: 171869 - DNA, 13 bp, Artificial Sequence
  Oligonucleotide for detection of SNP TSC0042839
agaatataagtgg

SEQ ID NO: 171870 - DNA, 13 bp, Artificial Sequence
  Oligonucleotide for detection of SNP TSC0042839
ccacttatattct

SEQ ID NO: 171871 - DNA, 13 bp, Artificial Sequence
  Oligonucleotide for detection of SNP TSC0042840
agttgggtatttt

SEQ ID NO: 171872 - DNA, 13 bp, Artificial Sequence
  Oligonucleotide for detection of SNP TSC0042840
aaaatacccaact

SEQ ID NO: 171873 - DNA, 13 bp, Artificial Sequence
  Oligonucleotide for detection of SNP TSC0042840
agttggatatttt

SEQ ID NO: 171874 - DNA, 13 bp, Artificial Sequence
  Oligonucleotide for detection of SNP TSC0042840
aaaatatccaact

SEQ ID NO: 171875 - DNA, 13 bp, Artificial Sequence
  Oligonucleotide for detection of SNP TSC0042844
gatgatattttgg

SEQ ID NO: 171876 - DNA, 13 bp, Artificial Sequence
  Oligonucleotide for detection of SNP TSC0042844
ccaaaatatcatc

SEQ ID NO: 171877 - DNA, 13 bp, Artificial Sequence
  Oligonucleotide for detection of SNP TSC0042844
gatgatgttttgg

SEQ ID NO: 171878 - DNA, 13 bp, Artificial Sequence
  Oligonucleotide for detection of SNP TSC0042844
ccaaaacatcatc

SEQ ID NO: 171879 - DNA, 13 bp, Artificial Sequence
  Oligonucleotide for detection of SNP TSC0042844
gatgatatttcgg

SEQ ID NO: 171880 - DNA, 13 bp, Artificial Sequence
  Oligonucleotide for detection of SNP TSC0042844
ccgaaatatcatc

SEQ ID NO: 171881 - DNA, 13 bp, Artificial Sequence
  Oligonucleotide for detection of SNP TSC0042844
gatgatgtttcgg

SEQ ID NO: 171882 - DNA, 13 bp, Artificial Sequence
  Oligonucleotide for detection of SNP TSC0042844
ccgaaacatcatc

SEQ ID NO: 171883 - DNA, 13 bp, Artificial Sequence
  Oligonucleotide for detection of SNP TSC0042845
taatatagtgaag

SEQ ID NO: 171884 - DNA, 13 bp, Artificial Sequence
  Oligonucleotide for detection of SNP TSC0042845
cttcactatatta

SEQ ID NO: 171885 - DNA, 13 bp, Artificial Sequence
  Oligonucleotide for detection of SNP TSC0042845
taatatggtgaag

SEQ ID NO: 171886 - DNA, 13 bp, Artificial Sequence
  Oligonucleotide for detection of SNP TSC0042845
cttcaccatatta

SEQ ID NO: 171887 - DNA, 13 bp, Artificial Sequence
  Oligonucleotide for detection of SNP TSC0042845
taatacggtgaag

SEQ ID NO: 171888 - DNA, 13 bp, Artificial Sequence
  Oligonucleotide for detection of SNP TSC0042845
cttcaccgtatta

SEQ ID NO: 171889 - DNA, 13 bp, Artificial Sequence
  Oligonucleotide for detection of SNP TSC0042846
tttaagaaaatgy

SEQ ID NO: 171890 - DNA, 13 bp, Artificial Sequence
  Oligonucleotide for detection of SNP TSC0042846
rcattttcttaaa

SEQ ID NO: 171891 - DNA, 13 bp, Artificial Sequence
  Oligonucleotide for detection of SNP TSC0042846
tttaaggaaatgy

SEQ ID NO: 171892 - DNA, 13 bp, Artificial Sequence
  Oligonucleotide for detection of SNP TSC0042846
rcatttccttaaa

SEQ ID NO: 171893 - DNA, 13 bp, Artificial Sequence
  Oligonucleotide for detection of SNP TSC0009000
tttgaaattttat

SEQ ID NO: 171894 - DNA, 13 bp, Artificial Sequence
  Oligonucleotide for detection of SNP TSC0009000
ataaaatttcaaa

SEQ ID NO: 171895 - DNA, 13 bp, Artificial Sequence
  Oligonucleotide for detection of SNP TSC0009000
tttgaagttttat

SEQ ID NO: 171896 - DNA, 13 bp, Artificial Sequence
  Oligonucleotide for detection of SNP TSC0009000
ataaaacttcaaa

SEQ ID NO: 171897 - DNA, 13 bp, Artificial Sequence
  Oligonucleotide for detection of SNP TSC0009001
agaaatatattgy

SEQ ID NO: 171898 - DNA, 13 bp, Artificial Sequence
  Oligonucleotide for detection of SNP TSC0009001
rcaatatatttct

SEQ ID NO: 171899 - DNA, 13 bp, Artificial Sequence
  Oligonucleotide for detection of SNP TSC0009001
agaaatgtattgy

SEQ ID NO: 171900 - DNA, 13 bp, Artificial Sequence
  Oligonucleotide for detection of SNP TSC0009001
rcaatacatttct

SEQ ID NO: 171901 - DNA, 13 bp, Artificial Sequence
  Oligonucleotide for detection of SNP TSC0042851
ataggtataatgy

SEQ ID NO: 171902 - DNA, 13 bp, Artificial Sequence
  Oligonucleotide for detection of SNP TSC0042851
rcattatacctat

SEQ ID NO: 171903 - DNA, 13 bp, Artificial Sequence
  Oligonucleotide for detection of SNP TSC0042851
ataggtttaatgy

SEQ ID NO: 171904 - DNA, 13 bp, Artificial Sequence
  Oligonucleotide for detection of SNP TSC0042851
rcattaaacctat

SEQ ID NO: 171905 - DNA, 13 bp, Artificial Sequence
  Oligonucleotide for detection of SNP TSC0042851
gtattgtgtttat

SEQ ID NO: 171906 - DNA, 13 bp, Artificial Sequence
  Oligonucleotide for detection of SNP TSC0042851
ataaacacaatac

SEQ ID NO: 171907 - DNA, 13 bp, Artificial Sequence
  Oligonucleotide for detection of SNP TSC0042851
gtattgagtttat

SEQ ID NO: 171908 - DNA, 13 bp, Artificial Sequence
  Oligonucleotide for detection of SNP TSC0042851
ataaactcaatac

SEQ ID NO: 171909 - DNA, 13 bp, Artificial Sequence
  Oligonucleotide for detection of SNP TSC0042852
ggatatatatgtt

SEQ ID NO: 171910 - DNA, 13 bp, Artificial Sequence
  Oligonucleotide for detection of SNP TSC0042852
aacatatatatcc

SEQ ID NO: 171911 - DNA, 13 bp, Artificial Sequence
  Oligonucleotide for detection of SNP TSC0042852
ggatatgtatgtt

SEQ ID NO: 171912 - DNA, 13 bp, Artificial Sequence
  Oligonucleotide for detection of SNP TSC0042852
aacatacatatcc

SEQ ID NO: 171913 - DNA, 13 bp, Artificial Sequence
  Oligonucleotide for detection of SNP TSC0042852
ggatacgtatgtt

SEQ ID NO: 171914 - DNA, 13 bp, Artificial Sequence
  Oligonucleotide for detection of SNP TSC0042852
aacatacgtatcc

SEQ ID NO: 171915 - DNA, 13 bp, Artificial Sequence
  Oligonucleotide for detection of SNP TSC0042852
agtatatgtatty

SEQ ID NO: 171916 - DNA, 13 bp, Artificial Sequence
  Oligonucleotide for detection of SNP TSC0042852
raatacatatact

SEQ ID NO: 171917 - DNA, 13 bp, Artificial Sequence
  Oligonucleotide for detection of SNP TSC0042852
agtatacgtatty

SEQ ID NO: 171918 - DNA, 13 bp, Artificial Sequence
  Oligonucleotide for detection of SNP TSC0042852
raatacgtatact

SEQ ID NO: 171919 - DNA, 13 bp, Artificial Sequence
  Oligonucleotide for detection of SNP TSC0042854
ttttttgtagtgy

SEQ ID NO: 171920 - DNA, 13 bp, Artificial Sequence
  Oligonucleotide for detection of SNP TSC0042854
rcactacaaaaaa

SEQ ID NO: 171921 - DNA, 13 bp, Artificial Sequence
  Oligonucleotide for detection of SNP TSC0042854
tttttcgtagtgy

SEQ ID NO: 171922 - DNA, 13 bp, Artificial Sequence
  Oligonucleotide for detection of SNP TSC0042854
rcactacgaaaaa

SEQ ID NO: 171923 - DNA, 13 bp, Artificial Sequence
  Oligonucleotide for detection of SNP TSC0042854
gtattatgaaaaa

SEQ ID NO: 171924 - DNA, 13 bp, Artificial Sequence
  Oligonucleotide for detection of SNP TSC0042854
tttttcataatac

SEQ ID NO: 171925 - DNA, 13 bp, Artificial Sequence
  Oligonucleotide for detection of SNP TSC0042854
gtattacgaaaaa

SEQ ID NO: 171926 - DNA, 13 bp, Artificial Sequence
  Oligonucleotide for detection of SNP TSC0042854
tttttcgtaatac

SEQ ID NO: 171927 - DNA, 13 bp, Artificial Sequence
  Oligonucleotide for detection of SNP TSC0042855
atatatttttatg

SEQ ID NO: 171928 - DNA, 13 bp, Artificial Sequence
  Oligonucleotide for detection of SNP TSC0042855
cataaaaatatat

SEQ ID NO: 171929 - DNA, 13 bp, Artificial Sequence
  Oligonucleotide for detection of SNP TSC0042855
tatagggatatat

SEQ ID NO: 171930 - DNA, 13 bp, Artificial Sequence
  Oligonucleotide for detection of SNP TSC0042855
atatatccctata

SEQ ID NO: 171931 - DNA, 13 bp, Artificial Sequence
  Oligonucleotide for detection of SNP TSC0042855
tataggtatatat

SEQ ID NO: 171932 - DNA, 13 bp, Artificial Sequence
  Oligonucleotide for detection of SNP TSC0042855
atatatacctata

SEQ ID NO: 171933 - DNA, 13 bp, Artificial Sequence
  Oligonucleotide for detection of SNP TSC0042856
aaatattgttgta

SEQ ID NO: 171934 - DNA, 13 bp, Artificial Sequence
  Oligonucleotide for detection of SNP TSC0042856
tacaacaatattt

SEQ ID NO: 171935 - DNA, 13 bp, Artificial Sequence
  Oligonucleotide for detection of SNP TSC0042856
aaatatggttgta

SEQ ID NO: 171936 - DNA, 13 bp, Artificial Sequence
  Oligonucleotide for detection of SNP TSC0042856
tacaaccatattt

SEQ ID NO: 171937 - DNA, 13 bp, Artificial Sequence
  Oligonucleotide for detection of SNP TSC0042856
tataataatattt

SEQ ID NO: 171938 - DNA, 13 bp, Artificial Sequence
  Oligonucleotide for detection of SNP TSC0042856
aaatattattata

SEQ ID NO: 171939 - DNA, 13 bp, Artificial Sequence
  Oligonucleotide for detection of SNP TSC0042857
ttgttagtgtttt

SEQ ID NO: 171940 - DNA, 13 bp, Artificial Sequence
  Oligonucleotide for detection of SNP TSC0042857
aaaacactaacaa

SEQ ID NO: 171941 - DNA, 13 bp, Artificial Sequence
  Oligonucleotide for detection of SNP TSC0042857
ttgttaatgtttt

SEQ ID NO: 171942 - DNA, 13 bp, Artificial Sequence
  Oligonucleotide for detection of SNP TSC0042857
aaaacattaacaa

SEQ ID NO: 171943 - DNA, 13 bp, Artificial Sequence
  Oligonucleotide for detection of SNP TSC0042858
aaaaatgtgtaag

SEQ ID NO: 171944 - DNA, 13 bp, Artificial Sequence
  Oligonucleotide for detection of SNP TSC0042858
cttacacattttt

SEQ ID NO: 171945 - DNA, 13 bp, Artificial Sequence
  Oligonucleotide for detection of SNP TSC0042858
aaaaatatgtaag

SEQ ID NO: 171946 - DNA, 13 bp, Artificial Sequence
  Oligonucleotide for detection of SNP TSC0042858
cttacatattttt

SEQ ID NO: 171947 - DNA, 13 bp, Artificial Sequence
  Oligonucleotide for detection of SNP TSC0042858
aaaaacgtgtaag

SEQ ID NO: 171948 - DNA, 13 bp, Artificial Sequence
  Oligonucleotide for detection of SNP TSC0042858
cttacacgttttt

SEQ ID NO: 171949 - DNA, 13 bp, Artificial Sequence
  Oligonucleotide for detection of SNP TSC0042862
tgagatgttttty

SEQ ID NO: 171950 - DNA, 13 bp, Artificial Sequence
  Oligonucleotide for detection of SNP TSC0042862
raaaaacatctca

SEQ ID NO: 171951 - DNA, 13 bp, Artificial Sequence
  Oligonucleotide for detection of SNP TSC0042862
tgagatattttty

SEQ ID NO: 171952 - DNA, 13 bp, Artificial Sequence
  Oligonucleotide for detection of SNP TSC0042862
raaaaatatctca

SEQ ID NO: 171953 - DNA, 13 bp, Artificial Sequence
  Oligonucleotide for detection of SNP TSC0042865
tttaaaaattgty

SEQ ID NO: 171954 - DNA, 13 bp, Artificial Sequence
  Oligonucleotide for detection of SNP TSC0042865
racaatttttaaa

SEQ ID NO: 171955 - DNA, 13 bp, Artificial Sequence
  Oligonucleotide for detection of SNP TSC0042865
tttaaatattgty

SEQ ID NO: 171956 - DNA, 13 bp, Artificial Sequence
  Oligonucleotide for detection of SNP TSC0042865
racaatatttaaa

SEQ ID NO: 171957 - DNA, 13 bp, Artificial Sequence
  Oligonucleotide for detection of SNP TSC0042865
ggtagtttttaaa

SEQ ID NO: 171958 - DNA, 13 bp, Artificial Sequence
  Oligonucleotide for detection of SNP TSC0042865
tttaaaaactacc

SEQ ID NO: 171959 - DNA, 13 bp, Artificial Sequence
  Oligonucleotide for detection of SNP TSC0042865
ggtagtgtttaaa

SEQ ID NO: 171960 - DNA, 13 bp, Artificial Sequence
  Oligonucleotide for detection of SNP TSC0042865
tttaaacactacc

SEQ ID NO: 171961 - DNA, 13 bp, Artificial Sequence
  Oligonucleotide for detection of SNP TSC0042866
agagttgaattta

SEQ ID NO: 171962 - DNA, 13 bp, Artificial Sequence
  Oligonucleotide for detection of SNP TSC0042866
taaattcaactct

SEQ ID NO: 171963 - DNA, 13 bp, Artificial Sequence
  Oligonucleotide for detection of SNP TSC0042866
agagttaaattta

SEQ ID NO: 171964 - DNA, 13 bp, Artificial Sequence
  Oligonucleotide for detection of SNP TSC0042866
taaatttaactct

SEQ ID NO: 171965 - DNA, 13 bp, Artificial Sequence
  Oligonucleotide for detection of SNP TSC0042867
aagaaagataaga

SEQ ID NO: 171966 - DNA, 13 bp, Artificial Sequence
  Oligonucleotide for detection of SNP TSC0042867
tcttatctttctt

SEQ ID NO: 171967 - DNA, 13 bp, Artificial Sequence
  Oligonucleotide for detection of SNP TSC0042867
aagaaaaataaga

SEQ ID NO: 171968 - DNA, 13 bp, Artificial Sequence
  Oligonucleotide for detection of SNP TSC0042867
tcttatttttctt

SEQ ID NO: 171969 - DNA, 13 bp, Artificial Sequence
  Oligonucleotide for detection of SNP TSC0042868
ggataatgaaata

SEQ ID NO: 171970 - DNA, 13 bp, Artificial Sequence
  Oligonucleotide for detection of SNP TSC0042868
tatttcattatcc

SEQ ID NO: 171971 - DNA, 13 bp, Artificial Sequence
  Oligonucleotide for detection of SNP TSC0042868
ggataacgaaata

SEQ ID NO: 171972 - DNA, 13 bp, Artificial Sequence
  Oligonucleotide for detection of SNP TSC0042868
tatttcgttatcc

SEQ ID NO: 171973 - DNA, 13 bp, Artificial Sequence
  Oligonucleotide for detection of SNP TSC0042868
tgtttcgttgtty

SEQ ID NO: 171974 - DNA, 13 bp, Artificial Sequence
  Oligonucleotide for detection of SNP TSC0042868
raacaacgaaaca

SEQ ID NO: 171975 - DNA, 13 bp, Artificial Sequence
  Oligonucleotide for detection of SNP TSC0042871
ggtttaggaaaaa

SEQ ID NO: 171976 - DNA, 13 bp, Artificial Sequence
  Oligonucleotide for detection of SNP TSC0042871
tttttcctaaacc

SEQ ID NO: 171977 - DNA, 13 bp, Artificial Sequence
  Oligonucleotide for detection of SNP TSC0042871
ggtttaagaaaaa

SEQ ID NO: 171978 - DNA, 13 bp, Artificial Sequence
  Oligonucleotide for detection of SNP TSC0042871
tttttcttaaacc

SEQ ID NO: 171979 - DNA, 13 bp, Artificial Sequence
  Oligonucleotide for detection of SNP TSC0042872
tatgttgtgaatg

SEQ ID NO: 171980 - DNA, 13 bp, Artificial Sequence
  Oligonucleotide for detection of SNP TSC0042872
cattcacaacata

SEQ ID NO: 171981 - DNA, 13 bp, Artificial Sequence
  Oligonucleotide for detection of SNP TSC0042872
tatgttatgaatg

SEQ ID NO: 171982 - DNA, 13 bp, Artificial Sequence
  Oligonucleotide for detection of SNP TSC0042872
cattcataacata

SEQ ID NO: 171983 - DNA, 13 bp, Artificial Sequence
  Oligonucleotide for detection of SNP TSC0042875
ttaggtgatagtt

SEQ ID NO: 171984 - DNA, 13 bp, Artificial Sequence
  Oligonucleotide for detection of SNP TSC0042875
aactatcacctaa

SEQ ID NO: 171985 - DNA, 13 bp, Artificial Sequence
  Oligonucleotide for detection of SNP TSC0042875
ttaggtaatagtt

SEQ ID NO: 171986 - DNA, 13 bp, Artificial Sequence
  Oligonucleotide for detection of SNP TSC0042875
aactattacctaa

SEQ ID NO: 171987 - DNA, 13 bp, Artificial Sequence
  Oligonucleotide for detection of SNP TSC0042880
tggtgtggttagg

SEQ ID NO: 171988 - DNA, 13 bp, Artificial Sequence
  Oligonucleotide for detection of SNP TSC0042880
cctaaccacacca

SEQ ID NO: 171989 - DNA, 13 bp, Artificial Sequence
  Oligonucleotide for detection of SNP TSC0042880
tggtgtagttagg

SEQ ID NO: 171990 - DNA, 13 bp, Artificial Sequence
  Oligonucleotide for detection of SNP TSC0042880
cctaactacacca

SEQ ID NO: 171991 - DNA, 13 bp, Artificial Sequence
  Oligonucleotide for detection of SNP TSC0042881
tgtttttgattty

SEQ ID NO: 171992 - DNA, 13 bp, Artificial Sequence
  Oligonucleotide for detection of SNP TSC0042881
raaatcaaaaaca

SEQ ID NO: 171993 - DNA, 13 bp, Artificial Sequence
  Oligonucleotide for detection of SNP TSC0042881
tgttttcgattty

SEQ ID NO: 171994 - DNA, 13 bp, Artificial Sequence
  Oligonucleotide for detection of SNP TSC0042881
raaatcgaaaaca

SEQ ID NO: 171995 - DNA, 13 bp, Artificial Sequence
  Oligonucleotide for detection of SNP TSC0042881
gaaattgaagata

SEQ ID NO: 171996 - DNA, 13 bp, Artificial Sequence
  Oligonucleotide for detection of SNP TSC0042881
tatcttcaatttc

SEQ ID NO: 171997 - DNA, 13 bp, Artificial Sequence
  Oligonucleotide for detection of SNP TSC0042881
gaaattaaagata

SEQ ID NO: 171998 - DNA, 13 bp, Artificial Sequence
  Oligonucleotide for detection of SNP TSC0042881
tatctttaatttc

SEQ ID NO: 171999 - DNA, 13 bp, Artificial Sequence
  Oligonucleotide for detection of SNP TSC0042881
gaaatcgaagata

SEQ ID NO: 172000 - DNA, 13 bp, Artificial Sequence
  Oligonucleotide for detection of SNP TSC0042881
tatcttcgatttc

SEQ ID NO: 172001 - DNA, 13 bp, Artificial Sequence
  Oligonucleotide for detection of SNP TSC0042883
tattttgaagaat

SEQ ID NO: 172002 - DNA, 13 bp, Artificial Sequence
  Oligonucleotide for detection of SNP TSC0042883
attcttcaaaata

SEQ ID NO: 172003 - DNA, 13 bp, Artificial Sequence
  Oligonucleotide for detection of SNP TSC0042883
tattttaaagaat

SEQ ID NO: 172004 - DNA, 13 bp, Artificial Sequence
  Oligonucleotide for detection of SNP TSC0042883
attctttaaaata

SEQ ID NO: 172005 - DNA, 13 bp, Artificial Sequence
  Oligonucleotide for detection of SNP TSC0042886
tagtgtaattaaa

SEQ ID NO: 172006 - DNA, 13 bp, Artificial Sequence
  Oligonucleotide for detection of SNP TSC0042886
tttaattacacta

SEQ ID NO: 172007 - DNA, 13 bp, Artificial Sequence
  Oligonucleotide for detection of SNP TSC0042886
tagtgttattaaa

SEQ ID NO: 172008 - DNA, 13 bp, Artificial Sequence
  Oligonucleotide for detection of SNP TSC0042886
tttaataacacta

SEQ ID NO: 172009 - DNA, 13 bp, Artificial Sequence
  Oligonucleotide for detection of SNP TSC0042886
tttggttgtattg

SEQ ID NO: 172010 - DNA, 13 bp, Artificial Sequence
  Oligonucleotide for detection of SNP TSC0042886
caatacaaccaaa

SEQ ID NO: 172011 - DNA, 13 bp, Artificial Sequence
  Oligonucleotide for detection of SNP TSC0042886
tttggtggtattg

SEQ ID NO: 172012 - DNA, 13 bp, Artificial Sequence
  Oligonucleotide for detection of SNP TSC0042886
caataccaccaaa

SEQ ID NO: 172013 - DNA, 13 bp, Artificial Sequence
  Oligonucleotide for detection of SNP TSC0042887
gtggatttagagg

SEQ ID NO: 172014 - DNA, 13 bp, Artificial Sequence
  Oligonucleotide for detection of SNP TSC0042887
cctctaaatccac

SEQ ID NO: 172015 - DNA, 13 bp, Artificial Sequence
  Oligonucleotide for detection of SNP TSC0042887
gtggatgtagagg

SEQ ID NO: 172016 - DNA, 13 bp, Artificial Sequence
  Oligonucleotide for detection of SNP TSC0042887
cctctacatccac

SEQ ID NO: 172017 - DNA, 13 bp, Artificial Sequence
  Oligonucleotide for detection of SNP TSC0042887
tttttggatttay

SEQ ID NO: 172018 - DNA, 13 bp, Artificial Sequence
  Oligonucleotide for detection of SNP TSC0042887
rtaaatccaaaaa

SEQ ID NO: 172019 - DNA, 13 bp, Artificial Sequence
  Oligonucleotide for detection of SNP TSC0042890
tttaatgtatata

SEQ ID NO: 172020 - DNA, 13 bp, Artificial Sequence
  Oligonucleotide for detection of SNP TSC0042890
tatatacattaaa

SEQ ID NO: 172021 - DNA, 13 bp, Artificial Sequence
  Oligonucleotide for detection of SNP TSC0042890
tttaatatatata

SEQ ID NO: 172022 - DNA, 13 bp, Artificial Sequence
  Oligonucleotide for detection of SNP TSC0042890
tatatatattaaa

SEQ ID NO: 172023 - DNA, 13 bp, Artificial Sequence
  Oligonucleotide for detection of SNP TSC0042892
ttatataagttaa

SEQ ID NO: 172024 - DNA, 13 bp, Artificial Sequence
  Oligonucleotide for detection of SNP TSC0042892
ttaacttatataa

SEQ ID NO: 172025 - DNA, 13 bp, Artificial Sequence
  Oligonucleotide for detection of SNP TSC0042892
ttatattagttaa

SEQ ID NO: 172026 - DNA, 13 bp, Artificial Sequence
  Oligonucleotide for detection of SNP TSC0042892
ttaactaatataa

SEQ ID NO: 172027 - DNA, 13 bp, Artificial Sequence
  Oligonucleotide for detection of SNP TSC0042892
ttagtttgtataa

SEQ ID NO: 172028 - DNA, 13 bp, Artificial Sequence
  Oligonucleotide for detection of SNP TSC0042892
ttatacaaactaa

SEQ ID NO: 172029 - DNA, 13 bp, Artificial Sequence
  Oligonucleotide for detection of SNP TSC0042892
ttagttggtataa

SEQ ID NO: 172030 - DNA, 13 bp, Artificial Sequence
  Oligonucleotide for detection of SNP TSC0042892
ttataccaactaa

SEQ ID NO: 172031 - DNA, 13 bp, Artificial Sequence
  Oligonucleotide for detection of SNP TSC0042894
aataaagtattat

SEQ ID NO: 172032 - DNA, 13 bp, Artificial Sequence
  Oligonucleotide for detection of SNP TSC0042894
ataatactttatt

SEQ ID NO: 172033 - DNA, 13 bp, Artificial Sequence
  Oligonucleotide for detection of SNP TSC0042894
aataaaatattat

SEQ ID NO: 172034 - DNA, 13 bp, Artificial Sequence
  Oligonucleotide for detection of SNP TSC0042894
ataatattttatt

SEQ ID NO: 172035 - DNA, 13 bp, Artificial Sequence
  Oligonucleotide for detection of SNP TSC0042895
ttataagaggttg

SEQ ID NO: 172036 - DNA, 13 bp, Artificial Sequence
  Oligonucleotide for detection of SNP TSC0042895
caacctcttataa

SEQ ID NO: 172037 - DNA, 13 bp, Artificial Sequence
  Oligonucleotide for detection of SNP TSC0042895
ttataaaaggttg

SEQ ID NO: 172038 - DNA, 13 bp, Artificial Sequence
  Oligonucleotide for detection of SNP TSC0042895
caaccttttataa

SEQ ID NO: 172039 - DNA, 13 bp, Artificial Sequence
  Oligonucleotide for detection of SNP TSC0042897
gattttgtggtga

SEQ ID NO: 172040 - DNA, 13 bp, Artificial Sequence
  Oligonucleotide for detection of SNP TSC0042897
tcaccacaaaatc

SEQ ID NO: 172041 - DNA, 13 bp, Artificial Sequence
  Oligonucleotide for detection of SNP TSC0042897
gattttatggtga

SEQ ID NO: 172042 - DNA, 13 bp, Artificial Sequence
  Oligonucleotide for detection of SNP TSC0042897
tcaccataaaatc

SEQ ID NO: 172043 - DNA, 13 bp, Artificial Sequence
  Oligonucleotide for detection of SNP TSC0042899
atttttatgtgay

SEQ ID NO: 172044 - DNA, 13 bp, Artificial Sequence
  Oligonucleotide for detection of SNP TSC0042899
rtcacataaaaat

SEQ ID NO: 172045 - DNA, 13 bp, Artificial Sequence
  Oligonucleotide for detection of SNP TSC0042900
tttaaagataatt

SEQ ID NO: 172046 - DNA, 13 bp, Artificial Sequence
  Oligonucleotide for detection of SNP TSC0042900
aattatctttaaa

SEQ ID NO: 172047 - DNA, 13 bp, Artificial Sequence
  Oligonucleotide for detection of SNP TSC0042900
tttaaaaataatt

SEQ ID NO: 172048 - DNA, 13 bp, Artificial Sequence
  Oligonucleotide for detection of SNP TSC0042900
aattatttttaaa

SEQ ID NO: 172049 - DNA, 13 bp, Artificial Sequence
  Oligonucleotide for detection of SNP TSC0042901
aggtttaaaattt

SEQ ID NO: 172050 - DNA, 13 bp, Artificial Sequence
  Oligonucleotide for detection of SNP TSC0042901
aaattttaaacct

SEQ ID NO: 172051 - DNA, 13 bp, Artificial Sequence
  Oligonucleotide for detection of SNP TSC0042901
aggttttaaattt

SEQ ID NO: 172052 - DNA, 13 bp, Artificial Sequence
  Oligonucleotide for detection of SNP TSC0042901
aaatttaaaacct

SEQ ID NO: 172053 - DNA, 13 bp, Artificial Sequence
  Oligonucleotide for detection of SNP TSC0042901
agattttaagttt

SEQ ID NO: 172054 - DNA, 13 bp, Artificial Sequence
  Oligonucleotide for detection of SNP TSC0042901
aaacttaaaatct

SEQ ID NO: 172055 - DNA, 13 bp, Artificial Sequence
  Oligonucleotide for detection of SNP TSC0042901
agatttgaagttt

SEQ ID NO: 172056 - DNA, 13 bp, Artificial Sequence
  Oligonucleotide for detection of SNP TSC0042901
aaacttcaaatct

SEQ ID NO: 172057 - DNA, 13 bp, Artificial Sequence
  Oligonucleotide for detection of SNP TSC0042902
ttgatttgggtga

SEQ ID NO: 172058 - DNA, 13 bp, Artificial Sequence
  Oligonucleotide for detection of SNP TSC0042902
tcacccaaatcaa

SEQ ID NO: 172059 - DNA, 13 bp, Artificial Sequence
  Oligonucleotide for detection of SNP TSC0042902
ttgattcgggtga

SEQ ID NO: 172060 - DNA, 13 bp, Artificial Sequence
  Oligonucleotide for detection of SNP TSC0042902
tcacccgaatcaa

SEQ ID NO: 172061 - DNA, 13 bp, Artificial Sequence
  Oligonucleotide for detection of SNP TSC0042902
ttatttggattag

SEQ ID NO: 172062 - DNA, 13 bp, Artificial Sequence
  Oligonucleotide for detection of SNP TSC0042902
ctaatccaaataa

SEQ ID NO: 172063 - DNA, 13 bp, Artificial Sequence
  Oligonucleotide for detection of SNP TSC0042902
ttatttagattag

SEQ ID NO: 172064 - DNA, 13 bp, Artificial Sequence
  Oligonucleotide for detection of SNP TSC0042902
ctaatctaaataa

SEQ ID NO: 172065 - DNA, 13 bp, Artificial Sequence
  Oligonucleotide for detection of SNP TSC0042902
ttattcggattag

SEQ ID NO: 172066 - DNA, 13 bp, Artificial Sequence
  Oligonucleotide for detection of SNP TSC0042902
ctaatccgaataa

SEQ ID NO: 172067 - DNA, 13 bp, Artificial Sequence
  Oligonucleotide for detection of SNP TSC0042903
atagtaatatttt

SEQ ID NO: 172068 - DNA, 13 bp, Artificial Sequence
  Oligonucleotide for detection of SNP TSC0042903
aaaatattactat

SEQ ID NO: 172069 - DNA, 13 bp, Artificial Sequence
  Oligonucleotide for detection of SNP TSC0042903
atagtattatttt

SEQ ID NO: 172070 - DNA, 13 bp, Artificial Sequence
  Oligonucleotide for detection of SNP TSC0042903
aaaataatactat

SEQ ID NO: 172071 - DNA, 13 bp, Artificial Sequence
  Oligonucleotide for detection of SNP TSC0042903
agaatattattgt

SEQ ID NO: 172072 - DNA, 13 bp, Artificial Sequence
  Oligonucleotide for detection of SNP TSC0042903
acaataatattct

SEQ ID NO: 172073 - DNA, 13 bp, Artificial Sequence
  Oligonucleotide for detection of SNP TSC0042903
agaatagtattgt

SEQ ID NO: 172074 - DNA, 13 bp, Artificial Sequence
  Oligonucleotide for detection of SNP TSC0042903
acaatactattct

SEQ ID NO: 172075 - DNA, 13 bp, Artificial Sequence
  Oligonucleotide for detection of SNP TSC0005766
aataaatggaaag

SEQ ID NO: 172076 - DNA, 13 bp, Artificial Sequence
  Oligonucleotide for detection of SNP TSC0005766
ctttccatttatt

SEQ ID NO: 172077 - DNA, 13 bp, Artificial Sequence
  Oligonucleotide for detection of SNP TSC0005766
aataaaaggaaag

SEQ ID NO: 172078 - DNA, 13 bp, Artificial Sequence
  Oligonucleotide for detection of SNP TSC0005766
ctttccttttatt

SEQ ID NO: 172079 - DNA, 13 bp, Artificial Sequence
  Oligonucleotide for detection of SNP TSC0005542
gtaagtataatay

SEQ ID NO: 172080 - DNA, 13 bp, Artificial Sequence
  Oligonucleotide for detection of SNP TSC0005542
rtattatacttac

SEQ ID NO: 172081 - DNA, 13 bp, Artificial Sequence
  Oligonucleotide for detection of SNP TSC0005542
gtaagtgtaatay

SEQ ID NO: 172082 - DNA, 13 bp, Artificial Sequence
  Oligonucleotide for detection of SNP TSC0005542
rtattacacttac

SEQ ID NO: 172083 - DNA, 13 bp, Artificial Sequence
  Oligonucleotide for detection of SNP TSC0042910
ggaatatgtggat

SEQ ID NO: 172084 - DNA, 13 bp, Artificial Sequence
  Oligonucleotide for detection of SNP TSC0042910
atccacatattcc

SEQ ID NO: 172085 - DNA, 13 bp, Artificial Sequence
  Oligonucleotide for detection of SNP TSC0042910
ggaatacgtggat

SEQ ID NO: 172086 - DNA, 13 bp, Artificial Sequence
  Oligonucleotide for detection of SNP TSC0042910
atccacgtattcc

SEQ ID NO: 172087 - DNA, 13 bp, Artificial Sequence
  Oligonucleotide for detection of SNP TSC0042911
gaaatatgtttat

SEQ ID NO: 172088 - DNA, 13 bp, Artificial Sequence
  Oligonucleotide for detection of SNP TSC0042911
ataaacatatttc

SEQ ID NO: 172089 - DNA, 13 bp, Artificial Sequence
  Oligonucleotide for detection of SNP TSC0042911
gaaatacgtttat

SEQ ID NO: 172090 - DNA, 13 bp, Artificial Sequence
  Oligonucleotide for detection of SNP TSC0042911
ataaacgtatttc

SEQ ID NO: 172091 - DNA, 13 bp, Artificial Sequence
  Oligonucleotide for detection of SNP TSC0042911
ataaatgtgttty

SEQ ID NO: 172092 - DNA, 13 bp, Artificial Sequence
  Oligonucleotide for detection of SNP TSC0042911
raaacacatttat

SEQ ID NO: 172093 - DNA, 13 bp, Artificial Sequence
  Oligonucleotide for detection of SNP TSC0042911
ataaatatgttty

SEQ ID NO: 172094 - DNA, 13 bp, Artificial Sequence
  Oligonucleotide for detection of SNP TSC0042911
raaacatatttat

SEQ ID NO: 172095 - DNA, 13 bp, Artificial Sequence
  Oligonucleotide for detection of SNP TSC0042911
ataaacgtgttty

SEQ ID NO: 172096 - DNA, 13 bp, Artificial Sequence
  Oligonucleotide for detection of SNP TSC0042911
raaacacgtttat

SEQ ID NO: 172097 - DNA, 13 bp, Artificial Sequence
  Oligonucleotide for detection of SNP TSC0042912
tgtttagatagga

SEQ ID NO: 172098 - DNA, 13 bp, Artificial Sequence
  Oligonucleotide for detection of SNP TSC0042912
tcctatctaaaca

SEQ ID NO: 172099 - DNA, 13 bp, Artificial Sequence
  Oligonucleotide for detection of SNP TSC0042912
tgtttaaatagga

SEQ ID NO: 172100 - DNA, 13 bp, Artificial Sequence
  Oligonucleotide for detection of SNP TSC0042912
tcctatttaaaca

SEQ ID NO: 172101 - DNA, 13 bp, Artificial Sequence
  Oligonucleotide for detection of SNP TSC0042915
ttagattagaaat

SEQ ID NO: 172102 - DNA, 13 bp, Artificial Sequence
  Oligonucleotide for detection of SNP TSC0042915
atttctaatctaa

SEQ ID NO: 172103 - DNA, 13 bp, Artificial Sequence
  Oligonucleotide for detection of SNP TSC0042915
ttagatgagaaat

SEQ ID NO: 172104 - DNA, 13 bp, Artificial Sequence
  Oligonucleotide for detection of SNP TSC0042915
atttctcatctaa

SEQ ID NO: 172105 - DNA, 13 bp, Artificial Sequence
  Oligonucleotide for detection of SNP TSC0042915
atttttaatttgg

SEQ ID NO: 172106 - DNA, 13 bp, Artificial Sequence
  Oligonucleotide for detection of SNP TSC0042915
ccaaattaaaaat

SEQ ID NO: 172107 - DNA, 13 bp, Artificial Sequence
  Oligonucleotide for detection of SNP TSC0042915
attttttatttgg

SEQ ID NO: 172108 - DNA, 13 bp, Artificial Sequence
  Oligonucleotide for detection of SNP TSC0042915
ccaaataaaaaat

SEQ ID NO: 172109 - DNA, 13 bp, Artificial Sequence
  Oligonucleotide for detection of SNP TSC0042916
ttttgttgtggat

SEQ ID NO: 172110 - DNA, 13 bp, Artificial Sequence
  Oligonucleotide for detection of SNP TSC0042916
atccacaacaaaa

SEQ ID NO: 172111 - DNA, 13 bp, Artificial Sequence
  Oligonucleotide for detection of SNP TSC0042916
ttttgtcgtggat

SEQ ID NO: 172112 - DNA, 13 bp, Artificial Sequence
  Oligonucleotide for detection of SNP TSC0042916
atccacgacaaaa

SEQ ID NO: 172113 - DNA, 13 bp, Artificial Sequence
  Oligonucleotide for detection of SNP TSC0042916
atttatggtaagg

SEQ ID NO: 172114 - DNA, 13 bp, Artificial Sequence
  Oligonucleotide for detection of SNP TSC0042916
ccttaccataaat

SEQ ID NO: 172115 - DNA, 13 bp, Artificial Sequence
  Oligonucleotide for detection of SNP TSC0042916
atttatagtaagg

SEQ ID NO: 172116 - DNA, 13 bp, Artificial Sequence
  Oligonucleotide for detection of SNP TSC0042916
ccttactataaat

SEQ ID NO: 172117 - DNA, 13 bp, Artificial Sequence
  Oligonucleotide for detection of SNP TSC0042916
atttacggtaagg

SEQ ID NO: 172118 - DNA, 13 bp, Artificial Sequence
  Oligonucleotide for detection of SNP TSC0042916
ccttaccgtaaat

SEQ ID NO: 172119 - DNA, 13 bp, Artificial Sequence
  Oligonucleotide for detection of SNP TSC0042917
ataattattaggt

SEQ ID NO: 172120 - DNA, 13 bp, Artificial Sequence
  Oligonucleotide for detection of SNP TSC0042917
acctaataattat

SEQ ID NO: 172121 - DNA, 13 bp, Artificial Sequence
  Oligonucleotide for detection of SNP TSC0042917
ataattgttaggt

SEQ ID NO: 172122 - DNA, 13 bp, Artificial Sequence
  Oligonucleotide for detection of SNP TSC0042917
acctaacaattat

SEQ ID NO: 172123 - DNA, 13 bp, Artificial Sequence
  Oligonucleotide for detection of SNP TSC0042917
ataatcgttaggt

SEQ ID NO: 172124 - DNA, 13 bp, Artificial Sequence
  Oligonucleotide for detection of SNP TSC0042917
acctaacgattat

SEQ ID NO: 172125 - DNA, 13 bp, Artificial Sequence
  Oligonucleotide for detection of SNP TSC0042919
aagttaattaaay

SEQ ID NO: 172126 - DNA, 13 bp, Artificial Sequence
  Oligonucleotide for detection of SNP TSC0042919
rtttaattaactt

SEQ ID NO: 172127 - DNA, 13 bp, Artificial Sequence
  Oligonucleotide for detection of SNP TSC0042919
aagttagttaaay

SEQ ID NO: 172128 - DNA, 13 bp, Artificial Sequence
  Oligonucleotide for detection of SNP TSC0042919
rtttaactaactt

SEQ ID NO: 172129 - DNA, 13 bp, Artificial Sequence
  Oligonucleotide for detection of SNP TSC0004816
tgagttatgagtg

SEQ ID NO: 172130 - DNA, 13 bp, Artificial Sequence
  Oligonucleotide for detection of SNP TSC0004816
cactcataactca

SEQ ID NO: 172131 - DNA, 13 bp, Artificial Sequence
  Oligonucleotide for detection of SNP TSC0004816
tgagttgtgagtg

SEQ ID NO: 172132 - DNA, 13 bp, Artificial Sequence
  Oligonucleotide for detection of SNP TSC0004816
cactcacaactca

SEQ ID NO: 172133 - DNA, 13 bp, Artificial Sequence
  Oligonucleotide for detection of SNP TSC0042920
ttttgattaattt

SEQ ID NO: 172134 - DNA, 13 bp, Artificial Sequence
  Oligonucleotide for detection of SNP TSC0042920
aaattaatcaaaa

SEQ ID NO: 172135 - DNA, 13 bp, Artificial Sequence
  Oligonucleotide for detection of SNP TSC0042920
ttttgagtaattt

SEQ ID NO: 172136 - DNA, 13 bp, Artificial Sequence
  Oligonucleotide for detection of SNP TSC0042920
aaattactcaaaa

SEQ ID NO: 172137 - DNA, 13 bp, Artificial Sequence
  Oligonucleotide for detection of SNP TSC0042920
aagttggttaaaa

SEQ ID NO: 172138 - DNA, 13 bp, Artificial Sequence
  Oligonucleotide for detection of SNP TSC0042920
ttttaaccaactt

SEQ ID NO: 172139 - DNA, 13 bp, Artificial Sequence
  Oligonucleotide for detection of SNP TSC0042920
aagttgtttaaaa

SEQ ID NO: 172140 - DNA, 13 bp, Artificial Sequence
  Oligonucleotide for detection of SNP TSC0042920
ttttaaacaactt

SEQ ID NO: 172141 - DNA, 13 bp, Artificial Sequence
  Oligonucleotide for detection of SNP TSC0042921
tttaatttaaaaa

SEQ ID NO: 172142 - DNA, 13 bp, Artificial Sequence
  Oligonucleotide for detection of SNP TSC0042921
tttttaaattaaa

SEQ ID NO: 172143 - DNA, 13 bp, Artificial Sequence
  Oligonucleotide for detection of SNP TSC0042923
tgtttaaaaatay

SEQ ID NO: 172144 - DNA, 13 bp, Artificial Sequence
  Oligonucleotide for detection of SNP TSC0042923
rtatttttaaaca

SEQ ID NO: 172145 - DNA, 13 bp, Artificial Sequence
  Oligonucleotide for detection of SNP TSC0042923
tgtttataaatay

SEQ ID NO: 172146 - DNA, 13 bp, Artificial Sequence
  Oligonucleotide for detection of SNP TSC0042923
rtatttataaaca

SEQ ID NO: 172147 - DNA, 13 bp, Artificial Sequence
  Oligonucleotide for detection of SNP TSC0042924
atttattgttttt

SEQ ID NO: 172148 - DNA, 13 bp, Artificial Sequence
  Oligonucleotide for detection of SNP TSC0042924
aaaaacaataaat

SEQ ID NO: 172149 - DNA, 13 bp, Artificial Sequence
  Oligonucleotide for detection of SNP TSC0042924
atttatcgttttt

SEQ ID NO: 172150 - DNA, 13 bp, Artificial Sequence
  Oligonucleotide for detection of SNP TSC0042924
aaaaacgataaat

SEQ ID NO: 172151 - DNA, 13 bp, Artificial Sequence
  Oligonucleotide for detection of SNP TSC0042924
aagagtggtaaat

SEQ ID NO: 172152 - DNA, 13 bp, Artificial Sequence
  Oligonucleotide for detection of SNP TSC0042924
atttaccactctt

SEQ ID NO: 172153 - DNA, 13 bp, Artificial Sequence
  Oligonucleotide for detection of SNP TSC0042924
aagagtagtaaat

SEQ ID NO: 172154 - DNA, 13 bp, Artificial Sequence
  Oligonucleotide for detection of SNP TSC0042924
atttactactctt

SEQ ID NO: 172155 - DNA, 13 bp, Artificial Sequence
  Oligonucleotide for detection of SNP TSC0042924
aagagcggtaaat

SEQ ID NO: 172156 - DNA, 13 bp, Artificial Sequence
  Oligonucleotide for detection of SNP TSC0042924
atttaccgctctt

SEQ ID NO: 172157 - DNA, 13 bp, Artificial Sequence
  Oligonucleotide for detection of SNP TSC0042928
tgtgatggtttta

SEQ ID NO: 172158 - DNA, 13 bp, Artificial Sequence
  Oligonucleotide for detection of SNP TSC0042928
taaaaccatcaca

SEQ ID NO: 172159 - DNA, 13 bp, Artificial Sequence
  Oligonucleotide for detection of SNP TSC0042928
tgtgatagtttta

SEQ ID NO: 172160 - DNA, 13 bp, Artificial Sequence
  Oligonucleotide for detection of SNP TSC0042928
taaaactatcaca

SEQ ID NO: 172161 - DNA, 13 bp, Artificial Sequence
  Oligonucleotide for detection of SNP TSC0042928
tgcgatggtttta

SEQ ID NO: 172162 - DNA, 13 bp, Artificial Sequence
  Oligonucleotide for detection of SNP TSC0042928
taaaaccatcgca

SEQ ID NO: 172163 - DNA, 13 bp, Artificial Sequence
  Oligonucleotide for detection of SNP TSC0042928
tgcgatagtttta

SEQ ID NO: 172164 - DNA, 13 bp, Artificial Sequence
  Oligonucleotide for detection of SNP TSC0042928
taaaactatcgca

SEQ ID NO: 172165 - DNA, 13 bp, Artificial Sequence
  Oligonucleotide for detection of SNP TSC0042929
tgtatgattatty

SEQ ID NO: 172166 - DNA, 13 bp, Artificial Sequence
  Oligonucleotide for detection of SNP TSC0042929
raataatcataca

SEQ ID NO: 172167 - DNA, 13 bp, Artificial Sequence
  Oligonucleotide for detection of SNP TSC0042929
tgtatggttatty

SEQ ID NO: 172168 - DNA, 13 bp, Artificial Sequence
  Oligonucleotide for detection of SNP TSC0042929
raataaccataca

SEQ ID NO: 172169 - DNA, 13 bp, Artificial Sequence
  Oligonucleotide for detection of SNP TSC0042930
gggattggtagtt

SEQ ID NO: 172170 - DNA, 13 bp, Artificial Sequence
  Oligonucleotide for detection of SNP TSC0042930
aactaccaatccc

SEQ ID NO: 172171 - DNA, 13 bp, Artificial Sequence
  Oligonucleotide for detection of SNP TSC0042930
gggattagtagtt

SEQ ID NO: 172172 - DNA, 13 bp, Artificial Sequence
  Oligonucleotide for detection of SNP TSC0042930
aactactaatccc

SEQ ID NO: 172173 - DNA, 13 bp, Artificial Sequence
  Oligonucleotide for detection of SNP TSC0042931
tttttttgaggga

SEQ ID NO: 172174 - DNA, 13 bp, Artificial Sequence
  Oligonucleotide for detection of SNP TSC0042931
tccctcaaaaaaa

SEQ ID NO: 172175 - DNA, 13 bp, Artificial Sequence
  Oligonucleotide for detection of SNP TSC0042931
ttttttagaggga

SEQ ID NO: 172176 - DNA, 13 bp, Artificial Sequence
  Oligonucleotide for detection of SNP TSC0042931
tccctctaaaaaa

SEQ ID NO: 172177 - DNA, 13 bp, Artificial Sequence
  Oligonucleotide for detection of SNP TSC0042932
aggttggaagtty

SEQ ID NO: 172178 - DNA, 13 bp, Artificial Sequence
  Oligonucleotide for detection of SNP TSC0042932
raacttccaacct

SEQ ID NO: 172179 - DNA, 13 bp, Artificial Sequence
  Oligonucleotide for detection of SNP TSC0042932
aggttgaaagtty

SEQ ID NO: 172180 - DNA, 13 bp, Artificial Sequence
  Oligonucleotide for detection of SNP TSC0042932
raactttcaacct

SEQ ID NO: 172181 - DNA, 13 bp, Artificial Sequence
  Oligonucleotide for detection of SNP TSC0042933
gtaaagtgaaaaa

SEQ ID NO: 172182 - DNA, 13 bp, Artificial Sequence
  Oligonucleotide for detection of SNP TSC0042933
tttttcactttac

SEQ ID NO: 172183 - DNA, 13 bp, Artificial Sequence
  Oligonucleotide for detection of SNP TSC0042933
gtaaagcgaaaaa

SEQ ID NO: 172184 - DNA, 13 bp, Artificial Sequence
  Oligonucleotide for detection of SNP TSC0042933
tttttcgctttac

SEQ ID NO: 172185 - DNA, 13 bp, Artificial Sequence
  Oligonucleotide for detection of SNP TSC0042934
aggaagatgggag

SEQ ID NO: 172186 - DNA, 13 bp, Artificial Sequence
  Oligonucleotide for detection of SNP TSC0042934
ctcccatcttcct

SEQ ID NO: 172187 - DNA, 13 bp, Artificial Sequence
  Oligonucleotide for detection of SNP TSC0042934
aggaaggtgggag

SEQ ID NO: 172188 - DNA, 13 bp, Artificial Sequence
  Oligonucleotide for detection of SNP TSC0042934
ctcccaccttcct

SEQ ID NO: 172189 - DNA, 13 bp, Artificial Sequence
  Oligonucleotide for detection of SNP TSC0042939
tagatattataat

SEQ ID NO: 172190 - DNA, 13 bp, Artificial Sequence
  Oligonucleotide for detection of SNP TSC0042939
attataatatcta

SEQ ID NO: 172191 - DNA, 13 bp, Artificial Sequence
  Oligonucleotide for detection of SNP TSC0042939
tagatagtataat

SEQ ID NO: 172192 - DNA, 13 bp, Artificial Sequence
  Oligonucleotide for detection of SNP TSC0042939
attatactatcta

SEQ ID NO: 172193 - DNA, 13 bp, Artificial Sequence
  Oligonucleotide for detection of SNP TSC0042939
attatagtgtttg

SEQ ID NO: 172194 - DNA, 13 bp, Artificial Sequence
  Oligonucleotide for detection of SNP TSC0042939
caaacactataat

SEQ ID NO: 172195 - DNA, 13 bp, Artificial Sequence
  Oligonucleotide for detection of SNP TSC0042939
attatattgtttg

SEQ ID NO: 172196 - DNA, 13 bp, Artificial Sequence
  Oligonucleotide for detection of SNP TSC0042939
caaacaatataat

SEQ ID NO: 172197 - DNA, 13 bp, Artificial Sequence
  Oligonucleotide for detection of SNP TSC0042940
atagtaggaaagt

SEQ ID NO: 172198 - DNA, 13 bp, Artificial Sequence
  Oligonucleotide for detection of SNP TSC0042940
actttcctactat

SEQ ID NO: 172199 - DNA, 13 bp, Artificial Sequence
  Oligonucleotide for detection of SNP TSC0042940
atagtaagaaagt

SEQ ID NO: 172200 - DNA, 13 bp, Artificial Sequence
  Oligonucleotide for detection of SNP TSC0042940
actttcttactat

SEQ ID NO: 172201 - DNA, 13 bp, Artificial Sequence
  Oligonucleotide for detection of SNP TSC0042941
ttttaaaaaaata

SEQ ID NO: 172202 - DNA, 13 bp, Artificial Sequence
  Oligonucleotide for detection of SNP TSC0042941
tatttttttaaaa

SEQ ID NO: 172203 - DNA, 13 bp, Artificial Sequence
  Oligonucleotide for detection of SNP TSC0042941
ttttaagaaaata

SEQ ID NO: 172204 - DNA, 13 bp, Artificial Sequence
  Oligonucleotide for detection of SNP TSC0042941
tattttcttaaaa

SEQ ID NO: 172205 - DNA, 13 bp, Artificial Sequence
  Oligonucleotide for detection of SNP TSC0042942
tttttaaaaaaat

SEQ ID NO: 172206 - DNA, 13 bp, Artificial Sequence
  Oligonucleotide for detection of SNP TSC0042942
atttttttaaaaa

SEQ ID NO: 172207 - DNA, 13 bp, Artificial Sequence
  Oligonucleotide for detection of SNP TSC0042942
tttttagaaaaat

SEQ ID NO: 172208 - DNA, 13 bp, Artificial Sequence
  Oligonucleotide for detection of SNP TSC0042942
atttttctaaaaa

SEQ ID NO: 172209 - DNA, 13 bp, Artificial Sequence
  Oligonucleotide for detection of SNP TSC0042943
tggtttatatttg

SEQ ID NO: 172210 - DNA, 13 bp, Artificial Sequence
  Oligonucleotide for detection of SNP TSC0042943
caaatataaacca

SEQ ID NO: 172211 - DNA, 13 bp, Artificial Sequence
  Oligonucleotide for detection of SNP TSC0042943
taggtgggagtta

SEQ ID NO: 172212 - DNA, 13 bp, Artificial Sequence
  Oligonucleotide for detection of SNP TSC0042943
taactcccaccta

SEQ ID NO: 172213 - DNA, 13 bp, Artificial Sequence
  Oligonucleotide for detection of SNP TSC0042944
ttgttagtttgat

SEQ ID NO: 172214 - DNA, 13 bp, Artificial Sequence
  Oligonucleotide for detection of SNP TSC0042944
atcaaactaacaa

SEQ ID NO: 172215 - DNA, 13 bp, Artificial Sequence
  Oligonucleotide for detection of SNP TSC0042944
ttgttaatttgat

SEQ ID NO: 172216 - DNA, 13 bp, Artificial Sequence
  Oligonucleotide for detection of SNP TSC0042944
atcaaattaacaa

SEQ ID NO: 172217 - DNA, 13 bp, Artificial Sequence
  Oligonucleotide for detection of SNP TSC0042945
tttataatgaata

SEQ ID NO: 172218 - DNA, 13 bp, Artificial Sequence
  Oligonucleotide for detection of SNP TSC0042945
tattcattataaa

SEQ ID NO: 172219 - DNA, 13 bp, Artificial Sequence
  Oligonucleotide for detection of SNP TSC0042945
tttatagtgaata

SEQ ID NO: 172220 - DNA, 13 bp, Artificial Sequence
  Oligonucleotide for detection of SNP TSC0042945
tattcactataaa

SEQ ID NO: 172221 - DNA, 13 bp, Artificial Sequence
  Oligonucleotide for detection of SNP TSC0042946
atttatggtatta

SEQ ID NO: 172222 - DNA, 13 bp, Artificial Sequence
  Oligonucleotide for detection of SNP TSC0042946
taataccataaat

SEQ ID NO: 172223 - DNA, 13 bp, Artificial Sequence
  Oligonucleotide for detection of SNP TSC0042946
atttatagtatta

SEQ ID NO: 172224 - DNA, 13 bp, Artificial Sequence
  Oligonucleotide for detection of SNP TSC0042946
taatactataaat

SEQ ID NO: 172225 - DNA, 13 bp, Artificial Sequence
  Oligonucleotide for detection of SNP TSC0042947
aaatatatataaa

SEQ ID NO: 172226 - DNA, 13 bp, Artificial Sequence
  Oligonucleotide for detection of SNP TSC0042947
tttatatatattt

SEQ ID NO: 172227 - DNA, 13 bp, Artificial Sequence
  Oligonucleotide for detection of SNP TSC0042947
aaatatgtataaa

SEQ ID NO: 172228 - DNA, 13 bp, Artificial Sequence
  Oligonucleotide for detection of SNP TSC0042947
tttatacatattt

SEQ ID NO: 172229 - DNA, 13 bp, Artificial Sequence
  Oligonucleotide for detection of SNP TSC0042948
ttatataagattt

SEQ ID NO: 172230 - DNA, 13 bp, Artificial Sequence
  Oligonucleotide for detection of SNP TSC0042948
aaatcttatataa

SEQ ID NO: 172231 - DNA, 13 bp, Artificial Sequence
  Oligonucleotide for detection of SNP TSC0042948
ttatatgagattt

SEQ ID NO: 172232 - DNA, 13 bp, Artificial Sequence
  Oligonucleotide for detection of SNP TSC0042948
aaatctcatataa

SEQ ID NO: 172233 - DNA, 13 bp, Artificial Sequence
  Oligonucleotide for detection of SNP TSC0042949
tgattaaaaatta

SEQ ID NO: 172234 - DNA, 13 bp, Artificial Sequence
  Oligonucleotide for detection of SNP TSC0042949
taatttttaatca

SEQ ID NO: 172235 - DNA, 13 bp, Artificial Sequence
  Oligonucleotide for detection of SNP TSC0042949
tgattataaatta

SEQ ID NO: 172236 - DNA, 13 bp, Artificial Sequence
  Oligonucleotide for detection of SNP TSC0042949
taatttataatca

SEQ ID NO: 172237 - DNA, 13 bp, Artificial Sequence
  Oligonucleotide for detection of SNP TSC0042949
tggtttttgatta

SEQ ID NO: 172238 - DNA, 13 bp, Artificial Sequence
  Oligonucleotide for detection of SNP TSC0042949
taatcaaaaacca

SEQ ID NO: 172239 - DNA, 13 bp, Artificial Sequence
  Oligonucleotide for detection of SNP TSC0042949
tggtttatgatta

SEQ ID NO: 172240 - DNA, 13 bp, Artificial Sequence
  Oligonucleotide for detection of SNP TSC0042949
taatcataaacca

SEQ ID NO: 172241 - DNA, 13 bp, Artificial Sequence
  Oligonucleotide for detection of SNP TSC0005175
atattagtttttt

SEQ ID NO: 172242 - DNA, 13 bp, Artificial Sequence
  Oligonucleotide for detection of SNP TSC0005175
aaaaaactaatat

SEQ ID NO: 172243 - DNA, 13 bp, Artificial Sequence
  Oligonucleotide for detection of SNP TSC0005175
aaaagagtggtat

SEQ ID NO: 172244 - DNA, 13 bp, Artificial Sequence
  Oligonucleotide for detection of SNP TSC0005175
ataccactctttt

SEQ ID NO: 172245 - DNA, 13 bp, Artificial Sequence
  Oligonucleotide for detection of SNP TSC0005175
aaaagattggtat

SEQ ID NO: 172246 - DNA, 13 bp, Artificial Sequence
  Oligonucleotide for detection of SNP TSC0005175
ataccaatctttt

SEQ ID NO: 172247 - DNA, 13 bp, Artificial Sequence
  Oligonucleotide for detection of SNP TSC0042951
tgaatgtttgaga

SEQ ID NO: 172248 - DNA, 13 bp, Artificial Sequence
  Oligonucleotide for detection of SNP TSC0042951
tctcaaacattca

SEQ ID NO: 172249 - DNA, 13 bp, Artificial Sequence
  Oligonucleotide for detection of SNP TSC0042951
tgaatgattgaga

SEQ ID NO: 172250 - DNA, 13 bp, Artificial Sequence
  Oligonucleotide for detection of SNP TSC0042951
tctcaatcattca

SEQ ID NO: 172251 - DNA, 13 bp, Artificial Sequence
  Oligonucleotide for detection of SNP TSC0042952
gttgttgtatatg

SEQ ID NO: 172252 - DNA, 13 bp, Artificial Sequence
  Oligonucleotide for detection of SNP TSC0042952
catatacaacaac

SEQ ID NO: 172253 - DNA, 13 bp, Artificial Sequence
  Oligonucleotide for detection of SNP TSC0042952
gttgttatatatg

SEQ ID NO: 172254 - DNA, 13 bp, Artificial Sequence
  Oligonucleotide for detection of SNP TSC0042952
catatataacaac

SEQ ID NO: 172255 - DNA, 13 bp, Artificial Sequence
  Oligonucleotide for detection of SNP TSC0042953
ggggtttggaggt

SEQ ID NO: 172256 - DNA, 13 bp, Artificial Sequence
  Oligonucleotide for detection of SNP TSC0042953
acctccaaacccc

SEQ ID NO: 172257 - DNA, 13 bp, Artificial Sequence
  Oligonucleotide for detection of SNP TSC0042953
ggggttgggaggt

SEQ ID NO: 172258 - DNA, 13 bp, Artificial Sequence
  Oligonucleotide for detection of SNP TSC0042953
acctcccaacccc

SEQ ID NO: 172259 - DNA, 13 bp, Artificial Sequence
  Oligonucleotide for detection of SNP TSC0042953
atttttaagttty

SEQ ID NO: 172260 - DNA, 13 bp, Artificial Sequence
  Oligonucleotide for detection of SNP TSC0042953
raaacttaaaaat

SEQ ID NO: 172261 - DNA, 13 bp, Artificial Sequence
  Oligonucleotide for detection of SNP TSC0042953
attttttagttty

SEQ ID NO: 172262 - DNA, 13 bp, Artificial Sequence
  Oligonucleotide for detection of SNP TSC0042953
raaactaaaaaat

SEQ ID NO: 172263 - DNA, 13 bp, Artificial Sequence
  Oligonucleotide for detection of SNP TSC0042955
ggttgtatttgtt

SEQ ID NO: 172264 - DNA, 13 bp, Artificial Sequence
  Oligonucleotide for detection of SNP TSC0042955
aacaaatacaacc

SEQ ID NO: 172265 - DNA, 13 bp, Artificial Sequence
  Oligonucleotide for detection of SNP TSC0042955
ggttgtgtttgtt

SEQ ID NO: 172266 - DNA, 13 bp, Artificial Sequence
  Oligonucleotide for detection of SNP TSC0042955
aacaaacacaacc

SEQ ID NO: 172267 - DNA, 13 bp, Artificial Sequence
  Oligonucleotide for detection of SNP TSC0042955
ggttgcgtttgtt

SEQ ID NO: 172268 - DNA, 13 bp, Artificial Sequence
  Oligonucleotide for detection of SNP TSC0042955
aacaaacgcaacc

SEQ ID NO: 172269 - DNA, 13 bp, Artificial Sequence
  Oligonucleotide for detection of SNP TSC0042955
agtagatgtagty

SEQ ID NO: 172270 - DNA, 13 bp, Artificial Sequence
  Oligonucleotide for detection of SNP TSC0042955
ractacatctact

SEQ ID NO: 172271 - DNA, 13 bp, Artificial Sequence
  Oligonucleotide for detection of SNP TSC0042955
agtagacgtagty

SEQ ID NO: 172272 - DNA, 13 bp, Artificial Sequence
  Oligonucleotide for detection of SNP TSC0042955
ractacgtctact

SEQ ID NO: 172273 - DNA, 13 bp, Artificial Sequence
  Oligonucleotide for detection of SNP TSC0042957
tttagtaatttgy

SEQ ID NO: 172274 - DNA, 13 bp, Artificial Sequence
  Oligonucleotide for detection of SNP TSC0042957
rcaaattactaaa

SEQ ID NO: 172275 - DNA, 13 bp, Artificial Sequence
  Oligonucleotide for detection of SNP TSC0042957
tttagtgatttgy

SEQ ID NO: 172276 - DNA, 13 bp, Artificial Sequence
  Oligonucleotide for detection of SNP TSC0042957
rcaaatcactaaa

SEQ ID NO: 172277 - DNA, 13 bp, Artificial Sequence
  Oligonucleotide for detection of SNP TSC0042957
tttagcgatttgy

SEQ ID NO: 172278 - DNA, 13 bp, Artificial Sequence
  Oligonucleotide for detection of SNP TSC0042957
rcaaatcgctaaa

SEQ ID NO: 172279 - DNA, 13 bp, Artificial Sequence
  Oligonucleotide for detection of SNP TSC0042957
gtaagttgttaag

SEQ ID NO: 172280 - DNA, 13 bp, Artificial Sequence
  Oligonucleotide for detection of SNP TSC0042957
cttaacaacttac

SEQ ID NO: 172281 - DNA, 13 bp, Artificial Sequence
  Oligonucleotide for detection of SNP TSC0042957
gtaagtcgttaag

SEQ ID NO: 172282 - DNA, 13 bp, Artificial Sequence
  Oligonucleotide for detection of SNP TSC0042957
cttaacgacttac

SEQ ID NO: 172283 - DNA, 13 bp, Artificial Sequence
  Oligonucleotide for detection of SNP TSC0042959
taaatgatatttt

SEQ ID NO: 172284 - DNA, 13 bp, Artificial Sequence
  Oligonucleotide for detection of SNP TSC0042959
aaaatatcattta

SEQ ID NO: 172285 - DNA, 13 bp, Artificial Sequence
  Oligonucleotide for detection of SNP TSC0042959
agggtgttattta

SEQ ID NO: 172286 - DNA, 13 bp, Artificial Sequence
  Oligonucleotide for detection of SNP TSC0042959
taaataacaccct

SEQ ID NO: 172287 - DNA, 13 bp, Artificial Sequence
  Oligonucleotide for detection of SNP TSC0042959
agggtgatattta

SEQ ID NO: 172288 - DNA, 13 bp, Artificial Sequence
  Oligonucleotide for detection of SNP TSC0042959
taaatatcaccct

SEQ ID NO: 172289 - DNA, 13 bp, Artificial Sequence
  Oligonucleotide for detection of SNP TSC0042960
gtattatgtattt

SEQ ID NO: 172290 - DNA, 13 bp, Artificial Sequence
  Oligonucleotide for detection of SNP TSC0042960
aaatacataatac

SEQ ID NO: 172291 - DNA, 13 bp, Artificial Sequence
  Oligonucleotide for detection of SNP TSC0042960
gtattacgtattt

SEQ ID NO: 172292 - DNA, 13 bp, Artificial Sequence
  Oligonucleotide for detection of SNP TSC0042960
aaatacgtaatac

SEQ ID NO: 172293 - DNA, 13 bp, Artificial Sequence
  Oligonucleotide for detection of SNP TSC0042960
aaatgtgtaatgy

SEQ ID NO: 172294 - DNA, 13 bp, Artificial Sequence
  Oligonucleotide for detection of SNP TSC0042960
rcattacacattt

SEQ ID NO: 172295 - DNA, 13 bp, Artificial Sequence
  Oligonucleotide for detection of SNP TSC0042960
aaatgtataatgy

SEQ ID NO: 172296 - DNA, 13 bp, Artificial Sequence
  Oligonucleotide for detection of SNP TSC0042960
rcattatacattt

SEQ ID NO: 172297 - DNA, 13 bp, Artificial Sequence
  Oligonucleotide for detection of SNP TSC0042960
aaatgcgtaatgy

SEQ ID NO: 172298 - DNA, 13 bp, Artificial Sequence
  Oligonucleotide for detection of SNP TSC0042960
rcattacgcattt

SEQ ID NO: 172299 - DNA, 13 bp, Artificial Sequence
  Oligonucleotide for detection of SNP TSC0010295
tatttatttttag

SEQ ID NO: 172300 - DNA, 13 bp, Artificial Sequence
  Oligonucleotide for detection of SNP TSC0010295
ctaaaaataaata

SEQ ID NO: 172301 - DNA, 13 bp, Artificial Sequence
  Oligonucleotide for detection of SNP TSC0010295
ttgagagtgggta

SEQ ID NO: 172302 - DNA, 13 bp, Artificial Sequence
  Oligonucleotide for detection of SNP TSC0010295
tacccactctcaa

SEQ ID NO: 172303 - DNA, 13 bp, Artificial Sequence
  Oligonucleotide for detection of SNP TSC0010295
ttgagattgggta

SEQ ID NO: 172304 - DNA, 13 bp, Artificial Sequence
  Oligonucleotide for detection of SNP TSC0010295
tacccaatctcaa

SEQ ID NO: 172305 - DNA, 13 bp, Artificial Sequence
  Oligonucleotide for detection of SNP TSC0042961
ggaaggtattttt

SEQ ID NO: 172306 - DNA, 13 bp, Artificial Sequence
  Oligonucleotide for detection of SNP TSC0042961
aaaaataccttcc

SEQ ID NO: 172307 - DNA, 13 bp, Artificial Sequence
  Oligonucleotide for detection of SNP TSC0042961
ggaagggattttt

SEQ ID NO: 172308 - DNA, 13 bp, Artificial Sequence
  Oligonucleotide for detection of SNP TSC0042961
aaaaatcccttcc

SEQ ID NO: 172309 - DNA, 13 bp, Artificial Sequence
  Oligonucleotide for detection of SNP TSC0042961
agaggtgttttty

SEQ ID NO: 172310 - DNA, 13 bp, Artificial Sequence
  Oligonucleotide for detection of SNP TSC0042961
raaaaacacctct

SEQ ID NO: 172311 - DNA, 13 bp, Artificial Sequence
  Oligonucleotide for detection of SNP TSC0042965
tatgaaaggaata

SEQ ID NO: 172312 - DNA, 13 bp, Artificial Sequence
  Oligonucleotide for detection of SNP TSC0042965
tattcctttcata

SEQ ID NO: 172313 - DNA, 13 bp, Artificial Sequence
  Oligonucleotide for detection of SNP TSC0042965
tatgaatggaata

SEQ ID NO: 172314 - DNA, 13 bp, Artificial Sequence
  Oligonucleotide for detection of SNP TSC0042965
tattccattcata

SEQ ID NO: 172315 - DNA, 13 bp, Artificial Sequence
  Oligonucleotide for detection of SNP TSC0042966
gttatttgtggtg

SEQ ID NO: 172316 - DNA, 13 bp, Artificial Sequence
  Oligonucleotide for detection of SNP TSC0042966
caccacaaataac

SEQ ID NO: 172317 - DNA, 13 bp, Artificial Sequence
  Oligonucleotide for detection of SNP TSC0042966
gttattcgtggtg

SEQ ID NO: 172318 - DNA, 13 bp, Artificial Sequence
  Oligonucleotide for detection of SNP TSC0042966
caccacgaataac

SEQ ID NO: 172319 - DNA, 13 bp, Artificial Sequence
  Oligonucleotide for detection of SNP TSC0042966
tattatgaatggy

SEQ ID NO: 172320 - DNA, 13 bp, Artificial Sequence
  Oligonucleotide for detection of SNP TSC0042966
rccattcataata

SEQ ID NO: 172321 - DNA, 13 bp, Artificial Sequence
  Oligonucleotide for detection of SNP TSC0042966
tattataaatggy

SEQ ID NO: 172322 - DNA, 13 bp, Artificial Sequence
  Oligonucleotide for detection of SNP TSC0042966
rccatttataata

SEQ ID NO: 172323 - DNA, 13 bp, Artificial Sequence
  Oligonucleotide for detection of SNP TSC0042966
tattacgaatggy

SEQ ID NO: 172324 - DNA, 13 bp, Artificial Sequence
  Oligonucleotide for detection of SNP TSC0042966
rccattcgtaata

SEQ ID NO: 172325 - DNA, 13 bp, Artificial Sequence
  Oligonucleotide for detection of SNP TSC0042967
aatagagaggggg

SEQ ID NO: 172326 - DNA, 13 bp, Artificial Sequence
  Oligonucleotide for detection of SNP TSC0042967
ccccctctctatt

SEQ ID NO: 172327 - DNA, 13 bp, Artificial Sequence
  Oligonucleotide for detection of SNP TSC0042967
aatagataggggg

SEQ ID NO: 172328 - DNA, 13 bp, Artificial Sequence
  Oligonucleotide for detection of SNP TSC0042967
ccccctatctatt

SEQ ID NO: 172329 - DNA, 13 bp, Artificial Sequence
  Oligonucleotide for detection of SNP TSC0042968
gaaaaagaagatt

SEQ ID NO: 172330 - DNA, 13 bp, Artificial Sequence
  Oligonucleotide for detection of SNP TSC0042968
aatcttctttttc

SEQ ID NO: 172331 - DNA, 13 bp, Artificial Sequence
  Oligonucleotide for detection of SNP TSC0042968
gaaaaaaaagatt

SEQ ID NO: 172332 - DNA, 13 bp, Artificial Sequence
  Oligonucleotide for detection of SNP TSC0042968
aatcttttttttc

SEQ ID NO: 172333 - DNA, 13 bp, Artificial Sequence
  Oligonucleotide for detection of SNP TSC0042969
gtagatgtttata

SEQ ID NO: 172334 - DNA, 13 bp, Artificial Sequence
  Oligonucleotide for detection of SNP TSC0042969
tataaacatctac

SEQ ID NO: 172335 - DNA, 13 bp, Artificial Sequence
  Oligonucleotide for detection of SNP TSC0042969
gtagatatttata

SEQ ID NO: 172336 - DNA, 13 bp, Artificial Sequence
  Oligonucleotide for detection of SNP TSC0042969
tataaatatctac

SEQ ID NO: 172337 - DNA, 13 bp, Artificial Sequence
  Oligonucleotide for detection of SNP TSC0042970
agtaaagtaaaag

SEQ ID NO: 172338 - DNA, 13 bp, Artificial Sequence
  Oligonucleotide for detection of SNP TSC0042970
cttttactttact

SEQ ID NO: 172339 - DNA, 13 bp, Artificial Sequence
  Oligonucleotide for detection of SNP TSC0042970
agtaaaataaaag

SEQ ID NO: 172340 - DNA, 13 bp, Artificial Sequence
  Oligonucleotide for detection of SNP TSC0042970
cttttattttact

SEQ ID NO: 172341 - DNA, 13 bp, Artificial Sequence
  Oligonucleotide for detection of SNP TSC0042971
ttaattatgtgty

SEQ ID NO: 172342 - DNA, 13 bp, Artificial Sequence
  Oligonucleotide for detection of SNP TSC0042971
racacataattaa

SEQ ID NO: 172343 - DNA, 13 bp, Artificial Sequence
  Oligonucleotide for detection of SNP TSC0042971
ttaattttgtgty

SEQ ID NO: 172344 - DNA, 13 bp, Artificial Sequence
  Oligonucleotide for detection of SNP TSC0042971
racacaaaattaa

SEQ ID NO: 172345 - DNA, 13 bp, Artificial Sequence
  Oligonucleotide for detection of SNP TSC0042971
gatatataattga

SEQ ID NO: 172346 - DNA, 13 bp, Artificial Sequence
  Oligonucleotide for detection of SNP TSC0042971
tcaattatatatc

SEQ ID NO: 172347 - DNA, 13 bp, Artificial Sequence
  Oligonucleotide for detection of SNP TSC0042971
gatatagaattga

SEQ ID NO: 172348 - DNA, 13 bp, Artificial Sequence
  Oligonucleotide for detection of SNP TSC0042971
tcaattctatatc

SEQ ID NO: 172349 - DNA, 13 bp, Artificial Sequence
  Oligonucleotide for detection of SNP TSC0042972
gattttaaataty

SEQ ID NO: 172350 - DNA, 13 bp, Artificial Sequence
  Oligonucleotide for detection of SNP TSC0042972
ratatttaaaatc

SEQ ID NO: 172351 - DNA, 13 bp, Artificial Sequence
  Oligonucleotide for detection of SNP TSC0042972
gattttgaataty

SEQ ID NO: 172352 - DNA, 13 bp, Artificial Sequence
  Oligonucleotide for detection of SNP TSC0042972
ratattcaaaatc

SEQ ID NO: 172353 - DNA, 13 bp, Artificial Sequence
  Oligonucleotide for detection of SNP TSC0005776
attgtaggtttta

SEQ ID NO: 172354 - DNA, 13 bp, Artificial Sequence
  Oligonucleotide for detection of SNP TSC0005776
taaaacctacaat

SEQ ID NO: 172355 - DNA, 13 bp, Artificial Sequence
  Oligonucleotide for detection of SNP TSC0005776
taaaatgtataat

SEQ ID NO: 172356 - DNA, 13 bp, Artificial Sequence
  Oligonucleotide for detection of SNP TSC0005776
attatacatttta

SEQ ID NO: 172357 - DNA, 13 bp, Artificial Sequence
  Oligonucleotide for detection of SNP TSC0005174
tattttagattag

SEQ ID NO: 172358 - DNA, 13 bp, Artificial Sequence
  Oligonucleotide for detection of SNP TSC0005174
ctaatctaaaata

SEQ ID NO: 172359 - DNA, 13 bp, Artificial Sequence
  Oligonucleotide for detection of SNP TSC0005174
tattttggattag

SEQ ID NO: 172360 - DNA, 13 bp, Artificial Sequence
  Oligonucleotide for detection of SNP TSC0005174
ctaatccaaaata

SEQ ID NO: 172361 - DNA, 13 bp, Artificial Sequence
  Oligonucleotide for detection of SNP TSC0005174
tatttcggattag

SEQ ID NO: 172362 - DNA, 13 bp, Artificial Sequence
  Oligonucleotide for detection of SNP TSC0005174
ctaatccgaaata

SEQ ID NO: 172363 - DNA, 13 bp, Artificial Sequence
  Oligonucleotide for detection of SNP TSC0005174
ttgatttgaggta

SEQ ID NO: 172364 - DNA, 13 bp, Artificial Sequence
  Oligonucleotide for detection of SNP TSC0005174
tacctcaaatcaa

SEQ ID NO: 172365 - DNA, 13 bp, Artificial Sequence
  Oligonucleotide for detection of SNP TSC0005174
ttgattcgaggta

SEQ ID NO: 172366 - DNA, 13 bp, Artificial Sequence
  Oligonucleotide for detection of SNP TSC0005174
tacctcgaatcaa

SEQ ID NO: 172367 - DNA, 13 bp, Artificial Sequence
  Oligonucleotide for detection of SNP TSC0042975
gatagtggttttt

SEQ ID NO: 172368 - DNA, 13 bp, Artificial Sequence
  Oligonucleotide for detection of SNP TSC0042975
aaaaaccactatc

SEQ ID NO: 172369 - DNA, 13 bp, Artificial Sequence
  Oligonucleotide for detection of SNP TSC0042975
gatagtagttttt

SEQ ID NO: 172370 - DNA, 13 bp, Artificial Sequence
  Oligonucleotide for detection of SNP TSC0042975
aaaaactactatc

SEQ ID NO: 172371 - DNA, 13 bp, Artificial Sequence
  Oligonucleotide for detection of SNP TSC0042976
ttattattattty

SEQ ID NO: 172372 - DNA, 13 bp, Artificial Sequence
  Oligonucleotide for detection of SNP TSC0042976
raaataataataa

SEQ ID NO: 172373 - DNA, 13 bp, Artificial Sequence
  Oligonucleotide for detection of SNP TSC0042976
gaaatgttggtgg

SEQ ID NO: 172374 - DNA, 13 bp, Artificial Sequence
  Oligonucleotide for detection of SNP TSC0042976
ccaccaacatttc

SEQ ID NO: 172375 - DNA, 13 bp, Artificial Sequence
  Oligonucleotide for detection of SNP TSC0042976
gaaatggtggtgg

SEQ ID NO: 172376 - DNA, 13 bp, Artificial Sequence
  Oligonucleotide for detection of SNP TSC0042976
ccaccaccatttc

SEQ ID NO: 172377 - DNA, 13 bp, Artificial Sequence
  Oligonucleotide for detection of SNP TSC0042978
gattaatgggtaa

SEQ ID NO: 172378 - DNA, 13 bp, Artificial Sequence
  Oligonucleotide for detection of SNP TSC0042978
ttacccattaatc

SEQ ID NO: 172379 - DNA, 13 bp, Artificial Sequence
  Oligonucleotide for detection of SNP TSC0042978
gattaacgggtaa

SEQ ID NO: 172380 - DNA, 13 bp, Artificial Sequence
  Oligonucleotide for detection of SNP TSC0042978
ttacccgttaatc

SEQ ID NO: 172381 - DNA, 13 bp, Artificial Sequence
  Oligonucleotide for detection of SNP TSC0042979
ttaaggtatttaa

SEQ ID NO: 172382 - DNA, 13 bp, Artificial Sequence
  Oligonucleotide for detection of SNP TSC0042979
ttaaataccttaa

SEQ ID NO: 172383 - DNA, 13 bp, Artificial Sequence
  Oligonucleotide for detection of SNP TSC0042979
ttaagggatttaa

SEQ ID NO: 172384 - DNA, 13 bp, Artificial Sequence
  Oligonucleotide for detection of SNP TSC0042979
ttaaatcccttaa

SEQ ID NO: 172385 - DNA, 13 bp, Artificial Sequence
  Oligonucleotide for detection of SNP TSC0042979
ttgggtattttaa

SEQ ID NO: 172386 - DNA, 13 bp, Artificial Sequence
  Oligonucleotide for detection of SNP TSC0042979
ttaaaatacccaa

SEQ ID NO: 172387 - DNA, 13 bp, Artificial Sequence
  Oligonucleotide for detection of SNP TSC0042979
ttgggttttttaa

SEQ ID NO: 172388 - DNA, 13 bp, Artificial Sequence
  Oligonucleotide for detection of SNP TSC0042979
ttaaaaaacccaa

SEQ ID NO: 172389 - DNA, 13 bp, Artificial Sequence
  Oligonucleotide for detection of SNP TSC0042980
ggtaatatttgga

SEQ ID NO: 172390 - DNA, 13 bp, Artificial Sequence
  Oligonucleotide for detection of SNP TSC0042980
tccaaatattacc

SEQ ID NO: 172391 - DNA, 13 bp, Artificial Sequence
  Oligonucleotide for detection of SNP TSC0042980
ggtaatgtttgga

SEQ ID NO: 172392 - DNA, 13 bp, Artificial Sequence
  Oligonucleotide for detection of SNP TSC0042980
tccaaacattacc

SEQ ID NO: 172393 - DNA, 13 bp, Artificial Sequence
  Oligonucleotide for detection of SNP TSC0042980
ggtaacgtttgga

SEQ ID NO: 172394 - DNA, 13 bp, Artificial Sequence
  Oligonucleotide for detection of SNP TSC0042980
tccaaacgttacc

SEQ ID NO: 172395 - DNA, 13 bp, Artificial Sequence
  Oligonucleotide for detection of SNP TSC0042980
tttagatgttgty

SEQ ID NO: 172396 - DNA, 13 bp, Artificial Sequence
  Oligonucleotide for detection of SNP TSC0042980
racaacatctaaa

SEQ ID NO: 172397 - DNA, 13 bp, Artificial Sequence
  Oligonucleotide for detection of SNP TSC0042980
tttagacgttgty

SEQ ID NO: 172398 - DNA, 13 bp, Artificial Sequence
  Oligonucleotide for detection of SNP TSC0042980
racaacgtctaaa

SEQ ID NO: 172399 - DNA, 13 bp, Artificial Sequence
  Oligonucleotide for detection of SNP TSC0005172
atttgtattatag

SEQ ID NO: 172400 - DNA, 13 bp, Artificial Sequence
  Oligonucleotide for detection of SNP TSC0005172
ctataatacaaat

SEQ ID NO: 172401 - DNA, 13 bp, Artificial Sequence
  Oligonucleotide for detection of SNP TSC0005172
atttgtgttatag

SEQ ID NO: 172402 - DNA, 13 bp, Artificial Sequence
  Oligonucleotide for detection of SNP TSC0005172
ctataacacaaat

SEQ ID NO: 172403 - DNA, 13 bp, Artificial Sequence
  Oligonucleotide for detection of SNP TSC0005172
atttgcgttatag

SEQ ID NO: 172404 - DNA, 13 bp, Artificial Sequence
  Oligonucleotide for detection of SNP TSC0005172
ctataacgcaaat

SEQ ID NO: 172405 - DNA, 13 bp, Artificial Sequence
  Oligonucleotide for detection of SNP TSC0005172
ttgtgatgtaaat

SEQ ID NO: 172406 - DNA, 13 bp, Artificial Sequence
  Oligonucleotide for detection of SNP TSC0005172
atttacatcacaa

SEQ ID NO: 172407 - DNA, 13 bp, Artificial Sequence
  Oligonucleotide for detection of SNP TSC0005172
ttgtgacgtaaat

SEQ ID NO: 172408 - DNA, 13 bp, Artificial Sequence
  Oligonucleotide for detection of SNP TSC0005172
atttacgtcacaa

SEQ ID NO: 172409 - DNA, 13 bp, Artificial Sequence
  Oligonucleotide for detection of SNP TSC0042981
tagtattggtgat

SEQ ID NO: 172410 - DNA, 13 bp, Artificial Sequence
  Oligonucleotide for detection of SNP TSC0042981
atcaccaatacta

SEQ ID NO: 172411 - DNA, 13 bp, Artificial Sequence
  Oligonucleotide for detection of SNP TSC0042981
tagtatcggtgat

SEQ ID NO: 172412 - DNA, 13 bp, Artificial Sequence
  Oligonucleotide for detection of SNP TSC0042981
atcaccgatacta

SEQ ID NO: 172413 - DNA, 13 bp, Artificial Sequence
  Oligonucleotide for detection of SNP TSC0042981
tagtattggcgat

SEQ ID NO: 172414 - DNA, 13 bp, Artificial Sequence
  Oligonucleotide for detection of SNP TSC0042981
atcgccaatacta

SEQ ID NO: 172415 - DNA, 13 bp, Artificial Sequence
  Oligonucleotide for detection of SNP TSC0042981
tagtatcggcgat

SEQ ID NO: 172416 - DNA, 13 bp, Artificial Sequence
  Oligonucleotide for detection of SNP TSC0042981
atcgccgatacta

SEQ ID NO: 172417 - DNA, 13 bp, Artificial Sequence
  Oligonucleotide for detection of SNP TSC0042981
attgttgatgttg

SEQ ID NO: 172418 - DNA, 13 bp, Artificial Sequence
  Oligonucleotide for detection of SNP TSC0042981
caacatcaacaat

SEQ ID NO: 172419 - DNA, 13 bp, Artificial Sequence
  Oligonucleotide for detection of SNP TSC0042981
attgttaatgttg

SEQ ID NO: 172420 - DNA, 13 bp, Artificial Sequence
  Oligonucleotide for detection of SNP TSC0042981
caacattaacaat

SEQ ID NO: 172421 - DNA, 13 bp, Artificial Sequence
  Oligonucleotide for detection of SNP TSC0042981
atcgttgatgttg

SEQ ID NO: 172422 - DNA, 13 bp, Artificial Sequence
  Oligonucleotide for detection of SNP TSC0042981
caacatcaacgat

SEQ ID NO: 172423 - DNA, 13 bp, Artificial Sequence
  Oligonucleotide for detection of SNP TSC0042981
atcgttaatgttg

SEQ ID NO: 172424 - DNA, 13 bp, Artificial Sequence
  Oligonucleotide for detection of SNP TSC0042981
caacattaacgat

SEQ ID NO: 172425 - DNA, 13 bp, Artificial Sequence
  Oligonucleotide for detection of SNP TSC0042981
attgtcgatgttg

SEQ ID NO: 172426 - DNA, 13 bp, Artificial Sequence
  Oligonucleotide for detection of SNP TSC0042981
caacatcgacaat

SEQ ID NO: 172427 - DNA, 13 bp, Artificial Sequence
  Oligonucleotide for detection of SNP TSC0042981
atcgtcgatgttg

SEQ ID NO: 172428 - DNA, 13 bp, Artificial Sequence
  Oligonucleotide for detection of SNP TSC0042981
caacatcgacgat

SEQ ID NO: 172429 - DNA, 13 bp, Artificial Sequence
  Oligonucleotide for detection of SNP TSC0042983
ttgttagttgtta

SEQ ID NO: 172430 - DNA, 13 bp, Artificial Sequence
  Oligonucleotide for detection of SNP TSC0042983
taacaactaacaa

SEQ ID NO: 172431 - DNA, 13 bp, Artificial Sequence
  Oligonucleotide for detection of SNP TSC0042983
ttgttaattgtta

SEQ ID NO: 172432 - DNA, 13 bp, Artificial Sequence
  Oligonucleotide for detection of SNP TSC0042983
taacaattaacaa

SEQ ID NO: 172433 - DNA, 13 bp, Artificial Sequence
  Oligonucleotide for detection of SNP TSC0005685
agaaggggttgtg

SEQ ID NO: 172434 - DNA, 13 bp, Artificial Sequence
  Oligonucleotide for detection of SNP TSC0005685
cacaaccccttct

SEQ ID NO: 172435 - DNA, 13 bp, Artificial Sequence
  Oligonucleotide for detection of SNP TSC0005685
agaaggagttgtg

SEQ ID NO: 172436 - DNA, 13 bp, Artificial Sequence
  Oligonucleotide for detection of SNP TSC0005685
cacaactccttct

SEQ ID NO: 172437 - DNA, 13 bp, Artificial Sequence
  Oligonucleotide for detection of SNP TSC0005685
agaaggggtcgtg

SEQ ID NO: 172438 - DNA, 13 bp, Artificial Sequence
  Oligonucleotide for detection of SNP TSC0005685
cacgaccccttct

SEQ ID NO: 172439 - DNA, 13 bp, Artificial Sequence
  Oligonucleotide for detection of SNP TSC0005685
agaaggagtcgtg

SEQ ID NO: 172440 - DNA, 13 bp, Artificial Sequence
  Oligonucleotide for detection of SNP TSC0005685
cacgactccttct

SEQ ID NO: 172441 - DNA, 13 bp, Artificial Sequence
  Oligonucleotide for detection of SNP TSC0005685
agaaggggttgcg

SEQ ID NO: 172442 - DNA, 13 bp, Artificial Sequence
  Oligonucleotide for detection of SNP TSC0005685
cgcaaccccttct

SEQ ID NO: 172443 - DNA, 13 bp, Artificial Sequence
  Oligonucleotide for detection of SNP TSC0005685
agaaggagttgcg

SEQ ID NO: 172444 - DNA, 13 bp, Artificial Sequence
  Oligonucleotide for detection of SNP TSC0005685
cgcaactccttct

SEQ ID NO: 172445 - DNA, 13 bp, Artificial Sequence
  Oligonucleotide for detection of SNP TSC0005685
agaaggggtcgcg

SEQ ID NO: 172446 - DNA, 13 bp, Artificial Sequence
  Oligonucleotide for detection of SNP TSC0005685
cgcgaccccttct

SEQ ID NO: 172447 - DNA, 13 bp, Artificial Sequence
  Oligonucleotide for detection of SNP TSC0005685
agaaggagtcgcg

SEQ ID NO: 172448 - DNA, 13 bp, Artificial Sequence
  Oligonucleotide for detection of SNP TSC0005685
cgcgactccttct

SEQ ID NO: 172449 - DNA, 13 bp, Artificial Sequence
  Oligonucleotide for detection of SNP TSC0009030
gtgaatgagttgg

SEQ ID NO: 172450 - DNA, 13 bp, Artificial Sequence
  Oligonucleotide for detection of SNP TSC0009030
ccaactcattcac

SEQ ID NO: 172451 - DNA, 13 bp, Artificial Sequence
  Oligonucleotide for detection of SNP TSC0009030
gtgaataagttgg

SEQ ID NO: 172452 - DNA, 13 bp, Artificial Sequence
  Oligonucleotide for detection of SNP TSC0009030
ccaacttattcac

SEQ ID NO: 172453 - DNA, 13 bp, Artificial Sequence
  Oligonucleotide for detection of SNP TSC0042985
agagtagggtttt

SEQ ID NO: 172454 - DNA, 13 bp, Artificial Sequence
  Oligonucleotide for detection of SNP TSC0042985
aaaaccctactct

SEQ ID NO: 172455 - DNA, 13 bp, Artificial Sequence
  Oligonucleotide for detection of SNP TSC0042985
agagtaaggtttt

SEQ ID NO: 172456 - DNA, 13 bp, Artificial Sequence
  Oligonucleotide for detection of SNP TSC0042985
aaaaccttactct

SEQ ID NO: 172457 - DNA, 13 bp, Artificial Sequence
  Oligonucleotide for detection of SNP TSC0042986
ttattagtgatty

SEQ ID NO: 172458 - DNA, 13 bp, Artificial Sequence
  Oligonucleotide for detection of SNP TSC0042986
raatcactaataa

SEQ ID NO: 172459 - DNA, 13 bp, Artificial Sequence
  Oligonucleotide for detection of SNP TSC0042986
ttattaatgatty

SEQ ID NO: 172460 - DNA, 13 bp, Artificial Sequence
  Oligonucleotide for detection of SNP TSC0042986
raatcattaataa

SEQ ID NO: 172461 - DNA, 13 bp, Artificial Sequence
  Oligonucleotide for detection of SNP TSC0042988
aaaattatattty

SEQ ID NO: 172462 - DNA, 13 bp, Artificial Sequence
  Oligonucleotide for detection of SNP TSC0042988
raaatataatttt

SEQ ID NO: 172463 - DNA, 13 bp, Artificial Sequence
  Oligonucleotide for detection of SNP TSC0042988
aaaattgtattty

SEQ ID NO: 172464 - DNA, 13 bp, Artificial Sequence
  Oligonucleotide for detection of SNP TSC0042988
raaatacaatttt

SEQ ID NO: 172465 - DNA, 13 bp, Artificial Sequence
  Oligonucleotide for detection of SNP TSC0042988
aaaatcgtattty

SEQ ID NO: 172466 - DNA, 13 bp, Artificial Sequence
  Oligonucleotide for detection of SNP TSC0042988
raaatacgatttt

SEQ ID NO: 172467 - DNA, 13 bp, Artificial Sequence
  Oligonucleotide for detection of SNP TSC0042988
gagatatgatttt

SEQ ID NO: 172468 - DNA, 13 bp, Artificial Sequence
  Oligonucleotide for detection of SNP TSC0042988
aaaatcatatctc

SEQ ID NO: 172469 - DNA, 13 bp, Artificial Sequence
  Oligonucleotide for detection of SNP TSC0042988
gagatacgatttt

SEQ ID NO: 172470 - DNA, 13 bp, Artificial Sequence
  Oligonucleotide for detection of SNP TSC0042988
aaaatcgtatctc

SEQ ID NO: 172471 - DNA, 13 bp, Artificial Sequence
  Oligonucleotide for detection of SNP TSC0042989
attttaaaattay

SEQ ID NO: 172472 - DNA, 13 bp, Artificial Sequence
  Oligonucleotide for detection of SNP TSC0042989
rtaattttaaaat

SEQ ID NO: 172473 - DNA, 13 bp, Artificial Sequence
  Oligonucleotide for detection of SNP TSC0042989
attttagaattay

SEQ ID NO: 172474 - DNA, 13 bp, Artificial Sequence
  Oligonucleotide for detection of SNP TSC0042989
rtaattctaaaat

SEQ ID NO: 172475 - DNA, 13 bp, Artificial Sequence
  Oligonucleotide for detection of SNP TSC0010824
ggagttattagtg

SEQ ID NO: 172476 - DNA, 13 bp, Artificial Sequence
  Oligonucleotide for detection of SNP TSC0010824
cactaataactcc

SEQ ID NO: 172477 - DNA, 13 bp, Artificial Sequence
  Oligonucleotide for detection of SNP TSC0010824
ggagtttttagtg

SEQ ID NO: 172478 - DNA, 13 bp, Artificial Sequence
  Oligonucleotide for detection of SNP TSC0010824
cactaaaaactcc

SEQ ID NO: 172479 - DNA, 13 bp, Artificial Sequence
  Oligonucleotide for detection of SNP TSC0010824
tattggtgattty

SEQ ID NO: 172480 - DNA, 13 bp, Artificial Sequence
  Oligonucleotide for detection of SNP TSC0010824
raaatcaccaata

SEQ ID NO: 172481 - DNA, 13 bp, Artificial Sequence
  Oligonucleotide for detection of SNP TSC0010824
tattggggattty

SEQ ID NO: 172482 - DNA, 13 bp, Artificial Sequence
  Oligonucleotide for detection of SNP TSC0010824
raaatccccaata

SEQ ID NO: 172483 - DNA, 13 bp, Artificial Sequence
  Oligonucleotide for detection of SNP TSC0010454
aagttgggttttt

SEQ ID NO: 172484 - DNA, 13 bp, Artificial Sequence
  Oligonucleotide for detection of SNP TSC0010454
aaaaacccaactt

SEQ ID NO: 172485 - DNA, 13 bp, Artificial Sequence
  Oligonucleotide for detection of SNP TSC0010454
aagttgagttttt

SEQ ID NO: 172486 - DNA, 13 bp, Artificial Sequence
  Oligonucleotide for detection of SNP TSC0010454
aaaaactcaactt

SEQ ID NO: 172487 - DNA, 13 bp, Artificial Sequence
  Oligonucleotide for detection of SNP TSC0042990
gatttaatttaat

SEQ ID NO: 172488 - DNA, 13 bp, Artificial Sequence
  Oligonucleotide for detection of SNP TSC0042990
attaaattaaatc

SEQ ID NO: 172489 - DNA, 13 bp, Artificial Sequence
  Oligonucleotide for detection of SNP TSC0042990
gatttattttaat

SEQ ID NO: 172490 - DNA, 13 bp, Artificial Sequence
  Oligonucleotide for detection of SNP TSC0042990
attaaaataaatc

SEQ ID NO: 172491 - DNA, 13 bp, Artificial Sequence
  Oligonucleotide for detection of SNP TSC0042990
attaaattaaaty

SEQ ID NO: 172492 - DNA, 13 bp, Artificial Sequence
  Oligonucleotide for detection of SNP TSC0042990
ratttaatttaat

SEQ ID NO: 172493 - DNA, 13 bp, Artificial Sequence
  Oligonucleotide for detection of SNP TSC0042990
attaaaataaaty

SEQ ID NO: 172494 - DNA, 13 bp, Artificial Sequence
  Oligonucleotide for detection of SNP TSC0042990
ratttattttaat

SEQ ID NO: 172495 - DNA, 13 bp, Artificial Sequence
  Oligonucleotide for detection of SNP TSC0042991
ataggtatataay

SEQ ID NO: 172496 - DNA, 13 bp, Artificial Sequence
  Oligonucleotide for detection of SNP TSC0042991
rttatatacctat

SEQ ID NO: 172497 - DNA, 13 bp, Artificial Sequence
  Oligonucleotide for detection of SNP TSC0042991
ataggtgtataay

SEQ ID NO: 172498 - DNA, 13 bp, Artificial Sequence
  Oligonucleotide for detection of SNP TSC0042991
rttatacacctat

SEQ ID NO: 172499 - DNA, 13 bp, Artificial Sequence
  Oligonucleotide for detection of SNP TSC0042992
atatttaataggt

SEQ ID NO: 172500 - DNA, 13 bp, Artificial Sequence
  Oligonucleotide for detection of SNP TSC0042992
acctattaaatat

SEQ ID NO: 172501 - DNA, 13 bp, Artificial Sequence
  Oligonucleotide for detection of SNP TSC0042992
atattttataggt

SEQ ID NO: 172502 - DNA, 13 bp, Artificial Sequence
  Oligonucleotide for detection of SNP TSC0042992
acctataaaatat

SEQ ID NO: 172503 - DNA, 13 bp, Artificial Sequence
  Oligonucleotide for detection of SNP TSC0042992
atttgttagatat

SEQ ID NO: 172504 - DNA, 13 bp, Artificial Sequence
  Oligonucleotide for detection of SNP TSC0042992
atatctaacaaat

SEQ ID NO: 172505 - DNA, 13 bp, Artificial Sequence
  Oligonucleotide for detection of SNP TSC0042992
atttgtaagatat

SEQ ID NO: 172506 - DNA, 13 bp, Artificial Sequence
  Oligonucleotide for detection of SNP TSC0042992
atatcttacaaat

SEQ ID NO: 172507 - DNA, 13 bp, Artificial Sequence
  Oligonucleotide for detection of SNP TSC0042993
gtttagtttttta

SEQ ID NO: 172508 - DNA, 13 bp, Artificial Sequence
  Oligonucleotide for detection of SNP TSC0042993
taaaaaactaaac

SEQ ID NO: 172509 - DNA, 13 bp, Artificial Sequence
  Oligonucleotide for detection of SNP TSC0042993
gtttaggttttta

SEQ ID NO: 172510 - DNA, 13 bp, Artificial Sequence
  Oligonucleotide for detection of SNP TSC0042993
taaaaacctaaac

SEQ ID NO: 172511 - DNA, 13 bp, Artificial Sequence
  Oligonucleotide for detection of SNP TSC0042993
taaaaaattgaay

SEQ ID NO: 172512 - DNA, 13 bp, Artificial Sequence
  Oligonucleotide for detection of SNP TSC0042993
rttcaatttttta

SEQ ID NO: 172513 - DNA, 13 bp, Artificial Sequence
  Oligonucleotide for detection of SNP TSC0042993
taaaaatttgaay

SEQ ID NO: 172514 - DNA, 13 bp, Artificial Sequence
  Oligonucleotide for detection of SNP TSC0042993
rttcaaattttta

SEQ ID NO: 172515 - DNA, 13 bp, Artificial Sequence
  Oligonucleotide for detection of SNP TSC0042994
tatttttagtaga

SEQ ID NO: 172516 - DNA, 13 bp, Artificial Sequence
  Oligonucleotide for detection of SNP TSC0042994
tctactaaaaata

SEQ ID NO: 172517 - DNA, 13 bp, Artificial Sequence
  Oligonucleotide for detection of SNP TSC0042994
tattttaagtaga

SEQ ID NO: 172518 - DNA, 13 bp, Artificial Sequence
  Oligonucleotide for detection of SNP TSC0042994
tctacttaaaata

SEQ ID NO: 172519 - DNA, 13 bp, Artificial Sequence
  Oligonucleotide for detection of SNP TSC0042995
tttagagtaatty

SEQ ID NO: 172520 - DNA, 13 bp, Artificial Sequence
  Oligonucleotide for detection of SNP TSC0042995
raattactctaaa

SEQ ID NO: 172521 - DNA, 13 bp, Artificial Sequence
  Oligonucleotide for detection of SNP TSC0042995
tttagaataatty

SEQ ID NO: 172522 - DNA, 13 bp, Artificial Sequence
  Oligonucleotide for detection of SNP TSC0042995
raattattctaaa

SEQ ID NO: 172523 - DNA, 13 bp, Artificial Sequence
  Oligonucleotide for detection of SNP TSC0042996
gtggagattgtta

SEQ ID NO: 172524 - DNA, 13 bp, Artificial Sequence
  Oligonucleotide for detection of SNP TSC0042996
taacaatctccac

SEQ ID NO: 172525 - DNA, 13 bp, Artificial Sequence
  Oligonucleotide for detection of SNP TSC0042996
gtggaggttgtta

SEQ ID NO: 172526 - DNA, 13 bp, Artificial Sequence
  Oligonucleotide for detection of SNP TSC0042996
taacaacctccac

SEQ ID NO: 172527 - DNA, 13 bp, Artificial Sequence
  Oligonucleotide for detection of SNP TSC0042998
ttattgtataatt

SEQ ID NO: 172528 - DNA, 13 bp, Artificial Sequence
  Oligonucleotide for detection of SNP TSC0042998
aattatacaataa

SEQ ID NO: 172529 - DNA, 13 bp, Artificial Sequence
  Oligonucleotide for detection of SNP TSC0042998
ttattggataatt

SEQ ID NO: 172530 - DNA, 13 bp, Artificial Sequence
  Oligonucleotide for detection of SNP TSC0042998
aattatccaataa

SEQ ID NO: 172531 - DNA, 13 bp, Artificial Sequence
  Oligonucleotide for detection of SNP TSC0042998
aattatatagtgg

SEQ ID NO: 172532 - DNA, 13 bp, Artificial Sequence
  Oligonucleotide for detection of SNP TSC0042998
ccactatataatt

SEQ ID NO: 172533 - DNA, 13 bp, Artificial Sequence
  Oligonucleotide for detection of SNP TSC0042998
aattatttagtgg

SEQ ID NO: 172534 - DNA, 13 bp, Artificial Sequence
  Oligonucleotide for detection of SNP TSC0042998
ccactaaataatt

SEQ ID NO: 172535 - DNA, 13 bp, Artificial Sequence
  Oligonucleotide for detection of SNP TSC0042999
atgagaaaatatg

SEQ ID NO: 172536 - DNA, 13 bp, Artificial Sequence
  Oligonucleotide for detection of SNP TSC0042999
catattttctcat

SEQ ID NO: 172537 - DNA, 13 bp, Artificial Sequence
  Oligonucleotide for detection of SNP TSC0042999
atgagagaatatg

SEQ ID NO: 172538 - DNA, 13 bp, Artificial Sequence
  Oligonucleotide for detection of SNP TSC0042999
catattctctcat

SEQ ID NO: 172539 - DNA, 13 bp, Artificial Sequence
  Oligonucleotide for detection of SNP TSC0043000
agatgggagaaaa

SEQ ID NO: 172540 - DNA, 13 bp, Artificial Sequence
  Oligonucleotide for detection of SNP TSC0043000
ttttctcccatct

SEQ ID NO: 172541 - DNA, 13 bp, Artificial Sequence
  Oligonucleotide for detection of SNP TSC0043000
agatggaagaaaa

SEQ ID NO: 172542 - DNA, 13 bp, Artificial Sequence
  Oligonucleotide for detection of SNP TSC0043000
ttttcttccatct

SEQ ID NO: 172543 - DNA, 13 bp, Artificial Sequence
  Oligonucleotide for detection of SNP TSC0043001
gtgtagaagtttt

SEQ ID NO: 172544 - DNA, 13 bp, Artificial Sequence
  Oligonucleotide for detection of SNP TSC0043001
aaaacttctacac

SEQ ID NO: 172545 - DNA, 13 bp, Artificial Sequence
  Oligonucleotide for detection of SNP TSC0043001
gtgtaggagtttt

SEQ ID NO: 172546 - DNA, 13 bp, Artificial Sequence
  Oligonucleotide for detection of SNP TSC0043001
aaaactcctacac

SEQ ID NO: 172547 - DNA, 13 bp, Artificial Sequence
  Oligonucleotide for detection of SNP TSC0043002
taataaggtaaag

SEQ ID NO: 172548 - DNA, 13 bp, Artificial Sequence
  Oligonucleotide for detection of SNP TSC0043002
ctttaccttatta

SEQ ID NO: 172549 - DNA, 13 bp, Artificial Sequence
  Oligonucleotide for detection of SNP TSC0043002
taataaagtaaag

SEQ ID NO: 172550 - DNA, 13 bp, Artificial Sequence
  Oligonucleotide for detection of SNP TSC0043002
ctttactttatta

SEQ ID NO: 172551 - DNA, 13 bp, Artificial Sequence
  Oligonucleotide for detection of SNP TSC0043007
agttttaatttta

SEQ ID NO: 172552 - DNA, 13 bp, Artificial Sequence
  Oligonucleotide for detection of SNP TSC0043007
taaaattaaaact

SEQ ID NO: 172553 - DNA, 13 bp, Artificial Sequence
  Oligonucleotide for detection of SNP TSC0043007
tagaattaaagtt

SEQ ID NO: 172554 - DNA, 13 bp, Artificial Sequence
  Oligonucleotide for detection of SNP TSC0043007
aactttaattcta

SEQ ID NO: 172555 - DNA, 13 bp, Artificial Sequence
  Oligonucleotide for detection of SNP TSC0043007
tagaatgaaagtt

SEQ ID NO: 172556 - DNA, 13 bp, Artificial Sequence
  Oligonucleotide for detection of SNP TSC0043007
aactttcattcta

SEQ ID NO: 172557 - DNA, 13 bp, Artificial Sequence
  Oligonucleotide for detection of SNP TSC0043008
ttattagaatgaa

SEQ ID NO: 172558 - DNA, 13 bp, Artificial Sequence
  Oligonucleotide for detection of SNP TSC0043008
ttcattctaataa

SEQ ID NO: 172559 - DNA, 13 bp, Artificial Sequence
  Oligonucleotide for detection of SNP TSC0043008
ttattaaaatgaa

SEQ ID NO: 172560 - DNA, 13 bp, Artificial Sequence
  Oligonucleotide for detection of SNP TSC0043008
ttcattttaataa

SEQ ID NO: 172561 - DNA, 13 bp, Artificial Sequence
  Oligonucleotide for detection of SNP TSC0043009
tagtagagttagy

SEQ ID NO: 172562 - DNA, 13 bp, Artificial Sequence
  Oligonucleotide for detection of SNP TSC0043009
rctaactctacta

SEQ ID NO: 172563 - DNA, 13 bp, Artificial Sequence
  Oligonucleotide for detection of SNP TSC0043009
tagtagggttagy

SEQ ID NO: 172564 - DNA, 13 bp, Artificial Sequence
  Oligonucleotide for detection of SNP TSC0043009
rctaaccctacta

SEQ ID NO: 172565 - DNA, 13 bp, Artificial Sequence
  Oligonucleotide for detection of SNP TSC0043010
ttaataattttgy

SEQ ID NO: 172566 - DNA, 13 bp, Artificial Sequence
  Oligonucleotide for detection of SNP TSC0043010
rcaaaattattaa

SEQ ID NO: 172567 - DNA, 13 bp, Artificial Sequence
  Oligonucleotide for detection of SNP TSC0043011
aggtttgaagagt

SEQ ID NO: 172568 - DNA, 13 bp, Artificial Sequence
  Oligonucleotide for detection of SNP TSC0043011
actcttcaaacct

SEQ ID NO: 172569 - DNA, 13 bp, Artificial Sequence
  Oligonucleotide for detection of SNP TSC0043011
aggtttaaagagt

SEQ ID NO: 172570 - DNA, 13 bp, Artificial Sequence
  Oligonucleotide for detection of SNP TSC0043011
actctttaaacct

SEQ ID NO: 172571 - DNA, 13 bp, Artificial Sequence
  Oligonucleotide for detection of SNP TSC0043011
aggttcgaagagt

SEQ ID NO: 172572 - DNA, 13 bp, Artificial Sequence
  Oligonucleotide for detection of SNP TSC0043011
actcttcgaacct

SEQ ID NO: 172573 - DNA, 13 bp, Artificial Sequence
  Oligonucleotide for detection of SNP TSC0043013
agatgttgttaty

SEQ ID NO: 172574 - DNA, 13 bp, Artificial Sequence
  Oligonucleotide for detection of SNP TSC0043013
rataacaacatct

SEQ ID NO: 172575 - DNA, 13 bp, Artificial Sequence
  Oligonucleotide for detection of SNP TSC0043013
agatgtcgttaty

SEQ ID NO: 172576 - DNA, 13 bp, Artificial Sequence
  Oligonucleotide for detection of SNP TSC0043013
rataacgacatct

SEQ ID NO: 172577 - DNA, 13 bp, Artificial Sequence
  Oligonucleotide for detection of SNP TSC0043013
ggtggtgatattt

SEQ ID NO: 172578 - DNA, 13 bp, Artificial Sequence
  Oligonucleotide for detection of SNP TSC0043013
aaatatcaccacc

SEQ ID NO: 172579 - DNA, 13 bp, Artificial Sequence
  Oligonucleotide for detection of SNP TSC0043013
ggtggtaatattt

SEQ ID NO: 172580 - DNA, 13 bp, Artificial Sequence
  Oligonucleotide for detection of SNP TSC0043013
aaatattaccacc

SEQ ID NO: 172581 - DNA, 13 bp, Artificial Sequence
  Oligonucleotide for detection of SNP TSC0043013
ggtggcgatattt

SEQ ID NO: 172582 - DNA, 13 bp, Artificial Sequence
  Oligonucleotide for detection of SNP TSC0043013
aaatatcgccacc

SEQ ID NO: 172583 - DNA, 13 bp, Artificial Sequence
  Oligonucleotide for detection of SNP TSC0043017
ttgtaagagaaaa

SEQ ID NO: 172584 - DNA, 13 bp, Artificial Sequence
  Oligonucleotide for detection of SNP TSC0043017
ttttctcttacaa

SEQ ID NO: 172585 - DNA, 13 bp, Artificial Sequence
  Oligonucleotide for detection of SNP TSC0043017
ttgtaaaagaaaa

SEQ ID NO: 172586 - DNA, 13 bp, Artificial Sequence
  Oligonucleotide for detection of SNP TSC0043017
ttttcttttacaa

SEQ ID NO: 172587 - DNA, 13 bp, Artificial Sequence
  Oligonucleotide for detection of SNP TSC0006537
tgtttgaataaat

SEQ ID NO: 172588 - DNA, 13 bp, Artificial Sequence
  Oligonucleotide for detection of SNP TSC0006537
atttattcaaaca

SEQ ID NO: 172589 - DNA, 13 bp, Artificial Sequence
  Oligonucleotide for detection of SNP TSC0006537
tgtttgtataaat

SEQ ID NO: 172590 - DNA, 13 bp, Artificial Sequence
  Oligonucleotide for detection of SNP TSC0006537
atttatacaaaca

SEQ ID NO: 172591 - DNA, 13 bp, Artificial Sequence
  Oligonucleotide for detection of SNP TSC0006537
atttgtgtaaata

SEQ ID NO: 172592 - DNA, 13 bp, Artificial Sequence
  Oligonucleotide for detection of SNP TSC0006537
tatttacacaaat

SEQ ID NO: 172593 - DNA, 13 bp, Artificial Sequence
  Oligonucleotide for detection of SNP TSC0043018
tgaattaaaaagy

SEQ ID NO: 172594 - DNA, 13 bp, Artificial Sequence
  Oligonucleotide for detection of SNP TSC0043018
rctttttaattca

SEQ ID NO: 172595 - DNA, 13 bp, Artificial Sequence
  Oligonucleotide for detection of SNP TSC0043018
tgaattgaaaagy

SEQ ID NO: 172596 - DNA, 13 bp, Artificial Sequence
  Oligonucleotide for detection of SNP TSC0043018
rcttttcaattca

SEQ ID NO: 172597 - DNA, 13 bp, Artificial Sequence
  Oligonucleotide for detection of SNP TSC0043019
atatgaatatata

SEQ ID NO: 172598 - DNA, 13 bp, Artificial Sequence
  Oligonucleotide for detection of SNP TSC0043019
tatatattcatat

SEQ ID NO: 172599 - DNA, 13 bp, Artificial Sequence
  Oligonucleotide for detection of SNP TSC0043019
atatgattatata

SEQ ID NO: 172600 - DNA, 13 bp, Artificial Sequence
  Oligonucleotide for detection of SNP TSC0043019
tatataatcatat

SEQ ID NO: 172601 - DNA, 13 bp, Artificial Sequence
  Oligonucleotide for detection of SNP TSC0043019
tgtgtatttatat

SEQ ID NO: 172602 - DNA, 13 bp, Artificial Sequence
  Oligonucleotide for detection of SNP TSC0043019
atataaatacaca

SEQ ID NO: 172603 - DNA, 13 bp, Artificial Sequence
  Oligonucleotide for detection of SNP TSC0043019
tgtgtagttatat

SEQ ID NO: 172604 - DNA, 13 bp, Artificial Sequence
  Oligonucleotide for detection of SNP TSC0043019
atataactacaca

SEQ ID NO: 172605 - DNA, 13 bp, Artificial Sequence
  Oligonucleotide for detection of SNP TSC0043022
atatggaggatgg

SEQ ID NO: 172606 - DNA, 13 bp, Artificial Sequence
  Oligonucleotide for detection of SNP TSC0043022
ccatcctccatat

SEQ ID NO: 172607 - DNA, 13 bp, Artificial Sequence
  Oligonucleotide for detection of SNP TSC0043022
atatggtggatgg

SEQ ID NO: 172608 - DNA, 13 bp, Artificial Sequence
  Oligonucleotide for detection of SNP TSC0043022
ccatccaccatat

SEQ ID NO: 172609 - DNA, 13 bp, Artificial Sequence
  Oligonucleotide for detection of SNP TSC0043022
atatggcggatgg

SEQ ID NO: 172610 - DNA, 13 bp, Artificial Sequence
  Oligonucleotide for detection of SNP TSC0043022
ccatccgccatat

SEQ ID NO: 172611 - DNA, 13 bp, Artificial Sequence
  Oligonucleotide for detection of SNP TSC0043022
ttattcgttatat

SEQ ID NO: 172612 - DNA, 13 bp, Artificial Sequence
  Oligonucleotide for detection of SNP TSC0043022
atataacgaataa

SEQ ID NO: 172613 - DNA, 13 bp, Artificial Sequence
  Oligonucleotide for detection of SNP TSC0043026
tggtaagtggatt

SEQ ID NO: 172614 - DNA, 13 bp, Artificial Sequence
  Oligonucleotide for detection of SNP TSC0043026
aatccacttacca

SEQ ID NO: 172615 - DNA, 13 bp, Artificial Sequence
  Oligonucleotide for detection of SNP TSC0043026
tggtaaatggatt

SEQ ID NO: 172616 - DNA, 13 bp, Artificial Sequence
  Oligonucleotide for detection of SNP TSC0043026
aatccatttacca

SEQ ID NO: 172617 - DNA, 13 bp, Artificial Sequence
  Oligonucleotide for detection of SNP TSC0009897
tagttcgtttttt

SEQ ID NO: 172618 - DNA, 13 bp, Artificial Sequence
  Oligonucleotide for detection of SNP TSC0009897
aaaaaacgaacta

SEQ ID NO: 172619 - DNA, 13 bp, Artificial Sequence
  Oligonucleotide for detection of SNP TSC0009897
aaggaaggggttg

SEQ ID NO: 172620 - DNA, 13 bp, Artificial Sequence
  Oligonucleotide for detection of SNP TSC0009897
caaccccttcctt

SEQ ID NO: 172621 - DNA, 13 bp, Artificial Sequence
  Oligonucleotide for detection of SNP TSC0009897
aaggaatgggttg

SEQ ID NO: 172622 - DNA, 13 bp, Artificial Sequence
  Oligonucleotide for detection of SNP TSC0009897
caacccattcctt

SEQ ID NO: 172623 - DNA, 13 bp, Artificial Sequence
  Oligonucleotide for detection of SNP TSC0009897
aaggaacgggttg

SEQ ID NO: 172624 - DNA, 13 bp, Artificial Sequence
  Oligonucleotide for detection of SNP TSC0009897
caacccgttcctt

SEQ ID NO: 172625 - DNA, 13 bp, Artificial Sequence
  Oligonucleotide for detection of SNP TSC0043028
ttggggattatay

SEQ ID NO: 172626 - DNA, 13 bp, Artificial Sequence
  Oligonucleotide for detection of SNP TSC0043028
rtataatccccaa

SEQ ID NO: 172627 - DNA, 13 bp, Artificial Sequence
  Oligonucleotide for detection of SNP TSC0043028
ttgggggttatay

SEQ ID NO: 172628 - DNA, 13 bp, Artificial Sequence
  Oligonucleotide for detection of SNP TSC0043028
rtataacccccaa

SEQ ID NO: 172629 - DNA, 13 bp, Artificial Sequence
  Oligonucleotide for detection of SNP TSC0007776
tgaaaatgagtgt

SEQ ID NO: 172630 - DNA, 13 bp, Artificial Sequence
  Oligonucleotide for detection of SNP TSC0007776
acactcattttca

SEQ ID NO: 172631 - DNA, 13 bp, Artificial Sequence
  Oligonucleotide for detection of SNP TSC0007776
tgaaaacgagtgt

SEQ ID NO: 172632 - DNA, 13 bp, Artificial Sequence
  Oligonucleotide for detection of SNP TSC0007776
acactcgttttca

SEQ ID NO: 172633 - DNA, 13 bp, Artificial Sequence
  Oligonucleotide for detection of SNP TSC0007777
tgaaatagataat

SEQ ID NO: 172634 - DNA, 13 bp, Artificial Sequence
  Oligonucleotide for detection of SNP TSC0007777
attatctatttca

SEQ ID NO: 172635 - DNA, 13 bp, Artificial Sequence
  Oligonucleotide for detection of SNP TSC0007777
tgaaattgataat

SEQ ID NO: 172636 - DNA, 13 bp, Artificial Sequence
  Oligonucleotide for detection of SNP TSC0007777
attatcaatttca

SEQ ID NO: 172637 - DNA, 13 bp, Artificial Sequence
  Oligonucleotide for detection of SNP TSC0007777
attgtttgtttta

SEQ ID NO: 172638 - DNA, 13 bp, Artificial Sequence
  Oligonucleotide for detection of SNP TSC0007777
taaaacaaacaat

SEQ ID NO: 172639 - DNA, 13 bp, Artificial Sequence
  Oligonucleotide for detection of SNP TSC0007777
attgttagtttta

SEQ ID NO: 172640 - DNA, 13 bp, Artificial Sequence
  Oligonucleotide for detection of SNP TSC0007777
taaaactaacaat

SEQ ID NO: 172641 - DNA, 13 bp, Artificial Sequence
  Oligonucleotide for detection of SNP TSC0043030
tattatattgtgt

SEQ ID NO: 172642 - DNA, 13 bp, Artificial Sequence
  Oligonucleotide for detection of SNP TSC0043030
acacaatataata

SEQ ID NO: 172643 - DNA, 13 bp, Artificial Sequence
  Oligonucleotide for detection of SNP TSC0043030
tattattttgtgt

SEQ ID NO: 172644 - DNA, 13 bp, Artificial Sequence
  Oligonucleotide for detection of SNP TSC0043030
acacaaaataata

SEQ ID NO: 172645 - DNA, 13 bp, Artificial Sequence
  Oligonucleotide for detection of SNP TSC0043030
atatagtatgata

SEQ ID NO: 172646 - DNA, 13 bp, Artificial Sequence
  Oligonucleotide for detection of SNP TSC0043030
tatcatactatat

SEQ ID NO: 172647 - DNA, 13 bp, Artificial Sequence
  Oligonucleotide for detection of SNP TSC0043030
atatagaatgata

SEQ ID NO: 172648 - DNA, 13 bp, Artificial Sequence
  Oligonucleotide for detection of SNP TSC0043030
tatcattctatat

SEQ ID NO: 172649 - DNA, 13 bp, Artificial Sequence
  Oligonucleotide for detection of SNP TSC0043031
ttttagagttttt

SEQ ID NO: 172650 - DNA, 13 bp, Artificial Sequence
  Oligonucleotide for detection of SNP TSC0043031
aaaaactctaaaa

SEQ ID NO: 172651 - DNA, 13 bp, Artificial Sequence
  Oligonucleotide for detection of SNP TSC0043031
agggattttgggg

SEQ ID NO: 172652 - DNA, 13 bp, Artificial Sequence
  Oligonucleotide for detection of SNP TSC0043031
ccccaaaatccct

SEQ ID NO: 172653 - DNA, 13 bp, Artificial Sequence
  Oligonucleotide for detection of SNP TSC0043031
agggatattgggg

SEQ ID NO: 172654 - DNA, 13 bp, Artificial Sequence
  Oligonucleotide for detection of SNP TSC0043031
ccccaatatccct

SEQ ID NO: 172655 - DNA, 13 bp, Artificial Sequence
  Oligonucleotide for detection of SNP TSC0043034
tatgtatgtgaga

SEQ ID NO: 172656 - DNA, 13 bp, Artificial Sequence
  Oligonucleotide for detection of SNP TSC0043034
tctcacatacata

SEQ ID NO: 172657 - DNA, 13 bp, Artificial Sequence
  Oligonucleotide for detection of SNP TSC0043034
tatgtacgtgaga

SEQ ID NO: 172658 - DNA, 13 bp, Artificial Sequence
  Oligonucleotide for detection of SNP TSC0043034
tctcacgtacata

SEQ ID NO: 172659 - DNA, 13 bp, Artificial Sequence
  Oligonucleotide for detection of SNP TSC0043034
ttttatgtgtatg

SEQ ID NO: 172660 - DNA, 13 bp, Artificial Sequence
  Oligonucleotide for detection of SNP TSC0043034
catacacataaaa

SEQ ID NO: 172661 - DNA, 13 bp, Artificial Sequence
  Oligonucleotide for detection of SNP TSC0043034
ttttatatgtatg

SEQ ID NO: 172662 - DNA, 13 bp, Artificial Sequence
  Oligonucleotide for detection of SNP TSC0043034
catacatataaaa

SEQ ID NO: 172663 - DNA, 13 bp, Artificial Sequence
  Oligonucleotide for detection of SNP TSC0043034
ttttacgtgtatg

SEQ ID NO: 172664 - DNA, 13 bp, Artificial Sequence
  Oligonucleotide for detection of SNP TSC0043034
catacacgtaaaa

SEQ ID NO: 172665 - DNA, 13 bp, Artificial Sequence
  Oligonucleotide for detection of SNP TSC0043035
gagaggtttttga

SEQ ID NO: 172666 - DNA, 13 bp, Artificial Sequence
  Oligonucleotide for detection of SNP TSC0043035
tcaaaaacctctc

SEQ ID NO: 172667 - DNA, 13 bp, Artificial Sequence
  Oligonucleotide for detection of SNP TSC0043035
gagagggttttga

SEQ ID NO: 172668 - DNA, 13 bp, Artificial Sequence
  Oligonucleotide for detection of SNP TSC0043035
tcaaaaccctctc

SEQ ID NO: 172669 - DNA, 13 bp, Artificial Sequence
  Oligonucleotide for detection of SNP TSC0043035
ttagaaattttty

SEQ ID NO: 172670 - DNA, 13 bp, Artificial Sequence
  Oligonucleotide for detection of SNP TSC0043035
raaaaatttctaa

SEQ ID NO: 172671 - DNA, 13 bp, Artificial Sequence
  Oligonucleotide for detection of SNP TSC0043035
ttagaatttttty

SEQ ID NO: 172672 - DNA, 13 bp, Artificial Sequence
  Oligonucleotide for detection of SNP TSC0043035
raaaaaattctaa

SEQ ID NO: 172673 - DNA, 13 bp, Artificial Sequence
  Oligonucleotide for detection of SNP TSC0043036
gagtttaggaggt

SEQ ID NO: 172674 - DNA, 13 bp, Artificial Sequence
  Oligonucleotide for detection of SNP TSC0043036
acctcctaaactc

SEQ ID NO: 172675 - DNA, 13 bp, Artificial Sequence
  Oligonucleotide for detection of SNP TSC0043036
gagtttgggaggt

SEQ ID NO: 172676 - DNA, 13 bp, Artificial Sequence
  Oligonucleotide for detection of SNP TSC0043036
acctcccaaactc

SEQ ID NO: 172677 - DNA, 13 bp, Artificial Sequence
  Oligonucleotide for detection of SNP TSC0043036
gagttcgggaggt

SEQ ID NO: 172678 - DNA, 13 bp, Artificial Sequence
  Oligonucleotide for detection of SNP TSC0043036
acctcccgaactc

SEQ ID NO: 172679 - DNA, 13 bp, Artificial Sequence
  Oligonucleotide for detection of SNP TSC0043037
taatgttgttttt

SEQ ID NO: 172680 - DNA, 13 bp, Artificial Sequence
  Oligonucleotide for detection of SNP TSC0043037
aaaaacaacatta

SEQ ID NO: 172681 - DNA, 13 bp, Artificial Sequence
  Oligonucleotide for detection of SNP TSC0043037
taatgtggttttt

SEQ ID NO: 172682 - DNA, 13 bp, Artificial Sequence
  Oligonucleotide for detection of SNP TSC0043037
aaaaaccacatta

SEQ ID NO: 172683 - DNA, 13 bp, Artificial Sequence
  Oligonucleotide for detection of SNP TSC0043037
aaaagtaatatta

SEQ ID NO: 172684 - DNA, 13 bp, Artificial Sequence
  Oligonucleotide for detection of SNP TSC0043037
taatattactttt

SEQ ID NO: 172685 - DNA, 13 bp, Artificial Sequence
  Oligonucleotide for detection of SNP TSC0043037
aaaagttatatta

SEQ ID NO: 172686 - DNA, 13 bp, Artificial Sequence
  Oligonucleotide for detection of SNP TSC0043037
taatataactttt

SEQ ID NO: 172687 - DNA, 13 bp, Artificial Sequence
  Oligonucleotide for detection of SNP TSC0043038
tggtgaggtagtt

SEQ ID NO: 172688 - DNA, 13 bp, Artificial Sequence
  Oligonucleotide for detection of SNP TSC0043038
aactacctcacca

SEQ ID NO: 172689 - DNA, 13 bp, Artificial Sequence
  Oligonucleotide for detection of SNP TSC0043038
tggtgaagtagtt

SEQ ID NO: 172690 - DNA, 13 bp, Artificial Sequence
  Oligonucleotide for detection of SNP TSC0043038
aactacttcacca

SEQ ID NO: 172691 - DNA, 13 bp, Artificial Sequence
  Oligonucleotide for detection of SNP TSC0043040
ttgtgagtagtty

SEQ ID NO: 172692 - DNA, 13 bp, Artificial Sequence
  Oligonucleotide for detection of SNP TSC0043040
raactactcacaa

SEQ ID NO: 172693 - DNA, 13 bp, Artificial Sequence
  Oligonucleotide for detection of SNP TSC0043040
ttgtgaatagtty

SEQ ID NO: 172694 - DNA, 13 bp, Artificial Sequence
  Oligonucleotide for detection of SNP TSC0043040
raactattcacaa

SEQ ID NO: 172695 - DNA, 13 bp, Artificial Sequence
  Oligonucleotide for detection of SNP TSC0043042
agaaagaggtaaa

SEQ ID NO: 172696 - DNA, 13 bp, Artificial Sequence
  Oligonucleotide for detection of SNP TSC0043042
tttacctctttct

SEQ ID NO: 172697 - DNA, 13 bp, Artificial Sequence
  Oligonucleotide for detection of SNP TSC0043042
agaaaggggtaaa

SEQ ID NO: 172698 - DNA, 13 bp, Artificial Sequence
  Oligonucleotide for detection of SNP TSC0043042
tttacccctttct

SEQ ID NO: 172699 - DNA, 13 bp, Artificial Sequence
  Oligonucleotide for detection of SNP TSC0043043
taaaggagatttt

SEQ ID NO: 172700 - DNA, 13 bp, Artificial Sequence
  Oligonucleotide for detection of SNP TSC0043043
aaaatctccttta

SEQ ID NO: 172701 - DNA, 13 bp, Artificial Sequence
  Oligonucleotide for detection of SNP TSC0043043
taaaggggatttt

SEQ ID NO: 172702 - DNA, 13 bp, Artificial Sequence
  Oligonucleotide for detection of SNP TSC0043043
aaaatccccttta

SEQ ID NO: 172703 - DNA, 13 bp, Artificial Sequence
  Oligonucleotide for detection of SNP TSC0005042
gtttttataggaa

SEQ ID NO: 172704 - DNA, 13 bp, Artificial Sequence
  Oligonucleotide for detection of SNP TSC0005042
ttcctataaaaac

SEQ ID NO: 172705 - DNA, 13 bp, Artificial Sequence
  Oligonucleotide for detection of SNP TSC0005042
gtttttgtaggaa

SEQ ID NO: 172706 - DNA, 13 bp, Artificial Sequence
  Oligonucleotide for detection of SNP TSC0005042
ttcctacaaaaac

SEQ ID NO: 172707 - DNA, 13 bp, Artificial Sequence
  Oligonucleotide for detection of SNP TSC0005043
gttttaagttgtt

SEQ ID NO: 172708 - DNA, 13 bp, Artificial Sequence
  Oligonucleotide for detection of SNP TSC0005043
aacaacttaaaac

SEQ ID NO: 172709 - DNA, 13 bp, Artificial Sequence
  Oligonucleotide for detection of SNP TSC0005043
gttttaggttgtt

SEQ ID NO: 172710 - DNA, 13 bp, Artificial Sequence
  Oligonucleotide for detection of SNP TSC0005043
aacaacctaaaac

SEQ ID NO: 172711 - DNA, 13 bp, Artificial Sequence
  Oligonucleotide for detection of SNP TSC0043046
aaatagagattag

SEQ ID NO: 172712 - DNA, 13 bp, Artificial Sequence
  Oligonucleotide for detection of SNP TSC0043046
ctaatctctattt

SEQ ID NO: 172713 - DNA, 13 bp, Artificial Sequence
  Oligonucleotide for detection of SNP TSC0043046
aaatagtgattag

SEQ ID NO: 172714 - DNA, 13 bp, Artificial Sequence
  Oligonucleotide for detection of SNP TSC0043046
ctaatcactattt

SEQ ID NO: 172715 - DNA, 13 bp, Artificial Sequence
  Oligonucleotide for detection of SNP TSC0043046
ttggtttttgttt

SEQ ID NO: 172716 - DNA, 13 bp, Artificial Sequence
  Oligonucleotide for detection of SNP TSC0043046
aaacaaaaaccaa

SEQ ID NO: 172717 - DNA, 13 bp, Artificial Sequence
  Oligonucleotide for detection of SNP TSC0043047
aattttattttcg

SEQ ID NO: 172718 - DNA, 13 bp, Artificial Sequence
  Oligonucleotide for detection of SNP TSC0043047
cgaaaataaaatt

SEQ ID NO: 172719 - DNA, 13 bp, Artificial Sequence
  Oligonucleotide for detection of SNP TSC0043047
aattttgttttcg

SEQ ID NO: 172720 - DNA, 13 bp, Artificial Sequence
  Oligonucleotide for detection of SNP TSC0043047
cgaaaacaaaatt

SEQ ID NO: 172721 - DNA, 13 bp, Artificial Sequence
  Oligonucleotide for detection of SNP TSC0043048
ttttgtagtttay

SEQ ID NO: 172722 - DNA, 13 bp, Artificial Sequence
  Oligonucleotide for detection of SNP TSC0043048
rtaaactacaaaa

SEQ ID NO: 172723 - DNA, 13 bp, Artificial Sequence
  Oligonucleotide for detection of SNP TSC0043048
ttttgttgtttay

SEQ ID NO: 172724 - DNA, 13 bp, Artificial Sequence
  Oligonucleotide for detection of SNP TSC0043048
rtaaacaacaaaa

SEQ ID NO: 172725 - DNA, 13 bp, Artificial Sequence
  Oligonucleotide for detection of SNP TSC0043048
gtaagttatagag

SEQ ID NO: 172726 - DNA, 13 bp, Artificial Sequence
  Oligonucleotide for detection of SNP TSC0043048
ctctataacttac

SEQ ID NO: 172727 - DNA, 13 bp, Artificial Sequence
  Oligonucleotide for detection of SNP TSC0043048
gtaagtaatagag

SEQ ID NO: 172728 - DNA, 13 bp, Artificial Sequence
  Oligonucleotide for detection of SNP TSC0043048
ctctattacttac

SEQ ID NO: 172729 - DNA, 13 bp, Artificial Sequence
  Oligonucleotide for detection of SNP TSC0043049
aatattatatgta

SEQ ID NO: 172730 - DNA, 13 bp, Artificial Sequence
  Oligonucleotide for detection of SNP TSC0043049
tacatataatatt

SEQ ID NO: 172731 - DNA, 13 bp, Artificial Sequence
  Oligonucleotide for detection of SNP TSC0043049
aatattgtatgta

SEQ ID NO: 172732 - DNA, 13 bp, Artificial Sequence
  Oligonucleotide for detection of SNP TSC0043049
tacatacaatatt

SEQ ID NO: 172733 - DNA, 13 bp, Artificial Sequence
  Oligonucleotide for detection of SNP TSC0043049
aatattatacgta

SEQ ID NO: 172734 - DNA, 13 bp, Artificial Sequence
  Oligonucleotide for detection of SNP TSC0043049
tacgtataatatt

SEQ ID NO: 172735 - DNA, 13 bp, Artificial Sequence
  Oligonucleotide for detection of SNP TSC0043049
aatattgtacgta

SEQ ID NO: 172736 - DNA, 13 bp, Artificial Sequence
  Oligonucleotide for detection of SNP TSC0043049
tacgtacaatatt

SEQ ID NO: 172737 - DNA, 13 bp, Artificial Sequence
  Oligonucleotide for detection of SNP TSC0043050
taggaattaaatg

SEQ ID NO: 172738 - DNA, 13 bp, Artificial Sequence
  Oligonucleotide for detection of SNP TSC0043050
catttaattccta

SEQ ID NO: 172739 - DNA, 13 bp, Artificial Sequence
  Oligonucleotide for detection of SNP TSC0043050
taggaagtaaatg

SEQ ID NO: 172740 - DNA, 13 bp, Artificial Sequence
  Oligonucleotide for detection of SNP TSC0043050
catttacttccta

SEQ ID NO: 172741 - DNA, 13 bp, Artificial Sequence
  Oligonucleotide for detection of SNP TSC0043051
gtttttggtttat

SEQ ID NO: 172742 - DNA, 13 bp, Artificial Sequence
  Oligonucleotide for detection of SNP TSC0043051
ataaaccaaaaac

SEQ ID NO: 172743 - DNA, 13 bp, Artificial Sequence
  Oligonucleotide for detection of SNP TSC0043051
gtttttagtttat

SEQ ID NO: 172744 - DNA, 13 bp, Artificial Sequence
  Oligonucleotide for detection of SNP TSC0043051
ataaactaaaaac

SEQ ID NO: 172745 - DNA, 13 bp, Artificial Sequence
  Oligonucleotide for detection of SNP TSC0043052
ttgttatgttgty

SEQ ID NO: 172746 - DNA, 13 bp, Artificial Sequence
  Oligonucleotide for detection of SNP TSC0043052
racaacataacaa

SEQ ID NO: 172747 - DNA, 13 bp, Artificial Sequence
  Oligonucleotide for detection of SNP TSC0043052
ttgttacgttgty

SEQ ID NO: 172748 - DNA, 13 bp, Artificial Sequence
  Oligonucleotide for detection of SNP TSC0043052
racaacgtaacaa

SEQ ID NO: 172749 - DNA, 13 bp, Artificial Sequence
  Oligonucleotide for detection of SNP TSC0043052
ggtaatgtggtaa

SEQ ID NO: 172750 - DNA, 13 bp, Artificial Sequence
  Oligonucleotide for detection of SNP TSC0043052
ttaccacattacc

SEQ ID NO: 172751 - DNA, 13 bp, Artificial Sequence
  Oligonucleotide for detection of SNP TSC0043052
ggtaatatggtaa

SEQ ID NO: 172752 - DNA, 13 bp, Artificial Sequence
  Oligonucleotide for detection of SNP TSC0043052
ttaccatattacc

SEQ ID NO: 172753 - DNA, 13 bp, Artificial Sequence
  Oligonucleotide for detection of SNP TSC0043052
ggtaacgtggtaa

SEQ ID NO: 172754 - DNA, 13 bp, Artificial Sequence
  Oligonucleotide for detection of SNP TSC0043052
ttaccacgttacc

SEQ ID NO: 172755 - DNA, 13 bp, Artificial Sequence
  Oligonucleotide for detection of SNP TSC0009140
ggaatgagtttgg

SEQ ID NO: 172756 - DNA, 13 bp, Artificial Sequence
  Oligonucleotide for detection of SNP TSC0009140
ccaaactcattcc

SEQ ID NO: 172757 - DNA, 13 bp, Artificial Sequence
  Oligonucleotide for detection of SNP TSC0009140
ggaatgggtttgg

SEQ ID NO: 172758 - DNA, 13 bp, Artificial Sequence
  Oligonucleotide for detection of SNP TSC0009140
ccaaacccattcc

SEQ ID NO: 172759 - DNA, 13 bp, Artificial Sequence
  Oligonucleotide for detection of SNP TSC0009140
ggaacgagtttgg

SEQ ID NO: 172760 - DNA, 13 bp, Artificial Sequence
  Oligonucleotide for detection of SNP TSC0009140
ccaaactcgttcc

SEQ ID NO: 172761 - DNA, 13 bp, Artificial Sequence
  Oligonucleotide for detection of SNP TSC0009140
ggaacgggtttgg

SEQ ID NO: 172762 - DNA, 13 bp, Artificial Sequence
  Oligonucleotide for detection of SNP TSC0009140
ccaaacccgttcc

SEQ ID NO: 172763 - DNA, 13 bp, Artificial Sequence
  Oligonucleotide for detection of SNP TSC0043053
ggagtaattgagg

SEQ ID NO: 172764 - DNA, 13 bp, Artificial Sequence
  Oligonucleotide for detection of SNP TSC0043053
cctcaattactcc

SEQ ID NO: 172765 - DNA, 13 bp, Artificial Sequence
  Oligonucleotide for detection of SNP TSC0043053
ggagtagttgagg

SEQ ID NO: 172766 - DNA, 13 bp, Artificial Sequence
  Oligonucleotide for detection of SNP TSC0043053
cctcaactactcc

SEQ ID NO: 172767 - DNA, 13 bp, Artificial Sequence
  Oligonucleotide for detection of SNP TSC0043054
aggaggtagattt

SEQ ID NO: 172768 - DNA, 13 bp, Artificial Sequence
  Oligonucleotide for detection of SNP TSC0043054
aaatctacctcct

SEQ ID NO: 172769 - DNA, 13 bp, Artificial Sequence
  Oligonucleotide for detection of SNP TSC0043054
aggagggagattt

SEQ ID NO: 172770 - DNA, 13 bp, Artificial Sequence
  Oligonucleotide for detection of SNP TSC0043054
aaatctccctcct

SEQ ID NO: 172771 - DNA, 13 bp, Artificial Sequence
  Oligonucleotide for detection of SNP TSC0043054
aggtttttttttt

SEQ ID NO: 172772 - DNA, 13 bp, Artificial Sequence
  Oligonucleotide for detection of SNP TSC0043054
aaaaaaaaaacct

SEQ ID NO: 172773 - DNA, 13 bp, Artificial Sequence
  Oligonucleotide for detection of SNP TSC0043055
tgtatttggggty

SEQ ID NO: 172774 - DNA, 13 bp, Artificial Sequence
  Oligonucleotide for detection of SNP TSC0043055
raccccaaataca

SEQ ID NO: 172775 - DNA, 13 bp, Artificial Sequence
  Oligonucleotide for detection of SNP TSC0043055
tgtattcggggty

SEQ ID NO: 172776 - DNA, 13 bp, Artificial Sequence
  Oligonucleotide for detection of SNP TSC0043055
raccccgaataca

SEQ ID NO: 172777 - DNA, 13 bp, Artificial Sequence
  Oligonucleotide for detection of SNP TSC0043055
gattttgagtata

SEQ ID NO: 172778 - DNA, 13 bp, Artificial Sequence
  Oligonucleotide for detection of SNP TSC0043055
tatactcaaaatc

SEQ ID NO: 172779 - DNA, 13 bp, Artificial Sequence
  Oligonucleotide for detection of SNP TSC0043055
gattttaagtata

SEQ ID NO: 172780 - DNA, 13 bp, Artificial Sequence
  Oligonucleotide for detection of SNP TSC0043055
tatacttaaaatc

SEQ ID NO: 172781 - DNA, 13 bp, Artificial Sequence
  Oligonucleotide for detection of SNP TSC0043055
gatttcgagtata

SEQ ID NO: 172782 - DNA, 13 bp, Artificial Sequence
  Oligonucleotide for detection of SNP TSC0043055
tatactcgaaatc

SEQ ID NO: 172783 - DNA, 13 bp, Artificial Sequence
  Oligonucleotide for detection of SNP TSC0043058
taaaatatatgga

SEQ ID NO: 172784 - DNA, 13 bp, Artificial Sequence
  Oligonucleotide for detection of SNP TSC0043058
tccatatatttta

SEQ ID NO: 172785 - DNA, 13 bp, Artificial Sequence
  Oligonucleotide for detection of SNP TSC0043058
taaaatttatgga

SEQ ID NO: 172786 - DNA, 13 bp, Artificial Sequence
  Oligonucleotide for detection of SNP TSC0043058
tccataaatttta

SEQ ID NO: 172787 - DNA, 13 bp, Artificial Sequence
  Oligonucleotide for detection of SNP TSC0043058
tttataagtttta

SEQ ID NO: 172788 - DNA, 13 bp, Artificial Sequence
  Oligonucleotide for detection of SNP TSC0043058
taaaacttataaa

SEQ ID NO: 172789 - DNA, 13 bp, Artificial Sequence
  Oligonucleotide for detection of SNP TSC0043060
ttataggtgaata

SEQ ID NO: 172790 - DNA, 13 bp, Artificial Sequence
  Oligonucleotide for detection of SNP TSC0043060
tattcacctataa

SEQ ID NO: 172791 - DNA, 13 bp, Artificial Sequence
  Oligonucleotide for detection of SNP TSC0043060
ttatagatgaata

SEQ ID NO: 172792 - DNA, 13 bp, Artificial Sequence
  Oligonucleotide for detection of SNP TSC0043060
tattcatctataa

SEQ ID NO: 172793 - DNA, 13 bp, Artificial Sequence
  Oligonucleotide for detection of SNP TSC0043062
aaatatattttat

SEQ ID NO: 172794 - DNA, 13 bp, Artificial Sequence
  Oligonucleotide for detection of SNP TSC0043062
ataaaatatattt

SEQ ID NO: 172795 - DNA, 13 bp, Artificial Sequence
  Oligonucleotide for detection of SNP TSC0043062
aaatatgttttat

SEQ ID NO: 172796 - DNA, 13 bp, Artificial Sequence
  Oligonucleotide for detection of SNP TSC0043062
ataaaacatattt

SEQ ID NO: 172797 - DNA, 13 bp, Artificial Sequence
  Oligonucleotide for detection of SNP TSC0043062
aaatacgttttat

SEQ ID NO: 172798 - DNA, 13 bp, Artificial Sequence
  Oligonucleotide for detection of SNP TSC0043062
ataaaacgtattt

SEQ ID NO: 172799 - DNA, 13 bp, Artificial Sequence
  Oligonucleotide for detection of SNP TSC0043062
atgggatgtattt

SEQ ID NO: 172800 - DNA, 13 bp, Artificial Sequence
  Oligonucleotide for detection of SNP TSC0043062
aaatacatcccat

SEQ ID NO: 172801 - DNA, 13 bp, Artificial Sequence
  Oligonucleotide for detection of SNP TSC0043062
atgggacgtattt

SEQ ID NO: 172802 - DNA, 13 bp, Artificial Sequence
  Oligonucleotide for detection of SNP TSC0043062
aaatacgtcccat

SEQ ID NO: 172803 - DNA, 13 bp, Artificial Sequence
  Oligonucleotide for detection of SNP TSC0043063
gtttttgtgtata

SEQ ID NO: 172804 - DNA, 13 bp, Artificial Sequence
  Oligonucleotide for detection of SNP TSC0043063
tatacacaaaaac

SEQ ID NO: 172805 - DNA, 13 bp, Artificial Sequence
  Oligonucleotide for detection of SNP TSC0043063
gtttttacgtata

SEQ ID NO: 172806 - DNA, 13 bp, Artificial Sequence
  Oligonucleotide for detection of SNP TSC0043063
tatacgtaaaaac

SEQ ID NO: 172807 - DNA, 13 bp, Artificial Sequence
  Oligonucleotide for detection of SNP TSC0043063
gtttttgcgtata

SEQ ID NO: 172808 - DNA, 13 bp, Artificial Sequence
  Oligonucleotide for detection of SNP TSC0043063
tatacgcaaaaac

SEQ ID NO: 172809 - DNA, 13 bp, Artificial Sequence
  Oligonucleotide for detection of SNP TSC0043064
attatgttttagg

SEQ ID NO: 172810 - DNA, 13 bp, Artificial Sequence
  Oligonucleotide for detection of SNP TSC0043064
cctaaaacataat

SEQ ID NO: 172811 - DNA, 13 bp, Artificial Sequence
  Oligonucleotide for detection of SNP TSC0043064
attatggtttagg

SEQ ID NO: 172812 - DNA, 13 bp, Artificial Sequence
  Oligonucleotide for detection of SNP TSC0043064
cctaaaccataat

SEQ ID NO: 172813 - DNA, 13 bp, Artificial Sequence
  Oligonucleotide for detection of SNP TSC0043064
tttgagatataat

SEQ ID NO: 172814 - DNA, 13 bp, Artificial Sequence
  Oligonucleotide for detection of SNP TSC0043064
attatatctcaaa

SEQ ID NO: 172815 - DNA, 13 bp, Artificial Sequence
  Oligonucleotide for detection of SNP TSC0043064
tttgagttataat

SEQ ID NO: 172816 - DNA, 13 bp, Artificial Sequence
  Oligonucleotide for detection of SNP TSC0043064
attataactcaaa

SEQ ID NO: 172817 - DNA, 13 bp, Artificial Sequence
  Oligonucleotide for detection of SNP TSC0043067
ggatggatgttaa

SEQ ID NO: 172818 - DNA, 13 bp, Artificial Sequence
  Oligonucleotide for detection of SNP TSC0043067
ttaacatccatcc

SEQ ID NO: 172819 - DNA, 13 bp, Artificial Sequence
  Oligonucleotide for detection of SNP TSC0043067
ggatggttgttaa

SEQ ID NO: 172820 - DNA, 13 bp, Artificial Sequence
  Oligonucleotide for detection of SNP TSC0043067
ttaacaaccatcc

SEQ ID NO: 172821 - DNA, 13 bp, Artificial Sequence
  Oligonucleotide for detection of SNP TSC0043067
ttaatatttatty

SEQ ID NO: 172822 - DNA, 13 bp, Artificial Sequence
  Oligonucleotide for detection of SNP TSC0043067
raataaatattaa

SEQ ID NO: 172823 - DNA, 13 bp, Artificial Sequence
  Oligonucleotide for detection of SNP TSC0043067
ttaataattatty

SEQ ID NO: 172824 - DNA, 13 bp, Artificial Sequence
  Oligonucleotide for detection of SNP TSC0043067
raataattattaa

SEQ ID NO: 172825 - DNA, 13 bp, Artificial Sequence
  Oligonucleotide for detection of SNP TSC0043068
atttttatagtaa

SEQ ID NO: 172826 - DNA, 13 bp, Artificial Sequence
  Oligonucleotide for detection of SNP TSC0043068
ttactataaaaat

SEQ ID NO: 172827 - DNA, 13 bp, Artificial Sequence
  Oligonucleotide for detection of SNP TSC0043069
gtattgattgatg

SEQ ID NO: 172828 - DNA, 13 bp, Artificial Sequence
  Oligonucleotide for detection of SNP TSC0043069
catcaatcaatac

SEQ ID NO: 172829 - DNA, 13 bp, Artificial Sequence
  Oligonucleotide for detection of SNP TSC0043069
gtattggttgatg

SEQ ID NO: 172830 - DNA, 13 bp, Artificial Sequence
  Oligonucleotide for detection of SNP TSC0043069
catcaaccaatac

SEQ ID NO: 172831 - DNA, 13 bp, Artificial Sequence
  Oligonucleotide for detection of SNP TSC0043069
gtatcgattgatg

SEQ ID NO: 172832 - DNA, 13 bp, Artificial Sequence
  Oligonucleotide for detection of SNP TSC0043069
catcaatcgatac

SEQ ID NO: 172833 - DNA, 13 bp, Artificial Sequence
  Oligonucleotide for detection of SNP TSC0043069
gtatcggttgatg

SEQ ID NO: 172834 - DNA, 13 bp, Artificial Sequence
  Oligonucleotide for detection of SNP TSC0043069
catcaaccgatac

SEQ ID NO: 172835 - DNA, 13 bp, Artificial Sequence
  Oligonucleotide for detection of SNP TSC0043070
tatattattgtag

SEQ ID NO: 172836 - DNA, 13 bp, Artificial Sequence
  Oligonucleotide for detection of SNP TSC0043070
ctacaataatata

SEQ ID NO: 172837 - DNA, 13 bp, Artificial Sequence
  Oligonucleotide for detection of SNP TSC0043070
tatattgttgtag

SEQ ID NO: 172838 - DNA, 13 bp, Artificial Sequence
  Oligonucleotide for detection of SNP TSC0043070
ctacaacaatata

SEQ ID NO: 172839 - DNA, 13 bp, Artificial Sequence
  Oligonucleotide for detection of SNP TSC0043070
tatatcgttgtag

SEQ ID NO: 172840 - DNA, 13 bp, Artificial Sequence
  Oligonucleotide for detection of SNP TSC0043070
ctacaacgatata

SEQ ID NO: 172841 - DNA, 13 bp, Artificial Sequence
  Oligonucleotide for detection of SNP TSC0043070
ttgtagtgatgta

SEQ ID NO: 172842 - DNA, 13 bp, Artificial Sequence
  Oligonucleotide for detection of SNP TSC0043070
tacatcactacaa

SEQ ID NO: 172843 - DNA, 13 bp, Artificial Sequence
  Oligonucleotide for detection of SNP TSC0043070
ttgtagcgatgta

SEQ ID NO: 172844 - DNA, 13 bp, Artificial Sequence
  Oligonucleotide for detection of SNP TSC0043070
tacatcgctacaa

SEQ ID NO: 172845 - DNA, 13 bp, Artificial Sequence
  Oligonucleotide for detection of SNP TSC0007853
aaggtaaatttat

SEQ ID NO: 172846 - DNA, 13 bp, Artificial Sequence
  Oligonucleotide for detection of SNP TSC0007853
ataaatttacctt

SEQ ID NO: 172847 - DNA, 13 bp, Artificial Sequence
  Oligonucleotide for detection of SNP TSC0043071
aggtttaggttty

SEQ ID NO: 172848 - DNA, 13 bp, Artificial Sequence
  Oligonucleotide for detection of SNP TSC0043071
raaacctaaacct

SEQ ID NO: 172849 - DNA, 13 bp, Artificial Sequence
  Oligonucleotide for detection of SNP TSC0043071
aggtttgggttty

SEQ ID NO: 172850 - DNA, 13 bp, Artificial Sequence
  Oligonucleotide for detection of SNP TSC0043071
raaacccaaacct

SEQ ID NO: 172851 - DNA, 13 bp, Artificial Sequence
  Oligonucleotide for detection of SNP TSC0043071
aggttcgggttty

SEQ ID NO: 172852 - DNA, 13 bp, Artificial Sequence
  Oligonucleotide for detection of SNP TSC0043071
raaacccgaacct

SEQ ID NO: 172853 - DNA, 13 bp, Artificial Sequence
  Oligonucleotide for detection of SNP TSC0043071
ggaatttgaattt

SEQ ID NO: 172854 - DNA, 13 bp, Artificial Sequence
  Oligonucleotide for detection of SNP TSC0043071
aaattcaaattcc

SEQ ID NO: 172855 - DNA, 13 bp, Artificial Sequence
  Oligonucleotide for detection of SNP TSC0043071
ggaattcgaattt

SEQ ID NO: 172856 - DNA, 13 bp, Artificial Sequence
  Oligonucleotide for detection of SNP TSC0043071
aaattcgaattcc

SEQ ID NO: 172857 - DNA, 13 bp, Artificial Sequence
  Oligonucleotide for detection of SNP TSC0043072
gtattagaaatat

SEQ ID NO: 172858 - DNA, 13 bp, Artificial Sequence
  Oligonucleotide for detection of SNP TSC0043072
atatttctaatac

SEQ ID NO: 172859 - DNA, 13 bp, Artificial Sequence
  Oligonucleotide for detection of SNP TSC0043072
gtattaaaaatat

SEQ ID NO: 172860 - DNA, 13 bp, Artificial Sequence
  Oligonucleotide for detection of SNP TSC0043072
atatttttaatac

SEQ ID NO: 172861 - DNA, 13 bp, Artificial Sequence
  Oligonucleotide for detection of SNP TSC0043073
tggggggatgggy

SEQ ID NO: 172862 - DNA, 13 bp, Artificial Sequence
  Oligonucleotide for detection of SNP TSC0043073
rcccatcccccca

SEQ ID NO: 172863 - DNA, 13 bp, Artificial Sequence
  Oligonucleotide for detection of SNP TSC0043073
tgggggaatgggy

SEQ ID NO: 172864 - DNA, 13 bp, Artificial Sequence
  Oligonucleotide for detection of SNP TSC0043073
rcccattccccca

SEQ ID NO: 172865 - DNA, 13 bp, Artificial Sequence
  Oligonucleotide for detection of SNP TSC0043074
agttattggtaga

SEQ ID NO: 172866 - DNA, 13 bp, Artificial Sequence
  Oligonucleotide for detection of SNP TSC0043074
tctaccaataact

SEQ ID NO: 172867 - DNA, 13 bp, Artificial Sequence
  Oligonucleotide for detection of SNP TSC0043074
agttatcggtaga

SEQ ID NO: 172868 - DNA, 13 bp, Artificial Sequence
  Oligonucleotide for detection of SNP TSC0043074
tctaccgataact

SEQ ID NO: 172869 - DNA, 13 bp, Artificial Sequence
  Oligonucleotide for detection of SNP TSC0043074
tttgttgatggtt

SEQ ID NO: 172870 - DNA, 13 bp, Artificial Sequence
  Oligonucleotide for detection of SNP TSC0043074
aaccatcaacaaa

SEQ ID NO: 172871 - DNA, 13 bp, Artificial Sequence
  Oligonucleotide for detection of SNP TSC0043074
tttgttaatggtt

SEQ ID NO: 172872 - DNA, 13 bp, Artificial Sequence
  Oligonucleotide for detection of SNP TSC0043074
aaccattaacaaa

SEQ ID NO: 172873 - DNA, 13 bp, Artificial Sequence
  Oligonucleotide for detection of SNP TSC0043074
tttgtcgatggtt

SEQ ID NO: 172874 - DNA, 13 bp, Artificial Sequence
  Oligonucleotide for detection of SNP TSC0043074
aaccatcgacaaa

SEQ ID NO: 172875 - DNA, 13 bp, Artificial Sequence
  Oligonucleotide for detection of SNP TSC0006453
aaaaatgataaaa

SEQ ID NO: 172876 - DNA, 13 bp, Artificial Sequence
  Oligonucleotide for detection of SNP TSC0006453
ttttatcattttt

SEQ ID NO: 172877 - DNA, 13 bp, Artificial Sequence
  Oligonucleotide for detection of SNP TSC0043076
aattttatgaagg

SEQ ID NO: 172878 - DNA, 13 bp, Artificial Sequence
  Oligonucleotide for detection of SNP TSC0043076
ccttcataaaatt

SEQ ID NO: 172879 - DNA, 13 bp, Artificial Sequence
  Oligonucleotide for detection of SNP TSC0043076
aattttgtgaagg

SEQ ID NO: 172880 - DNA, 13 bp, Artificial Sequence
  Oligonucleotide for detection of SNP TSC0043076
ccttcacaaaatt

SEQ ID NO: 172881 - DNA, 13 bp, Artificial Sequence
  Oligonucleotide for detection of SNP TSC0043078
ttttaagttttag

SEQ ID NO: 172882 - DNA, 13 bp, Artificial Sequence
  Oligonucleotide for detection of SNP TSC0043078
ctaaaacttaaaa

SEQ ID NO: 172883 - DNA, 13 bp, Artificial Sequence
  Oligonucleotide for detection of SNP TSC0043079
tagttaattaagt

SEQ ID NO: 172884 - DNA, 13 bp, Artificial Sequence
  Oligonucleotide for detection of SNP TSC0043079
acttaattaacta

SEQ ID NO: 172885 - DNA, 13 bp, Artificial Sequence
  Oligonucleotide for detection of SNP TSC0043079
tagttagttaagt

SEQ ID NO: 172886 - DNA, 13 bp, Artificial Sequence
  Oligonucleotide for detection of SNP TSC0043079
acttaactaacta

SEQ ID NO: 172887 - DNA, 13 bp, Artificial Sequence
  Oligonucleotide for detection of SNP TSC0009281
atatttaatattt

SEQ ID NO: 172888 - DNA, 13 bp, Artificial Sequence
  Oligonucleotide for detection of SNP TSC0009281
aaatattaaatat

SEQ ID NO: 172889 - DNA, 13 bp, Artificial Sequence
  Oligonucleotide for detection of SNP TSC0009281
atatttgatattt

SEQ ID NO: 172890 - DNA, 13 bp, Artificial Sequence
  Oligonucleotide for detection of SNP TSC0009281
aaatatcaaatat

SEQ ID NO: 172891 - DNA, 13 bp, Artificial Sequence
  Oligonucleotide for detection of SNP TSC0009281
atattcgatattt

SEQ ID NO: 172892 - DNA, 13 bp, Artificial Sequence
  Oligonucleotide for detection of SNP TSC0009281
aaatatcgaatat

SEQ ID NO: 172893 - DNA, 13 bp, Artificial Sequence
  Oligonucleotide for detection of SNP TSC0009281
aaatgttgagtgt

SEQ ID NO: 172894 - DNA, 13 bp, Artificial Sequence
  Oligonucleotide for detection of SNP TSC0009281
acactcaacattt

SEQ ID NO: 172895 - DNA, 13 bp, Artificial Sequence
  Oligonucleotide for detection of SNP TSC0009281
aaatgtcgagtgt

SEQ ID NO: 172896 - DNA, 13 bp, Artificial Sequence
  Oligonucleotide for detection of SNP TSC0009281
acactcgacattt

SEQ ID NO: 172897 - DNA, 13 bp, Artificial Sequence
  Oligonucleotide for detection of SNP TSC0043080
tagttatgtgata

SEQ ID NO: 172898 - DNA, 13 bp, Artificial Sequence
  Oligonucleotide for detection of SNP TSC0043080
tatcacataacta

SEQ ID NO: 172899 - DNA, 13 bp, Artificial Sequence
  Oligonucleotide for detection of SNP TSC0043080
tagttacgtgata

SEQ ID NO: 172900 - DNA, 13 bp, Artificial Sequence
  Oligonucleotide for detection of SNP TSC0043080
tatcacgtaacta

SEQ ID NO: 172901 - DNA, 13 bp, Artificial Sequence
  Oligonucleotide for detection of SNP TSC0043080
tattatgtggttg

SEQ ID NO: 172902 - DNA, 13 bp, Artificial Sequence
  Oligonucleotide for detection of SNP TSC0043080
caaccacataata

SEQ ID NO: 172903 - DNA, 13 bp, Artificial Sequence
  Oligonucleotide for detection of SNP TSC0043080
tattatatggttg

SEQ ID NO: 172904 - DNA, 13 bp, Artificial Sequence
  Oligonucleotide for detection of SNP TSC0043080
caaccatataata

SEQ ID NO: 172905 - DNA, 13 bp, Artificial Sequence
  Oligonucleotide for detection of SNP TSC0043080
tattacgtggttg

SEQ ID NO: 172906 - DNA, 13 bp, Artificial Sequence
  Oligonucleotide for detection of SNP TSC0043080
caaccacgtaata

SEQ ID NO: 172907 - DNA, 13 bp, Artificial Sequence
  Oligonucleotide for detection of SNP TSC0043081
tgttttgtaataa

SEQ ID NO: 172908 - DNA, 13 bp, Artificial Sequence
  Oligonucleotide for detection of SNP TSC0043081
ttattacaaaaca

SEQ ID NO: 172909 - DNA, 13 bp, Artificial Sequence
  Oligonucleotide for detection of SNP TSC0043081
tgttttataataa

SEQ ID NO: 172910 - DNA, 13 bp, Artificial Sequence
  Oligonucleotide for detection of SNP TSC0043081
ttattataaaaca

SEQ ID NO: 172911 - DNA, 13 bp, Artificial Sequence
  Oligonucleotide for detection of SNP TSC0043083
aaagttataattg

SEQ ID NO: 172912 - DNA, 13 bp, Artificial Sequence
  Oligonucleotide for detection of SNP TSC0043083
caattataacttt

SEQ ID NO: 172913 - DNA, 13 bp, Artificial Sequence
  Oligonucleotide for detection of SNP TSC0043083
aaagttgtaattg

SEQ ID NO: 172914 - DNA, 13 bp, Artificial Sequence
  Oligonucleotide for detection of SNP TSC0043083
caattacaacttt

SEQ ID NO: 172915 - DNA, 13 bp, Artificial Sequence
  Oligonucleotide for detection of SNP TSC0043083
aaagtcgtaattg

SEQ ID NO: 172916 - DNA, 13 bp, Artificial Sequence
  Oligonucleotide for detection of SNP TSC0043083
caattacgacttt

SEQ ID NO: 172917 - DNA, 13 bp, Artificial Sequence
  Oligonucleotide for detection of SNP TSC0043083
taattatggtttt

SEQ ID NO: 172918 - DNA, 13 bp, Artificial Sequence
  Oligonucleotide for detection of SNP TSC0043083
aaaaccataatta

SEQ ID NO: 172919 - DNA, 13 bp, Artificial Sequence
  Oligonucleotide for detection of SNP TSC0043083
taattacggtttt

SEQ ID NO: 172920 - DNA, 13 bp, Artificial Sequence
  Oligonucleotide for detection of SNP TSC0043083
aaaaccgtaatta

SEQ ID NO: 172921 - DNA, 13 bp, Artificial Sequence
  Oligonucleotide for detection of SNP TSC0043085
gtggtgtggagag

SEQ ID NO: 172922 - DNA, 13 bp, Artificial Sequence
  Oligonucleotide for detection of SNP TSC0043085
ctctccacaccac

SEQ ID NO: 172923 - DNA, 13 bp, Artificial Sequence
  Oligonucleotide for detection of SNP TSC0043085
gtggtgcggagag

SEQ ID NO: 172924 - DNA, 13 bp, Artificial Sequence
  Oligonucleotide for detection of SNP TSC0043085
ctctccgcaccac

SEQ ID NO: 172925 - DNA, 13 bp, Artificial Sequence
  Oligonucleotide for detection of SNP TSC0007238
tttttgattttat

SEQ ID NO: 172926 - DNA, 13 bp, Artificial Sequence
  Oligonucleotide for detection of SNP TSC0007238
ataaaatcaaaaa

SEQ ID NO: 172927 - DNA, 13 bp, Artificial Sequence
  Oligonucleotide for detection of SNP TSC0007238
tttttggttttat

SEQ ID NO: 172928 - DNA, 13 bp, Artificial Sequence
  Oligonucleotide for detection of SNP TSC0007238
ataaaaccaaaaa

SEQ ID NO: 172929 - DNA, 13 bp, Artificial Sequence
  Oligonucleotide for detection of SNP TSC0043087
aaaaaagaataaa

SEQ ID NO: 172930 - DNA, 13 bp, Artificial Sequence
  Oligonucleotide for detection of SNP TSC0043087
tttattctttttt

SEQ ID NO: 172931 - DNA, 13 bp, Artificial Sequence
  Oligonucleotide for detection of SNP TSC0043088
tttttaagagaat

SEQ ID NO: 172932 - DNA, 13 bp, Artificial Sequence
  Oligonucleotide for detection of SNP TSC0043088
attctcttaaaaa

SEQ ID NO: 172933 - DNA, 13 bp, Artificial Sequence
  Oligonucleotide for detection of SNP TSC0043089
gtgaaaaaagtta

SEQ ID NO: 172934 - DNA, 13 bp, Artificial Sequence
  Oligonucleotide for detection of SNP TSC0043089
taacttttttcac

SEQ ID NO: 172935 - DNA, 13 bp, Artificial Sequence
  Oligonucleotide for detection of SNP TSC0043089
gtgaaagaagtta

SEQ ID NO: 172936 - DNA, 13 bp, Artificial Sequence
  Oligonucleotide for detection of SNP TSC0043089
taacttctttcac

SEQ ID NO: 172937 - DNA, 13 bp, Artificial Sequence
  Oligonucleotide for detection of SNP TSC0043091
gaaaatattttay

SEQ ID NO: 172938 - DNA, 13 bp, Artificial Sequence
  Oligonucleotide for detection of SNP TSC0043091
rtaaaatattttc

SEQ ID NO: 172939 - DNA, 13 bp, Artificial Sequence
  Oligonucleotide for detection of SNP TSC0043091
gaaaatgttttay

SEQ ID NO: 172940 - DNA, 13 bp, Artificial Sequence
  Oligonucleotide for detection of SNP TSC0043091
rtaaaacattttc

SEQ ID NO: 172941 - DNA, 13 bp, Artificial Sequence
  Oligonucleotide for detection of SNP TSC0043092
aatgtttgttttg

SEQ ID NO: 172942 - DNA, 13 bp, Artificial Sequence
  Oligonucleotide for detection of SNP TSC0043092
caaaacaaacatt

SEQ ID NO: 172943 - DNA, 13 bp, Artificial Sequence
  Oligonucleotide for detection of SNP TSC0043092
aatgttggttttg

SEQ ID NO: 172944 - DNA, 13 bp, Artificial Sequence
  Oligonucleotide for detection of SNP TSC0043092
caaaaccaacatt

SEQ ID NO: 172945 - DNA, 13 bp, Artificial Sequence
  Oligonucleotide for detection of SNP TSC0043092
taagataaatatt

SEQ ID NO: 172946 - DNA, 13 bp, Artificial Sequence
  Oligonucleotide for detection of SNP TSC0043092
aatatttatctta

SEQ ID NO: 172947 - DNA, 13 bp, Artificial Sequence
  Oligonucleotide for detection of SNP TSC0043092
taagattaatatt

SEQ ID NO: 172948 - DNA, 13 bp, Artificial Sequence
  Oligonucleotide for detection of SNP TSC0043092
aatattaatctta

SEQ ID NO: 172949 - DNA, 13 bp, Artificial Sequence
  Oligonucleotide for detection of SNP TSC0043093
atttatattttgy

SEQ ID NO: 172950 - DNA, 13 bp, Artificial Sequence
  Oligonucleotide for detection of SNP TSC0043093
rcaaaatataaat

SEQ ID NO: 172951 - DNA, 13 bp, Artificial Sequence
  Oligonucleotide for detection of SNP TSC0043093
atttatgttttgy

SEQ ID NO: 172952 - DNA, 13 bp, Artificial Sequence
  Oligonucleotide for detection of SNP TSC0043093
rcaaaacataaat

SEQ ID NO: 172953 - DNA, 13 bp, Artificial Sequence
  Oligonucleotide for detection of SNP TSC0043093
atttatatttcgy

SEQ ID NO: 172954 - DNA, 13 bp, Artificial Sequence
  Oligonucleotide for detection of SNP TSC0043093
rcgaaatataaat

SEQ ID NO: 172955 - DNA, 13 bp, Artificial Sequence
  Oligonucleotide for detection of SNP TSC0043093
atttatgtttcgy

SEQ ID NO: 172956 - DNA, 13 bp, Artificial Sequence
  Oligonucleotide for detection of SNP TSC0043093
rcgaaacataaat

SEQ ID NO: 172957 - DNA, 13 bp, Artificial Sequence
  Oligonucleotide for detection of SNP TSC0043095
tattgggttggga

SEQ ID NO: 172958 - DNA, 13 bp, Artificial Sequence
  Oligonucleotide for detection of SNP TSC0043095
tcccaacccaata

SEQ ID NO: 172959 - DNA, 13 bp, Artificial Sequence
  Oligonucleotide for detection of SNP TSC0043095
tattggattggga

SEQ ID NO: 172960 - DNA, 13 bp, Artificial Sequence
  Oligonucleotide for detection of SNP TSC0043095
tcccaatccaata

SEQ ID NO: 172961 - DNA, 13 bp, Artificial Sequence
  Oligonucleotide for detection of SNP TSC0043096
atagtgtgggttg

SEQ ID NO: 172962 - DNA, 13 bp, Artificial Sequence
  Oligonucleotide for detection of SNP TSC0043096
caacccacactat

SEQ ID NO: 172963 - DNA, 13 bp, Artificial Sequence
  Oligonucleotide for detection of SNP TSC0043096
atagtgcgggttg

SEQ ID NO: 172964 - DNA, 13 bp, Artificial Sequence
  Oligonucleotide for detection of SNP TSC0043096
caacccgcactat

SEQ ID NO: 172965 - DNA, 13 bp, Artificial Sequence
  Oligonucleotide for detection of SNP TSC0043098
ttttatatttgta

SEQ ID NO: 172966 - DNA, 13 bp, Artificial Sequence
  Oligonucleotide for detection of SNP TSC0043098
tacaaatataaaa

SEQ ID NO: 172967 - DNA, 13 bp, Artificial Sequence
  Oligonucleotide for detection of SNP TSC0043098
ttttatgtttgta

SEQ ID NO: 172968 - DNA, 13 bp, Artificial Sequence
  Oligonucleotide for detection of SNP TSC0043098
tacaaacataaaa

SEQ ID NO: 172969 - DNA, 13 bp, Artificial Sequence
  Oligonucleotide for detection of SNP TSC0006855
agttttggaagga

SEQ ID NO: 172970 - DNA, 13 bp, Artificial Sequence
  Oligonucleotide for detection of SNP TSC0006855
tccttccaaaact

SEQ ID NO: 172971 - DNA, 13 bp, Artificial Sequence
  Oligonucleotide for detection of SNP TSC0006855
agttttagaagga

SEQ ID NO: 172972 - DNA, 13 bp, Artificial Sequence
  Oligonucleotide for detection of SNP TSC0006855
tccttctaaaact

SEQ ID NO: 172973 - DNA, 13 bp, Artificial Sequence
  Oligonucleotide for detection of SNP TSC0007899
ttatatagtaagg

SEQ ID NO: 172974 - DNA, 13 bp, Artificial Sequence
  Oligonucleotide for detection of SNP TSC0007899
ccttactatataa

SEQ ID NO: 172975 - DNA, 13 bp, Artificial Sequence
  Oligonucleotide for detection of SNP TSC0007899
ttatatggtaagg

SEQ ID NO: 172976 - DNA, 13 bp, Artificial Sequence
  Oligonucleotide for detection of SNP TSC0007899
ccttaccatataa

SEQ ID NO: 172977 - DNA, 13 bp, Artificial Sequence
  Oligonucleotide for detection of SNP TSC0043101
tgtattattcgtt

SEQ ID NO: 172978 - DNA, 13 bp, Artificial Sequence
  Oligonucleotide for detection of SNP TSC0043101
aacgaataataca

SEQ ID NO: 172979 - DNA, 13 bp, Artificial Sequence
  Oligonucleotide for detection of SNP TSC0043101
tgtatttttcgtt

SEQ ID NO: 172980 - DNA, 13 bp, Artificial Sequence
  Oligonucleotide for detection of SNP TSC0043101
aacgaaaaataca

SEQ ID NO: 172981 - DNA, 13 bp, Artificial Sequence
  Oligonucleotide for detection of SNP TSC0043101
aatgggtgatgta

SEQ ID NO: 172982 - DNA, 13 bp, Artificial Sequence
  Oligonucleotide for detection of SNP TSC0043101
tacatcacccatt

SEQ ID NO: 172983 - DNA, 13 bp, Artificial Sequence
  Oligonucleotide for detection of SNP TSC0043101
aatgggggatgta

SEQ ID NO: 172984 - DNA, 13 bp, Artificial Sequence
  Oligonucleotide for detection of SNP TSC0043101
tacatcccccatt

SEQ ID NO: 172985 - DNA, 13 bp, Artificial Sequence
  Oligonucleotide for detection of SNP TSC0043101
aacgggtgatgta

SEQ ID NO: 172986 - DNA, 13 bp, Artificial Sequence
  Oligonucleotide for detection of SNP TSC0043101
tacatcacccgtt

SEQ ID NO: 172987 - DNA, 13 bp, Artificial Sequence
  Oligonucleotide for detection of SNP TSC0043101
aacgggggatgta

SEQ ID NO: 172988 - DNA, 13 bp, Artificial Sequence
  Oligonucleotide for detection of SNP TSC0043101
tacatcccccgtt

SEQ ID NO: 172989 - DNA, 13 bp, Artificial Sequence
  Oligonucleotide for detection of SNP TSC0043102
gatatgaattttg

SEQ ID NO: 172990 - DNA, 13 bp, Artificial Sequence
  Oligonucleotide for detection of SNP TSC0043102
caaaattcatatc

SEQ ID NO: 172991 - DNA, 13 bp, Artificial Sequence
  Oligonucleotide for detection of SNP TSC0043102
gatatggattttg

SEQ ID NO: 172992 - DNA, 13 bp, Artificial Sequence
  Oligonucleotide for detection of SNP TSC0043102
caaaatccatatc

SEQ ID NO: 172993 - DNA, 13 bp, Artificial Sequence
  Oligonucleotide for detection of SNP TSC0008309
tttgatgtaaaaa

SEQ ID NO: 172994 - DNA, 13 bp, Artificial Sequence
  Oligonucleotide for detection of SNP TSC0008309
tttttacatcaaa

SEQ ID NO: 172995 - DNA, 13 bp, Artificial Sequence
  Oligonucleotide for detection of SNP TSC0008309
tttgatataaaaa

SEQ ID NO: 172996 - DNA, 13 bp, Artificial Sequence
  Oligonucleotide for detection of SNP TSC0008309
tttttatatcaaa

SEQ ID NO: 172997 - DNA, 13 bp, Artificial Sequence
  Oligonucleotide for detection of SNP TSC0008309
tttgacgtaaaaa

SEQ ID NO: 172998 - DNA, 13 bp, Artificial Sequence
  Oligonucleotide for detection of SNP TSC0008309
tttttacgtcaaa

SEQ ID NO: 172999 - DNA, 13 bp, Artificial Sequence
  Oligonucleotide for detection of SNP TSC0043103
tagaaggtgatta

SEQ ID NO: 173000 - DNA, 13 bp, Artificial Sequence
  Oligonucleotide for detection of SNP TSC0043103
taatcaccttcta

SEQ ID NO: 173001 - DNA, 13 bp, Artificial Sequence
  Oligonucleotide for detection of SNP TSC0043103
tagaagatgatta

SEQ ID NO: 173002 - DNA, 13 bp, Artificial Sequence
  Oligonucleotide for detection of SNP TSC0043103
taatcatcttcta

SEQ ID NO: 173003 - DNA, 13 bp, Artificial Sequence
  Oligonucleotide for detection of SNP TSC0043103
tagaaggcgatta

SEQ ID NO: 173004 - DNA, 13 bp, Artificial Sequence
  Oligonucleotide for detection of SNP TSC0043103
taatcgccttcta

SEQ ID NO: 173005 - DNA, 13 bp, Artificial Sequence
  Oligonucleotide for detection of SNP TSC0043103
tagaagacgatta

SEQ ID NO: 173006 - DNA, 13 bp, Artificial Sequence
  Oligonucleotide for detection of SNP TSC0043103
taatcgtcttcta

SEQ ID NO: 173007 - DNA, 13 bp, Artificial Sequence
  Oligonucleotide for detection of SNP TSC0043104
aattttgggttaa

SEQ ID NO: 173008 - DNA, 13 bp, Artificial Sequence
  Oligonucleotide for detection of SNP TSC0043104
ttaacccaaaatt

SEQ ID NO: 173009 - DNA, 13 bp, Artificial Sequence
  Oligonucleotide for detection of SNP TSC0043104
aattttaggttaa

SEQ ID NO: 173010 - DNA, 13 bp, Artificial Sequence
  Oligonucleotide for detection of SNP TSC0043104
ttaacctaaaatt

SEQ ID NO: 173011 - DNA, 13 bp, Artificial Sequence
  Oligonucleotide for detection of SNP TSC0043105
aaatatatttgtg

SEQ ID NO: 173012 - DNA, 13 bp, Artificial Sequence
  Oligonucleotide for detection of SNP TSC0043105
cacaaatatattt

SEQ ID NO: 173013 - DNA, 13 bp, Artificial Sequence
  Oligonucleotide for detection of SNP TSC0043105
aaatatttttgtg

SEQ ID NO: 173014 - DNA, 13 bp, Artificial Sequence
  Oligonucleotide for detection of SNP TSC0043105
cacaaaaatattt

SEQ ID NO: 173015 - DNA, 13 bp, Artificial Sequence
  Oligonucleotide for detection of SNP TSC0043105
tatagatgtgttt

SEQ ID NO: 173016 - DNA, 13 bp, Artificial Sequence
  Oligonucleotide for detection of SNP TSC0043105
aaacacatctata

SEQ ID NO: 173017 - DNA, 13 bp, Artificial Sequence
  Oligonucleotide for detection of SNP TSC0043105
tatagaagtgttt

SEQ ID NO: 173018 - DNA, 13 bp, Artificial Sequence
  Oligonucleotide for detection of SNP TSC0043105
aaacacttctata

SEQ ID NO: 173019 - DNA, 13 bp, Artificial Sequence
  Oligonucleotide for detection of SNP TSC0043106
attaaaatagtta

SEQ ID NO: 173020 - DNA, 13 bp, Artificial Sequence
  Oligonucleotide for detection of SNP TSC0043106
taactattttaat

SEQ ID NO: 173021 - DNA, 13 bp, Artificial Sequence
  Oligonucleotide for detection of SNP TSC0043106
attaaagtagtta

SEQ ID NO: 173022 - DNA, 13 bp, Artificial Sequence
  Oligonucleotide for detection of SNP TSC0043106
taactactttaat

SEQ ID NO: 173023 - DNA, 13 bp, Artificial Sequence
  Oligonucleotide for detection of SNP TSC0043107
ttataaattttty

SEQ ID NO: 173024 - DNA, 13 bp, Artificial Sequence
  Oligonucleotide for detection of SNP TSC0043107
raaaaatttataa

SEQ ID NO: 173025 - DNA, 13 bp, Artificial Sequence
  Oligonucleotide for detection of SNP TSC0043107
ttataatttttty

SEQ ID NO: 173026 - DNA, 13 bp, Artificial Sequence
  Oligonucleotide for detection of SNP TSC0043107
raaaaaattataa

SEQ ID NO: 173027 - DNA, 13 bp, Artificial Sequence
  Oligonucleotide for detection of SNP TSC0043107
gaagggtttatgg

SEQ ID NO: 173028 - DNA, 13 bp, Artificial Sequence
  Oligonucleotide for detection of SNP TSC0043107
ccataaacccttc

SEQ ID NO: 173029 - DNA, 13 bp, Artificial Sequence
  Oligonucleotide for detection of SNP TSC0043107
gaagggattatgg

SEQ ID NO: 173030 - DNA, 13 bp, Artificial Sequence
  Oligonucleotide for detection of SNP TSC0043107
ccataatcccttc

SEQ ID NO: 173031 - DNA, 13 bp, Artificial Sequence
  Oligonucleotide for detection of SNP TSC0043108
tagtggggataag

SEQ ID NO: 173032 - DNA, 13 bp, Artificial Sequence
  Oligonucleotide for detection of SNP TSC0043108
cttatccccacta

SEQ ID NO: 173033 - DNA, 13 bp, Artificial Sequence
  Oligonucleotide for detection of SNP TSC0043108
tagtggagataag

SEQ ID NO: 173034 - DNA, 13 bp, Artificial Sequence
  Oligonucleotide for detection of SNP TSC0043108
cttatctccacta

SEQ ID NO: 173035 - DNA, 13 bp, Artificial Sequence
  Oligonucleotide for detection of SNP TSC0005233
tttttaatgtaga

SEQ ID NO: 173036 - DNA, 13 bp, Artificial Sequence
  Oligonucleotide for detection of SNP TSC0005233
tctacattaaaaa

SEQ ID NO: 173037 - DNA, 13 bp, Artificial Sequence
  Oligonucleotide for detection of SNP TSC0005233
tttttagtgtaga

SEQ ID NO: 173038 - DNA, 13 bp, Artificial Sequence
  Oligonucleotide for detection of SNP TSC0005233
tctacactaaaaa

SEQ ID NO: 173039 - DNA, 13 bp, Artificial Sequence
  Oligonucleotide for detection of SNP TSC0043109
aattataaatttt

SEQ ID NO: 173040 - DNA, 13 bp, Artificial Sequence
  Oligonucleotide for detection of SNP TSC0043109
aaaatttataatt

SEQ ID NO: 173041 - DNA, 13 bp, Artificial Sequence
  Oligonucleotide for detection of SNP TSC0043109
aattattaatttt

SEQ ID NO: 173042 - DNA, 13 bp, Artificial Sequence
  Oligonucleotide for detection of SNP TSC0043109
aaaattaataatt

SEQ ID NO: 173043 - DNA, 13 bp, Artificial Sequence
  Oligonucleotide for detection of SNP TSC0043109
aaagtttatggtt

SEQ ID NO: 173044 - DNA, 13 bp, Artificial Sequence
  Oligonucleotide for detection of SNP TSC0043109
aaccataaacttt

SEQ ID NO: 173045 - DNA, 13 bp, Artificial Sequence
  Oligonucleotide for detection of SNP TSC0043109
aaagttaatggtt

SEQ ID NO: 173046 - DNA, 13 bp, Artificial Sequence
  Oligonucleotide for detection of SNP TSC0043109
aaccattaacttt

SEQ ID NO: 173047 - DNA, 13 bp, Artificial Sequence
  Oligonucleotide for detection of SNP TSC0043110
taagataggaagg

SEQ ID NO: 173048 - DNA, 13 bp, Artificial Sequence
  Oligonucleotide for detection of SNP TSC0043110
ccttcctatctta

SEQ ID NO: 173049 - DNA, 13 bp, Artificial Sequence
  Oligonucleotide for detection of SNP TSC0043110
taagattggaagg

SEQ ID NO: 173050 - DNA, 13 bp, Artificial Sequence
  Oligonucleotide for detection of SNP TSC0043110
ccttccaatctta

SEQ ID NO: 173051 - DNA, 13 bp, Artificial Sequence
  Oligonucleotide for detection of SNP TSC0008144
ttaagttttattg

SEQ ID NO: 173052 - DNA, 13 bp, Artificial Sequence
  Oligonucleotide for detection of SNP TSC0008144
caataaaacttaa

SEQ ID NO: 173053 - DNA, 13 bp, Artificial Sequence
  Oligonucleotide for detection of SNP TSC0008144
taatgatatttaa

SEQ ID NO: 173054 - DNA, 13 bp, Artificial Sequence
  Oligonucleotide for detection of SNP TSC0008144
ttaaatatcatta

SEQ ID NO: 173055 - DNA, 13 bp, Artificial Sequence
  Oligonucleotide for detection of SNP TSC0008144
taatgaaatttaa

SEQ ID NO: 173056 - DNA, 13 bp, Artificial Sequence
  Oligonucleotide for detection of SNP TSC0008144
ttaaatttcatta

SEQ ID NO: 173057 - DNA, 13 bp, Artificial Sequence
  Oligonucleotide for detection of SNP TSC0043111
ttatgtaaggtaa

SEQ ID NO: 173058 - DNA, 13 bp, Artificial Sequence
  Oligonucleotide for detection of SNP TSC0043111
ttaccttacataa

SEQ ID NO: 173059 - DNA, 13 bp, Artificial Sequence
  Oligonucleotide for detection of SNP TSC0043111
ttatgtgaggtaa

SEQ ID NO: 173060 - DNA, 13 bp, Artificial Sequence
  Oligonucleotide for detection of SNP TSC0043111
ttacctcacataa

SEQ ID NO: 173061 - DNA, 13 bp, Artificial Sequence
  Oligonucleotide for detection of SNP TSC0043111
ttacgtaaggtaa

SEQ ID NO: 173062 - DNA, 13 bp, Artificial Sequence
  Oligonucleotide for detection of SNP TSC0043111
ttaccttacgtaa

SEQ ID NO: 173063 - DNA, 13 bp, Artificial Sequence
  Oligonucleotide for detection of SNP TSC0043111
ttacgtgaggtaa

SEQ ID NO: 173064 - DNA, 13 bp, Artificial Sequence
  Oligonucleotide for detection of SNP TSC0043111
ttacctcacgtaa

SEQ ID NO: 173065 - DNA, 13 bp, Artificial Sequence
  Oligonucleotide for detection of SNP TSC0010582
ttgaaaaattagg

SEQ ID NO: 173066 - DNA, 13 bp, Artificial Sequence
  Oligonucleotide for detection of SNP TSC0010582
cctaatttttcaa

SEQ ID NO: 173067 - DNA, 13 bp, Artificial Sequence
  Oligonucleotide for detection of SNP TSC0010582
ttgaaatattagg

SEQ ID NO: 173068 - DNA, 13 bp, Artificial Sequence
  Oligonucleotide for detection of SNP TSC0010582
cctaatatttcaa

SEQ ID NO: 173069 - DNA, 13 bp, Artificial Sequence
  Oligonucleotide for detection of SNP TSC0010582
tttaattttttaa

SEQ ID NO: 173070 - DNA, 13 bp, Artificial Sequence
  Oligonucleotide for detection of SNP TSC0010582
ttaaaaaattaaa

SEQ ID NO: 173071 - DNA, 13 bp, Artificial Sequence
  Oligonucleotide for detection of SNP TSC0010582
tttaatattttaa

SEQ ID NO: 173072 - DNA, 13 bp, Artificial Sequence
  Oligonucleotide for detection of SNP TSC0010582
ttaaaatattaaa

SEQ ID NO: 173073 - DNA, 13 bp, Artificial Sequence
  Oligonucleotide for detection of SNP TSC0043112
gttttgattgtaa

SEQ ID NO: 173074 - DNA, 13 bp, Artificial Sequence
  Oligonucleotide for detection of SNP TSC0043112
ttacaatcaaaac

SEQ ID NO: 173075 - DNA, 13 bp, Artificial Sequence
  Oligonucleotide for detection of SNP TSC0043112
gttttgtttgtaa

SEQ ID NO: 173076 - DNA, 13 bp, Artificial Sequence
  Oligonucleotide for detection of SNP TSC0043112
ttacaaacaaaac

SEQ ID NO: 173077 - DNA, 13 bp, Artificial Sequence
  Oligonucleotide for detection of SNP TSC0043112
ttataattaaagy

SEQ ID NO: 173078 - DNA, 13 bp, Artificial Sequence
  Oligonucleotide for detection of SNP TSC0043112
rctttaattataa

SEQ ID NO: 173079 - DNA, 13 bp, Artificial Sequence
  Oligonucleotide for detection of SNP TSC0043112
ttataaataaagy

SEQ ID NO: 173080 - DNA, 13 bp, Artificial Sequence
  Oligonucleotide for detection of SNP TSC0043112
rctttatttataa

SEQ ID NO: 173081 - DNA, 13 bp, Artificial Sequence
  Oligonucleotide for detection of SNP TSC0043113
taaaaatggaagg

SEQ ID NO: 173082 - DNA, 13 bp, Artificial Sequence
  Oligonucleotide for detection of SNP TSC0043113
ccttccattttta

SEQ ID NO: 173083 - DNA, 13 bp, Artificial Sequence
  Oligonucleotide for detection of SNP TSC0043113
taaaaacggaagg

SEQ ID NO: 173084 - DNA, 13 bp, Artificial Sequence
  Oligonucleotide for detection of SNP TSC0043113
ccttccgttttta

SEQ ID NO: 173085 - DNA, 13 bp, Artificial Sequence
  Oligonucleotide for detection of SNP TSC0043114
gtaaattagttat

SEQ ID NO: 173086 - DNA, 13 bp, Artificial Sequence
  Oligonucleotide for detection of SNP TSC0043114
ataactaatttac

SEQ ID NO: 173087 - DNA, 13 bp, Artificial Sequence
  Oligonucleotide for detection of SNP TSC0043114
gtaaatgagttat

SEQ ID NO: 173088 - DNA, 13 bp, Artificial Sequence
  Oligonucleotide for detection of SNP TSC0043114
ataactcatttac

SEQ ID NO: 173089 - DNA, 13 bp, Artificial Sequence
  Oligonucleotide for detection of SNP TSC0043115
gttttaggtgtgy

SEQ ID NO: 173090 - DNA, 13 bp, Artificial Sequence
  Oligonucleotide for detection of SNP TSC0043115
rcacacctaaaac

SEQ ID NO: 173091 - DNA, 13 bp, Artificial Sequence
  Oligonucleotide for detection of SNP TSC0043115
gttttaagtgtgy

SEQ ID NO: 173092 - DNA, 13 bp, Artificial Sequence
  Oligonucleotide for detection of SNP TSC0043115
rcacacttaaaac

SEQ ID NO: 173093 - DNA, 13 bp, Artificial Sequence
  Oligonucleotide for detection of SNP TSC0043119
gatgagttaggty

SEQ ID NO: 173094 - DNA, 13 bp, Artificial Sequence
  Oligonucleotide for detection of SNP TSC0043119
racctaactcatc

SEQ ID NO: 173095 - DNA, 13 bp, Artificial Sequence
  Oligonucleotide for detection of SNP TSC0043119
gatgaggtaggty

SEQ ID NO: 173096 - DNA, 13 bp, Artificial Sequence
  Oligonucleotide for detection of SNP TSC0043119
racctacctcatc

SEQ ID NO: 173097 - DNA, 13 bp, Artificial Sequence
  Oligonucleotide for detection of SNP TSC0043119
ggtttggtttaty

SEQ ID NO: 173098 - DNA, 13 bp, Artificial Sequence
  Oligonucleotide for detection of SNP TSC0043119
rataaaccaaacc

SEQ ID NO: 173099 - DNA, 13 bp, Artificial Sequence
  Oligonucleotide for detection of SNP TSC0043119
ggtttgttttaty

SEQ ID NO: 173100 - DNA, 13 bp, Artificial Sequence
  Oligonucleotide for detection of SNP TSC0043119
rataaaacaaacc

SEQ ID NO: 173101 - DNA, 13 bp, Artificial Sequence
  Oligonucleotide for detection of SNP TSC0043120
aaatagatttata

SEQ ID NO: 173102 - DNA, 13 bp, Artificial Sequence
  Oligonucleotide for detection of SNP TSC0043120
tataaatctattt

SEQ ID NO: 173103 - DNA, 13 bp, Artificial Sequence
  Oligonucleotide for detection of SNP TSC0043120
aaataggtttata

SEQ ID NO: 173104 - DNA, 13 bp, Artificial Sequence
  Oligonucleotide for detection of SNP TSC0043120
tataaacctattt

SEQ ID NO: 173105 - DNA, 13 bp, Artificial Sequence
  Oligonucleotide for detection of SNP TSC0043121
aagtttatttgat

SEQ ID NO: 173106 - DNA, 13 bp, Artificial Sequence
  Oligonucleotide for detection of SNP TSC0043121
atcaaataaactt

SEQ ID NO: 173107 - DNA, 13 bp, Artificial Sequence
  Oligonucleotide for detection of SNP TSC0043121
aagtttgtttgat

SEQ ID NO: 173108 - DNA, 13 bp, Artificial Sequence
  Oligonucleotide for detection of SNP TSC0043121
atcaaacaaactt

SEQ ID NO: 173109 - DNA, 13 bp, Artificial Sequence
  Oligonucleotide for detection of SNP TSC0007548
aagtaagttgttt

SEQ ID NO: 173110 - DNA, 13 bp, Artificial Sequence
  Oligonucleotide for detection of SNP TSC0007548
aaacaacttactt

SEQ ID NO: 173111 - DNA, 13 bp, Artificial Sequence
  Oligonucleotide for detection of SNP TSC0007548
aagtaaattgttt

SEQ ID NO: 173112 - DNA, 13 bp, Artificial Sequence
  Oligonucleotide for detection of SNP TSC0007548
aaacaatttactt

SEQ ID NO: 173113 - DNA, 13 bp, Artificial Sequence
  Oligonucleotide for detection of SNP TSC0007549
ttgattataaagy

SEQ ID NO: 173114 - DNA, 13 bp, Artificial Sequence
  Oligonucleotide for detection of SNP TSC0007549
rctttataatcaa

SEQ ID NO: 173115 - DNA, 13 bp, Artificial Sequence
  Oligonucleotide for detection of SNP TSC0007549
ttgattgtaaagy

SEQ ID NO: 173116 - DNA, 13 bp, Artificial Sequence
  Oligonucleotide for detection of SNP TSC0007549
rctttacaatcaa

SEQ ID NO: 173117 - DNA, 13 bp, Artificial Sequence
  Oligonucleotide for detection of SNP TSC0007549
ttgatcgtaaagy

SEQ ID NO: 173118 - DNA, 13 bp, Artificial Sequence
  Oligonucleotide for detection of SNP TSC0007549
rctttacgatcaa

SEQ ID NO: 173119 - DNA, 13 bp, Artificial Sequence
  Oligonucleotide for detection of SNP TSC0007549
gttttatggttaa

SEQ ID NO: 173120 - DNA, 13 bp, Artificial Sequence
  Oligonucleotide for detection of SNP TSC0007549
ttaaccataaaac

SEQ ID NO: 173121 - DNA, 13 bp, Artificial Sequence
  Oligonucleotide for detection of SNP TSC0007549
gttttacggttaa

SEQ ID NO: 173122 - DNA, 13 bp, Artificial Sequence
  Oligonucleotide for detection of SNP TSC0007549
ttaaccgtaaaac

SEQ ID NO: 173123 - DNA, 13 bp, Artificial Sequence
  Oligonucleotide for detection of SNP TSC0043122
ttttaatgagata

SEQ ID NO: 173124 - DNA, 13 bp, Artificial Sequence
  Oligonucleotide for detection of SNP TSC0043122
tatctcattaaaa

SEQ ID NO: 173125 - DNA, 13 bp, Artificial Sequence
  Oligonucleotide for detection of SNP TSC0043122
tatttttttgagg

SEQ ID NO: 173126 - DNA, 13 bp, Artificial Sequence
  Oligonucleotide for detection of SNP TSC0043122
cctcaaaaaaata

SEQ ID NO: 173127 - DNA, 13 bp, Artificial Sequence
  Oligonucleotide for detection of SNP TSC0043122
tattttattgagg

SEQ ID NO: 173128 - DNA, 13 bp, Artificial Sequence
  Oligonucleotide for detection of SNP TSC0043122
cctcaataaaata

SEQ ID NO: 173129 - DNA, 13 bp, Artificial Sequence
  Oligonucleotide for detection of SNP TSC0010681
tagtatagatagg

SEQ ID NO: 173130 - DNA, 13 bp, Artificial Sequence
  Oligonucleotide for detection of SNP TSC0010681
cctatctatacta

SEQ ID NO: 173131 - DNA, 13 bp, Artificial Sequence
  Oligonucleotide for detection of SNP TSC0010681
tagtatggatagg

SEQ ID NO: 173132 - DNA, 13 bp, Artificial Sequence
  Oligonucleotide for detection of SNP TSC0010681
cctatccatacta

SEQ ID NO: 173133 - DNA, 13 bp, Artificial Sequence
  Oligonucleotide for detection of SNP TSC0010681
tagtacggatagg

SEQ ID NO: 173134 - DNA, 13 bp, Artificial Sequence
  Oligonucleotide for detection of SNP TSC0010681
cctatccgtacta

SEQ ID NO: 173135 - DNA, 13 bp, Artificial Sequence
  Oligonucleotide for detection of SNP TSC0043123
ggattgagaggaa

SEQ ID NO: 173136 - DNA, 13 bp, Artificial Sequence
  Oligonucleotide for detection of SNP TSC0043123
ttcctctcaatcc

SEQ ID NO: 173137 - DNA, 13 bp, Artificial Sequence
  Oligonucleotide for detection of SNP TSC0043123
ggattgggaggaa

SEQ ID NO: 173138 - DNA, 13 bp, Artificial Sequence
  Oligonucleotide for detection of SNP TSC0043123
ttcctcccaatcc

SEQ ID NO: 173139 - DNA, 13 bp, Artificial Sequence
  Oligonucleotide for detection of SNP TSC0043123
ggatcgagaggaa

SEQ ID NO: 173140 - DNA, 13 bp, Artificial Sequence
  Oligonucleotide for detection of SNP TSC0043123
ttcctctcgatcc

SEQ ID NO: 173141 - DNA, 13 bp, Artificial Sequence
  Oligonucleotide for detection of SNP TSC0043123
ggatcgggaggaa

SEQ ID NO: 173142 - DNA, 13 bp, Artificial Sequence
  Oligonucleotide for detection of SNP TSC0043123
ttcctcccgatcc

SEQ ID NO: 173143 - DNA, 13 bp, Artificial Sequence
  Oligonucleotide for detection of SNP TSC0010300
tttaatattgggg

SEQ ID NO: 173144 - DNA, 13 bp, Artificial Sequence
  Oligonucleotide for detection of SNP TSC0010300
ccccaatattaaa

SEQ ID NO: 173145 - DNA, 13 bp, Artificial Sequence
  Oligonucleotide for detection of SNP TSC0010300
tttaattttgggg

SEQ ID NO: 173146 - DNA, 13 bp, Artificial Sequence
  Oligonucleotide for detection of SNP TSC0010300
ccccaaaattaaa

SEQ ID NO: 173147 - DNA, 13 bp, Artificial Sequence
  Oligonucleotide for detection of SNP TSC0010863
tatgggggtagtt

SEQ ID NO: 173148 - DNA, 13 bp, Artificial Sequence
  Oligonucleotide for detection of SNP TSC0010863
aactacccccata

SEQ ID NO: 173149 - DNA, 13 bp, Artificial Sequence
  Oligonucleotide for detection of SNP TSC0010863
tatgggagtagtt

SEQ ID NO: 173150 - DNA, 13 bp, Artificial Sequence
  Oligonucleotide for detection of SNP TSC0010863
aactactcccata

SEQ ID NO: 173151 - DNA, 13 bp, Artificial Sequence
  Oligonucleotide for detection of SNP TSC0006077
tttgaagttttty

SEQ ID NO: 173152 - DNA, 13 bp, Artificial Sequence
  Oligonucleotide for detection of SNP TSC0006077
raaaaacttcaaa

SEQ ID NO: 173153 - DNA, 13 bp, Artificial Sequence
  Oligonucleotide for detection of SNP TSC0006078
taagttattatta

SEQ ID NO: 173154 - DNA, 13 bp, Artificial Sequence
  Oligonucleotide for detection of SNP TSC0006078
taataataactta

SEQ ID NO: 173155 - DNA, 13 bp, Artificial Sequence
  Oligonucleotide for detection of SNP TSC0006078
taagtttttatta

SEQ ID NO: 173156 - DNA, 13 bp, Artificial Sequence
  Oligonucleotide for detection of SNP TSC0006078
taataaaaactta

SEQ ID NO: 173157 - DNA, 13 bp, Artificial Sequence
  Oligonucleotide for detection of SNP TSC0006078
taataatgatttg

SEQ ID NO: 173158 - DNA, 13 bp, Artificial Sequence
  Oligonucleotide for detection of SNP TSC0006078
caaatcattatta

SEQ ID NO: 173159 - DNA, 13 bp, Artificial Sequence
  Oligonucleotide for detection of SNP TSC0006078
taataaagatttg

SEQ ID NO: 173160 - DNA, 13 bp, Artificial Sequence
  Oligonucleotide for detection of SNP TSC0006078
caaatctttatta

SEQ ID NO: 173161 - DNA, 13 bp, Artificial Sequence
  Oligonucleotide for detection of SNP TSC0043126
aaagaaatatttg

SEQ ID NO: 173162 - DNA, 13 bp, Artificial Sequence
  Oligonucleotide for detection of SNP TSC0043126
caaatatttcttt

SEQ ID NO: 173163 - DNA, 13 bp, Artificial Sequence
  Oligonucleotide for detection of SNP TSC0043126
aaagaagtatttg

SEQ ID NO: 173164 - DNA, 13 bp, Artificial Sequence
  Oligonucleotide for detection of SNP TSC0043126
caaatacttcttt

SEQ ID NO: 173165 - DNA, 13 bp, Artificial Sequence
  Oligonucleotide for detection of SNP TSC0006888
ggtgttgtgtttg

SEQ ID NO: 173166 - DNA, 13 bp, Artificial Sequence
  Oligonucleotide for detection of SNP TSC0006888
caaacacaacacc

SEQ ID NO: 173167 - DNA, 13 bp, Artificial Sequence
  Oligonucleotide for detection of SNP TSC0006888
ggtgttatgtttg

SEQ ID NO: 173168 - DNA, 13 bp, Artificial Sequence
  Oligonucleotide for detection of SNP TSC0006888
caaacataacacc

SEQ ID NO: 173169 - DNA, 13 bp, Artificial Sequence
  Oligonucleotide for detection of SNP TSC0008348
gttttgatttgag

SEQ ID NO: 173170 - DNA, 13 bp, Artificial Sequence
  Oligonucleotide for detection of SNP TSC0008348
ctcaaatcaaaac

SEQ ID NO: 173171 - DNA, 13 bp, Artificial Sequence
  Oligonucleotide for detection of SNP TSC0008348
gttttggtttgag

SEQ ID NO: 173172 - DNA, 13 bp, Artificial Sequence
  Oligonucleotide for detection of SNP TSC0008348
ctcaaaccaaaac

SEQ ID NO: 173173 - DNA, 13 bp, Artificial Sequence
  Oligonucleotide for detection of SNP TSC0043127
tagagtgtattgt

SEQ ID NO: 173174 - DNA, 13 bp, Artificial Sequence
  Oligonucleotide for detection of SNP TSC0043127
acaatacactcta

SEQ ID NO: 173175 - DNA, 13 bp, Artificial Sequence
  Oligonucleotide for detection of SNP TSC0043127
tagagcgtattgt

SEQ ID NO: 173176 - DNA, 13 bp, Artificial Sequence
  Oligonucleotide for detection of SNP TSC0043127
acaatacgctcta

SEQ ID NO: 173177 - DNA, 13 bp, Artificial Sequence
  Oligonucleotide for detection of SNP TSC0043127
ataatgtgttttg

SEQ ID NO: 173178 - DNA, 13 bp, Artificial Sequence
  Oligonucleotide for detection of SNP TSC0043127
caaaacacattat

SEQ ID NO: 173179 - DNA, 13 bp, Artificial Sequence
  Oligonucleotide for detection of SNP TSC0043127
ataatgcgttttg

SEQ ID NO: 173180 - DNA, 13 bp, Artificial Sequence
  Oligonucleotide for detection of SNP TSC0043127
caaaacgcattat

SEQ ID NO: 173181 - DNA, 13 bp, Artificial Sequence
  Oligonucleotide for detection of SNP TSC0043128
attgagaaaggag

SEQ ID NO: 173182 - DNA, 13 bp, Artificial Sequence
  Oligonucleotide for detection of SNP TSC0043128
ctcctttctcaat

SEQ ID NO: 173183 - DNA, 13 bp, Artificial Sequence
  Oligonucleotide for detection of SNP TSC0043128
attgaggaaggag

SEQ ID NO: 173184 - DNA, 13 bp, Artificial Sequence
  Oligonucleotide for detection of SNP TSC0043128
ctccttcctcaat

SEQ ID NO: 173185 - DNA, 13 bp, Artificial Sequence
  Oligonucleotide for detection of SNP TSC0043134
tgagaaaaaagga

SEQ ID NO: 173186 - DNA, 13 bp, Artificial Sequence
  Oligonucleotide for detection of SNP TSC0043134
tccttttttctca

SEQ ID NO: 173187 - DNA, 13 bp, Artificial Sequence
  Oligonucleotide for detection of SNP TSC0043134
tgagaataaagga

SEQ ID NO: 173188 - DNA, 13 bp, Artificial Sequence
  Oligonucleotide for detection of SNP TSC0043134
tcctttattctca

SEQ ID NO: 173189 - DNA, 13 bp, Artificial Sequence
  Oligonucleotide for detection of SNP TSC0043135
tttgggtttggat

SEQ ID NO: 173190 - DNA, 13 bp, Artificial Sequence
  Oligonucleotide for detection of SNP TSC0043135
atccaaacccaaa

SEQ ID NO: 173191 - DNA, 13 bp, Artificial Sequence
  Oligonucleotide for detection of SNP TSC0043135
tttggggttggat

SEQ ID NO: 173192 - DNA, 13 bp, Artificial Sequence
  Oligonucleotide for detection of SNP TSC0043135
atccaaccccaaa

SEQ ID NO: 173193 - DNA, 13 bp, Artificial Sequence
  Oligonucleotide for detection of SNP TSC0043135
atttagatttaaa

SEQ ID NO: 173194 - DNA, 13 bp, Artificial Sequence
  Oligonucleotide for detection of SNP TSC0043135
tttaaatctaaat

SEQ ID NO: 173195 - DNA, 13 bp, Artificial Sequence
  Oligonucleotide for detection of SNP TSC0043135
atttagttttaaa

SEQ ID NO: 173196 - DNA, 13 bp, Artificial Sequence
  Oligonucleotide for detection of SNP TSC0043135
tttaaaactaaat

SEQ ID NO: 173197 - DNA, 13 bp, Artificial Sequence
  Oligonucleotide for detection of SNP TSC0043140
agtattgttgaag

SEQ ID NO: 173198 - DNA, 13 bp, Artificial Sequence
  Oligonucleotide for detection of SNP TSC0043140
cttcaacaatact

SEQ ID NO: 173199 - DNA, 13 bp, Artificial Sequence
  Oligonucleotide for detection of SNP TSC0043140
agtattattgaag

SEQ ID NO: 173200 - DNA, 13 bp, Artificial Sequence
  Oligonucleotide for detection of SNP TSC0043140
cttcaataatact

SEQ ID NO: 173201 - DNA, 13 bp, Artificial Sequence
  Oligonucleotide for detection of SNP TSC0043141
ttaataattttga

SEQ ID NO: 173202 - DNA, 13 bp, Artificial Sequence
  Oligonucleotide for detection of SNP TSC0043141
tcaaaattattaa

SEQ ID NO: 173203 - DNA, 13 bp, Artificial Sequence
  Oligonucleotide for detection of SNP TSC0043141
ttaatatttttga

SEQ ID NO: 173204 - DNA, 13 bp, Artificial Sequence
  Oligonucleotide for detection of SNP TSC0043141
tcaaaaatattaa

SEQ ID NO: 173205 - DNA, 13 bp, Artificial Sequence
  Oligonucleotide for detection of SNP TSC0043141
ttagaattattaa

SEQ ID NO: 173206 - DNA, 13 bp, Artificial Sequence
  Oligonucleotide for detection of SNP TSC0043141
ttaataattctaa

SEQ ID NO: 173207 - DNA, 13 bp, Artificial Sequence
  Oligonucleotide for detection of SNP TSC0043141
ttagaagtattaa

SEQ ID NO: 173208 - DNA, 13 bp, Artificial Sequence
  Oligonucleotide for detection of SNP TSC0043141
ttaatacttctaa

SEQ ID NO: 173209 - DNA, 13 bp, Artificial Sequence
  Oligonucleotide for detection of SNP TSC0043146
gttgtggtgtttg

SEQ ID NO: 173210 - DNA, 13 bp, Artificial Sequence
  Oligonucleotide for detection of SNP TSC0043146
caaacaccacaac

SEQ ID NO: 173211 - DNA, 13 bp, Artificial Sequence
  Oligonucleotide for detection of SNP TSC0043146
gttgtgatgtttg

SEQ ID NO: 173212 - DNA, 13 bp, Artificial Sequence
  Oligonucleotide for detection of SNP TSC0043146
caaacatcacaac

SEQ ID NO: 173213 - DNA, 13 bp, Artificial Sequence
  Oligonucleotide for detection of SNP TSC0043146
gttgcggtgtttg

SEQ ID NO: 173214 - DNA, 13 bp, Artificial Sequence
  Oligonucleotide for detection of SNP TSC0043146
caaacaccgcaac

SEQ ID NO: 173215 - DNA, 13 bp, Artificial Sequence
  Oligonucleotide for detection of SNP TSC0043146
gttgcgatgtttg

SEQ ID NO: 173216 - DNA, 13 bp, Artificial Sequence
  Oligonucleotide for detection of SNP TSC0043146
caaacatcgcaac

SEQ ID NO: 173217 - DNA, 13 bp, Artificial Sequence
  Oligonucleotide for detection of SNP TSC0043150
aaaaaaattttty

SEQ ID NO: 173218 - DNA, 13 bp, Artificial Sequence
  Oligonucleotide for detection of SNP TSC0043150
raaaaattttttt

SEQ ID NO: 173219 - DNA, 13 bp, Artificial Sequence
  Oligonucleotide for detection of SNP TSC0043150
aaaaaatttttty

SEQ ID NO: 173220 - DNA, 13 bp, Artificial Sequence
  Oligonucleotide for detection of SNP TSC0043150
raaaaaatttttt

SEQ ID NO: 173221 - DNA, 13 bp, Artificial Sequence
  Oligonucleotide for detection of SNP TSC0043150
gaaaaattttttt

SEQ ID NO: 173222 - DNA, 13 bp, Artificial Sequence
  Oligonucleotide for detection of SNP TSC0043150
aaaaaaatttttc

SEQ ID NO: 173223 - DNA, 13 bp, Artificial Sequence
  Oligonucleotide for detection of SNP TSC0043150
gaaaaaatttttt

SEQ ID NO: 173224 - DNA, 13 bp, Artificial Sequence
  Oligonucleotide for detection of SNP TSC0043150
aaaaaattttttc

SEQ ID NO: 173225 - DNA, 13 bp, Artificial Sequence
  Oligonucleotide for detection of SNP TSC0043151
agaaaattttttt

SEQ ID NO: 173226 - DNA, 13 bp, Artificial Sequence
  Oligonucleotide for detection of SNP TSC0043151
aaaaaaattttct

SEQ ID NO: 173227 - DNA, 13 bp, Artificial Sequence
  Oligonucleotide for detection of SNP TSC0043151
agaaaaatttttt

SEQ ID NO: 173228 - DNA, 13 bp, Artificial Sequence
  Oligonucleotide for detection of SNP TSC0043151
aaaaaatttttct

SEQ ID NO: 173229 - DNA, 13 bp, Artificial Sequence
  Oligonucleotide for detection of SNP TSC0043152
tttttatggtaay

SEQ ID NO: 173230 - DNA, 13 bp, Artificial Sequence
  Oligonucleotide for detection of SNP TSC0043152
rttaccataaaaa

SEQ ID NO: 173231 - DNA, 13 bp, Artificial Sequence
  Oligonucleotide for detection of SNP TSC0043152
tttttacggtaay

SEQ ID NO: 173232 - DNA, 13 bp, Artificial Sequence
  Oligonucleotide for detection of SNP TSC0043152
rttaccgtaaaaa

SEQ ID NO: 173233 - DNA, 13 bp, Artificial Sequence
  Oligonucleotide for detection of SNP TSC0043152
gttattgtaaagg

SEQ ID NO: 173234 - DNA, 13 bp, Artificial Sequence
  Oligonucleotide for detection of SNP TSC0043152
cctttacaataac

SEQ ID NO: 173235 - DNA, 13 bp, Artificial Sequence
  Oligonucleotide for detection of SNP TSC0043152
gttattataaagg

SEQ ID NO: 173236 - DNA, 13 bp, Artificial Sequence
  Oligonucleotide for detection of SNP TSC0043152
cctttataataac

SEQ ID NO: 173237 - DNA, 13 bp, Artificial Sequence
  Oligonucleotide for detection of SNP TSC0043152
gttatcgtaaagg

SEQ ID NO: 173238 - DNA, 13 bp, Artificial Sequence
  Oligonucleotide for detection of SNP TSC0043152
cctttacgataac

SEQ ID NO: 173239 - DNA, 13 bp, Artificial Sequence
  Oligonucleotide for detection of SNP TSC0043153
gataggtaagaat

SEQ ID NO: 173240 - DNA, 13 bp, Artificial Sequence
  Oligonucleotide for detection of SNP TSC0043153
attcttacctatc

SEQ ID NO: 173241 - DNA, 13 bp, Artificial Sequence
  Oligonucleotide for detection of SNP TSC0043153
gatagggaagaat

SEQ ID NO: 173242 - DNA, 13 bp, Artificial Sequence
  Oligonucleotide for detection of SNP TSC0043153
attcttccctatc

SEQ ID NO: 173243 - DNA, 13 bp, Artificial Sequence
  Oligonucleotide for detection of SNP TSC0043154
tgagtttgggaga

SEQ ID NO: 173244 - DNA, 13 bp, Artificial Sequence
  Oligonucleotide for detection of SNP TSC0043154
tctcccaaactca

SEQ ID NO: 173245 - DNA, 13 bp, Artificial Sequence
  Oligonucleotide for detection of SNP TSC0043154
tgagttggggaga

SEQ ID NO: 173246 - DNA, 13 bp, Artificial Sequence
  Oligonucleotide for detection of SNP TSC0043154
tctccccaactca

SEQ ID NO: 173247 - DNA, 13 bp, Artificial Sequence
  Oligonucleotide for detection of SNP TSC0043154
tgagttcgggaga

SEQ ID NO: 173248 - DNA, 13 bp, Artificial Sequence
  Oligonucleotide for detection of SNP TSC0043154
tctcccgaactca

SEQ ID NO: 173249 - DNA, 13 bp, Artificial Sequence
  Oligonucleotide for detection of SNP TSC0043154
tttttcgaattta

SEQ ID NO: 173250 - DNA, 13 bp, Artificial Sequence
  Oligonucleotide for detection of SNP TSC0043154
taaattcgaaaaa

SEQ ID NO: 173251 - DNA, 13 bp, Artificial Sequence
  Oligonucleotide for detection of SNP TSC0043155
tagtagatggttg

SEQ ID NO: 173252 - DNA, 13 bp, Artificial Sequence
  Oligonucleotide for detection of SNP TSC0043155
caaccatctacta

SEQ ID NO: 173253 - DNA, 13 bp, Artificial Sequence
  Oligonucleotide for detection of SNP TSC0043155
tagtaggtggttg

SEQ ID NO: 173254 - DNA, 13 bp, Artificial Sequence
  Oligonucleotide for detection of SNP TSC0043155
caaccacctacta

SEQ ID NO: 173255 - DNA, 13 bp, Artificial Sequence
  Oligonucleotide for detection of SNP TSC0043159
aggataaattttt

SEQ ID NO: 173256 - DNA, 13 bp, Artificial Sequence
  Oligonucleotide for detection of SNP TSC0043159
aaaaatttatcct

SEQ ID NO: 173257 - DNA, 13 bp, Artificial Sequence
  Oligonucleotide for detection of SNP TSC0043159
aggatagattttt

SEQ ID NO: 173258 - DNA, 13 bp, Artificial Sequence
  Oligonucleotide for detection of SNP TSC0043159
aaaaatctatcct

SEQ ID NO: 173259 - DNA, 13 bp, Artificial Sequence
  Oligonucleotide for detection of SNP TSC0043160
tttattttattat

SEQ ID NO: 173260 - DNA, 13 bp, Artificial Sequence
  Oligonucleotide for detection of SNP TSC0043160
ataataaaataaa

SEQ ID NO: 173261 - DNA, 13 bp, Artificial Sequence
  Oligonucleotide for detection of SNP TSC0043160
atgatgaaataga

SEQ ID NO: 173262 - DNA, 13 bp, Artificial Sequence
  Oligonucleotide for detection of SNP TSC0043160
tctatttcatcat

SEQ ID NO: 173263 - DNA, 13 bp, Artificial Sequence
  Oligonucleotide for detection of SNP TSC0043160
atgatgtaataga

SEQ ID NO: 173264 - DNA, 13 bp, Artificial Sequence
  Oligonucleotide for detection of SNP TSC0043160
tctattacatcat

SEQ ID NO: 173265 - DNA, 13 bp, Artificial Sequence
  Oligonucleotide for detection of SNP TSC0043161
tttaatatttttg

SEQ ID NO: 173266 - DNA, 13 bp, Artificial Sequence
  Oligonucleotide for detection of SNP TSC0043161
caaaaatattaaa

SEQ ID NO: 173267 - DNA, 13 bp, Artificial Sequence
  Oligonucleotide for detection of SNP TSC0043161
tttaatttttttg

SEQ ID NO: 173268 - DNA, 13 bp, Artificial Sequence
  Oligonucleotide for detection of SNP TSC0043161
caaaaaaattaaa

SEQ ID NO: 173269 - DNA, 13 bp, Artificial Sequence
  Oligonucleotide for detection of SNP TSC0043161
taaaaatattgaa

SEQ ID NO: 173270 - DNA, 13 bp, Artificial Sequence
  Oligonucleotide for detection of SNP TSC0043161
ttcaatattttta

SEQ ID NO: 173271 - DNA, 13 bp, Artificial Sequence
  Oligonucleotide for detection of SNP TSC0043161
taaaaaaattgaa

SEQ ID NO: 173272 - DNA, 13 bp, Artificial Sequence
  Oligonucleotide for detection of SNP TSC0043161
ttcaattttttta

SEQ ID NO: 173273 - DNA, 13 bp, Artificial Sequence
  Oligonucleotide for detection of SNP TSC0043162
gaataggttattt

SEQ ID NO: 173274 - DNA, 13 bp, Artificial Sequence
  Oligonucleotide for detection of SNP TSC0043162
aaataacctattc

SEQ ID NO: 173275 - DNA, 13 bp, Artificial Sequence
  Oligonucleotide for detection of SNP TSC0043162
gaatagattattt

SEQ ID NO: 173276 - DNA, 13 bp, Artificial Sequence
  Oligonucleotide for detection of SNP TSC0043162
aaataatctattc

SEQ ID NO: 173277 - DNA, 13 bp, Artificial Sequence
  Oligonucleotide for detection of SNP TSC0043165
aggaatgaaatga

SEQ ID NO: 173278 - DNA, 13 bp, Artificial Sequence
  Oligonucleotide for detection of SNP TSC0043165
tcatttcattcct

SEQ ID NO: 173279 - DNA, 13 bp, Artificial Sequence
  Oligonucleotide for detection of SNP TSC0043165
aggaattaaatga

SEQ ID NO: 173280 - DNA, 13 bp, Artificial Sequence
  Oligonucleotide for detection of SNP TSC0043165
tcatttaattcct

SEQ ID NO: 173281 - DNA, 13 bp, Artificial Sequence
  Oligonucleotide for detection of SNP TSC0043167
tatttaatagtaa

SEQ ID NO: 173282 - DNA, 13 bp, Artificial Sequence
  Oligonucleotide for detection of SNP TSC0043167
ttactattaaata

SEQ ID NO: 173283 - DNA, 13 bp, Artificial Sequence
  Oligonucleotide for detection of SNP TSC0043167
tatttagtagtaa

SEQ ID NO: 173284 - DNA, 13 bp, Artificial Sequence
  Oligonucleotide for detection of SNP TSC0043167
ttactactaaata

SEQ ID NO: 173285 - DNA, 13 bp, Artificial Sequence
  Oligonucleotide for detection of SNP TSC0043172
ttgaaggtattty

SEQ ID NO: 173286 - DNA, 13 bp, Artificial Sequence
  Oligonucleotide for detection of SNP TSC0043172
raaataccttcaa

SEQ ID NO: 173287 - DNA, 13 bp, Artificial Sequence
  Oligonucleotide for detection of SNP TSC0043174
tgtaatgttatay

SEQ ID NO: 173288 - DNA, 13 bp, Artificial Sequence
  Oligonucleotide for detection of SNP TSC0043174
rtataacattaca

SEQ ID NO: 173289 - DNA, 13 bp, Artificial Sequence
  Oligonucleotide for detection of SNP TSC0043174
tgtaatattatay

SEQ ID NO: 173290 - DNA, 13 bp, Artificial Sequence
  Oligonucleotide for detection of SNP TSC0043174
rtataatattaca

SEQ ID NO: 173291 - DNA, 13 bp, Artificial Sequence
  Oligonucleotide for detection of SNP TSC0043175
gatttattggttt

SEQ ID NO: 173292 - DNA, 13 bp, Artificial Sequence
  Oligonucleotide for detection of SNP TSC0043175
aaaccaataaatc

SEQ ID NO: 173293 - DNA, 13 bp, Artificial Sequence
  Oligonucleotide for detection of SNP TSC0043175
gatttagtggttt

SEQ ID NO: 173294 - DNA, 13 bp, Artificial Sequence
  Oligonucleotide for detection of SNP TSC0043175
aaaccactaaatc

SEQ ID NO: 173295 - DNA, 13 bp, Artificial Sequence
  Oligonucleotide for detection of SNP TSC0043175
aggttagtaggty

SEQ ID NO: 173296 - DNA, 13 bp, Artificial Sequence
  Oligonucleotide for detection of SNP TSC0043175
racctactaacct

SEQ ID NO: 173297 - DNA, 13 bp, Artificial Sequence
  Oligonucleotide for detection of SNP TSC0043175
aggttattaggty

SEQ ID NO: 173298 - DNA, 13 bp, Artificial Sequence
  Oligonucleotide for detection of SNP TSC0043175
racctaataacct

SEQ ID NO: 173299 - DNA, 13 bp, Artificial Sequence
  Oligonucleotide for detection of SNP TSC0043176
agttttaggagat

SEQ ID NO: 173300 - DNA, 13 bp, Artificial Sequence
  Oligonucleotide for detection of SNP TSC0043176
atctcctaaaact

SEQ ID NO: 173301 - DNA, 13 bp, Artificial Sequence
  Oligonucleotide for detection of SNP TSC0043176
agttttgggagat

SEQ ID NO: 173302 - DNA, 13 bp, Artificial Sequence
  Oligonucleotide for detection of SNP TSC0043176
atctcccaaaact

SEQ ID NO: 173303 - DNA, 13 bp, Artificial Sequence
  Oligonucleotide for detection of SNP TSC0043176
agtttcgggagat

SEQ ID NO: 173304 - DNA, 13 bp, Artificial Sequence
  Oligonucleotide for detection of SNP TSC0043176
atctcccgaaact

SEQ ID NO: 173305 - DNA, 13 bp, Artificial Sequence
  Oligonucleotide for detection of SNP TSC0043176
atttttcgagatt

SEQ ID NO: 173306 - DNA, 13 bp, Artificial Sequence
  Oligonucleotide for detection of SNP TSC0043176
aatctcgaaaaat

SEQ ID NO: 173307 - DNA, 13 bp, Artificial Sequence
  Oligonucleotide for detection of SNP TSC0043179
gtttgtatatata

SEQ ID NO: 173308 - DNA, 13 bp, Artificial Sequence
  Oligonucleotide for detection of SNP TSC0043179
tatatatacaaac

SEQ ID NO: 173309 - DNA, 13 bp, Artificial Sequence
  Oligonucleotide for detection of SNP TSC0043179
gtttgtgtatata

SEQ ID NO: 173310 - DNA, 13 bp, Artificial Sequence
  Oligonucleotide for detection of SNP TSC0043179
tatatacacaaac

SEQ ID NO: 173311 - DNA, 13 bp, Artificial Sequence
  Oligonucleotide for detection of SNP TSC0043179
gtttgcgtatata

SEQ ID NO: 173312 - DNA, 13 bp, Artificial Sequence
  Oligonucleotide for detection of SNP TSC0043179
tatatacgcaaac

SEQ ID NO: 173313 - DNA, 13 bp, Artificial Sequence
  Oligonucleotide for detection of SNP TSC0043179
tatgtatgtagay

SEQ ID NO: 173314 - DNA, 13 bp, Artificial Sequence
  Oligonucleotide for detection of SNP TSC0043179
rtctacatacata

SEQ ID NO: 173315 - DNA, 13 bp, Artificial Sequence
  Oligonucleotide for detection of SNP TSC0043179
tatgtacgtagay

SEQ ID NO: 173316 - DNA, 13 bp, Artificial Sequence
  Oligonucleotide for detection of SNP TSC0043179
rtctacgtacata

SEQ ID NO: 173317 - DNA, 13 bp, Artificial Sequence
  Oligonucleotide for detection of SNP TSC0043181
ttgtaaattatta

SEQ ID NO: 173318 - DNA, 13 bp, Artificial Sequence
  Oligonucleotide for detection of SNP TSC0043181
taataatttacaa

SEQ ID NO: 173319 - DNA, 13 bp, Artificial Sequence
  Oligonucleotide for detection of SNP TSC0043181
ttgtaagttatta

SEQ ID NO: 173320 - DNA, 13 bp, Artificial Sequence
  Oligonucleotide for detection of SNP TSC0043181
taataacttacaa

SEQ ID NO: 173321 - DNA, 13 bp, Artificial Sequence
  Oligonucleotide for detection of SNP TSC0043182
tttttaagatgag

SEQ ID NO: 173322 - DNA, 13 bp, Artificial Sequence
  Oligonucleotide for detection of SNP TSC0043182
ctcatcttaaaaa

SEQ ID NO: 173323 - DNA, 13 bp, Artificial Sequence
  Oligonucleotide for detection of SNP TSC0043182
tttttaggatgag

SEQ ID NO: 173324 - DNA, 13 bp, Artificial Sequence
  Oligonucleotide for detection of SNP TSC0043182
ctcatcctaaaaa

SEQ ID NO: 173325 - DNA, 13 bp, Artificial Sequence
  Oligonucleotide for detection of SNP TSC0043183
aatagatgatatt

SEQ ID NO: 173326 - DNA, 13 bp, Artificial Sequence
  Oligonucleotide for detection of SNP TSC0043183
aatatcatctatt

SEQ ID NO: 173327 - DNA, 13 bp, Artificial Sequence
  Oligonucleotide for detection of SNP TSC0043183
aatagacgatatt

SEQ ID NO: 173328 - DNA, 13 bp, Artificial Sequence
  Oligonucleotide for detection of SNP TSC0043183
aatatcgtctatt

SEQ ID NO: 173329 - DNA, 13 bp, Artificial Sequence
  Oligonucleotide for detection of SNP TSC0043183
agtattgtttgtt

SEQ ID NO: 173330 - DNA, 13 bp, Artificial Sequence
  Oligonucleotide for detection of SNP TSC0043183
aacaaacaatact

SEQ ID NO: 173331 - DNA, 13 bp, Artificial Sequence
  Oligonucleotide for detection of SNP TSC0043183
agtattatttgtt

SEQ ID NO: 173332 - DNA, 13 bp, Artificial Sequence
  Oligonucleotide for detection of SNP TSC0043183
aacaaataatact

SEQ ID NO: 173333 - DNA, 13 bp, Artificial Sequence
  Oligonucleotide for detection of SNP TSC0043183
agtatcgtttgtt

SEQ ID NO: 173334 - DNA, 13 bp, Artificial Sequence
  Oligonucleotide for detection of SNP TSC0043183
aacaaacgatact

SEQ ID NO: 173335 - DNA, 13 bp, Artificial Sequence
  Oligonucleotide for detection of SNP TSC0043184
gtaaattgtatta

SEQ ID NO: 173336 - DNA, 13 bp, Artificial Sequence
  Oligonucleotide for detection of SNP TSC0043184
taatacaatttac

SEQ ID NO: 173337 - DNA, 13 bp, Artificial Sequence
  Oligonucleotide for detection of SNP TSC0043184
gtaaatggtatta

SEQ ID NO: 173338 - DNA, 13 bp, Artificial Sequence
  Oligonucleotide for detection of SNP TSC0043184
taataccatttac

SEQ ID NO: 173339 - DNA, 13 bp, Artificial Sequence
  Oligonucleotide for detection of SNP TSC0043184
gtaaatcgtatta

SEQ ID NO: 173340 - DNA, 13 bp, Artificial Sequence
  Oligonucleotide for detection of SNP TSC0043184
taatacgatttac

SEQ ID NO: 173341 - DNA, 13 bp, Artificial Sequence
  Oligonucleotide for detection of SNP TSC0043184
tgatgtgatttgy

SEQ ID NO: 173342 - DNA, 13 bp, Artificial Sequence
  Oligonucleotide for detection of SNP TSC0043184
rcaaatcacatca

SEQ ID NO: 173343 - DNA, 13 bp, Artificial Sequence
  Oligonucleotide for detection of SNP TSC0043184
tgatgttatttgy

SEQ ID NO: 173344 - DNA, 13 bp, Artificial Sequence
  Oligonucleotide for detection of SNP TSC0043184
rcaaataacatca

SEQ ID NO: 173345 - DNA, 13 bp, Artificial Sequence
  Oligonucleotide for detection of SNP TSC0043184
tgatgcgatttgy

SEQ ID NO: 173346 - DNA, 13 bp, Artificial Sequence
  Oligonucleotide for detection of SNP TSC0043184
rcaaatcgcatca

SEQ ID NO: 173347 - DNA, 13 bp, Artificial Sequence
  Oligonucleotide for detection of SNP TSC0043188
gttaatatgttgy

SEQ ID NO: 173348 - DNA, 13 bp, Artificial Sequence
  Oligonucleotide for detection of SNP TSC0043188
rcaacatattaac

SEQ ID NO: 173349 - DNA, 13 bp, Artificial Sequence
  Oligonucleotide for detection of SNP TSC0043188
gttaatgtgttgy

SEQ ID NO: 173350 - DNA, 13 bp, Artificial Sequence
  Oligonucleotide for detection of SNP TSC0043188
rcaacacattaac

SEQ ID NO: 173351 - DNA, 13 bp, Artificial Sequence
  Oligonucleotide for detection of SNP TSC0043188
gttaatacgttgy

SEQ ID NO: 173352 - DNA, 13 bp, Artificial Sequence
  Oligonucleotide for detection of SNP TSC0043188
rcaacgtattaac

SEQ ID NO: 173353 - DNA, 13 bp, Artificial Sequence
  Oligonucleotide for detection of SNP TSC0043188
gttaatgcgttgy

SEQ ID NO: 173354 - DNA, 13 bp, Artificial Sequence
  Oligonucleotide for detection of SNP TSC0043188
rcaacgcattaac

SEQ ID NO: 173355 - DNA, 13 bp, Artificial Sequence
  Oligonucleotide for detection of SNP TSC0043189
attgtttttggga

SEQ ID NO: 173356 - DNA, 13 bp, Artificial Sequence
  Oligonucleotide for detection of SNP TSC0043189
tcccaaaaacaat

SEQ ID NO: 173357 - DNA, 13 bp, Artificial Sequence
  Oligonucleotide for detection of SNP TSC0043189
ttttagaagtagt

SEQ ID NO: 173358 - DNA, 13 bp, Artificial Sequence
  Oligonucleotide for detection of SNP TSC0043189
actacttctaaaa

SEQ ID NO: 173359 - DNA, 13 bp, Artificial Sequence
  Oligonucleotide for detection of SNP TSC0043189
ttttagtagtagt

SEQ ID NO: 173360 - DNA, 13 bp, Artificial Sequence
  Oligonucleotide for detection of SNP TSC0043189
actactactaaaa

SEQ ID NO: 173361 - DNA, 13 bp, Artificial Sequence
  Oligonucleotide for detection of SNP TSC0043190
aatatagtagtag

SEQ ID NO: 173362 - DNA, 13 bp, Artificial Sequence
  Oligonucleotide for detection of SNP TSC0043190
ctactactatatt

SEQ ID NO: 173363 - DNA, 13 bp, Artificial Sequence
  Oligonucleotide for detection of SNP TSC0043190
aatataatagtag

SEQ ID NO: 173364 - DNA, 13 bp, Artificial Sequence
  Oligonucleotide for detection of SNP TSC0043190
ctactattatatt

SEQ ID NO: 173365 - DNA, 13 bp, Artificial Sequence
  Oligonucleotide for detection of SNP TSC0043191
ggaaaatgtggtt

SEQ ID NO: 173366 - DNA, 13 bp, Artificial Sequence
  Oligonucleotide for detection of SNP TSC0043191
aaccacattttcc

SEQ ID NO: 173367 - DNA, 13 bp, Artificial Sequence
  Oligonucleotide for detection of SNP TSC0043191
ggaaaaggtggtt

SEQ ID NO: 173368 - DNA, 13 bp, Artificial Sequence
  Oligonucleotide for detection of SNP TSC0043191
aaccaccttttcc

SEQ ID NO: 173369 - DNA, 13 bp, Artificial Sequence
  Oligonucleotide for detection of SNP TSC0043192
gtattagtagttt

SEQ ID NO: 173370 - DNA, 13 bp, Artificial Sequence
  Oligonucleotide for detection of SNP TSC0043192
aaactactaatac

SEQ ID NO: 173371 - DNA, 13 bp, Artificial Sequence
  Oligonucleotide for detection of SNP TSC0043192
gtattaatagttt

SEQ ID NO: 173372 - DNA, 13 bp, Artificial Sequence
  Oligonucleotide for detection of SNP TSC0043192
aaactattaatac

SEQ ID NO: 173373 - DNA, 13 bp, Artificial Sequence
  Oligonucleotide for detection of SNP TSC0043193
atggatattttta

SEQ ID NO: 173374 - DNA, 13 bp, Artificial Sequence
  Oligonucleotide for detection of SNP TSC0043193
taaaaatatccat

SEQ ID NO: 173375 - DNA, 13 bp, Artificial Sequence
  Oligonucleotide for detection of SNP TSC0043193
atggatgttttta

SEQ ID NO: 173376 - DNA, 13 bp, Artificial Sequence
  Oligonucleotide for detection of SNP TSC0043193
taaaaacatccat

SEQ ID NO: 173377 - DNA, 13 bp, Artificial Sequence
  Oligonucleotide for detection of SNP TSC0043193
atggacgttttta

SEQ ID NO: 173378 - DNA, 13 bp, Artificial Sequence
  Oligonucleotide for detection of SNP TSC0043193
taaaaacgtccat

SEQ ID NO: 173379 - DNA, 13 bp, Artificial Sequence
  Oligonucleotide for detection of SNP TSC0043193
tgaaaatgtttat

SEQ ID NO: 173380 - DNA, 13 bp, Artificial Sequence
  Oligonucleotide for detection of SNP TSC0043193
ataaacattttca

SEQ ID NO: 173381 - DNA, 13 bp, Artificial Sequence
  Oligonucleotide for detection of SNP TSC0043193
tgaaaacgtttat

SEQ ID NO: 173382 - DNA, 13 bp, Artificial Sequence
  Oligonucleotide for detection of SNP TSC0043193
ataaacgttttca

SEQ ID NO: 173383 - DNA, 13 bp, Artificial Sequence
  Oligonucleotide for detection of SNP TSC0043194
aaagatatgtagg

SEQ ID NO: 173384 - DNA, 13 bp, Artificial Sequence
  Oligonucleotide for detection of SNP TSC0043194
cctacatatcttt

SEQ ID NO: 173385 - DNA, 13 bp, Artificial Sequence
  Oligonucleotide for detection of SNP TSC0043194
aaagatttgtagg

SEQ ID NO: 173386 - DNA, 13 bp, Artificial Sequence
  Oligonucleotide for detection of SNP TSC0043194
cctacaaatcttt

SEQ ID NO: 173387 - DNA, 13 bp, Artificial Sequence
  Oligonucleotide for detection of SNP TSC0043194
tttgtatattttt

SEQ ID NO: 173388 - DNA, 13 bp, Artificial Sequence
  Oligonucleotide for detection of SNP TSC0043194
aaaaatatacaaa

SEQ ID NO: 173389 - DNA, 13 bp, Artificial Sequence
  Oligonucleotide for detection of SNP TSC0043194
tttgtagattttt

SEQ ID NO: 173390 - DNA, 13 bp, Artificial Sequence
  Oligonucleotide for detection of SNP TSC0043194
aaaaatctacaaa

SEQ ID NO: 173391 - DNA, 13 bp, Artificial Sequence
  Oligonucleotide for detection of SNP TSC0043195
ttataagtaaaaa

SEQ ID NO: 173392 - DNA, 13 bp, Artificial Sequence
  Oligonucleotide for detection of SNP TSC0043195
tttttacttataa

SEQ ID NO: 173393 - DNA, 13 bp, Artificial Sequence
  Oligonucleotide for detection of SNP TSC0043196
gatttatgtagty

SEQ ID NO: 173394 - DNA, 13 bp, Artificial Sequence
  Oligonucleotide for detection of SNP TSC0043196
ractacataaatc

SEQ ID NO: 173395 - DNA, 13 bp, Artificial Sequence
  Oligonucleotide for detection of SNP TSC0043196
gatttacgtagty

SEQ ID NO: 173396 - DNA, 13 bp, Artificial Sequence
  Oligonucleotide for detection of SNP TSC0043196
ractacgtaaatc

SEQ ID NO: 173397 - DNA, 13 bp, Artificial Sequence
  Oligonucleotide for detection of SNP TSC0043196
ggttgtgtgaaty

SEQ ID NO: 173398 - DNA, 13 bp, Artificial Sequence
  Oligonucleotide for detection of SNP TSC0043196
rattcacacaacc

SEQ ID NO: 173399 - DNA, 13 bp, Artificial Sequence
  Oligonucleotide for detection of SNP TSC0043196
ggttgtatgaaty

SEQ ID NO: 173400 - DNA, 13 bp, Artificial Sequence
  Oligonucleotide for detection of SNP TSC0043196
rattcatacaacc

SEQ ID NO: 173401 - DNA, 13 bp, Artificial Sequence
  Oligonucleotide for detection of SNP TSC0043196
ggttgcgtgaaty

SEQ ID NO: 173402 - DNA, 13 bp, Artificial Sequence
  Oligonucleotide for detection of SNP TSC0043196
rattcacgcaacc

SEQ ID NO: 173403 - DNA, 13 bp, Artificial Sequence
  Oligonucleotide for detection of SNP TSC0043197
ataaggatttgaa

SEQ ID NO: 173404 - DNA, 13 bp, Artificial Sequence
  Oligonucleotide for detection of SNP TSC0043197
ttcaaatccttat

SEQ ID NO: 173405 - DNA, 13 bp, Artificial Sequence
  Oligonucleotide for detection of SNP TSC0043197
ataaggttttgaa

SEQ ID NO: 173406 - DNA, 13 bp, Artificial Sequence
  Oligonucleotide for detection of SNP TSC0043197
ttcaaaaccttat

SEQ ID NO: 173407 - DNA, 13 bp, Artificial Sequence
  Oligonucleotide for detection of SNP TSC0043197
tttaagtttttgt

SEQ ID NO: 173408 - DNA, 13 bp, Artificial Sequence
  Oligonucleotide for detection of SNP TSC0043197
acaaaaacttaaa

SEQ ID NO: 173409 - DNA, 13 bp, Artificial Sequence
  Oligonucleotide for detection of SNP TSC0043197
tttaagattttgt

SEQ ID NO: 173410 - DNA, 13 bp, Artificial Sequence
  Oligonucleotide for detection of SNP TSC0043197
acaaaatcttaaa

SEQ ID NO: 173411 - DNA, 13 bp, Artificial Sequence
  Oligonucleotide for detection of SNP TSC0043198
gaagagattatat

SEQ ID NO: 173412 - DNA, 13 bp, Artificial Sequence
  Oligonucleotide for detection of SNP TSC0043198
atataatctcttc

SEQ ID NO: 173413 - DNA, 13 bp, Artificial Sequence
  Oligonucleotide for detection of SNP TSC0043198
gaagaggttatat

SEQ ID NO: 173414 - DNA, 13 bp, Artificial Sequence
  Oligonucleotide for detection of SNP TSC0043198
atataacctcttc

SEQ ID NO: 173415 - DNA, 13 bp, Artificial Sequence
  Oligonucleotide for detection of SNP TSC0043199
ttttgtgttatty

SEQ ID NO: 173416 - DNA, 13 bp, Artificial Sequence
  Oligonucleotide for detection of SNP TSC0043199
raataacacaaaa

SEQ ID NO: 173417 - DNA, 13 bp, Artificial Sequence
  Oligonucleotide for detection of SNP TSC0043201
gatataaaagatt

SEQ ID NO: 173418 - DNA, 13 bp, Artificial Sequence
  Oligonucleotide for detection of SNP TSC0043201
aatcttttatatc

SEQ ID NO: 173419 - DNA, 13 bp, Artificial Sequence
  Oligonucleotide for detection of SNP TSC0043201
gatatagaagatt

SEQ ID NO: 173420 - DNA, 13 bp, Artificial Sequence
  Oligonucleotide for detection of SNP TSC0043201
aatcttctatatc

SEQ ID NO: 173421 - DNA, 13 bp, Artificial Sequence
  Oligonucleotide for detection of SNP TSC0043204
taatgatgatgtg

SEQ ID NO: 173422 - DNA, 13 bp, Artificial Sequence
  Oligonucleotide for detection of SNP TSC0043204
cacatcatcatta

SEQ ID NO: 173423 - DNA, 13 bp, Artificial Sequence
  Oligonucleotide for detection of SNP TSC0043204
taatgacgatgtg

SEQ ID NO: 173424 - DNA, 13 bp, Artificial Sequence
  Oligonucleotide for detection of SNP TSC0043204
cacatcgtcatta

SEQ ID NO: 173425 - DNA, 13 bp, Artificial Sequence
  Oligonucleotide for detection of SNP TSC0043204
tatattgttattg

SEQ ID NO: 173426 - DNA, 13 bp, Artificial Sequence
  Oligonucleotide for detection of SNP TSC0043204
caataacaatata

SEQ ID NO: 173427 - DNA, 13 bp, Artificial Sequence
  Oligonucleotide for detection of SNP TSC0043204
tatattattattg

SEQ ID NO: 173428 - DNA, 13 bp, Artificial Sequence
  Oligonucleotide for detection of SNP TSC0043204
caataataatata

SEQ ID NO: 173429 - DNA, 13 bp, Artificial Sequence
  Oligonucleotide for detection of SNP TSC0043204
tatatcgttattg

SEQ ID NO: 173430 - DNA, 13 bp, Artificial Sequence
  Oligonucleotide for detection of SNP TSC0043204
caataacgatata

SEQ ID NO: 173431 - DNA, 13 bp, Artificial Sequence
  Oligonucleotide for detection of SNP TSC0043205
aggtgatgagagg

SEQ ID NO: 173432 - DNA, 13 bp, Artificial Sequence
  Oligonucleotide for detection of SNP TSC0043205
cctctcatcacct

SEQ ID NO: 173433 - DNA, 13 bp, Artificial Sequence
  Oligonucleotide for detection of SNP TSC0043205
aggtgacgagagg

SEQ ID NO: 173434 - DNA, 13 bp, Artificial Sequence
  Oligonucleotide for detection of SNP TSC0043205
cctctcgtcacct

SEQ ID NO: 173435 - DNA, 13 bp, Artificial Sequence
  Oligonucleotide for detection of SNP TSC0043206
agaggtaggggtt

SEQ ID NO: 173436 - DNA, 13 bp, Artificial Sequence
  Oligonucleotide for detection of SNP TSC0043206
aacccctacctct

SEQ ID NO: 173437 - DNA, 13 bp, Artificial Sequence
  Oligonucleotide for detection of SNP TSC0043206
agaggtgggggtt

SEQ ID NO: 173438 - DNA, 13 bp, Artificial Sequence
  Oligonucleotide for detection of SNP TSC0043206
aacccccacctct

SEQ ID NO: 173439 - DNA, 13 bp, Artificial Sequence
  Oligonucleotide for detection of SNP TSC0043206
agaggcgggggtt

SEQ ID NO: 173440 - DNA, 13 bp, Artificial Sequence
  Oligonucleotide for detection of SNP TSC0043206
aacccccgcctct

SEQ ID NO: 173441 - DNA, 13 bp, Artificial Sequence
  Oligonucleotide for detection of SNP TSC0043206
agttttcgttttt

SEQ ID NO: 173442 - DNA, 13 bp, Artificial Sequence
  Oligonucleotide for detection of SNP TSC0043206
aaaaacgaaaact

SEQ ID NO: 173443 - DNA, 13 bp, Artificial Sequence
  Oligonucleotide for detection of SNP TSC0043208
ggttggttaagaa

SEQ ID NO: 173444 - DNA, 13 bp, Artificial Sequence
  Oligonucleotide for detection of SNP TSC0043208
ttcttaaccaacc

SEQ ID NO: 173445 - DNA, 13 bp, Artificial Sequence
  Oligonucleotide for detection of SNP TSC0043208
ggttgggtaagaa

SEQ ID NO: 173446 - DNA, 13 bp, Artificial Sequence
  Oligonucleotide for detection of SNP TSC0043208
ttcttacccaacc

SEQ ID NO: 173447 - DNA, 13 bp, Artificial Sequence
  Oligonucleotide for detection of SNP TSC0043208
tttttgattagty

SEQ ID NO: 173448 - DNA, 13 bp, Artificial Sequence
  Oligonucleotide for detection of SNP TSC0043208
ractaatcaaaaa

SEQ ID NO: 173449 - DNA, 13 bp, Artificial Sequence
  Oligonucleotide for detection of SNP TSC0043208
tttttgtttagty

SEQ ID NO: 173450 - DNA, 13 bp, Artificial Sequence
  Oligonucleotide for detection of SNP TSC0043208
ractaaacaaaaa

SEQ ID NO: 173451 - DNA, 13 bp, Artificial Sequence
  Oligonucleotide for detection of SNP TSC0043209
ggaaaggttgtgt

SEQ ID NO: 173452 - DNA, 13 bp, Artificial Sequence
  Oligonucleotide for detection of SNP TSC0043209
acacaacctttcc

SEQ ID NO: 173453 - DNA, 13 bp, Artificial Sequence
  Oligonucleotide for detection of SNP TSC0043209
ggaaagattgtgt

SEQ ID NO: 173454 - DNA, 13 bp, Artificial Sequence
  Oligonucleotide for detection of SNP TSC0043209
acacaatctttcc

SEQ ID NO: 173455 - DNA, 13 bp, Artificial Sequence
  Oligonucleotide for detection of SNP TSC0043210
taaatatggaagy

SEQ ID NO: 173456 - DNA, 13 bp, Artificial Sequence
  Oligonucleotide for detection of SNP TSC0043210
rcttccatattta

SEQ ID NO: 173457 - DNA, 13 bp, Artificial Sequence
  Oligonucleotide for detection of SNP TSC0043210
taaatacggaagy

SEQ ID NO: 173458 - DNA, 13 bp, Artificial Sequence
  Oligonucleotide for detection of SNP TSC0043210
rcttccgtattta

SEQ ID NO: 173459 - DNA, 13 bp, Artificial Sequence
  Oligonucleotide for detection of SNP TSC0043210
gtttttgtatttg

SEQ ID NO: 173460 - DNA, 13 bp, Artificial Sequence
  Oligonucleotide for detection of SNP TSC0043210
caaatacaaaaac

SEQ ID NO: 173461 - DNA, 13 bp, Artificial Sequence
  Oligonucleotide for detection of SNP TSC0043210
gtttttatatttg

SEQ ID NO: 173462 - DNA, 13 bp, Artificial Sequence
  Oligonucleotide for detection of SNP TSC0043210
caaatataaaaac

SEQ ID NO: 173463 - DNA, 13 bp, Artificial Sequence
  Oligonucleotide for detection of SNP TSC0043210
gttttcgtatttg

SEQ ID NO: 173464 - DNA, 13 bp, Artificial Sequence
  Oligonucleotide for detection of SNP TSC0043210
caaatacgaaaac

SEQ ID NO: 173465 - DNA, 13 bp, Artificial Sequence
  Oligonucleotide for detection of SNP TSC0043211
gagttaatattgg

SEQ ID NO: 173466 - DNA, 13 bp, Artificial Sequence
  Oligonucleotide for detection of SNP TSC0043211
ccaatattaactc

SEQ ID NO: 173467 - DNA, 13 bp, Artificial Sequence
  Oligonucleotide for detection of SNP TSC0043211
gagttagtattgg

SEQ ID NO: 173468 - DNA, 13 bp, Artificial Sequence
  Oligonucleotide for detection of SNP TSC0043211
ccaatactaactc

SEQ ID NO: 173469 - DNA, 13 bp, Artificial Sequence
  Oligonucleotide for detection of SNP TSC0043212
gggtaagtaataa

SEQ ID NO: 173470 - DNA, 13 bp, Artificial Sequence
  Oligonucleotide for detection of SNP TSC0043212
ttattacttaccc

SEQ ID NO: 173471 - DNA, 13 bp, Artificial Sequence
  Oligonucleotide for detection of SNP TSC0043212
gggtaaataataa

SEQ ID NO: 173472 - DNA, 13 bp, Artificial Sequence
  Oligonucleotide for detection of SNP TSC0043212
ttattatttaccc

SEQ ID NO: 173473 - DNA, 13 bp, Artificial Sequence
  Oligonucleotide for detection of SNP TSC0043213
tgtggagtatttt

SEQ ID NO: 173474 - DNA, 13 bp, Artificial Sequence
  Oligonucleotide for detection of SNP TSC0043213
aaaatactccaca

SEQ ID NO: 173475 - DNA, 13 bp, Artificial Sequence
  Oligonucleotide for detection of SNP TSC0043213
tgtggaatatttt

SEQ ID NO: 173476 - DNA, 13 bp, Artificial Sequence
  Oligonucleotide for detection of SNP TSC0043213
aaaatattccaca

SEQ ID NO: 173477 - DNA, 13 bp, Artificial Sequence
  Oligonucleotide for detection of SNP TSC0043213
cgtggagtatttt

SEQ ID NO: 173478 - DNA, 13 bp, Artificial Sequence
  Oligonucleotide for detection of SNP TSC0043213
aaaatactccacg

SEQ ID NO: 173479 - DNA, 13 bp, Artificial Sequence
  Oligonucleotide for detection of SNP TSC0043213
cgtggaatatttt

SEQ ID NO: 173480 - DNA, 13 bp, Artificial Sequence
  Oligonucleotide for detection of SNP TSC0043213
aaaatattccacg

SEQ ID NO: 173481 - DNA, 13 bp, Artificial Sequence
  Oligonucleotide for detection of SNP TSC0043214
tttatttggttty

SEQ ID NO: 173482 - DNA, 13 bp, Artificial Sequence
  Oligonucleotide for detection of SNP TSC0043214
raaaccaaataaa

SEQ ID NO: 173483 - DNA, 13 bp, Artificial Sequence
  Oligonucleotide for detection of SNP TSC0043214
tttattcggttty

SEQ ID NO: 173484 - DNA, 13 bp, Artificial Sequence
  Oligonucleotide for detection of SNP TSC0043214
raaaccgaataaa

SEQ ID NO: 173485 - DNA, 13 bp, Artificial Sequence
  Oligonucleotide for detection of SNP TSC0043214
gagattgaatgga

SEQ ID NO: 173486 - DNA, 13 bp, Artificial Sequence
  Oligonucleotide for detection of SNP TSC0043214
tccattcaatctc

SEQ ID NO: 173487 - DNA, 13 bp, Artificial Sequence
  Oligonucleotide for detection of SNP TSC0043214
gagattaaatgga

SEQ ID NO: 173488 - DNA, 13 bp, Artificial Sequence
  Oligonucleotide for detection of SNP TSC0043214
tccatttaatctc

SEQ ID NO: 173489 - DNA, 13 bp, Artificial Sequence
  Oligonucleotide for detection of SNP TSC0043214
gagatcgaatgga

SEQ ID NO: 173490 - DNA, 13 bp, Artificial Sequence
  Oligonucleotide for detection of SNP TSC0043214
tccattcgatctc

SEQ ID NO: 173491 - DNA, 13 bp, Artificial Sequence
  Oligonucleotide for detection of SNP TSC0043217
tatttgagtatta

SEQ ID NO: 173492 - DNA, 13 bp, Artificial Sequence
  Oligonucleotide for detection of SNP TSC0043217
taatactcaaata

SEQ ID NO: 173493 - DNA, 13 bp, Artificial Sequence
  Oligonucleotide for detection of SNP TSC0043217
tatttgtgtatta

SEQ ID NO: 173494 - DNA, 13 bp, Artificial Sequence
  Oligonucleotide for detection of SNP TSC0043217
taatacacaaata

SEQ ID NO: 173495 - DNA, 13 bp, Artificial Sequence
  Oligonucleotide for detection of SNP TSC0043217
tattcgagtatta

SEQ ID NO: 173496 - DNA, 13 bp, Artificial Sequence
  Oligonucleotide for detection of SNP TSC0043217
taatactcgaata

SEQ ID NO: 173497 - DNA, 13 bp, Artificial Sequence
  Oligonucleotide for detection of SNP TSC0043217
tattcgtgtatta

SEQ ID NO: 173498 - DNA, 13 bp, Artificial Sequence
  Oligonucleotide for detection of SNP TSC0043217
taatacacgaata

SEQ ID NO: 173499 - DNA, 13 bp, Artificial Sequence
  Oligonucleotide for detection of SNP TSC0043217
taatatttgaata

SEQ ID NO: 173500 - DNA, 13 bp, Artificial Sequence
  Oligonucleotide for detection of SNP TSC0043217
tattcaaatatta

SEQ ID NO: 173501 - DNA, 13 bp, Artificial Sequence
  Oligonucleotide for detection of SNP TSC0043217
taatatatgaata

SEQ ID NO: 173502 - DNA, 13 bp, Artificial Sequence
  Oligonucleotide for detection of SNP TSC0043217
tattcatatatta

SEQ ID NO: 173503 - DNA, 13 bp, Artificial Sequence
  Oligonucleotide for detection of SNP TSC0043217
taatattcgaata

SEQ ID NO: 173504 - DNA, 13 bp, Artificial Sequence
  Oligonucleotide for detection of SNP TSC0043217
tattcgaatatta

SEQ ID NO: 173505 - DNA, 13 bp, Artificial Sequence
  Oligonucleotide for detection of SNP TSC0043217
taatatacgaata

SEQ ID NO: 173506 - DNA, 13 bp, Artificial Sequence
  Oligonucleotide for detection of SNP TSC0043217
tattcgtatatta

SEQ ID NO: 173507 - DNA, 13 bp, Artificial Sequence
  Oligonucleotide for detection of SNP TSC0043218
tggattatgttgy

SEQ ID NO: 173508 - DNA, 13 bp, Artificial Sequence
  Oligonucleotide for detection of SNP TSC0043218
rcaacataatcca

SEQ ID NO: 173509 - DNA, 13 bp, Artificial Sequence
  Oligonucleotide for detection of SNP TSC0043218
tggattgtgttgy

SEQ ID NO: 173510 - DNA, 13 bp, Artificial Sequence
  Oligonucleotide for detection of SNP TSC0043218
rcaacacaatcca

SEQ ID NO: 173511 - DNA, 13 bp, Artificial Sequence
  Oligonucleotide for detection of SNP TSC0043218
tggatcgtgttgy

SEQ ID NO: 173512 - DNA, 13 bp, Artificial Sequence
  Oligonucleotide for detection of SNP TSC0043218
rcaacacgatcca

SEQ ID NO: 173513 - DNA, 13 bp, Artificial Sequence
  Oligonucleotide for detection of SNP TSC0043221
gtgtgtttttgaa

SEQ ID NO: 173514 - DNA, 13 bp, Artificial Sequence
  Oligonucleotide for detection of SNP TSC0043221
ttcaaaaacacac

SEQ ID NO: 173515 - DNA, 13 bp, Artificial Sequence
  Oligonucleotide for detection of SNP TSC0043221
gtgtgtgtttgaa

SEQ ID NO: 173516 - DNA, 13 bp, Artificial Sequence
  Oligonucleotide for detection of SNP TSC0043221
ttcaaacacacac

SEQ ID NO: 173517 - DNA, 13 bp, Artificial Sequence
  Oligonucleotide for detection of SNP TSC0043221
tttagagatatay

SEQ ID NO: 173518 - DNA, 13 bp, Artificial Sequence
  Oligonucleotide for detection of SNP TSC0043221
rtatatctctaaa

SEQ ID NO: 173519 - DNA, 13 bp, Artificial Sequence
  Oligonucleotide for detection of SNP TSC0043221
tttagatatatay

SEQ ID NO: 173520 - DNA, 13 bp, Artificial Sequence
  Oligonucleotide for detection of SNP TSC0043221
rtatatatctaaa

SEQ ID NO: 173521 - DNA, 13 bp, Artificial Sequence
  Oligonucleotide for detection of SNP TSC0043222
gaaatggtatggg

SEQ ID NO: 173522 - DNA, 13 bp, Artificial Sequence
  Oligonucleotide for detection of SNP TSC0043222
cccataccatttc

SEQ ID NO: 173523 - DNA, 13 bp, Artificial Sequence
  Oligonucleotide for detection of SNP TSC0043222
gaaatgatatggg

SEQ ID NO: 173524 - DNA, 13 bp, Artificial Sequence
  Oligonucleotide for detection of SNP TSC0043222
cccatatcatttc

SEQ ID NO: 173525 - DNA, 13 bp, Artificial Sequence
  Oligonucleotide for detection of SNP TSC0043222
gaaacggtatggg

SEQ ID NO: 173526 - DNA, 13 bp, Artificial Sequence
  Oligonucleotide for detection of SNP TSC0043222
cccataccgtttc

SEQ ID NO: 173527 - DNA, 13 bp, Artificial Sequence
  Oligonucleotide for detection of SNP TSC0043222
gaaacgatatggg

SEQ ID NO: 173528 - DNA, 13 bp, Artificial Sequence
  Oligonucleotide for detection of SNP TSC0043222
cccatatcgtttc

SEQ ID NO: 173529 - DNA, 13 bp, Artificial Sequence
  Oligonucleotide for detection of SNP TSC0043223
aagtgggttttty

SEQ ID NO: 173530 - DNA, 13 bp, Artificial Sequence
  Oligonucleotide for detection of SNP TSC0043223
raaaaacccactt

SEQ ID NO: 173531 - DNA, 13 bp, Artificial Sequence
  Oligonucleotide for detection of SNP TSC0043223
aagtggattttty

SEQ ID NO: 173532 - DNA, 13 bp, Artificial Sequence
  Oligonucleotide for detection of SNP TSC0043223
raaaaatccactt

SEQ ID NO: 173533 - DNA, 13 bp, Artificial Sequence
  Oligonucleotide for detection of SNP TSC0043224
tttttgttgaata

SEQ ID NO: 173534 - DNA, 13 bp, Artificial Sequence
  Oligonucleotide for detection of SNP TSC0043224
tattcaacaaaaa

SEQ ID NO: 173535 - DNA, 13 bp, Artificial Sequence
  Oligonucleotide for detection of SNP TSC0043224
tttttggtgaata

SEQ ID NO: 173536 - DNA, 13 bp, Artificial Sequence
  Oligonucleotide for detection of SNP TSC0043224
tattcaccaaaaa

SEQ ID NO: 173537 - DNA, 13 bp, Artificial Sequence
  Oligonucleotide for detection of SNP TSC0043224
tatttaataagaa

SEQ ID NO: 173538 - DNA, 13 bp, Artificial Sequence
  Oligonucleotide for detection of SNP TSC0043224
ttcttattaaata

SEQ ID NO: 173539 - DNA, 13 bp, Artificial Sequence
  Oligonucleotide for detection of SNP TSC0043224
tatttattaagaa

SEQ ID NO: 173540 - DNA, 13 bp, Artificial Sequence
  Oligonucleotide for detection of SNP TSC0043224
ttcttaataaata

SEQ ID NO: 173541 - DNA, 13 bp, Artificial Sequence
  Oligonucleotide for detection of SNP TSC0043225
gaggattgggatt

SEQ ID NO: 173542 - DNA, 13 bp, Artificial Sequence
  Oligonucleotide for detection of SNP TSC0043225
aatcccaatcctc

SEQ ID NO: 173543 - DNA, 13 bp, Artificial Sequence
  Oligonucleotide for detection of SNP TSC0043225
gaggatggggatt

SEQ ID NO: 173544 - DNA, 13 bp, Artificial Sequence
  Oligonucleotide for detection of SNP TSC0043225
aatccccatcctc

SEQ ID NO: 173545 - DNA, 13 bp, Artificial Sequence
  Oligonucleotide for detection of SNP TSC0043225
gaggacggggatt

SEQ ID NO: 173546 - DNA, 13 bp, Artificial Sequence
  Oligonucleotide for detection of SNP TSC0043225
aatccccgtcctc

SEQ ID NO: 173547 - DNA, 13 bp, Artificial Sequence
  Oligonucleotide for detection of SNP TSC0006326
tatgaaaagaagt

SEQ ID NO: 173548 - DNA, 13 bp, Artificial Sequence
  Oligonucleotide for detection of SNP TSC0006326
acttcttttcata

SEQ ID NO: 173549 - DNA, 13 bp, Artificial Sequence
  Oligonucleotide for detection of SNP TSC0006326
tatgaagagaagt

SEQ ID NO: 173550 - DNA, 13 bp, Artificial Sequence
  Oligonucleotide for detection of SNP TSC0006326
acttctcttcata

SEQ ID NO: 173551 - DNA, 13 bp, Artificial Sequence
  Oligonucleotide for detection of SNP TSC0043227
ttgatgtggtttt

SEQ ID NO: 173552 - DNA, 13 bp, Artificial Sequence
  Oligonucleotide for detection of SNP TSC0043227
aaaaccacatcaa

SEQ ID NO: 173553 - DNA, 13 bp, Artificial Sequence
  Oligonucleotide for detection of SNP TSC0043227
ttgatgcggtttt

SEQ ID NO: 173554 - DNA, 13 bp, Artificial Sequence
  Oligonucleotide for detection of SNP TSC0043227
aaaaccgcatcaa

SEQ ID NO: 173555 - DNA, 13 bp, Artificial Sequence
  Oligonucleotide for detection of SNP TSC0043227
aaggttgtattaa

SEQ ID NO: 173556 - DNA, 13 bp, Artificial Sequence
  Oligonucleotide for detection of SNP TSC0043227
ttaatacaacctt

SEQ ID NO: 173557 - DNA, 13 bp, Artificial Sequence
  Oligonucleotide for detection of SNP TSC0043227
aaggttatattaa

SEQ ID NO: 173558 - DNA, 13 bp, Artificial Sequence
  Oligonucleotide for detection of SNP TSC0043227
ttaatataacctt

SEQ ID NO: 173559 - DNA, 13 bp, Artificial Sequence
  Oligonucleotide for detection of SNP TSC0043227
aaggtcgtattaa

SEQ ID NO: 173560 - DNA, 13 bp, Artificial Sequence
  Oligonucleotide for detection of SNP TSC0043227
ttaatacgacctt

SEQ ID NO: 173561 - DNA, 13 bp, Artificial Sequence
  Oligonucleotide for detection of SNP TSC0043229
tattgatggatga

SEQ ID NO: 173562 - DNA, 13 bp, Artificial Sequence
  Oligonucleotide for detection of SNP TSC0043229
tcatccatcaata

SEQ ID NO: 173563 - DNA, 13 bp, Artificial Sequence
  Oligonucleotide for detection of SNP TSC0043229
tattgacggatga

SEQ ID NO: 173564 - DNA, 13 bp, Artificial Sequence
  Oligonucleotide for detection of SNP TSC0043229
tcatccgtcaata

SEQ ID NO: 173565 - DNA, 13 bp, Artificial Sequence
  Oligonucleotide for detection of SNP TSC0043229
tattgatggacga

SEQ ID NO: 173566 - DNA, 13 bp, Artificial Sequence
  Oligonucleotide for detection of SNP TSC0043229
tcgtccatcaata

SEQ ID NO: 173567 - DNA, 13 bp, Artificial Sequence
  Oligonucleotide for detection of SNP TSC0043229
tattgacggacga

SEQ ID NO: 173568 - DNA, 13 bp, Artificial Sequence
  Oligonucleotide for detection of SNP TSC0043229
tcgtccgtcaata

SEQ ID NO: 173569 - DNA, 13 bp, Artificial Sequence
  Oligonucleotide for detection of SNP TSC0043229
ttgtttgttagtg

SEQ ID NO: 173570 - DNA, 13 bp, Artificial Sequence
  Oligonucleotide for detection of SNP TSC0043229
cactaacaaacaa

SEQ ID NO: 173571 - DNA, 13 bp, Artificial Sequence
  Oligonucleotide for detection of SNP TSC0043229
ttgtttattagtg

SEQ ID NO: 173572 - DNA, 13 bp, Artificial Sequence
  Oligonucleotide for detection of SNP TSC0043229
cactaataaacaa

SEQ ID NO: 173573 - DNA, 13 bp, Artificial Sequence
  Oligonucleotide for detection of SNP TSC0043229
tcgtttgttagtg

SEQ ID NO: 173574 - DNA, 13 bp, Artificial Sequence
  Oligonucleotide for detection of SNP TSC0043229
cactaacaaacga

SEQ ID NO: 173575 - DNA, 13 bp, Artificial Sequence
  Oligonucleotide for detection of SNP TSC0043229
tcgtttattagtg

SEQ ID NO: 173576 - DNA, 13 bp, Artificial Sequence
  Oligonucleotide for detection of SNP TSC0043229
cactaataaacga

SEQ ID NO: 173577 - DNA, 13 bp, Artificial Sequence
  Oligonucleotide for detection of SNP TSC0043229
ttgttcgttagtg

SEQ ID NO: 173578 - DNA, 13 bp, Artificial Sequence
  Oligonucleotide for detection of SNP TSC0043229
cactaacgaacaa

SEQ ID NO: 173579 - DNA, 13 bp, Artificial Sequence
  Oligonucleotide for detection of SNP TSC0043229
tcgttcgttagtg

SEQ ID NO: 173580 - DNA, 13 bp, Artificial Sequence
  Oligonucleotide for detection of SNP TSC0043229
cactaacgaacga

SEQ ID NO: 173581 - DNA, 13 bp, Artificial Sequence
  Oligonucleotide for detection of SNP TSC0043230
gatggatgaatgg

SEQ ID NO: 173582 - DNA, 13 bp, Artificial Sequence
  Oligonucleotide for detection of SNP TSC0043230
ccattcatccatc

SEQ ID NO: 173583 - DNA, 13 bp, Artificial Sequence
  Oligonucleotide for detection of SNP TSC0043230
gacggatgaatgg

SEQ ID NO: 173584 - DNA, 13 bp, Artificial Sequence
  Oligonucleotide for detection of SNP TSC0043230
ccattcatccgtc

SEQ ID NO: 173585 - DNA, 13 bp, Artificial Sequence
  Oligonucleotide for detection of SNP TSC0043230
gatggacgaatgg

SEQ ID NO: 173586 - DNA, 13 bp, Artificial Sequence
  Oligonucleotide for detection of SNP TSC0043230
ccattcgtccatc

SEQ ID NO: 173587 - DNA, 13 bp, Artificial Sequence
  Oligonucleotide for detection of SNP TSC0043230
gacggacgaatgg

SEQ ID NO: 173588 - DNA, 13 bp, Artificial Sequence
  Oligonucleotide for detection of SNP TSC0043230
ccattcgtccgtc

SEQ ID NO: 173589 - DNA, 13 bp, Artificial Sequence
  Oligonucleotide for detection of SNP TSC0043230
ttatttattcgty

SEQ ID NO: 173590 - DNA, 13 bp, Artificial Sequence
  Oligonucleotide for detection of SNP TSC0043230
racgaataaataa

SEQ ID NO: 173591 - DNA, 13 bp, Artificial Sequence
  Oligonucleotide for detection of SNP TSC0043231
ttgtggaattttg

SEQ ID NO: 173592 - DNA, 13 bp, Artificial Sequence
  Oligonucleotide for detection of SNP TSC0043231
caaaattccacaa

SEQ ID NO: 173593 - DNA, 13 bp, Artificial Sequence
  Oligonucleotide for detection of SNP TSC0043231
ttgtggtattttg

SEQ ID NO: 173594 - DNA, 13 bp, Artificial Sequence
  Oligonucleotide for detection of SNP TSC0043231
caaaataccacaa

SEQ ID NO: 173595 - DNA, 13 bp, Artificial Sequence
  Oligonucleotide for detection of SNP TSC0043231
tagaattttatag

SEQ ID NO: 173596 - DNA, 13 bp, Artificial Sequence
  Oligonucleotide for detection of SNP TSC0043231
ctataaaattcta

SEQ ID NO: 173597 - DNA, 13 bp, Artificial Sequence
  Oligonucleotide for detection of SNP TSC0043231
tagaatattatag

SEQ ID NO: 173598 - DNA, 13 bp, Artificial Sequence
  Oligonucleotide for detection of SNP TSC0043231
ctataatattcta

SEQ ID NO: 173599 - DNA, 13 bp, Artificial Sequence
  Oligonucleotide for detection of SNP TSC0043234
gaaagagaagtty

SEQ ID NO: 173600 - DNA, 13 bp, Artificial Sequence
  Oligonucleotide for detection of SNP TSC0043234
raacttctctttc

SEQ ID NO: 173601 - DNA, 13 bp, Artificial Sequence
  Oligonucleotide for detection of SNP TSC0043234
gaaagaaaagtty

SEQ ID NO: 173602 - DNA, 13 bp, Artificial Sequence
  Oligonucleotide for detection of SNP TSC0043234
raacttttctttc

SEQ ID NO: 173603 - DNA, 13 bp, Artificial Sequence
  Oligonucleotide for detection of SNP TSC0043235
atggtgattaatt

SEQ ID NO: 173604 - DNA, 13 bp, Artificial Sequence
  Oligonucleotide for detection of SNP TSC0043235
aattaatcaccat

SEQ ID NO: 173605 - DNA, 13 bp, Artificial Sequence
  Oligonucleotide for detection of SNP TSC0043235
acggtggttaatt

SEQ ID NO: 173606 - DNA, 13 bp, Artificial Sequence
  Oligonucleotide for detection of SNP TSC0043235
aattaaccaccgt

SEQ ID NO: 173607 - DNA, 13 bp, Artificial Sequence
  Oligonucleotide for detection of SNP TSC0043235
acggtgattaatt

SEQ ID NO: 173608 - DNA, 13 bp, Artificial Sequence
  Oligonucleotide for detection of SNP TSC0043235
aattaatcaccgt

SEQ ID NO: 173609 - DNA, 13 bp, Artificial Sequence
  Oligonucleotide for detection of SNP TSC0043236
aggagggagggta

SEQ ID NO: 173610 - DNA, 13 bp, Artificial Sequence
  Oligonucleotide for detection of SNP TSC0043236
taccctccctcct

SEQ ID NO: 173611 - DNA, 13 bp, Artificial Sequence
  Oligonucleotide for detection of SNP TSC0043236
aggaggaagggta

SEQ ID NO: 173612 - DNA, 13 bp, Artificial Sequence
  Oligonucleotide for detection of SNP TSC0043236
tacccttcctcct

SEQ ID NO: 173613 - DNA, 13 bp, Artificial Sequence
  Oligonucleotide for detection of SNP TSC0043237
tatatagtaattt

SEQ ID NO: 173614 - DNA, 13 bp, Artificial Sequence
  Oligonucleotide for detection of SNP TSC0043237
aaattactatata

SEQ ID NO: 173615 - DNA, 13 bp, Artificial Sequence
  Oligonucleotide for detection of SNP TSC0043237
aaattaatatgtg

SEQ ID NO: 173616 - DNA, 13 bp, Artificial Sequence
  Oligonucleotide for detection of SNP TSC0043237
cacatattaattt

SEQ ID NO: 173617 - DNA, 13 bp, Artificial Sequence
  Oligonucleotide for detection of SNP TSC0043237
aaattattatgtg

SEQ ID NO: 173618 - DNA, 13 bp, Artificial Sequence
  Oligonucleotide for detection of SNP TSC0043237
cacataataattt

SEQ ID NO: 173619 - DNA, 13 bp, Artificial Sequence
  Oligonucleotide for detection of SNP TSC0043238
aaaaaaagagagy

SEQ ID NO: 173620 - DNA, 13 bp, Artificial Sequence
  Oligonucleotide for detection of SNP TSC0043238
rctctcttttttt

SEQ ID NO: 173621 - DNA, 13 bp, Artificial Sequence
  Oligonucleotide for detection of SNP TSC0043238
aaaaaatgagagy

SEQ ID NO: 173622 - DNA, 13 bp, Artificial Sequence
  Oligonucleotide for detection of SNP TSC0043238
rctctcatttttt

SEQ ID NO: 173623 - DNA, 13 bp, Artificial Sequence
  Oligonucleotide for detection of SNP TSC0010926
aatgtatgtgaaa

SEQ ID NO: 173624 - DNA, 13 bp, Artificial Sequence
  Oligonucleotide for detection of SNP TSC0010926
tttcacatacatt

SEQ ID NO: 173625 - DNA, 13 bp, Artificial Sequence
  Oligonucleotide for detection of SNP TSC0010926
aatgtaggtgaaa

SEQ ID NO: 173626 - DNA, 13 bp, Artificial Sequence
  Oligonucleotide for detection of SNP TSC0010926
tttcacctacatt

SEQ ID NO: 173627 - DNA, 13 bp, Artificial Sequence
  Oligonucleotide for detection of SNP TSC0010926
ttttatttgtatt

SEQ ID NO: 173628 - DNA, 13 bp, Artificial Sequence
  Oligonucleotide for detection of SNP TSC0010926
aatacaaataaaa

SEQ ID NO: 173629 - DNA, 13 bp, Artificial Sequence
  Oligonucleotide for detection of SNP TSC0043239
tttttcgatttat

SEQ ID NO: 173630 - DNA, 13 bp, Artificial Sequence
  Oligonucleotide for detection of SNP TSC0043239
ataaatcgaaaaa

SEQ ID NO: 173631 - DNA, 13 bp, Artificial Sequence
  Oligonucleotide for detection of SNP TSC0043239
ataagttggggaa

SEQ ID NO: 173632 - DNA, 13 bp, Artificial Sequence
  Oligonucleotide for detection of SNP TSC0043239
ttccccaacttat

SEQ ID NO: 173633 - DNA, 13 bp, Artificial Sequence
  Oligonucleotide for detection of SNP TSC0043239
ataagtcggggaa

SEQ ID NO: 173634 - DNA, 13 bp, Artificial Sequence
  Oligonucleotide for detection of SNP TSC0043239
ttccccgacttat

SEQ ID NO: 173635 - DNA, 13 bp, Artificial Sequence
  Oligonucleotide for detection of SNP TSC0043240
ttttggagttgaa

SEQ ID NO: 173636 - DNA, 13 bp, Artificial Sequence
  Oligonucleotide for detection of SNP TSC0043240
ttcaactccaaaa

SEQ ID NO: 173637 - DNA, 13 bp, Artificial Sequence
  Oligonucleotide for detection of SNP TSC0043240
ttttggggttgaa

SEQ ID NO: 173638 - DNA, 13 bp, Artificial Sequence
  Oligonucleotide for detection of SNP TSC0043240
ttcaaccccaaaa

SEQ ID NO: 173639 - DNA, 13 bp, Artificial Sequence
  Oligonucleotide for detection of SNP TSC0043245
gaattttgatttg

SEQ ID NO: 173640 - DNA, 13 bp, Artificial Sequence
  Oligonucleotide for detection of SNP TSC0043245
caaatcaaaattc

SEQ ID NO: 173641 - DNA, 13 bp, Artificial Sequence
  Oligonucleotide for detection of SNP TSC0043245
gaatttcgatttg

SEQ ID NO: 173642 - DNA, 13 bp, Artificial Sequence
  Oligonucleotide for detection of SNP TSC0043245
caaatcgaaattc

SEQ ID NO: 173643 - DNA, 13 bp, Artificial Sequence
  Oligonucleotide for detection of SNP TSC0043245
taaattggaatty

SEQ ID NO: 173644 - DNA, 13 bp, Artificial Sequence
  Oligonucleotide for detection of SNP TSC0043245
raattccaattta

SEQ ID NO: 173645 - DNA, 13 bp, Artificial Sequence
  Oligonucleotide for detection of SNP TSC0043245
taaattagaatty

SEQ ID NO: 173646 - DNA, 13 bp, Artificial Sequence
  Oligonucleotide for detection of SNP TSC0043245
raattctaattta

SEQ ID NO: 173647 - DNA, 13 bp, Artificial Sequence
  Oligonucleotide for detection of SNP TSC0043245
taaatcggaatty

SEQ ID NO: 173648 - DNA, 13 bp, Artificial Sequence
  Oligonucleotide for detection of SNP TSC0043245
raattccgattta

SEQ ID NO: 173649 - DNA, 13 bp, Artificial Sequence
  Oligonucleotide for detection of SNP TSC0043248
ttgttattataag

SEQ ID NO: 173650 - DNA, 13 bp, Artificial Sequence
  Oligonucleotide for detection of SNP TSC0043248
cttataataacaa

SEQ ID NO: 173651 - DNA, 13 bp, Artificial Sequence
  Oligonucleotide for detection of SNP TSC0043248
ttgttagtataag

SEQ ID NO: 173652 - DNA, 13 bp, Artificial Sequence
  Oligonucleotide for detection of SNP TSC0043248
cttatactaacaa

SEQ ID NO: 173653 - DNA, 13 bp, Artificial Sequence
  Oligonucleotide for detection of SNP TSC0043248
tttatggtaataa

SEQ ID NO: 173654 - DNA, 13 bp, Artificial Sequence
  Oligonucleotide for detection of SNP TSC0043248
ttattaccataaa

SEQ ID NO: 173655 - DNA, 13 bp, Artificial Sequence
  Oligonucleotide for detection of SNP TSC0043248
tttatgttaataa

SEQ ID NO: 173656 - DNA, 13 bp, Artificial Sequence
  Oligonucleotide for detection of SNP TSC0043248
ttattaacataaa

SEQ ID NO: 173657 - DNA, 13 bp, Artificial Sequence
  Oligonucleotide for detection of SNP TSC0043249
aatgtatttttta

SEQ ID NO: 173658 - DNA, 13 bp, Artificial Sequence
  Oligonucleotide for detection of SNP TSC0043249
taaaaaatacatt

SEQ ID NO: 173659 - DNA, 13 bp, Artificial Sequence
  Oligonucleotide for detection of SNP TSC0043249
aacgtatttttta

SEQ ID NO: 173660 - DNA, 13 bp, Artificial Sequence
  Oligonucleotide for detection of SNP TSC0043249
taaaaaatacgtt

SEQ ID NO: 173661 - DNA, 13 bp, Artificial Sequence
  Oligonucleotide for detection of SNP TSC0043249
aacgtagttttta

SEQ ID NO: 173662 - DNA, 13 bp, Artificial Sequence
  Oligonucleotide for detection of SNP TSC0043249
taaaaactacgtt

SEQ ID NO: 173663 - DNA, 13 bp, Artificial Sequence
  Oligonucleotide for detection of SNP TSC0043249
taaaaagtgtgtt

SEQ ID NO: 173664 - DNA, 13 bp, Artificial Sequence
  Oligonucleotide for detection of SNP TSC0043249
aacacacttttta

SEQ ID NO: 173665 - DNA, 13 bp, Artificial Sequence
  Oligonucleotide for detection of SNP TSC0043249
taaaaattgtgtt

SEQ ID NO: 173666 - DNA, 13 bp, Artificial Sequence
  Oligonucleotide for detection of SNP TSC0043249
aacacaattttta

SEQ ID NO: 173667 - DNA, 13 bp, Artificial Sequence
  Oligonucleotide for detection of SNP TSC0043249
taaaaagtgcgtt

SEQ ID NO: 173668 - DNA, 13 bp, Artificial Sequence
  Oligonucleotide for detection of SNP TSC0043249
aacgcacttttta

SEQ ID NO: 173669 - DNA, 13 bp, Artificial Sequence
  Oligonucleotide for detection of SNP TSC0043249
taaaaattgcgtt

SEQ ID NO: 173670 - DNA, 13 bp, Artificial Sequence
  Oligonucleotide for detection of SNP TSC0043249
aacgcaattttta

SEQ ID NO: 173671 - DNA, 13 bp, Artificial Sequence
  Oligonucleotide for detection of SNP TSC0043251
agggatgagagga

SEQ ID NO: 173672 - DNA, 13 bp, Artificial Sequence
  Oligonucleotide for detection of SNP TSC0043251
tcctctcatccct

SEQ ID NO: 173673 - DNA, 13 bp, Artificial Sequence
  Oligonucleotide for detection of SNP TSC0043251
agggataagagga

SEQ ID NO: 173674 - DNA, 13 bp, Artificial Sequence
  Oligonucleotide for detection of SNP TSC0043251
tcctcttatccct

SEQ ID NO: 173675 - DNA, 13 bp, Artificial Sequence
  Oligonucleotide for detection of SNP TSC0043252
gtatgaattatty

SEQ ID NO: 173676 - DNA, 13 bp, Artificial Sequence
  Oligonucleotide for detection of SNP TSC0043252
raataattcatac

SEQ ID NO: 173677 - DNA, 13 bp, Artificial Sequence
  Oligonucleotide for detection of SNP TSC0043252
gtatgatttatty

SEQ ID NO: 173678 - DNA, 13 bp, Artificial Sequence
  Oligonucleotide for detection of SNP TSC0043252
raataaatcatac

SEQ ID NO: 173679 - DNA, 13 bp, Artificial Sequence
  Oligonucleotide for detection of SNP TSC0043252
gaatagtttatgy

SEQ ID NO: 173680 - DNA, 13 bp, Artificial Sequence
  Oligonucleotide for detection of SNP TSC0043252
rcataaactattc

SEQ ID NO: 173681 - DNA, 13 bp, Artificial Sequence
  Oligonucleotide for detection of SNP TSC0043252
gaatagattatgy

SEQ ID NO: 173682 - DNA, 13 bp, Artificial Sequence
  Oligonucleotide for detection of SNP TSC0043252
rcataatctattc

SEQ ID NO: 173683 - DNA, 13 bp, Artificial Sequence
  Oligonucleotide for detection of SNP TSC0043256
attattgttttag

SEQ ID NO: 173684 - DNA, 13 bp, Artificial Sequence
  Oligonucleotide for detection of SNP TSC0043256
ctaaaacaataat

SEQ ID NO: 173685 - DNA, 13 bp, Artificial Sequence
  Oligonucleotide for detection of SNP TSC0043256
attattattttag

SEQ ID NO: 173686 - DNA, 13 bp, Artificial Sequence
  Oligonucleotide for detection of SNP TSC0043256
ctaaaataataat

SEQ ID NO: 173687 - DNA, 13 bp, Artificial Sequence
  Oligonucleotide for detection of SNP TSC0043258
ggaaggtagttgg

SEQ ID NO: 173688 - DNA, 13 bp, Artificial Sequence
  Oligonucleotide for detection of SNP TSC0043258
ccaactaccttcc

SEQ ID NO: 173689 - DNA, 13 bp, Artificial Sequence
  Oligonucleotide for detection of SNP TSC0043258
ggaagggagttgg

SEQ ID NO: 173690 - DNA, 13 bp, Artificial Sequence
  Oligonucleotide for detection of SNP TSC0043258
ccaactcccttcc

SEQ ID NO: 173691 - DNA, 13 bp, Artificial Sequence
  Oligonucleotide for detection of SNP TSC0043259
ggtggagagttay

SEQ ID NO: 173692 - DNA, 13 bp, Artificial Sequence
  Oligonucleotide for detection of SNP TSC0043259
rtaactctccacc

SEQ ID NO: 173693 - DNA, 13 bp, Artificial Sequence
  Oligonucleotide for detection of SNP TSC0043259
ggtggaaagttay

SEQ ID NO: 173694 - DNA, 13 bp, Artificial Sequence
  Oligonucleotide for detection of SNP TSC0043259
rtaactttccacc

SEQ ID NO: 173695 - DNA, 13 bp, Artificial Sequence
  Oligonucleotide for detection of SNP TSC0004918
aatggaatattat

SEQ ID NO: 173696 - DNA, 13 bp, Artificial Sequence
  Oligonucleotide for detection of SNP TSC0004918
ataatattccatt

SEQ ID NO: 173697 - DNA, 13 bp, Artificial Sequence
  Oligonucleotide for detection of SNP TSC0004918
aatggagtattat

SEQ ID NO: 173698 - DNA, 13 bp, Artificial Sequence
  Oligonucleotide for detection of SNP TSC0004918
ataatactccatt

SEQ ID NO: 173699 - DNA, 13 bp, Artificial Sequence
  Oligonucleotide for detection of SNP TSC0006945
tattaatatttty

SEQ ID NO: 173700 - DNA, 13 bp, Artificial Sequence
  Oligonucleotide for detection of SNP TSC0006945
raaaatattaata

SEQ ID NO: 173701 - DNA, 13 bp, Artificial Sequence
  Oligonucleotide for detection of SNP TSC0006945
gaaagttttaata

SEQ ID NO: 173702 - DNA, 13 bp, Artificial Sequence
  Oligonucleotide for detection of SNP TSC0006945
tattaaaactttc

SEQ ID NO: 173703 - DNA, 13 bp, Artificial Sequence
  Oligonucleotide for detection of SNP TSC0006945
gaaagtattaata

SEQ ID NO: 173704 - DNA, 13 bp, Artificial Sequence
  Oligonucleotide for detection of SNP TSC0006945
tattaatactttc

SEQ ID NO: 173705 - DNA, 13 bp, Artificial Sequence
  Oligonucleotide for detection of SNP TSC0043261
tatgataatatat

SEQ ID NO: 173706 - DNA, 13 bp, Artificial Sequence
  Oligonucleotide for detection of SNP TSC0043261
atatattatcata

SEQ ID NO: 173707 - DNA, 13 bp, Artificial Sequence
  Oligonucleotide for detection of SNP TSC0043261
tatgattatatat

SEQ ID NO: 173708 - DNA, 13 bp, Artificial Sequence
  Oligonucleotide for detection of SNP TSC0043261
atatataatcata

SEQ ID NO: 173709 - DNA, 13 bp, Artificial Sequence
  Oligonucleotide for detection of SNP TSC0043261
atatgttattata

SEQ ID NO: 173710 - DNA, 13 bp, Artificial Sequence
  Oligonucleotide for detection of SNP TSC0043261
tataataacatat

SEQ ID NO: 173711 - DNA, 13 bp, Artificial Sequence
  Oligonucleotide for detection of SNP TSC0043261
atatgtaattata

SEQ ID NO: 173712 - DNA, 13 bp, Artificial Sequence
  Oligonucleotide for detection of SNP TSC0043261
tataattacatat

SEQ ID NO: 173713 - DNA, 13 bp, Artificial Sequence
  Oligonucleotide for detection of SNP TSC0043262
tttaggaaagttt

SEQ ID NO: 173714 - DNA, 13 bp, Artificial Sequence
  Oligonucleotide for detection of SNP TSC0043262
aaactttcctaaa

SEQ ID NO: 173715 - DNA, 13 bp, Artificial Sequence
  Oligonucleotide for detection of SNP TSC0043262
tttagggaagttt

SEQ ID NO: 173716 - DNA, 13 bp, Artificial Sequence
  Oligonucleotide for detection of SNP TSC0043262
aaacttccctaaa

SEQ ID NO: 173717 - DNA, 13 bp, Artificial Sequence
  Oligonucleotide for detection of SNP TSC0043263
atataaatttaty

SEQ ID NO: 173718 - DNA, 13 bp, Artificial Sequence
  Oligonucleotide for detection of SNP TSC0043263
rataaatttatat

SEQ ID NO: 173719 - DNA, 13 bp, Artificial Sequence
  Oligonucleotide for detection of SNP TSC0043263
atataagtttaty

SEQ ID NO: 173720 - DNA, 13 bp, Artificial Sequence
  Oligonucleotide for detection of SNP TSC0043263
rataaacttatat

SEQ ID NO: 173721 - DNA, 13 bp, Artificial Sequence
  Oligonucleotide for detection of SNP TSC0043264
gttatggtgagtg

SEQ ID NO: 173722 - DNA, 13 bp, Artificial Sequence
  Oligonucleotide for detection of SNP TSC0043264
cactcaccataac

SEQ ID NO: 173723 - DNA, 13 bp, Artificial Sequence
  Oligonucleotide for detection of SNP TSC0043264
gttatgatgagtg

SEQ ID NO: 173724 - DNA, 13 bp, Artificial Sequence
  Oligonucleotide for detection of SNP TSC0043264
cactcatcataac

SEQ ID NO: 173725 - DNA, 13 bp, Artificial Sequence
  Oligonucleotide for detection of SNP TSC0043265
ttatgtaatggaa

SEQ ID NO: 173726 - DNA, 13 bp, Artificial Sequence
  Oligonucleotide for detection of SNP TSC0043265
ttccattacataa

SEQ ID NO: 173727 - DNA, 13 bp, Artificial Sequence
  Oligonucleotide for detection of SNP TSC0043265
ttatgtgatggaa

SEQ ID NO: 173728 - DNA, 13 bp, Artificial Sequence
  Oligonucleotide for detection of SNP TSC0043265
ttccatcacataa

SEQ ID NO: 173729 - DNA, 13 bp, Artificial Sequence
  Oligonucleotide for detection of SNP TSC0043265
ttacgtaatggaa

SEQ ID NO: 173730 - DNA, 13 bp, Artificial Sequence
  Oligonucleotide for detection of SNP TSC0043265
ttccattacgtaa

SEQ ID NO: 173731 - DNA, 13 bp, Artificial Sequence
  Oligonucleotide for detection of SNP TSC0043265
ttacgtgatggaa

SEQ ID NO: 173732 - DNA, 13 bp, Artificial Sequence
  Oligonucleotide for detection of SNP TSC0043265
ttccatcacgtaa

SEQ ID NO: 173733 - DNA, 13 bp, Artificial Sequence
  Oligonucleotide for detection of SNP TSC0043265
ttatgtaacggaa

SEQ ID NO: 173734 - DNA, 13 bp, Artificial Sequence
  Oligonucleotide for detection of SNP TSC0043265
ttccgttacataa

SEQ ID NO: 173735 - DNA, 13 bp, Artificial Sequence
  Oligonucleotide for detection of SNP TSC0043265
ttatgtgacggaa

SEQ ID NO: 173736 - DNA, 13 bp, Artificial Sequence
  Oligonucleotide for detection of SNP TSC0043265
ttccgtcacataa

SEQ ID NO: 173737 - DNA, 13 bp, Artificial Sequence
  Oligonucleotide for detection of SNP TSC0043265
ttacgtaacggaa

SEQ ID NO: 173738 - DNA, 13 bp, Artificial Sequence
  Oligonucleotide for detection of SNP TSC0043265
ttccgttacgtaa

SEQ ID NO: 173739 - DNA, 13 bp, Artificial Sequence
  Oligonucleotide for detection of SNP TSC0043265
ttacgtgacggaa

SEQ ID NO: 173740 - DNA, 13 bp, Artificial Sequence
  Oligonucleotide for detection of SNP TSC0043265
ttccgtcacgtaa

SEQ ID NO: 173741 - DNA, 13 bp, Artificial Sequence
  Oligonucleotide for detection of SNP TSC0043266
atggtgatagata

SEQ ID NO: 173742 - DNA, 13 bp, Artificial Sequence
  Oligonucleotide for detection of SNP TSC0043266
tatctatcaccat

SEQ ID NO: 173743 - DNA, 13 bp, Artificial Sequence
  Oligonucleotide for detection of SNP TSC0043266
atggtggtagata

SEQ ID NO: 173744 - DNA, 13 bp, Artificial Sequence
  Oligonucleotide for detection of SNP TSC0043266
tatctaccaccat

SEQ ID NO: 173745 - DNA, 13 bp, Artificial Sequence
  Oligonucleotide for detection of SNP TSC0043266
atggcgatagata

SEQ ID NO: 173746 - DNA, 13 bp, Artificial Sequence
  Oligonucleotide for detection of SNP TSC0043266
tatctatcgccat

SEQ ID NO: 173747 - DNA, 13 bp, Artificial Sequence
  Oligonucleotide for detection of SNP TSC0043266
atggcggtagata

SEQ ID NO: 173748 - DNA, 13 bp, Artificial Sequence
  Oligonucleotide for detection of SNP TSC0043266
tatctaccgccat

SEQ ID NO: 173749 - DNA, 13 bp, Artificial Sequence
  Oligonucleotide for detection of SNP TSC0043267
taagtaagttaga

SEQ ID NO: 173750 - DNA, 13 bp, Artificial Sequence
  Oligonucleotide for detection of SNP TSC0043267
tctaacttactta

SEQ ID NO: 173751 - DNA, 13 bp, Artificial Sequence
  Oligonucleotide for detection of SNP TSC0043267
taagtatgttaga

SEQ ID NO: 173752 - DNA, 13 bp, Artificial Sequence
  Oligonucleotide for detection of SNP TSC0043267
tctaacatactta

SEQ ID NO: 173753 - DNA, 13 bp, Artificial Sequence
  Oligonucleotide for detection of SNP TSC0043267
tttaatttgttta

SEQ ID NO: 173754 - DNA, 13 bp, Artificial Sequence
  Oligonucleotide for detection of SNP TSC0043267
taaacaaattaaa

SEQ ID NO: 173755 - DNA, 13 bp, Artificial Sequence
  Oligonucleotide for detection of SNP TSC0043267
tttaatatgttta

SEQ ID NO: 173756 - DNA, 13 bp, Artificial Sequence
  Oligonucleotide for detection of SNP TSC0043267
taaacatattaaa

SEQ ID NO: 173757 - DNA, 13 bp, Artificial Sequence
  Oligonucleotide for detection of SNP TSC0043268
aaaggatgatgtt

SEQ ID NO: 173758 - DNA, 13 bp, Artificial Sequence
  Oligonucleotide for detection of SNP TSC0043268
aacatcatccttt

SEQ ID NO: 173759 - DNA, 13 bp, Artificial Sequence
  Oligonucleotide for detection of SNP TSC0043268
aaaggaggatgtt

SEQ ID NO: 173760 - DNA, 13 bp, Artificial Sequence
  Oligonucleotide for detection of SNP TSC0043268
aacatcctccttt

SEQ ID NO: 173761 - DNA, 13 bp, Artificial Sequence
  Oligonucleotide for detection of SNP TSC0043268
aaaggacgatgtt

SEQ ID NO: 173762 - DNA, 13 bp, Artificial Sequence
  Oligonucleotide for detection of SNP TSC0043268
aacatcgtccttt

SEQ ID NO: 173763 - DNA, 13 bp, Artificial Sequence
  Oligonucleotide for detection of SNP TSC0043269
atgggtgtagagt

SEQ ID NO: 173764 - DNA, 13 bp, Artificial Sequence
  Oligonucleotide for detection of SNP TSC0043269
actctacacccat

SEQ ID NO: 173765 - DNA, 13 bp, Artificial Sequence
  Oligonucleotide for detection of SNP TSC0043269
atgggtatagagt

SEQ ID NO: 173766 - DNA, 13 bp, Artificial Sequence
  Oligonucleotide for detection of SNP TSC0043269
actctatacccat

SEQ ID NO: 173767 - DNA, 13 bp, Artificial Sequence
  Oligonucleotide for detection of SNP TSC0043269
atgggcgtagagt

SEQ ID NO: 173768 - DNA, 13 bp, Artificial Sequence
  Oligonucleotide for detection of SNP TSC0043269
actctacgcccat

SEQ ID NO: 173769 - DNA, 13 bp, Artificial Sequence
  Oligonucleotide for detection of SNP TSC0043273
agaaatagaaaat

SEQ ID NO: 173770 - DNA, 13 bp, Artificial Sequence
  Oligonucleotide for detection of SNP TSC0043273
attttctatttct

SEQ ID NO: 173771 - DNA, 13 bp, Artificial Sequence
  Oligonucleotide for detection of SNP TSC0043273
agaaattgaaaat

SEQ ID NO: 173772 - DNA, 13 bp, Artificial Sequence
  Oligonucleotide for detection of SNP TSC0043273
attttcaatttct

SEQ ID NO: 173773 - DNA, 13 bp, Artificial Sequence
  Oligonucleotide for detection of SNP TSC0043273
agaaatcgaaaat

SEQ ID NO: 173774 - DNA, 13 bp, Artificial Sequence
  Oligonucleotide for detection of SNP TSC0043273
attttcgatttct

SEQ ID NO: 173775 - DNA, 13 bp, Artificial Sequence
  Oligonucleotide for detection of SNP TSC0043274
ggtagattataag

SEQ ID NO: 173776 - DNA, 13 bp, Artificial Sequence
  Oligonucleotide for detection of SNP TSC0043274
cttataatctacc

SEQ ID NO: 173777 - DNA, 13 bp, Artificial Sequence
  Oligonucleotide for detection of SNP TSC0043274
ggtagagtataag

SEQ ID NO: 173778 - DNA, 13 bp, Artificial Sequence
  Oligonucleotide for detection of SNP TSC0043274
cttatactctacc

SEQ ID NO: 173779 - DNA, 13 bp, Artificial Sequence
  Oligonucleotide for detection of SNP TSC0043274
tttgtgatttgty

SEQ ID NO: 173780 - DNA, 13 bp, Artificial Sequence
  Oligonucleotide for detection of SNP TSC0043274
racaaatcacaaa

SEQ ID NO: 173781 - DNA, 13 bp, Artificial Sequence
  Oligonucleotide for detection of SNP TSC0043274
tttgtgttttgty

SEQ ID NO: 173782 - DNA, 13 bp, Artificial Sequence
  Oligonucleotide for detection of SNP TSC0043274
racaaaacacaaa

SEQ ID NO: 173783 - DNA, 13 bp, Artificial Sequence
  Oligonucleotide for detection of SNP TSC0043275
agaggttgggtgy

SEQ ID NO: 173784 - DNA, 13 bp, Artificial Sequence
  Oligonucleotide for detection of SNP TSC0043275
rcacccaacctct

SEQ ID NO: 173785 - DNA, 13 bp, Artificial Sequence
  Oligonucleotide for detection of SNP TSC0043275
agaggtcgggtgy

SEQ ID NO: 173786 - DNA, 13 bp, Artificial Sequence
  Oligonucleotide for detection of SNP TSC0043275
rcacccgacctct

SEQ ID NO: 173787 - DNA, 13 bp, Artificial Sequence
  Oligonucleotide for detection of SNP TSC0005775
aatattgaaaatt

SEQ ID NO: 173788 - DNA, 13 bp, Artificial Sequence
  Oligonucleotide for detection of SNP TSC0005775
aattttcaatatt

SEQ ID NO: 173789 - DNA, 13 bp, Artificial Sequence
  Oligonucleotide for detection of SNP TSC0005775
aatattaaaaatt

SEQ ID NO: 173790 - DNA, 13 bp, Artificial Sequence
  Oligonucleotide for detection of SNP TSC0005775
aatttttaatatt

SEQ ID NO: 173791 - DNA, 13 bp, Artificial Sequence
  Oligonucleotide for detection of SNP TSC0005775
aatatcgaaaatt

SEQ ID NO: 173792 - DNA, 13 bp, Artificial Sequence
  Oligonucleotide for detection of SNP TSC0005775
aattttcgatatt

SEQ ID NO: 173793 - DNA, 13 bp, Artificial Sequence
  Oligonucleotide for detection of SNP TSC0006227
tttttaatttcgg

SEQ ID NO: 173794 - DNA, 13 bp, Artificial Sequence
  Oligonucleotide for detection of SNP TSC0006227
ccgaaattaaaaa

SEQ ID NO: 173795 - DNA, 13 bp, Artificial Sequence
  Oligonucleotide for detection of SNP TSC0006227
tttttattttcgg

SEQ ID NO: 173796 - DNA, 13 bp, Artificial Sequence
  Oligonucleotide for detection of SNP TSC0006227
ccgaaaataaaaa

SEQ ID NO: 173797 - DNA, 13 bp, Artificial Sequence
  Oligonucleotide for detection of SNP TSC0006227
ttggaattaaaaa

SEQ ID NO: 173798 - DNA, 13 bp, Artificial Sequence
  Oligonucleotide for detection of SNP TSC0006227
tttttaattccaa

SEQ ID NO: 173799 - DNA, 13 bp, Artificial Sequence
  Oligonucleotide for detection of SNP TSC0006227
ttggaagtaaaaa

SEQ ID NO: 173800 - DNA, 13 bp, Artificial Sequence
  Oligonucleotide for detection of SNP TSC0006227
tttttacttccaa

SEQ ID NO: 173801 - DNA, 13 bp, Artificial Sequence
  Oligonucleotide for detection of SNP TSC0006227
tcggaattaaaaa

SEQ ID NO: 173802 - DNA, 13 bp, Artificial Sequence
  Oligonucleotide for detection of SNP TSC0006227
tttttaattccga

SEQ ID NO: 173803 - DNA, 13 bp, Artificial Sequence
  Oligonucleotide for detection of SNP TSC0006227
tcggaagtaaaaa

SEQ ID NO: 173804 - DNA, 13 bp, Artificial Sequence
  Oligonucleotide for detection of SNP TSC0006227
tttttacttccga

SEQ ID NO: 173805 - DNA, 13 bp, Artificial Sequence
  Oligonucleotide for detection of SNP TSC0010198
tatgttttattay

SEQ ID NO: 173806 - DNA, 13 bp, Artificial Sequence
  Oligonucleotide for detection of SNP TSC0010198
rtaataaaacata

SEQ ID NO: 173807 - DNA, 13 bp, Artificial Sequence
  Oligonucleotide for detection of SNP TSC0010198
tatgttgtattay

SEQ ID NO: 173808 - DNA, 13 bp, Artificial Sequence
  Oligonucleotide for detection of SNP TSC0010198
rtaatacaacata

SEQ ID NO: 173809 - DNA, 13 bp, Artificial Sequence
  Oligonucleotide for detection of SNP TSC0010198
tacgttttattay

SEQ ID NO: 173810 - DNA, 13 bp, Artificial Sequence
  Oligonucleotide for detection of SNP TSC0010198
rtaataaaacgta

SEQ ID NO: 173811 - DNA, 13 bp, Artificial Sequence
  Oligonucleotide for detection of SNP TSC0010198
tacgttgtattay

SEQ ID NO: 173812 - DNA, 13 bp, Artificial Sequence
  Oligonucleotide for detection of SNP TSC0010198
rtaatacaacgta

SEQ ID NO: 173813 - DNA, 13 bp, Artificial Sequence
  Oligonucleotide for detection of SNP TSC0010198
gtaatagagtgta

SEQ ID NO: 173814 - DNA, 13 bp, Artificial Sequence
  Oligonucleotide for detection of SNP TSC0010198
tacactctattac

SEQ ID NO: 173815 - DNA, 13 bp, Artificial Sequence
  Oligonucleotide for detection of SNP TSC0010198
gtaatatagtgta

SEQ ID NO: 173816 - DNA, 13 bp, Artificial Sequence
  Oligonucleotide for detection of SNP TSC0010198
tacactatattac

SEQ ID NO: 173817 - DNA, 13 bp, Artificial Sequence
  Oligonucleotide for detection of SNP TSC0010198
gtaatagagcgta

SEQ ID NO: 173818 - DNA, 13 bp, Artificial Sequence
  Oligonucleotide for detection of SNP TSC0010198
tacgctctattac

SEQ ID NO: 173819 - DNA, 13 bp, Artificial Sequence
  Oligonucleotide for detection of SNP TSC0010198
gtaatatagcgta

SEQ ID NO: 173820 - DNA, 13 bp, Artificial Sequence
  Oligonucleotide for detection of SNP TSC0010198
tacgctatattac

SEQ ID NO: 173821 - DNA, 13 bp, Artificial Sequence
  Oligonucleotide for detection of SNP TSC0043278
tagatttaattta

SEQ ID NO: 173822 - DNA, 13 bp, Artificial Sequence
  Oligonucleotide for detection of SNP TSC0043278
taaattaaatcta

SEQ ID NO: 173823 - DNA, 13 bp, Artificial Sequence
  Oligonucleotide for detection of SNP TSC0043278
tagattgaattta

SEQ ID NO: 173824 - DNA, 13 bp, Artificial Sequence
  Oligonucleotide for detection of SNP TSC0043278
taaattcaatcta

SEQ ID NO: 173825 - DNA, 13 bp, Artificial Sequence
  Oligonucleotide for detection of SNP TSC0043278
tagatcgaattta

SEQ ID NO: 173826 - DNA, 13 bp, Artificial Sequence
  Oligonucleotide for detection of SNP TSC0043278
taaattcgatcta

SEQ ID NO: 173827 - DNA, 13 bp, Artificial Sequence
  Oligonucleotide for detection of SNP TSC0043278
tgagttgggttta

SEQ ID NO: 173828 - DNA, 13 bp, Artificial Sequence
  Oligonucleotide for detection of SNP TSC0043278
taaacccaactca

SEQ ID NO: 173829 - DNA, 13 bp, Artificial Sequence
  Oligonucleotide for detection of SNP TSC0043278
tgagtttggttta

SEQ ID NO: 173830 - DNA, 13 bp, Artificial Sequence
  Oligonucleotide for detection of SNP TSC0043278
taaaccaaactca

SEQ ID NO: 173831 - DNA, 13 bp, Artificial Sequence
  Oligonucleotide for detection of SNP TSC0043278
tgagttcggttta

SEQ ID NO: 173832 - DNA, 13 bp, Artificial Sequence
  Oligonucleotide for detection of SNP TSC0043278
taaaccgaactca

SEQ ID NO: 173833 - DNA, 13 bp, Artificial Sequence
  Oligonucleotide for detection of SNP TSC0043279
tttgaatgttagg

SEQ ID NO: 173834 - DNA, 13 bp, Artificial Sequence
  Oligonucleotide for detection of SNP TSC0043279
cctaacattcaaa

SEQ ID NO: 173835 - DNA, 13 bp, Artificial Sequence
  Oligonucleotide for detection of SNP TSC0043279
tttgaaagttagg

SEQ ID NO: 173836 - DNA, 13 bp, Artificial Sequence
  Oligonucleotide for detection of SNP TSC0043279
cctaactttcaaa

SEQ ID NO: 173837 - DNA, 13 bp, Artificial Sequence
  Oligonucleotide for detection of SNP TSC0043280
tgatgtatataay

SEQ ID NO: 173838 - DNA, 13 bp, Artificial Sequence
  Oligonucleotide for detection of SNP TSC0043280
rttatatacatca

SEQ ID NO: 173839 - DNA, 13 bp, Artificial Sequence
  Oligonucleotide for detection of SNP TSC0043280
tgatgtgtataay

SEQ ID NO: 173840 - DNA, 13 bp, Artificial Sequence
  Oligonucleotide for detection of SNP TSC0043280
rttatacacatca

SEQ ID NO: 173841 - DNA, 13 bp, Artificial Sequence
  Oligonucleotide for detection of SNP TSC0043280
tgatgcgtataay

SEQ ID NO: 173842 - DNA, 13 bp, Artificial Sequence
  Oligonucleotide for detection of SNP TSC0043280
rttatacgcatca

SEQ ID NO: 173843 - DNA, 13 bp, Artificial Sequence
  Oligonucleotide for detection of SNP TSC0043280
gttatatgtatta

SEQ ID NO: 173844 - DNA, 13 bp, Artificial Sequence
  Oligonucleotide for detection of SNP TSC0043280
taatacatataac

SEQ ID NO: 173845 - DNA, 13 bp, Artificial Sequence
  Oligonucleotide for detection of SNP TSC0043280
gttatacgtatta

SEQ ID NO: 173846 - DNA, 13 bp, Artificial Sequence
  Oligonucleotide for detection of SNP TSC0043280
taatacgtataac

SEQ ID NO: 173847 - DNA, 13 bp, Artificial Sequence
  Oligonucleotide for detection of SNP TSC0043281
taatttatgttty

SEQ ID NO: 173848 - DNA, 13 bp, Artificial Sequence
  Oligonucleotide for detection of SNP TSC0043281
raaacataaatta

SEQ ID NO: 173849 - DNA, 13 bp, Artificial Sequence
  Oligonucleotide for detection of SNP TSC0043281
taatttgtgttty

SEQ ID NO: 173850 - DNA, 13 bp, Artificial Sequence
  Oligonucleotide for detection of SNP TSC0043281
raaacacaaatta

SEQ ID NO: 173851 - DNA, 13 bp, Artificial Sequence
  Oligonucleotide for detection of SNP TSC0043281
taattcgtgttty

SEQ ID NO: 173852 - DNA, 13 bp, Artificial Sequence
  Oligonucleotide for detection of SNP TSC0043281
raaacacgaatta

SEQ ID NO: 173853 - DNA, 13 bp, Artificial Sequence
  Oligonucleotide for detection of SNP TSC0043281
gaggtatgagttg

SEQ ID NO: 173854 - DNA, 13 bp, Artificial Sequence
  Oligonucleotide for detection of SNP TSC0043281
caactcatacctc

SEQ ID NO: 173855 - DNA, 13 bp, Artificial Sequence
  Oligonucleotide for detection of SNP TSC0043281
gaggtacgagttg

SEQ ID NO: 173856 - DNA, 13 bp, Artificial Sequence
  Oligonucleotide for detection of SNP TSC0043281
caactcgtacctc

SEQ ID NO: 173857 - DNA, 13 bp, Artificial Sequence
  Oligonucleotide for detection of SNP TSC0010310
atatgatgttggg

SEQ ID NO: 173858 - DNA, 13 bp, Artificial Sequence
  Oligonucleotide for detection of SNP TSC0010310
cccaacatcatat

SEQ ID NO: 173859 - DNA, 13 bp, Artificial Sequence
  Oligonucleotide for detection of SNP TSC0010310
atatgacgttggg

SEQ ID NO: 173860 - DNA, 13 bp, Artificial Sequence
  Oligonucleotide for detection of SNP TSC0010310
cccaacgtcatat

SEQ ID NO: 173861 - DNA, 13 bp, Artificial Sequence
  Oligonucleotide for detection of SNP TSC0010310
tttagtgttatgt

SEQ ID NO: 173862 - DNA, 13 bp, Artificial Sequence
  Oligonucleotide for detection of SNP TSC0010310
acataacactaaa

SEQ ID NO: 173863 - DNA, 13 bp, Artificial Sequence
  Oligonucleotide for detection of SNP TSC0010310
tttagtattatgt

SEQ ID NO: 173864 - DNA, 13 bp, Artificial Sequence
  Oligonucleotide for detection of SNP TSC0010310
acataatactaaa

SEQ ID NO: 173865 - DNA, 13 bp, Artificial Sequence
  Oligonucleotide for detection of SNP TSC0010310
tttagcgttatgt

SEQ ID NO: 173866 - DNA, 13 bp, Artificial Sequence
  Oligonucleotide for detection of SNP TSC0010310
acataacgctaaa

SEQ ID NO: 173867 - DNA, 13 bp, Artificial Sequence
  Oligonucleotide for detection of SNP TSC0043284
gtagagagaggga

SEQ ID NO: 173868 - DNA, 13 bp, Artificial Sequence
  Oligonucleotide for detection of SNP TSC0043284
tccctctctctac

SEQ ID NO: 173869 - DNA, 13 bp, Artificial Sequence
  Oligonucleotide for detection of SNP TSC0043284
gtagagggaggga

SEQ ID NO: 173870 - DNA, 13 bp, Artificial Sequence
  Oligonucleotide for detection of SNP TSC0043284
tccctccctctac

SEQ ID NO: 173871 - DNA, 13 bp, Artificial Sequence
  Oligonucleotide for detection of SNP TSC0043285
taaaaagaatttt

SEQ ID NO: 173872 - DNA, 13 bp, Artificial Sequence
  Oligonucleotide for detection of SNP TSC0043285
aaaattcttttta

SEQ ID NO: 173873 - DNA, 13 bp, Artificial Sequence
  Oligonucleotide for detection of SNP TSC0043285
taaaaaaaatttt

SEQ ID NO: 173874 - DNA, 13 bp, Artificial Sequence
  Oligonucleotide for detection of SNP TSC0043285
aaaatttttttta

SEQ ID NO: 173875 - DNA, 13 bp, Artificial Sequence
  Oligonucleotide for detection of SNP TSC0043287
taatgtattttay

SEQ ID NO: 173876 - DNA, 13 bp, Artificial Sequence
  Oligonucleotide for detection of SNP TSC0043287
rtaaaatacatta

SEQ ID NO: 173877 - DNA, 13 bp, Artificial Sequence
  Oligonucleotide for detection of SNP TSC0043287
taatgttttttay

SEQ ID NO: 173878 - DNA, 13 bp, Artificial Sequence
  Oligonucleotide for detection of SNP TSC0043287
rtaaaaaacatta

SEQ ID NO: 173879 - DNA, 13 bp, Artificial Sequence
  Oligonucleotide for detection of SNP TSC0043287
gtggagtatatta

SEQ ID NO: 173880 - DNA, 13 bp, Artificial Sequence
  Oligonucleotide for detection of SNP TSC0043287
taatatactccac

SEQ ID NO: 173881 - DNA, 13 bp, Artificial Sequence
  Oligonucleotide for detection of SNP TSC0043287
gtggaggatatta

SEQ ID NO: 173882 - DNA, 13 bp, Artificial Sequence
  Oligonucleotide for detection of SNP TSC0043287
taatatcctccac

SEQ ID NO: 173883 - DNA, 13 bp, Artificial Sequence
  Oligonucleotide for detection of SNP TSC0043288
ttagttagaggaa

SEQ ID NO: 173884 - DNA, 13 bp, Artificial Sequence
  Oligonucleotide for detection of SNP TSC0043288
ttcctctaactaa

SEQ ID NO: 173885 - DNA, 13 bp, Artificial Sequence
  Oligonucleotide for detection of SNP TSC0043288
ttagttggaggaa

SEQ ID NO: 173886 - DNA, 13 bp, Artificial Sequence
  Oligonucleotide for detection of SNP TSC0043288
ttcctccaactaa

SEQ ID NO: 173887 - DNA, 13 bp, Artificial Sequence
  Oligonucleotide for detection of SNP TSC0043288
ttagtcggaggaa

SEQ ID NO: 173888 - DNA, 13 bp, Artificial Sequence
  Oligonucleotide for detection of SNP TSC0043288
ttcctccgactaa

SEQ ID NO: 173889 - DNA, 13 bp, Artificial Sequence
  Oligonucleotide for detection of SNP TSC0043289
atgagggaagtgg

SEQ ID NO: 173890 - DNA, 13 bp, Artificial Sequence
  Oligonucleotide for detection of SNP TSC0043289
ccacttccctcat

SEQ ID NO: 173891 - DNA, 13 bp, Artificial Sequence
  Oligonucleotide for detection of SNP TSC0043289
atgaggaaagtgg

SEQ ID NO: 173892 - DNA, 13 bp, Artificial Sequence
  Oligonucleotide for detection of SNP TSC0043289
ccactttcctcat

SEQ ID NO: 173893 - DNA, 13 bp, Artificial Sequence
  Oligonucleotide for detection of SNP TSC0043290
atgtgtgggtgga

SEQ ID NO: 173894 - DNA, 13 bp, Artificial Sequence
  Oligonucleotide for detection of SNP TSC0043290
tccacccacacat

SEQ ID NO: 173895 - DNA, 13 bp, Artificial Sequence
  Oligonucleotide for detection of SNP TSC0043290
atgtgtaggtgga

SEQ ID NO: 173896 - DNA, 13 bp, Artificial Sequence
  Oligonucleotide for detection of SNP TSC0043290
tccacctacacat

SEQ ID NO: 173897 - DNA, 13 bp, Artificial Sequence
  Oligonucleotide for detection of SNP TSC0043291
taatgagaaaggy

SEQ ID NO: 173898 - DNA, 13 bp, Artificial Sequence
  Oligonucleotide for detection of SNP TSC0043291
rcctttctcatta

SEQ ID NO: 173899 - DNA, 13 bp, Artificial Sequence
  Oligonucleotide for detection of SNP TSC0043291
taatgaaaaaggy

SEQ ID NO: 173900 - DNA, 13 bp, Artificial Sequence
  Oligonucleotide for detection of SNP TSC0043291
rcctttttcatta

SEQ ID NO: 173901 - DNA, 13 bp, Artificial Sequence
  Oligonucleotide for detection of SNP TSC0043292
atagaaaaggtag

SEQ ID NO: 173902 - DNA, 13 bp, Artificial Sequence
  Oligonucleotide for detection of SNP TSC0043292
ctaccttttctat

SEQ ID NO: 173903 - DNA, 13 bp, Artificial Sequence
  Oligonucleotide for detection of SNP TSC0043292
atagaagaggtag

SEQ ID NO: 173904 - DNA, 13 bp, Artificial Sequence
  Oligonucleotide for detection of SNP TSC0043292
ctacctcttctat

SEQ ID NO: 173905 - DNA, 13 bp, Artificial Sequence
  Oligonucleotide for detection of SNP TSC0043293
tataatttagtgg

SEQ ID NO: 173906 - DNA, 13 bp, Artificial Sequence
  Oligonucleotide for detection of SNP TSC0043293
ccactaaattata

SEQ ID NO: 173907 - DNA, 13 bp, Artificial Sequence
  Oligonucleotide for detection of SNP TSC0043293
tataatgtagtgg

SEQ ID NO: 173908 - DNA, 13 bp, Artificial Sequence
  Oligonucleotide for detection of SNP TSC0043293
ccactacattata

SEQ ID NO: 173909 - DNA, 13 bp, Artificial Sequence
  Oligonucleotide for detection of SNP TSC0043293
ttattaaattgtg

SEQ ID NO: 173910 - DNA, 13 bp, Artificial Sequence
  Oligonucleotide for detection of SNP TSC0043293
cacaatttaataa

SEQ ID NO: 173911 - DNA, 13 bp, Artificial Sequence
  Oligonucleotide for detection of SNP TSC0043293
ttattatattgtg

SEQ ID NO: 173912 - DNA, 13 bp, Artificial Sequence
  Oligonucleotide for detection of SNP TSC0043293
cacaatataataa

SEQ ID NO: 173913 - DNA, 13 bp, Artificial Sequence
  Oligonucleotide for detection of SNP TSC0043294
gagtagaaattga

SEQ ID NO: 173914 - DNA, 13 bp, Artificial Sequence
  Oligonucleotide for detection of SNP TSC0043294
tcaatttctactc

SEQ ID NO: 173915 - DNA, 13 bp, Artificial Sequence
  Oligonucleotide for detection of SNP TSC0043294
gagtaggaattga

SEQ ID NO: 173916 - DNA, 13 bp, Artificial Sequence
  Oligonucleotide for detection of SNP TSC0043294
tcaattcctactc

SEQ ID NO: 173917 - DNA, 13 bp, Artificial Sequence
  Oligonucleotide for detection of SNP TSC0043295
tatataatgtgtt

SEQ ID NO: 173918 - DNA, 13 bp, Artificial Sequence
  Oligonucleotide for detection of SNP TSC0043295
aacacattatata

SEQ ID NO: 173919 - DNA, 13 bp, Artificial Sequence
  Oligonucleotide for detection of SNP TSC0043295
tatatattgtgtt

SEQ ID NO: 173920 - DNA, 13 bp, Artificial Sequence
  Oligonucleotide for detection of SNP TSC0043295
aacacaatatata

SEQ ID NO: 173921 - DNA, 13 bp, Artificial Sequence
  Oligonucleotide for detection of SNP TSC0043295
aatatattgtgta

SEQ ID NO: 173922 - DNA, 13 bp, Artificial Sequence
  Oligonucleotide for detection of SNP TSC0043295
tacacaatatatt

SEQ ID NO: 173923 - DNA, 13 bp, Artificial Sequence
  Oligonucleotide for detection of SNP TSC0043295
aatataatgtgta

SEQ ID NO: 173924 - DNA, 13 bp, Artificial Sequence
  Oligonucleotide for detection of SNP TSC0043295
tacacattatatt

SEQ ID NO: 173925 - DNA, 13 bp, Artificial Sequence
  Oligonucleotide for detection of SNP TSC0008073
ttttatgagtgty

SEQ ID NO: 173926 - DNA, 13 bp, Artificial Sequence
  Oligonucleotide for detection of SNP TSC0008073
racactcataaaa

SEQ ID NO: 173927 - DNA, 13 bp, Artificial Sequence
  Oligonucleotide for detection of SNP TSC0008073
ttttataagtgty

SEQ ID NO: 173928 - DNA, 13 bp, Artificial Sequence
  Oligonucleotide for detection of SNP TSC0008073
racacttataaaa

SEQ ID NO: 173929 - DNA, 13 bp, Artificial Sequence
  Oligonucleotide for detection of SNP TSC0043297
gataggatttatg

SEQ ID NO: 173930 - DNA, 13 bp, Artificial Sequence
  Oligonucleotide for detection of SNP TSC0043297
cataaatcctatc

SEQ ID NO: 173931 - DNA, 13 bp, Artificial Sequence
  Oligonucleotide for detection of SNP TSC0043297
gataggttttatg

SEQ ID NO: 173932 - DNA, 13 bp, Artificial Sequence
  Oligonucleotide for detection of SNP TSC0043297
cataaaacctatc

SEQ ID NO: 173933 - DNA, 13 bp, Artificial Sequence
  Oligonucleotide for detection of SNP TSC0043297
gataggatttacg

SEQ ID NO: 173934 - DNA, 13 bp, Artificial Sequence
  Oligonucleotide for detection of SNP TSC0043297
cgtaaatcctatc

SEQ ID NO: 173935 - DNA, 13 bp, Artificial Sequence
  Oligonucleotide for detection of SNP TSC0043297
gataggttttacg

SEQ ID NO: 173936 - DNA, 13 bp, Artificial Sequence
  Oligonucleotide for detection of SNP TSC0043297
cgtaaaacctatc

SEQ ID NO: 173937 - DNA, 13 bp, Artificial Sequence
  Oligonucleotide for detection of SNP TSC0043297
tgtgagttttgty

SEQ ID NO: 173938 - DNA, 13 bp, Artificial Sequence
  Oligonucleotide for detection of SNP TSC0043297
racaaaactcaca

SEQ ID NO: 173939 - DNA, 13 bp, Artificial Sequence
  Oligonucleotide for detection of SNP TSC0043297
tgtgaggtttgty

SEQ ID NO: 173940 - DNA, 13 bp, Artificial Sequence
  Oligonucleotide for detection of SNP TSC0043297
racaaacctcaca

SEQ ID NO: 173941 - DNA, 13 bp, Artificial Sequence
  Oligonucleotide for detection of SNP TSC0043297
cgtgagttttgty

SEQ ID NO: 173942 - DNA, 13 bp, Artificial Sequence
  Oligonucleotide for detection of SNP TSC0043297
racaaaactcacg

SEQ ID NO: 173943 - DNA, 13 bp, Artificial Sequence
  Oligonucleotide for detection of SNP TSC0043297
cgtgaggtttgty

SEQ ID NO: 173944 - DNA, 13 bp, Artificial Sequence
  Oligonucleotide for detection of SNP TSC0043297
racaaacctcacg

SEQ ID NO: 173945 - DNA, 13 bp, Artificial Sequence
  Oligonucleotide for detection of SNP TSC0043298
agtattgtttata

SEQ ID NO: 173946 - DNA, 13 bp, Artificial Sequence
  Oligonucleotide for detection of SNP TSC0043298
tataaacaatact

SEQ ID NO: 173947 - DNA, 13 bp, Artificial Sequence
  Oligonucleotide for detection of SNP TSC0043299
aatatatgaattt

SEQ ID NO: 173948 - DNA, 13 bp, Artificial Sequence
  Oligonucleotide for detection of SNP TSC0043299
aaattcatatatt

SEQ ID NO: 173949 - DNA, 13 bp, Artificial Sequence
  Oligonucleotide for detection of SNP TSC0043299
aatatacgaattt

SEQ ID NO: 173950 - DNA, 13 bp, Artificial Sequence
  Oligonucleotide for detection of SNP TSC0043299
aaattcgtatatt

SEQ ID NO: 173951 - DNA, 13 bp, Artificial Sequence
  Oligonucleotide for detection of SNP TSC0043299
aaatttgtatgtt

SEQ ID NO: 173952 - DNA, 13 bp, Artificial Sequence
  Oligonucleotide for detection of SNP TSC0043299
aacatacaaattt

SEQ ID NO: 173953 - DNA, 13 bp, Artificial Sequence
  Oligonucleotide for detection of SNP TSC0043299
aaatttatatgtt

SEQ ID NO: 173954 - DNA, 13 bp, Artificial Sequence
  Oligonucleotide for detection of SNP TSC0043299
aacatataaattt

SEQ ID NO: 173955 - DNA, 13 bp, Artificial Sequence
  Oligonucleotide for detection of SNP TSC0043299
aaattcgtatgtt

SEQ ID NO: 173956 - DNA, 13 bp, Artificial Sequence
  Oligonucleotide for detection of SNP TSC0043299
aacatacgaattt

SEQ ID NO: 173957 - DNA, 13 bp, Artificial Sequence
  Oligonucleotide for detection of SNP TSC0008453
tatgtttttggga

SEQ ID NO: 173958 - DNA, 13 bp, Artificial Sequence
  Oligonucleotide for detection of SNP TSC0008453
tcccaaaaacata

SEQ ID NO: 173959 - DNA, 13 bp, Artificial Sequence
  Oligonucleotide for detection of SNP TSC0008453
tatgttgttggga

SEQ ID NO: 173960 - DNA, 13 bp, Artificial Sequence
  Oligonucleotide for detection of SNP TSC0008453
tcccaacaacata

SEQ ID NO: 173961 - DNA, 13 bp, Artificial Sequence
  Oligonucleotide for detection of SNP TSC0008453
ttttaataatata

SEQ ID NO: 173962 - DNA, 13 bp, Artificial Sequence
  Oligonucleotide for detection of SNP TSC0008453
tatattattaaaa

SEQ ID NO: 173963 - DNA, 13 bp, Artificial Sequence
  Oligonucleotide for detection of SNP TSC0005420
atttttaaggggy

SEQ ID NO: 173964 - DNA, 13 bp, Artificial Sequence
  Oligonucleotide for detection of SNP TSC0005420
rccccttaaaaat

SEQ ID NO: 173965 - DNA, 13 bp, Artificial Sequence
  Oligonucleotide for detection of SNP TSC0005420
attttttaggggy

SEQ ID NO: 173966 - DNA, 13 bp, Artificial Sequence
  Oligonucleotide for detection of SNP TSC0005420
rcccctaaaaaat

SEQ ID NO: 173967 - DNA, 13 bp, Artificial Sequence
  Oligonucleotide for detection of SNP TSC0005420
gttttttgaagat

SEQ ID NO: 173968 - DNA, 13 bp, Artificial Sequence
  Oligonucleotide for detection of SNP TSC0005420
atcttcaaaaaac

SEQ ID NO: 173969 - DNA, 13 bp, Artificial Sequence
  Oligonucleotide for detection of SNP TSC0005420
gtttttggaagat

SEQ ID NO: 173970 - DNA, 13 bp, Artificial Sequence
  Oligonucleotide for detection of SNP TSC0005420
atcttccaaaaac

SEQ ID NO: 173971 - DNA, 13 bp, Artificial Sequence
  Oligonucleotide for detection of SNP TSC0043302
tatttattttgaa

SEQ ID NO: 173972 - DNA, 13 bp, Artificial Sequence
  Oligonucleotide for detection of SNP TSC0043302
ttcaaaataaata

SEQ ID NO: 173973 - DNA, 13 bp, Artificial Sequence
  Oligonucleotide for detection of SNP TSC0043302
tatttagtttgaa

SEQ ID NO: 173974 - DNA, 13 bp, Artificial Sequence
  Oligonucleotide for detection of SNP TSC0043302
ttcaaactaaata

SEQ ID NO: 173975 - DNA, 13 bp, Artificial Sequence
  Oligonucleotide for detection of SNP TSC0043302
tttaagataagta

SEQ ID NO: 173976 - DNA, 13 bp, Artificial Sequence
  Oligonucleotide for detection of SNP TSC0043302
tacttatcttaaa

SEQ ID NO: 173977 - DNA, 13 bp, Artificial Sequence
  Oligonucleotide for detection of SNP TSC0043302
tttaagttaagta

SEQ ID NO: 173978 - DNA, 13 bp, Artificial Sequence
  Oligonucleotide for detection of SNP TSC0043302
tacttaacttaaa

SEQ ID NO: 173979 - DNA, 13 bp, Artificial Sequence
  Oligonucleotide for detection of SNP TSC0010818
atttaaaatttga

SEQ ID NO: 173980 - DNA, 13 bp, Artificial Sequence
  Oligonucleotide for detection of SNP TSC0010818
tcaaattttaaat

SEQ ID NO: 173981 - DNA, 13 bp, Artificial Sequence
  Oligonucleotide for detection of SNP TSC0010818
atttaatatttga

SEQ ID NO: 173982 - DNA, 13 bp, Artificial Sequence
  Oligonucleotide for detection of SNP TSC0010818
tcaaatattaaat

SEQ ID NO: 173983 - DNA, 13 bp, Artificial Sequence
  Oligonucleotide for detection of SNP TSC0010818
ttaaattttgaat

SEQ ID NO: 173984 - DNA, 13 bp, Artificial Sequence
  Oligonucleotide for detection of SNP TSC0010818
attcaaaatttaa

SEQ ID NO: 173985 - DNA, 13 bp, Artificial Sequence
  Oligonucleotide for detection of SNP TSC0010818
ttaaatgttgaat

SEQ ID NO: 173986 - DNA, 13 bp, Artificial Sequence
  Oligonucleotide for detection of SNP TSC0010818
attcaacatttaa

SEQ ID NO: 173987 - DNA, 13 bp, Artificial Sequence
  Oligonucleotide for detection of SNP TSC0043303
gtgtttataatay

SEQ ID NO: 173988 - DNA, 13 bp, Artificial Sequence
  Oligonucleotide for detection of SNP TSC0043303
rtattataaacac

SEQ ID NO: 173989 - DNA, 13 bp, Artificial Sequence
  Oligonucleotide for detection of SNP TSC0043303
gtgtttttaatay

SEQ ID NO: 173990 - DNA, 13 bp, Artificial Sequence
  Oligonucleotide for detection of SNP TSC0043303
rtattaaaaacac

SEQ ID NO: 173991 - DNA, 13 bp, Artificial Sequence
  Oligonucleotide for detection of SNP TSC0043303
gtattataaatay

SEQ ID NO: 173992 - DNA, 13 bp, Artificial Sequence
  Oligonucleotide for detection of SNP TSC0043303
rtatttataatac

SEQ ID NO: 173993 - DNA, 13 bp, Artificial Sequence
  Oligonucleotide for detection of SNP TSC0043303
gtattagaaatay

SEQ ID NO: 173994 - DNA, 13 bp, Artificial Sequence
  Oligonucleotide for detection of SNP TSC0043303
rtatttctaatac

SEQ ID NO: 173995 - DNA, 13 bp, Artificial Sequence
  Oligonucleotide for detection of SNP TSC0043304
tggagtttgtttt

SEQ ID NO: 173996 - DNA, 13 bp, Artificial Sequence
  Oligonucleotide for detection of SNP TSC0043304
aaaacaaactcca

SEQ ID NO: 173997 - DNA, 13 bp, Artificial Sequence
  Oligonucleotide for detection of SNP TSC0043304
tggagtgtgtttt

SEQ ID NO: 173998 - DNA, 13 bp, Artificial Sequence
  Oligonucleotide for detection of SNP TSC0043304
aaaacacactcca

SEQ ID NO: 173999 - DNA, 13 bp, Artificial Sequence
  Oligonucleotide for detection of SNP TSC0043304
aaaatatatttta

SEQ ID NO: 174000 - DNA, 13 bp, Artificial Sequence
  Oligonucleotide for detection of SNP TSC0043304
taaaatatatttt

SEQ ID NO: 174001 - DNA, 13 bp, Artificial Sequence
  Oligonucleotide for detection of SNP TSC0043305
aatattaagaaga

SEQ ID NO: 174002 - DNA, 13 bp, Artificial Sequence
  Oligonucleotide for detection of SNP TSC0043305
tcttcttaatatt

SEQ ID NO: 174003 - DNA, 13 bp, Artificial Sequence
  Oligonucleotide for detection of SNP TSC0043305
aatatttagaaga

SEQ ID NO: 174004 - DNA, 13 bp, Artificial Sequence
  Oligonucleotide for detection of SNP TSC0043305
tcttctaaatatt

SEQ ID NO: 174005 - DNA, 13 bp, Artificial Sequence
  Oligonucleotide for detection of SNP TSC0043306
gagagtttgagag

SEQ ID NO: 174006 - DNA, 13 bp, Artificial Sequence
  Oligonucleotide for detection of SNP TSC0043306
ctctcaaactctc

SEQ ID NO: 174007 - DNA, 13 bp, Artificial Sequence
  Oligonucleotide for detection of SNP TSC0043306
gagagtgtgagag

SEQ ID NO: 174008 - DNA, 13 bp, Artificial Sequence
  Oligonucleotide for detection of SNP TSC0043306
ctctcacactctc

SEQ ID NO: 174009 - DNA, 13 bp, Artificial Sequence
  Oligonucleotide for detection of SNP TSC0043306
gagagcgtgagag

SEQ ID NO: 174010 - DNA, 13 bp, Artificial Sequence
  Oligonucleotide for detection of SNP TSC0043306
ctctcacgctctc

SEQ ID NO: 174011 - DNA, 13 bp, Artificial Sequence
  Oligonucleotide for detection of SNP TSC0043307
tgttttaggtttg

SEQ ID NO: 174012 - DNA, 13 bp, Artificial Sequence
  Oligonucleotide for detection of SNP TSC0043307
caaacctaaaaca

SEQ ID NO: 174013 - DNA, 13 bp, Artificial Sequence
  Oligonucleotide for detection of SNP TSC0043307
tgttttgggtttg

SEQ ID NO: 174014 - DNA, 13 bp, Artificial Sequence
  Oligonucleotide for detection of SNP TSC0043307
caaacccaaaaca

SEQ ID NO: 174015 - DNA, 13 bp, Artificial Sequence
  Oligonucleotide for detection of SNP TSC0043307
tgtttcgggtttg

SEQ ID NO: 174016 - DNA, 13 bp, Artificial Sequence
  Oligonucleotide for detection of SNP TSC0043307
caaacccgaaaca

SEQ ID NO: 174017 - DNA, 13 bp, Artificial Sequence
  Oligonucleotide for detection of SNP TSC0043307
tagatttgaggta

SEQ ID NO: 174018 - DNA, 13 bp, Artificial Sequence
  Oligonucleotide for detection of SNP TSC0043307
tacctcaaatcta

SEQ ID NO: 174019 - DNA, 13 bp, Artificial Sequence
  Oligonucleotide for detection of SNP TSC0043307
tagattcgaggta

SEQ ID NO: 174020 - DNA, 13 bp, Artificial Sequence
  Oligonucleotide for detection of SNP TSC0043307
tacctcgaatcta

SEQ ID NO: 174021 - DNA, 13 bp, Artificial Sequence
  Oligonucleotide for detection of SNP TSC0043308
ttttggtagaaty

SEQ ID NO: 174022 - DNA, 13 bp, Artificial Sequence
  Oligonucleotide for detection of SNP TSC0043308
rattctaccaaaa

SEQ ID NO: 174023 - DNA, 13 bp, Artificial Sequence
  Oligonucleotide for detection of SNP TSC0043308
ttttgggagaaty

SEQ ID NO: 174024 - DNA, 13 bp, Artificial Sequence
  Oligonucleotide for detection of SNP TSC0043308
rattctcccaaaa

SEQ ID NO: 174025 - DNA, 13 bp, Artificial Sequence
  Oligonucleotide for detection of SNP TSC0043308
ggtttttttagaa

SEQ ID NO: 174026 - DNA, 13 bp, Artificial Sequence
  Oligonucleotide for detection of SNP TSC0043308
ttctaaaaaaacc

SEQ ID NO: 174027 - DNA, 13 bp, Artificial Sequence
  Oligonucleotide for detection of SNP TSC0043309
aatattagtgttt

SEQ ID NO: 174028 - DNA, 13 bp, Artificial Sequence
  Oligonucleotide for detection of SNP TSC0043309
aaacactaatatt

SEQ ID NO: 174029 - DNA, 13 bp, Artificial Sequence
  Oligonucleotide for detection of SNP TSC0043309
aatattggtgttt

SEQ ID NO: 174030 - DNA, 13 bp, Artificial Sequence
  Oligonucleotide for detection of SNP TSC0043309
aaacaccaatatt

SEQ ID NO: 174031 - DNA, 13 bp, Artificial Sequence
  Oligonucleotide for detection of SNP TSC0043310
gaaagaagtttaa

SEQ ID NO: 174032 - DNA, 13 bp, Artificial Sequence
  Oligonucleotide for detection of SNP TSC0043310
ttaaacttctttc

SEQ ID NO: 174033 - DNA, 13 bp, Artificial Sequence
  Oligonucleotide for detection of SNP TSC0043310
gaaagaggtttaa

SEQ ID NO: 174034 - DNA, 13 bp, Artificial Sequence
  Oligonucleotide for detection of SNP TSC0043310
ttaaacctctttc

SEQ ID NO: 174035 - DNA, 13 bp, Artificial Sequence
  Oligonucleotide for detection of SNP TSC0043311
tttatgtggatgg

SEQ ID NO: 174036 - DNA, 13 bp, Artificial Sequence
  Oligonucleotide for detection of SNP TSC0043311
ccatccacataaa

SEQ ID NO: 174037 - DNA, 13 bp, Artificial Sequence
  Oligonucleotide for detection of SNP TSC0043311
tttatgcggatgg

SEQ ID NO: 174038 - DNA, 13 bp, Artificial Sequence
  Oligonucleotide for detection of SNP TSC0043311
ccatccgcataaa

SEQ ID NO: 174039 - DNA, 13 bp, Artificial Sequence
  Oligonucleotide for detection of SNP TSC0043311
ttatttgtataag

SEQ ID NO: 174040 - DNA, 13 bp, Artificial Sequence
  Oligonucleotide for detection of SNP TSC0043311
cttatacaaataa

SEQ ID NO: 174041 - DNA, 13 bp, Artificial Sequence
  Oligonucleotide for detection of SNP TSC0043311
ttatttatataag

SEQ ID NO: 174042 - DNA, 13 bp, Artificial Sequence
  Oligonucleotide for detection of SNP TSC0043311
cttatataaataa

SEQ ID NO: 174043 - DNA, 13 bp, Artificial Sequence
  Oligonucleotide for detection of SNP TSC0043311
ttattcgtataag

SEQ ID NO: 174044 - DNA, 13 bp, Artificial Sequence
  Oligonucleotide for detection of SNP TSC0043311
cttatacgaataa

SEQ ID NO: 174045 - DNA, 13 bp, Artificial Sequence
  Oligonucleotide for detection of SNP TSC0043312
tgtaaatatgagt

SEQ ID NO: 174046 - DNA, 13 bp, Artificial Sequence
  Oligonucleotide for detection of SNP TSC0043312
actcatatttaca

SEQ ID NO: 174047 - DNA, 13 bp, Artificial Sequence
  Oligonucleotide for detection of SNP TSC0043312
tgtaaagatgagt

SEQ ID NO: 174048 - DNA, 13 bp, Artificial Sequence
  Oligonucleotide for detection of SNP TSC0043312
actcatctttaca

SEQ ID NO: 174049 - DNA, 13 bp, Artificial Sequence
  Oligonucleotide for detection of SNP TSC0043312
tgtaaatacgagt

SEQ ID NO: 174050 - DNA, 13 bp, Artificial Sequence
  Oligonucleotide for detection of SNP TSC0043312
actcgtatttaca

SEQ ID NO: 174051 - DNA, 13 bp, Artificial Sequence
  Oligonucleotide for detection of SNP TSC0043312
tgtaaagacgagt

SEQ ID NO: 174052 - DNA, 13 bp, Artificial Sequence
  Oligonucleotide for detection of SNP TSC0043312
actcgtctttaca

SEQ ID NO: 174053 - DNA, 13 bp, Artificial Sequence
  Oligonucleotide for detection of SNP TSC0043312
atttgtgtttata

SEQ ID NO: 174054 - DNA, 13 bp, Artificial Sequence
  Oligonucleotide for detection of SNP TSC0043312
tataaacacaaat

SEQ ID NO: 174055 - DNA, 13 bp, Artificial Sequence
  Oligonucleotide for detection of SNP TSC0043312
atttgtttttata

SEQ ID NO: 174056 - DNA, 13 bp, Artificial Sequence
  Oligonucleotide for detection of SNP TSC0043312
tataaaaacaaat

SEQ ID NO: 174057 - DNA, 13 bp, Artificial Sequence
  Oligonucleotide for detection of SNP TSC0043312
attcgtgtttata

SEQ ID NO: 174058 - DNA, 13 bp, Artificial Sequence
  Oligonucleotide for detection of SNP TSC0043312
tataaacacgaat

SEQ ID NO: 174059 - DNA, 13 bp, Artificial Sequence
  Oligonucleotide for detection of SNP TSC0043312
attcgtttttata

SEQ ID NO: 174060 - DNA, 13 bp, Artificial Sequence
  Oligonucleotide for detection of SNP TSC0043312
tataaaaacgaat

SEQ ID NO: 174061 - DNA, 13 bp, Artificial Sequence
  Oligonucleotide for detection of SNP TSC0043313
aaattaaagtttg

SEQ ID NO: 174062 - DNA, 13 bp, Artificial Sequence
  Oligonucleotide for detection of SNP TSC0043313
caaactttaattt

SEQ ID NO: 174063 - DNA, 13 bp, Artificial Sequence
  Oligonucleotide for detection of SNP TSC0043313
aaattatagtttg

SEQ ID NO: 174064 - DNA, 13 bp, Artificial Sequence
  Oligonucleotide for detection of SNP TSC0043313
caaactataattt

SEQ ID NO: 174065 - DNA, 13 bp, Artificial Sequence
  Oligonucleotide for detection of SNP TSC0043313
taagttttagttt

SEQ ID NO: 174066 - DNA, 13 bp, Artificial Sequence
  Oligonucleotide for detection of SNP TSC0043313
aaactaaaactta

SEQ ID NO: 174067 - DNA, 13 bp, Artificial Sequence
  Oligonucleotide for detection of SNP TSC0043313
taagttatagttt

SEQ ID NO: 174068 - DNA, 13 bp, Artificial Sequence
  Oligonucleotide for detection of SNP TSC0043313
aaactataactta

SEQ ID NO: 174069 - DNA, 13 bp, Artificial Sequence
  Oligonucleotide for detection of SNP TSC0043314
gatataaaaaata

SEQ ID NO: 174070 - DNA, 13 bp, Artificial Sequence
  Oligonucleotide for detection of SNP TSC0043314
tattttttatatc

SEQ ID NO: 174071 - DNA, 13 bp, Artificial Sequence
  Oligonucleotide for detection of SNP TSC0043314
gatatagaaaata

SEQ ID NO: 174072 - DNA, 13 bp, Artificial Sequence
  Oligonucleotide for detection of SNP TSC0043314
tattttctatatc

SEQ ID NO: 174073 - DNA, 13 bp, Artificial Sequence
  Oligonucleotide for detection of SNP TSC0043315
taaattaaaatta

SEQ ID NO: 174074 - DNA, 13 bp, Artificial Sequence
  Oligonucleotide for detection of SNP TSC0043315
taattttaattta

SEQ ID NO: 174075 - DNA, 13 bp, Artificial Sequence
  Oligonucleotide for detection of SNP TSC0043315
taaatttaaatta

SEQ ID NO: 174076 - DNA, 13 bp, Artificial Sequence
  Oligonucleotide for detection of SNP TSC0043315
taatttaaattta

SEQ ID NO: 174077 - DNA, 13 bp, Artificial Sequence
  Oligonucleotide for detection of SNP TSC0043315
taattttgatttg

SEQ ID NO: 174078 - DNA, 13 bp, Artificial Sequence
  Oligonucleotide for detection of SNP TSC0043315
caaatcaaaatta

SEQ ID NO: 174079 - DNA, 13 bp, Artificial Sequence
  Oligonucleotide for detection of SNP TSC0043315
taatttggatttg

SEQ ID NO: 174080 - DNA, 13 bp, Artificial Sequence
  Oligonucleotide for detection of SNP TSC0043315
caaatccaaatta

SEQ ID NO: 174081 - DNA, 13 bp, Artificial Sequence
  Oligonucleotide for detection of SNP TSC0008517
aatatagtgatag

SEQ ID NO: 174082 - DNA, 13 bp, Artificial Sequence
  Oligonucleotide for detection of SNP TSC0008517
ctatcactatatt

SEQ ID NO: 174083 - DNA, 13 bp, Artificial Sequence
  Oligonucleotide for detection of SNP TSC0008517
aatataatgatag

SEQ ID NO: 174084 - DNA, 13 bp, Artificial Sequence
  Oligonucleotide for detection of SNP TSC0008517
ctatcattatatt

SEQ ID NO: 174085 - DNA, 13 bp, Artificial Sequence
  Oligonucleotide for detection of SNP TSC0043316
tgatatgtatata

SEQ ID NO: 174086 - DNA, 13 bp, Artificial Sequence
  Oligonucleotide for detection of SNP TSC0043316
tatatacatatca

SEQ ID NO: 174087 - DNA, 13 bp, Artificial Sequence
  Oligonucleotide for detection of SNP TSC0043316
tgatatatatata

SEQ ID NO: 174088 - DNA, 13 bp, Artificial Sequence
  Oligonucleotide for detection of SNP TSC0043316
tatatatatatca

SEQ ID NO: 174089 - DNA, 13 bp, Artificial Sequence
  Oligonucleotide for detection of SNP TSC0043317
atttttatgttaa

SEQ ID NO: 174090 - DNA, 13 bp, Artificial Sequence
  Oligonucleotide for detection of SNP TSC0043317
ttaacataaaaat

SEQ ID NO: 174091 - DNA, 13 bp, Artificial Sequence
  Oligonucleotide for detection of SNP TSC0043317
atttttgtgttaa

SEQ ID NO: 174092 - DNA, 13 bp, Artificial Sequence
  Oligonucleotide for detection of SNP TSC0043317
ttaacacaaaaat

SEQ ID NO: 174093 - DNA, 13 bp, Artificial Sequence
  Oligonucleotide for detection of SNP TSC0043318
tattggataaaag

SEQ ID NO: 174094 - DNA, 13 bp, Artificial Sequence
  Oligonucleotide for detection of SNP TSC0043318
cttttatccaata

SEQ ID NO: 174095 - DNA, 13 bp, Artificial Sequence
  Oligonucleotide for detection of SNP TSC0043318
tattggttaaaag

SEQ ID NO: 174096 - DNA, 13 bp, Artificial Sequence
  Oligonucleotide for detection of SNP TSC0043318
cttttaaccaata

SEQ ID NO: 174097 - DNA, 13 bp, Artificial Sequence
  Oligonucleotide for detection of SNP TSC0043318
tttttatttaatg

SEQ ID NO: 174098 - DNA, 13 bp, Artificial Sequence
  Oligonucleotide for detection of SNP TSC0043318
cattaaataaaaa

SEQ ID NO: 174099 - DNA, 13 bp, Artificial Sequence
  Oligonucleotide for detection of SNP TSC0043318
tttttaattaatg

SEQ ID NO: 174100 - DNA, 13 bp, Artificial Sequence
  Oligonucleotide for detection of SNP TSC0043318
cattaattaaaaa

SEQ ID NO: 174101 - DNA, 13 bp, Artificial Sequence
  Oligonucleotide for detection of SNP TSC0043319
ggttatagttgag

SEQ ID NO: 174102 - DNA, 13 bp, Artificial Sequence
  Oligonucleotide for detection of SNP TSC0043319
ctcaactataacc

SEQ ID NO: 174103 - DNA, 13 bp, Artificial Sequence
  Oligonucleotide for detection of SNP TSC0043319
ggttatggttgag

SEQ ID NO: 174104 - DNA, 13 bp, Artificial Sequence
  Oligonucleotide for detection of SNP TSC0043319
ctcaaccataacc

SEQ ID NO: 174105 - DNA, 13 bp, Artificial Sequence
  Oligonucleotide for detection of SNP TSC0043320
taaatattggttt

SEQ ID NO: 174106 - DNA, 13 bp, Artificial Sequence
  Oligonucleotide for detection of SNP TSC0043320
aaaccaatattta

SEQ ID NO: 174107 - DNA, 13 bp, Artificial Sequence
  Oligonucleotide for detection of SNP TSC0043320
taaatagtggttt

SEQ ID NO: 174108 - DNA, 13 bp, Artificial Sequence
  Oligonucleotide for detection of SNP TSC0043320
aaaccactattta

SEQ ID NO: 174109 - DNA, 13 bp, Artificial Sequence
  Oligonucleotide for detection of SNP TSC0043320
aggttagtattta

SEQ ID NO: 174110 - DNA, 13 bp, Artificial Sequence
  Oligonucleotide for detection of SNP TSC0043320
taaatactaacct

SEQ ID NO: 174111 - DNA, 13 bp, Artificial Sequence
  Oligonucleotide for detection of SNP TSC0043320
aggttattattta

SEQ ID NO: 174112 - DNA, 13 bp, Artificial Sequence
  Oligonucleotide for detection of SNP TSC0043320
taaataataacct

SEQ ID NO: 174113 - DNA, 13 bp, Artificial Sequence
  Oligonucleotide for detection of SNP TSC0043321
tataaggtaaata

SEQ ID NO: 174114 - DNA, 13 bp, Artificial Sequence
  Oligonucleotide for detection of SNP TSC0043321
tatttaccttata

SEQ ID NO: 174115 - DNA, 13 bp, Artificial Sequence
  Oligonucleotide for detection of SNP TSC0043321
tataagataaata

SEQ ID NO: 174116 - DNA, 13 bp, Artificial Sequence
  Oligonucleotide for detection of SNP TSC0043321
tatttatcttata

SEQ ID NO: 174117 - DNA, 13 bp, Artificial Sequence
  Oligonucleotide for detection of SNP TSC0043322
tttttatagatat

SEQ ID NO: 174118 - DNA, 13 bp, Artificial Sequence
  Oligonucleotide for detection of SNP TSC0043322
atatctataaaaa

SEQ ID NO: 174119 - DNA, 13 bp, Artificial Sequence
  Oligonucleotide for detection of SNP TSC0043322
tttttagagatat

SEQ ID NO: 174120 - DNA, 13 bp, Artificial Sequence
  Oligonucleotide for detection of SNP TSC0043322
atatctctaaaaa

SEQ ID NO: 174121 - DNA, 13 bp, Artificial Sequence
  Oligonucleotide for detection of SNP TSC0043322
atatttttaagaa

SEQ ID NO: 174122 - DNA, 13 bp, Artificial Sequence
  Oligonucleotide for detection of SNP TSC0043322
ttcttaaaaatat

SEQ ID NO: 174123 - DNA, 13 bp, Artificial Sequence
  Oligonucleotide for detection of SNP TSC0043324
agggtaaattaty

SEQ ID NO: 174124 - DNA, 13 bp, Artificial Sequence
  Oligonucleotide for detection of SNP TSC0043324
rataatttaccct

SEQ ID NO: 174125 - DNA, 13 bp, Artificial Sequence
  Oligonucleotide for detection of SNP TSC0043324
agggtagattaty

SEQ ID NO: 174126 - DNA, 13 bp, Artificial Sequence
  Oligonucleotide for detection of SNP TSC0043324
rataatctaccct

SEQ ID NO: 174127 - DNA, 13 bp, Artificial Sequence
  Oligonucleotide for detection of SNP TSC0043326
gtaggaaatgaga

SEQ ID NO: 174128 - DNA, 13 bp, Artificial Sequence
  Oligonucleotide for detection of SNP TSC0043326
tctcatttcctac

SEQ ID NO: 174129 - DNA, 13 bp, Artificial Sequence
  Oligonucleotide for detection of SNP TSC0043326
gtaggagatgaga

SEQ ID NO: 174130 - DNA, 13 bp, Artificial Sequence
  Oligonucleotide for detection of SNP TSC0043326
tctcatctcctac

SEQ ID NO: 174131 - DNA, 13 bp, Artificial Sequence
  Oligonucleotide for detection of SNP TSC0043327
aatagaagggtta

SEQ ID NO: 174132 - DNA, 13 bp, Artificial Sequence
  Oligonucleotide for detection of SNP TSC0043327
taacccttctatt

SEQ ID NO: 174133 - DNA, 13 bp, Artificial Sequence
  Oligonucleotide for detection of SNP TSC0043327
aatagaggggtta

SEQ ID NO: 174134 - DNA, 13 bp, Artificial Sequence
  Oligonucleotide for detection of SNP TSC0043327
taacccctctatt

SEQ ID NO: 174135 - DNA, 13 bp, Artificial Sequence
  Oligonucleotide for detection of SNP TSC0043328
gaagatttgaata

SEQ ID NO: 174136 - DNA, 13 bp, Artificial Sequence
  Oligonucleotide for detection of SNP TSC0043328
tattcaaatcttc

SEQ ID NO: 174137 - DNA, 13 bp, Artificial Sequence
  Oligonucleotide for detection of SNP TSC0043328
gaagatgtgaata

SEQ ID NO: 174138 - DNA, 13 bp, Artificial Sequence
  Oligonucleotide for detection of SNP TSC0043328
tattcacatcttc

SEQ ID NO: 174139 - DNA, 13 bp, Artificial Sequence
  Oligonucleotide for detection of SNP TSC0043328
tgtttagatttty

SEQ ID NO: 174140 - DNA, 13 bp, Artificial Sequence
  Oligonucleotide for detection of SNP TSC0043328
raaaatctaaaca

SEQ ID NO: 174141 - DNA, 13 bp, Artificial Sequence
  Oligonucleotide for detection of SNP TSC0043328
tgtttatatttty

SEQ ID NO: 174142 - DNA, 13 bp, Artificial Sequence
  Oligonucleotide for detection of SNP TSC0043328
raaaatataaaca

SEQ ID NO: 174143 - DNA, 13 bp, Artificial Sequence
  Oligonucleotide for detection of SNP TSC0043329
gagagatgattta

SEQ ID NO: 174144 - DNA, 13 bp, Artificial Sequence
  Oligonucleotide for detection of SNP TSC0043329
taaatcatctctc

SEQ ID NO: 174145 - DNA, 13 bp, Artificial Sequence
  Oligonucleotide for detection of SNP TSC0043329
gagagacgattta

SEQ ID NO: 174146 - DNA, 13 bp, Artificial Sequence
  Oligonucleotide for detection of SNP TSC0043329
taaatcgtctctc

SEQ ID NO: 174147 - DNA, 13 bp, Artificial Sequence
  Oligonucleotide for detection of SNP TSC0043329
tggattgttttty

SEQ ID NO: 174148 - DNA, 13 bp, Artificial Sequence
  Oligonucleotide for detection of SNP TSC0043329
raaaaacaatcca

SEQ ID NO: 174149 - DNA, 13 bp, Artificial Sequence
  Oligonucleotide for detection of SNP TSC0043329
tggattattttty

SEQ ID NO: 174150 - DNA, 13 bp, Artificial Sequence
  Oligonucleotide for detection of SNP TSC0043329
raaaaataatcca

SEQ ID NO: 174151 - DNA, 13 bp, Artificial Sequence
  Oligonucleotide for detection of SNP TSC0043329
tggatcgttttty

SEQ ID NO: 174152 - DNA, 13 bp, Artificial Sequence
  Oligonucleotide for detection of SNP TSC0043329
raaaaacgatcca

SEQ ID NO: 174153 - DNA, 13 bp, Artificial Sequence
  Oligonucleotide for detection of SNP TSC0043330
attttaatatttt

SEQ ID NO: 174154 - DNA, 13 bp, Artificial Sequence
  Oligonucleotide for detection of SNP TSC0043330
aaaatattaaaat

SEQ ID NO: 174155 - DNA, 13 bp, Artificial Sequence
  Oligonucleotide for detection of SNP TSC0043331
tgttattggtttt

SEQ ID NO: 174156 - DNA, 13 bp, Artificial Sequence
  Oligonucleotide for detection of SNP TSC0043331
aaaaccaataaca

SEQ ID NO: 174157 - DNA, 13 bp, Artificial Sequence
  Oligonucleotide for detection of SNP TSC0043331
tgttatcggtttt

SEQ ID NO: 174158 - DNA, 13 bp, Artificial Sequence
  Oligonucleotide for detection of SNP TSC0043331
aaaaccgataaca

SEQ ID NO: 174159 - DNA, 13 bp, Artificial Sequence
  Oligonucleotide for detection of SNP TSC0043331
aggattgatgata

SEQ ID NO: 174160 - DNA, 13 bp, Artificial Sequence
  Oligonucleotide for detection of SNP TSC0043331
tatcatcaatcct

SEQ ID NO: 174161 - DNA, 13 bp, Artificial Sequence
  Oligonucleotide for detection of SNP TSC0043331
aggattaatgata

SEQ ID NO: 174162 - DNA, 13 bp, Artificial Sequence
  Oligonucleotide for detection of SNP TSC0043331
tatcattaatcct

SEQ ID NO: 174163 - DNA, 13 bp, Artificial Sequence
  Oligonucleotide for detection of SNP TSC0043331
aggatcgatgata

SEQ ID NO: 174164 - DNA, 13 bp, Artificial Sequence
  Oligonucleotide for detection of SNP TSC0043331
tatcatcgatcct

SEQ ID NO: 174165 - DNA, 13 bp, Artificial Sequence
  Oligonucleotide for detection of SNP TSC0043332
gaattaaataaaa

SEQ ID NO: 174166 - DNA, 13 bp, Artificial Sequence
  Oligonucleotide for detection of SNP TSC0043332
ttttatttaattc

SEQ ID NO: 174167 - DNA, 13 bp, Artificial Sequence
  Oligonucleotide for detection of SNP TSC0043332
gaattatataaaa

SEQ ID NO: 174168 - DNA, 13 bp, Artificial Sequence
  Oligonucleotide for detection of SNP TSC0043332
ttttatataattc

SEQ ID NO: 174169 - DNA, 13 bp, Artificial Sequence
  Oligonucleotide for detection of SNP TSC0043332
ttttatttaatty

SEQ ID NO: 174170 - DNA, 13 bp, Artificial Sequence
  Oligonucleotide for detection of SNP TSC0043332
raattaaataaaa

SEQ ID NO: 174171 - DNA, 13 bp, Artificial Sequence
  Oligonucleotide for detection of SNP TSC0043332
ttttatgtaatty

SEQ ID NO: 174172 - DNA, 13 bp, Artificial Sequence
  Oligonucleotide for detection of SNP TSC0043332
raattacataaaa

SEQ ID NO: 174173 - DNA, 13 bp, Artificial Sequence
  Oligonucleotide for detection of SNP TSC0043333
tgatatagggtta

SEQ ID NO: 174174 - DNA, 13 bp, Artificial Sequence
  Oligonucleotide for detection of SNP TSC0043333
taaccctatatca

SEQ ID NO: 174175 - DNA, 13 bp, Artificial Sequence
  Oligonucleotide for detection of SNP TSC0043333
tgatatggggtta

SEQ ID NO: 174176 - DNA, 13 bp, Artificial Sequence
  Oligonucleotide for detection of SNP TSC0043333
taaccccatatca

SEQ ID NO: 174177 - DNA, 13 bp, Artificial Sequence
  Oligonucleotide for detection of SNP TSC0043333
tgatacggggtta

SEQ ID NO: 174178 - DNA, 13 bp, Artificial Sequence
  Oligonucleotide for detection of SNP TSC0043333
taaccccgtatca

SEQ ID NO: 174179 - DNA, 13 bp, Artificial Sequence
  Oligonucleotide for detection of SNP TSC0043333
tggttttgtatta

SEQ ID NO: 174180 - DNA, 13 bp, Artificial Sequence
  Oligonucleotide for detection of SNP TSC0043333
taatacaaaacca

SEQ ID NO: 174181 - DNA, 13 bp, Artificial Sequence
  Oligonucleotide for detection of SNP TSC0043333
tggtttcgtatta

SEQ ID NO: 174182 - DNA, 13 bp, Artificial Sequence
  Oligonucleotide for detection of SNP TSC0043333
taatacgaaacca

SEQ ID NO: 174183 - DNA, 13 bp, Artificial Sequence
  Oligonucleotide for detection of SNP TSC0043334
ggtttattttggt

SEQ ID NO: 174184 - DNA, 13 bp, Artificial Sequence
  Oligonucleotide for detection of SNP TSC0043334
accaaaataaacc

SEQ ID NO: 174185 - DNA, 13 bp, Artificial Sequence
  Oligonucleotide for detection of SNP TSC0043334
ggtttagtttggt

SEQ ID NO: 174186 - DNA, 13 bp, Artificial Sequence
  Oligonucleotide for detection of SNP TSC0043334
accaaactaaacc

SEQ ID NO: 174187 - DNA, 13 bp, Artificial Sequence
  Oligonucleotide for detection of SNP TSC0043334
attaaggtaagty

SEQ ID NO: 174188 - DNA, 13 bp, Artificial Sequence
  Oligonucleotide for detection of SNP TSC0043334
racttaccttaat

SEQ ID NO: 174189 - DNA, 13 bp, Artificial Sequence
  Oligonucleotide for detection of SNP TSC0043334
attaagttaagty

SEQ ID NO: 174190 - DNA, 13 bp, Artificial Sequence
  Oligonucleotide for detection of SNP TSC0043334
racttaacttaat

SEQ ID NO: 174191 - DNA, 13 bp, Artificial Sequence
  Oligonucleotide for detection of SNP TSC0006588
gtttaaaaaggay

SEQ ID NO: 174192 - DNA, 13 bp, Artificial Sequence
  Oligonucleotide for detection of SNP TSC0006588
rtcctttttaaac

SEQ ID NO: 174193 - DNA, 13 bp, Artificial Sequence
  Oligonucleotide for detection of SNP TSC0006588
gtttaataaggay

SEQ ID NO: 174194 - DNA, 13 bp, Artificial Sequence
  Oligonucleotide for detection of SNP TSC0006588
rtccttattaaac

SEQ ID NO: 174195 - DNA, 13 bp, Artificial Sequence
  Oligonucleotide for detection of SNP TSC0006588
gttttttttggay

SEQ ID NO: 174196 - DNA, 13 bp, Artificial Sequence
  Oligonucleotide for detection of SNP TSC0006588
rtccaaaaaaaac

SEQ ID NO: 174197 - DNA, 13 bp, Artificial Sequence
  Oligonucleotide for detection of SNP TSC0006588
gtttttgttggay

SEQ ID NO: 174198 - DNA, 13 bp, Artificial Sequence
  Oligonucleotide for detection of SNP TSC0006588
rtccaacaaaaac

SEQ ID NO: 174199 - DNA, 13 bp, Artificial Sequence
  Oligonucleotide for detection of SNP TSC0043335
atagtgaaggttg

SEQ ID NO: 174200 - DNA, 13 bp, Artificial Sequence
  Oligonucleotide for detection of SNP TSC0043335
caaccttcactat

SEQ ID NO: 174201 - DNA, 13 bp, Artificial Sequence
  Oligonucleotide for detection of SNP TSC0043335
atagtggaggttg

SEQ ID NO: 174202 - DNA, 13 bp, Artificial Sequence
  Oligonucleotide for detection of SNP TSC0043335
caacctccactat

SEQ ID NO: 174203 - DNA, 13 bp, Artificial Sequence
  Oligonucleotide for detection of SNP TSC0043335
atagcgaaggttg

SEQ ID NO: 174204 - DNA, 13 bp, Artificial Sequence
  Oligonucleotide for detection of SNP TSC0043335
caaccttcgctat

SEQ ID NO: 174205 - DNA, 13 bp, Artificial Sequence
  Oligonucleotide for detection of SNP TSC0043335
atagcggaggttg

SEQ ID NO: 174206 - DNA, 13 bp, Artificial Sequence
  Oligonucleotide for detection of SNP TSC0043335
caacctccgctat

SEQ ID NO: 174207 - DNA, 13 bp, Artificial Sequence
  Oligonucleotide for detection of SNP TSC0043336
gtagttaggatga

SEQ ID NO: 174208 - DNA, 13 bp, Artificial Sequence
  Oligonucleotide for detection of SNP TSC0043336
tcatcctaactac

SEQ ID NO: 174209 - DNA, 13 bp, Artificial Sequence
  Oligonucleotide for detection of SNP TSC0043336
gtagttgggatga

SEQ ID NO: 174210 - DNA, 13 bp, Artificial Sequence
  Oligonucleotide for detection of SNP TSC0043336
tcatcccaactac

SEQ ID NO: 174211 - DNA, 13 bp, Artificial Sequence
  Oligonucleotide for detection of SNP TSC0043340
aaatagtaaagty

SEQ ID NO: 174212 - DNA, 13 bp, Artificial Sequence
  Oligonucleotide for detection of SNP TSC0043340
ractttactattt

SEQ ID NO: 174213 - DNA, 13 bp, Artificial Sequence
  Oligonucleotide for detection of SNP TSC0043340
aaataggaaagty

SEQ ID NO: 174214 - DNA, 13 bp, Artificial Sequence
  Oligonucleotide for detection of SNP TSC0043340
ractttcctattt

SEQ ID NO: 174215 - DNA, 13 bp, Artificial Sequence
  Oligonucleotide for detection of SNP TSC0043340
gattttgttgttt

SEQ ID NO: 174216 - DNA, 13 bp, Artificial Sequence
  Oligonucleotide for detection of SNP TSC0043340
aaacaacaaaatc

SEQ ID NO: 174217 - DNA, 13 bp, Artificial Sequence
  Oligonucleotide for detection of SNP TSC0043340
gatttttttgttt

SEQ ID NO: 174218 - DNA, 13 bp, Artificial Sequence
  Oligonucleotide for detection of SNP TSC0043340
aaacaaaaaaatc

SEQ ID NO: 174219 - DNA, 13 bp, Artificial Sequence
  Oligonucleotide for detection of SNP TSC0043341
ttattttgtgaaa

SEQ ID NO: 174220 - DNA, 13 bp, Artificial Sequence
  Oligonucleotide for detection of SNP TSC0043341
tttcacaaaataa

SEQ ID NO: 174221 - DNA, 13 bp, Artificial Sequence
  Oligonucleotide for detection of SNP TSC0043341
ttatttcgtgaaa

SEQ ID NO: 174222 - DNA, 13 bp, Artificial Sequence
  Oligonucleotide for detection of SNP TSC0043341
tttcacgaaataa

SEQ ID NO: 174223 - DNA, 13 bp, Artificial Sequence
  Oligonucleotide for detection of SNP TSC0043341
ttttatgaaatga

SEQ ID NO: 174224 - DNA, 13 bp, Artificial Sequence
  Oligonucleotide for detection of SNP TSC0043341
tcatttcataaaa

SEQ ID NO: 174225 - DNA, 13 bp, Artificial Sequence
  Oligonucleotide for detection of SNP TSC0043341
ttttataaaatga

SEQ ID NO: 174226 - DNA, 13 bp, Artificial Sequence
  Oligonucleotide for detection of SNP TSC0043341
tcattttataaaa

SEQ ID NO: 174227 - DNA, 13 bp, Artificial Sequence
  Oligonucleotide for detection of SNP TSC0043341
ttttacgaaatga

SEQ ID NO: 174228 - DNA, 13 bp, Artificial Sequence
  Oligonucleotide for detection of SNP TSC0043341
tcatttcgtaaaa

SEQ ID NO: 174229 - DNA, 13 bp, Artificial Sequence
  Oligonucleotide for detection of SNP TSC0043343
aatgggatttttt

SEQ ID NO: 174230 - DNA, 13 bp, Artificial Sequence
  Oligonucleotide for detection of SNP TSC0043343
aaaaaatcccatt

SEQ ID NO: 174231 - DNA, 13 bp, Artificial Sequence
  Oligonucleotide for detection of SNP TSC0043344
tgaaataatttta

SEQ ID NO: 174232 - DNA, 13 bp, Artificial Sequence
  Oligonucleotide for detection of SNP TSC0043344
taaaattatttca

SEQ ID NO: 174233 - DNA, 13 bp, Artificial Sequence
  Oligonucleotide for detection of SNP TSC0043344
tgaaattatttta

SEQ ID NO: 174234 - DNA, 13 bp, Artificial Sequence
  Oligonucleotide for detection of SNP TSC0043344
taaaataatttca

SEQ ID NO: 174235 - DNA, 13 bp, Artificial Sequence
  Oligonucleotide for detection of SNP TSC0043344
taggattgtttta

SEQ ID NO: 174236 - DNA, 13 bp, Artificial Sequence
  Oligonucleotide for detection of SNP TSC0043344
taaaacaatccta

SEQ ID NO: 174237 - DNA, 13 bp, Artificial Sequence
  Oligonucleotide for detection of SNP TSC0043346
gaggtggtattta

SEQ ID NO: 174238 - DNA, 13 bp, Artificial Sequence
  Oligonucleotide for detection of SNP TSC0043346
taaataccacctc

SEQ ID NO: 174239 - DNA, 13 bp, Artificial Sequence
  Oligonucleotide for detection of SNP TSC0043346
gaggtgatattta

SEQ ID NO: 174240 - DNA, 13 bp, Artificial Sequence
  Oligonucleotide for detection of SNP TSC0043346
taaatatcacctc

SEQ ID NO: 174241 - DNA, 13 bp, Artificial Sequence
  Oligonucleotide for detection of SNP TSC0043353
tatagaatgtgga

SEQ ID NO: 174242 - DNA, 13 bp, Artificial Sequence
  Oligonucleotide for detection of SNP TSC0043353
tccacattctata

SEQ ID NO: 174243 - DNA, 13 bp, Artificial Sequence
  Oligonucleotide for detection of SNP TSC0043353
tatagattgtgga

SEQ ID NO: 174244 - DNA, 13 bp, Artificial Sequence
  Oligonucleotide for detection of SNP TSC0043353
tccacaatctata

SEQ ID NO: 174245 - DNA, 13 bp, Artificial Sequence
  Oligonucleotide for detection of SNP TSC0043353
tatagaacgtgga

SEQ ID NO: 174246 - DNA, 13 bp, Artificial Sequence
  Oligonucleotide for detection of SNP TSC0043353
tccacgttctata

SEQ ID NO: 174247 - DNA, 13 bp, Artificial Sequence
  Oligonucleotide for detection of SNP TSC0043353
tatagatcgtgga

SEQ ID NO: 174248 - DNA, 13 bp, Artificial Sequence
  Oligonucleotide for detection of SNP TSC0043353
tccacgatctata

SEQ ID NO: 174249 - DNA, 13 bp, Artificial Sequence
  Oligonucleotide for detection of SNP TSC0043353
tatagaatgcgga

SEQ ID NO: 174250 - DNA, 13 bp, Artificial Sequence
  Oligonucleotide for detection of SNP TSC0043353
tccgcattctata

SEQ ID NO: 174251 - DNA, 13 bp, Artificial Sequence
  Oligonucleotide for detection of SNP TSC0043353
tatagattgcgga

SEQ ID NO: 174252 - DNA, 13 bp, Artificial Sequence
  Oligonucleotide for detection of SNP TSC0043353
tccgcaatctata

SEQ ID NO: 174253 - DNA, 13 bp, Artificial Sequence
  Oligonucleotide for detection of SNP TSC0043353
tatagaacgcgga

SEQ ID NO: 174254 - DNA, 13 bp, Artificial Sequence
  Oligonucleotide for detection of SNP TSC0043353
tccgcgttctata

SEQ ID NO: 174255 - DNA, 13 bp, Artificial Sequence
  Oligonucleotide for detection of SNP TSC0043353
tatagatcgcgga

SEQ ID NO: 174256 - DNA, 13 bp, Artificial Sequence
  Oligonucleotide for detection of SNP TSC0043353
tccgcgatctata

SEQ ID NO: 174257 - DNA, 13 bp, Artificial Sequence
  Oligonucleotide for detection of SNP TSC0043353
tttgtgttttgta

SEQ ID NO: 174258 - DNA, 13 bp, Artificial Sequence
  Oligonucleotide for detection of SNP TSC0043353
tacaaaacacaaa

SEQ ID NO: 174259 - DNA, 13 bp, Artificial Sequence
  Oligonucleotide for detection of SNP TSC0043353
tttgtggtttgta

SEQ ID NO: 174260 - DNA, 13 bp, Artificial Sequence
  Oligonucleotide for detection of SNP TSC0043353
tacaaaccacaaa

SEQ ID NO: 174261 - DNA, 13 bp, Artificial Sequence
  Oligonucleotide for detection of SNP TSC0043353
ttcgtgttttgta

SEQ ID NO: 174262 - DNA, 13 bp, Artificial Sequence
  Oligonucleotide for detection of SNP TSC0043353
tacaaaacacgaa

SEQ ID NO: 174263 - DNA, 13 bp, Artificial Sequence
  Oligonucleotide for detection of SNP TSC0043353
ttcgtggtttgta

SEQ ID NO: 174264 - DNA, 13 bp, Artificial Sequence
  Oligonucleotide for detection of SNP TSC0043353
tacaaaccacgaa

SEQ ID NO: 174265 - DNA, 13 bp, Artificial Sequence
  Oligonucleotide for detection of SNP TSC0043353
tttgcgttttgta

SEQ ID NO: 174266 - DNA, 13 bp, Artificial Sequence
  Oligonucleotide for detection of SNP TSC0043353
tacaaaacgcaaa

SEQ ID NO: 174267 - DNA, 13 bp, Artificial Sequence
  Oligonucleotide for detection of SNP TSC0043353
tttgcggtttgta

SEQ ID NO: 174268 - DNA, 13 bp, Artificial Sequence
  Oligonucleotide for detection of SNP TSC0043353
tacaaaccgcaaa

SEQ ID NO: 174269 - DNA, 13 bp, Artificial Sequence
  Oligonucleotide for detection of SNP TSC0043353
ttcgcgttttgta

SEQ ID NO: 174270 - DNA, 13 bp, Artificial Sequence
  Oligonucleotide for detection of SNP TSC0043353
tacaaaacgcgaa

SEQ ID NO: 174271 - DNA, 13 bp, Artificial Sequence
  Oligonucleotide for detection of SNP TSC0043353
ttcgcggtttgta

SEQ ID NO: 174272 - DNA, 13 bp, Artificial Sequence
  Oligonucleotide for detection of SNP TSC0043353
tacaaaccgcgaa

SEQ ID NO: 174273 - DNA, 13 bp, Artificial Sequence
  Oligonucleotide for detection of SNP TSC0043354
tgtggaagtgtgy

SEQ ID NO: 174274 - DNA, 13 bp, Artificial Sequence
  Oligonucleotide for detection of SNP TSC0043354
rcacacttccaca

SEQ ID NO: 174275 - DNA, 13 bp, Artificial Sequence
  Oligonucleotide for detection of SNP TSC0043354
tgtggaggtgtgy

SEQ ID NO: 174276 - DNA, 13 bp, Artificial Sequence
  Oligonucleotide for detection of SNP TSC0043354
rcacacctccaca

SEQ ID NO: 174277 - DNA, 13 bp, Artificial Sequence
  Oligonucleotide for detection of SNP TSC0043354
cgtggaagtgtgy

SEQ ID NO: 174278 - DNA, 13 bp, Artificial Sequence
  Oligonucleotide for detection of SNP TSC0043354
rcacacttccacg

SEQ ID NO: 174279 - DNA, 13 bp, Artificial Sequence
  Oligonucleotide for detection of SNP TSC0043354
cgtggaggtgtgy

SEQ ID NO: 174280 - DNA, 13 bp, Artificial Sequence
  Oligonucleotide for detection of SNP TSC0043354
rcacacctccacg

SEQ ID NO: 174281 - DNA, 13 bp, Artificial Sequence
  Oligonucleotide for detection of SNP TSC0043354
tgcggaagtgtgy

SEQ ID NO: 174282 - DNA, 13 bp, Artificial Sequence
  Oligonucleotide for detection of SNP TSC0043354
rcacacttccgca

SEQ ID NO: 174283 - DNA, 13 bp, Artificial Sequence
  Oligonucleotide for detection of SNP TSC0043354
tgcggaggtgtgy

SEQ ID NO: 174284 - DNA, 13 bp, Artificial Sequence
  Oligonucleotide for detection of SNP TSC0043354
rcacacctccgca

SEQ ID NO: 174285 - DNA, 13 bp, Artificial Sequence
  Oligonucleotide for detection of SNP TSC0043354
cgcggaagtgtgy

SEQ ID NO: 174286 - DNA, 13 bp, Artificial Sequence
  Oligonucleotide for detection of SNP TSC0043354
rcacacttccgcg

SEQ ID NO: 174287 - DNA, 13 bp, Artificial Sequence
  Oligonucleotide for detection of SNP TSC0043354
cgcggaggtgtgy

SEQ ID NO: 174288 - DNA, 13 bp, Artificial Sequence
  Oligonucleotide for detection of SNP TSC0043354
rcacacctccgcg

SEQ ID NO: 174289 - DNA, 13 bp, Artificial Sequence
  Oligonucleotide for detection of SNP TSC0043357
gtgttttgtttag

SEQ ID NO: 174290 - DNA, 13 bp, Artificial Sequence
  Oligonucleotide for detection of SNP TSC0043357
ctaaacaaaacac

SEQ ID NO: 174291 - DNA, 13 bp, Artificial Sequence
  Oligonucleotide for detection of SNP TSC0043357
gtgtttggtttag

SEQ ID NO: 174292 - DNA, 13 bp, Artificial Sequence
  Oligonucleotide for detection of SNP TSC0043357
ctaaaccaaacac

SEQ ID NO: 174293 - DNA, 13 bp, Artificial Sequence
  Oligonucleotide for detection of SNP TSC0043357
gtgtttcgtttag

SEQ ID NO: 174294 - DNA, 13 bp, Artificial Sequence
  Oligonucleotide for detection of SNP TSC0043357
ctaaacgaaacac

SEQ ID NO: 174295 - DNA, 13 bp, Artificial Sequence
  Oligonucleotide for detection of SNP TSC0043357
ttgagtgaggtay

SEQ ID NO: 174296 - DNA, 13 bp, Artificial Sequence
  Oligonucleotide for detection of SNP TSC0043357
rtacctcactcaa

SEQ ID NO: 174297 - DNA, 13 bp, Artificial Sequence
  Oligonucleotide for detection of SNP TSC0043357
ttgagttaggtay

SEQ ID NO: 174298 - DNA, 13 bp, Artificial Sequence
  Oligonucleotide for detection of SNP TSC0043357
rtacctaactcaa

SEQ ID NO: 174299 - DNA, 13 bp, Artificial Sequence
  Oligonucleotide for detection of SNP TSC0043357
ttgagcgaggtay

SEQ ID NO: 174300 - DNA, 13 bp, Artificial Sequence
  Oligonucleotide for detection of SNP TSC0043357
rtacctcgctcaa

SEQ ID NO: 174301 - DNA, 13 bp, Artificial Sequence
  Oligonucleotide for detection of SNP TSC0043358
agtttatgagttt

SEQ ID NO: 174302 - DNA, 13 bp, Artificial Sequence
  Oligonucleotide for detection of SNP TSC0043358
aaactcataaact

SEQ ID NO: 174303 - DNA, 13 bp, Artificial Sequence
  Oligonucleotide for detection of SNP TSC0043358
agtttaggagttt

SEQ ID NO: 174304 - DNA, 13 bp, Artificial Sequence
  Oligonucleotide for detection of SNP TSC0043358
aaactcctaaact

SEQ ID NO: 174305 - DNA, 13 bp, Artificial Sequence
  Oligonucleotide for detection of SNP TSC0043358
aaatttatgagtt

SEQ ID NO: 174306 - DNA, 13 bp, Artificial Sequence
  Oligonucleotide for detection of SNP TSC0043358
aactcataaattt

SEQ ID NO: 174307 - DNA, 13 bp, Artificial Sequence
  Oligonucleotide for detection of SNP TSC0043358
aaatttttgagtt

SEQ ID NO: 174308 - DNA, 13 bp, Artificial Sequence
  Oligonucleotide for detection of SNP TSC0043358
aactcaaaaattt

SEQ ID NO: 174309 - DNA, 13 bp, Artificial Sequence
  Oligonucleotide for detection of SNP TSC0043359
tttataattggag

SEQ ID NO: 174310 - DNA, 13 bp, Artificial Sequence
  Oligonucleotide for detection of SNP TSC0043359
ctccaattataaa

SEQ ID NO: 174311 - DNA, 13 bp, Artificial Sequence
  Oligonucleotide for detection of SNP TSC0043359
tttatatttggag

SEQ ID NO: 174312 - DNA, 13 bp, Artificial Sequence
  Oligonucleotide for detection of SNP TSC0043359
ctccaaatataaa

SEQ ID NO: 174313 - DNA, 13 bp, Artificial Sequence
  Oligonucleotide for detection of SNP TSC0043359
ttttaattataag

SEQ ID NO: 174314 - DNA, 13 bp, Artificial Sequence
  Oligonucleotide for detection of SNP TSC0043359
cttataattaaaa

SEQ ID NO: 174315 - DNA, 13 bp, Artificial Sequence
  Oligonucleotide for detection of SNP TSC0043361
tttaaatttttgg

SEQ ID NO: 174316 - DNA, 13 bp, Artificial Sequence
  Oligonucleotide for detection of SNP TSC0043361
ccaaaaatttaaa

SEQ ID NO: 174317 - DNA, 13 bp, Artificial Sequence
  Oligonucleotide for detection of SNP TSC0043361
ttaaggttttaaa

SEQ ID NO: 174318 - DNA, 13 bp, Artificial Sequence
  Oligonucleotide for detection of SNP TSC0043361
tttaaaaccttaa

SEQ ID NO: 174319 - DNA, 13 bp, Artificial Sequence
  Oligonucleotide for detection of SNP TSC0043363
aattagatagtta

SEQ ID NO: 174320 - DNA, 13 bp, Artificial Sequence
  Oligonucleotide for detection of SNP TSC0043363
taactatctaatt

SEQ ID NO: 174321 - DNA, 13 bp, Artificial Sequence
  Oligonucleotide for detection of SNP TSC0043363
aattagttagtta

SEQ ID NO: 174322 - DNA, 13 bp, Artificial Sequence
  Oligonucleotide for detection of SNP TSC0043363
taactaactaatt

SEQ ID NO: 174323 - DNA, 13 bp, Artificial Sequence
  Oligonucleotide for detection of SNP TSC0043363
tgattgtttaatt

SEQ ID NO: 174324 - DNA, 13 bp, Artificial Sequence
  Oligonucleotide for detection of SNP TSC0043363
aattaaacaatca

SEQ ID NO: 174325 - DNA, 13 bp, Artificial Sequence
  Oligonucleotide for detection of SNP TSC0043363
tgattggttaatt

SEQ ID NO: 174326 - DNA, 13 bp, Artificial Sequence
  Oligonucleotide for detection of SNP TSC0043363
aattaaccaatca

SEQ ID NO: 174327 - DNA, 13 bp, Artificial Sequence
  Oligonucleotide for detection of SNP TSC0043364
tagtagattaagg

SEQ ID NO: 174328 - DNA, 13 bp, Artificial Sequence
  Oligonucleotide for detection of SNP TSC0043364
ccttaatctacta

SEQ ID NO: 174329 - DNA, 13 bp, Artificial Sequence
  Oligonucleotide for detection of SNP TSC0043364
tagtaggttaagg

SEQ ID NO: 174330 - DNA, 13 bp, Artificial Sequence
  Oligonucleotide for detection of SNP TSC0043364
ccttaacctacta

SEQ ID NO: 174331 - DNA, 13 bp, Artificial Sequence
  Oligonucleotide for detection of SNP TSC0043365
aaatatggtttgg

SEQ ID NO: 174332 - DNA, 13 bp, Artificial Sequence
  Oligonucleotide for detection of SNP TSC0043365
ccaaaccatattt

SEQ ID NO: 174333 - DNA, 13 bp, Artificial Sequence
  Oligonucleotide for detection of SNP TSC0043365
aaatatagtttgg

SEQ ID NO: 174334 - DNA, 13 bp, Artificial Sequence
  Oligonucleotide for detection of SNP TSC0043365
ccaaactatattt

SEQ ID NO: 174335 - DNA, 13 bp, Artificial Sequence
  Oligonucleotide for detection of SNP TSC0043367
tttagtggaatag

SEQ ID NO: 174336 - DNA, 13 bp, Artificial Sequence
  Oligonucleotide for detection of SNP TSC0043367
ctattccactaaa

SEQ ID NO: 174337 - DNA, 13 bp, Artificial Sequence
  Oligonucleotide for detection of SNP TSC0043367
tttagtagaatag

SEQ ID NO: 174338 - DNA, 13 bp, Artificial Sequence
  Oligonucleotide for detection of SNP TSC0043367
ctattctactaaa

SEQ ID NO: 174339 - DNA, 13 bp, Artificial Sequence
  Oligonucleotide for detection of SNP TSC0043368
gtatataataaay

SEQ ID NO: 174340 - DNA, 13 bp, Artificial Sequence
  Oligonucleotide for detection of SNP TSC0043368
rtttattatatac

SEQ ID NO: 174341 - DNA, 13 bp, Artificial Sequence
  Oligonucleotide for detection of SNP TSC0043368
gtatatgataaay

SEQ ID NO: 174342 - DNA, 13 bp, Artificial Sequence
  Oligonucleotide for detection of SNP TSC0043368
rtttatcatatac

SEQ ID NO: 174343 - DNA, 13 bp, Artificial Sequence
  Oligonucleotide for detection of SNP TSC0043368
gtatacgataaay

SEQ ID NO: 174344 - DNA, 13 bp, Artificial Sequence
  Oligonucleotide for detection of SNP TSC0043368
rtttatcgtatac

SEQ ID NO: 174345 - DNA, 13 bp, Artificial Sequence
  Oligonucleotide for detection of SNP TSC0043369
aatttgattaaaa

SEQ ID NO: 174346 - DNA, 13 bp, Artificial Sequence
  Oligonucleotide for detection of SNP TSC0043369
ttttaatcaaatt

SEQ ID NO: 174347 - DNA, 13 bp, Artificial Sequence
  Oligonucleotide for detection of SNP TSC0043369
aatttgtttaaaa

SEQ ID NO: 174348 - DNA, 13 bp, Artificial Sequence
  Oligonucleotide for detection of SNP TSC0043369
ttttaaacaaatt

SEQ ID NO: 174349 - DNA, 13 bp, Artificial Sequence
  Oligonucleotide for detection of SNP TSC0043369
ttttaattagatt

SEQ ID NO: 174350 - DNA, 13 bp, Artificial Sequence
  Oligonucleotide for detection of SNP TSC0043369
aatctaattaaaa

SEQ ID NO: 174351 - DNA, 13 bp, Artificial Sequence
  Oligonucleotide for detection of SNP TSC0043369
ttttaaatagatt

SEQ ID NO: 174352 - DNA, 13 bp, Artificial Sequence
  Oligonucleotide for detection of SNP TSC0043369
aatctatttaaaa

SEQ ID NO: 174353 - DNA, 13 bp, Artificial Sequence
  Oligonucleotide for detection of SNP TSC0043370
ttaggtattttty

SEQ ID NO: 174354 - DNA, 13 bp, Artificial Sequence
  Oligonucleotide for detection of SNP TSC0043370
raaaaatacctaa

SEQ ID NO: 174355 - DNA, 13 bp, Artificial Sequence
  Oligonucleotide for detection of SNP TSC0043370
ttaggcgttttty

SEQ ID NO: 174356 - DNA, 13 bp, Artificial Sequence
  Oligonucleotide for detection of SNP TSC0043370
raaaaacgcctaa

SEQ ID NO: 174357 - DNA, 13 bp, Artificial Sequence
  Oligonucleotide for detection of SNP TSC0043370
gagaaatgtttag

SEQ ID NO: 174358 - DNA, 13 bp, Artificial Sequence
  Oligonucleotide for detection of SNP TSC0043370
ctaaacatttctc

SEQ ID NO: 174359 - DNA, 13 bp, Artificial Sequence
  Oligonucleotide for detection of SNP TSC0043370
gagaaacgtttag

SEQ ID NO: 174360 - DNA, 13 bp, Artificial Sequence
  Oligonucleotide for detection of SNP TSC0043370
ctaaacgtttctc

SEQ ID NO: 174361 - DNA, 13 bp, Artificial Sequence
  Oligonucleotide for detection of SNP TSC0008064
ttaggtatttatt

SEQ ID NO: 174362 - DNA, 13 bp, Artificial Sequence
  Oligonucleotide for detection of SNP TSC0008064
aataaatacctaa

SEQ ID NO: 174363 - DNA, 13 bp, Artificial Sequence
  Oligonucleotide for detection of SNP TSC0008064
ttaggtgtttatt

SEQ ID NO: 174364 - DNA, 13 bp, Artificial Sequence
  Oligonucleotide for detection of SNP TSC0008064
aataaacacctaa

SEQ ID NO: 174365 - DNA, 13 bp, Artificial Sequence
  Oligonucleotide for detection of SNP TSC0008065
tgtattataaaat

SEQ ID NO: 174366 - DNA, 13 bp, Artificial Sequence
  Oligonucleotide for detection of SNP TSC0008065
attttataataca

SEQ ID NO: 174367 - DNA, 13 bp, Artificial Sequence
  Oligonucleotide for detection of SNP TSC0008065
tgtattttaaaat

SEQ ID NO: 174368 - DNA, 13 bp, Artificial Sequence
  Oligonucleotide for detection of SNP TSC0008065
attttaaaataca

SEQ ID NO: 174369 - DNA, 13 bp, Artificial Sequence
  Oligonucleotide for detection of SNP TSC0008065
attttatggtata

SEQ ID NO: 174370 - DNA, 13 bp, Artificial Sequence
  Oligonucleotide for detection of SNP TSC0008065
tataccataaaat

SEQ ID NO: 174371 - DNA, 13 bp, Artificial Sequence
  Oligonucleotide for detection of SNP TSC0008065
attttagggtata

SEQ ID NO: 174372 - DNA, 13 bp, Artificial Sequence
  Oligonucleotide for detection of SNP TSC0008065
tataccctaaaat

SEQ ID NO: 174373 - DNA, 13 bp, Artificial Sequence
  Oligonucleotide for detection of SNP TSC0006205
aagttttgaagty

SEQ ID NO: 174374 - DNA, 13 bp, Artificial Sequence
  Oligonucleotide for detection of SNP TSC0006205
racttcaaaactt

SEQ ID NO: 174375 - DNA, 13 bp, Artificial Sequence
  Oligonucleotide for detection of SNP TSC0006205
aagtttcgaagty

SEQ ID NO: 174376 - DNA, 13 bp, Artificial Sequence
  Oligonucleotide for detection of SNP TSC0006205
racttcgaaactt

SEQ ID NO: 174377 - DNA, 13 bp, Artificial Sequence
  Oligonucleotide for detection of SNP TSC0006205
gattttgaaattt

SEQ ID NO: 174378 - DNA, 13 bp, Artificial Sequence
  Oligonucleotide for detection of SNP TSC0006205
aaatttcaaaatc

SEQ ID NO: 174379 - DNA, 13 bp, Artificial Sequence
  Oligonucleotide for detection of SNP TSC0006205
gattttaaaattt

SEQ ID NO: 174380 - DNA, 13 bp, Artificial Sequence
  Oligonucleotide for detection of SNP TSC0006205
aaattttaaaatc

SEQ ID NO: 174381 - DNA, 13 bp, Artificial Sequence
  Oligonucleotide for detection of SNP TSC0006205
gatttcgaaattt

SEQ ID NO: 174382 - DNA, 13 bp, Artificial Sequence
  Oligonucleotide for detection of SNP TSC0006205
aaatttcgaaatc

SEQ ID NO: 174383 - DNA, 13 bp, Artificial Sequence
  Oligonucleotide for detection of SNP TSC0043374
agttttgtttagg

SEQ ID NO: 174384 - DNA, 13 bp, Artificial Sequence
  Oligonucleotide for detection of SNP TSC0043374
cctaaacaaaact

SEQ ID NO: 174385 - DNA, 13 bp, Artificial Sequence
  Oligonucleotide for detection of SNP TSC0043374
agttttatttagg

SEQ ID NO: 174386 - DNA, 13 bp, Artificial Sequence
  Oligonucleotide for detection of SNP TSC0043374
cctaaataaaact

SEQ ID NO: 174387 - DNA, 13 bp, Artificial Sequence
  Oligonucleotide for detection of SNP TSC0043375
agttagataggta

SEQ ID NO: 174388 - DNA, 13 bp, Artificial Sequence
  Oligonucleotide for detection of SNP TSC0043375
tacctatctaact

SEQ ID NO: 174389 - DNA, 13 bp, Artificial Sequence
  Oligonucleotide for detection of SNP TSC0043375
agttaggtaggta

SEQ ID NO: 174390 - DNA, 13 bp, Artificial Sequence
  Oligonucleotide for detection of SNP TSC0043375
tacctacctaact

SEQ ID NO: 174391 - DNA, 13 bp, Artificial Sequence
  Oligonucleotide for detection of SNP TSC0043379
tatttagtagagg

SEQ ID NO: 174392 - DNA, 13 bp, Artificial Sequence
  Oligonucleotide for detection of SNP TSC0043379
cctctactaaata

SEQ ID NO: 174393 - DNA, 13 bp, Artificial Sequence
  Oligonucleotide for detection of SNP TSC0043379
tatttaatagagg

SEQ ID NO: 174394 - DNA, 13 bp, Artificial Sequence
  Oligonucleotide for detection of SNP TSC0043379
cctctattaaata

SEQ ID NO: 174395 - DNA, 13 bp, Artificial Sequence
  Oligonucleotide for detection of SNP TSC0043380
ttaattaattaty

SEQ ID NO: 174396 - DNA, 13 bp, Artificial Sequence
  Oligonucleotide for detection of SNP TSC0043380
rataattaattaa

SEQ ID NO: 174397 - DNA, 13 bp, Artificial Sequence
  Oligonucleotide for detection of SNP TSC0043380
ttaatttattaty

SEQ ID NO: 174398 - DNA, 13 bp, Artificial Sequence
  Oligonucleotide for detection of SNP TSC0043380
rataataaattaa

SEQ ID NO: 174399 - DNA, 13 bp, Artificial Sequence
  Oligonucleotide for detection of SNP TSC0043380
ggtggttagttaa

SEQ ID NO: 174400 - DNA, 13 bp, Artificial Sequence
  Oligonucleotide for detection of SNP TSC0043380
ttaactaaccacc

SEQ ID NO: 174401 - DNA, 13 bp, Artificial Sequence
  Oligonucleotide for detection of SNP TSC0043380
ggtggtgagttaa

SEQ ID NO: 174402 - DNA, 13 bp, Artificial Sequence
  Oligonucleotide for detection of SNP TSC0043380
ttaactcaccacc

SEQ ID NO: 174403 - DNA, 13 bp, Artificial Sequence
  Oligonucleotide for detection of SNP TSC0043381
atttttagtaggy

SEQ ID NO: 174404 - DNA, 13 bp, Artificial Sequence
  Oligonucleotide for detection of SNP TSC0043381
rcctactaaaaat

SEQ ID NO: 174405 - DNA, 13 bp, Artificial Sequence
  Oligonucleotide for detection of SNP TSC0043381
atttttggtaggy

SEQ ID NO: 174406 - DNA, 13 bp, Artificial Sequence
  Oligonucleotide for detection of SNP TSC0043381
rcctaccaaaaat

SEQ ID NO: 174407 - DNA, 13 bp, Artificial Sequence
  Oligonucleotide for detection of SNP TSC0043381
attttcggtaggy

SEQ ID NO: 174408 - DNA, 13 bp, Artificial Sequence
  Oligonucleotide for detection of SNP TSC0043381
rcctaccgaaaat

SEQ ID NO: 174409 - DNA, 13 bp, Artificial Sequence
  Oligonucleotide for detection of SNP TSC0043381
gtttgttgaggat

SEQ ID NO: 174410 - DNA, 13 bp, Artificial Sequence
  Oligonucleotide for detection of SNP TSC0043381
atcctcaacaaac

SEQ ID NO: 174411 - DNA, 13 bp, Artificial Sequence
  Oligonucleotide for detection of SNP TSC0043381
gtttgtcgaggat

SEQ ID NO: 174412 - DNA, 13 bp, Artificial Sequence
  Oligonucleotide for detection of SNP TSC0043381
atcctcgacaaac

SEQ ID NO: 174413 - DNA, 13 bp, Artificial Sequence
  Oligonucleotide for detection of SNP TSC0043382
ggtgatatggttt

SEQ ID NO: 174414 - DNA, 13 bp, Artificial Sequence
  Oligonucleotide for detection of SNP TSC0043382
aaaccatatcacc

SEQ ID NO: 174415 - DNA, 13 bp, Artificial Sequence
  Oligonucleotide for detection of SNP TSC0043382
ggtgatgtggttt

SEQ ID NO: 174416 - DNA, 13 bp, Artificial Sequence
  Oligonucleotide for detection of SNP TSC0043382
aaaccacatcacc

SEQ ID NO: 174417 - DNA, 13 bp, Artificial Sequence
  Oligonucleotide for detection of SNP TSC0043385
atatttgtatggt

SEQ ID NO: 174418 - DNA, 13 bp, Artificial Sequence
  Oligonucleotide for detection of SNP TSC0043385
accatacaaatat

SEQ ID NO: 174419 - DNA, 13 bp, Artificial Sequence
  Oligonucleotide for detection of SNP TSC0043385
atatttatatggt

SEQ ID NO: 174420 - DNA, 13 bp, Artificial Sequence
  Oligonucleotide for detection of SNP TSC0043385
accatataaatat

SEQ ID NO: 174421 - DNA, 13 bp, Artificial Sequence
  Oligonucleotide for detection of SNP TSC0043386
gaaaagaaaggtt

SEQ ID NO: 174422 - DNA, 13 bp, Artificial Sequence
  Oligonucleotide for detection of SNP TSC0043386
aacctttcttttc

SEQ ID NO: 174423 - DNA, 13 bp, Artificial Sequence
  Oligonucleotide for detection of SNP TSC0043386
gaaaagtaaggtt

SEQ ID NO: 174424 - DNA, 13 bp, Artificial Sequence
  Oligonucleotide for detection of SNP TSC0043386
aaccttacttttc

SEQ ID NO: 174425 - DNA, 13 bp, Artificial Sequence
  Oligonucleotide for detection of SNP TSC0043387
tatttaagaaaaa

SEQ ID NO: 174426 - DNA, 13 bp, Artificial Sequence
  Oligonucleotide for detection of SNP TSC0043387
tttttcttaaata

SEQ ID NO: 174427 - DNA, 13 bp, Artificial Sequence
  Oligonucleotide for detection of SNP TSC0043387
tatttaggaaaaa

SEQ ID NO: 174428 - DNA, 13 bp, Artificial Sequence
  Oligonucleotide for detection of SNP TSC0043387
tttttcctaaata

SEQ ID NO: 174429 - DNA, 13 bp, Artificial Sequence
  Oligonucleotide for detection of SNP TSC0043388
gtggtttggttgy

SEQ ID NO: 174430 - DNA, 13 bp, Artificial Sequence
  Oligonucleotide for detection of SNP TSC0043388
rcaaccaaaccac

SEQ ID NO: 174431 - DNA, 13 bp, Artificial Sequence
  Oligonucleotide for detection of SNP TSC0043388
gtggttcggttgy

SEQ ID NO: 174432 - DNA, 13 bp, Artificial Sequence
  Oligonucleotide for detection of SNP TSC0043388
rcaaccgaaccac

SEQ ID NO: 174433 - DNA, 13 bp, Artificial Sequence
  Oligonucleotide for detection of SNP TSC0043388
gtagttgggttay

SEQ ID NO: 174434 - DNA, 13 bp, Artificial Sequence
  Oligonucleotide for detection of SNP TSC0043388
rtaacccaactac

SEQ ID NO: 174435 - DNA, 13 bp, Artificial Sequence
  Oligonucleotide for detection of SNP TSC0043388
gtagttaggttay

SEQ ID NO: 174436 - DNA, 13 bp, Artificial Sequence
  Oligonucleotide for detection of SNP TSC0043388
rtaacctaactac

SEQ ID NO: 174437 - DNA, 13 bp, Artificial Sequence
  Oligonucleotide for detection of SNP TSC0043388
gtagtcgggttay

SEQ ID NO: 174438 - DNA, 13 bp, Artificial Sequence
  Oligonucleotide for detection of SNP TSC0043388
rtaacccgactac

SEQ ID NO: 174439 - DNA, 13 bp, Artificial Sequence
  Oligonucleotide for detection of SNP TSC0043389
taaattgtgatta

SEQ ID NO: 174440 - DNA, 13 bp, Artificial Sequence
  Oligonucleotide for detection of SNP TSC0043389
taatcacaattta

SEQ ID NO: 174441 - DNA, 13 bp, Artificial Sequence
  Oligonucleotide for detection of SNP TSC0043389
taaattatgatta

SEQ ID NO: 174442 - DNA, 13 bp, Artificial Sequence
  Oligonucleotide for detection of SNP TSC0043389
taatcataattta

SEQ ID NO: 174443 - DNA, 13 bp, Artificial Sequence
  Oligonucleotide for detection of SNP TSC0043390
ggtgtttgattty

SEQ ID NO: 174444 - DNA, 13 bp, Artificial Sequence
  Oligonucleotide for detection of SNP TSC0043390
raaatcaaacacc

SEQ ID NO: 174445 - DNA, 13 bp, Artificial Sequence
  Oligonucleotide for detection of SNP TSC0043390
ggtgttcgattty

SEQ ID NO: 174446 - DNA, 13 bp, Artificial Sequence
  Oligonucleotide for detection of SNP TSC0043390
raaatcgaacacc

SEQ ID NO: 174447 - DNA, 13 bp, Artificial Sequence
  Oligonucleotide for detection of SNP TSC0043390
gagattgaataty

SEQ ID NO: 174448 - DNA, 13 bp, Artificial Sequence
  Oligonucleotide for detection of SNP TSC0043390
ratattcaatctc

SEQ ID NO: 174449 - DNA, 13 bp, Artificial Sequence
  Oligonucleotide for detection of SNP TSC0043390
gagattaaataty

SEQ ID NO: 174450 - DNA, 13 bp, Artificial Sequence
  Oligonucleotide for detection of SNP TSC0043390
ratatttaatctc

SEQ ID NO: 174451 - DNA, 13 bp, Artificial Sequence
  Oligonucleotide for detection of SNP TSC0043390
gagatcgaataty

SEQ ID NO: 174452 - DNA, 13 bp, Artificial Sequence
  Oligonucleotide for detection of SNP TSC0043390
ratattcgatctc

SEQ ID NO: 174453 - DNA, 13 bp, Artificial Sequence
  Oligonucleotide for detection of SNP TSC0043391
taatttgtattty

SEQ ID NO: 174454 - DNA, 13 bp, Artificial Sequence
  Oligonucleotide for detection of SNP TSC0043391
raaatacaaatta

SEQ ID NO: 174455 - DNA, 13 bp, Artificial Sequence
  Oligonucleotide for detection of SNP TSC0043395
tagagaaggggtt

SEQ ID NO: 174456 - DNA, 13 bp, Artificial Sequence
  Oligonucleotide for detection of SNP TSC0043395
aaccccttctcta

SEQ ID NO: 174457 - DNA, 13 bp, Artificial Sequence
  Oligonucleotide for detection of SNP TSC0043397
tttaatgttagat

SEQ ID NO: 174458 - DNA, 13 bp, Artificial Sequence
  Oligonucleotide for detection of SNP TSC0043397
atctaacattaaa

SEQ ID NO: 174459 - DNA, 13 bp, Artificial Sequence
  Oligonucleotide for detection of SNP TSC0043397
tttaatattagat

SEQ ID NO: 174460 - DNA, 13 bp, Artificial Sequence
  Oligonucleotide for detection of SNP TSC0043397
atctaatattaaa

SEQ ID NO: 174461 - DNA, 13 bp, Artificial Sequence
  Oligonucleotide for detection of SNP TSC0007543
ttttttggatgaa

SEQ ID NO: 174462 - DNA, 13 bp, Artificial Sequence
  Oligonucleotide for detection of SNP TSC0007543
ttcatccaaaaaa

SEQ ID NO: 174463 - DNA, 13 bp, Artificial Sequence
  Oligonucleotide for detection of SNP TSC0007543
ttttttagatgaa

SEQ ID NO: 174464 - DNA, 13 bp, Artificial Sequence
  Oligonucleotide for detection of SNP TSC0007543
ttcatctaaaaaa

SEQ ID NO: 174465 - DNA, 13 bp, Artificial Sequence
  Oligonucleotide for detection of SNP TSC0043400
aatttaagatgag

SEQ ID NO: 174466 - DNA, 13 bp, Artificial Sequence
  Oligonucleotide for detection of SNP TSC0043400
ctcatcttaaatt

SEQ ID NO: 174467 - DNA, 13 bp, Artificial Sequence
  Oligonucleotide for detection of SNP TSC0043400
aatttaggatgag

SEQ ID NO: 174468 - DNA, 13 bp, Artificial Sequence
  Oligonucleotide for detection of SNP TSC0043400
ctcatcctaaatt

SEQ ID NO: 174469 - DNA, 13 bp, Artificial Sequence
  Oligonucleotide for detection of SNP TSC0008461
tttggatatttty

SEQ ID NO: 174470 - DNA, 13 bp, Artificial Sequence
  Oligonucleotide for detection of SNP TSC0008461
raaaatatccaaa

SEQ ID NO: 174471 - DNA, 13 bp, Artificial Sequence
  Oligonucleotide for detection of SNP TSC0008461
tttggagatttty

SEQ ID NO: 174472 - DNA, 13 bp, Artificial Sequence
  Oligonucleotide for detection of SNP TSC0008461
raaaatctccaaa

SEQ ID NO: 174473 - DNA, 13 bp, Artificial Sequence
  Oligonucleotide for detection of SNP TSC0008461
gagaatatttaag

SEQ ID NO: 174474 - DNA, 13 bp, Artificial Sequence
  Oligonucleotide for detection of SNP TSC0008461
cttaaatattctc

SEQ ID NO: 174475 - DNA, 13 bp, Artificial Sequence
  Oligonucleotide for detection of SNP TSC0008461
gagaatttttaag

SEQ ID NO: 174476 - DNA, 13 bp, Artificial Sequence
  Oligonucleotide for detection of SNP TSC0008461
cttaaaaattctc

SEQ ID NO: 174477 - DNA, 13 bp, Artificial Sequence
  Oligonucleotide for detection of SNP TSC0043401
gtttaaagagaaa

SEQ ID NO: 174478 - DNA, 13 bp, Artificial Sequence
  Oligonucleotide for detection of SNP TSC0043401
tttctctttaaac

SEQ ID NO: 174479 - DNA, 13 bp, Artificial Sequence
  Oligonucleotide for detection of SNP TSC0043401
gtttaatgagaaa

SEQ ID NO: 174480 - DNA, 13 bp, Artificial Sequence
  Oligonucleotide for detection of SNP TSC0043401
tttctcattaaac

SEQ ID NO: 174481 - DNA, 13 bp, Artificial Sequence
  Oligonucleotide for detection of SNP TSC0043401
tttttttttgggy

SEQ ID NO: 174482 - DNA, 13 bp, Artificial Sequence
  Oligonucleotide for detection of SNP TSC0043401
rcccaaaaaaaaa

SEQ ID NO: 174483 - DNA, 13 bp, Artificial Sequence
  Oligonucleotide for detection of SNP TSC0043401
ttttttattgggy

SEQ ID NO: 174484 - DNA, 13 bp, Artificial Sequence
  Oligonucleotide for detection of SNP TSC0043401
rcccaataaaaaa

SEQ ID NO: 174485 - DNA, 13 bp, Artificial Sequence
  Oligonucleotide for detection of SNP TSC0043402
ttagaagtatgtt

SEQ ID NO: 174486 - DNA, 13 bp, Artificial Sequence
  Oligonucleotide for detection of SNP TSC0043402
aacatacttctaa

SEQ ID NO: 174487 - DNA, 13 bp, Artificial Sequence
  Oligonucleotide for detection of SNP TSC0043402
ttagaaatatgtt

SEQ ID NO: 174488 - DNA, 13 bp, Artificial Sequence
  Oligonucleotide for detection of SNP TSC0043402
aacatatttctaa

SEQ ID NO: 174489 - DNA, 13 bp, Artificial Sequence
  Oligonucleotide for detection of SNP TSC0043404
ggttgtattggtt

SEQ ID NO: 174490 - DNA, 13 bp, Artificial Sequence
  Oligonucleotide for detection of SNP TSC0043404
aaccaatacaacc

SEQ ID NO: 174491 - DNA, 13 bp, Artificial Sequence
  Oligonucleotide for detection of SNP TSC0043404
ggttgttttggtt

SEQ ID NO: 174492 - DNA, 13 bp, Artificial Sequence
  Oligonucleotide for detection of SNP TSC0043404
aaccaaaacaacc

SEQ ID NO: 174493 - DNA, 13 bp, Artificial Sequence
  Oligonucleotide for detection of SNP TSC0043404
aattagtgtagty

SEQ ID NO: 174494 - DNA, 13 bp, Artificial Sequence
  Oligonucleotide for detection of SNP TSC0043404
ractacactaatt

SEQ ID NO: 174495 - DNA, 13 bp, Artificial Sequence
  Oligonucleotide for detection of SNP TSC0043404
aattagggtagty

SEQ ID NO: 174496 - DNA, 13 bp, Artificial Sequence
  Oligonucleotide for detection of SNP TSC0043404
ractaccctaatt

SEQ ID NO: 174497 - DNA, 13 bp, Artificial Sequence
  Oligonucleotide for detection of SNP TSC0043406
atttttttatgtt

SEQ ID NO: 174498 - DNA, 13 bp, Artificial Sequence
  Oligonucleotide for detection of SNP TSC0043406
aacataaaaaaat

SEQ ID NO: 174499 - DNA, 13 bp, Artificial Sequence
  Oligonucleotide for detection of SNP TSC0043406
aatatggaaaaat

SEQ ID NO: 174500 - DNA, 13 bp, Artificial Sequence
  Oligonucleotide for detection of SNP TSC0043406
atttttccatatt

SEQ ID NO: 174501 - DNA, 13 bp, Artificial Sequence
  Oligonucleotide for detection of SNP TSC0043406
aatatgtaaaaat

SEQ ID NO: 174502 - DNA, 13 bp, Artificial Sequence
  Oligonucleotide for detection of SNP TSC0043406
atttttacatatt

SEQ ID NO: 174503 - DNA, 13 bp, Artificial Sequence
  Oligonucleotide for detection of SNP TSC0006614
ataggatgagtat

SEQ ID NO: 174504 - DNA, 13 bp, Artificial Sequence
  Oligonucleotide for detection of SNP TSC0006614
atactcatcctat

SEQ ID NO: 174505 - DNA, 13 bp, Artificial Sequence
  Oligonucleotide for detection of SNP TSC0006614
ataggacgagtat

SEQ ID NO: 174506 - DNA, 13 bp, Artificial Sequence
  Oligonucleotide for detection of SNP TSC0006614
atactcgtcctat

SEQ ID NO: 174507 - DNA, 13 bp, Artificial Sequence
  Oligonucleotide for detection of SNP TSC0043414
aaaaatgaataag

SEQ ID NO: 174508 - DNA, 13 bp, Artificial Sequence
  Oligonucleotide for detection of SNP TSC0043414
cttattcattttt

SEQ ID NO: 174509 - DNA, 13 bp, Artificial Sequence
  Oligonucleotide for detection of SNP TSC0043414
aaaaataaataag

SEQ ID NO: 174510 - DNA, 13 bp, Artificial Sequence
  Oligonucleotide for detection of SNP TSC0043414
cttatttattttt

SEQ ID NO: 174511 - DNA, 13 bp, Artificial Sequence
  Oligonucleotide for detection of SNP TSC0006971
gtgtggaagtgtt

SEQ ID NO: 174512 - DNA, 13 bp, Artificial Sequence
  Oligonucleotide for detection of SNP TSC0006971
aacacttccacac

SEQ ID NO: 174513 - DNA, 13 bp, Artificial Sequence
  Oligonucleotide for detection of SNP TSC0006971
gtgtggtagtgtt

SEQ ID NO: 174514 - DNA, 13 bp, Artificial Sequence
  Oligonucleotide for detection of SNP TSC0006971
aacactaccacac

SEQ ID NO: 174515 - DNA, 13 bp, Artificial Sequence
  Oligonucleotide for detection of SNP TSC0006971
gtgcggaagtgtt

SEQ ID NO: 174516 - DNA, 13 bp, Artificial Sequence
  Oligonucleotide for detection of SNP TSC0006971
aacacttccgcac

SEQ ID NO: 174517 - DNA, 13 bp, Artificial Sequence
  Oligonucleotide for detection of SNP TSC0006971
gtgcggtagtgtt

SEQ ID NO: 174518 - DNA, 13 bp, Artificial Sequence
  Oligonucleotide for detection of SNP TSC0006971
aacactaccgcac

SEQ ID NO: 174519 - DNA, 13 bp, Artificial Sequence
  Oligonucleotide for detection of SNP TSC0006971
agtatttttgtay

SEQ ID NO: 174520 - DNA, 13 bp, Artificial Sequence
  Oligonucleotide for detection of SNP TSC0006971
rtacaaaaatact

SEQ ID NO: 174521 - DNA, 13 bp, Artificial Sequence
  Oligonucleotide for detection of SNP TSC0006971
agtattattgtay

SEQ ID NO: 174522 - DNA, 13 bp, Artificial Sequence
  Oligonucleotide for detection of SNP TSC0006971
rtacaataatact

SEQ ID NO: 174523 - DNA, 13 bp, Artificial Sequence
  Oligonucleotide for detection of SNP TSC0006971
agtattttcgtay

SEQ ID NO: 174524 - DNA, 13 bp, Artificial Sequence
  Oligonucleotide for detection of SNP TSC0006971
rtacgaaaatact

SEQ ID NO: 174525 - DNA, 13 bp, Artificial Sequence
  Oligonucleotide for detection of SNP TSC0006971
agtattatcgtay

SEQ ID NO: 174526 - DNA, 13 bp, Artificial Sequence
  Oligonucleotide for detection of SNP TSC0006971
rtacgataatact

SEQ ID NO: 174527 - DNA, 13 bp, Artificial Sequence
  Oligonucleotide for detection of SNP TSC0043415
tagaatatttagy

SEQ ID NO: 174528 - DNA, 13 bp, Artificial Sequence
  Oligonucleotide for detection of SNP TSC0043415
rctaaatattcta

SEQ ID NO: 174529 - DNA, 13 bp, Artificial Sequence
  Oligonucleotide for detection of SNP TSC0043415
tagaatttttagy

SEQ ID NO: 174530 - DNA, 13 bp, Artificial Sequence
  Oligonucleotide for detection of SNP TSC0043415
rctaaaaattcta

SEQ ID NO: 174531 - DNA, 13 bp, Artificial Sequence
  Oligonucleotide for detection of SNP TSC0043415
gttaagtgtttta

SEQ ID NO: 174532 - DNA, 13 bp, Artificial Sequence
  Oligonucleotide for detection of SNP TSC0043415
taaaacacttaac

SEQ ID NO: 174533 - DNA, 13 bp, Artificial Sequence
  Oligonucleotide for detection of SNP TSC0043415
gttaagggtttta

SEQ ID NO: 174534 - DNA, 13 bp, Artificial Sequence
  Oligonucleotide for detection of SNP TSC0043415
taaaacccttaac

SEQ ID NO: 174535 - DNA, 13 bp, Artificial Sequence
  Oligonucleotide for detection of SNP TSC0043416
tttggggtagaga

SEQ ID NO: 174536 - DNA, 13 bp, Artificial Sequence
  Oligonucleotide for detection of SNP TSC0043416
tctctaccccaaa

SEQ ID NO: 174537 - DNA, 13 bp, Artificial Sequence
  Oligonucleotide for detection of SNP TSC0043416
tttgggatagaga

SEQ ID NO: 174538 - DNA, 13 bp, Artificial Sequence
  Oligonucleotide for detection of SNP TSC0043416
tctctatcccaaa

SEQ ID NO: 174539 - DNA, 13 bp, Artificial Sequence
  Oligonucleotide for detection of SNP TSC0007195
tagggatgggata

SEQ ID NO: 174540 - DNA, 13 bp, Artificial Sequence
  Oligonucleotide for detection of SNP TSC0007195
tatcccatcccta

SEQ ID NO: 174541 - DNA, 13 bp, Artificial Sequence
  Oligonucleotide for detection of SNP TSC0007195
tagggacgggata

SEQ ID NO: 174542 - DNA, 13 bp, Artificial Sequence
  Oligonucleotide for detection of SNP TSC0007195
tatcccgtcccta

SEQ ID NO: 174543 - DNA, 13 bp, Artificial Sequence
  Oligonucleotide for detection of SNP TSC0007196
agttgagttatty

SEQ ID NO: 174544 - DNA, 13 bp, Artificial Sequence
  Oligonucleotide for detection of SNP TSC0007196
raataactcaact

SEQ ID NO: 174545 - DNA, 13 bp, Artificial Sequence
  Oligonucleotide for detection of SNP TSC0007196
agttgaattatty

SEQ ID NO: 174546 - DNA, 13 bp, Artificial Sequence
  Oligonucleotide for detection of SNP TSC0007196
raataattcaact

SEQ ID NO: 174547 - DNA, 13 bp, Artificial Sequence
  Oligonucleotide for detection of SNP TSC0007196
agtcgagttatty

SEQ ID NO: 174548 - DNA, 13 bp, Artificial Sequence
  Oligonucleotide for detection of SNP TSC0007196
raataactcgact

SEQ ID NO: 174549 - DNA, 13 bp, Artificial Sequence
  Oligonucleotide for detection of SNP TSC0007196
agtcgaattatty

SEQ ID NO: 174550 - DNA, 13 bp, Artificial Sequence
  Oligonucleotide for detection of SNP TSC0007196
raataattcgact

SEQ ID NO: 174551 - DNA, 13 bp, Artificial Sequence
  Oligonucleotide for detection of SNP TSC0043417
agaatatggatgg

SEQ ID NO: 174552 - DNA, 13 bp, Artificial Sequence
  Oligonucleotide for detection of SNP TSC0043417
ccatccatattct

SEQ ID NO: 174553 - DNA, 13 bp, Artificial Sequence
  Oligonucleotide for detection of SNP TSC0043417
agaatagggatgg

SEQ ID NO: 174554 - DNA, 13 bp, Artificial Sequence
  Oligonucleotide for detection of SNP TSC0043417
ccatccctattct

SEQ ID NO: 174555 - DNA, 13 bp, Artificial Sequence
  Oligonucleotide for detection of SNP TSC0043417
agaatacggatgg

SEQ ID NO: 174556 - DNA, 13 bp, Artificial Sequence
  Oligonucleotide for detection of SNP TSC0043417
ccatccgtattct

SEQ ID NO: 174557 - DNA, 13 bp, Artificial Sequence
  Oligonucleotide for detection of SNP TSC0043417
agaatagggacgg

SEQ ID NO: 174558 - DNA, 13 bp, Artificial Sequence
  Oligonucleotide for detection of SNP TSC0043417
ccgtccctattct

SEQ ID NO: 174559 - DNA, 13 bp, Artificial Sequence
  Oligonucleotide for detection of SNP TSC0043417
agaatatggacgg

SEQ ID NO: 174560 - DNA, 13 bp, Artificial Sequence
  Oligonucleotide for detection of SNP TSC0043417
ccgtccatattct

SEQ ID NO: 174561 - DNA, 13 bp, Artificial Sequence
  Oligonucleotide for detection of SNP TSC0043417
agaatacggacgg

SEQ ID NO: 174562 - DNA, 13 bp, Artificial Sequence
  Oligonucleotide for detection of SNP TSC0043417
ccgtccgtattct

SEQ ID NO: 174563 - DNA, 13 bp, Artificial Sequence
  Oligonucleotide for detection of SNP TSC0043417
ttgtttgtatttt

SEQ ID NO: 174564 - DNA, 13 bp, Artificial Sequence
  Oligonucleotide for detection of SNP TSC0043417
aaaatacaaacaa

SEQ ID NO: 174565 - DNA, 13 bp, Artificial Sequence
  Oligonucleotide for detection of SNP TSC0043417
tcgtttgtatttt

SEQ ID NO: 174566 - DNA, 13 bp, Artificial Sequence
  Oligonucleotide for detection of SNP TSC0043417
aaaatacaaacga

SEQ ID NO: 174567 - DNA, 13 bp, Artificial Sequence
  Oligonucleotide for detection of SNP TSC0043417
tcgtttttatttt

SEQ ID NO: 174568 - DNA, 13 bp, Artificial Sequence
  Oligonucleotide for detection of SNP TSC0043417
aaaataaaaacga

SEQ ID NO: 174569 - DNA, 13 bp, Artificial Sequence
  Oligonucleotide for detection of SNP TSC0043417
ttgttcgtatttt

SEQ ID NO: 174570 - DNA, 13 bp, Artificial Sequence
  Oligonucleotide for detection of SNP TSC0043417
aaaatacgaacaa

SEQ ID NO: 174571 - DNA, 13 bp, Artificial Sequence
  Oligonucleotide for detection of SNP TSC0043417
tcgttcgtatttt

SEQ ID NO: 174572 - DNA, 13 bp, Artificial Sequence
  Oligonucleotide for detection of SNP TSC0043417
aaaatacgaacga

SEQ ID NO: 174573 - DNA, 13 bp, Artificial Sequence
  Oligonucleotide for detection of SNP TSC0043421
agtgttttgaaag

SEQ ID NO: 174574 - DNA, 13 bp, Artificial Sequence
  Oligonucleotide for detection of SNP TSC0043421
ctttcaaaacact

SEQ ID NO: 174575 - DNA, 13 bp, Artificial Sequence
  Oligonucleotide for detection of SNP TSC0043421
agtgttgtgaaag

SEQ ID NO: 174576 - DNA, 13 bp, Artificial Sequence
  Oligonucleotide for detection of SNP TSC0043421
ctttcacaacact

SEQ ID NO: 174577 - DNA, 13 bp, Artificial Sequence
  Oligonucleotide for detection of SNP TSC0043421
tttttataatatt

SEQ ID NO: 174578 - DNA, 13 bp, Artificial Sequence
  Oligonucleotide for detection of SNP TSC0043421
aatattataaaaa

SEQ ID NO: 174579 - DNA, 13 bp, Artificial Sequence
  Oligonucleotide for detection of SNP TSC0043422
ttattaagaaagg

SEQ ID NO: 174580 - DNA, 13 bp, Artificial Sequence
  Oligonucleotide for detection of SNP TSC0043422
cctttcttaataa

SEQ ID NO: 174581 - DNA, 13 bp, Artificial Sequence
  Oligonucleotide for detection of SNP TSC0043422
ttattaggaaagg

SEQ ID NO: 174582 - DNA, 13 bp, Artificial Sequence
  Oligonucleotide for detection of SNP TSC0043422
cctttcctaataa

SEQ ID NO: 174583 - DNA, 13 bp, Artificial Sequence
  Oligonucleotide for detection of SNP TSC0043428
aaaggagtataat

SEQ ID NO: 174584 - DNA, 13 bp, Artificial Sequence
  Oligonucleotide for detection of SNP TSC0043428
attatactccttt

SEQ ID NO: 174585 - DNA, 13 bp, Artificial Sequence
  Oligonucleotide for detection of SNP TSC0043428
aaaggaatataat

SEQ ID NO: 174586 - DNA, 13 bp, Artificial Sequence
  Oligonucleotide for detection of SNP TSC0043428
attatattccttt

SEQ ID NO: 174587 - DNA, 13 bp, Artificial Sequence
  Oligonucleotide for detection of SNP TSC0043429
attattatagtty

SEQ ID NO: 174588 - DNA, 13 bp, Artificial Sequence
  Oligonucleotide for detection of SNP TSC0043429
raactataataat

SEQ ID NO: 174589 - DNA, 13 bp, Artificial Sequence
  Oligonucleotide for detection of SNP TSC0043429
gagttatggtgat

SEQ ID NO: 174590 - DNA, 13 bp, Artificial Sequence
  Oligonucleotide for detection of SNP TSC0043429
atcaccataactc

SEQ ID NO: 174591 - DNA, 13 bp, Artificial Sequence
  Oligonucleotide for detection of SNP TSC0043429
gagttacggtgat

SEQ ID NO: 174592 - DNA, 13 bp, Artificial Sequence
  Oligonucleotide for detection of SNP TSC0043429
atcaccgtaactc

SEQ ID NO: 174593 - DNA, 13 bp, Artificial Sequence
  Oligonucleotide for detection of SNP TSC0043431
taaatatggttgy

SEQ ID NO: 174594 - DNA, 13 bp, Artificial Sequence
  Oligonucleotide for detection of SNP TSC0043431
rcaaccatattta

SEQ ID NO: 174595 - DNA, 13 bp, Artificial Sequence
  Oligonucleotide for detection of SNP TSC0043431
taaatacggttgy

SEQ ID NO: 174596 - DNA, 13 bp, Artificial Sequence
  Oligonucleotide for detection of SNP TSC0043431
rcaaccgtattta

SEQ ID NO: 174597 - DNA, 13 bp, Artificial Sequence
  Oligonucleotide for detection of SNP TSC0043431
gtaattgtatttg

SEQ ID NO: 174598 - DNA, 13 bp, Artificial Sequence
  Oligonucleotide for detection of SNP TSC0043431
caaatacaattac

SEQ ID NO: 174599 - DNA, 13 bp, Artificial Sequence
  Oligonucleotide for detection of SNP TSC0043431
gtaattatatttg

SEQ ID NO: 174600 - DNA, 13 bp, Artificial Sequence
  Oligonucleotide for detection of SNP TSC0043431
caaatataattac

SEQ ID NO: 174601 - DNA, 13 bp, Artificial Sequence
  Oligonucleotide for detection of SNP TSC0043431
gtaatcgtatttg

SEQ ID NO: 174602 - DNA, 13 bp, Artificial Sequence
  Oligonucleotide for detection of SNP TSC0043431
caaatacgattac

SEQ ID NO: 174603 - DNA, 13 bp, Artificial Sequence
  Oligonucleotide for detection of SNP TSC0043432
aggagaattggtg

SEQ ID NO: 174604 - DNA, 13 bp, Artificial Sequence
  Oligonucleotide for detection of SNP TSC0043432
caccaattctcct

SEQ ID NO: 174605 - DNA, 13 bp, Artificial Sequence
  Oligonucleotide for detection of SNP TSC0043432
aggagagttggtg

SEQ ID NO: 174606 - DNA, 13 bp, Artificial Sequence
  Oligonucleotide for detection of SNP TSC0043432
caccaactctcct

SEQ ID NO: 174607 - DNA, 13 bp, Artificial Sequence
  Oligonucleotide for detection of SNP TSC0043433
tggaggtggtgaa

SEQ ID NO: 174608 - DNA, 13 bp, Artificial Sequence
  Oligonucleotide for detection of SNP TSC0043433
ttcaccacctcca

SEQ ID NO: 174609 - DNA, 13 bp, Artificial Sequence
  Oligonucleotide for detection of SNP TSC0043433
tggaggcggtgaa

SEQ ID NO: 174610 - DNA, 13 bp, Artificial Sequence
  Oligonucleotide for detection of SNP TSC0043433
ttcaccgcctcca

SEQ ID NO: 174611 - DNA, 13 bp, Artificial Sequence
  Oligonucleotide for detection of SNP TSC0043436
ttagtatagatag

SEQ ID NO: 174612 - DNA, 13 bp, Artificial Sequence
  Oligonucleotide for detection of SNP TSC0043436
ctatctatactaa

SEQ ID NO: 174613 - DNA, 13 bp, Artificial Sequence
  Oligonucleotide for detection of SNP TSC0043436
ttagtagagatag

SEQ ID NO: 174614 - DNA, 13 bp, Artificial Sequence
  Oligonucleotide for detection of SNP TSC0043436
ctatctctactaa

SEQ ID NO: 174615 - DNA, 13 bp, Artificial Sequence
  Oligonucleotide for detection of SNP TSC0008660
ttgaggataaggg

SEQ ID NO: 174616 - DNA, 13 bp, Artificial Sequence
  Oligonucleotide for detection of SNP TSC0008660
cccttatcctcaa

SEQ ID NO: 174617 - DNA, 13 bp, Artificial Sequence
  Oligonucleotide for detection of SNP TSC0008660
ttgagggtaaggg

SEQ ID NO: 174618 - DNA, 13 bp, Artificial Sequence
  Oligonucleotide for detection of SNP TSC0008660
cccttaccctcaa

SEQ ID NO: 174619 - DNA, 13 bp, Artificial Sequence
  Oligonucleotide for detection of SNP TSC0043437
tggtttgagttty

SEQ ID NO: 174620 - DNA, 13 bp, Artificial Sequence
  Oligonucleotide for detection of SNP TSC0043437
raaactcaaacca

SEQ ID NO: 174621 - DNA, 13 bp, Artificial Sequence
  Oligonucleotide for detection of SNP TSC0043437
tggtttaagttty

SEQ ID NO: 174622 - DNA, 13 bp, Artificial Sequence
  Oligonucleotide for detection of SNP TSC0043437
raaacttaaacca

SEQ ID NO: 174623 - DNA, 13 bp, Artificial Sequence
  Oligonucleotide for detection of SNP TSC0043438
ggggggtggggaa

SEQ ID NO: 174624 - DNA, 13 bp, Artificial Sequence
  Oligonucleotide for detection of SNP TSC0043438
ttccccacccccc

SEQ ID NO: 174625 - DNA, 13 bp, Artificial Sequence
  Oligonucleotide for detection of SNP TSC0043438
ggggggcggggaa

SEQ ID NO: 174626 - DNA, 13 bp, Artificial Sequence
  Oligonucleotide for detection of SNP TSC0043438
ttccccgcccccc

SEQ ID NO: 174627 - DNA, 13 bp, Artificial Sequence
  Oligonucleotide for detection of SNP TSC0005768
ttgatttgtgttt

SEQ ID NO: 174628 - DNA, 13 bp, Artificial Sequence
  Oligonucleotide for detection of SNP TSC0005768
aaacacaaatcaa

SEQ ID NO: 174629 - DNA, 13 bp, Artificial Sequence
  Oligonucleotide for detection of SNP TSC0005768
ttgattcgtgttt

SEQ ID NO: 174630 - DNA, 13 bp, Artificial Sequence
  Oligonucleotide for detection of SNP TSC0005768
aaacacgaatcaa

SEQ ID NO: 174631 - DNA, 13 bp, Artificial Sequence
  Oligonucleotide for detection of SNP TSC0005768
agatatgggttag

SEQ ID NO: 174632 - DNA, 13 bp, Artificial Sequence
  Oligonucleotide for detection of SNP TSC0005768
ctaacccatatct

SEQ ID NO: 174633 - DNA, 13 bp, Artificial Sequence
  Oligonucleotide for detection of SNP TSC0005768
agatataggttag

SEQ ID NO: 174634 - DNA, 13 bp, Artificial Sequence
  Oligonucleotide for detection of SNP TSC0005768
ctaacctatatct

SEQ ID NO: 174635 - DNA, 13 bp, Artificial Sequence
  Oligonucleotide for detection of SNP TSC0005768
agatacgggttag

SEQ ID NO: 174636 - DNA, 13 bp, Artificial Sequence
  Oligonucleotide for detection of SNP TSC0005768
ctaacccgtatct

SEQ ID NO: 174637 - DNA, 13 bp, Artificial Sequence
  Oligonucleotide for detection of SNP TSC0043439
gaagtagtatata

SEQ ID NO: 174638 - DNA, 13 bp, Artificial Sequence
  Oligonucleotide for detection of SNP TSC0043439
tatatactacttc

SEQ ID NO: 174639 - DNA, 13 bp, Artificial Sequence
  Oligonucleotide for detection of SNP TSC0043439
gaagtaatatata

SEQ ID NO: 174640 - DNA, 13 bp, Artificial Sequence
  Oligonucleotide for detection of SNP TSC0043439
tatatattacttc

SEQ ID NO: 174641 - DNA, 13 bp, Artificial Sequence
  Oligonucleotide for detection of SNP TSC0009116
ttttgtatgagtt

SEQ ID NO: 174642 - DNA, 13 bp, Artificial Sequence
  Oligonucleotide for detection of SNP TSC0009116
aactcatacaaaa

SEQ ID NO: 174643 - DNA, 13 bp, Artificial Sequence
  Oligonucleotide for detection of SNP TSC0009116
ttttgtgtgagtt

SEQ ID NO: 174644 - DNA, 13 bp, Artificial Sequence
  Oligonucleotide for detection of SNP TSC0009116
aactcacacaaaa

SEQ ID NO: 174645 - DNA, 13 bp, Artificial Sequence
  Oligonucleotide for detection of SNP TSC0009116
ttttgcgtgagtt

SEQ ID NO: 174646 - DNA, 13 bp, Artificial Sequence
  Oligonucleotide for detection of SNP TSC0009116
aactcacgcaaaa

SEQ ID NO: 174647 - DNA, 13 bp, Artificial Sequence
  Oligonucleotide for detection of SNP TSC0009116
agtttatgtaggg

SEQ ID NO: 174648 - DNA, 13 bp, Artificial Sequence
  Oligonucleotide for detection of SNP TSC0009116
ccctacataaact

SEQ ID NO: 174649 - DNA, 13 bp, Artificial Sequence
  Oligonucleotide for detection of SNP TSC0009116
agtttacgtaggg

SEQ ID NO: 174650 - DNA, 13 bp, Artificial Sequence
  Oligonucleotide for detection of SNP TSC0009116
ccctacgtaaact

SEQ ID NO: 174651 - DNA, 13 bp, Artificial Sequence
  Oligonucleotide for detection of SNP TSC0009117
tgtttattattgy

SEQ ID NO: 174652 - DNA, 13 bp, Artificial Sequence
  Oligonucleotide for detection of SNP TSC0009117
rcaataataaaca

SEQ ID NO: 174653 - DNA, 13 bp, Artificial Sequence
  Oligonucleotide for detection of SNP TSC0009117
gtaatggtaagta

SEQ ID NO: 174654 - DNA, 13 bp, Artificial Sequence
  Oligonucleotide for detection of SNP TSC0009117
tacttaccattac

SEQ ID NO: 174655 - DNA, 13 bp, Artificial Sequence
  Oligonucleotide for detection of SNP TSC0009117
gtaatgttaagta

SEQ ID NO: 174656 - DNA, 13 bp, Artificial Sequence
  Oligonucleotide for detection of SNP TSC0009117
tacttaacattac

SEQ ID NO: 174657 - DNA, 13 bp, Artificial Sequence
  Oligonucleotide for detection of SNP TSC0009118
agagagaagagay

SEQ ID NO: 174658 - DNA, 13 bp, Artificial Sequence
  Oligonucleotide for detection of SNP TSC0009118
rtctcttctctct

SEQ ID NO: 174659 - DNA, 13 bp, Artificial Sequence
  Oligonucleotide for detection of SNP TSC0009118
agagagtagagay

SEQ ID NO: 174660 - DNA, 13 bp, Artificial Sequence
  Oligonucleotide for detection of SNP TSC0009118
rtctctactctct

SEQ ID NO: 174661 - DNA, 13 bp, Artificial Sequence
  Oligonucleotide for detection of SNP TSC0043441
gaatagagtttta

SEQ ID NO: 174662 - DNA, 13 bp, Artificial Sequence
  Oligonucleotide for detection of SNP TSC0043441
taaaactctattc

SEQ ID NO: 174663 - DNA, 13 bp, Artificial Sequence
  Oligonucleotide for detection of SNP TSC0043441
gaatagggtttta

SEQ ID NO: 174664 - DNA, 13 bp, Artificial Sequence
  Oligonucleotide for detection of SNP TSC0043441
taaaaccctattc

SEQ ID NO: 174665 - DNA, 13 bp, Artificial Sequence
  Oligonucleotide for detection of SNP TSC0043442
ttgtggatgtggg

SEQ ID NO: 174666 - DNA, 13 bp, Artificial Sequence
  Oligonucleotide for detection of SNP TSC0043442
cccacatccacaa

SEQ ID NO: 174667 - DNA, 13 bp, Artificial Sequence
  Oligonucleotide for detection of SNP TSC0043442
ttgtgggtgtggg

SEQ ID NO: 174668 - DNA, 13 bp, Artificial Sequence
  Oligonucleotide for detection of SNP TSC0043442
cccacacccacaa

SEQ ID NO: 174669 - DNA, 13 bp, Artificial Sequence
  Oligonucleotide for detection of SNP TSC0043443
ggtttaaaattta

SEQ ID NO: 174670 - DNA, 13 bp, Artificial Sequence
  Oligonucleotide for detection of SNP TSC0043443
taaattttaaacc

SEQ ID NO: 174671 - DNA, 13 bp, Artificial Sequence
  Oligonucleotide for detection of SNP TSC0043443
ggtttagaattta

SEQ ID NO: 174672 - DNA, 13 bp, Artificial Sequence
  Oligonucleotide for detection of SNP TSC0043443
taaattctaaacc

SEQ ID NO: 174673 - DNA, 13 bp, Artificial Sequence
  Oligonucleotide for detection of SNP TSC0043446
atagttgtgttgt

SEQ ID NO: 174674 - DNA, 13 bp, Artificial Sequence
  Oligonucleotide for detection of SNP TSC0043446
acaacacaactat

SEQ ID NO: 174675 - DNA, 13 bp, Artificial Sequence
  Oligonucleotide for detection of SNP TSC0043446
atagttatgttgt

SEQ ID NO: 174676 - DNA, 13 bp, Artificial Sequence
  Oligonucleotide for detection of SNP TSC0043446
acaacataactat

SEQ ID NO: 174677 - DNA, 13 bp, Artificial Sequence
  Oligonucleotide for detection of SNP TSC0043447
tatttgtgttgag

SEQ ID NO: 174678 - DNA, 13 bp, Artificial Sequence
  Oligonucleotide for detection of SNP TSC0043447
ctcaacacaaata

SEQ ID NO: 174679 - DNA, 13 bp, Artificial Sequence
  Oligonucleotide for detection of SNP TSC0043447
tatttgggttgag

SEQ ID NO: 174680 - DNA, 13 bp, Artificial Sequence
  Oligonucleotide for detection of SNP TSC0043447
ctcaacccaaata

SEQ ID NO: 174681 - DNA, 13 bp, Artificial Sequence
  Oligonucleotide for detection of SNP TSC0043447
tttagtataaata

SEQ ID NO: 174682 - DNA, 13 bp, Artificial Sequence
  Oligonucleotide for detection of SNP TSC0043447
tatttatactaaa

SEQ ID NO: 174683 - DNA, 13 bp, Artificial Sequence
  Oligonucleotide for detection of SNP TSC0043447
tttagtttaaata

SEQ ID NO: 174684 - DNA, 13 bp, Artificial Sequence
  Oligonucleotide for detection of SNP TSC0043447
tatttaaactaaa

SEQ ID NO: 174685 - DNA, 13 bp, Artificial Sequence
  Oligonucleotide for detection of SNP TSC0043448
attttaggattta

SEQ ID NO: 174686 - DNA, 13 bp, Artificial Sequence
  Oligonucleotide for detection of SNP TSC0043448
taaatcctaaaat

SEQ ID NO: 174687 - DNA, 13 bp, Artificial Sequence
  Oligonucleotide for detection of SNP TSC0043448
attttaagattta

SEQ ID NO: 174688 - DNA, 13 bp, Artificial Sequence
  Oligonucleotide for detection of SNP TSC0043448
taaatcttaaaat

SEQ ID NO: 174689 - DNA, 13 bp, Artificial Sequence
  Oligonucleotide for detection of SNP TSC0043449
tataatattgttt

SEQ ID NO: 174690 - DNA, 13 bp, Artificial Sequence
  Oligonucleotide for detection of SNP TSC0043449
aaacaatattata

SEQ ID NO: 174691 - DNA, 13 bp, Artificial Sequence
  Oligonucleotide for detection of SNP TSC0043449
tataatgttgttt

SEQ ID NO: 174692 - DNA, 13 bp, Artificial Sequence
  Oligonucleotide for detection of SNP TSC0043449
aaacaacattata

SEQ ID NO: 174693 - DNA, 13 bp, Artificial Sequence
  Oligonucleotide for detection of SNP TSC0043450
aaaaatgtaagga

SEQ ID NO: 174694 - DNA, 13 bp, Artificial Sequence
  Oligonucleotide for detection of SNP TSC0043450
tccttacattttt

SEQ ID NO: 174695 - DNA, 13 bp, Artificial Sequence
  Oligonucleotide for detection of SNP TSC0043450
aaaaatataagga

SEQ ID NO: 174696 - DNA, 13 bp, Artificial Sequence
  Oligonucleotide for detection of SNP TSC0043450
tccttatattttt

SEQ ID NO: 174697 - DNA, 13 bp, Artificial Sequence
  Oligonucleotide for detection of SNP TSC0043450
aaaaacgtaagga

SEQ ID NO: 174698 - DNA, 13 bp, Artificial Sequence
  Oligonucleotide for detection of SNP TSC0043450
tccttacgttttt

SEQ ID NO: 174699 - DNA, 13 bp, Artificial Sequence
  Oligonucleotide for detection of SNP TSC0043454
tatgggggtggtt

SEQ ID NO: 174700 - DNA, 13 bp, Artificial Sequence
  Oligonucleotide for detection of SNP TSC0043454
aaccacccccata

SEQ ID NO: 174701 - DNA, 13 bp, Artificial Sequence
  Oligonucleotide for detection of SNP TSC0043454
tatgggagtggtt

SEQ ID NO: 174702 - DNA, 13 bp, Artificial Sequence
  Oligonucleotide for detection of SNP TSC0043454
aaccactcccata

SEQ ID NO: 174703 - DNA, 13 bp, Artificial Sequence
  Oligonucleotide for detection of SNP TSC0043455
ttttaatttgttt

SEQ ID NO: 174704 - DNA, 13 bp, Artificial Sequence
  Oligonucleotide for detection of SNP TSC0043455
aaacaaattaaaa

SEQ ID NO: 174705 - DNA, 13 bp, Artificial Sequence
  Oligonucleotide for detection of SNP TSC0043455
ttttaagttgttt

SEQ ID NO: 174706 - DNA, 13 bp, Artificial Sequence
  Oligonucleotide for detection of SNP TSC0043455
aaacaacttaaaa

SEQ ID NO: 174707 - DNA, 13 bp, Artificial Sequence
  Oligonucleotide for detection of SNP TSC0043455
aaataaattaaga

SEQ ID NO: 174708 - DNA, 13 bp, Artificial Sequence
  Oligonucleotide for detection of SNP TSC0043455
tcttaatttattt

SEQ ID NO: 174709 - DNA, 13 bp, Artificial Sequence
  Oligonucleotide for detection of SNP TSC0043455
aaataatttaaga

SEQ ID NO: 174710 - DNA, 13 bp, Artificial Sequence
  Oligonucleotide for detection of SNP TSC0043455
tcttaaattattt

SEQ ID NO: 174711 - DNA, 13 bp, Artificial Sequence
  Oligonucleotide for detection of SNP TSC0009589
gattttttgagty

SEQ ID NO: 174712 - DNA, 13 bp, Artificial Sequence
  Oligonucleotide for detection of SNP TSC0009589
ractcaaaaaatc

SEQ ID NO: 174713 - DNA, 13 bp, Artificial Sequence
  Oligonucleotide for detection of SNP TSC0009589
gattttgtgagty

SEQ ID NO: 174714 - DNA, 13 bp, Artificial Sequence
  Oligonucleotide for detection of SNP TSC0009589
ractcacaaaatc

SEQ ID NO: 174715 - DNA, 13 bp, Artificial Sequence
  Oligonucleotide for detection of SNP TSC0009589
gatttcgtgagty

SEQ ID NO: 174716 - DNA, 13 bp, Artificial Sequence
  Oligonucleotide for detection of SNP TSC0009589
ractcacgaaatc

SEQ ID NO: 174717 - DNA, 13 bp, Artificial Sequence
  Oligonucleotide for detection of SNP TSC0009589
ggtttaagagaty

SEQ ID NO: 174718 - DNA, 13 bp, Artificial Sequence
  Oligonucleotide for detection of SNP TSC0009589
ratctcttaaacc

SEQ ID NO: 174719 - DNA, 13 bp, Artificial Sequence
  Oligonucleotide for detection of SNP TSC0009589
ggtttatgagaty

SEQ ID NO: 174720 - DNA, 13 bp, Artificial Sequence
  Oligonucleotide for detection of SNP TSC0009589
ratctcataaacc

SEQ ID NO: 174721 - DNA, 13 bp, Artificial Sequence
  Oligonucleotide for detection of SNP TSC0009589
ggtttacgagaty

SEQ ID NO: 174722 - DNA, 13 bp, Artificial Sequence
  Oligonucleotide for detection of SNP TSC0009589
ratctcgtaaacc

SEQ ID NO: 174723 - DNA, 13 bp, Artificial Sequence
  Oligonucleotide for detection of SNP TSC0043461
ttttttgtgaaat

SEQ ID NO: 174724 - DNA, 13 bp, Artificial Sequence
  Oligonucleotide for detection of SNP TSC0043461
atttcacaaaaaa

SEQ ID NO: 174725 - DNA, 13 bp, Artificial Sequence
  Oligonucleotide for detection of SNP TSC0009626
tagtaggtttaat

SEQ ID NO: 174726 - DNA, 13 bp, Artificial Sequence
  Oligonucleotide for detection of SNP TSC0009626
attaaacctacta

SEQ ID NO: 174727 - DNA, 13 bp, Artificial Sequence
  Oligonucleotide for detection of SNP TSC0009626
tagtagatttaat

SEQ ID NO: 174728 - DNA, 13 bp, Artificial Sequence
  Oligonucleotide for detection of SNP TSC0009626
attaaatctacta

SEQ ID NO: 174729 - DNA, 13 bp, Artificial Sequence
  Oligonucleotide for detection of SNP TSC0043462
tttattttagtty

SEQ ID NO: 174730 - DNA, 13 bp, Artificial Sequence
  Oligonucleotide for detection of SNP TSC0043462
raactaaaataaa

SEQ ID NO: 174731 - DNA, 13 bp, Artificial Sequence
  Oligonucleotide for detection of SNP TSC0043462
tttatcgtagtty

SEQ ID NO: 174732 - DNA, 13 bp, Artificial Sequence
  Oligonucleotide for detection of SNP TSC0043462
raactacgataaa

SEQ ID NO: 174733 - DNA, 13 bp, Artificial Sequence
  Oligonucleotide for detection of SNP TSC0043462
gaattggggtgaa

SEQ ID NO: 174734 - DNA, 13 bp, Artificial Sequence
  Oligonucleotide for detection of SNP TSC0043462
ttcaccccaattc

SEQ ID NO: 174735 - DNA, 13 bp, Artificial Sequence
  Oligonucleotide for detection of SNP TSC0043462
gaattgtggtgaa

SEQ ID NO: 174736 - DNA, 13 bp, Artificial Sequence
  Oligonucleotide for detection of SNP TSC0043462
ttcaccacaattc

SEQ ID NO: 174737 - DNA, 13 bp, Artificial Sequence
  Oligonucleotide for detection of SNP TSC0043462
gaattgcggtgaa

SEQ ID NO: 174738 - DNA, 13 bp, Artificial Sequence
  Oligonucleotide for detection of SNP TSC0043462
ttcaccgcaattc

SEQ ID NO: 174739 - DNA, 13 bp, Artificial Sequence
  Oligonucleotide for detection of SNP TSC0043463
aatgagatattat

SEQ ID NO: 174740 - DNA, 13 bp, Artificial Sequence
  Oligonucleotide for detection of SNP TSC0043463
ataatatctcatt

SEQ ID NO: 174741 - DNA, 13 bp, Artificial Sequence
  Oligonucleotide for detection of SNP TSC0009895
ttgaagtttgtty

SEQ ID NO: 174742 - DNA, 13 bp, Artificial Sequence
  Oligonucleotide for detection of SNP TSC0009895
raacaaacttcaa

SEQ ID NO: 174743 - DNA, 13 bp, Artificial Sequence
  Oligonucleotide for detection of SNP TSC0009895
ttgaaggttgtty

SEQ ID NO: 174744 - DNA, 13 bp, Artificial Sequence
  Oligonucleotide for detection of SNP TSC0009895
raacaaccttcaa

SEQ ID NO: 174745 - DNA, 13 bp, Artificial Sequence
  Oligonucleotide for detection of SNP TSC0043465
gaattatttatty

SEQ ID NO: 174746 - DNA, 13 bp, Artificial Sequence
  Oligonucleotide for detection of SNP TSC0043465
raataaataattc

SEQ ID NO: 174747 - DNA, 13 bp, Artificial Sequence
  Oligonucleotide for detection of SNP TSC0043465
gaattagttatty

SEQ ID NO: 174748 - DNA, 13 bp, Artificial Sequence
  Oligonucleotide for detection of SNP TSC0043465
raataactaattc

SEQ ID NO: 174749 - DNA, 13 bp, Artificial Sequence
  Oligonucleotide for detection of SNP TSC0043465
gggtaaataatty

SEQ ID NO: 174750 - DNA, 13 bp, Artificial Sequence
  Oligonucleotide for detection of SNP TSC0043465
raattatttaccc

SEQ ID NO: 174751 - DNA, 13 bp, Artificial Sequence
  Oligonucleotide for detection of SNP TSC0043465
gggtaattaatty

SEQ ID NO: 174752 - DNA, 13 bp, Artificial Sequence
  Oligonucleotide for detection of SNP TSC0043465
raattaattaccc

SEQ ID NO: 174753 - DNA, 13 bp, Artificial Sequence
  Oligonucleotide for detection of SNP TSC0043466
gagtggtgtgggy

SEQ ID NO: 174754 - DNA, 13 bp, Artificial Sequence
  Oligonucleotide for detection of SNP TSC0043466
rcccacaccactc

SEQ ID NO: 174755 - DNA, 13 bp, Artificial Sequence
  Oligonucleotide for detection of SNP TSC0043466
gagtggcgtgggy

SEQ ID NO: 174756 - DNA, 13 bp, Artificial Sequence
  Oligonucleotide for detection of SNP TSC0043466
rcccacgccactc

SEQ ID NO: 174757 - DNA, 13 bp, Artificial Sequence
  Oligonucleotide for detection of SNP TSC0043467
tatagaaatattt

SEQ ID NO: 174758 - DNA, 13 bp, Artificial Sequence
  Oligonucleotide for detection of SNP TSC0043467
aaatatttctata

SEQ ID NO: 174759 - DNA, 13 bp, Artificial Sequence
  Oligonucleotide for detection of SNP TSC0043467
tatagatatattt

SEQ ID NO: 174760 - DNA, 13 bp, Artificial Sequence
  Oligonucleotide for detection of SNP TSC0043467
aaatatatctata

SEQ ID NO: 174761 - DNA, 13 bp, Artificial Sequence
  Oligonucleotide for detection of SNP TSC0043467
aagtatttttgta

SEQ ID NO: 174762 - DNA, 13 bp, Artificial Sequence
  Oligonucleotide for detection of SNP TSC0043467
tacaaaaatactt

SEQ ID NO: 174763 - DNA, 13 bp, Artificial Sequence
  Oligonucleotide for detection of SNP TSC0043467
aagtatatttgta

SEQ ID NO: 174764 - DNA, 13 bp, Artificial Sequence
  Oligonucleotide for detection of SNP TSC0043467
tacaaatatactt

SEQ ID NO: 174765 - DNA, 13 bp, Artificial Sequence
  Oligonucleotide for detection of SNP TSC0043468
tatgatatttttt

SEQ ID NO: 174766 - DNA, 13 bp, Artificial Sequence
  Oligonucleotide for detection of SNP TSC0043468
aaaaaatatcata

SEQ ID NO: 174767 - DNA, 13 bp, Artificial Sequence
  Oligonucleotide for detection of SNP TSC0043468
tatgatgtttttt

SEQ ID NO: 174768 - DNA, 13 bp, Artificial Sequence
  Oligonucleotide for detection of SNP TSC0043468
aaaaaacatcata

SEQ ID NO: 174769 - DNA, 13 bp, Artificial Sequence
  Oligonucleotide for detection of SNP TSC0043469
agtggttgggtgg

SEQ ID NO: 174770 - DNA, 13 bp, Artificial Sequence
  Oligonucleotide for detection of SNP TSC0043469
ccacccaaccact

SEQ ID NO: 174771 - DNA, 13 bp, Artificial Sequence
  Oligonucleotide for detection of SNP TSC0043469
agtggtggggtgg

SEQ ID NO: 174772 - DNA, 13 bp, Artificial Sequence
  Oligonucleotide for detection of SNP TSC0043469
ccaccccaccact

SEQ ID NO: 174773 - DNA, 13 bp, Artificial Sequence
  Oligonucleotide for detection of SNP TSC0043469
ttatttaattatt

SEQ ID NO: 174774 - DNA, 13 bp, Artificial Sequence
  Oligonucleotide for detection of SNP TSC0043469
aataattaaataa

SEQ ID NO: 174775 - DNA, 13 bp, Artificial Sequence
  Oligonucleotide for detection of SNP TSC0043469
ttattttattatt

SEQ ID NO: 174776 - DNA, 13 bp, Artificial Sequence
  Oligonucleotide for detection of SNP TSC0043469
aataataaaataa

SEQ ID NO: 174777 - DNA, 13 bp, Artificial Sequence
  Oligonucleotide for detection of SNP TSC0043471
attgttatattgt

SEQ ID NO: 174778 - DNA, 13 bp, Artificial Sequence
  Oligonucleotide for detection of SNP TSC0043471
acaatataacaat

SEQ ID NO: 174779 - DNA, 13 bp, Artificial Sequence
  Oligonucleotide for detection of SNP TSC0043471
attgttgtattgt

SEQ ID NO: 174780 - DNA, 13 bp, Artificial Sequence
  Oligonucleotide for detection of SNP TSC0043471
acaatacaacaat

SEQ ID NO: 174781 - DNA, 13 bp, Artificial Sequence
  Oligonucleotide for detection of SNP TSC0043471
attgtcgtattgt

SEQ ID NO: 174782 - DNA, 13 bp, Artificial Sequence
  Oligonucleotide for detection of SNP TSC0043471
acaatacgacaat

SEQ ID NO: 174783 - DNA, 13 bp, Artificial Sequence
  Oligonucleotide for detection of SNP TSC0043471
atagtatggtaat

SEQ ID NO: 174784 - DNA, 13 bp, Artificial Sequence
  Oligonucleotide for detection of SNP TSC0043471
attaccatactat

SEQ ID NO: 174785 - DNA, 13 bp, Artificial Sequence
  Oligonucleotide for detection of SNP TSC0043471
atagtacggtaat

SEQ ID NO: 174786 - DNA, 13 bp, Artificial Sequence
  Oligonucleotide for detection of SNP TSC0043471
attaccgtactat

SEQ ID NO: 174787 - DNA, 13 bp, Artificial Sequence
  Oligonucleotide for detection of SNP TSC0043472
tatggttgagtty

SEQ ID NO: 174788 - DNA, 13 bp, Artificial Sequence
  Oligonucleotide for detection of SNP TSC0043472
raactcaaccata

SEQ ID NO: 174789 - DNA, 13 bp, Artificial Sequence
  Oligonucleotide for detection of SNP TSC0043472
tatggtcgagtty

SEQ ID NO: 174790 - DNA, 13 bp, Artificial Sequence
  Oligonucleotide for detection of SNP TSC0043472
raactcgaccata

SEQ ID NO: 174791 - DNA, 13 bp, Artificial Sequence
  Oligonucleotide for detection of SNP TSC0043472
ggatttggttatg

SEQ ID NO: 174792 - DNA, 13 bp, Artificial Sequence
  Oligonucleotide for detection of SNP TSC0043472
cataaccaaatcc

SEQ ID NO: 174793 - DNA, 13 bp, Artificial Sequence
  Oligonucleotide for detection of SNP TSC0043472
ggatttagttatg

SEQ ID NO: 174794 - DNA, 13 bp, Artificial Sequence
  Oligonucleotide for detection of SNP TSC0043472
cataactaaatcc

SEQ ID NO: 174795 - DNA, 13 bp, Artificial Sequence
  Oligonucleotide for detection of SNP TSC0043472
ggattcggttatg

SEQ ID NO: 174796 - DNA, 13 bp, Artificial Sequence
  Oligonucleotide for detection of SNP TSC0043472
cataaccgaatcc

SEQ ID NO: 174797 - DNA, 13 bp, Artificial Sequence
  Oligonucleotide for detection of SNP TSC0043473
aggtataaagtty

SEQ ID NO: 174798 - DNA, 13 bp, Artificial Sequence
  Oligonucleotide for detection of SNP TSC0043473
raactttatacct

SEQ ID NO: 174799 - DNA, 13 bp, Artificial Sequence
  Oligonucleotide for detection of SNP TSC0043473
aggtatgaagtty

SEQ ID NO: 174800 - DNA, 13 bp, Artificial Sequence
  Oligonucleotide for detection of SNP TSC0043473
raacttcatacct

SEQ ID NO: 174801 - DNA, 13 bp, Artificial Sequence
  Oligonucleotide for detection of SNP TSC0043473
aggtacgaagtty

SEQ ID NO: 174802 - DNA, 13 bp, Artificial Sequence
  Oligonucleotide for detection of SNP TSC0043473
raacttcgtacct

SEQ ID NO: 174803 - DNA, 13 bp, Artificial Sequence
  Oligonucleotide for detection of SNP TSC0043473
gggttttgtattt

SEQ ID NO: 174804 - DNA, 13 bp, Artificial Sequence
  Oligonucleotide for detection of SNP TSC0043473
aaatacaaaaccc

SEQ ID NO: 174805 - DNA, 13 bp, Artificial Sequence
  Oligonucleotide for detection of SNP TSC0043473
gggtttcgtattt

SEQ ID NO: 174806 - DNA, 13 bp, Artificial Sequence
  Oligonucleotide for detection of SNP TSC0043473
aaatacgaaaccc

SEQ ID NO: 174807 - DNA, 13 bp, Artificial Sequence
  Oligonucleotide for detection of SNP TSC0043474
gatattgttatty

SEQ ID NO: 174808 - DNA, 13 bp, Artificial Sequence
  Oligonucleotide for detection of SNP TSC0043474
raataacaatatc

SEQ ID NO: 174809 - DNA, 13 bp, Artificial Sequence
  Oligonucleotide for detection of SNP TSC0043474
gatattattatty

SEQ ID NO: 174810 - DNA, 13 bp, Artificial Sequence
  Oligonucleotide for detection of SNP TSC0043474
raataataatatc

SEQ ID NO: 174811 - DNA, 13 bp, Artificial Sequence
  Oligonucleotide for detection of SNP TSC0005400
gagtagtttgtat

SEQ ID NO: 174812 - DNA, 13 bp, Artificial Sequence
  Oligonucleotide for detection of SNP TSC0005400
atacaaactactc

SEQ ID NO: 174813 - DNA, 13 bp, Artificial Sequence
  Oligonucleotide for detection of SNP TSC0005400
gagtaggttgtat

SEQ ID NO: 174814 - DNA, 13 bp, Artificial Sequence
  Oligonucleotide for detection of SNP TSC0005400
atacaacctactc

SEQ ID NO: 174815 - DNA, 13 bp, Artificial Sequence
  Oligonucleotide for detection of SNP TSC0005400
atgtaggttgtty

SEQ ID NO: 174816 - DNA, 13 bp, Artificial Sequence
  Oligonucleotide for detection of SNP TSC0005400
raacaacctacat

SEQ ID NO: 174817 - DNA, 13 bp, Artificial Sequence
  Oligonucleotide for detection of SNP TSC0005400
atgtagtttgtty

SEQ ID NO: 174818 - DNA, 13 bp, Artificial Sequence
  Oligonucleotide for detection of SNP TSC0005400
raacaaactacat

SEQ ID NO: 174819 - DNA, 13 bp, Artificial Sequence
  Oligonucleotide for detection of SNP TSC0005401
ttagaaaattatt

SEQ ID NO: 174820 - DNA, 13 bp, Artificial Sequence
  Oligonucleotide for detection of SNP TSC0005401
aataattttctaa

SEQ ID NO: 174821 - DNA, 13 bp, Artificial Sequence
  Oligonucleotide for detection of SNP TSC0005401
ttagaatattatt

SEQ ID NO: 174822 - DNA, 13 bp, Artificial Sequence
  Oligonucleotide for detection of SNP TSC0005401
aataatattctaa

SEQ ID NO: 174823 - DNA, 13 bp, Artificial Sequence
  Oligonucleotide for detection of SNP TSC0005401
aatgattttttag

SEQ ID NO: 174824 - DNA, 13 bp, Artificial Sequence
  Oligonucleotide for detection of SNP TSC0005401
ctaaaaaatcatt

SEQ ID NO: 174825 - DNA, 13 bp, Artificial Sequence
  Oligonucleotide for detection of SNP TSC0005401
aatgatattttag

SEQ ID NO: 174826 - DNA, 13 bp, Artificial Sequence
  Oligonucleotide for detection of SNP TSC0005401
ctaaaatatcatt

SEQ ID NO: 174827 - DNA, 13 bp, Artificial Sequence
  Oligonucleotide for detection of SNP TSC0043477
aagaaatgtagga

SEQ ID NO: 174828 - DNA, 13 bp, Artificial Sequence
  Oligonucleotide for detection of SNP TSC0043477
tcctacatttctt

SEQ ID NO: 174829 - DNA, 13 bp, Artificial Sequence
  Oligonucleotide for detection of SNP TSC0043477
aagaaaggtagga

SEQ ID NO: 174830 - DNA, 13 bp, Artificial Sequence
  Oligonucleotide for detection of SNP TSC0043477
tcctacctttctt

SEQ ID NO: 174831 - DNA, 13 bp, Artificial Sequence
  Oligonucleotide for detection of SNP TSC0043478
ggtttaaattgta

SEQ ID NO: 174832 - DNA, 13 bp, Artificial Sequence
  Oligonucleotide for detection of SNP TSC0043478
tacaatttaaacc

SEQ ID NO: 174833 - DNA, 13 bp, Artificial Sequence
  Oligonucleotide for detection of SNP TSC0043478
ggtttagattgta

SEQ ID NO: 174834 - DNA, 13 bp, Artificial Sequence
  Oligonucleotide for detection of SNP TSC0043478
tacaatctaaacc

SEQ ID NO: 174835 - DNA, 13 bp, Artificial Sequence
  Oligonucleotide for detection of SNP TSC0043482
gtttgtattgatg

SEQ ID NO: 174836 - DNA, 13 bp, Artificial Sequence
  Oligonucleotide for detection of SNP TSC0043482
catcaatacaaac

SEQ ID NO: 174837 - DNA, 13 bp, Artificial Sequence
  Oligonucleotide for detection of SNP TSC0043482
gtttgtgttgatg

SEQ ID NO: 174838 - DNA, 13 bp, Artificial Sequence
  Oligonucleotide for detection of SNP TSC0043482
catcaacacaaac

SEQ ID NO: 174839 - DNA, 13 bp, Artificial Sequence
  Oligonucleotide for detection of SNP TSC0043482
gtttgcgttgatg

SEQ ID NO: 174840 - DNA, 13 bp, Artificial Sequence
  Oligonucleotide for detection of SNP TSC0043482
catcaacgcaaac

SEQ ID NO: 174841 - DNA, 13 bp, Artificial Sequence
  Oligonucleotide for detection of SNP TSC0043482
tattaatgtaaay

SEQ ID NO: 174842 - DNA, 13 bp, Artificial Sequence
  Oligonucleotide for detection of SNP TSC0043482
rtttacattaata

SEQ ID NO: 174843 - DNA, 13 bp, Artificial Sequence
  Oligonucleotide for detection of SNP TSC0043482
tattaacgtaaay

SEQ ID NO: 174844 - DNA, 13 bp, Artificial Sequence
  Oligonucleotide for detection of SNP TSC0043482
rtttacgttaata

SEQ ID NO: 174845 - DNA, 13 bp, Artificial Sequence
  Oligonucleotide for detection of SNP TSC0043483
tttttagatattg

SEQ ID NO: 174846 - DNA, 13 bp, Artificial Sequence
  Oligonucleotide for detection of SNP TSC0043483
caatatctaaaaa

SEQ ID NO: 174847 - DNA, 13 bp, Artificial Sequence
  Oligonucleotide for detection of SNP TSC0043483
tttttaaatattg

SEQ ID NO: 174848 - DNA, 13 bp, Artificial Sequence
  Oligonucleotide for detection of SNP TSC0043483
caatatttaaaaa

SEQ ID NO: 174849 - DNA, 13 bp, Artificial Sequence
  Oligonucleotide for detection of SNP TSC0043484
taaggtgtagttt

SEQ ID NO: 174850 - DNA, 13 bp, Artificial Sequence
  Oligonucleotide for detection of SNP TSC0043484
aaactacacctta

SEQ ID NO: 174851 - DNA, 13 bp, Artificial Sequence
  Oligonucleotide for detection of SNP TSC0043484
taaggtatagttt

SEQ ID NO: 174852 - DNA, 13 bp, Artificial Sequence
  Oligonucleotide for detection of SNP TSC0043484
aaactatacctta

SEQ ID NO: 174853 - DNA, 13 bp, Artificial Sequence
  Oligonucleotide for detection of SNP TSC0008400
aaatttaatgtga

SEQ ID NO: 174854 - DNA, 13 bp, Artificial Sequence
  Oligonucleotide for detection of SNP TSC0008400
tcacattaaattt

SEQ ID NO: 174855 - DNA, 13 bp, Artificial Sequence
  Oligonucleotide for detection of SNP TSC0008400
aaattttatgtga

SEQ ID NO: 174856 - DNA, 13 bp, Artificial Sequence
  Oligonucleotide for detection of SNP TSC0008400
tcacataaaattt

SEQ ID NO: 174857 - DNA, 13 bp, Artificial Sequence
  Oligonucleotide for detection of SNP TSC0008400
ttatattaagttt

SEQ ID NO: 174858 - DNA, 13 bp, Artificial Sequence
  Oligonucleotide for detection of SNP TSC0008400
aaacttaatataa

SEQ ID NO: 174859 - DNA, 13 bp, Artificial Sequence
  Oligonucleotide for detection of SNP TSC0008400
ttatatgaagttt

SEQ ID NO: 174860 - DNA, 13 bp, Artificial Sequence
  Oligonucleotide for detection of SNP TSC0008400
aaacttcatataa

SEQ ID NO: 174861 - DNA, 13 bp, Artificial Sequence
  Oligonucleotide for detection of SNP TSC0009832
tttttgataaaga

SEQ ID NO: 174862 - DNA, 13 bp, Artificial Sequence
  Oligonucleotide for detection of SNP TSC0009832
tctttatcaaaaa

SEQ ID NO: 174863 - DNA, 13 bp, Artificial Sequence
  Oligonucleotide for detection of SNP TSC0009832
tttttggtaaaga

SEQ ID NO: 174864 - DNA, 13 bp, Artificial Sequence
  Oligonucleotide for detection of SNP TSC0009832
tctttaccaaaaa

SEQ ID NO: 174865 - DNA, 13 bp, Artificial Sequence
  Oligonucleotide for detection of SNP TSC0043486
ttttattgattga

SEQ ID NO: 174866 - DNA, 13 bp, Artificial Sequence
  Oligonucleotide for detection of SNP TSC0043486
tcaatcaataaaa

SEQ ID NO: 174867 - DNA, 13 bp, Artificial Sequence
  Oligonucleotide for detection of SNP TSC0043486
ttttatcgattga

SEQ ID NO: 174868 - DNA, 13 bp, Artificial Sequence
  Oligonucleotide for detection of SNP TSC0043486
tcaatcgataaaa

SEQ ID NO: 174869 - DNA, 13 bp, Artificial Sequence
  Oligonucleotide for detection of SNP TSC0043486
ttagttgatagga

SEQ ID NO: 174870 - DNA, 13 bp, Artificial Sequence
  Oligonucleotide for detection of SNP TSC0043486
tcctatcaactaa

SEQ ID NO: 174871 - DNA, 13 bp, Artificial Sequence
  Oligonucleotide for detection of SNP TSC0043486
ttagttaatagga

SEQ ID NO: 174872 - DNA, 13 bp, Artificial Sequence
  Oligonucleotide for detection of SNP TSC0043486
tcctattaactaa

SEQ ID NO: 174873 - DNA, 13 bp, Artificial Sequence
  Oligonucleotide for detection of SNP TSC0043486
ttagtcgatagga

SEQ ID NO: 174874 - DNA, 13 bp, Artificial Sequence
  Oligonucleotide for detection of SNP TSC0043486
tcctatcgactaa

SEQ ID NO: 174875 - DNA, 13 bp, Artificial Sequence
  Oligonucleotide for detection of SNP TSC0043488
tttaaattaattt

SEQ ID NO: 174876 - DNA, 13 bp, Artificial Sequence
  Oligonucleotide for detection of SNP TSC0043488
aaattaatttaaa

SEQ ID NO: 174877 - DNA, 13 bp, Artificial Sequence
  Oligonucleotide for detection of SNP TSC0043488
tttaaagtaattt

SEQ ID NO: 174878 - DNA, 13 bp, Artificial Sequence
  Oligonucleotide for detection of SNP TSC0043488
aaattactttaaa

SEQ ID NO: 174879 - DNA, 13 bp, Artificial Sequence
  Oligonucleotide for detection of SNP TSC0043488
aagttaatttgga

SEQ ID NO: 174880 - DNA, 13 bp, Artificial Sequence
  Oligonucleotide for detection of SNP TSC0043488
tccaaattaactt

SEQ ID NO: 174881 - DNA, 13 bp, Artificial Sequence
  Oligonucleotide for detection of SNP TSC0043488
aagttattttgga

SEQ ID NO: 174882 - DNA, 13 bp, Artificial Sequence
  Oligonucleotide for detection of SNP TSC0043488
tccaaaataactt

SEQ ID NO: 174883 - DNA, 13 bp, Artificial Sequence
  Oligonucleotide for detection of SNP TSC0043490
gaaagttgggata

SEQ ID NO: 174884 - DNA, 13 bp, Artificial Sequence
  Oligonucleotide for detection of SNP TSC0043490
tatcccaactttc

SEQ ID NO: 174885 - DNA, 13 bp, Artificial Sequence
  Oligonucleotide for detection of SNP TSC0043490
gaaagtcgggata

SEQ ID NO: 174886 - DNA, 13 bp, Artificial Sequence
  Oligonucleotide for detection of SNP TSC0043490
tatcccgactttc

SEQ ID NO: 174887 - DNA, 13 bp, Artificial Sequence
  Oligonucleotide for detection of SNP TSC0043491
aatgtttgggaaa

SEQ ID NO: 174888 - DNA, 13 bp, Artificial Sequence
  Oligonucleotide for detection of SNP TSC0043491
tttcccaaacatt

SEQ ID NO: 174889 - DNA, 13 bp, Artificial Sequence
  Oligonucleotide for detection of SNP TSC0043491
aatgttcgggaaa

SEQ ID NO: 174890 - DNA, 13 bp, Artificial Sequence
  Oligonucleotide for detection of SNP TSC0043491
tttcccgaacatt

SEQ ID NO: 174891 - DNA, 13 bp, Artificial Sequence
  Oligonucleotide for detection of SNP TSC0043491
ttttttgaatatt

SEQ ID NO: 174892 - DNA, 13 bp, Artificial Sequence
  Oligonucleotide for detection of SNP TSC0043491
aatattcaaaaaa

SEQ ID NO: 174893 - DNA, 13 bp, Artificial Sequence
  Oligonucleotide for detection of SNP TSC0043491
tttttcgaatatt

SEQ ID NO: 174894 - DNA, 13 bp, Artificial Sequence
  Oligonucleotide for detection of SNP TSC0043491
aatattcgaaaaa

SEQ ID NO: 174895 - DNA, 13 bp, Artificial Sequence
  Oligonucleotide for detection of SNP TSC0043492
agaattataatta

SEQ ID NO: 174896 - DNA, 13 bp, Artificial Sequence
  Oligonucleotide for detection of SNP TSC0043492
taattataattct

SEQ ID NO: 174897 - DNA, 13 bp, Artificial Sequence
  Oligonucleotide for detection of SNP TSC0043492
agaattgtaatta

SEQ ID NO: 174898 - DNA, 13 bp, Artificial Sequence
  Oligonucleotide for detection of SNP TSC0043492
taattacaattct

SEQ ID NO: 174899 - DNA, 13 bp, Artificial Sequence
  Oligonucleotide for detection of SNP TSC0043492
agaatcgtaatta

SEQ ID NO: 174900 - DNA, 13 bp, Artificial Sequence
  Oligonucleotide for detection of SNP TSC0043492
taattacgattct

SEQ ID NO: 174901 - DNA, 13 bp, Artificial Sequence
  Oligonucleotide for detection of SNP TSC0043492
tagttgtggtttt

SEQ ID NO: 174902 - DNA, 13 bp, Artificial Sequence
  Oligonucleotide for detection of SNP TSC0043492
aaaaccacaacta

SEQ ID NO: 174903 - DNA, 13 bp, Artificial Sequence
  Oligonucleotide for detection of SNP TSC0043492
tagttgcggtttt

SEQ ID NO: 174904 - DNA, 13 bp, Artificial Sequence
  Oligonucleotide for detection of SNP TSC0043492
aaaaccgcaacta

SEQ ID NO: 174905 - DNA, 13 bp, Artificial Sequence
  Oligonucleotide for detection of SNP TSC0005408
tatatagagaatg

SEQ ID NO: 174906 - DNA, 13 bp, Artificial Sequence
  Oligonucleotide for detection of SNP TSC0005408
cattctctatata

SEQ ID NO: 174907 - DNA, 13 bp, Artificial Sequence
  Oligonucleotide for detection of SNP TSC0005408
tatataaagaatg

SEQ ID NO: 174908 - DNA, 13 bp, Artificial Sequence
  Oligonucleotide for detection of SNP TSC0005408
cattctttatata

SEQ ID NO: 174909 - DNA, 13 bp, Artificial Sequence
  Oligonucleotide for detection of SNP TSC0043493
taggtgtgttgaa

SEQ ID NO: 174910 - DNA, 13 bp, Artificial Sequence
  Oligonucleotide for detection of SNP TSC0043493
ttcaacacaccta

SEQ ID NO: 174911 - DNA, 13 bp, Artificial Sequence
  Oligonucleotide for detection of SNP TSC0043493
taggtgcgttgaa

SEQ ID NO: 174912 - DNA, 13 bp, Artificial Sequence
  Oligonucleotide for detection of SNP TSC0043493
ttcaacgcaccta

SEQ ID NO: 174913 - DNA, 13 bp, Artificial Sequence
  Oligonucleotide for detection of SNP TSC0043493
tttaatgtattta

SEQ ID NO: 174914 - DNA, 13 bp, Artificial Sequence
  Oligonucleotide for detection of SNP TSC0043493
taaatacattaaa

SEQ ID NO: 174915 - DNA, 13 bp, Artificial Sequence
  Oligonucleotide for detection of SNP TSC0043493
tttaatatattta

SEQ ID NO: 174916 - DNA, 13 bp, Artificial Sequence
  Oligonucleotide for detection of SNP TSC0043493
taaatatattaaa

SEQ ID NO: 174917 - DNA, 13 bp, Artificial Sequence
  Oligonucleotide for detection of SNP TSC0043493
tttaacgtattta

SEQ ID NO: 174918 - DNA, 13 bp, Artificial Sequence
  Oligonucleotide for detection of SNP TSC0043493
taaatacgttaaa

SEQ ID NO: 174919 - DNA, 13 bp, Artificial Sequence
  Oligonucleotide for detection of SNP TSC0008625
tagttaaattttt

SEQ ID NO: 174920 - DNA, 13 bp, Artificial Sequence
  Oligonucleotide for detection of SNP TSC0008625
aaaaatttaacta

SEQ ID NO: 174921 - DNA, 13 bp, Artificial Sequence
  Oligonucleotide for detection of SNP TSC0008625
tagttatattttt

SEQ ID NO: 174922 - DNA, 13 bp, Artificial Sequence
  Oligonucleotide for detection of SNP TSC0008625
aaaaatataacta

SEQ ID NO: 174923 - DNA, 13 bp, Artificial Sequence
  Oligonucleotide for detection of SNP TSC0008625
agaggtttaatta

SEQ ID NO: 174924 - DNA, 13 bp, Artificial Sequence
  Oligonucleotide for detection of SNP TSC0008625
taattaaacctct

SEQ ID NO: 174925 - DNA, 13 bp, Artificial Sequence
  Oligonucleotide for detection of SNP TSC0008625
agaggtgtaatta

SEQ ID NO: 174926 - DNA, 13 bp, Artificial Sequence
  Oligonucleotide for detection of SNP TSC0008625
taattacacctct

SEQ ID NO: 174927 - DNA, 13 bp, Artificial Sequence
  Oligonucleotide for detection of SNP TSC0043494
aatttttggttty

SEQ ID NO: 174928 - DNA, 13 bp, Artificial Sequence
  Oligonucleotide for detection of SNP TSC0043494
raaaccaaaaatt

SEQ ID NO: 174929 - DNA, 13 bp, Artificial Sequence
  Oligonucleotide for detection of SNP TSC0043494
gaggtttggagtt

SEQ ID NO: 174930 - DNA, 13 bp, Artificial Sequence
  Oligonucleotide for detection of SNP TSC0043494
aactccaaacctc

SEQ ID NO: 174931 - DNA, 13 bp, Artificial Sequence
  Oligonucleotide for detection of SNP TSC0043494
gaggttcggagtt

SEQ ID NO: 174932 - DNA, 13 bp, Artificial Sequence
  Oligonucleotide for detection of SNP TSC0043494
aactccgaacctc

SEQ ID NO: 174933 - DNA, 13 bp, Artificial Sequence
  Oligonucleotide for detection of SNP TSC0005803
gggagaatattty

SEQ ID NO: 174934 - DNA, 13 bp, Artificial Sequence
  Oligonucleotide for detection of SNP TSC0005803
raaatattctccc

SEQ ID NO: 174935 - DNA, 13 bp, Artificial Sequence
  Oligonucleotide for detection of SNP TSC0005803
gggagagtattty

SEQ ID NO: 174936 - DNA, 13 bp, Artificial Sequence
  Oligonucleotide for detection of SNP TSC0005803
raaatactctccc

SEQ ID NO: 174937 - DNA, 13 bp, Artificial Sequence
  Oligonucleotide for detection of SNP TSC0005662
gggagtttaatgg

SEQ ID NO: 174938 - DNA, 13 bp, Artificial Sequence
  Oligonucleotide for detection of SNP TSC0005662
ccattaaactccc

SEQ ID NO: 174939 - DNA, 13 bp, Artificial Sequence
  Oligonucleotide for detection of SNP TSC0005662
gggagtgtaatgg

SEQ ID NO: 174940 - DNA, 13 bp, Artificial Sequence
  Oligonucleotide for detection of SNP TSC0005662
ccattacactccc

SEQ ID NO: 174941 - DNA, 13 bp, Artificial Sequence
  Oligonucleotide for detection of SNP TSC0005662
gggagcgtaatgg

SEQ ID NO: 174942 - DNA, 13 bp, Artificial Sequence
  Oligonucleotide for detection of SNP TSC0005662
ccattacgctccc

SEQ ID NO: 174943 - DNA, 13 bp, Artificial Sequence
  Oligonucleotide for detection of SNP TSC0005662
ttattgggtttty

SEQ ID NO: 174944 - DNA, 13 bp, Artificial Sequence
  Oligonucleotide for detection of SNP TSC0005662
raaaacccaataa

SEQ ID NO: 174945 - DNA, 13 bp, Artificial Sequence
  Oligonucleotide for detection of SNP TSC0005662
ttattgtgtttty

SEQ ID NO: 174946 - DNA, 13 bp, Artificial Sequence
  Oligonucleotide for detection of SNP TSC0005662
raaaacacaataa

SEQ ID NO: 174947 - DNA, 13 bp, Artificial Sequence
  Oligonucleotide for detection of SNP TSC0005662
ttattgcgtttty

SEQ ID NO: 174948 - DNA, 13 bp, Artificial Sequence
  Oligonucleotide for detection of SNP TSC0005662
raaaacgcaataa

SEQ ID NO: 174949 - DNA, 13 bp, Artificial Sequence
  Oligonucleotide for detection of SNP TSC0005663
taagaaaggtagy

SEQ ID NO: 174950 - DNA, 13 bp, Artificial Sequence
  Oligonucleotide for detection of SNP TSC0005663
rctacctttctta

SEQ ID NO: 174951 - DNA, 13 bp, Artificial Sequence
  Oligonucleotide for detection of SNP TSC0005663
taagaagggtagy

SEQ ID NO: 174952 - DNA, 13 bp, Artificial Sequence
  Oligonucleotide for detection of SNP TSC0005663
rctacccttctta

SEQ ID NO: 174953 - DNA, 13 bp, Artificial Sequence
  Oligonucleotide for detection of SNP TSC0043495
gttgggtttttat

SEQ ID NO: 174954 - DNA, 13 bp, Artificial Sequence
  Oligonucleotide for detection of SNP TSC0043495
ataaaaacccaac

SEQ ID NO: 174955 - DNA, 13 bp, Artificial Sequence
  Oligonucleotide for detection of SNP TSC0043495
gttggggttttat

SEQ ID NO: 174956 - DNA, 13 bp, Artificial Sequence
  Oligonucleotide for detection of SNP TSC0043495
ataaaaccccaac

SEQ ID NO: 174957 - DNA, 13 bp, Artificial Sequence
  Oligonucleotide for detection of SNP TSC0043495
atggaggtttagy

SEQ ID NO: 174958 - DNA, 13 bp, Artificial Sequence
  Oligonucleotide for detection of SNP TSC0043495
rctaaacctccat

SEQ ID NO: 174959 - DNA, 13 bp, Artificial Sequence
  Oligonucleotide for detection of SNP TSC0043495
atggagttttagy

SEQ ID NO: 174960 - DNA, 13 bp, Artificial Sequence
  Oligonucleotide for detection of SNP TSC0043495
rctaaaactccat

SEQ ID NO: 174961 - DNA, 13 bp, Artificial Sequence
  Oligonucleotide for detection of SNP TSC0043496
tttttaatattag

SEQ ID NO: 174962 - DNA, 13 bp, Artificial Sequence
  Oligonucleotide for detection of SNP TSC0043496
ctaatattaaaaa

SEQ ID NO: 174963 - DNA, 13 bp, Artificial Sequence
  Oligonucleotide for detection of SNP TSC0043496
tttttattattag

SEQ ID NO: 174964 - DNA, 13 bp, Artificial Sequence
  Oligonucleotide for detection of SNP TSC0043496
ctaataataaaaa

SEQ ID NO: 174965 - DNA, 13 bp, Artificial Sequence
  Oligonucleotide for detection of SNP TSC0043496
ttgatgttaaaaa

SEQ ID NO: 174966 - DNA, 13 bp, Artificial Sequence
  Oligonucleotide for detection of SNP TSC0043496
tttttaacatcaa

SEQ ID NO: 174967 - DNA, 13 bp, Artificial Sequence
  Oligonucleotide for detection of SNP TSC0043496
ttgatgataaaaa

SEQ ID NO: 174968 - DNA, 13 bp, Artificial Sequence
  Oligonucleotide for detection of SNP TSC0043496
tttttatcatcaa

SEQ ID NO: 174969 - DNA, 13 bp, Artificial Sequence
  Oligonucleotide for detection of SNP TSC0009738
ttttgtgtgtaat

SEQ ID NO: 174970 - DNA, 13 bp, Artificial Sequence
  Oligonucleotide for detection of SNP TSC0009738
attacacacaaaa

SEQ ID NO: 174971 - DNA, 13 bp, Artificial Sequence
  Oligonucleotide for detection of SNP TSC0009738
ttttgtatgtaat

SEQ ID NO: 174972 - DNA, 13 bp, Artificial Sequence
  Oligonucleotide for detection of SNP TSC0009738
attacatacaaaa

SEQ ID NO: 174973 - DNA, 13 bp, Artificial Sequence
  Oligonucleotide for detection of SNP TSC0043498
taatggtgagaaa

SEQ ID NO: 174974 - DNA, 13 bp, Artificial Sequence
  Oligonucleotide for detection of SNP TSC0043498
tttctcaccatta

SEQ ID NO: 174975 - DNA, 13 bp, Artificial Sequence
  Oligonucleotide for detection of SNP TSC0043498
taatggagagaaa

SEQ ID NO: 174976 - DNA, 13 bp, Artificial Sequence
  Oligonucleotide for detection of SNP TSC0043498
tttctctccatta

SEQ ID NO: 174977 - DNA, 13 bp, Artificial Sequence
  Oligonucleotide for detection of SNP TSC0043499
gatagatttattt

SEQ ID NO: 174978 - DNA, 13 bp, Artificial Sequence
  Oligonucleotide for detection of SNP TSC0043499
aaataaatctatc

SEQ ID NO: 174979 - DNA, 13 bp, Artificial Sequence
  Oligonucleotide for detection of SNP TSC0043499
agatggttttaty

SEQ ID NO: 174980 - DNA, 13 bp, Artificial Sequence
  Oligonucleotide for detection of SNP TSC0043499
rataaaaccatct

SEQ ID NO: 174981 - DNA, 13 bp, Artificial Sequence
  Oligonucleotide for detection of SNP TSC0043499
agatgggtttaty

SEQ ID NO: 174982 - DNA, 13 bp, Artificial Sequence
  Oligonucleotide for detection of SNP TSC0043499
rataaacccatct

SEQ ID NO: 174983 - DNA, 13 bp, Artificial Sequence
  Oligonucleotide for detection of SNP TSC0043501
tagtttaatatga

SEQ ID NO: 174984 - DNA, 13 bp, Artificial Sequence
  Oligonucleotide for detection of SNP TSC0043501
tcatattaaacta

SEQ ID NO: 174985 - DNA, 13 bp, Artificial Sequence
  Oligonucleotide for detection of SNP TSC0043501
tagttttatatga

SEQ ID NO: 174986 - DNA, 13 bp, Artificial Sequence
  Oligonucleotide for detection of SNP TSC0043501
tcatataaaacta

SEQ ID NO: 174987 - DNA, 13 bp, Artificial Sequence
  Oligonucleotide for detection of SNP TSC0043501
ttatattagattg

SEQ ID NO: 174988 - DNA, 13 bp, Artificial Sequence
  Oligonucleotide for detection of SNP TSC0043501
caatctaatataa

SEQ ID NO: 174989 - DNA, 13 bp, Artificial Sequence
  Oligonucleotide for detection of SNP TSC0043501
ttatataagattg

SEQ ID NO: 174990 - DNA, 13 bp, Artificial Sequence
  Oligonucleotide for detection of SNP TSC0043501
caatcttatataa

SEQ ID NO: 174991 - DNA, 13 bp, Artificial Sequence
  Oligonucleotide for detection of SNP TSC0043502
gtaaatgtttttt

SEQ ID NO: 174992 - DNA, 13 bp, Artificial Sequence
  Oligonucleotide for detection of SNP TSC0043502
aaaaaacatttac

SEQ ID NO: 174993 - DNA, 13 bp, Artificial Sequence
  Oligonucleotide for detection of SNP TSC0043502
gtaaatatttttt

SEQ ID NO: 174994 - DNA, 13 bp, Artificial Sequence
  Oligonucleotide for detection of SNP TSC0043502
aaaaaatatttac

SEQ ID NO: 174995 - DNA, 13 bp, Artificial Sequence
  Oligonucleotide for detection of SNP TSC0007661
agtgataatagtt

SEQ ID NO: 174996 - DNA, 13 bp, Artificial Sequence
  Oligonucleotide for detection of SNP TSC0007661
aactattatcact

SEQ ID NO: 174997 - DNA, 13 bp, Artificial Sequence
  Oligonucleotide for detection of SNP TSC0007661
agtgatgatagtt

SEQ ID NO: 174998 - DNA, 13 bp, Artificial Sequence
  Oligonucleotide for detection of SNP TSC0007661
aactatcatcact

SEQ ID NO: 174999 - DNA, 13 bp, Artificial Sequence
  Oligonucleotide for detection of SNP TSC0043503
aaatgagaggtga

SEQ ID NO: 175000 - DNA, 13 bp, Artificial Sequence
  Oligonucleotide for detection of SNP TSC0043503
tcacctctcattt

SEQ ID NO: 175001 - DNA, 13 bp, Artificial Sequence
  Oligonucleotide for detection of SNP TSC0043503
aaatgaaaggtga

SEQ ID NO: 175002 - DNA, 13 bp, Artificial Sequence
  Oligonucleotide for detection of SNP TSC0043503
tcacctttcattt

SEQ ID NO: 175003 - DNA, 13 bp, Artificial Sequence
  Oligonucleotide for detection of SNP TSC0043503
aaacgagaggtga

SEQ ID NO: 175004 - DNA, 13 bp, Artificial Sequence
  Oligonucleotide for detection of SNP TSC0043503
tcacctctcgttt

SEQ ID NO: 175005 - DNA, 13 bp, Artificial Sequence
  Oligonucleotide for detection of SNP TSC0043503
aaacgaaaggtga

SEQ ID NO: 175006 - DNA, 13 bp, Artificial Sequence
  Oligonucleotide for detection of SNP TSC0043503
tcacctttcgttt

SEQ ID NO: 175007 - DNA, 13 bp, Artificial Sequence
  Oligonucleotide for detection of SNP TSC0043504
taatgagtgaagt

SEQ ID NO: 175008 - DNA, 13 bp, Artificial Sequence
  Oligonucleotide for detection of SNP TSC0043504
acttcactcatta

SEQ ID NO: 175009 - DNA, 13 bp, Artificial Sequence
  Oligonucleotide for detection of SNP TSC0043504
taatgaatgaagt

SEQ ID NO: 175010 - DNA, 13 bp, Artificial Sequence
  Oligonucleotide for detection of SNP TSC0043504
acttcattcatta

SEQ ID NO: 175011 - DNA, 13 bp, Artificial Sequence
  Oligonucleotide for detection of SNP TSC0004702
ttggggaattgat

SEQ ID NO: 175012 - DNA, 13 bp, Artificial Sequence
  Oligonucleotide for detection of SNP TSC0004702
atcaattccccaa

SEQ ID NO: 175013 - DNA, 13 bp, Artificial Sequence
  Oligonucleotide for detection of SNP TSC0004702
ttgggggattgat

SEQ ID NO: 175014 - DNA, 13 bp, Artificial Sequence
  Oligonucleotide for detection of SNP TSC0004702
atcaatcccccaa

SEQ ID NO: 175015 - DNA, 13 bp, Artificial Sequence
  Oligonucleotide for detection of SNP TSC0043505
ttttgtattaagg

SEQ ID NO: 175016 - DNA, 13 bp, Artificial Sequence
  Oligonucleotide for detection of SNP TSC0043505
ccttaatacaaaa

SEQ ID NO: 175017 - DNA, 13 bp, Artificial Sequence
  Oligonucleotide for detection of SNP TSC0043505
ttttgtgttaagg

SEQ ID NO: 175018 - DNA, 13 bp, Artificial Sequence
  Oligonucleotide for detection of SNP TSC0043505
ccttaacacaaaa

SEQ ID NO: 175019 - DNA, 13 bp, Artificial Sequence
  Oligonucleotide for detection of SNP TSC0043505
ttttgcgttaagg

SEQ ID NO: 175020 - DNA, 13 bp, Artificial Sequence
  Oligonucleotide for detection of SNP TSC0043505
ccttaacgcaaaa

SEQ ID NO: 175021 - DNA, 13 bp, Artificial Sequence
  Oligonucleotide for detection of SNP TSC0043505
ttttaatgtagag

SEQ ID NO: 175022 - DNA, 13 bp, Artificial Sequence
  Oligonucleotide for detection of SNP TSC0043505
ctctacattaaaa

SEQ ID NO: 175023 - DNA, 13 bp, Artificial Sequence
  Oligonucleotide for detection of SNP TSC0043505
ttttaacgtagag

SEQ ID NO: 175024 - DNA, 13 bp, Artificial Sequence
  Oligonucleotide for detection of SNP TSC0043505
ctctacgttaaaa

SEQ ID NO: 175025 - DNA, 13 bp, Artificial Sequence
  Oligonucleotide for detection of SNP TSC0043506
gagttttgttgat

SEQ ID NO: 175026 - DNA, 13 bp, Artificial Sequence
  Oligonucleotide for detection of SNP TSC0043506
atcaacaaaactc

SEQ ID NO: 175027 - DNA, 13 bp, Artificial Sequence
  Oligonucleotide for detection of SNP TSC0043506
gagtttcgttgat

SEQ ID NO: 175028 - DNA, 13 bp, Artificial Sequence
  Oligonucleotide for detection of SNP TSC0043506
atcaacgaaactc

SEQ ID NO: 175029 - DNA, 13 bp, Artificial Sequence
  Oligonucleotide for detection of SNP TSC0043506
gagttttgtcgat

SEQ ID NO: 175030 - DNA, 13 bp, Artificial Sequence
  Oligonucleotide for detection of SNP TSC0043506
atcgacaaaactc

SEQ ID NO: 175031 - DNA, 13 bp, Artificial Sequence
  Oligonucleotide for detection of SNP TSC0043506
gagtttcgtcgat

SEQ ID NO: 175032 - DNA, 13 bp, Artificial Sequence
  Oligonucleotide for detection of SNP TSC0043506
atcgacgaaactc

SEQ ID NO: 175033 - DNA, 13 bp, Artificial Sequence
  Oligonucleotide for detection of SNP TSC0043506
attgatgaagtty

SEQ ID NO: 175034 - DNA, 13 bp, Artificial Sequence
  Oligonucleotide for detection of SNP TSC0043506
raacttcatcaat

SEQ ID NO: 175035 - DNA, 13 bp, Artificial Sequence
  Oligonucleotide for detection of SNP TSC0043506
attgataaagtty

SEQ ID NO: 175036 - DNA, 13 bp, Artificial Sequence
  Oligonucleotide for detection of SNP TSC0043506
raactttatcaat

SEQ ID NO: 175037 - DNA, 13 bp, Artificial Sequence
  Oligonucleotide for detection of SNP TSC0043506
atcgatgaagtty

SEQ ID NO: 175038 - DNA, 13 bp, Artificial Sequence
  Oligonucleotide for detection of SNP TSC0043506
raacttcatcgat

SEQ ID NO: 175039 - DNA, 13 bp, Artificial Sequence
  Oligonucleotide for detection of SNP TSC0043506
atcgataaagtty

SEQ ID NO: 175040 - DNA, 13 bp, Artificial Sequence
  Oligonucleotide for detection of SNP TSC0043506
raactttatcgat

SEQ ID NO: 175041 - DNA, 13 bp, Artificial Sequence
  Oligonucleotide for detection of SNP TSC0043506
attgacgaagtty

SEQ ID NO: 175042 - DNA, 13 bp, Artificial Sequence
  Oligonucleotide for detection of SNP TSC0043506
raacttcgtcaat

SEQ ID NO: 175043 - DNA, 13 bp, Artificial Sequence
  Oligonucleotide for detection of SNP TSC0043506
atcgacgaagtty

SEQ ID NO: 175044 - DNA, 13 bp, Artificial Sequence
  Oligonucleotide for detection of SNP TSC0043506
raacttcgtcgat

SEQ ID NO: 175045 - DNA, 13 bp, Artificial Sequence
  Oligonucleotide for detection of SNP TSC0004791
atataagtaagga

SEQ ID NO: 175046 - DNA, 13 bp, Artificial Sequence
  Oligonucleotide for detection of SNP TSC0004791
tccttacttatat

SEQ ID NO: 175047 - DNA, 13 bp, Artificial Sequence
  Oligonucleotide for detection of SNP TSC0004791
atataaataagga

SEQ ID NO: 175048 - DNA, 13 bp, Artificial Sequence
  Oligonucleotide for detection of SNP TSC0004791
tccttatttatat

SEQ ID NO: 175049 - DNA, 13 bp, Artificial Sequence
  Oligonucleotide for detection of SNP TSC0043508
aatggtgtggtgg

SEQ ID NO: 175050 - DNA, 13 bp, Artificial Sequence
  Oligonucleotide for detection of SNP TSC0043508
ccaccacaccatt

SEQ ID NO: 175051 - DNA, 13 bp, Artificial Sequence
  Oligonucleotide for detection of SNP TSC0043508
aatggtatggtgg

SEQ ID NO: 175052 - DNA, 13 bp, Artificial Sequence
  Oligonucleotide for detection of SNP TSC0043508
ccaccataccatt

SEQ ID NO: 175053 - DNA, 13 bp, Artificial Sequence
  Oligonucleotide for detection of SNP TSC0043508
aatggcgtggtgg

SEQ ID NO: 175054 - DNA, 13 bp, Artificial Sequence
  Oligonucleotide for detection of SNP TSC0043508
ccaccacgccatt

SEQ ID NO: 175055 - DNA, 13 bp, Artificial Sequence
  Oligonucleotide for detection of SNP TSC0005587
agtttgggttttt

SEQ ID NO: 175056 - DNA, 13 bp, Artificial Sequence
  Oligonucleotide for detection of SNP TSC0005587
aaaaacccaaact

SEQ ID NO: 175057 - DNA, 13 bp, Artificial Sequence
  Oligonucleotide for detection of SNP TSC0005587
agtttgagttttt

SEQ ID NO: 175058 - DNA, 13 bp, Artificial Sequence
  Oligonucleotide for detection of SNP TSC0005587
aaaaactcaaact

SEQ ID NO: 175059 - DNA, 13 bp, Artificial Sequence
  Oligonucleotide for detection of SNP TSC0004527
atattatgagaag

SEQ ID NO: 175060 - DNA, 13 bp, Artificial Sequence
  Oligonucleotide for detection of SNP TSC0004527
cttctcataatat

SEQ ID NO: 175061 - DNA, 13 bp, Artificial Sequence
  Oligonucleotide for detection of SNP TSC0004527
atattacgagaag

SEQ ID NO: 175062 - DNA, 13 bp, Artificial Sequence
  Oligonucleotide for detection of SNP TSC0004527
cttctcgtaatat

SEQ ID NO: 175063 - DNA, 13 bp, Artificial Sequence
  Oligonucleotide for detection of SNP TSC0004527
ttttttatggtgt

SEQ ID NO: 175064 - DNA, 13 bp, Artificial Sequence
  Oligonucleotide for detection of SNP TSC0004527
acaccataaaaaa

SEQ ID NO: 175065 - DNA, 13 bp, Artificial Sequence
  Oligonucleotide for detection of SNP TSC0043509
ataaatatggata

SEQ ID NO: 175066 - DNA, 13 bp, Artificial Sequence
  Oligonucleotide for detection of SNP TSC0043509
tatccatatttat

SEQ ID NO: 175067 - DNA, 13 bp, Artificial Sequence
  Oligonucleotide for detection of SNP TSC0043509
ataaatgtggata

SEQ ID NO: 175068 - DNA, 13 bp, Artificial Sequence
  Oligonucleotide for detection of SNP TSC0043509
tatccacatttat

SEQ ID NO: 175069 - DNA, 13 bp, Artificial Sequence
  Oligonucleotide for detection of SNP TSC0043509
ataaacgtggata

SEQ ID NO: 175070 - DNA, 13 bp, Artificial Sequence
  Oligonucleotide for detection of SNP TSC0043509
tatccacgtttat

SEQ ID NO: 175071 - DNA, 13 bp, Artificial Sequence
  Oligonucleotide for detection of SNP TSC0043510
tttagaatattga

SEQ ID NO: 175072 - DNA, 13 bp, Artificial Sequence
  Oligonucleotide for detection of SNP TSC0043510
tcaatattctaaa

SEQ ID NO: 175073 - DNA, 13 bp, Artificial Sequence
  Oligonucleotide for detection of SNP TSC0043510
tttagattattga

SEQ ID NO: 175074 - DNA, 13 bp, Artificial Sequence
  Oligonucleotide for detection of SNP TSC0043510
tcaataatctaaa

SEQ ID NO: 175075 - DNA, 13 bp, Artificial Sequence
  Oligonucleotide for detection of SNP TSC0043510
ttagtgttttgag

SEQ ID NO: 175076 - DNA, 13 bp, Artificial Sequence
  Oligonucleotide for detection of SNP TSC0043510
ctcaaaacactaa

SEQ ID NO: 175077 - DNA, 13 bp, Artificial Sequence
  Oligonucleotide for detection of SNP TSC0043510
ttagtgatttgag

SEQ ID NO: 175078 - DNA, 13 bp, Artificial Sequence
  Oligonucleotide for detection of SNP TSC0043510
ctcaaatcactaa

SEQ ID NO: 175079 - DNA, 13 bp, Artificial Sequence
  Oligonucleotide for detection of SNP TSC0043512
ataaattatttag

SEQ ID NO: 175080 - DNA, 13 bp, Artificial Sequence
  Oligonucleotide for detection of SNP TSC0043512
ctaaataatttat

SEQ ID NO: 175081 - DNA, 13 bp, Artificial Sequence
  Oligonucleotide for detection of SNP TSC0043512
ataaatgatttag

SEQ ID NO: 175082 - DNA, 13 bp, Artificial Sequence
  Oligonucleotide for detection of SNP TSC0043512
ctaaatcatttat

SEQ ID NO: 175083 - DNA, 13 bp, Artificial Sequence
  Oligonucleotide for detection of SNP TSC0043512
ttggataatttat

SEQ ID NO: 175084 - DNA, 13 bp, Artificial Sequence
  Oligonucleotide for detection of SNP TSC0043512
ataaattatccaa

SEQ ID NO: 175085 - DNA, 13 bp, Artificial Sequence
  Oligonucleotide for detection of SNP TSC0043512
ttggattatttat

SEQ ID NO: 175086 - DNA, 13 bp, Artificial Sequence
  Oligonucleotide for detection of SNP TSC0043512
ataaataatccaa

SEQ ID NO: 175087 - DNA, 13 bp, Artificial Sequence
  Oligonucleotide for detection of SNP TSC0043518
aggagaatatttg

SEQ ID NO: 175088 - DNA, 13 bp, Artificial Sequence
  Oligonucleotide for detection of SNP TSC0043518
caaatattctcct

SEQ ID NO: 175089 - DNA, 13 bp, Artificial Sequence
  Oligonucleotide for detection of SNP TSC0043518
aggagagtatttg

SEQ ID NO: 175090 - DNA, 13 bp, Artificial Sequence
  Oligonucleotide for detection of SNP TSC0043518
caaatactctcct

SEQ ID NO: 175091 - DNA, 13 bp, Artificial Sequence
  Oligonucleotide for detection of SNP TSC0043519
ttatataaatgag

SEQ ID NO: 175092 - DNA, 13 bp, Artificial Sequence
  Oligonucleotide for detection of SNP TSC0043519
ctcatttatataa

SEQ ID NO: 175093 - DNA, 13 bp, Artificial Sequence
  Oligonucleotide for detection of SNP TSC0043519
ttatattaatgag

SEQ ID NO: 175094 - DNA, 13 bp, Artificial Sequence
  Oligonucleotide for detection of SNP TSC0043519
ctcattaatataa

SEQ ID NO: 175095 - DNA, 13 bp, Artificial Sequence
  Oligonucleotide for detection of SNP TSC0043519
tttatttgtatga

SEQ ID NO: 175096 - DNA, 13 bp, Artificial Sequence
  Oligonucleotide for detection of SNP TSC0043519
tcatacaaataaa

SEQ ID NO: 175097 - DNA, 13 bp, Artificial Sequence
  Oligonucleotide for detection of SNP TSC0043519
tttattggtatga

SEQ ID NO: 175098 - DNA, 13 bp, Artificial Sequence
  Oligonucleotide for detection of SNP TSC0043519
tcataccaataaa

SEQ ID NO: 175099 - DNA, 13 bp, Artificial Sequence
  Oligonucleotide for detection of SNP TSC0043520
atatataataaga

SEQ ID NO: 175100 - DNA, 13 bp, Artificial Sequence
  Oligonucleotide for detection of SNP TSC0043520
tcttattatatat

SEQ ID NO: 175101 - DNA, 13 bp, Artificial Sequence
  Oligonucleotide for detection of SNP TSC0043520
atatattataaga

SEQ ID NO: 175102 - DNA, 13 bp, Artificial Sequence
  Oligonucleotide for detection of SNP TSC0043520
tcttataatatat

SEQ ID NO: 175103 - DNA, 13 bp, Artificial Sequence
  Oligonucleotide for detection of SNP TSC0043520
ttttattatgtgt

SEQ ID NO: 175104 - DNA, 13 bp, Artificial Sequence
  Oligonucleotide for detection of SNP TSC0043520
acacataataaaa

SEQ ID NO: 175105 - DNA, 13 bp, Artificial Sequence
  Oligonucleotide for detection of SNP TSC0043520
ttttataatgtgt

SEQ ID NO: 175106 - DNA, 13 bp, Artificial Sequence
  Oligonucleotide for detection of SNP TSC0043520
acacattataaaa

SEQ ID NO: 175107 - DNA, 13 bp, Artificial Sequence
  Oligonucleotide for detection of SNP TSC0043526
tttaaatttttty

SEQ ID NO: 175108 - DNA, 13 bp, Artificial Sequence
  Oligonucleotide for detection of SNP TSC0043526
raaaaaatttaaa

SEQ ID NO: 175109 - DNA, 13 bp, Artificial Sequence
  Oligonucleotide for detection of SNP TSC0043526
ggagggatttaaa

SEQ ID NO: 175110 - DNA, 13 bp, Artificial Sequence
  Oligonucleotide for detection of SNP TSC0043526
tttaaatccctcc

SEQ ID NO: 175111 - DNA, 13 bp, Artificial Sequence
  Oligonucleotide for detection of SNP TSC0043526
ggagggttttaaa

SEQ ID NO: 175112 - DNA, 13 bp, Artificial Sequence
  Oligonucleotide for detection of SNP TSC0043526
tttaaaaccctcc

SEQ ID NO: 175113 - DNA, 13 bp, Artificial Sequence
  Oligonucleotide for detection of SNP TSC0005969
gtgatgtttttta

SEQ ID NO: 175114 - DNA, 13 bp, Artificial Sequence
  Oligonucleotide for detection of SNP TSC0005969
taaaaaacatcac

SEQ ID NO: 175115 - DNA, 13 bp, Artificial Sequence
  Oligonucleotide for detection of SNP TSC0005969
gtgatggttttta

SEQ ID NO: 175116 - DNA, 13 bp, Artificial Sequence
  Oligonucleotide for detection of SNP TSC0005969
taaaaaccatcac

SEQ ID NO: 175117 - DNA, 13 bp, Artificial Sequence
  Oligonucleotide for detection of SNP TSC0005969
gcgatgtttttta

SEQ ID NO: 175118 - DNA, 13 bp, Artificial Sequence
  Oligonucleotide for detection of SNP TSC0005969
taaaaaacatcgc

SEQ ID NO: 175119 - DNA, 13 bp, Artificial Sequence
  Oligonucleotide for detection of SNP TSC0005969
gcgatggttttta

SEQ ID NO: 175120 - DNA, 13 bp, Artificial Sequence
  Oligonucleotide for detection of SNP TSC0005969
taaaaaccatcgc

SEQ ID NO: 175121 - DNA, 13 bp, Artificial Sequence
  Oligonucleotide for detection of SNP TSC0005969
tagagaatattgy

SEQ ID NO: 175122 - DNA, 13 bp, Artificial Sequence
  Oligonucleotide for detection of SNP TSC0005969
rcaatattctcta

SEQ ID NO: 175123 - DNA, 13 bp, Artificial Sequence
  Oligonucleotide for detection of SNP TSC0005969
tagagattattgy

SEQ ID NO: 175124 - DNA, 13 bp, Artificial Sequence
  Oligonucleotide for detection of SNP TSC0005969
rcaataatctcta

SEQ ID NO: 175125 - DNA, 13 bp, Artificial Sequence
  Oligonucleotide for detection of SNP TSC0005969
tagagaatatcgy

SEQ ID NO: 175126 - DNA, 13 bp, Artificial Sequence
  Oligonucleotide for detection of SNP TSC0005969
rcgatattctcta

SEQ ID NO: 175127 - DNA, 13 bp, Artificial Sequence
  Oligonucleotide for detection of SNP TSC0005969
tagagattatcgy

SEQ ID NO: 175128 - DNA, 13 bp, Artificial Sequence
  Oligonucleotide for detection of SNP TSC0005969
rcgataatctcta

SEQ ID NO: 175129 - DNA, 13 bp, Artificial Sequence
  Oligonucleotide for detection of SNP TSC0043531
attttaaaagata

SEQ ID NO: 175130 - DNA, 13 bp, Artificial Sequence
  Oligonucleotide for detection of SNP TSC0043531
tatcttttaaaat

SEQ ID NO: 175131 - DNA, 13 bp, Artificial Sequence
  Oligonucleotide for detection of SNP TSC0006223
aagtttagatgta

SEQ ID NO: 175132 - DNA, 13 bp, Artificial Sequence
  Oligonucleotide for detection of SNP TSC0006223
tacatctaaactt

SEQ ID NO: 175133 - DNA, 13 bp, Artificial Sequence
  Oligonucleotide for detection of SNP TSC0006223
aagtttggatgta

SEQ ID NO: 175134 - DNA, 13 bp, Artificial Sequence
  Oligonucleotide for detection of SNP TSC0006223
tacatccaaactt

SEQ ID NO: 175135 - DNA, 13 bp, Artificial Sequence
  Oligonucleotide for detection of SNP TSC0006223
aagtttagacgta

SEQ ID NO: 175136 - DNA, 13 bp, Artificial Sequence
  Oligonucleotide for detection of SNP TSC0006223
tacgtctaaactt

SEQ ID NO: 175137 - DNA, 13 bp, Artificial Sequence
  Oligonucleotide for detection of SNP TSC0006223
aagttcggatgta

SEQ ID NO: 175138 - DNA, 13 bp, Artificial Sequence
  Oligonucleotide for detection of SNP TSC0006223
tacatccgaactt

SEQ ID NO: 175139 - DNA, 13 bp, Artificial Sequence
  Oligonucleotide for detection of SNP TSC0006223
aagtttggacgta

SEQ ID NO: 175140 - DNA, 13 bp, Artificial Sequence
  Oligonucleotide for detection of SNP TSC0006223
tacgtccaaactt

SEQ ID NO: 175141 - DNA, 13 bp, Artificial Sequence
  Oligonucleotide for detection of SNP TSC0006223
aagttcggacgta

SEQ ID NO: 175142 - DNA, 13 bp, Artificial Sequence
  Oligonucleotide for detection of SNP TSC0006223
tacgtccgaactt

SEQ ID NO: 175143 - DNA, 13 bp, Artificial Sequence
  Oligonucleotide for detection of SNP TSC0006223
tatgtttggattt

SEQ ID NO: 175144 - DNA, 13 bp, Artificial Sequence
  Oligonucleotide for detection of SNP TSC0006223
aaatccaaacata

SEQ ID NO: 175145 - DNA, 13 bp, Artificial Sequence
  Oligonucleotide for detection of SNP TSC0006223
tacgtttggattt

SEQ ID NO: 175146 - DNA, 13 bp, Artificial Sequence
  Oligonucleotide for detection of SNP TSC0006223
aaatccaaacgta

SEQ ID NO: 175147 - DNA, 13 bp, Artificial Sequence
  Oligonucleotide for detection of SNP TSC0006223
tatgttcggattt

SEQ ID NO: 175148 - DNA, 13 bp, Artificial Sequence
  Oligonucleotide for detection of SNP TSC0006223
aaatccgaacata

SEQ ID NO: 175149 - DNA, 13 bp, Artificial Sequence
  Oligonucleotide for detection of SNP TSC0006223
tacgttcggattt

SEQ ID NO: 175150 - DNA, 13 bp, Artificial Sequence
  Oligonucleotide for detection of SNP TSC0006223
aaatccgaacgta

SEQ ID NO: 175151 - DNA, 13 bp, Artificial Sequence
  Oligonucleotide for detection of SNP TSC0006224
gtggggtgaggty

SEQ ID NO: 175152 - DNA, 13 bp, Artificial Sequence
  Oligonucleotide for detection of SNP TSC0006224
racctcaccccac

SEQ ID NO: 175153 - DNA, 13 bp, Artificial Sequence
  Oligonucleotide for detection of SNP TSC0006224
gtggggggaggty

SEQ ID NO: 175154 - DNA, 13 bp, Artificial Sequence
  Oligonucleotide for detection of SNP TSC0006224
racctccccccac

SEQ ID NO: 175155 - DNA, 13 bp, Artificial Sequence
  Oligonucleotide for detection of SNP TSC0006224
gtggggcgaggty

SEQ ID NO: 175156 - DNA, 13 bp, Artificial Sequence
  Oligonucleotide for detection of SNP TSC0006224
racctcgccccac

SEQ ID NO: 175157 - DNA, 13 bp, Artificial Sequence
  Oligonucleotide for detection of SNP TSC0043532
gattttattaatt

SEQ ID NO: 175158 - DNA, 13 bp, Artificial Sequence
  Oligonucleotide for detection of SNP TSC0043532
aattaataaaatc

SEQ ID NO: 175159 - DNA, 13 bp, Artificial Sequence
  Oligonucleotide for detection of SNP TSC0043532
gattttgttaatt

SEQ ID NO: 175160 - DNA, 13 bp, Artificial Sequence
  Oligonucleotide for detection of SNP TSC0043532
aattaacaaaatc

SEQ ID NO: 175161 - DNA, 13 bp, Artificial Sequence
  Oligonucleotide for detection of SNP TSC0043532
gatttcgttaatt

SEQ ID NO: 175162 - DNA, 13 bp, Artificial Sequence
  Oligonucleotide for detection of SNP TSC0043532
aattaacgaaatc

SEQ ID NO: 175163 - DNA, 13 bp, Artificial Sequence
  Oligonucleotide for detection of SNP TSC0043532
aattagtggaaty

SEQ ID NO: 175164 - DNA, 13 bp, Artificial Sequence
  Oligonucleotide for detection of SNP TSC0043532
rattccactaatt

SEQ ID NO: 175165 - DNA, 13 bp, Artificial Sequence
  Oligonucleotide for detection of SNP TSC0043532
aattagcggaaty

SEQ ID NO: 175166 - DNA, 13 bp, Artificial Sequence
  Oligonucleotide for detection of SNP TSC0043532
rattccgctaatt

SEQ ID NO: 175167 - DNA, 13 bp, Artificial Sequence
  Oligonucleotide for detection of SNP TSC0043533
ttggaaaaaggga

SEQ ID NO: 175168 - DNA, 13 bp, Artificial Sequence
  Oligonucleotide for detection of SNP TSC0043533
tccctttttccaa

SEQ ID NO: 175169 - DNA, 13 bp, Artificial Sequence
  Oligonucleotide for detection of SNP TSC0043533
ttggaataaggga

SEQ ID NO: 175170 - DNA, 13 bp, Artificial Sequence
  Oligonucleotide for detection of SNP TSC0043533
tcccttattccaa

SEQ ID NO: 175171 - DNA, 13 bp, Artificial Sequence
  Oligonucleotide for detection of SNP TSC0043534
tgtttttgtggtg

SEQ ID NO: 175172 - DNA, 13 bp, Artificial Sequence
  Oligonucleotide for detection of SNP TSC0043534
caccacaaaaaca

SEQ ID NO: 175173 - DNA, 13 bp, Artificial Sequence
  Oligonucleotide for detection of SNP TSC0043534
cgtttttgtggtg

SEQ ID NO: 175174 - DNA, 13 bp, Artificial Sequence
  Oligonucleotide for detection of SNP TSC0043534
caccacaaaaacg

SEQ ID NO: 175175 - DNA, 13 bp, Artificial Sequence
  Oligonucleotide for detection of SNP TSC0043534
tgttttcgtggtg

SEQ ID NO: 175176 - DNA, 13 bp, Artificial Sequence
  Oligonucleotide for detection of SNP TSC0043534
caccacgaaaaca

SEQ ID NO: 175177 - DNA, 13 bp, Artificial Sequence
  Oligonucleotide for detection of SNP TSC0043534
cgttttcgtggtg

SEQ ID NO: 175178 - DNA, 13 bp, Artificial Sequence
  Oligonucleotide for detection of SNP TSC0043534
caccacgaaaacg

SEQ ID NO: 175179 - DNA, 13 bp, Artificial Sequence
  Oligonucleotide for detection of SNP TSC0043534
tattatgaaaatg

SEQ ID NO: 175180 - DNA, 13 bp, Artificial Sequence
  Oligonucleotide for detection of SNP TSC0043534
cattttcataata

SEQ ID NO: 175181 - DNA, 13 bp, Artificial Sequence
  Oligonucleotide for detection of SNP TSC0043534
tattataaaaatg

SEQ ID NO: 175182 - DNA, 13 bp, Artificial Sequence
  Oligonucleotide for detection of SNP TSC0043534
catttttataata

SEQ ID NO: 175183 - DNA, 13 bp, Artificial Sequence
  Oligonucleotide for detection of SNP TSC0043534
tattacgaaaatg

SEQ ID NO: 175184 - DNA, 13 bp, Artificial Sequence
  Oligonucleotide for detection of SNP TSC0043534
cattttcgtaata

SEQ ID NO: 175185 - DNA, 13 bp, Artificial Sequence
  Oligonucleotide for detection of SNP TSC0043534
tattataaaaacg

SEQ ID NO: 175186 - DNA, 13 bp, Artificial Sequence
  Oligonucleotide for detection of SNP TSC0043534
cgtttttataata

SEQ ID NO: 175187 - DNA, 13 bp, Artificial Sequence
  Oligonucleotide for detection of SNP TSC0043534
tattatgaaaacg

SEQ ID NO: 175188 - DNA, 13 bp, Artificial Sequence
  Oligonucleotide for detection of SNP TSC0043534
cgttttcataata

SEQ ID NO: 175189 - DNA, 13 bp, Artificial Sequence
  Oligonucleotide for detection of SNP TSC0043534
tattacgaaaacg

SEQ ID NO: 175190 - DNA, 13 bp, Artificial Sequence
  Oligonucleotide for detection of SNP TSC0043534
cgttttcgtaata

SEQ ID NO: 175191 - DNA, 13 bp, Artificial Sequence
  Oligonucleotide for detection of SNP TSC0043535
tggaatgagatag

SEQ ID NO: 175192 - DNA, 13 bp, Artificial Sequence
  Oligonucleotide for detection of SNP TSC0043535
ctatctcattcca

SEQ ID NO: 175193 - DNA, 13 bp, Artificial Sequence
  Oligonucleotide for detection of SNP TSC0043535
tggaataagatag

SEQ ID NO: 175194 - DNA, 13 bp, Artificial Sequence
  Oligonucleotide for detection of SNP TSC0043535
ctatcttattcca

SEQ ID NO: 175195 - DNA, 13 bp, Artificial Sequence
  Oligonucleotide for detection of SNP TSC0043535
tggaacgagatag

SEQ ID NO: 175196 - DNA, 13 bp, Artificial Sequence
  Oligonucleotide for detection of SNP TSC0043535
ctatctcgttcca

SEQ ID NO: 175197 - DNA, 13 bp, Artificial Sequence
  Oligonucleotide for detection of SNP TSC0043537
ttatttgtggtay

SEQ ID NO: 175198 - DNA, 13 bp, Artificial Sequence
  Oligonucleotide for detection of SNP TSC0043537
rtaccacaaataa

SEQ ID NO: 175199 - DNA, 13 bp, Artificial Sequence
  Oligonucleotide for detection of SNP TSC0043537
ttatttatggtay

SEQ ID NO: 175200 - DNA, 13 bp, Artificial Sequence
  Oligonucleotide for detection of SNP TSC0043537
rtaccataaataa

SEQ ID NO: 175201 - DNA, 13 bp, Artificial Sequence
  Oligonucleotide for detection of SNP TSC0043538
atggggatgttta

SEQ ID NO: 175202 - DNA, 13 bp, Artificial Sequence
  Oligonucleotide for detection of SNP TSC0043538
taaacatccccat

SEQ ID NO: 175203 - DNA, 13 bp, Artificial Sequence
  Oligonucleotide for detection of SNP TSC0043538
atgggggtgttta

SEQ ID NO: 175204 - DNA, 13 bp, Artificial Sequence
  Oligonucleotide for detection of SNP TSC0043538
taaacacccccat

SEQ ID NO: 175205 - DNA, 13 bp, Artificial Sequence
  Oligonucleotide for detection of SNP TSC0043540
tttagggtattty

SEQ ID NO: 175206 - DNA, 13 bp, Artificial Sequence
  Oligonucleotide for detection of SNP TSC0043540
raaataccctaaa

SEQ ID NO: 175207 - DNA, 13 bp, Artificial Sequence
  Oligonucleotide for detection of SNP TSC0043540
tttaggatattty

SEQ ID NO: 175208 - DNA, 13 bp, Artificial Sequence
  Oligonucleotide for detection of SNP TSC0043540
raaatatcctaaa

SEQ ID NO: 175209 - DNA, 13 bp, Artificial Sequence
  Oligonucleotide for detection of SNP TSC0043543
ttttattgtaatt

SEQ ID NO: 175210 - DNA, 13 bp, Artificial Sequence
  Oligonucleotide for detection of SNP TSC0043543
aattacaataaaa

SEQ ID NO: 175211 - DNA, 13 bp, Artificial Sequence
  Oligonucleotide for detection of SNP TSC0043543
aattatagtgaaa

SEQ ID NO: 175212 - DNA, 13 bp, Artificial Sequence
  Oligonucleotide for detection of SNP TSC0043543
tttcactataatt

SEQ ID NO: 175213 - DNA, 13 bp, Artificial Sequence
  Oligonucleotide for detection of SNP TSC0043543
aattattgtgaaa

SEQ ID NO: 175214 - DNA, 13 bp, Artificial Sequence
  Oligonucleotide for detection of SNP TSC0043543
tttcacaataatt

SEQ ID NO: 175215 - DNA, 13 bp, Artificial Sequence
  Oligonucleotide for detection of SNP TSC0043543
aattatcgtgaaa

SEQ ID NO: 175216 - DNA, 13 bp, Artificial Sequence
  Oligonucleotide for detection of SNP TSC0043543
tttcacgataatt

SEQ ID NO: 175217 - DNA, 13 bp, Artificial Sequence
  Oligonucleotide for detection of SNP TSC0043544
ttgtagggagttg

SEQ ID NO: 175218 - DNA, 13 bp, Artificial Sequence
  Oligonucleotide for detection of SNP TSC0043544
caactccctacaa

SEQ ID NO: 175219 - DNA, 13 bp, Artificial Sequence
  Oligonucleotide for detection of SNP TSC0043544
tagtttattgtaa

SEQ ID NO: 175220 - DNA, 13 bp, Artificial Sequence
  Oligonucleotide for detection of SNP TSC0043544
ttacaataaacta

SEQ ID NO: 175221 - DNA, 13 bp, Artificial Sequence
  Oligonucleotide for detection of SNP TSC0043545
ttatattttttty

SEQ ID NO: 175222 - DNA, 13 bp, Artificial Sequence
  Oligonucleotide for detection of SNP TSC0043545
raaaaaaatataa

SEQ ID NO: 175223 - DNA, 13 bp, Artificial Sequence
  Oligonucleotide for detection of SNP TSC0043545
gaggagtgtgtga

SEQ ID NO: 175224 - DNA, 13 bp, Artificial Sequence
  Oligonucleotide for detection of SNP TSC0043545
tcacacactcctc

SEQ ID NO: 175225 - DNA, 13 bp, Artificial Sequence
  Oligonucleotide for detection of SNP TSC0043545
gaggagggtgtga

SEQ ID NO: 175226 - DNA, 13 bp, Artificial Sequence
  Oligonucleotide for detection of SNP TSC0043545
tcacaccctcctc

SEQ ID NO: 175227 - DNA, 13 bp, Artificial Sequence
  Oligonucleotide for detection of SNP TSC0043545
gaggagagtgtga

SEQ ID NO: 175228 - DNA, 13 bp, Artificial Sequence
  Oligonucleotide for detection of SNP TSC0043545
tcacactctcctc

SEQ ID NO: 175229 - DNA, 13 bp, Artificial Sequence
  Oligonucleotide for detection of SNP TSC0043545
gaggagcgtgtga

SEQ ID NO: 175230 - DNA, 13 bp, Artificial Sequence
  Oligonucleotide for detection of SNP TSC0043545
tcacacgctcctc

SEQ ID NO: 175231 - DNA, 13 bp, Artificial Sequence
  Oligonucleotide for detection of SNP TSC0043546
aaggttagttaaa

SEQ ID NO: 175232 - DNA, 13 bp, Artificial Sequence
  Oligonucleotide for detection of SNP TSC0043546
tttaactaacctt

SEQ ID NO: 175233 - DNA, 13 bp, Artificial Sequence
  Oligonucleotide for detection of SNP TSC0043546
aaggttggttaaa

SEQ ID NO: 175234 - DNA, 13 bp, Artificial Sequence
  Oligonucleotide for detection of SNP TSC0043546
tttaaccaacctt

SEQ ID NO: 175235 - DNA, 13 bp, Artificial Sequence
  Oligonucleotide for detection of SNP TSC0043547
gtggaggttgaaa

SEQ ID NO: 175236 - DNA, 13 bp, Artificial Sequence
  Oligonucleotide for detection of SNP TSC0043547
tttcaacctccac

SEQ ID NO: 175237 - DNA, 13 bp, Artificial Sequence
  Oligonucleotide for detection of SNP TSC0043547
gtggagattgaaa

SEQ ID NO: 175238 - DNA, 13 bp, Artificial Sequence
  Oligonucleotide for detection of SNP TSC0043547
tttcaatctccac

SEQ ID NO: 175239 - DNA, 13 bp, Artificial Sequence
  Oligonucleotide for detection of SNP TSC0043548
attttgatagaga

SEQ ID NO: 175240 - DNA, 13 bp, Artificial Sequence
  Oligonucleotide for detection of SNP TSC0043548
tctctatcaaaat

SEQ ID NO: 175241 - DNA, 13 bp, Artificial Sequence
  Oligonucleotide for detection of SNP TSC0043548
attttggtagaga

SEQ ID NO: 175242 - DNA, 13 bp, Artificial Sequence
  Oligonucleotide for detection of SNP TSC0043548
tctctaccaaaat

SEQ ID NO: 175243 - DNA, 13 bp, Artificial Sequence
  Oligonucleotide for detection of SNP TSC0043550
agtaataatgatg

SEQ ID NO: 175244 - DNA, 13 bp, Artificial Sequence
  Oligonucleotide for detection of SNP TSC0043550
catcattattact

SEQ ID NO: 175245 - DNA, 13 bp, Artificial Sequence
  Oligonucleotide for detection of SNP TSC0043550
agtaatgatgatg

SEQ ID NO: 175246 - DNA, 13 bp, Artificial Sequence
  Oligonucleotide for detection of SNP TSC0043550
catcatcattact

SEQ ID NO: 175247 - DNA, 13 bp, Artificial Sequence
  Oligonucleotide for detection of SNP TSC0043552
aaaagtatgtggy

SEQ ID NO: 175248 - DNA, 13 bp, Artificial Sequence
  Oligonucleotide for detection of SNP TSC0043552
rccacatactttt

SEQ ID NO: 175249 - DNA, 13 bp, Artificial Sequence
  Oligonucleotide for detection of SNP TSC0043552
aaaagtgtgtggy

SEQ ID NO: 175250 - DNA, 13 bp, Artificial Sequence
  Oligonucleotide for detection of SNP TSC0043552
rccacacactttt

SEQ ID NO: 175251 - DNA, 13 bp, Artificial Sequence
  Oligonucleotide for detection of SNP TSC0043552
aaaagcgtgtggy

SEQ ID NO: 175252 - DNA, 13 bp, Artificial Sequence
  Oligonucleotide for detection of SNP TSC0043552
rccacacgctttt

SEQ ID NO: 175253 - DNA, 13 bp, Artificial Sequence
  Oligonucleotide for detection of SNP TSC0043552
gttatatgttttt

SEQ ID NO: 175254 - DNA, 13 bp, Artificial Sequence
  Oligonucleotide for detection of SNP TSC0043552
aaaaacatataac

SEQ ID NO: 175255 - DNA, 13 bp, Artificial Sequence
  Oligonucleotide for detection of SNP TSC0043552
gttatacgttttt

SEQ ID NO: 175256 - DNA, 13 bp, Artificial Sequence
  Oligonucleotide for detection of SNP TSC0043552
aaaaacgtataac

SEQ ID NO: 175257 - DNA, 13 bp, Artificial Sequence
  Oligonucleotide for detection of SNP TSC0043553
ttaaatatttaga

SEQ ID NO: 175258 - DNA, 13 bp, Artificial Sequence
  Oligonucleotide for detection of SNP TSC0043553
tctaaatatttaa

SEQ ID NO: 175259 - DNA, 13 bp, Artificial Sequence
  Oligonucleotide for detection of SNP TSC0043553
ttaaatgtttaga

SEQ ID NO: 175260 - DNA, 13 bp, Artificial Sequence
  Oligonucleotide for detection of SNP TSC0043553
tctaaacatttaa

SEQ ID NO: 175261 - DNA, 13 bp, Artificial Sequence
  Oligonucleotide for detection of SNP TSC0043554
tttagtaatatat

SEQ ID NO: 175262 - DNA, 13 bp, Artificial Sequence
  Oligonucleotide for detection of SNP TSC0043554
atatattactaaa

SEQ ID NO: 175263 - DNA, 13 bp, Artificial Sequence
  Oligonucleotide for detection of SNP TSC0043554
tttagtgatatat

SEQ ID NO: 175264 - DNA, 13 bp, Artificial Sequence
  Oligonucleotide for detection of SNP TSC0043554
atatatcactaaa

SEQ ID NO: 175265 - DNA, 13 bp, Artificial Sequence
  Oligonucleotide for detection of SNP TSC0043555
agttttgttatgg

SEQ ID NO: 175266 - DNA, 13 bp, Artificial Sequence
  Oligonucleotide for detection of SNP TSC0043555
ccataacaaaact

SEQ ID NO: 175267 - DNA, 13 bp, Artificial Sequence
  Oligonucleotide for detection of SNP TSC0043555
agttttattatgg

SEQ ID NO: 175268 - DNA, 13 bp, Artificial Sequence
  Oligonucleotide for detection of SNP TSC0043555
ccataataaaact

SEQ ID NO: 175269 - DNA, 13 bp, Artificial Sequence
  Oligonucleotide for detection of SNP TSC0043558
attgtgttataty

SEQ ID NO: 175270 - DNA, 13 bp, Artificial Sequence
  Oligonucleotide for detection of SNP TSC0043558
ratataacacaat

SEQ ID NO: 175271 - DNA, 13 bp, Artificial Sequence
  Oligonucleotide for detection of SNP TSC0043558
attgtggtataty

SEQ ID NO: 175272 - DNA, 13 bp, Artificial Sequence
  Oligonucleotide for detection of SNP TSC0043558
ratataccacaat

SEQ ID NO: 175273 - DNA, 13 bp, Artificial Sequence
  Oligonucleotide for detection of SNP TSC0043558
gatataatataat

SEQ ID NO: 175274 - DNA, 13 bp, Artificial Sequence
  Oligonucleotide for detection of SNP TSC0043558
attatattatatc

SEQ ID NO: 175275 - DNA, 13 bp, Artificial Sequence
  Oligonucleotide for detection of SNP TSC0043558
gatatattataat

SEQ ID NO: 175276 - DNA, 13 bp, Artificial Sequence
  Oligonucleotide for detection of SNP TSC0043558
attataatatatc

SEQ ID NO: 175277 - DNA, 13 bp, Artificial Sequence
  Oligonucleotide for detection of SNP TSC0043559
agtttgataatgt

SEQ ID NO: 175278 - DNA, 13 bp, Artificial Sequence
  Oligonucleotide for detection of SNP TSC0043559
acattatcaaact

SEQ ID NO: 175279 - DNA, 13 bp, Artificial Sequence
  Oligonucleotide for detection of SNP TSC0043559
agtttgttaatgt

SEQ ID NO: 175280 - DNA, 13 bp, Artificial Sequence
  Oligonucleotide for detection of SNP TSC0043559
acattaacaaact

SEQ ID NO: 175281 - DNA, 13 bp, Artificial Sequence
  Oligonucleotide for detection of SNP TSC0043559
atattgttaaatt

SEQ ID NO: 175282 - DNA, 13 bp, Artificial Sequence
  Oligonucleotide for detection of SNP TSC0043559
aatttaacaatat

SEQ ID NO: 175283 - DNA, 13 bp, Artificial Sequence
  Oligonucleotide for detection of SNP TSC0043559
atattggtaaatt

SEQ ID NO: 175284 - DNA, 13 bp, Artificial Sequence
  Oligonucleotide for detection of SNP TSC0043559
aatttaccaatat

SEQ ID NO: 175285 - DNA, 13 bp, Artificial Sequence
  Oligonucleotide for detection of SNP TSC0043560
gtaaaagagaaaa

SEQ ID NO: 175286 - DNA, 13 bp, Artificial Sequence
  Oligonucleotide for detection of SNP TSC0043560
ttttctcttttac

SEQ ID NO: 175287 - DNA, 13 bp, Artificial Sequence
  Oligonucleotide for detection of SNP TSC0043560
gtaaaaaagaaaa

SEQ ID NO: 175288 - DNA, 13 bp, Artificial Sequence
  Oligonucleotide for detection of SNP TSC0043560
ttttcttttttac

SEQ ID NO: 175289 - DNA, 13 bp, Artificial Sequence
  Oligonucleotide for detection of SNP TSC0043561
aatttagtaatty

SEQ ID NO: 175290 - DNA, 13 bp, Artificial Sequence
  Oligonucleotide for detection of SNP TSC0043561
raattactaaatt

SEQ ID NO: 175291 - DNA, 13 bp, Artificial Sequence
  Oligonucleotide for detection of SNP TSC0043561
aatttaataatty

SEQ ID NO: 175292 - DNA, 13 bp, Artificial Sequence
  Oligonucleotide for detection of SNP TSC0043561
raattattaaatt

SEQ ID NO: 175293 - DNA, 13 bp, Artificial Sequence
  Oligonucleotide for detection of SNP TSC0043562
ggtgtgaagaatg

SEQ ID NO: 175294 - DNA, 13 bp, Artificial Sequence
  Oligonucleotide for detection of SNP TSC0043562
cattcttcacacc

SEQ ID NO: 175295 - DNA, 13 bp, Artificial Sequence
  Oligonucleotide for detection of SNP TSC0043562
ggtgtgtagaatg

SEQ ID NO: 175296 - DNA, 13 bp, Artificial Sequence
  Oligonucleotide for detection of SNP TSC0043562
cattctacacacc

SEQ ID NO: 175297 - DNA, 13 bp, Artificial Sequence
  Oligonucleotide for detection of SNP TSC0043562
tattttttataty

SEQ ID NO: 175298 - DNA, 13 bp, Artificial Sequence
  Oligonucleotide for detection of SNP TSC0043562
ratataaaaaata

SEQ ID NO: 175299 - DNA, 13 bp, Artificial Sequence
  Oligonucleotide for detection of SNP TSC0043562
tattttgtataty

SEQ ID NO: 175300 - DNA, 13 bp, Artificial Sequence
  Oligonucleotide for detection of SNP TSC0043562
ratatacaaaata

SEQ ID NO: 175301 - DNA, 13 bp, Artificial Sequence
  Oligonucleotide for detection of SNP TSC0043563
tttttttggatgt

SEQ ID NO: 175302 - DNA, 13 bp, Artificial Sequence
  Oligonucleotide for detection of SNP TSC0043563
acatccaaaaaaa

SEQ ID NO: 175303 - DNA, 13 bp, Artificial Sequence
  Oligonucleotide for detection of SNP TSC0043563
ttttttcggatgt

SEQ ID NO: 175304 - DNA, 13 bp, Artificial Sequence
  Oligonucleotide for detection of SNP TSC0043563
acatccgaaaaaa

SEQ ID NO: 175305 - DNA, 13 bp, Artificial Sequence
  Oligonucleotide for detection of SNP TSC0043564
ttaaattgtttgt

SEQ ID NO: 175306 - DNA, 13 bp, Artificial Sequence
  Oligonucleotide for detection of SNP TSC0043564
acaaacaatttaa

SEQ ID NO: 175307 - DNA, 13 bp, Artificial Sequence
  Oligonucleotide for detection of SNP TSC0043564
ttaaatcgtttgt

SEQ ID NO: 175308 - DNA, 13 bp, Artificial Sequence
  Oligonucleotide for detection of SNP TSC0043564
acaaacgatttaa

SEQ ID NO: 175309 - DNA, 13 bp, Artificial Sequence
  Oligonucleotide for detection of SNP TSC0043564
ataggtggtttag

SEQ ID NO: 175310 - DNA, 13 bp, Artificial Sequence
  Oligonucleotide for detection of SNP TSC0043564
ctaaaccacctat

SEQ ID NO: 175311 - DNA, 13 bp, Artificial Sequence
  Oligonucleotide for detection of SNP TSC0043564
ataggtagtttag

SEQ ID NO: 175312 - DNA, 13 bp, Artificial Sequence
  Oligonucleotide for detection of SNP TSC0043564
ctaaactacctat

SEQ ID NO: 175313 - DNA, 13 bp, Artificial Sequence
  Oligonucleotide for detection of SNP TSC0043564
ataggcggtttag

SEQ ID NO: 175314 - DNA, 13 bp, Artificial Sequence
  Oligonucleotide for detection of SNP TSC0043564
ctaaaccgcctat

SEQ ID NO: 175315 - DNA, 13 bp, Artificial Sequence
  Oligonucleotide for detection of SNP TSC0043565
ttattgagtgtty

SEQ ID NO: 175316 - DNA, 13 bp, Artificial Sequence
  Oligonucleotide for detection of SNP TSC0043565
raacactcaataa

SEQ ID NO: 175317 - DNA, 13 bp, Artificial Sequence
  Oligonucleotide for detection of SNP TSC0043565
ttattgggtgtty

SEQ ID NO: 175318 - DNA, 13 bp, Artificial Sequence
  Oligonucleotide for detection of SNP TSC0043565
raacacccaataa

SEQ ID NO: 175319 - DNA, 13 bp, Artificial Sequence
  Oligonucleotide for detection of SNP TSC0043567
tttaatgtgggag

SEQ ID NO: 175320 - DNA, 13 bp, Artificial Sequence
  Oligonucleotide for detection of SNP TSC0043567
ctcccacattaaa

SEQ ID NO: 175321 - DNA, 13 bp, Artificial Sequence
  Oligonucleotide for detection of SNP TSC0043567
tttaatatgggag

SEQ ID NO: 175322 - DNA, 13 bp, Artificial Sequence
  Oligonucleotide for detection of SNP TSC0043567
ctcccatattaaa

SEQ ID NO: 175323 - DNA, 13 bp, Artificial Sequence
  Oligonucleotide for detection of SNP TSC0043570
ggaggtatgttta

SEQ ID NO: 175324 - DNA, 13 bp, Artificial Sequence
  Oligonucleotide for detection of SNP TSC0043570
taaacatacctcc

SEQ ID NO: 175325 - DNA, 13 bp, Artificial Sequence
  Oligonucleotide for detection of SNP TSC0043570
ggaggtttgttta

SEQ ID NO: 175326 - DNA, 13 bp, Artificial Sequence
  Oligonucleotide for detection of SNP TSC0043570
taaacaaacctcc

SEQ ID NO: 175327 - DNA, 13 bp, Artificial Sequence
  Oligonucleotide for detection of SNP TSC0043570
tgagtatgtttty

SEQ ID NO: 175328 - DNA, 13 bp, Artificial Sequence
  Oligonucleotide for detection of SNP TSC0043570
raaaacatactca

SEQ ID NO: 175329 - DNA, 13 bp, Artificial Sequence
  Oligonucleotide for detection of SNP TSC0043570
tgagtaggtttty

SEQ ID NO: 175330 - DNA, 13 bp, Artificial Sequence
  Oligonucleotide for detection of SNP TSC0043570
raaaacctactca

SEQ ID NO: 175331 - DNA, 13 bp, Artificial Sequence
  Oligonucleotide for detection of SNP TSC0043572
tgtttagagtaaa

SEQ ID NO: 175332 - DNA, 13 bp, Artificial Sequence
  Oligonucleotide for detection of SNP TSC0043572
tttactctaaaca

SEQ ID NO: 175333 - DNA, 13 bp, Artificial Sequence
  Oligonucleotide for detection of SNP TSC0043572
tgtttaaagtaaa

SEQ ID NO: 175334 - DNA, 13 bp, Artificial Sequence
  Oligonucleotide for detection of SNP TSC0043572
tttactttaaaca

SEQ ID NO: 175335 - DNA, 13 bp, Artificial Sequence
  Oligonucleotide for detection of SNP TSC0010792
tttagttgtttta

SEQ ID NO: 175336 - DNA, 13 bp, Artificial Sequence
  Oligonucleotide for detection of SNP TSC0010792
taaaacaactaaa

SEQ ID NO: 175337 - DNA, 13 bp, Artificial Sequence
  Oligonucleotide for detection of SNP TSC0010792
tttagtcgtttta

SEQ ID NO: 175338 - DNA, 13 bp, Artificial Sequence
  Oligonucleotide for detection of SNP TSC0010792
taaaacgactaaa

SEQ ID NO: 175339 - DNA, 13 bp, Artificial Sequence
  Oligonucleotide for detection of SNP TSC0010792
tgagatggttgaa

SEQ ID NO: 175340 - DNA, 13 bp, Artificial Sequence
  Oligonucleotide for detection of SNP TSC0010792
ttcaaccatctca

SEQ ID NO: 175341 - DNA, 13 bp, Artificial Sequence
  Oligonucleotide for detection of SNP TSC0010792
tgagatagttgaa

SEQ ID NO: 175342 - DNA, 13 bp, Artificial Sequence
  Oligonucleotide for detection of SNP TSC0010792
ttcaactatctca

SEQ ID NO: 175343 - DNA, 13 bp, Artificial Sequence
  Oligonucleotide for detection of SNP TSC0010792
tgagacggttgaa

SEQ ID NO: 175344 - DNA, 13 bp, Artificial Sequence
  Oligonucleotide for detection of SNP TSC0010792
ttcaaccgtctca

SEQ ID NO: 175345 - DNA, 13 bp, Artificial Sequence
  Oligonucleotide for detection of SNP TSC0043574
ttaaaaggttatg

SEQ ID NO: 175346 - DNA, 13 bp, Artificial Sequence
  Oligonucleotide for detection of SNP TSC0043574
cataaccttttaa

SEQ ID NO: 175347 - DNA, 13 bp, Artificial Sequence
  Oligonucleotide for detection of SNP TSC0043574
ttaaaaagttatg

SEQ ID NO: 175348 - DNA, 13 bp, Artificial Sequence
  Oligonucleotide for detection of SNP TSC0043574
cataactttttaa

SEQ ID NO: 175349 - DNA, 13 bp, Artificial Sequence
  Oligonucleotide for detection of SNP TSC0043575
atatgaatgaagt

SEQ ID NO: 175350 - DNA, 13 bp, Artificial Sequence
  Oligonucleotide for detection of SNP TSC0043575
acttcattcatat

SEQ ID NO: 175351 - DNA, 13 bp, Artificial Sequence
  Oligonucleotide for detection of SNP TSC0043575
atatgattgaagt

SEQ ID NO: 175352 - DNA, 13 bp, Artificial Sequence
  Oligonucleotide for detection of SNP TSC0043575
acttcaatcatat

SEQ ID NO: 175353 - DNA, 13 bp, Artificial Sequence
  Oligonucleotide for detection of SNP TSC0043575
attttagttatat

SEQ ID NO: 175354 - DNA, 13 bp, Artificial Sequence
  Oligonucleotide for detection of SNP TSC0043575
atataactaaaat

SEQ ID NO: 175355 - DNA, 13 bp, Artificial Sequence
  Oligonucleotide for detection of SNP TSC0043576
agtaaaatttttt

SEQ ID NO: 175356 - DNA, 13 bp, Artificial Sequence
  Oligonucleotide for detection of SNP TSC0043576
aaaaaattttact

SEQ ID NO: 175357 - DNA, 13 bp, Artificial Sequence
  Oligonucleotide for detection of SNP TSC0043576
agtaaattttttt

SEQ ID NO: 175358 - DNA, 13 bp, Artificial Sequence
  Oligonucleotide for detection of SNP TSC0043576
aaaaaaatttact

SEQ ID NO: 175359 - DNA, 13 bp, Artificial Sequence
  Oligonucleotide for detection of SNP TSC0043576
agaaagttttgtt

SEQ ID NO: 175360 - DNA, 13 bp, Artificial Sequence
  Oligonucleotide for detection of SNP TSC0043576
aacaaaactttct

SEQ ID NO: 175361 - DNA, 13 bp, Artificial Sequence
  Oligonucleotide for detection of SNP TSC0043576
agaaaggtttgtt

SEQ ID NO: 175362 - DNA, 13 bp, Artificial Sequence
  Oligonucleotide for detection of SNP TSC0043576
aacaaacctttct

SEQ ID NO: 175363 - DNA, 13 bp, Artificial Sequence
  Oligonucleotide for detection of SNP TSC0043578
ttaggagttaagt

SEQ ID NO: 175364 - DNA, 13 bp, Artificial Sequence
  Oligonucleotide for detection of SNP TSC0043578
acttaactcctaa

SEQ ID NO: 175365 - DNA, 13 bp, Artificial Sequence
  Oligonucleotide for detection of SNP TSC0043578
ttaggaattaagt

SEQ ID NO: 175366 - DNA, 13 bp, Artificial Sequence
  Oligonucleotide for detection of SNP TSC0043578
acttaattcctaa

SEQ ID NO: 175367 - DNA, 13 bp, Artificial Sequence
  Oligonucleotide for detection of SNP TSC0043580
attttaggtataa

SEQ ID NO: 175368 - DNA, 13 bp, Artificial Sequence
  Oligonucleotide for detection of SNP TSC0043580
ttatacctaaaat

SEQ ID NO: 175369 - DNA, 13 bp, Artificial Sequence
  Oligonucleotide for detection of SNP TSC0043580
ttatatttgaaat

SEQ ID NO: 175370 - DNA, 13 bp, Artificial Sequence
  Oligonucleotide for detection of SNP TSC0043580
atttcaaatataa

SEQ ID NO: 175371 - DNA, 13 bp, Artificial Sequence
  Oligonucleotide for detection of SNP TSC0043581
ttttgaattagaa

SEQ ID NO: 175372 - DNA, 13 bp, Artificial Sequence
  Oligonucleotide for detection of SNP TSC0043581
ttctaattcaaaa

SEQ ID NO: 175373 - DNA, 13 bp, Artificial Sequence
  Oligonucleotide for detection of SNP TSC0043581
ttttgatttagaa

SEQ ID NO: 175374 - DNA, 13 bp, Artificial Sequence
  Oligonucleotide for detection of SNP TSC0043581
ttctaaatcaaaa

SEQ ID NO: 175375 - DNA, 13 bp, Artificial Sequence
  Oligonucleotide for detection of SNP TSC0043581
ttttgatttagga

SEQ ID NO: 175376 - DNA, 13 bp, Artificial Sequence
  Oligonucleotide for detection of SNP TSC0043581
tcctaaatcaaaa

SEQ ID NO: 175377 - DNA, 13 bp, Artificial Sequence
  Oligonucleotide for detection of SNP TSC0043581
ttttgaattagga

SEQ ID NO: 175378 - DNA, 13 bp, Artificial Sequence
  Oligonucleotide for detection of SNP TSC0043581
tcctaattcaaaa

SEQ ID NO: 175379 - DNA, 13 bp, Artificial Sequence
  Oligonucleotide for detection of SNP TSC0043582
ggaatttgtttty

SEQ ID NO: 175380 - DNA, 13 bp, Artificial Sequence
  Oligonucleotide for detection of SNP TSC0043582
raaaacaaattcc

SEQ ID NO: 175381 - DNA, 13 bp, Artificial Sequence
  Oligonucleotide for detection of SNP TSC0043582
ggaattcgtttty

SEQ ID NO: 175382 - DNA, 13 bp, Artificial Sequence
  Oligonucleotide for detection of SNP TSC0043582
raaaacgaattcc

SEQ ID NO: 175383 - DNA, 13 bp, Artificial Sequence
  Oligonucleotide for detection of SNP TSC0043582
ggaagtgaattty

SEQ ID NO: 175384 - DNA, 13 bp, Artificial Sequence
  Oligonucleotide for detection of SNP TSC0043582
raaattcacttcc

SEQ ID NO: 175385 - DNA, 13 bp, Artificial Sequence
  Oligonucleotide for detection of SNP TSC0043582
ggaagtaaattty

SEQ ID NO: 175386 - DNA, 13 bp, Artificial Sequence
  Oligonucleotide for detection of SNP TSC0043582
raaatttacttcc

SEQ ID NO: 175387 - DNA, 13 bp, Artificial Sequence
  Oligonucleotide for detection of SNP TSC0043582
ggaagcgaattty

SEQ ID NO: 175388 - DNA, 13 bp, Artificial Sequence
  Oligonucleotide for detection of SNP TSC0043582
raaattcgcttcc

SEQ ID NO: 175389 - DNA, 13 bp, Artificial Sequence
  Oligonucleotide for detection of SNP TSC0004988
gtatgaatagtay

SEQ ID NO: 175390 - DNA, 13 bp, Artificial Sequence
  Oligonucleotide for detection of SNP TSC0004988
rtactattcatac

SEQ ID NO: 175391 - DNA, 13 bp, Artificial Sequence
  Oligonucleotide for detection of SNP TSC0004988
gtatgagtagtay

SEQ ID NO: 175392 - DNA, 13 bp, Artificial Sequence
  Oligonucleotide for detection of SNP TSC0004988
rtactactcatac

SEQ ID NO: 175393 - DNA, 13 bp, Artificial Sequence
  Oligonucleotide for detection of SNP TSC0004988
gtacgaatagtay

SEQ ID NO: 175394 - DNA, 13 bp, Artificial Sequence
  Oligonucleotide for detection of SNP TSC0004988
rtactattcgtac

SEQ ID NO: 175395 - DNA, 13 bp, Artificial Sequence
  Oligonucleotide for detection of SNP TSC0004988
gtacgagtagtay

SEQ ID NO: 175396 - DNA, 13 bp, Artificial Sequence
  Oligonucleotide for detection of SNP TSC0004988
rtactactcgtac

SEQ ID NO: 175397 - DNA, 13 bp, Artificial Sequence
  Oligonucleotide for detection of SNP TSC0043589
agtattaaagata

SEQ ID NO: 175398 - DNA, 13 bp, Artificial Sequence
  Oligonucleotide for detection of SNP TSC0043589
tatctttaatact

SEQ ID NO: 175399 - DNA, 13 bp, Artificial Sequence
  Oligonucleotide for detection of SNP TSC0043589
agtattgaagata

SEQ ID NO: 175400 - DNA, 13 bp, Artificial Sequence
  Oligonucleotide for detection of SNP TSC0043589
tatcttcaatact

SEQ ID NO: 175401 - DNA, 13 bp, Artificial Sequence
  Oligonucleotide for detection of SNP TSC0043590
gtttaggtataat

SEQ ID NO: 175402 - DNA, 13 bp, Artificial Sequence
  Oligonucleotide for detection of SNP TSC0043590
attatacctaaac

SEQ ID NO: 175403 - DNA, 13 bp, Artificial Sequence
  Oligonucleotide for detection of SNP TSC0043590
gtttagatataat

SEQ ID NO: 175404 - DNA, 13 bp, Artificial Sequence
  Oligonucleotide for detection of SNP TSC0043590
attatatctaaac

SEQ ID NO: 175405 - DNA, 13 bp, Artificial Sequence
  Oligonucleotide for detection of SNP TSC0043591
ttattaaaagaty

SEQ ID NO: 175406 - DNA, 13 bp, Artificial Sequence
  Oligonucleotide for detection of SNP TSC0043591
ratcttttaataa

SEQ ID NO: 175407 - DNA, 13 bp, Artificial Sequence
  Oligonucleotide for detection of SNP TSC0043591
ttattagaagaty

SEQ ID NO: 175408 - DNA, 13 bp, Artificial Sequence
  Oligonucleotide for detection of SNP TSC0043591
ratcttctaataa

SEQ ID NO: 175409 - DNA, 13 bp, Artificial Sequence
  Oligonucleotide for detection of SNP TSC0043592
ttagggattatgy

SEQ ID NO: 175410 - DNA, 13 bp, Artificial Sequence
  Oligonucleotide for detection of SNP TSC0043592
rcataatccctaa

SEQ ID NO: 175411 - DNA, 13 bp, Artificial Sequence
  Oligonucleotide for detection of SNP TSC0043592
ttaggggttatgy

SEQ ID NO: 175412 - DNA, 13 bp, Artificial Sequence
  Oligonucleotide for detection of SNP TSC0043592
rcataacccctaa

SEQ ID NO: 175413 - DNA, 13 bp, Artificial Sequence
  Oligonucleotide for detection of SNP TSC0043592
ttagggattacgy

SEQ ID NO: 175414 - DNA, 13 bp, Artificial Sequence
  Oligonucleotide for detection of SNP TSC0043592
rcgtaatccctaa

SEQ ID NO: 175415 - DNA, 13 bp, Artificial Sequence
  Oligonucleotide for detection of SNP TSC0043592
ttaggggttacgy

SEQ ID NO: 175416 - DNA, 13 bp, Artificial Sequence
  Oligonucleotide for detection of SNP TSC0043592
rcgtaacccctaa

SEQ ID NO: 175417 - DNA, 13 bp, Artificial Sequence
  Oligonucleotide for detection of SNP TSC0043593
gtttttacgaaty

SEQ ID NO: 175418 - DNA, 13 bp, Artificial Sequence
  Oligonucleotide for detection of SNP TSC0043593
rattcgtaaaaac

SEQ ID NO: 175419 - DNA, 13 bp, Artificial Sequence
  Oligonucleotide for detection of SNP TSC0043593
gtttttgcgaaty

SEQ ID NO: 175420 - DNA, 13 bp, Artificial Sequence
  Oligonucleotide for detection of SNP TSC0043593
rattcgcaaaaac

SEQ ID NO: 175421 - DNA, 13 bp, Artificial Sequence
  Oligonucleotide for detection of SNP TSC0043593
gttttcgcgaaty

SEQ ID NO: 175422 - DNA, 13 bp, Artificial Sequence
  Oligonucleotide for detection of SNP TSC0043593
rattcgcgaaaac

SEQ ID NO: 175423 - DNA, 13 bp, Artificial Sequence
  Oligonucleotide for detection of SNP TSC0043593
ggtttgtggaggy

SEQ ID NO: 175424 - DNA, 13 bp, Artificial Sequence
  Oligonucleotide for detection of SNP TSC0043593
rcctccacaaacc

SEQ ID NO: 175425 - DNA, 13 bp, Artificial Sequence
  Oligonucleotide for detection of SNP TSC0043593
ggttcgtggaggy

SEQ ID NO: 175426 - DNA, 13 bp, Artificial Sequence
  Oligonucleotide for detection of SNP TSC0043593
rcctccacgaacc

SEQ ID NO: 175427 - DNA, 13 bp, Artificial Sequence
  Oligonucleotide for detection of SNP TSC0043593
ggtttgcggaggy

SEQ ID NO: 175428 - DNA, 13 bp, Artificial Sequence
  Oligonucleotide for detection of SNP TSC0043593
rcctccgcaaacc

SEQ ID NO: 175429 - DNA, 13 bp, Artificial Sequence
  Oligonucleotide for detection of SNP TSC0043593
ggttcgcggaggy

SEQ ID NO: 175430 - DNA, 13 bp, Artificial Sequence
  Oligonucleotide for detection of SNP TSC0043593
rcctccgcgaacc

SEQ ID NO: 175431 - DNA, 13 bp, Artificial Sequence
  Oligonucleotide for detection of SNP TSC0043597
ttttgtataaggt

SEQ ID NO: 175432 - DNA, 13 bp, Artificial Sequence
  Oligonucleotide for detection of SNP TSC0043597
accttatacaaaa

SEQ ID NO: 175433 - DNA, 13 bp, Artificial Sequence
  Oligonucleotide for detection of SNP TSC0043597
ttttgtttaaggt

SEQ ID NO: 175434 - DNA, 13 bp, Artificial Sequence
  Oligonucleotide for detection of SNP TSC0043597
accttaaacaaaa

SEQ ID NO: 175435 - DNA, 13 bp, Artificial Sequence
  Oligonucleotide for detection of SNP TSC0043597
attttatataaag

SEQ ID NO: 175436 - DNA, 13 bp, Artificial Sequence
  Oligonucleotide for detection of SNP TSC0043597
ctttatataaaat

SEQ ID NO: 175437 - DNA, 13 bp, Artificial Sequence
  Oligonucleotide for detection of SNP TSC0043597
attttaaataaag

SEQ ID NO: 175438 - DNA, 13 bp, Artificial Sequence
  Oligonucleotide for detection of SNP TSC0043597
ctttatttaaaat

SEQ ID NO: 175439 - DNA, 13 bp, Artificial Sequence
  Oligonucleotide for detection of SNP TSC0043598
atatatttattty

SEQ ID NO: 175440 - DNA, 13 bp, Artificial Sequence
  Oligonucleotide for detection of SNP TSC0043598
raaataaatatat

SEQ ID NO: 175441 - DNA, 13 bp, Artificial Sequence
  Oligonucleotide for detection of SNP TSC0043598
gaaataaatatgt

SEQ ID NO: 175442 - DNA, 13 bp, Artificial Sequence
  Oligonucleotide for detection of SNP TSC0043598
acatatttatttc

SEQ ID NO: 175443 - DNA, 13 bp, Artificial Sequence
  Oligonucleotide for detection of SNP TSC0043598
gaaatatatatgt

SEQ ID NO: 175444 - DNA, 13 bp, Artificial Sequence
  Oligonucleotide for detection of SNP TSC0043598
acatatatatttc

SEQ ID NO: 175445 - DNA, 13 bp, Artificial Sequence
  Oligonucleotide for detection of SNP TSC0043599
atgtttattttay

SEQ ID NO: 175446 - DNA, 13 bp, Artificial Sequence
  Oligonucleotide for detection of SNP TSC0043599
rtaaaataaacat

SEQ ID NO: 175447 - DNA, 13 bp, Artificial Sequence
  Oligonucleotide for detection of SNP TSC0043599
atgtttgttttay

SEQ ID NO: 175448 - DNA, 13 bp, Artificial Sequence
  Oligonucleotide for detection of SNP TSC0043599
rtaaaacaaacat

SEQ ID NO: 175449 - DNA, 13 bp, Artificial Sequence
  Oligonucleotide for detection of SNP TSC0043599
atgttcgttttay

SEQ ID NO: 175450 - DNA, 13 bp, Artificial Sequence
  Oligonucleotide for detection of SNP TSC0043599
rtaaaacgaacat

SEQ ID NO: 175451 - DNA, 13 bp, Artificial Sequence
  Oligonucleotide for detection of SNP TSC0043599
gtaggatgaatat

SEQ ID NO: 175452 - DNA, 13 bp, Artificial Sequence
  Oligonucleotide for detection of SNP TSC0043599
atattcatcctac

SEQ ID NO: 175453 - DNA, 13 bp, Artificial Sequence
  Oligonucleotide for detection of SNP TSC0043599
gtaggacgaatat

SEQ ID NO: 175454 - DNA, 13 bp, Artificial Sequence
  Oligonucleotide for detection of SNP TSC0043599
atattcgtcctac

SEQ ID NO: 175455 - DNA, 13 bp, Artificial Sequence
  Oligonucleotide for detection of SNP TSC0043600
tttaataataagt

SEQ ID NO: 175456 - DNA, 13 bp, Artificial Sequence
  Oligonucleotide for detection of SNP TSC0043600
acttattattaaa

SEQ ID NO: 175457 - DNA, 13 bp, Artificial Sequence
  Oligonucleotide for detection of SNP TSC0043600
tttaatgataagt

SEQ ID NO: 175458 - DNA, 13 bp, Artificial Sequence
  Oligonucleotide for detection of SNP TSC0043600
acttatcattaaa

SEQ ID NO: 175459 - DNA, 13 bp, Artificial Sequence
  Oligonucleotide for detection of SNP TSC0043604
gtttattgttgtg

SEQ ID NO: 175460 - DNA, 13 bp, Artificial Sequence
  Oligonucleotide for detection of SNP TSC0043604
cacaacaataaac

SEQ ID NO: 175461 - DNA, 13 bp, Artificial Sequence
  Oligonucleotide for detection of SNP TSC0043604
gtttatcgttgtg

SEQ ID NO: 175462 - DNA, 13 bp, Artificial Sequence
  Oligonucleotide for detection of SNP TSC0043604
cacaacgataaac

SEQ ID NO: 175463 - DNA, 13 bp, Artificial Sequence
  Oligonucleotide for detection of SNP TSC0043604
gtttattgttgcg

SEQ ID NO: 175464 - DNA, 13 bp, Artificial Sequence
  Oligonucleotide for detection of SNP TSC0043604
cgcaacaataaac

SEQ ID NO: 175465 - DNA, 13 bp, Artificial Sequence
  Oligonucleotide for detection of SNP TSC0043604
gtttatcgttgcg

SEQ ID NO: 175466 - DNA, 13 bp, Artificial Sequence
  Oligonucleotide for detection of SNP TSC0043604
cgcaacgataaac

SEQ ID NO: 175467 - DNA, 13 bp, Artificial Sequence
  Oligonucleotide for detection of SNP TSC0043604
tgtagtggtagay

SEQ ID NO: 175468 - DNA, 13 bp, Artificial Sequence
  Oligonucleotide for detection of SNP TSC0043604
rtctaccactaca

SEQ ID NO: 175469 - DNA, 13 bp, Artificial Sequence
  Oligonucleotide for detection of SNP TSC0043604
tgtagtagtagay

SEQ ID NO: 175470 - DNA, 13 bp, Artificial Sequence
  Oligonucleotide for detection of SNP TSC0043604
rtctactactaca

SEQ ID NO: 175471 - DNA, 13 bp, Artificial Sequence
  Oligonucleotide for detection of SNP TSC0043604
cgtagtggtagay

SEQ ID NO: 175472 - DNA, 13 bp, Artificial Sequence
  Oligonucleotide for detection of SNP TSC0043604
rtctaccactacg

SEQ ID NO: 175473 - DNA, 13 bp, Artificial Sequence
  Oligonucleotide for detection of SNP TSC0043604
cgtagtagtagay

SEQ ID NO: 175474 - DNA, 13 bp, Artificial Sequence
  Oligonucleotide for detection of SNP TSC0043604
rtctactactacg

SEQ ID NO: 175475 - DNA, 13 bp, Artificial Sequence
  Oligonucleotide for detection of SNP TSC0043604
tgtagcggtagay

SEQ ID NO: 175476 - DNA, 13 bp, Artificial Sequence
  Oligonucleotide for detection of SNP TSC0043604
rtctaccgctaca

SEQ ID NO: 175477 - DNA, 13 bp, Artificial Sequence
  Oligonucleotide for detection of SNP TSC0043604
cgtagcggtagay

SEQ ID NO: 175478 - DNA, 13 bp, Artificial Sequence
  Oligonucleotide for detection of SNP TSC0043604
rtctaccgctacg

SEQ ID NO: 175479 - DNA, 13 bp, Artificial Sequence
  Oligonucleotide for detection of SNP TSC0043605
tgttgtaatttay

SEQ ID NO: 175480 - DNA, 13 bp, Artificial Sequence
  Oligonucleotide for detection of SNP TSC0043605
rtaaattacaaca

SEQ ID NO: 175481 - DNA, 13 bp, Artificial Sequence
  Oligonucleotide for detection of SNP TSC0043605
tgttgtgatttay

SEQ ID NO: 175482 - DNA, 13 bp, Artificial Sequence
  Oligonucleotide for detection of SNP TSC0043605
rtaaatcacaaca

SEQ ID NO: 175483 - DNA, 13 bp, Artificial Sequence
  Oligonucleotide for detection of SNP TSC0043605
cgttgtaatttay

SEQ ID NO: 175484 - DNA, 13 bp, Artificial Sequence
  Oligonucleotide for detection of SNP TSC0043605
rtaaattacaacg

SEQ ID NO: 175485 - DNA, 13 bp, Artificial Sequence
  Oligonucleotide for detection of SNP TSC0043605
cgttgtgatttay

SEQ ID NO: 175486 - DNA, 13 bp, Artificial Sequence
  Oligonucleotide for detection of SNP TSC0043605
rtaaatcacaacg

SEQ ID NO: 175487 - DNA, 13 bp, Artificial Sequence
  Oligonucleotide for detection of SNP TSC0043605
tgttgcgatttay

SEQ ID NO: 175488 - DNA, 13 bp, Artificial Sequence
  Oligonucleotide for detection of SNP TSC0043605
rtaaatcgcaaca

SEQ ID NO: 175489 - DNA, 13 bp, Artificial Sequence
  Oligonucleotide for detection of SNP TSC0043605
cgttgcgatttay

SEQ ID NO: 175490 - DNA, 13 bp, Artificial Sequence
  Oligonucleotide for detection of SNP TSC0043605
rtaaatcgcaacg

SEQ ID NO: 175491 - DNA, 13 bp, Artificial Sequence
  Oligonucleotide for detection of SNP TSC0043605
gtaggttgtagtg

SEQ ID NO: 175492 - DNA, 13 bp, Artificial Sequence
  Oligonucleotide for detection of SNP TSC0043605
cactacaacctac

SEQ ID NO: 175493 - DNA, 13 bp, Artificial Sequence
  Oligonucleotide for detection of SNP TSC0043605
gtaggttgtagcg

SEQ ID NO: 175494 - DNA, 13 bp, Artificial Sequence
  Oligonucleotide for detection of SNP TSC0043605
cgctacaacctac

SEQ ID NO: 175495 - DNA, 13 bp, Artificial Sequence
  Oligonucleotide for detection of SNP TSC0043605
gtaggtcgtagtg

SEQ ID NO: 175496 - DNA, 13 bp, Artificial Sequence
  Oligonucleotide for detection of SNP TSC0043605
cactacgacctac

SEQ ID NO: 175497 - DNA, 13 bp, Artificial Sequence
  Oligonucleotide for detection of SNP TSC0043605
gtaggtcgtagcg

SEQ ID NO: 175498 - DNA, 13 bp, Artificial Sequence
  Oligonucleotide for detection of SNP TSC0043605
cgctacgacctac

SEQ ID NO: 175499 - DNA, 13 bp, Artificial Sequence
  Oligonucleotide for detection of SNP TSC0043606
tgatatatttagy

SEQ ID NO: 175500 - DNA, 13 bp, Artificial Sequence
  Oligonucleotide for detection of SNP TSC0043606
rctaaatatatca

SEQ ID NO: 175501 - DNA, 13 bp, Artificial Sequence
  Oligonucleotide for detection of SNP TSC0043606
tgatatttttagy

SEQ ID NO: 175502 - DNA, 13 bp, Artificial Sequence
  Oligonucleotide for detection of SNP TSC0043606
rctaaaaatatca

SEQ ID NO: 175503 - DNA, 13 bp, Artificial Sequence
  Oligonucleotide for detection of SNP TSC0043606
gttaagtatatta

SEQ ID NO: 175504 - DNA, 13 bp, Artificial Sequence
  Oligonucleotide for detection of SNP TSC0043606
taatatacttaac

SEQ ID NO: 175505 - DNA, 13 bp, Artificial Sequence
  Oligonucleotide for detection of SNP TSC0043606
gttaaggatatta

SEQ ID NO: 175506 - DNA, 13 bp, Artificial Sequence
  Oligonucleotide for detection of SNP TSC0043606
taatatccttaac

SEQ ID NO: 175507 - DNA, 13 bp, Artificial Sequence
  Oligonucleotide for detection of SNP TSC0043607
ttttgtagtggaa

SEQ ID NO: 175508 - DNA, 13 bp, Artificial Sequence
  Oligonucleotide for detection of SNP TSC0043607
ttccactacaaaa

SEQ ID NO: 175509 - DNA, 13 bp, Artificial Sequence
  Oligonucleotide for detection of SNP TSC0043607
ttttgtggtggaa

SEQ ID NO: 175510 - DNA, 13 bp, Artificial Sequence
  Oligonucleotide for detection of SNP TSC0043607
ttccaccacaaaa

SEQ ID NO: 175511 - DNA, 13 bp, Artificial Sequence
  Oligonucleotide for detection of SNP TSC0043607
ttttgcggtggaa

SEQ ID NO: 175512 - DNA, 13 bp, Artificial Sequence
  Oligonucleotide for detection of SNP TSC0043607
ttccaccgcaaaa

SEQ ID NO: 175513 - DNA, 13 bp, Artificial Sequence
  Oligonucleotide for detection of SNP TSC0043607
ttttatcgtagag

SEQ ID NO: 175514 - DNA, 13 bp, Artificial Sequence
  Oligonucleotide for detection of SNP TSC0043607
ctctacgataaaa

SEQ ID NO: 175515 - DNA, 13 bp, Artificial Sequence
  Oligonucleotide for detection of SNP TSC0043609
agaaaggtgtgtt

SEQ ID NO: 175516 - DNA, 13 bp, Artificial Sequence
  Oligonucleotide for detection of SNP TSC0043609
aacacacctttct

SEQ ID NO: 175517 - DNA, 13 bp, Artificial Sequence
  Oligonucleotide for detection of SNP TSC0043609
agaaagatgtgtt

SEQ ID NO: 175518 - DNA, 13 bp, Artificial Sequence
  Oligonucleotide for detection of SNP TSC0043609
aacacatctttct

SEQ ID NO: 175519 - DNA, 13 bp, Artificial Sequence
  Oligonucleotide for detection of SNP TSC0043611
ttagaaatatgtg

SEQ ID NO: 175520 - DNA, 13 bp, Artificial Sequence
  Oligonucleotide for detection of SNP TSC0043611
cacatatttctaa

SEQ ID NO: 175521 - DNA, 13 bp, Artificial Sequence
  Oligonucleotide for detection of SNP TSC0043611
ttagaagtatgtg

SEQ ID NO: 175522 - DNA, 13 bp, Artificial Sequence
  Oligonucleotide for detection of SNP TSC0043611
cacatacttctaa

SEQ ID NO: 175523 - DNA, 13 bp, Artificial Sequence
  Oligonucleotide for detection of SNP TSC0043612
taatgtattttag

SEQ ID NO: 175524 - DNA, 13 bp, Artificial Sequence
  Oligonucleotide for detection of SNP TSC0043612
ctaaaatacatta

SEQ ID NO: 175525 - DNA, 13 bp, Artificial Sequence
  Oligonucleotide for detection of SNP TSC0043612
taatgtgttttag

SEQ ID NO: 175526 - DNA, 13 bp, Artificial Sequence
  Oligonucleotide for detection of SNP TSC0043612
ctaaaacacatta

SEQ ID NO: 175527 - DNA, 13 bp, Artificial Sequence
  Oligonucleotide for detection of SNP TSC0043613
attttaaatttty

SEQ ID NO: 175528 - DNA, 13 bp, Artificial Sequence
  Oligonucleotide for detection of SNP TSC0043613
raaaatttaaaat

SEQ ID NO: 175529 - DNA, 13 bp, Artificial Sequence
  Oligonucleotide for detection of SNP TSC0043614
attttaagtaata

SEQ ID NO: 175530 - DNA, 13 bp, Artificial Sequence
  Oligonucleotide for detection of SNP TSC0043614
tattacttaaaat

SEQ ID NO: 175531 - DNA, 13 bp, Artificial Sequence
  Oligonucleotide for detection of SNP TSC0043614
attttaggtaata

SEQ ID NO: 175532 - DNA, 13 bp, Artificial Sequence
  Oligonucleotide for detection of SNP TSC0043614
tattacctaaaat

SEQ ID NO: 175533 - DNA, 13 bp, Artificial Sequence
  Oligonucleotide for detection of SNP TSC0043615
ggtttaagagtty

SEQ ID NO: 175534 - DNA, 13 bp, Artificial Sequence
  Oligonucleotide for detection of SNP TSC0043615
raactcttaaacc

SEQ ID NO: 175535 - DNA, 13 bp, Artificial Sequence
  Oligonucleotide for detection of SNP TSC0043615
ggtttaggagtty

SEQ ID NO: 175536 - DNA, 13 bp, Artificial Sequence
  Oligonucleotide for detection of SNP TSC0043615
raactcctaaacc

SEQ ID NO: 175537 - DNA, 13 bp, Artificial Sequence
  Oligonucleotide for detection of SNP TSC0043616
atgtgtgtagaty

SEQ ID NO: 175538 - DNA, 13 bp, Artificial Sequence
  Oligonucleotide for detection of SNP TSC0043616
ratctacacacat

SEQ ID NO: 175539 - DNA, 13 bp, Artificial Sequence
  Oligonucleotide for detection of SNP TSC0043616
atgtgtatagaty

SEQ ID NO: 175540 - DNA, 13 bp, Artificial Sequence
  Oligonucleotide for detection of SNP TSC0043616
ratctatacacat

SEQ ID NO: 175541 - DNA, 13 bp, Artificial Sequence
  Oligonucleotide for detection of SNP TSC0043616
acgtgtgtagaty

SEQ ID NO: 175542 - DNA, 13 bp, Artificial Sequence
  Oligonucleotide for detection of SNP TSC0043616
ratctacacacgt

SEQ ID NO: 175543 - DNA, 13 bp, Artificial Sequence
  Oligonucleotide for detection of SNP TSC0043616
acgtgtatagaty

SEQ ID NO: 175544 - DNA, 13 bp, Artificial Sequence
  Oligonucleotide for detection of SNP TSC0043616
ratctatacacgt

SEQ ID NO: 175545 - DNA, 13 bp, Artificial Sequence
  Oligonucleotide for detection of SNP TSC0004852
atgattaaagtgy

SEQ ID NO: 175546 - DNA, 13 bp, Artificial Sequence
  Oligonucleotide for detection of SNP TSC0004852
rcactttaatcat

SEQ ID NO: 175547 - DNA, 13 bp, Artificial Sequence
  Oligonucleotide for detection of SNP TSC0004852
atgattgaagtgy

SEQ ID NO: 175548 - DNA, 13 bp, Artificial Sequence
  Oligonucleotide for detection of SNP TSC0004852
rcacttcaatcat

SEQ ID NO: 175549 - DNA, 13 bp, Artificial Sequence
  Oligonucleotide for detection of SNP TSC0043618
tggaagagggttg

SEQ ID NO: 175550 - DNA, 13 bp, Artificial Sequence
  Oligonucleotide for detection of SNP TSC0043618
caaccctcttcca

SEQ ID NO: 175551 - DNA, 13 bp, Artificial Sequence
  Oligonucleotide for detection of SNP TSC0043618
tggaagtgggttg

SEQ ID NO: 175552 - DNA, 13 bp, Artificial Sequence
  Oligonucleotide for detection of SNP TSC0043618
caacccacttcca

SEQ ID NO: 175553 - DNA, 13 bp, Artificial Sequence
  Oligonucleotide for detection of SNP TSC0005919
aatgttatttagt

SEQ ID NO: 175554 - DNA, 13 bp, Artificial Sequence
  Oligonucleotide for detection of SNP TSC0005919
actaaataacatt

SEQ ID NO: 175555 - DNA, 13 bp, Artificial Sequence
  Oligonucleotide for detection of SNP TSC0005919
aatgttgtttagt

SEQ ID NO: 175556 - DNA, 13 bp, Artificial Sequence
  Oligonucleotide for detection of SNP TSC0005919
actaaacaacatt

SEQ ID NO: 175557 - DNA, 13 bp, Artificial Sequence
  Oligonucleotide for detection of SNP TSC0005919
aatgtcgtttagt

SEQ ID NO: 175558 - DNA, 13 bp, Artificial Sequence
  Oligonucleotide for detection of SNP TSC0005919
actaaacgacatt

SEQ ID NO: 175559 - DNA, 13 bp, Artificial Sequence
  Oligonucleotide for detection of SNP TSC0005919
attaaatgatatt

SEQ ID NO: 175560 - DNA, 13 bp, Artificial Sequence
  Oligonucleotide for detection of SNP TSC0005919
aatatcatttaat

SEQ ID NO: 175561 - DNA, 13 bp, Artificial Sequence
  Oligonucleotide for detection of SNP TSC0005919
attaaacgatatt

SEQ ID NO: 175562 - DNA, 13 bp, Artificial Sequence
  Oligonucleotide for detection of SNP TSC0005919
aatatcgtttaat

SEQ ID NO: 175563 - DNA, 13 bp, Artificial Sequence
  Oligonucleotide for detection of SNP TSC0004676
ggtgtgatggtgy

SEQ ID NO: 175564 - DNA, 13 bp, Artificial Sequence
  Oligonucleotide for detection of SNP TSC0004676
rcaccatcacacc

SEQ ID NO: 175565 - DNA, 13 bp, Artificial Sequence
  Oligonucleotide for detection of SNP TSC0004676
ggtgtggtggtgy

SEQ ID NO: 175566 - DNA, 13 bp, Artificial Sequence
  Oligonucleotide for detection of SNP TSC0004676
rcaccaccacacc

SEQ ID NO: 175567 - DNA, 13 bp, Artificial Sequence
  Oligonucleotide for detection of SNP TSC0004676
ggcgtgatggtgy

SEQ ID NO: 175568 - DNA, 13 bp, Artificial Sequence
  Oligonucleotide for detection of SNP TSC0004676
rcaccatcacgcc

SEQ ID NO: 175569 - DNA, 13 bp, Artificial Sequence
  Oligonucleotide for detection of SNP TSC0004676
ggcgtggtggtgy

SEQ ID NO: 175570 - DNA, 13 bp, Artificial Sequence
  Oligonucleotide for detection of SNP TSC0004676
rcaccaccacgcc

SEQ ID NO: 175571 - DNA, 13 bp, Artificial Sequence
  Oligonucleotide for detection of SNP TSC0043622
taatattttttgt

SEQ ID NO: 175572 - DNA, 13 bp, Artificial Sequence
  Oligonucleotide for detection of SNP TSC0043622
acaaaaaatatta

SEQ ID NO: 175573 - DNA, 13 bp, Artificial Sequence
  Oligonucleotide for detection of SNP TSC0043622
taatatgttttgt

SEQ ID NO: 175574 - DNA, 13 bp, Artificial Sequence
  Oligonucleotide for detection of SNP TSC0043622
acaaaacatatta

SEQ ID NO: 175575 - DNA, 13 bp, Artificial Sequence
  Oligonucleotide for detection of SNP TSC0043622
taatacgttttgt

SEQ ID NO: 175576 - DNA, 13 bp, Artificial Sequence
  Oligonucleotide for detection of SNP TSC0043622
acaaaacgtatta

SEQ ID NO: 175577 - DNA, 13 bp, Artificial Sequence
  Oligonucleotide for detection of SNP TSC0043622
ataaaaagtgtta

SEQ ID NO: 175578 - DNA, 13 bp, Artificial Sequence
  Oligonucleotide for detection of SNP TSC0043622
taacactttttat

SEQ ID NO: 175579 - DNA, 13 bp, Artificial Sequence
  Oligonucleotide for detection of SNP TSC0043622
ataaaatgtgtta

SEQ ID NO: 175580 - DNA, 13 bp, Artificial Sequence
  Oligonucleotide for detection of SNP TSC0043622
taacacattttat

SEQ ID NO: 175581 - DNA, 13 bp, Artificial Sequence
  Oligonucleotide for detection of SNP TSC0043622
ataaaacgtgtta

SEQ ID NO: 175582 - DNA, 13 bp, Artificial Sequence
  Oligonucleotide for detection of SNP TSC0043622
taacacgttttat

SEQ ID NO: 175583 - DNA, 13 bp, Artificial Sequence
  Oligonucleotide for detection of SNP TSC0043623
aaaaaaattgaag

SEQ ID NO: 175584 - DNA, 13 bp, Artificial Sequence
  Oligonucleotide for detection of SNP TSC0043623
cttcaattttttt

SEQ ID NO: 175585 - DNA, 13 bp, Artificial Sequence
  Oligonucleotide for detection of SNP TSC0043623
aaaaaatttgaag

SEQ ID NO: 175586 - DNA, 13 bp, Artificial Sequence
  Oligonucleotide for detection of SNP TSC0043623
cttcaaatttttt

SEQ ID NO: 175587 - DNA, 13 bp, Artificial Sequence
  Oligonucleotide for detection of SNP TSC0043624
tttaaggtataga

SEQ ID NO: 175588 - DNA, 13 bp, Artificial Sequence
  Oligonucleotide for detection of SNP TSC0043624
tctataccttaaa

SEQ ID NO: 175589 - DNA, 13 bp, Artificial Sequence
  Oligonucleotide for detection of SNP TSC0043624
tttaagatataga

SEQ ID NO: 175590 - DNA, 13 bp, Artificial Sequence
  Oligonucleotide for detection of SNP TSC0043624
tctatatcttaaa

SEQ ID NO: 175591 - DNA, 13 bp, Artificial Sequence
  Oligonucleotide for detection of SNP TSC0004550
tttttatttggta

SEQ ID NO: 175592 - DNA, 13 bp, Artificial Sequence
  Oligonucleotide for detection of SNP TSC0004550
taccaaataaaaa

SEQ ID NO: 175593 - DNA, 13 bp, Artificial Sequence
  Oligonucleotide for detection of SNP TSC0004550
tttttagttggta

SEQ ID NO: 175594 - DNA, 13 bp, Artificial Sequence
  Oligonucleotide for detection of SNP TSC0004550
taccaactaaaaa

SEQ ID NO: 175595 - DNA, 13 bp, Artificial Sequence
  Oligonucleotide for detection of SNP TSC0004550
tgttaggtaggaa

SEQ ID NO: 175596 - DNA, 13 bp, Artificial Sequence
  Oligonucleotide for detection of SNP TSC0004550
ttcctacctaaca

SEQ ID NO: 175597 - DNA, 13 bp, Artificial Sequence
  Oligonucleotide for detection of SNP TSC0004550
tgttagttaggaa

SEQ ID NO: 175598 - DNA, 13 bp, Artificial Sequence
  Oligonucleotide for detection of SNP TSC0004550
ttcctaactaaca

SEQ ID NO: 175599 - DNA, 13 bp, Artificial Sequence
  Oligonucleotide for detection of SNP TSC0043627
gaatatggtaggt

SEQ ID NO: 175600 - DNA, 13 bp, Artificial Sequence
  Oligonucleotide for detection of SNP TSC0043627
acctaccatattc

SEQ ID NO: 175601 - DNA, 13 bp, Artificial Sequence
  Oligonucleotide for detection of SNP TSC0043627
gaatatagtaggt

SEQ ID NO: 175602 - DNA, 13 bp, Artificial Sequence
  Oligonucleotide for detection of SNP TSC0043627
acctactatattc

SEQ ID NO: 175603 - DNA, 13 bp, Artificial Sequence
  Oligonucleotide for detection of SNP TSC0043627
gaatacggtaggt

SEQ ID NO: 175604 - DNA, 13 bp, Artificial Sequence
  Oligonucleotide for detection of SNP TSC0043627
acctaccgtattc

SEQ ID NO: 175605 - DNA, 13 bp, Artificial Sequence
  Oligonucleotide for detection of SNP TSC0043628
tgtgtgtaatgga

SEQ ID NO: 175606 - DNA, 13 bp, Artificial Sequence
  Oligonucleotide for detection of SNP TSC0043628
tccattacacaca

SEQ ID NO: 175607 - DNA, 13 bp, Artificial Sequence
  Oligonucleotide for detection of SNP TSC0043628
tgtgtggaatgga

SEQ ID NO: 175608 - DNA, 13 bp, Artificial Sequence
  Oligonucleotide for detection of SNP TSC0043628
tccattccacaca

SEQ ID NO: 175609 - DNA, 13 bp, Artificial Sequence
  Oligonucleotide for detection of SNP TSC0043629
aggtttttggtaa

SEQ ID NO: 175610 - DNA, 13 bp, Artificial Sequence
  Oligonucleotide for detection of SNP TSC0043629
ttaccaaaaacct

SEQ ID NO: 175611 - DNA, 13 bp, Artificial Sequence
  Oligonucleotide for detection of SNP TSC0043629
aggtttgtggtaa

SEQ ID NO: 175612 - DNA, 13 bp, Artificial Sequence
  Oligonucleotide for detection of SNP TSC0043629
ttaccacaaacct

SEQ ID NO: 175613 - DNA, 13 bp, Artificial Sequence
  Oligonucleotide for detection of SNP TSC0043629
aggttcgtggtaa

SEQ ID NO: 175614 - DNA, 13 bp, Artificial Sequence
  Oligonucleotide for detection of SNP TSC0043629
ttaccacgaacct

SEQ ID NO: 175615 - DNA, 13 bp, Artificial Sequence
  Oligonucleotide for detection of SNP TSC0043629
ttgttaggggttt

SEQ ID NO: 175616 - DNA, 13 bp, Artificial Sequence
  Oligonucleotide for detection of SNP TSC0043629
aaacccctaacaa

SEQ ID NO: 175617 - DNA, 13 bp, Artificial Sequence
  Oligonucleotide for detection of SNP TSC0043629
ttgttatgggttt

SEQ ID NO: 175618 - DNA, 13 bp, Artificial Sequence
  Oligonucleotide for detection of SNP TSC0043629
aaacccataacaa

SEQ ID NO: 175619 - DNA, 13 bp, Artificial Sequence
  Oligonucleotide for detection of SNP TSC0043629
ttgttacgggttt

SEQ ID NO: 175620 - DNA, 13 bp, Artificial Sequence
  Oligonucleotide for detection of SNP TSC0043629
aaacccgtaacaa

SEQ ID NO: 175621 - DNA, 13 bp, Artificial Sequence
  Oligonucleotide for detection of SNP TSC0043631
ggttttatgttty

SEQ ID NO: 175622 - DNA, 13 bp, Artificial Sequence
  Oligonucleotide for detection of SNP TSC0043631
raaacataaaacc

SEQ ID NO: 175623 - DNA, 13 bp, Artificial Sequence
  Oligonucleotide for detection of SNP TSC0043631
ggttttttgttty

SEQ ID NO: 175624 - DNA, 13 bp, Artificial Sequence
  Oligonucleotide for detection of SNP TSC0043631
raaacaaaaaacc

SEQ ID NO: 175625 - DNA, 13 bp, Artificial Sequence
  Oligonucleotide for detection of SNP TSC0043631
ggaatatggggty

SEQ ID NO: 175626 - DNA, 13 bp, Artificial Sequence
  Oligonucleotide for detection of SNP TSC0043631
raccccatattcc

SEQ ID NO: 175627 - DNA, 13 bp, Artificial Sequence
  Oligonucleotide for detection of SNP TSC0043631
ggaatagggggty

SEQ ID NO: 175628 - DNA, 13 bp, Artificial Sequence
  Oligonucleotide for detection of SNP TSC0043631
raccccctattcc

SEQ ID NO: 175629 - DNA, 13 bp, Artificial Sequence
  Oligonucleotide for detection of SNP TSC0043631
ggaataaggggty

SEQ ID NO: 175630 - DNA, 13 bp, Artificial Sequence
  Oligonucleotide for detection of SNP TSC0043631
raccccttattcc

SEQ ID NO: 175631 - DNA, 13 bp, Artificial Sequence
  Oligonucleotide for detection of SNP TSC0043632
aattttttaatag

SEQ ID NO: 175632 - DNA, 13 bp, Artificial Sequence
  Oligonucleotide for detection of SNP TSC0043632
ctattaaaaaatt

SEQ ID NO: 175633 - DNA, 13 bp, Artificial Sequence
  Oligonucleotide for detection of SNP TSC0043632
aattttgtaatag

SEQ ID NO: 175634 - DNA, 13 bp, Artificial Sequence
  Oligonucleotide for detection of SNP TSC0043632
ctattacaaaatt

SEQ ID NO: 175635 - DNA, 13 bp, Artificial Sequence
  Oligonucleotide for detection of SNP TSC0043632
ttattagaaaatt

SEQ ID NO: 175636 - DNA, 13 bp, Artificial Sequence
  Oligonucleotide for detection of SNP TSC0043632
aattttctaataa

SEQ ID NO: 175637 - DNA, 13 bp, Artificial Sequence
  Oligonucleotide for detection of SNP TSC0043632
ttattaaaaaatt

SEQ ID NO: 175638 - DNA, 13 bp, Artificial Sequence
  Oligonucleotide for detection of SNP TSC0043632
aattttttaataa

SEQ ID NO: 175639 - DNA, 13 bp, Artificial Sequence
  Oligonucleotide for detection of SNP TSC0043633
tggttgttattta

SEQ ID NO: 175640 - DNA, 13 bp, Artificial Sequence
  Oligonucleotide for detection of SNP TSC0043633
taaataacaacca

SEQ ID NO: 175641 - DNA, 13 bp, Artificial Sequence
  Oligonucleotide for detection of SNP TSC0043633
tggttggtattta

SEQ ID NO: 175642 - DNA, 13 bp, Artificial Sequence
  Oligonucleotide for detection of SNP TSC0043633
taaataccaacca

SEQ ID NO: 175643 - DNA, 13 bp, Artificial Sequence
  Oligonucleotide for detection of SNP TSC0043633
tgagtagtagtta

SEQ ID NO: 175644 - DNA, 13 bp, Artificial Sequence
  Oligonucleotide for detection of SNP TSC0043633
taactactactca

SEQ ID NO: 175645 - DNA, 13 bp, Artificial Sequence
  Oligonucleotide for detection of SNP TSC0043633
tgagtaatagtta

SEQ ID NO: 175646 - DNA, 13 bp, Artificial Sequence
  Oligonucleotide for detection of SNP TSC0043633
taactattactca

SEQ ID NO: 175647 - DNA, 13 bp, Artificial Sequence
  Oligonucleotide for detection of SNP TSC0043633
tgagtattagtta

SEQ ID NO: 175648 - DNA, 13 bp, Artificial Sequence
  Oligonucleotide for detection of SNP TSC0043633
taactaatactca

SEQ ID NO: 175649 - DNA, 13 bp, Artificial Sequence
  Oligonucleotide for detection of SNP TSC0043634
atttttttaaagt

SEQ ID NO: 175650 - DNA, 13 bp, Artificial Sequence
  Oligonucleotide for detection of SNP TSC0043634
actttaaaaaaat

SEQ ID NO: 175651 - DNA, 13 bp, Artificial Sequence
  Oligonucleotide for detection of SNP TSC0043634
attttcgtaaagt

SEQ ID NO: 175652 - DNA, 13 bp, Artificial Sequence
  Oligonucleotide for detection of SNP TSC0043634
actttacgaaaat

SEQ ID NO: 175653 - DNA, 13 bp, Artificial Sequence
  Oligonucleotide for detection of SNP TSC0043634
attttgggaaaat

SEQ ID NO: 175654 - DNA, 13 bp, Artificial Sequence
  Oligonucleotide for detection of SNP TSC0043634
attttcccaaaat

SEQ ID NO: 175655 - DNA, 13 bp, Artificial Sequence
  Oligonucleotide for detection of SNP TSC0043634
attttgagaaaat

SEQ ID NO: 175656 - DNA, 13 bp, Artificial Sequence
  Oligonucleotide for detection of SNP TSC0043634
attttctcaaaat

SEQ ID NO: 175657 - DNA, 13 bp, Artificial Sequence
  Oligonucleotide for detection of SNP TSC0043634
attttgtgaaaat

SEQ ID NO: 175658 - DNA, 13 bp, Artificial Sequence
  Oligonucleotide for detection of SNP TSC0043634
attttcacaaaat

SEQ ID NO: 175659 - DNA, 13 bp, Artificial Sequence
  Oligonucleotide for detection of SNP TSC0043634
attttgcgaaaat

SEQ ID NO: 175660 - DNA, 13 bp, Artificial Sequence
  Oligonucleotide for detection of SNP TSC0043634
attttcgcaaaat

SEQ ID NO: 175661 - DNA, 13 bp, Artificial Sequence
  Oligonucleotide for detection of SNP TSC0043635
agaggtagttttg

SEQ ID NO: 175662 - DNA, 13 bp, Artificial Sequence
  Oligonucleotide for detection of SNP TSC0043635
caaaactacctct

SEQ ID NO: 175663 - DNA, 13 bp, Artificial Sequence
  Oligonucleotide for detection of SNP TSC0043635
agaggtggttttg

SEQ ID NO: 175664 - DNA, 13 bp, Artificial Sequence
  Oligonucleotide for detection of SNP TSC0043635
caaaaccacctct

SEQ ID NO: 175665 - DNA, 13 bp, Artificial Sequence
  Oligonucleotide for detection of SNP TSC0043636
gatttgttgggag

SEQ ID NO: 175666 - DNA, 13 bp, Artificial Sequence
  Oligonucleotide for detection of SNP TSC0043636
ctcccaacaaatc

SEQ ID NO: 175667 - DNA, 13 bp, Artificial Sequence
  Oligonucleotide for detection of SNP TSC0043636
gatttggtgggag

SEQ ID NO: 175668 - DNA, 13 bp, Artificial Sequence
  Oligonucleotide for detection of SNP TSC0043636
ctcccaccaaatc

SEQ ID NO: 175669 - DNA, 13 bp, Artificial Sequence
  Oligonucleotide for detection of SNP TSC0043636
tttttaataggty

SEQ ID NO: 175670 - DNA, 13 bp, Artificial Sequence
  Oligonucleotide for detection of SNP TSC0043636
racctattaaaaa

SEQ ID NO: 175671 - DNA, 13 bp, Artificial Sequence
  Oligonucleotide for detection of SNP TSC0043637
attttaagtagta

SEQ ID NO: 175672 - DNA, 13 bp, Artificial Sequence
  Oligonucleotide for detection of SNP TSC0043637
tactacttaaaat

SEQ ID NO: 175673 - DNA, 13 bp, Artificial Sequence
  Oligonucleotide for detection of SNP TSC0043637
attttaggtagta

SEQ ID NO: 175674 - DNA, 13 bp, Artificial Sequence
  Oligonucleotide for detection of SNP TSC0043637
tactacctaaaat

SEQ ID NO: 175675 - DNA, 13 bp, Artificial Sequence
  Oligonucleotide for detection of SNP TSC0043639
gtggaggtagtgt

SEQ ID NO: 175676 - DNA, 13 bp, Artificial Sequence
  Oligonucleotide for detection of SNP TSC0043639
acactacctccac

SEQ ID NO: 175677 - DNA, 13 bp, Artificial Sequence
  Oligonucleotide for detection of SNP TSC0043639
gtggagatagtgt

SEQ ID NO: 175678 - DNA, 13 bp, Artificial Sequence
  Oligonucleotide for detection of SNP TSC0043639
acactatctccac

SEQ ID NO: 175679 - DNA, 13 bp, Artificial Sequence
  Oligonucleotide for detection of SNP TSC0006871
tggatgtttagty

SEQ ID NO: 175680 - DNA, 13 bp, Artificial Sequence
  Oligonucleotide for detection of SNP TSC0006871
ractaaacatcca

SEQ ID NO: 175681 - DNA, 13 bp, Artificial Sequence
  Oligonucleotide for detection of SNP TSC0006871
tggatggttagty

SEQ ID NO: 175682 - DNA, 13 bp, Artificial Sequence
  Oligonucleotide for detection of SNP TSC0006871
ractaaccatcca

SEQ ID NO: 175683 - DNA, 13 bp, Artificial Sequence
  Oligonucleotide for detection of SNP TSC0006871
ggttgagtattta

SEQ ID NO: 175684 - DNA, 13 bp, Artificial Sequence
  Oligonucleotide for detection of SNP TSC0006871
taaatactcaacc

SEQ ID NO: 175685 - DNA, 13 bp, Artificial Sequence
  Oligonucleotide for detection of SNP TSC0006871
ggttgattattta

SEQ ID NO: 175686 - DNA, 13 bp, Artificial Sequence
  Oligonucleotide for detection of SNP TSC0006871
taaataatcaacc

SEQ ID NO: 175687 - DNA, 13 bp, Artificial Sequence
  Oligonucleotide for detection of SNP TSC0043642
tagggttatttga

SEQ ID NO: 175688 - DNA, 13 bp, Artificial Sequence
  Oligonucleotide for detection of SNP TSC0043642
tcaaataacccta

SEQ ID NO: 175689 - DNA, 13 bp, Artificial Sequence
  Oligonucleotide for detection of SNP TSC0043642
tagggtgatttga

SEQ ID NO: 175690 - DNA, 13 bp, Artificial Sequence
  Oligonucleotide for detection of SNP TSC0043642
tcaaatcacccta

SEQ ID NO: 175691 - DNA, 13 bp, Artificial Sequence
  Oligonucleotide for detection of SNP TSC0043643
agtattaagtaty

SEQ ID NO: 175692 - DNA, 13 bp, Artificial Sequence
  Oligonucleotide for detection of SNP TSC0043643
ratacttaatact

SEQ ID NO: 175693 - DNA, 13 bp, Artificial Sequence
  Oligonucleotide for detection of SNP TSC0043643
agtattgagtaty

SEQ ID NO: 175694 - DNA, 13 bp, Artificial Sequence
  Oligonucleotide for detection of SNP TSC0043643
ratactcaatact

SEQ ID NO: 175695 - DNA, 13 bp, Artificial Sequence
  Oligonucleotide for detection of SNP TSC0043643
agtatcgagtaty

SEQ ID NO: 175696 - DNA, 13 bp, Artificial Sequence
  Oligonucleotide for detection of SNP TSC0043643
ratactcgatact

SEQ ID NO: 175697 - DNA, 13 bp, Artificial Sequence
  Oligonucleotide for detection of SNP TSC0043643
gatgtttggtgtt

SEQ ID NO: 175698 - DNA, 13 bp, Artificial Sequence
  Oligonucleotide for detection of SNP TSC0043643
aacaccaaacatc

SEQ ID NO: 175699 - DNA, 13 bp, Artificial Sequence
  Oligonucleotide for detection of SNP TSC0043643
gatgttcggtgtt

SEQ ID NO: 175700 - DNA, 13 bp, Artificial Sequence
  Oligonucleotide for detection of SNP TSC0043643
aacaccgaacatc

SEQ ID NO: 175701 - DNA, 13 bp, Artificial Sequence
  Oligonucleotide for detection of SNP TSC0004576
gttggattgttgt

SEQ ID NO: 175702 - DNA, 13 bp, Artificial Sequence
  Oligonucleotide for detection of SNP TSC0004576
acaacaatccaac

SEQ ID NO: 175703 - DNA, 13 bp, Artificial Sequence
  Oligonucleotide for detection of SNP TSC0004576
gttggagtgttgt

SEQ ID NO: 175704 - DNA, 13 bp, Artificial Sequence
  Oligonucleotide for detection of SNP TSC0004576
acaacactccaac

SEQ ID NO: 175705 - DNA, 13 bp, Artificial Sequence
  Oligonucleotide for detection of SNP TSC0004576
gttggattgtcgt

SEQ ID NO: 175706 - DNA, 13 bp, Artificial Sequence
  Oligonucleotide for detection of SNP TSC0004576
acgacaatccaac

SEQ ID NO: 175707 - DNA, 13 bp, Artificial Sequence
  Oligonucleotide for detection of SNP TSC0004576
gttggagtgtcgt

SEQ ID NO: 175708 - DNA, 13 bp, Artificial Sequence
  Oligonucleotide for detection of SNP TSC0004576
acgacactccaac

SEQ ID NO: 175709 - DNA, 13 bp, Artificial Sequence
  Oligonucleotide for detection of SNP TSC0004576
atggtagtttagy

SEQ ID NO: 175710 - DNA, 13 bp, Artificial Sequence
  Oligonucleotide for detection of SNP TSC0004576
rctaaactaccat

SEQ ID NO: 175711 - DNA, 13 bp, Artificial Sequence
  Oligonucleotide for detection of SNP TSC0004576
atggtattttagy

SEQ ID NO: 175712 - DNA, 13 bp, Artificial Sequence
  Oligonucleotide for detection of SNP TSC0004576
rctaaaataccat

SEQ ID NO: 175713 - DNA, 13 bp, Artificial Sequence
  Oligonucleotide for detection of SNP TSC0004576
acggtagtttagy

SEQ ID NO: 175714 - DNA, 13 bp, Artificial Sequence
  Oligonucleotide for detection of SNP TSC0004576
rctaaactaccgt

SEQ ID NO: 175715 - DNA, 13 bp, Artificial Sequence
  Oligonucleotide for detection of SNP TSC0004576
acggtattttagy

SEQ ID NO: 175716 - DNA, 13 bp, Artificial Sequence
  Oligonucleotide for detection of SNP TSC0004576
rctaaaataccgt

SEQ ID NO: 175717 - DNA, 13 bp, Artificial Sequence
  Oligonucleotide for detection of SNP TSC0004577
tttgtcgggttgt

SEQ ID NO: 175718 - DNA, 13 bp, Artificial Sequence
  Oligonucleotide for detection of SNP TSC0004577
acaacccgacaaa

SEQ ID NO: 175719 - DNA, 13 bp, Artificial Sequence
  Oligonucleotide for detection of SNP TSC0004577
atagtttggtaaa

SEQ ID NO: 175720 - DNA, 13 bp, Artificial Sequence
  Oligonucleotide for detection of SNP TSC0004577
tttaccaaactat

SEQ ID NO: 175721 - DNA, 13 bp, Artificial Sequence
  Oligonucleotide for detection of SNP TSC0004577
atagttcggtaaa

SEQ ID NO: 175722 - DNA, 13 bp, Artificial Sequence
  Oligonucleotide for detection of SNP TSC0004577
tttaccgaactat

SEQ ID NO: 175723 - DNA, 13 bp, Artificial Sequence
  Oligonucleotide for detection of SNP TSC0043644
ttttgttagttgt

SEQ ID NO: 175724 - DNA, 13 bp, Artificial Sequence
  Oligonucleotide for detection of SNP TSC0043644
acaactaacaaaa

SEQ ID NO: 175725 - DNA, 13 bp, Artificial Sequence
  Oligonucleotide for detection of SNP TSC0043644
ttttgtgagttgt

SEQ ID NO: 175726 - DNA, 13 bp, Artificial Sequence
  Oligonucleotide for detection of SNP TSC0043644
acaactcacaaaa

SEQ ID NO: 175727 - DNA, 13 bp, Artificial Sequence
  Oligonucleotide for detection of SNP TSC0043644
ttttgcgagttgt

SEQ ID NO: 175728 - DNA, 13 bp, Artificial Sequence
  Oligonucleotide for detection of SNP TSC0043644
acaactcgcaaaa

SEQ ID NO: 175729 - DNA, 13 bp, Artificial Sequence
  Oligonucleotide for detection of SNP TSC0043644
atagttggtagga

SEQ ID NO: 175730 - DNA, 13 bp, Artificial Sequence
  Oligonucleotide for detection of SNP TSC0043644
tcctaccaactat

SEQ ID NO: 175731 - DNA, 13 bp, Artificial Sequence
  Oligonucleotide for detection of SNP TSC0043644
atagtttgtagga

SEQ ID NO: 175732 - DNA, 13 bp, Artificial Sequence
  Oligonucleotide for detection of SNP TSC0043644
tcctacaaactat

SEQ ID NO: 175733 - DNA, 13 bp, Artificial Sequence
  Oligonucleotide for detection of SNP TSC0043644
atagttcgtagga

SEQ ID NO: 175734 - DNA, 13 bp, Artificial Sequence
  Oligonucleotide for detection of SNP TSC0043644
tcctacgaactat

SEQ ID NO: 175735 - DNA, 13 bp, Artificial Sequence
  Oligonucleotide for detection of SNP TSC0043645
aataaatatatag

SEQ ID NO: 175736 - DNA, 13 bp, Artificial Sequence
  Oligonucleotide for detection of SNP TSC0043645
ctatatatttatt

SEQ ID NO: 175737 - DNA, 13 bp, Artificial Sequence
  Oligonucleotide for detection of SNP TSC0043645
aataaagatatag

SEQ ID NO: 175738 - DNA, 13 bp, Artificial Sequence
  Oligonucleotide for detection of SNP TSC0043645
ctatatctttatt

SEQ ID NO: 175739 - DNA, 13 bp, Artificial Sequence
  Oligonucleotide for detection of SNP TSC0043645
ttgtgtgtttgtt

SEQ ID NO: 175740 - DNA, 13 bp, Artificial Sequence
  Oligonucleotide for detection of SNP TSC0043645
aacaaacacacaa

SEQ ID NO: 175741 - DNA, 13 bp, Artificial Sequence
  Oligonucleotide for detection of SNP TSC0043645
ttgtgtttttgtt

SEQ ID NO: 175742 - DNA, 13 bp, Artificial Sequence
  Oligonucleotide for detection of SNP TSC0043645
aacaaaaacacaa

SEQ ID NO: 175743 - DNA, 13 bp, Artificial Sequence
  Oligonucleotide for detection of SNP TSC0043647
agtggttgtagtt

SEQ ID NO: 175744 - DNA, 13 bp, Artificial Sequence
  Oligonucleotide for detection of SNP TSC0043647
aactacaaccact

SEQ ID NO: 175745 - DNA, 13 bp, Artificial Sequence
  Oligonucleotide for detection of SNP TSC0043647
agtggtcgtagtt

SEQ ID NO: 175746 - DNA, 13 bp, Artificial Sequence
  Oligonucleotide for detection of SNP TSC0043647
aactacgaccact

SEQ ID NO: 175747 - DNA, 13 bp, Artificial Sequence
  Oligonucleotide for detection of SNP TSC0043647
aattatggttatt

SEQ ID NO: 175748 - DNA, 13 bp, Artificial Sequence
  Oligonucleotide for detection of SNP TSC0043647
aataaccataatt

SEQ ID NO: 175749 - DNA, 13 bp, Artificial Sequence
  Oligonucleotide for detection of SNP TSC0043647
aattatagttatt

SEQ ID NO: 175750 - DNA, 13 bp, Artificial Sequence
  Oligonucleotide for detection of SNP TSC0043647
aataactataatt

SEQ ID NO: 175751 - DNA, 13 bp, Artificial Sequence
  Oligonucleotide for detection of SNP TSC0043647
aattacggttatt

SEQ ID NO: 175752 - DNA, 13 bp, Artificial Sequence
  Oligonucleotide for detection of SNP TSC0043647
aataaccgtaatt

SEQ ID NO: 175753 - DNA, 13 bp, Artificial Sequence
  Oligonucleotide for detection of SNP TSC0043648
atgagatgtgttt

SEQ ID NO: 175754 - DNA, 13 bp, Artificial Sequence
  Oligonucleotide for detection of SNP TSC0043648
aaacacatctcat

SEQ ID NO: 175755 - DNA, 13 bp, Artificial Sequence
  Oligonucleotide for detection of SNP TSC0043648
atgagacgtgttt

SEQ ID NO: 175756 - DNA, 13 bp, Artificial Sequence
  Oligonucleotide for detection of SNP TSC0043648
aaacacgtctcat

SEQ ID NO: 175757 - DNA, 13 bp, Artificial Sequence
  Oligonucleotide for detection of SNP TSC0043648
aggtatgttttat

SEQ ID NO: 175758 - DNA, 13 bp, Artificial Sequence
  Oligonucleotide for detection of SNP TSC0043648
ataaaacatacct

SEQ ID NO: 175759 - DNA, 13 bp, Artificial Sequence
  Oligonucleotide for detection of SNP TSC0043648
aggtatattttat

SEQ ID NO: 175760 - DNA, 13 bp, Artificial Sequence
  Oligonucleotide for detection of SNP TSC0043648
ataaaatatacct

SEQ ID NO: 175761 - DNA, 13 bp, Artificial Sequence
  Oligonucleotide for detection of SNP TSC0043648
aggtacgttttat

SEQ ID NO: 175762 - DNA, 13 bp, Artificial Sequence
  Oligonucleotide for detection of SNP TSC0043648
ataaaacgtacct

SEQ ID NO: 175763 - DNA, 13 bp, Artificial Sequence
  Oligonucleotide for detection of SNP TSC0043651
tggaagtgtagty

SEQ ID NO: 175764 - DNA, 13 bp, Artificial Sequence
  Oligonucleotide for detection of SNP TSC0043651
ractacacttcca

SEQ ID NO: 175765 - DNA, 13 bp, Artificial Sequence
  Oligonucleotide for detection of SNP TSC0043651
tggaagcgtagty

SEQ ID NO: 175766 - DNA, 13 bp, Artificial Sequence
  Oligonucleotide for detection of SNP TSC0043651
ractacgcttcca

SEQ ID NO: 175767 - DNA, 13 bp, Artificial Sequence
  Oligonucleotide for detection of SNP TSC0043652
tggttttgggaag

SEQ ID NO: 175768 - DNA, 13 bp, Artificial Sequence
  Oligonucleotide for detection of SNP TSC0043652
cttcccaaaacca

SEQ ID NO: 175769 - DNA, 13 bp, Artificial Sequence
  Oligonucleotide for detection of SNP TSC0043652
tggtttcgggaag

SEQ ID NO: 175770 - DNA, 13 bp, Artificial Sequence
  Oligonucleotide for detection of SNP TSC0043652
cttcccgaaacca

SEQ ID NO: 175771 - DNA, 13 bp, Artificial Sequence
  Oligonucleotide for detection of SNP TSC0043652
tttttcgaagtta

SEQ ID NO: 175772 - DNA, 13 bp, Artificial Sequence
  Oligonucleotide for detection of SNP TSC0043652
taacttcgaaaaa

SEQ ID NO: 175773 - DNA, 13 bp, Artificial Sequence
  Oligonucleotide for detection of SNP TSC0043654
gaaggtgtttttt

SEQ ID NO: 175774 - DNA, 13 bp, Artificial Sequence
  Oligonucleotide for detection of SNP TSC0043654
aaaaaacaccttc

SEQ ID NO: 175775 - DNA, 13 bp, Artificial Sequence
  Oligonucleotide for detection of SNP TSC0043654
gaaggcgtttttt

SEQ ID NO: 175776 - DNA, 13 bp, Artificial Sequence
  Oligonucleotide for detection of SNP TSC0043654
aaaaaacgccttc

SEQ ID NO: 175777 - DNA, 13 bp, Artificial Sequence
  Oligonucleotide for detection of SNP TSC0043654
aagaggtgtttty

SEQ ID NO: 175778 - DNA, 13 bp, Artificial Sequence
  Oligonucleotide for detection of SNP TSC0043654
raaaacacctctt

SEQ ID NO: 175779 - DNA, 13 bp, Artificial Sequence
  Oligonucleotide for detection of SNP TSC0043654
aagaggcgtttty

SEQ ID NO: 175780 - DNA, 13 bp, Artificial Sequence
  Oligonucleotide for detection of SNP TSC0043654
raaaacgcctctt

SEQ ID NO: 175781 - DNA, 13 bp, Artificial Sequence
  Oligonucleotide for detection of SNP TSC0043655
tttattaaaaaga

SEQ ID NO: 175782 - DNA, 13 bp, Artificial Sequence
  Oligonucleotide for detection of SNP TSC0043655
tctttttaataaa

SEQ ID NO: 175783 - DNA, 13 bp, Artificial Sequence
  Oligonucleotide for detection of SNP TSC0043655
tttatttaaaaga

SEQ ID NO: 175784 - DNA, 13 bp, Artificial Sequence
  Oligonucleotide for detection of SNP TSC0043655
tcttttaaataaa

SEQ ID NO: 175785 - DNA, 13 bp, Artificial Sequence
  Oligonucleotide for detection of SNP TSC0043655
tttttttaatagg

SEQ ID NO: 175786 - DNA, 13 bp, Artificial Sequence
  Oligonucleotide for detection of SNP TSC0043655
cctattaaaaaaa

SEQ ID NO: 175787 - DNA, 13 bp, Artificial Sequence
  Oligonucleotide for detection of SNP TSC0043655
ttttttaaatagg

SEQ ID NO: 175788 - DNA, 13 bp, Artificial Sequence
  Oligonucleotide for detection of SNP TSC0043655
cctatttaaaaaa

SEQ ID NO: 175789 - DNA, 13 bp, Artificial Sequence
  Oligonucleotide for detection of SNP TSC0006941
ttaattgtttaty

SEQ ID NO: 175790 - DNA, 13 bp, Artificial Sequence
  Oligonucleotide for detection of SNP TSC0006941
rataaacaattaa

SEQ ID NO: 175791 - DNA, 13 bp, Artificial Sequence
  Oligonucleotide for detection of SNP TSC0006941
ttaattatttaty

SEQ ID NO: 175792 - DNA, 13 bp, Artificial Sequence
  Oligonucleotide for detection of SNP TSC0006941
rataaataattaa

SEQ ID NO: 175793 - DNA, 13 bp, Artificial Sequence
  Oligonucleotide for detection of SNP TSC0043656
ttaaagagtgtta

SEQ ID NO: 175794 - DNA, 13 bp, Artificial Sequence
  Oligonucleotide for detection of SNP TSC0043656
taacactctttaa

SEQ ID NO: 175795 - DNA, 13 bp, Artificial Sequence
  Oligonucleotide for detection of SNP TSC0043656
ttaaagggtgtta

SEQ ID NO: 175796 - DNA, 13 bp, Artificial Sequence
  Oligonucleotide for detection of SNP TSC0043656
taacaccctttaa

SEQ ID NO: 175797 - DNA, 13 bp, Artificial Sequence
  Oligonucleotide for detection of SNP TSC0043657
attattatttaat

SEQ ID NO: 175798 - DNA, 13 bp, Artificial Sequence
  Oligonucleotide for detection of SNP TSC0043657
attaaataataat

SEQ ID NO: 175799 - DNA, 13 bp, Artificial Sequence
  Oligonucleotide for detection of SNP TSC0043657
attattttttaat

SEQ ID NO: 175800 - DNA, 13 bp, Artificial Sequence
  Oligonucleotide for detection of SNP TSC0043657
attaaaaaataat

SEQ ID NO: 175801 - DNA, 13 bp, Artificial Sequence
  Oligonucleotide for detection of SNP TSC0043657
attaagtaatggt

SEQ ID NO: 175802 - DNA, 13 bp, Artificial Sequence
  Oligonucleotide for detection of SNP TSC0043657
accattacttaat

SEQ ID NO: 175803 - DNA, 13 bp, Artificial Sequence
  Oligonucleotide for detection of SNP TSC0043657
attaaggaatggt

SEQ ID NO: 175804 - DNA, 13 bp, Artificial Sequence
  Oligonucleotide for detection of SNP TSC0043657
accattccttaat

SEQ ID NO: 175805 - DNA, 13 bp, Artificial Sequence
  Oligonucleotide for detection of SNP TSC0043659
ttttattagaaaa

SEQ ID NO: 175806 - DNA, 13 bp, Artificial Sequence
  Oligonucleotide for detection of SNP TSC0043659
ttttctaataaaa

SEQ ID NO: 175807 - DNA, 13 bp, Artificial Sequence
  Oligonucleotide for detection of SNP TSC0043661
aaaaaaataataa

SEQ ID NO: 175808 - DNA, 13 bp, Artificial Sequence
  Oligonucleotide for detection of SNP TSC0043661
ttattattttttt

SEQ ID NO: 175809 - DNA, 13 bp, Artificial Sequence
  Oligonucleotide for detection of SNP TSC0043661
aaaaaattaataa

SEQ ID NO: 175810 - DNA, 13 bp, Artificial Sequence
  Oligonucleotide for detection of SNP TSC0043661
ttattaatttttt

SEQ ID NO: 175811 - DNA, 13 bp, Artificial Sequence
  Oligonucleotide for detection of SNP TSC0043661
ttattagtttttt

SEQ ID NO: 175812 - DNA, 13 bp, Artificial Sequence
  Oligonucleotide for detection of SNP TSC0043661
aaaaaactaataa

SEQ ID NO: 175813 - DNA, 13 bp, Artificial Sequence
  Oligonucleotide for detection of SNP TSC0043663
gtttgtattgtgt

SEQ ID NO: 175814 - DNA, 13 bp, Artificial Sequence
  Oligonucleotide for detection of SNP TSC0043663
acacaatacaaac

SEQ ID NO: 175815 - DNA, 13 bp, Artificial Sequence
  Oligonucleotide for detection of SNP TSC0043663
gtttgtgttgtgt

SEQ ID NO: 175816 - DNA, 13 bp, Artificial Sequence
  Oligonucleotide for detection of SNP TSC0043663
acacaacacaaac

SEQ ID NO: 175817 - DNA, 13 bp, Artificial Sequence
  Oligonucleotide for detection of SNP TSC0043663
gtttgcgttgtgt

SEQ ID NO: 175818 - DNA, 13 bp, Artificial Sequence
  Oligonucleotide for detection of SNP TSC0043663
acacaacgcaaac

SEQ ID NO: 175819 - DNA, 13 bp, Artificial Sequence
  Oligonucleotide for detection of SNP TSC0043663
atatagtgtaggy

SEQ ID NO: 175820 - DNA, 13 bp, Artificial Sequence
  Oligonucleotide for detection of SNP TSC0043663
rcctacactatat

SEQ ID NO: 175821 - DNA, 13 bp, Artificial Sequence
  Oligonucleotide for detection of SNP TSC0043663
atatagcgtaggy

SEQ ID NO: 175822 - DNA, 13 bp, Artificial Sequence
  Oligonucleotide for detection of SNP TSC0043663
rcctacgctatat

SEQ ID NO: 175823 - DNA, 13 bp, Artificial Sequence
  Oligonucleotide for detection of SNP TSC0043664
gaaagtattagty

SEQ ID NO: 175824 - DNA, 13 bp, Artificial Sequence
  Oligonucleotide for detection of SNP TSC0043664
ractaatactttc

SEQ ID NO: 175825 - DNA, 13 bp, Artificial Sequence
  Oligonucleotide for detection of SNP TSC0043664
gaaagttttagty

SEQ ID NO: 175826 - DNA, 13 bp, Artificial Sequence
  Oligonucleotide for detection of SNP TSC0043664
ractaaaactttc

SEQ ID NO: 175827 - DNA, 13 bp, Artificial Sequence
  Oligonucleotide for detection of SNP TSC0043664
ggttggtgtttty

SEQ ID NO: 175828 - DNA, 13 bp, Artificial Sequence
  Oligonucleotide for detection of SNP TSC0043664
raaaacaccaacc

SEQ ID NO: 175829 - DNA, 13 bp, Artificial Sequence
  Oligonucleotide for detection of SNP TSC0043664
ggttggggtttty

SEQ ID NO: 175830 - DNA, 13 bp, Artificial Sequence
  Oligonucleotide for detection of SNP TSC0043664
raaaaccccaacc

SEQ ID NO: 175831 - DNA, 13 bp, Artificial Sequence
  Oligonucleotide for detection of SNP TSC0043668
ttttttatgtaat

SEQ ID NO: 175832 - DNA, 13 bp, Artificial Sequence
  Oligonucleotide for detection of SNP TSC0043668
attacataaaaaa

SEQ ID NO: 175833 - DNA, 13 bp, Artificial Sequence
  Oligonucleotide for detection of SNP TSC0043668
ttttttgtgtaat

SEQ ID NO: 175834 - DNA, 13 bp, Artificial Sequence
  Oligonucleotide for detection of SNP TSC0043668
attacacaaaaaa

SEQ ID NO: 175835 - DNA, 13 bp, Artificial Sequence
  Oligonucleotide for detection of SNP TSC0043668
tttttcgtgtaat

SEQ ID NO: 175836 - DNA, 13 bp, Artificial Sequence
  Oligonucleotide for detection of SNP TSC0043668
attacacgaaaaa

SEQ ID NO: 175837 - DNA, 13 bp, Artificial Sequence
  Oligonucleotide for detection of SNP TSC0043668
attatatggggag

SEQ ID NO: 175838 - DNA, 13 bp, Artificial Sequence
  Oligonucleotide for detection of SNP TSC0043668
ctccccatataat

SEQ ID NO: 175839 - DNA, 13 bp, Artificial Sequence
  Oligonucleotide for detection of SNP TSC0043668
attatacggggag

SEQ ID NO: 175840 - DNA, 13 bp, Artificial Sequence
  Oligonucleotide for detection of SNP TSC0043668
ctccccgtataat

SEQ ID NO: 175841 - DNA, 13 bp, Artificial Sequence
  Oligonucleotide for detection of SNP TSC0043669
gagtaaattaaaa

SEQ ID NO: 175842 - DNA, 13 bp, Artificial Sequence
  Oligonucleotide for detection of SNP TSC0043669
ttttaatttactc

SEQ ID NO: 175843 - DNA, 13 bp, Artificial Sequence
  Oligonucleotide for detection of SNP TSC0043669
gagtaatttaaaa

SEQ ID NO: 175844 - DNA, 13 bp, Artificial Sequence
  Oligonucleotide for detection of SNP TSC0043669
ttttaaattactc

SEQ ID NO: 175845 - DNA, 13 bp, Artificial Sequence
  Oligonucleotide for detection of SNP TSC0043669
ttttaatttatty

SEQ ID NO: 175846 - DNA, 13 bp, Artificial Sequence
  Oligonucleotide for detection of SNP TSC0043669
raataaattaaaa

SEQ ID NO: 175847 - DNA, 13 bp, Artificial Sequence
  Oligonucleotide for detection of SNP TSC0043669
ttttaaattatty

SEQ ID NO: 175848 - DNA, 13 bp, Artificial Sequence
  Oligonucleotide for detection of SNP TSC0043669
raataatttaaaa

SEQ ID NO: 175849 - DNA, 13 bp, Artificial Sequence
  Oligonucleotide for detection of SNP TSC0043670
ggtgtattggtty

SEQ ID NO: 175850 - DNA, 13 bp, Artificial Sequence
  Oligonucleotide for detection of SNP TSC0043670
raaccaatacacc

SEQ ID NO: 175851 - DNA, 13 bp, Artificial Sequence
  Oligonucleotide for detection of SNP TSC0043670
ggtgtagtggtty

SEQ ID NO: 175852 - DNA, 13 bp, Artificial Sequence
  Oligonucleotide for detection of SNP TSC0043670
raaccactacacc

SEQ ID NO: 175853 - DNA, 13 bp, Artificial Sequence
  Oligonucleotide for detection of SNP TSC0043670
gagttaatgtaty

SEQ ID NO: 175854 - DNA, 13 bp, Artificial Sequence
  Oligonucleotide for detection of SNP TSC0043670
ratacattaactc

SEQ ID NO: 175855 - DNA, 13 bp, Artificial Sequence
  Oligonucleotide for detection of SNP TSC0043670
gagttattgtaty

SEQ ID NO: 175856 - DNA, 13 bp, Artificial Sequence
  Oligonucleotide for detection of SNP TSC0043670
ratacaataactc

SEQ ID NO: 175857 - DNA, 13 bp, Artificial Sequence
  Oligonucleotide for detection of SNP TSC0043672
ttatgtatgtttg

SEQ ID NO: 175858 - DNA, 13 bp, Artificial Sequence
  Oligonucleotide for detection of SNP TSC0043672
caaacatacataa

SEQ ID NO: 175859 - DNA, 13 bp, Artificial Sequence
  Oligonucleotide for detection of SNP TSC0043672
ttatgtgtgtttg

SEQ ID NO: 175860 - DNA, 13 bp, Artificial Sequence
  Oligonucleotide for detection of SNP TSC0043672
caaacacacataa

SEQ ID NO: 175861 - DNA, 13 bp, Artificial Sequence
  Oligonucleotide for detection of SNP TSC0043672
ttatgcgtgtttg

SEQ ID NO: 175862 - DNA, 13 bp, Artificial Sequence
  Oligonucleotide for detection of SNP TSC0043672
caaacacgcataa

SEQ ID NO: 175863 - DNA, 13 bp, Artificial Sequence
  Oligonucleotide for detection of SNP TSC0043672
taaatatgtatga

SEQ ID NO: 175864 - DNA, 13 bp, Artificial Sequence
  Oligonucleotide for detection of SNP TSC0043672
tcatacatattta

SEQ ID NO: 175865 - DNA, 13 bp, Artificial Sequence
  Oligonucleotide for detection of SNP TSC0043672
taaatacgtatga

SEQ ID NO: 175866 - DNA, 13 bp, Artificial Sequence
  Oligonucleotide for detection of SNP TSC0043672
tcatacgtattta

SEQ ID NO: 175867 - DNA, 13 bp, Artificial Sequence
  Oligonucleotide for detection of SNP TSC0005067
gtatgtagtggtt

SEQ ID NO: 175868 - DNA, 13 bp, Artificial Sequence
  Oligonucleotide for detection of SNP TSC0005067
aaccactacatac

SEQ ID NO: 175869 - DNA, 13 bp, Artificial Sequence
  Oligonucleotide for detection of SNP TSC0005067
gtatgtggtggtt

SEQ ID NO: 175870 - DNA, 13 bp, Artificial Sequence
  Oligonucleotide for detection of SNP TSC0005067
aaccaccacatac

SEQ ID NO: 175871 - DNA, 13 bp, Artificial Sequence
  Oligonucleotide for detection of SNP TSC0005067
gtatgtagcggtt

SEQ ID NO: 175872 - DNA, 13 bp, Artificial Sequence
  Oligonucleotide for detection of SNP TSC0005067
aaccgctacatac

SEQ ID NO: 175873 - DNA, 13 bp, Artificial Sequence
  Oligonucleotide for detection of SNP TSC0005067
gtatgtggcggtt

SEQ ID NO: 175874 - DNA, 13 bp, Artificial Sequence
  Oligonucleotide for detection of SNP TSC0005067
aaccgccacatac

SEQ ID NO: 175875 - DNA, 13 bp, Artificial Sequence
  Oligonucleotide for detection of SNP TSC0043673
ttatttataatat

SEQ ID NO: 175876 - DNA, 13 bp, Artificial Sequence
  Oligonucleotide for detection of SNP TSC0043673
atattataaataa

SEQ ID NO: 175877 - DNA, 13 bp, Artificial Sequence
  Oligonucleotide for detection of SNP TSC0043673
ttatttttaatat

SEQ ID NO: 175878 - DNA, 13 bp, Artificial Sequence
  Oligonucleotide for detection of SNP TSC0043673
atattaaaaataa

SEQ ID NO: 175879 - DNA, 13 bp, Artificial Sequence
  Oligonucleotide for detection of SNP TSC0043673
atattataagtaa

SEQ ID NO: 175880 - DNA, 13 bp, Artificial Sequence
  Oligonucleotide for detection of SNP TSC0043673
ttacttataatat

SEQ ID NO: 175881 - DNA, 13 bp, Artificial Sequence
  Oligonucleotide for detection of SNP TSC0043673
atattagaagtaa

SEQ ID NO: 175882 - DNA, 13 bp, Artificial Sequence
  Oligonucleotide for detection of SNP TSC0043673
ttacttctaatat

SEQ ID NO: 175883 - DNA, 13 bp, Artificial Sequence
  Oligonucleotide for detection of SNP TSC0043675
taaaatgatggta

SEQ ID NO: 175884 - DNA, 13 bp, Artificial Sequence
  Oligonucleotide for detection of SNP TSC0043675
taccatcatttta

SEQ ID NO: 175885 - DNA, 13 bp, Artificial Sequence
  Oligonucleotide for detection of SNP TSC0043675
taaaataatggta

SEQ ID NO: 175886 - DNA, 13 bp, Artificial Sequence
  Oligonucleotide for detection of SNP TSC0043675
taccattatttta

SEQ ID NO: 175887 - DNA, 13 bp, Artificial Sequence
  Oligonucleotide for detection of SNP TSC0043679
agagattgaaaat

SEQ ID NO: 175888 - DNA, 13 bp, Artificial Sequence
  Oligonucleotide for detection of SNP TSC0043679
attttcaatctct

SEQ ID NO: 175889 - DNA, 13 bp, Artificial Sequence
  Oligonucleotide for detection of SNP TSC0043679
agagatagaaaat

SEQ ID NO: 175890 - DNA, 13 bp, Artificial Sequence
  Oligonucleotide for detection of SNP TSC0043679
attttctatctct

SEQ ID NO: 175891 - DNA, 13 bp, Artificial Sequence
  Oligonucleotide for detection of SNP TSC0043680
ggagaagatagag

SEQ ID NO: 175892 - DNA, 13 bp, Artificial Sequence
  Oligonucleotide for detection of SNP TSC0043680
ctctatcttctcc

SEQ ID NO: 175893 - DNA, 13 bp, Artificial Sequence
  Oligonucleotide for detection of SNP TSC0043680
ggagaaaatagag

SEQ ID NO: 175894 - DNA, 13 bp, Artificial Sequence
  Oligonucleotide for detection of SNP TSC0043680
ctctattttctcc

SEQ ID NO: 175895 - DNA, 13 bp, Artificial Sequence
  Oligonucleotide for detection of SNP TSC0043681
ttagagatagatg

SEQ ID NO: 175896 - DNA, 13 bp, Artificial Sequence
  Oligonucleotide for detection of SNP TSC0043681
catctatctctaa

SEQ ID NO: 175897 - DNA, 13 bp, Artificial Sequence
  Oligonucleotide for detection of SNP TSC0043681
ttagaggtagatg

SEQ ID NO: 175898 - DNA, 13 bp, Artificial Sequence
  Oligonucleotide for detection of SNP TSC0043681
catctacctctaa

SEQ ID NO: 175899 - DNA, 13 bp, Artificial Sequence
  Oligonucleotide for detection of SNP TSC0043681
ttagagatagacg

SEQ ID NO: 175900 - DNA, 13 bp, Artificial Sequence
  Oligonucleotide for detection of SNP TSC0043681
cgtctatctctaa

SEQ ID NO: 175901 - DNA, 13 bp, Artificial Sequence
  Oligonucleotide for detection of SNP TSC0043681
ttagaggtagacg

SEQ ID NO: 175902 - DNA, 13 bp, Artificial Sequence
  Oligonucleotide for detection of SNP TSC0043681
cgtctacctctaa

SEQ ID NO: 175903 - DNA, 13 bp, Artificial Sequence
  Oligonucleotide for detection of SNP TSC0043682
tggtatatacgtg

SEQ ID NO: 175904 - DNA, 13 bp, Artificial Sequence
  Oligonucleotide for detection of SNP TSC0043682
cacgtatatacca

SEQ ID NO: 175905 - DNA, 13 bp, Artificial Sequence
  Oligonucleotide for detection of SNP TSC0043682
tggtacgtatgtg

SEQ ID NO: 175906 - DNA, 13 bp, Artificial Sequence
  Oligonucleotide for detection of SNP TSC0043682
cacatacgtacca

SEQ ID NO: 175907 - DNA, 13 bp, Artificial Sequence
  Oligonucleotide for detection of SNP TSC0043682
tggtatgtacgtg

SEQ ID NO: 175908 - DNA, 13 bp, Artificial Sequence
  Oligonucleotide for detection of SNP TSC0043682
cacgtacatacca

SEQ ID NO: 175909 - DNA, 13 bp, Artificial Sequence
  Oligonucleotide for detection of SNP TSC0043682
tggtacgtacgtg

SEQ ID NO: 175910 - DNA, 13 bp, Artificial Sequence
  Oligonucleotide for detection of SNP TSC0043682
cacgtacgtacca

SEQ ID NO: 175911 - DNA, 13 bp, Artificial Sequence
  Oligonucleotide for detection of SNP TSC0043682
tatgtatgtgtta

SEQ ID NO: 175912 - DNA, 13 bp, Artificial Sequence
  Oligonucleotide for detection of SNP TSC0043682
taacacatacata

SEQ ID NO: 175913 - DNA, 13 bp, Artificial Sequence
  Oligonucleotide for detection of SNP TSC0043682
tacgtatgtgtta

SEQ ID NO: 175914 - DNA, 13 bp, Artificial Sequence
  Oligonucleotide for detection of SNP TSC0043682
taacacatacgta

SEQ ID NO: 175915 - DNA, 13 bp, Artificial Sequence
  Oligonucleotide for detection of SNP TSC0043682
tatgtacgtgtta

SEQ ID NO: 175916 - DNA, 13 bp, Artificial Sequence
  Oligonucleotide for detection of SNP TSC0043682
taacacgtacata

SEQ ID NO: 175917 - DNA, 13 bp, Artificial Sequence
  Oligonucleotide for detection of SNP TSC0043682
tacgtacgtgtta

SEQ ID NO: 175918 - DNA, 13 bp, Artificial Sequence
  Oligonucleotide for detection of SNP TSC0043682
taacacgtacgta

SEQ ID NO: 175919 - DNA, 13 bp, Artificial Sequence
  Oligonucleotide for detection of SNP TSC0043683
tttttgggtagtt

SEQ ID NO: 175920 - DNA, 13 bp, Artificial Sequence
  Oligonucleotide for detection of SNP TSC0043683
aactacccaaaaa

SEQ ID NO: 175921 - DNA, 13 bp, Artificial Sequence
  Oligonucleotide for detection of SNP TSC0043684
taatttgtttttg

SEQ ID NO: 175922 - DNA, 13 bp, Artificial Sequence
  Oligonucleotide for detection of SNP TSC0043684
caaaaacaaatta

SEQ ID NO: 175923 - DNA, 13 bp, Artificial Sequence
  Oligonucleotide for detection of SNP TSC0043684
taatttatttttg

SEQ ID NO: 175924 - DNA, 13 bp, Artificial Sequence
  Oligonucleotide for detection of SNP TSC0043684
caaaaataaatta

SEQ ID NO: 175925 - DNA, 13 bp, Artificial Sequence
  Oligonucleotide for detection of SNP TSC0043684
taatttgttttcg

SEQ ID NO: 175926 - DNA, 13 bp, Artificial Sequence
  Oligonucleotide for detection of SNP TSC0043684
cgaaaacaaatta

SEQ ID NO: 175927 - DNA, 13 bp, Artificial Sequence
  Oligonucleotide for detection of SNP TSC0043684
taatttattttcg

SEQ ID NO: 175928 - DNA, 13 bp, Artificial Sequence
  Oligonucleotide for detection of SNP TSC0043684
cgaaaataaatta

SEQ ID NO: 175929 - DNA, 13 bp, Artificial Sequence
  Oligonucleotide for detection of SNP TSC0043685
tttttaagagttg

SEQ ID NO: 175930 - DNA, 13 bp, Artificial Sequence
  Oligonucleotide for detection of SNP TSC0043685
caactcttaaaaa

SEQ ID NO: 175931 - DNA, 13 bp, Artificial Sequence
  Oligonucleotide for detection of SNP TSC0043685
tttttaggagttg

SEQ ID NO: 175932 - DNA, 13 bp, Artificial Sequence
  Oligonucleotide for detection of SNP TSC0043685
caactcctaaaaa

SEQ ID NO: 175933 - DNA, 13 bp, Artificial Sequence
  Oligonucleotide for detection of SNP TSC0043686
taagtattaaggg

SEQ ID NO: 175934 - DNA, 13 bp, Artificial Sequence
  Oligonucleotide for detection of SNP TSC0043686
cccttaatactta

SEQ ID NO: 175935 - DNA, 13 bp, Artificial Sequence
  Oligonucleotide for detection of SNP TSC0043686
taagtagtaaggg

SEQ ID NO: 175936 - DNA, 13 bp, Artificial Sequence
  Oligonucleotide for detection of SNP TSC0043686
cccttactactta

SEQ ID NO: 175937 - DNA, 13 bp, Artificial Sequence
  Oligonucleotide for detection of SNP TSC0043687
attttaatgtttg

SEQ ID NO: 175938 - DNA, 13 bp, Artificial Sequence
  Oligonucleotide for detection of SNP TSC0043687
caaacattaaaat

SEQ ID NO: 175939 - DNA, 13 bp, Artificial Sequence
  Oligonucleotide for detection of SNP TSC0043687
attttagtgtttg

SEQ ID NO: 175940 - DNA, 13 bp, Artificial Sequence
  Oligonucleotide for detection of SNP TSC0043687
caaacactaaaat

SEQ ID NO: 175941 - DNA, 13 bp, Artificial Sequence
  Oligonucleotide for detection of SNP TSC0043688
ggataaatttaaa

SEQ ID NO: 175942 - DNA, 13 bp, Artificial Sequence
  Oligonucleotide for detection of SNP TSC0043688
tttaaatttatcc

SEQ ID NO: 175943 - DNA, 13 bp, Artificial Sequence
  Oligonucleotide for detection of SNP TSC0043688
ggataagtttaaa

SEQ ID NO: 175944 - DNA, 13 bp, Artificial Sequence
  Oligonucleotide for detection of SNP TSC0043688
tttaaacttatcc

SEQ ID NO: 175945 - DNA, 13 bp, Artificial Sequence
  Oligonucleotide for detection of SNP TSC0043689
aaattaattttga

SEQ ID NO: 175946 - DNA, 13 bp, Artificial Sequence
  Oligonucleotide for detection of SNP TSC0043689
tcaaaattaattt

SEQ ID NO: 175947 - DNA, 13 bp, Artificial Sequence
  Oligonucleotide for detection of SNP TSC0043689
aaattagttttga

SEQ ID NO: 175948 - DNA, 13 bp, Artificial Sequence
  Oligonucleotide for detection of SNP TSC0043689
tcaaaactaattt

SEQ ID NO: 175949 - DNA, 13 bp, Artificial Sequence
  Oligonucleotide for detection of SNP TSC0043690
aagagaggtaatt

SEQ ID NO: 175950 - DNA, 13 bp, Artificial Sequence
  Oligonucleotide for detection of SNP TSC0043690
aattacctctctt

SEQ ID NO: 175951 - DNA, 13 bp, Artificial Sequence
  Oligonucleotide for detection of SNP TSC0043690
aagagaagtaatt

SEQ ID NO: 175952 - DNA, 13 bp, Artificial Sequence
  Oligonucleotide for detection of SNP TSC0043690
aattacttctctt

SEQ ID NO: 175953 - DNA, 13 bp, Artificial Sequence
  Oligonucleotide for detection of SNP TSC0010379
gttgtgtgtttta

SEQ ID NO: 175954 - DNA, 13 bp, Artificial Sequence
  Oligonucleotide for detection of SNP TSC0010379
taaaacacacaac

SEQ ID NO: 175955 - DNA, 13 bp, Artificial Sequence
  Oligonucleotide for detection of SNP TSC0010379
gttgtgcgtttta

SEQ ID NO: 175956 - DNA, 13 bp, Artificial Sequence
  Oligonucleotide for detection of SNP TSC0010379
taaaacgcacaac

SEQ ID NO: 175957 - DNA, 13 bp, Artificial Sequence
  Oligonucleotide for detection of SNP TSC0010379
tgaaatgtatagy

SEQ ID NO: 175958 - DNA, 13 bp, Artificial Sequence
  Oligonucleotide for detection of SNP TSC0010379
rctatacatttca

SEQ ID NO: 175959 - DNA, 13 bp, Artificial Sequence
  Oligonucleotide for detection of SNP TSC0010379
tgaaatatatagy

SEQ ID NO: 175960 - DNA, 13 bp, Artificial Sequence
  Oligonucleotide for detection of SNP TSC0010379
rctatatatttca

SEQ ID NO: 175961 - DNA, 13 bp, Artificial Sequence
  Oligonucleotide for detection of SNP TSC0010379
tgaaacgtatagy

SEQ ID NO: 175962 - DNA, 13 bp, Artificial Sequence
  Oligonucleotide for detection of SNP TSC0010379
rctatacgtttca

SEQ ID NO: 175963 - DNA, 13 bp, Artificial Sequence
  Oligonucleotide for detection of SNP TSC0043691
tgtaatagtgtga

SEQ ID NO: 175964 - DNA, 13 bp, Artificial Sequence
  Oligonucleotide for detection of SNP TSC0043691
tcacactattaca

SEQ ID NO: 175965 - DNA, 13 bp, Artificial Sequence
  Oligonucleotide for detection of SNP TSC0043691
tgtaatggtgtga

SEQ ID NO: 175966 - DNA, 13 bp, Artificial Sequence
  Oligonucleotide for detection of SNP TSC0043691
tcacaccattaca

SEQ ID NO: 175967 - DNA, 13 bp, Artificial Sequence
  Oligonucleotide for detection of SNP TSC0043691
tgtaatagtgcga

SEQ ID NO: 175968 - DNA, 13 bp, Artificial Sequence
  Oligonucleotide for detection of SNP TSC0043691
tcgcactattaca

SEQ ID NO: 175969 - DNA, 13 bp, Artificial Sequence
  Oligonucleotide for detection of SNP TSC0043691
tgtaatggtgcga

SEQ ID NO: 175970 - DNA, 13 bp, Artificial Sequence
  Oligonucleotide for detection of SNP TSC0043691
tcgcaccattaca

SEQ ID NO: 175971 - DNA, 13 bp, Artificial Sequence
  Oligonucleotide for detection of SNP TSC0005689
agtttttggggta

SEQ ID NO: 175972 - DNA, 13 bp, Artificial Sequence
  Oligonucleotide for detection of SNP TSC0005689
taccccaaaaact

SEQ ID NO: 175973 - DNA, 13 bp, Artificial Sequence
  Oligonucleotide for detection of SNP TSC0005689
agttttcggggta

SEQ ID NO: 175974 - DNA, 13 bp, Artificial Sequence
  Oligonucleotide for detection of SNP TSC0005689
taccccgaaaact

SEQ ID NO: 175975 - DNA, 13 bp, Artificial Sequence
  Oligonucleotide for detection of SNP TSC0005689
tgttttgagagtt

SEQ ID NO: 175976 - DNA, 13 bp, Artificial Sequence
  Oligonucleotide for detection of SNP TSC0005689
aactctcaaaaca

SEQ ID NO: 175977 - DNA, 13 bp, Artificial Sequence
  Oligonucleotide for detection of SNP TSC0005689
tgttttaagagtt

SEQ ID NO: 175978 - DNA, 13 bp, Artificial Sequence
  Oligonucleotide for detection of SNP TSC0005689
aactcttaaaaca

SEQ ID NO: 175979 - DNA, 13 bp, Artificial Sequence
  Oligonucleotide for detection of SNP TSC0005689
tgtttcgagagtt

SEQ ID NO: 175980 - DNA, 13 bp, Artificial Sequence
  Oligonucleotide for detection of SNP TSC0005689
aactctcgaaaca

SEQ ID NO: 175981 - DNA, 13 bp, Artificial Sequence
  Oligonucleotide for detection of SNP TSC0005690
ggtttggtggttt

SEQ ID NO: 175982 - DNA, 13 bp, Artificial Sequence
  Oligonucleotide for detection of SNP TSC0005690
aaaccaccaaacc

SEQ ID NO: 175983 - DNA, 13 bp, Artificial Sequence
  Oligonucleotide for detection of SNP TSC0005690
ggtttgatggttt

SEQ ID NO: 175984 - DNA, 13 bp, Artificial Sequence
  Oligonucleotide for detection of SNP TSC0005690
aaaccatcaaacc

SEQ ID NO: 175985 - DNA, 13 bp, Artificial Sequence
  Oligonucleotide for detection of SNP TSC0005691
tatgtaagggagg

SEQ ID NO: 175986 - DNA, 13 bp, Artificial Sequence
  Oligonucleotide for detection of SNP TSC0005691
cctcccttacata

SEQ ID NO: 175987 - DNA, 13 bp, Artificial Sequence
  Oligonucleotide for detection of SNP TSC0005691
tatgtatgggagg

SEQ ID NO: 175988 - DNA, 13 bp, Artificial Sequence
  Oligonucleotide for detection of SNP TSC0005691
cctcccatacata

SEQ ID NO: 175989 - DNA, 13 bp, Artificial Sequence
  Oligonucleotide for detection of SNP TSC0005691
tatgtacgggagg

SEQ ID NO: 175990 - DNA, 13 bp, Artificial Sequence
  Oligonucleotide for detection of SNP TSC0005691
cctcccgtacata

SEQ ID NO: 175991 - DNA, 13 bp, Artificial Sequence
  Oligonucleotide for detection of SNP TSC0005691
ttttttttgtatg

SEQ ID NO: 175992 - DNA, 13 bp, Artificial Sequence
  Oligonucleotide for detection of SNP TSC0005691
catacaaaaaaaa

SEQ ID NO: 175993 - DNA, 13 bp, Artificial Sequence
  Oligonucleotide for detection of SNP TSC0005691
tttttcgtgtatg

SEQ ID NO: 175994 - DNA, 13 bp, Artificial Sequence
  Oligonucleotide for detection of SNP TSC0005691
catacacgaaaaa

SEQ ID NO: 175995 - DNA, 13 bp, Artificial Sequence
  Oligonucleotide for detection of SNP TSC0005692
ttttatgggggta

SEQ ID NO: 175996 - DNA, 13 bp, Artificial Sequence
  Oligonucleotide for detection of SNP TSC0005692
tacccccataaaa

SEQ ID NO: 175997 - DNA, 13 bp, Artificial Sequence
  Oligonucleotide for detection of SNP TSC0005692
ttttataggggta

SEQ ID NO: 175998 - DNA, 13 bp, Artificial Sequence
  Oligonucleotide for detection of SNP TSC0005692
tacccctataaaa

SEQ ID NO: 175999 - DNA, 13 bp, Artificial Sequence
  Oligonucleotide for detection of SNP TSC0043694
gtaagttattttt

SEQ ID NO: 176000 - DNA, 13 bp, Artificial Sequence
  Oligonucleotide for detection of SNP TSC0043694
aaaaataacttac

SEQ ID NO: 176001 - DNA, 13 bp, Artificial Sequence
  Oligonucleotide for detection of SNP TSC0043694
gtaagtgattttt

SEQ ID NO: 176002 - DNA, 13 bp, Artificial Sequence
  Oligonucleotide for detection of SNP TSC0043694
aaaaatcacttac

SEQ ID NO: 176003 - DNA, 13 bp, Artificial Sequence
  Oligonucleotide for detection of SNP TSC0043694
agagatgatttgy

SEQ ID NO: 176004 - DNA, 13 bp, Artificial Sequence
  Oligonucleotide for detection of SNP TSC0043694
rcaaatcatctct

SEQ ID NO: 176005 - DNA, 13 bp, Artificial Sequence
  Oligonucleotide for detection of SNP TSC0043694
agagattatttgy

SEQ ID NO: 176006 - DNA, 13 bp, Artificial Sequence
  Oligonucleotide for detection of SNP TSC0043694
rcaaataatctct

SEQ ID NO: 176007 - DNA, 13 bp, Artificial Sequence
  Oligonucleotide for detection of SNP TSC0043695
gagtaatgagagg

SEQ ID NO: 176008 - DNA, 13 bp, Artificial Sequence
  Oligonucleotide for detection of SNP TSC0043695
cctctcattactc

SEQ ID NO: 176009 - DNA, 13 bp, Artificial Sequence
  Oligonucleotide for detection of SNP TSC0043695
gagtaacgagagg

SEQ ID NO: 176010 - DNA, 13 bp, Artificial Sequence
  Oligonucleotide for detection of SNP TSC0043695
cctctcgttactc

SEQ ID NO: 176011 - DNA, 13 bp, Artificial Sequence
  Oligonucleotide for detection of SNP TSC0009010
taataaagggtaa

SEQ ID NO: 176012 - DNA, 13 bp, Artificial Sequence
  Oligonucleotide for detection of SNP TSC0009010
ttaccctttatta

SEQ ID NO: 176013 - DNA, 13 bp, Artificial Sequence
  Oligonucleotide for detection of SNP TSC0009010
ttattttttgttg

SEQ ID NO: 176014 - DNA, 13 bp, Artificial Sequence
  Oligonucleotide for detection of SNP TSC0009010
caacaaaaaataa

SEQ ID NO: 176015 - DNA, 13 bp, Artificial Sequence
  Oligonucleotide for detection of SNP TSC0009010
ttattcgttgttg

SEQ ID NO: 176016 - DNA, 13 bp, Artificial Sequence
  Oligonucleotide for detection of SNP TSC0009010
caacaacgaataa

SEQ ID NO: 176017 - DNA, 13 bp, Artificial Sequence
  Oligonucleotide for detection of SNP TSC0043696
attttaagtagaa

SEQ ID NO: 176018 - DNA, 13 bp, Artificial Sequence
  Oligonucleotide for detection of SNP TSC0043696
ttctacttaaaat

SEQ ID NO: 176019 - DNA, 13 bp, Artificial Sequence
  Oligonucleotide for detection of SNP TSC0043696
attttaggtagaa

SEQ ID NO: 176020 - DNA, 13 bp, Artificial Sequence
  Oligonucleotide for detection of SNP TSC0043696
ttctacctaaaat

SEQ ID NO: 176021 - DNA, 13 bp, Artificial Sequence
  Oligonucleotide for detection of SNP TSC0043697
tagtaatggatga

SEQ ID NO: 176022 - DNA, 13 bp, Artificial Sequence
  Oligonucleotide for detection of SNP TSC0043697
tcatccattacta

SEQ ID NO: 176023 - DNA, 13 bp, Artificial Sequence
  Oligonucleotide for detection of SNP TSC0043697
tagtaagggatga

SEQ ID NO: 176024 - DNA, 13 bp, Artificial Sequence
  Oligonucleotide for detection of SNP TSC0043697
tcatcccttacta

SEQ ID NO: 176025 - DNA, 13 bp, Artificial Sequence
  Oligonucleotide for detection of SNP TSC0043697
tagtaacggatga

SEQ ID NO: 176026 - DNA, 13 bp, Artificial Sequence
  Oligonucleotide for detection of SNP TSC0043697
tcatccgttacta

SEQ ID NO: 176027 - DNA, 13 bp, Artificial Sequence
  Oligonucleotide for detection of SNP TSC0043698
ataggatgtgagy

SEQ ID NO: 176028 - DNA, 13 bp, Artificial Sequence
  Oligonucleotide for detection of SNP TSC0043698
rctcacatcctat

SEQ ID NO: 176029 - DNA, 13 bp, Artificial Sequence
  Oligonucleotide for detection of SNP TSC0043698
ataggacgtgagy

SEQ ID NO: 176030 - DNA, 13 bp, Artificial Sequence
  Oligonucleotide for detection of SNP TSC0043698
rctcacgtcctat

SEQ ID NO: 176031 - DNA, 13 bp, Artificial Sequence
  Oligonucleotide for detection of SNP TSC0043702
tttttagagtaay

SEQ ID NO: 176032 - DNA, 13 bp, Artificial Sequence
  Oligonucleotide for detection of SNP TSC0043702
rttactctaaaaa

SEQ ID NO: 176033 - DNA, 13 bp, Artificial Sequence
  Oligonucleotide for detection of SNP TSC0043702
tttttaaagtaay

SEQ ID NO: 176034 - DNA, 13 bp, Artificial Sequence
  Oligonucleotide for detection of SNP TSC0043702
rttactttaaaaa

SEQ ID NO: 176035 - DNA, 13 bp, Artificial Sequence
  Oligonucleotide for detection of SNP TSC0043703
taatggagtgaty

SEQ ID NO: 176036 - DNA, 13 bp, Artificial Sequence
  Oligonucleotide for detection of SNP TSC0043703
ratcactccatta

SEQ ID NO: 176037 - DNA, 13 bp, Artificial Sequence
  Oligonucleotide for detection of SNP TSC0043703
taatggtgtgaty

SEQ ID NO: 176038 - DNA, 13 bp, Artificial Sequence
  Oligonucleotide for detection of SNP TSC0043703
ratcacaccatta

SEQ ID NO: 176039 - DNA, 13 bp, Artificial Sequence
  Oligonucleotide for detection of SNP TSC0043703
taatggagcgaty

SEQ ID NO: 176040 - DNA, 13 bp, Artificial Sequence
  Oligonucleotide for detection of SNP TSC0043703
ratcgctccatta

SEQ ID NO: 176041 - DNA, 13 bp, Artificial Sequence
  Oligonucleotide for detection of SNP TSC0043703
taatggcgtgaty

SEQ ID NO: 176042 - DNA, 13 bp, Artificial Sequence
  Oligonucleotide for detection of SNP TSC0043703
ratcacgccatta

SEQ ID NO: 176043 - DNA, 13 bp, Artificial Sequence
  Oligonucleotide for detection of SNP TSC0043703
taatggtgcgaty

SEQ ID NO: 176044 - DNA, 13 bp, Artificial Sequence
  Oligonucleotide for detection of SNP TSC0043703
ratcgcaccatta

SEQ ID NO: 176045 - DNA, 13 bp, Artificial Sequence
  Oligonucleotide for detection of SNP TSC0043703
taatggcgcgaty

SEQ ID NO: 176046 - DNA, 13 bp, Artificial Sequence
  Oligonucleotide for detection of SNP TSC0043703
ratcgcgccatta

SEQ ID NO: 176047 - DNA, 13 bp, Artificial Sequence
  Oligonucleotide for detection of SNP TSC0043704
gagaatatgaaga

SEQ ID NO: 176048 - DNA, 13 bp, Artificial Sequence
  Oligonucleotide for detection of SNP TSC0043704
tcttcatattctc

SEQ ID NO: 176049 - DNA, 13 bp, Artificial Sequence
  Oligonucleotide for detection of SNP TSC0043704
gagaatgtgaaga

SEQ ID NO: 176050 - DNA, 13 bp, Artificial Sequence
  Oligonucleotide for detection of SNP TSC0043704
tcttcacattctc

SEQ ID NO: 176051 - DNA, 13 bp, Artificial Sequence
  Oligonucleotide for detection of SNP TSC0043704
gagaacgtgaaga

SEQ ID NO: 176052 - DNA, 13 bp, Artificial Sequence
  Oligonucleotide for detection of SNP TSC0043704
tcttcacgttctc

SEQ ID NO: 176053 - DNA, 13 bp, Artificial Sequence
  Oligonucleotide for detection of SNP TSC0043708
taagtgtatttat

SEQ ID NO: 176054 - DNA, 13 bp, Artificial Sequence
  Oligonucleotide for detection of SNP TSC0043708
ataaatacactta

SEQ ID NO: 176055 - DNA, 13 bp, Artificial Sequence
  Oligonucleotide for detection of SNP TSC0043708
taagtggatttat

SEQ ID NO: 176056 - DNA, 13 bp, Artificial Sequence
  Oligonucleotide for detection of SNP TSC0043708
ataaatccactta

SEQ ID NO: 176057 - DNA, 13 bp, Artificial Sequence
  Oligonucleotide for detection of SNP TSC0043708
ataaatgtattta

SEQ ID NO: 176058 - DNA, 13 bp, Artificial Sequence
  Oligonucleotide for detection of SNP TSC0043708
taaatacatttat

SEQ ID NO: 176059 - DNA, 13 bp, Artificial Sequence
  Oligonucleotide for detection of SNP TSC0043708
ataaatttattta

SEQ ID NO: 176060 - DNA, 13 bp, Artificial Sequence
  Oligonucleotide for detection of SNP TSC0043708
taaataaatttat

SEQ ID NO: 176061 - DNA, 13 bp, Artificial Sequence
  Oligonucleotide for detection of SNP TSC0043709
gttgtgatttatt

SEQ ID NO: 176062 - DNA, 13 bp, Artificial Sequence
  Oligonucleotide for detection of SNP TSC0043709
aataaatcacaac

SEQ ID NO: 176063 - DNA, 13 bp, Artificial Sequence
  Oligonucleotide for detection of SNP TSC0043709
gttgtgttttatt

SEQ ID NO: 176064 - DNA, 13 bp, Artificial Sequence
  Oligonucleotide for detection of SNP TSC0043709
aataaaacacaac

SEQ ID NO: 176065 - DNA, 13 bp, Artificial Sequence
  Oligonucleotide for detection of SNP TSC0043709
aatgagttatagy

SEQ ID NO: 176066 - DNA, 13 bp, Artificial Sequence
  Oligonucleotide for detection of SNP TSC0043709
rctataactcatt

SEQ ID NO: 176067 - DNA, 13 bp, Artificial Sequence
  Oligonucleotide for detection of SNP TSC0043709
aatgaggtatagy

SEQ ID NO: 176068 - DNA, 13 bp, Artificial Sequence
  Oligonucleotide for detection of SNP TSC0043709
rctatacctcatt

SEQ ID NO: 176069 - DNA, 13 bp, Artificial Sequence
  Oligonucleotide for detection of SNP TSC0043712
ttttaagttatty

SEQ ID NO: 176070 - DNA, 13 bp, Artificial Sequence
  Oligonucleotide for detection of SNP TSC0043712
raataacttaaaa

SEQ ID NO: 176071 - DNA, 13 bp, Artificial Sequence
  Oligonucleotide for detection of SNP TSC0043712
gaatgagttaggg

SEQ ID NO: 176072 - DNA, 13 bp, Artificial Sequence
  Oligonucleotide for detection of SNP TSC0043712
ccctaactcattc

SEQ ID NO: 176073 - DNA, 13 bp, Artificial Sequence
  Oligonucleotide for detection of SNP TSC0043712
gaatgatttaggg

SEQ ID NO: 176074 - DNA, 13 bp, Artificial Sequence
  Oligonucleotide for detection of SNP TSC0043712
ccctaaatcattc

SEQ ID NO: 176075 - DNA, 13 bp, Artificial Sequence
  Oligonucleotide for detection of SNP TSC0043713
ttttattagatat

SEQ ID NO: 176076 - DNA, 13 bp, Artificial Sequence
  Oligonucleotide for detection of SNP TSC0043713
atatctaataaaa

SEQ ID NO: 176077 - DNA, 13 bp, Artificial Sequence
  Oligonucleotide for detection of SNP TSC0043713
ttttatgagatat

SEQ ID NO: 176078 - DNA, 13 bp, Artificial Sequence
  Oligonucleotide for detection of SNP TSC0043713
atatctcataaaa

SEQ ID NO: 176079 - DNA, 13 bp, Artificial Sequence
  Oligonucleotide for detection of SNP TSC0043713
ttttacgagatat

SEQ ID NO: 176080 - DNA, 13 bp, Artificial Sequence
  Oligonucleotide for detection of SNP TSC0043713
atatctcgtaaaa

SEQ ID NO: 176081 - DNA, 13 bp, Artificial Sequence
  Oligonucleotide for detection of SNP TSC0043713
atgtttggtagaa

SEQ ID NO: 176082 - DNA, 13 bp, Artificial Sequence
  Oligonucleotide for detection of SNP TSC0043713
ttctaccaaacat

SEQ ID NO: 176083 - DNA, 13 bp, Artificial Sequence
  Oligonucleotide for detection of SNP TSC0043713
atgttttgtagaa

SEQ ID NO: 176084 - DNA, 13 bp, Artificial Sequence
  Oligonucleotide for detection of SNP TSC0043713
ttctacaaaacat

SEQ ID NO: 176085 - DNA, 13 bp, Artificial Sequence
  Oligonucleotide for detection of SNP TSC0043713
atgtttcgtagaa

SEQ ID NO: 176086 - DNA, 13 bp, Artificial Sequence
  Oligonucleotide for detection of SNP TSC0043713
ttctacgaaacat

SEQ ID NO: 176087 - DNA, 13 bp, Artificial Sequence
  Oligonucleotide for detection of SNP TSC0043717
attttgtaattgg

SEQ ID NO: 176088 - DNA, 13 bp, Artificial Sequence
  Oligonucleotide for detection of SNP TSC0043717
ccaattacaaaat

SEQ ID NO: 176089 - DNA, 13 bp, Artificial Sequence
  Oligonucleotide for detection of SNP TSC0043717
attttggaattgg

SEQ ID NO: 176090 - DNA, 13 bp, Artificial Sequence
  Oligonucleotide for detection of SNP TSC0043717
ccaattccaaaat

SEQ ID NO: 176091 - DNA, 13 bp, Artificial Sequence
  Oligonucleotide for detection of SNP TSC0043717
ttagttataagat

SEQ ID NO: 176092 - DNA, 13 bp, Artificial Sequence
  Oligonucleotide for detection of SNP TSC0043717
atcttataactaa

SEQ ID NO: 176093 - DNA, 13 bp, Artificial Sequence
  Oligonucleotide for detection of SNP TSC0043717
ttagttttaagat

SEQ ID NO: 176094 - DNA, 13 bp, Artificial Sequence
  Oligonucleotide for detection of SNP TSC0043717
atcttaaaactaa

SEQ ID NO: 176095 - DNA, 13 bp, Artificial Sequence
  Oligonucleotide for detection of SNP TSC0008719
ataaaagatatga

SEQ ID NO: 176096 - DNA, 13 bp, Artificial Sequence
  Oligonucleotide for detection of SNP TSC0008719
tcatatcttttat

SEQ ID NO: 176097 - DNA, 13 bp, Artificial Sequence
  Oligonucleotide for detection of SNP TSC0008719
ataaaatatatga

SEQ ID NO: 176098 - DNA, 13 bp, Artificial Sequence
  Oligonucleotide for detection of SNP TSC0008719
tcatatattttat

SEQ ID NO: 176099 - DNA, 13 bp, Artificial Sequence
  Oligonucleotide for detection of SNP TSC0043718
ttttattgttaty

SEQ ID NO: 176100 - DNA, 13 bp, Artificial Sequence
  Oligonucleotide for detection of SNP TSC0043718
rataacaataaaa

SEQ ID NO: 176101 - DNA, 13 bp, Artificial Sequence
  Oligonucleotide for detection of SNP TSC0043718
ttttatcgttaty

SEQ ID NO: 176102 - DNA, 13 bp, Artificial Sequence
  Oligonucleotide for detection of SNP TSC0043718
rataacgataaaa

SEQ ID NO: 176103 - DNA, 13 bp, Artificial Sequence
  Oligonucleotide for detection of SNP TSC0043718
gatgatggtagaa

SEQ ID NO: 176104 - DNA, 13 bp, Artificial Sequence
  Oligonucleotide for detection of SNP TSC0043718
ttctaccatcatc

SEQ ID NO: 176105 - DNA, 13 bp, Artificial Sequence
  Oligonucleotide for detection of SNP TSC0043718
gatgatagtagaa

SEQ ID NO: 176106 - DNA, 13 bp, Artificial Sequence
  Oligonucleotide for detection of SNP TSC0043718
ttctactatcatc

SEQ ID NO: 176107 - DNA, 13 bp, Artificial Sequence
  Oligonucleotide for detection of SNP TSC0043718
gatgacggtagaa

SEQ ID NO: 176108 - DNA, 13 bp, Artificial Sequence
  Oligonucleotide for detection of SNP TSC0043718
ttctaccgtcatc

SEQ ID NO: 176109 - DNA, 13 bp, Artificial Sequence
  Oligonucleotide for detection of SNP TSC0043719
ttagttggttttt

SEQ ID NO: 176110 - DNA, 13 bp, Artificial Sequence
  Oligonucleotide for detection of SNP TSC0043719
aaaaaccaactaa

SEQ ID NO: 176111 - DNA, 13 bp, Artificial Sequence
  Oligonucleotide for detection of SNP TSC0043719
aaagatgagttgg

SEQ ID NO: 176112 - DNA, 13 bp, Artificial Sequence
  Oligonucleotide for detection of SNP TSC0043719
ccaactcatcttt

SEQ ID NO: 176113 - DNA, 13 bp, Artificial Sequence
  Oligonucleotide for detection of SNP TSC0043719
aaagattagttgg

SEQ ID NO: 176114 - DNA, 13 bp, Artificial Sequence
  Oligonucleotide for detection of SNP TSC0043719
ccaactaatcttt

SEQ ID NO: 176115 - DNA, 13 bp, Artificial Sequence
  Oligonucleotide for detection of SNP TSC0043719
aaagacgagttgg

SEQ ID NO: 176116 - DNA, 13 bp, Artificial Sequence
  Oligonucleotide for detection of SNP TSC0043719
ccaactcgtcttt

SEQ ID NO: 176117 - DNA, 13 bp, Artificial Sequence
  Oligonucleotide for detection of SNP TSC0009508
atttattgtgaty

SEQ ID NO: 176118 - DNA, 13 bp, Artificial Sequence
  Oligonucleotide for detection of SNP TSC0009508
ratcacaataaat

SEQ ID NO: 176119 - DNA, 13 bp, Artificial Sequence
  Oligonucleotide for detection of SNP TSC0009508
atttatcgtgaty

SEQ ID NO: 176120 - DNA, 13 bp, Artificial Sequence
  Oligonucleotide for detection of SNP TSC0009508
ratcacgataaat

SEQ ID NO: 176121 - DNA, 13 bp, Artificial Sequence
  Oligonucleotide for detection of SNP TSC0009508
ggttatggtaggt

SEQ ID NO: 176122 - DNA, 13 bp, Artificial Sequence
  Oligonucleotide for detection of SNP TSC0009508
acctaccataacc

SEQ ID NO: 176123 - DNA, 13 bp, Artificial Sequence
  Oligonucleotide for detection of SNP TSC0009508
ggttatagtaggt

SEQ ID NO: 176124 - DNA, 13 bp, Artificial Sequence
  Oligonucleotide for detection of SNP TSC0009508
acctactataacc

SEQ ID NO: 176125 - DNA, 13 bp, Artificial Sequence
  Oligonucleotide for detection of SNP TSC0009508
ggttacggtaggt

SEQ ID NO: 176126 - DNA, 13 bp, Artificial Sequence
  Oligonucleotide for detection of SNP TSC0009508
acctaccgtaacc

SEQ ID NO: 176127 - DNA, 13 bp, Artificial Sequence
  Oligonucleotide for detection of SNP TSC0009509
attttagttagta

SEQ ID NO: 176128 - DNA, 13 bp, Artificial Sequence
  Oligonucleotide for detection of SNP TSC0009509
tactaactaaaat

SEQ ID NO: 176129 - DNA, 13 bp, Artificial Sequence
  Oligonucleotide for detection of SNP TSC0009509
attttaattagta

SEQ ID NO: 176130 - DNA, 13 bp, Artificial Sequence
  Oligonucleotide for detection of SNP TSC0009509
tactaattaaaat

SEQ ID NO: 176131 - DNA, 13 bp, Artificial Sequence
  Oligonucleotide for detection of SNP TSC0009510
taaataatttgtt

SEQ ID NO: 176132 - DNA, 13 bp, Artificial Sequence
  Oligonucleotide for detection of SNP TSC0009510
aacaaattattta

SEQ ID NO: 176133 - DNA, 13 bp, Artificial Sequence
  Oligonucleotide for detection of SNP TSC0009510
taaatattttgtt

SEQ ID NO: 176134 - DNA, 13 bp, Artificial Sequence
  Oligonucleotide for detection of SNP TSC0009510
aacaaaatattta

SEQ ID NO: 176135 - DNA, 13 bp, Artificial Sequence
  Oligonucleotide for detection of SNP TSC0009510
aataagttgtttg

SEQ ID NO: 176136 - DNA, 13 bp, Artificial Sequence
  Oligonucleotide for detection of SNP TSC0009510
caaacaacttatt

SEQ ID NO: 176137 - DNA, 13 bp, Artificial Sequence
  Oligonucleotide for detection of SNP TSC0009510
aataagatgtttg

SEQ ID NO: 176138 - DNA, 13 bp, Artificial Sequence
  Oligonucleotide for detection of SNP TSC0009510
caaacatcttatt

SEQ ID NO: 176139 - DNA, 13 bp, Artificial Sequence
  Oligonucleotide for detection of SNP TSC0009506
tgttaaagatttt

SEQ ID NO: 176140 - DNA, 13 bp, Artificial Sequence
  Oligonucleotide for detection of SNP TSC0009506
aaaatctttaaca

SEQ ID NO: 176141 - DNA, 13 bp, Artificial Sequence
  Oligonucleotide for detection of SNP TSC0009506
tgttaaggatttt

SEQ ID NO: 176142 - DNA, 13 bp, Artificial Sequence
  Oligonucleotide for detection of SNP TSC0009506
aaaatccttaaca

SEQ ID NO: 176143 - DNA, 13 bp, Artificial Sequence
  Oligonucleotide for detection of SNP TSC0043720
aatttatgagtaa

SEQ ID NO: 176144 - DNA, 13 bp, Artificial Sequence
  Oligonucleotide for detection of SNP TSC0043720
ttactcataaatt

SEQ ID NO: 176145 - DNA, 13 bp, Artificial Sequence
  Oligonucleotide for detection of SNP TSC0043720
aatttacgagtaa

SEQ ID NO: 176146 - DNA, 13 bp, Artificial Sequence
  Oligonucleotide for detection of SNP TSC0043720
ttactcgtaaatt

SEQ ID NO: 176147 - DNA, 13 bp, Artificial Sequence
  Oligonucleotide for detection of SNP TSC0043720
ttatttgtgggtt

SEQ ID NO: 176148 - DNA, 13 bp, Artificial Sequence
  Oligonucleotide for detection of SNP TSC0043720
aacccacaaataa

SEQ ID NO: 176149 - DNA, 13 bp, Artificial Sequence
  Oligonucleotide for detection of SNP TSC0043720
ttatttatgggtt

SEQ ID NO: 176150 - DNA, 13 bp, Artificial Sequence
  Oligonucleotide for detection of SNP TSC0043720
aacccataaataa

SEQ ID NO: 176151 - DNA, 13 bp, Artificial Sequence
  Oligonucleotide for detection of SNP TSC0043720
ttattcgtgggtt

SEQ ID NO: 176152 - DNA, 13 bp, Artificial Sequence
  Oligonucleotide for detection of SNP TSC0043720
aacccacgaataa

SEQ ID NO: 176153 - DNA, 13 bp, Artificial Sequence
  Oligonucleotide for detection of SNP TSC0043721
ttatgaataagga

SEQ ID NO: 176154 - DNA, 13 bp, Artificial Sequence
  Oligonucleotide for detection of SNP TSC0043721
tccttattcataa

SEQ ID NO: 176155 - DNA, 13 bp, Artificial Sequence
  Oligonucleotide for detection of SNP TSC0043721
ttatgagtaagga

SEQ ID NO: 176156 - DNA, 13 bp, Artificial Sequence
  Oligonucleotide for detection of SNP TSC0043721
tccttactcataa

SEQ ID NO: 176157 - DNA, 13 bp, Artificial Sequence
  Oligonucleotide for detection of SNP TSC0043721
ttacgaataagga

SEQ ID NO: 176158 - DNA, 13 bp, Artificial Sequence
  Oligonucleotide for detection of SNP TSC0043721
tccttattcgtaa

SEQ ID NO: 176159 - DNA, 13 bp, Artificial Sequence
  Oligonucleotide for detection of SNP TSC0043721
ttacgagtaagga

SEQ ID NO: 176160 - DNA, 13 bp, Artificial Sequence
  Oligonucleotide for detection of SNP TSC0043721
tccttactcgtaa

SEQ ID NO: 176161 - DNA, 13 bp, Artificial Sequence
  Oligonucleotide for detection of SNP TSC0043722
aaaaatattagaa

SEQ ID NO: 176162 - DNA, 13 bp, Artificial Sequence
  Oligonucleotide for detection of SNP TSC0043722
ttctaatattttt

SEQ ID NO: 176163 - DNA, 13 bp, Artificial Sequence
  Oligonucleotide for detection of SNP TSC0043722
aaaaattttagaa

SEQ ID NO: 176164 - DNA, 13 bp, Artificial Sequence
  Oligonucleotide for detection of SNP TSC0043722
ttctaaaattttt

SEQ ID NO: 176165 - DNA, 13 bp, Artificial Sequence
  Oligonucleotide for detection of SNP TSC0043725
tttattatatagg

SEQ ID NO: 176166 - DNA, 13 bp, Artificial Sequence
  Oligonucleotide for detection of SNP TSC0043725
cctatataataaa

SEQ ID NO: 176167 - DNA, 13 bp, Artificial Sequence
  Oligonucleotide for detection of SNP TSC0043725
tttattttatagg

SEQ ID NO: 176168 - DNA, 13 bp, Artificial Sequence
  Oligonucleotide for detection of SNP TSC0043725
cctataaaataaa

SEQ ID NO: 176169 - DNA, 13 bp, Artificial Sequence
  Oligonucleotide for detection of SNP TSC0043725
tttgtatagtaaa

SEQ ID NO: 176170 - DNA, 13 bp, Artificial Sequence
  Oligonucleotide for detection of SNP TSC0043725
tttactatacaaa

SEQ ID NO: 176171 - DNA, 13 bp, Artificial Sequence
  Oligonucleotide for detection of SNP TSC0043725
tttgtagagtaaa

SEQ ID NO: 176172 - DNA, 13 bp, Artificial Sequence
  Oligonucleotide for detection of SNP TSC0043725
tttactctacaaa

SEQ ID NO: 176173 - DNA, 13 bp, Artificial Sequence
  Oligonucleotide for detection of SNP TSC0043727
taagggaaatgag

SEQ ID NO: 176174 - DNA, 13 bp, Artificial Sequence
  Oligonucleotide for detection of SNP TSC0043727
ctcatttccctta

SEQ ID NO: 176175 - DNA, 13 bp, Artificial Sequence
  Oligonucleotide for detection of SNP TSC0043727
taaggggaatgag

SEQ ID NO: 176176 - DNA, 13 bp, Artificial Sequence
  Oligonucleotide for detection of SNP TSC0043727
ctcattcccctta

SEQ ID NO: 176177 - DNA, 13 bp, Artificial Sequence
  Oligonucleotide for detection of SNP TSC0043728
attaatggttagg

SEQ ID NO: 176178 - DNA, 13 bp, Artificial Sequence
  Oligonucleotide for detection of SNP TSC0043728
cctaaccattaat

SEQ ID NO: 176179 - DNA, 13 bp, Artificial Sequence
  Oligonucleotide for detection of SNP TSC0043728
attaacggttagg

SEQ ID NO: 176180 - DNA, 13 bp, Artificial Sequence
  Oligonucleotide for detection of SNP TSC0043728
cctaaccgttaat

SEQ ID NO: 176181 - DNA, 13 bp, Artificial Sequence
  Oligonucleotide for detection of SNP TSC0043728
tttggttgttaat

SEQ ID NO: 176182 - DNA, 13 bp, Artificial Sequence
  Oligonucleotide for detection of SNP TSC0043728
attaacaaccaaa

SEQ ID NO: 176183 - DNA, 13 bp, Artificial Sequence
  Oligonucleotide for detection of SNP TSC0043728
tttggtcgttaat

SEQ ID NO: 176184 - DNA, 13 bp, Artificial Sequence
  Oligonucleotide for detection of SNP TSC0043728
attaacgaccaaa

SEQ ID NO: 176185 - DNA, 13 bp, Artificial Sequence
  Oligonucleotide for detection of SNP TSC0043729
gaggttaagatag

SEQ ID NO: 176186 - DNA, 13 bp, Artificial Sequence
  Oligonucleotide for detection of SNP TSC0043729
ctatcttaacctc

SEQ ID NO: 176187 - DNA, 13 bp, Artificial Sequence
  Oligonucleotide for detection of SNP TSC0043729
gaggttgagatag

SEQ ID NO: 176188 - DNA, 13 bp, Artificial Sequence
  Oligonucleotide for detection of SNP TSC0043729
ctatctcaacctc

SEQ ID NO: 176189 - DNA, 13 bp, Artificial Sequence
  Oligonucleotide for detection of SNP TSC0043729
gaggtcgagatag

SEQ ID NO: 176190 - DNA, 13 bp, Artificial Sequence
  Oligonucleotide for detection of SNP TSC0043729
ctatctcgacctc

SEQ ID NO: 176191 - DNA, 13 bp, Artificial Sequence
  Oligonucleotide for detection of SNP TSC0043730
tattttggtttgg

SEQ ID NO: 176192 - DNA, 13 bp, Artificial Sequence
  Oligonucleotide for detection of SNP TSC0043730
ccaaaccaaaata

SEQ ID NO: 176193 - DNA, 13 bp, Artificial Sequence
  Oligonucleotide for detection of SNP TSC0043730
tatttcggtttgg

SEQ ID NO: 176194 - DNA, 13 bp, Artificial Sequence
  Oligonucleotide for detection of SNP TSC0043730
ccaaaccgaaata

SEQ ID NO: 176195 - DNA, 13 bp, Artificial Sequence
  Oligonucleotide for detection of SNP TSC0043730
ttagattggagtg

SEQ ID NO: 176196 - DNA, 13 bp, Artificial Sequence
  Oligonucleotide for detection of SNP TSC0043730
cactccaatctaa

SEQ ID NO: 176197 - DNA, 13 bp, Artificial Sequence
  Oligonucleotide for detection of SNP TSC0043730
ttagatcggagtg

SEQ ID NO: 176198 - DNA, 13 bp, Artificial Sequence
  Oligonucleotide for detection of SNP TSC0043730
cactccgatctaa

SEQ ID NO: 176199 - DNA, 13 bp, Artificial Sequence
  Oligonucleotide for detection of SNP TSC0043733
aataaaatagtat

SEQ ID NO: 176200 - DNA, 13 bp, Artificial Sequence
  Oligonucleotide for detection of SNP TSC0043733
atactattttatt

SEQ ID NO: 176201 - DNA, 13 bp, Artificial Sequence
  Oligonucleotide for detection of SNP TSC0043733
aataaagtagtat

SEQ ID NO: 176202 - DNA, 13 bp, Artificial Sequence
  Oligonucleotide for detection of SNP TSC0043733
atactactttatt

SEQ ID NO: 176203 - DNA, 13 bp, Artificial Sequence
  Oligonucleotide for detection of SNP TSC0043734
aatttagttttgy

SEQ ID NO: 176204 - DNA, 13 bp, Artificial Sequence
  Oligonucleotide for detection of SNP TSC0043734
rcaaaactaaatt

SEQ ID NO: 176205 - DNA, 13 bp, Artificial Sequence
  Oligonucleotide for detection of SNP TSC0043734
gtaggaatagatt

SEQ ID NO: 176206 - DNA, 13 bp, Artificial Sequence
  Oligonucleotide for detection of SNP TSC0043734
aatctattcctac

SEQ ID NO: 176207 - DNA, 13 bp, Artificial Sequence
  Oligonucleotide for detection of SNP TSC0043734
gtaggattagatt

SEQ ID NO: 176208 - DNA, 13 bp, Artificial Sequence
  Oligonucleotide for detection of SNP TSC0043734
aatctaatcctac

SEQ ID NO: 176209 - DNA, 13 bp, Artificial Sequence
  Oligonucleotide for detection of SNP TSC0010154
gattaatggtttt

SEQ ID NO: 176210 - DNA, 13 bp, Artificial Sequence
  Oligonucleotide for detection of SNP TSC0010154
aaaaccattaatc

SEQ ID NO: 176211 - DNA, 13 bp, Artificial Sequence
  Oligonucleotide for detection of SNP TSC0010154
gattaacggtttt

SEQ ID NO: 176212 - DNA, 13 bp, Artificial Sequence
  Oligonucleotide for detection of SNP TSC0010154
aaaaccgttaatc

SEQ ID NO: 176213 - DNA, 13 bp, Artificial Sequence
  Oligonucleotide for detection of SNP TSC0010154
agaattgttaaty

SEQ ID NO: 176214 - DNA, 13 bp, Artificial Sequence
  Oligonucleotide for detection of SNP TSC0010154
rattaacaattct

SEQ ID NO: 176215 - DNA, 13 bp, Artificial Sequence
  Oligonucleotide for detection of SNP TSC0010154
agaattattaaty

SEQ ID NO: 176216 - DNA, 13 bp, Artificial Sequence
  Oligonucleotide for detection of SNP TSC0010154
rattaataattct

SEQ ID NO: 176217 - DNA, 13 bp, Artificial Sequence
  Oligonucleotide for detection of SNP TSC0010154
agaatcgttaaty

SEQ ID NO: 176218 - DNA, 13 bp, Artificial Sequence
  Oligonucleotide for detection of SNP TSC0010154
rattaacgattct

SEQ ID NO: 176219 - DNA, 13 bp, Artificial Sequence
  Oligonucleotide for detection of SNP TSC0043736
agaatattatggg

SEQ ID NO: 176220 - DNA, 13 bp, Artificial Sequence
  Oligonucleotide for detection of SNP TSC0043736
cccataatattct

SEQ ID NO: 176221 - DNA, 13 bp, Artificial Sequence
  Oligonucleotide for detection of SNP TSC0043736
tttatgttgtttt

SEQ ID NO: 176222 - DNA, 13 bp, Artificial Sequence
  Oligonucleotide for detection of SNP TSC0043736
aaaacaacataaa

SEQ ID NO: 176223 - DNA, 13 bp, Artificial Sequence
  Oligonucleotide for detection of SNP TSC0043736
tttatggtgtttt

SEQ ID NO: 176224 - DNA, 13 bp, Artificial Sequence
  Oligonucleotide for detection of SNP TSC0043736
aaaacaccataaa

SEQ ID NO: 176225 - DNA, 13 bp, Artificial Sequence
  Oligonucleotide for detection of SNP TSC0043738
tgttgtataaagg

SEQ ID NO: 176226 - DNA, 13 bp, Artificial Sequence
  Oligonucleotide for detection of SNP TSC0043738
cctttatacaaca

SEQ ID NO: 176227 - DNA, 13 bp, Artificial Sequence
  Oligonucleotide for detection of SNP TSC0043738
tgttgtttaaagg

SEQ ID NO: 176228 - DNA, 13 bp, Artificial Sequence
  Oligonucleotide for detection of SNP TSC0043738
cctttaaacaaca

SEQ ID NO: 176229 - DNA, 13 bp, Artificial Sequence
  Oligonucleotide for detection of SNP TSC0043739
ttgataggtattt

SEQ ID NO: 176230 - DNA, 13 bp, Artificial Sequence
  Oligonucleotide for detection of SNP TSC0043739
aaatacctatcaa

SEQ ID NO: 176231 - DNA, 13 bp, Artificial Sequence
  Oligonucleotide for detection of SNP TSC0043739
ttgataagtattt

SEQ ID NO: 176232 - DNA, 13 bp, Artificial Sequence
  Oligonucleotide for detection of SNP TSC0043739
aaatacttatcaa

SEQ ID NO: 176233 - DNA, 13 bp, Artificial Sequence
  Oligonucleotide for detection of SNP TSC0043740
ataatagtataaa

SEQ ID NO: 176234 - DNA, 13 bp, Artificial Sequence
  Oligonucleotide for detection of SNP TSC0043740
tttatactattat

SEQ ID NO: 176235 - DNA, 13 bp, Artificial Sequence
  Oligonucleotide for detection of SNP TSC0043741
tttagatggaggy

SEQ ID NO: 176236 - DNA, 13 bp, Artificial Sequence
  Oligonucleotide for detection of SNP TSC0043741
rcctccatctaaa

SEQ ID NO: 176237 - DNA, 13 bp, Artificial Sequence
  Oligonucleotide for detection of SNP TSC0043741
tttagagggaggy

SEQ ID NO: 176238 - DNA, 13 bp, Artificial Sequence
  Oligonucleotide for detection of SNP TSC0043741
rcctccctctaaa

SEQ ID NO: 176239 - DNA, 13 bp, Artificial Sequence
  Oligonucleotide for detection of SNP TSC0043741
gtttttttttagg

SEQ ID NO: 176240 - DNA, 13 bp, Artificial Sequence
  Oligonucleotide for detection of SNP TSC0043741
cctaaaaaaaaac

SEQ ID NO: 176241 - DNA, 13 bp, Artificial Sequence
  Oligonucleotide for detection of SNP TSC0043742
ggaaagataatag

SEQ ID NO: 176242 - DNA, 13 bp, Artificial Sequence
  Oligonucleotide for detection of SNP TSC0043742
ctattatctttcc

SEQ ID NO: 176243 - DNA, 13 bp, Artificial Sequence
  Oligonucleotide for detection of SNP TSC0043742
ggaaagttaatag

SEQ ID NO: 176244 - DNA, 13 bp, Artificial Sequence
  Oligonucleotide for detection of SNP TSC0043742
ctattaactttcc

SEQ ID NO: 176245 - DNA, 13 bp, Artificial Sequence
  Oligonucleotide for detection of SNP TSC0006881
ttaaaaattttta

SEQ ID NO: 176246 - DNA, 13 bp, Artificial Sequence
  Oligonucleotide for detection of SNP TSC0006881
taaaaatttttaa

SEQ ID NO: 176247 - DNA, 13 bp, Artificial Sequence
  Oligonucleotide for detection of SNP TSC0006881
ttaaaatttttta

SEQ ID NO: 176248 - DNA, 13 bp, Artificial Sequence
  Oligonucleotide for detection of SNP TSC0006881
taaaaaattttaa

SEQ ID NO: 176249 - DNA, 13 bp, Artificial Sequence
  Oligonucleotide for detection of SNP TSC0006881
taagaatttttga

SEQ ID NO: 176250 - DNA, 13 bp, Artificial Sequence
  Oligonucleotide for detection of SNP TSC0006881
tcaaaaattctta

SEQ ID NO: 176251 - DNA, 13 bp, Artificial Sequence
  Oligonucleotide for detection of SNP TSC0006881
taagaaattttga

SEQ ID NO: 176252 - DNA, 13 bp, Artificial Sequence
  Oligonucleotide for detection of SNP TSC0006881
tcaaaatttctta

SEQ ID NO: 176253 - DNA, 13 bp, Artificial Sequence
  Oligonucleotide for detection of SNP TSC0043743
attgaggtaagat

SEQ ID NO: 176254 - DNA, 13 bp, Artificial Sequence
  Oligonucleotide for detection of SNP TSC0043743
atcttacctcaat

SEQ ID NO: 176255 - DNA, 13 bp, Artificial Sequence
  Oligonucleotide for detection of SNP TSC0043743
attgagataagat

SEQ ID NO: 176256 - DNA, 13 bp, Artificial Sequence
  Oligonucleotide for detection of SNP TSC0043743
atcttatctcaat

SEQ ID NO: 176257 - DNA, 13 bp, Artificial Sequence
  Oligonucleotide for detection of SNP TSC0007471
tgttgtagttggg

SEQ ID NO: 176258 - DNA, 13 bp, Artificial Sequence
  Oligonucleotide for detection of SNP TSC0007471
cccaactacaaca

SEQ ID NO: 176259 - DNA, 13 bp, Artificial Sequence
  Oligonucleotide for detection of SNP TSC0007471
tgttgtggttggg

SEQ ID NO: 176260 - DNA, 13 bp, Artificial Sequence
  Oligonucleotide for detection of SNP TSC0007471
cccaaccacaaca

SEQ ID NO: 176261 - DNA, 13 bp, Artificial Sequence
  Oligonucleotide for detection of SNP TSC0007471
tgttgcggttggg

SEQ ID NO: 176262 - DNA, 13 bp, Artificial Sequence
  Oligonucleotide for detection of SNP TSC0007471
cccaaccgcaaca

SEQ ID NO: 176263 - DNA, 13 bp, Artificial Sequence
  Oligonucleotide for detection of SNP TSC0007471
tttaattgtagta

SEQ ID NO: 176264 - DNA, 13 bp, Artificial Sequence
  Oligonucleotide for detection of SNP TSC0007471
tactacaattaaa

SEQ ID NO: 176265 - DNA, 13 bp, Artificial Sequence
  Oligonucleotide for detection of SNP TSC0007471
tttaatcgtagta

SEQ ID NO: 176266 - DNA, 13 bp, Artificial Sequence
  Oligonucleotide for detection of SNP TSC0007471
tactacgattaaa

SEQ ID NO: 176267 - DNA, 13 bp, Artificial Sequence
  Oligonucleotide for detection of SNP TSC0007472
tttgagtgtaatg

SEQ ID NO: 176268 - DNA, 13 bp, Artificial Sequence
  Oligonucleotide for detection of SNP TSC0007472
cattacactcaaa

SEQ ID NO: 176269 - DNA, 13 bp, Artificial Sequence
  Oligonucleotide for detection of SNP TSC0007472
tttgagcgtaatg

SEQ ID NO: 176270 - DNA, 13 bp, Artificial Sequence
  Oligonucleotide for detection of SNP TSC0007472
cattacgctcaaa

SEQ ID NO: 176271 - DNA, 13 bp, Artificial Sequence
  Oligonucleotide for detection of SNP TSC0043746
tttataagtattt

SEQ ID NO: 176272 - DNA, 13 bp, Artificial Sequence
  Oligonucleotide for detection of SNP TSC0043746
aaatacttataaa

SEQ ID NO: 176273 - DNA, 13 bp, Artificial Sequence
  Oligonucleotide for detection of SNP TSC0043746
tttatatgtattt

SEQ ID NO: 176274 - DNA, 13 bp, Artificial Sequence
  Oligonucleotide for detection of SNP TSC0043746
aaatacatataaa

SEQ ID NO: 176275 - DNA, 13 bp, Artificial Sequence
  Oligonucleotide for detection of SNP TSC0043746
aaatgtttgtgga

SEQ ID NO: 176276 - DNA, 13 bp, Artificial Sequence
  Oligonucleotide for detection of SNP TSC0043746
tccacaaacattt

SEQ ID NO: 176277 - DNA, 13 bp, Artificial Sequence
  Oligonucleotide for detection of SNP TSC0043746
aaatgtatgtgga

SEQ ID NO: 176278 - DNA, 13 bp, Artificial Sequence
  Oligonucleotide for detection of SNP TSC0043746
tccacatacattt

SEQ ID NO: 176279 - DNA, 13 bp, Artificial Sequence
  Oligonucleotide for detection of SNP TSC0043747
atgtttatagtga

SEQ ID NO: 176280 - DNA, 13 bp, Artificial Sequence
  Oligonucleotide for detection of SNP TSC0043747
tcactataaacat

SEQ ID NO: 176281 - DNA, 13 bp, Artificial Sequence
  Oligonucleotide for detection of SNP TSC0043747
atgtttgtagtga

SEQ ID NO: 176282 - DNA, 13 bp, Artificial Sequence
  Oligonucleotide for detection of SNP TSC0043747
tcactacaaacat

SEQ ID NO: 176283 - DNA, 13 bp, Artificial Sequence
  Oligonucleotide for detection of SNP TSC0043747
acgtttatagtga

SEQ ID NO: 176284 - DNA, 13 bp, Artificial Sequence
  Oligonucleotide for detection of SNP TSC0043747
tcactataaacgt

SEQ ID NO: 176285 - DNA, 13 bp, Artificial Sequence
  Oligonucleotide for detection of SNP TSC0043747
acgtttgtagtga

SEQ ID NO: 176286 - DNA, 13 bp, Artificial Sequence
  Oligonucleotide for detection of SNP TSC0043747
tcactacaaacgt

SEQ ID NO: 176287 - DNA, 13 bp, Artificial Sequence
  Oligonucleotide for detection of SNP TSC0043747
atgttcgtagtga

SEQ ID NO: 176288 - DNA, 13 bp, Artificial Sequence
  Oligonucleotide for detection of SNP TSC0043747
tcactacgaacat

SEQ ID NO: 176289 - DNA, 13 bp, Artificial Sequence
  Oligonucleotide for detection of SNP TSC0043747
acgttcgtagtga

SEQ ID NO: 176290 - DNA, 13 bp, Artificial Sequence
  Oligonucleotide for detection of SNP TSC0043747
tcactacgaacgt

SEQ ID NO: 176291 - DNA, 13 bp, Artificial Sequence
  Oligonucleotide for detection of SNP TSC0043747
ttattatgggtgt

SEQ ID NO: 176292 - DNA, 13 bp, Artificial Sequence
  Oligonucleotide for detection of SNP TSC0043747
acacccataataa

SEQ ID NO: 176293 - DNA, 13 bp, Artificial Sequence
  Oligonucleotide for detection of SNP TSC0043747
ttattatgggcgt

SEQ ID NO: 176294 - DNA, 13 bp, Artificial Sequence
  Oligonucleotide for detection of SNP TSC0043747
acgcccataataa

SEQ ID NO: 176295 - DNA, 13 bp, Artificial Sequence
  Oligonucleotide for detection of SNP TSC0043747
ttattacgggtgt

SEQ ID NO: 176296 - DNA, 13 bp, Artificial Sequence
  Oligonucleotide for detection of SNP TSC0043747
acacccgtaataa

SEQ ID NO: 176297 - DNA, 13 bp, Artificial Sequence
  Oligonucleotide for detection of SNP TSC0043747
ttattacgggcgt

SEQ ID NO: 176298 - DNA, 13 bp, Artificial Sequence
  Oligonucleotide for detection of SNP TSC0043747
acgcccgtaataa

SEQ ID NO: 176299 - DNA, 13 bp, Artificial Sequence
  Oligonucleotide for detection of SNP TSC0043751
ttaataagttttt

SEQ ID NO: 176300 - DNA, 13 bp, Artificial Sequence
  Oligonucleotide for detection of SNP TSC0043751
aaaaacttattaa

SEQ ID NO: 176301 - DNA, 13 bp, Artificial Sequence
  Oligonucleotide for detection of SNP TSC0043751
ttaataggttttt

SEQ ID NO: 176302 - DNA, 13 bp, Artificial Sequence
  Oligonucleotide for detection of SNP TSC0043751
aaaaacctattaa

SEQ ID NO: 176303 - DNA, 13 bp, Artificial Sequence
  Oligonucleotide for detection of SNP TSC0043752
gaattaagatgag

SEQ ID NO: 176304 - DNA, 13 bp, Artificial Sequence
  Oligonucleotide for detection of SNP TSC0043752
ctcatcttaattc

SEQ ID NO: 176305 - DNA, 13 bp, Artificial Sequence
  Oligonucleotide for detection of SNP TSC0043752
gaattaggatgag

SEQ ID NO: 176306 - DNA, 13 bp, Artificial Sequence
  Oligonucleotide for detection of SNP TSC0043752
ctcatcctaattc

SEQ ID NO: 176307 - DNA, 13 bp, Artificial Sequence
  Oligonucleotide for detection of SNP TSC0043754
tatttatatagta

SEQ ID NO: 176308 - DNA, 13 bp, Artificial Sequence
  Oligonucleotide for detection of SNP TSC0043754
tactatataaata

SEQ ID NO: 176309 - DNA, 13 bp, Artificial Sequence
  Oligonucleotide for detection of SNP TSC0043754
tatttagatagta

SEQ ID NO: 176310 - DNA, 13 bp, Artificial Sequence
  Oligonucleotide for detection of SNP TSC0043754
tactatctaaata

SEQ ID NO: 176311 - DNA, 13 bp, Artificial Sequence
  Oligonucleotide for detection of SNP TSC0043754
tgttgtgtgagtg

SEQ ID NO: 176312 - DNA, 13 bp, Artificial Sequence
  Oligonucleotide for detection of SNP TSC0043754
cactcacacaaca

SEQ ID NO: 176313 - DNA, 13 bp, Artificial Sequence
  Oligonucleotide for detection of SNP TSC0043754
tgttgtttgagtg

SEQ ID NO: 176314 - DNA, 13 bp, Artificial Sequence
  Oligonucleotide for detection of SNP TSC0043754
cactcaaacaaca

SEQ ID NO: 176315 - DNA, 13 bp, Artificial Sequence
  Oligonucleotide for detection of SNP TSC0043755
gtatatgtatgta

SEQ ID NO: 176316 - DNA, 13 bp, Artificial Sequence
  Oligonucleotide for detection of SNP TSC0043755
tacatacatatac

SEQ ID NO: 176317 - DNA, 13 bp, Artificial Sequence
  Oligonucleotide for detection of SNP TSC0043755
gtatatatatgta

SEQ ID NO: 176318 - DNA, 13 bp, Artificial Sequence
  Oligonucleotide for detection of SNP TSC0043755
tacatatatatac

SEQ ID NO: 176319 - DNA, 13 bp, Artificial Sequence
  Oligonucleotide for detection of SNP TSC0043755
gtatacgtatgta

SEQ ID NO: 176320 - DNA, 13 bp, Artificial Sequence
  Oligonucleotide for detection of SNP TSC0043755
tacatacgtatac

SEQ ID NO: 176321 - DNA, 13 bp, Artificial Sequence
  Oligonucleotide for detection of SNP TSC0043755
gtatatatacgta

SEQ ID NO: 176322 - DNA, 13 bp, Artificial Sequence
  Oligonucleotide for detection of SNP TSC0043755
tacgtatatatac

SEQ ID NO: 176323 - DNA, 13 bp, Artificial Sequence
  Oligonucleotide for detection of SNP TSC0043755
gtatatgtacgta

SEQ ID NO: 176324 - DNA, 13 bp, Artificial Sequence
  Oligonucleotide for detection of SNP TSC0043755
tacgtacatatac

SEQ ID NO: 176325 - DNA, 13 bp, Artificial Sequence
  Oligonucleotide for detection of SNP TSC0043755
gtatacgtacgta

SEQ ID NO: 176326 - DNA, 13 bp, Artificial Sequence
  Oligonucleotide for detection of SNP TSC0043755
tacgtacgtatac

SEQ ID NO: 176327 - DNA, 13 bp, Artificial Sequence
  Oligonucleotide for detection of SNP TSC0043756
ttaaaatagagaa

SEQ ID NO: 176328 - DNA, 13 bp, Artificial Sequence
  Oligonucleotide for detection of SNP TSC0043756
ttctctattttaa

SEQ ID NO: 176329 - DNA, 13 bp, Artificial Sequence
  Oligonucleotide for detection of SNP TSC0043756
ttaaaagagagaa

SEQ ID NO: 176330 - DNA, 13 bp, Artificial Sequence
  Oligonucleotide for detection of SNP TSC0043756
ttctctcttttaa

SEQ ID NO: 176331 - DNA, 13 bp, Artificial Sequence
  Oligonucleotide for detection of SNP TSC0043759
agtaatgaaattt

SEQ ID NO: 176332 - DNA, 13 bp, Artificial Sequence
  Oligonucleotide for detection of SNP TSC0043759
aaatttcattact

SEQ ID NO: 176333 - DNA, 13 bp, Artificial Sequence
  Oligonucleotide for detection of SNP TSC0043759
agtaataaaattt

SEQ ID NO: 176334 - DNA, 13 bp, Artificial Sequence
  Oligonucleotide for detection of SNP TSC0043759
aaattttattact

SEQ ID NO: 176335 - DNA, 13 bp, Artificial Sequence
  Oligonucleotide for detection of SNP TSC0043759
agtaacgaaattt

SEQ ID NO: 176336 - DNA, 13 bp, Artificial Sequence
  Oligonucleotide for detection of SNP TSC0043759
aaatttcgttact

SEQ ID NO: 176337 - DNA, 13 bp, Artificial Sequence
  Oligonucleotide for detection of SNP TSC0043760
tagggagtattta

SEQ ID NO: 176338 - DNA, 13 bp, Artificial Sequence
  Oligonucleotide for detection of SNP TSC0043760
taaatactcccta

SEQ ID NO: 176339 - DNA, 13 bp, Artificial Sequence
  Oligonucleotide for detection of SNP TSC0043760
tagggaatattta

SEQ ID NO: 176340 - DNA, 13 bp, Artificial Sequence
  Oligonucleotide for detection of SNP TSC0043760
taaatattcccta

SEQ ID NO: 176341 - DNA, 13 bp, Artificial Sequence
  Oligonucleotide for detection of SNP TSC0043761
atattaaaattga

SEQ ID NO: 176342 - DNA, 13 bp, Artificial Sequence
  Oligonucleotide for detection of SNP TSC0043761
tcaattttaatat

SEQ ID NO: 176343 - DNA, 13 bp, Artificial Sequence
  Oligonucleotide for detection of SNP TSC0043761
atattagaattga

SEQ ID NO: 176344 - DNA, 13 bp, Artificial Sequence
  Oligonucleotide for detection of SNP TSC0043761
tcaattctaatat

SEQ ID NO: 176345 - DNA, 13 bp, Artificial Sequence
  Oligonucleotide for detection of SNP TSC0043766
taattatgtttat

SEQ ID NO: 176346 - DNA, 13 bp, Artificial Sequence
  Oligonucleotide for detection of SNP TSC0043766
ataaacataatta

SEQ ID NO: 176347 - DNA, 13 bp, Artificial Sequence
  Oligonucleotide for detection of SNP TSC0043766
taattaggtttat

SEQ ID NO: 176348 - DNA, 13 bp, Artificial Sequence
  Oligonucleotide for detection of SNP TSC0043766
ataaacctaatta

SEQ ID NO: 176349 - DNA, 13 bp, Artificial Sequence
  Oligonucleotide for detection of SNP TSC0043766
ataaatataatta

SEQ ID NO: 176350 - DNA, 13 bp, Artificial Sequence
  Oligonucleotide for detection of SNP TSC0043766
taattatatttat

SEQ ID NO: 176351 - DNA, 13 bp, Artificial Sequence
  Oligonucleotide for detection of SNP TSC0043766
ataaatttaatta

SEQ ID NO: 176352 - DNA, 13 bp, Artificial Sequence
  Oligonucleotide for detection of SNP TSC0043766
taattaaatttat

SEQ ID NO: 176353 - DNA, 13 bp, Artificial Sequence
  Oligonucleotide for detection of SNP TSC0043767
tatttagattgty

SEQ ID NO: 176354 - DNA, 13 bp, Artificial Sequence
  Oligonucleotide for detection of SNP TSC0043767
racaatctaaata

SEQ ID NO: 176355 - DNA, 13 bp, Artificial Sequence
  Oligonucleotide for detection of SNP TSC0043767
tatttaaattgty

SEQ ID NO: 176356 - DNA, 13 bp, Artificial Sequence
  Oligonucleotide for detection of SNP TSC0043767
racaatttaaata

SEQ ID NO: 176357 - DNA, 13 bp, Artificial Sequence
  Oligonucleotide for detection of SNP TSC0043771
gttttttggttay

SEQ ID NO: 176358 - DNA, 13 bp, Artificial Sequence
  Oligonucleotide for detection of SNP TSC0043771
rtaaccaaaaaac

SEQ ID NO: 176359 - DNA, 13 bp, Artificial Sequence
  Oligonucleotide for detection of SNP TSC0043771
gtttttcggttay

SEQ ID NO: 176360 - DNA, 13 bp, Artificial Sequence
  Oligonucleotide for detection of SNP TSC0043771
rtaaccgaaaaac

SEQ ID NO: 176361 - DNA, 13 bp, Artificial Sequence
  Oligonucleotide for detection of SNP TSC0043771
gtggttgaggggy

SEQ ID NO: 176362 - DNA, 13 bp, Artificial Sequence
  Oligonucleotide for detection of SNP TSC0043771
rcccctcaaccac

SEQ ID NO: 176363 - DNA, 13 bp, Artificial Sequence
  Oligonucleotide for detection of SNP TSC0043771
gtggttaaggggy

SEQ ID NO: 176364 - DNA, 13 bp, Artificial Sequence
  Oligonucleotide for detection of SNP TSC0043771
rccccttaaccac

SEQ ID NO: 176365 - DNA, 13 bp, Artificial Sequence
  Oligonucleotide for detection of SNP TSC0043771
gtggtcgaggggy

SEQ ID NO: 176366 - DNA, 13 bp, Artificial Sequence
  Oligonucleotide for detection of SNP TSC0043771
rcccctcgaccac

SEQ ID NO: 176367 - DNA, 13 bp, Artificial Sequence
  Oligonucleotide for detection of SNP TSC0043772
agttattgagaag

SEQ ID NO: 176368 - DNA, 13 bp, Artificial Sequence
  Oligonucleotide for detection of SNP TSC0043772
cttctcaataact

SEQ ID NO: 176369 - DNA, 13 bp, Artificial Sequence
  Oligonucleotide for detection of SNP TSC0043772
agttatcgagaag

SEQ ID NO: 176370 - DNA, 13 bp, Artificial Sequence
  Oligonucleotide for detection of SNP TSC0043772
cttctcgataact

SEQ ID NO: 176371 - DNA, 13 bp, Artificial Sequence
  Oligonucleotide for detection of SNP TSC0043773
tttagatggtttt

SEQ ID NO: 176372 - DNA, 13 bp, Artificial Sequence
  Oligonucleotide for detection of SNP TSC0043773
aaaaccatctaaa

SEQ ID NO: 176373 - DNA, 13 bp, Artificial Sequence
  Oligonucleotide for detection of SNP TSC0043773
tttagacggtttt

SEQ ID NO: 176374 - DNA, 13 bp, Artificial Sequence
  Oligonucleotide for detection of SNP TSC0043773
aaaaccgtctaaa

SEQ ID NO: 176375 - DNA, 13 bp, Artificial Sequence
  Oligonucleotide for detection of SNP TSC0043773
aaaattgtttaaa

SEQ ID NO: 176376 - DNA, 13 bp, Artificial Sequence
  Oligonucleotide for detection of SNP TSC0043773
tttaaacaatttt

SEQ ID NO: 176377 - DNA, 13 bp, Artificial Sequence
  Oligonucleotide for detection of SNP TSC0043773
aaaatcgtttaaa

SEQ ID NO: 176378 - DNA, 13 bp, Artificial Sequence
  Oligonucleotide for detection of SNP TSC0043773
tttaaacgatttt

SEQ ID NO: 176379 - DNA, 13 bp, Artificial Sequence
  Oligonucleotide for detection of SNP TSC0043774
aataatatgatay

SEQ ID NO: 176380 - DNA, 13 bp, Artificial Sequence
  Oligonucleotide for detection of SNP TSC0043774
rtatcatattatt

SEQ ID NO: 176381 - DNA, 13 bp, Artificial Sequence
  Oligonucleotide for detection of SNP TSC0043774
aataatgtgatay

SEQ ID NO: 176382 - DNA, 13 bp, Artificial Sequence
  Oligonucleotide for detection of SNP TSC0043774
rtatcacattatt

SEQ ID NO: 176383 - DNA, 13 bp, Artificial Sequence
  Oligonucleotide for detection of SNP TSC0043777
attttcgtaaaty

SEQ ID NO: 176384 - DNA, 13 bp, Artificial Sequence
  Oligonucleotide for detection of SNP TSC0043777
ratttacgaaaat

SEQ ID NO: 176385 - DNA, 13 bp, Artificial Sequence
  Oligonucleotide for detection of SNP TSC0043777
gatttatgaggat

SEQ ID NO: 176386 - DNA, 13 bp, Artificial Sequence
  Oligonucleotide for detection of SNP TSC0043777
atcctcataaatc

SEQ ID NO: 176387 - DNA, 13 bp, Artificial Sequence
  Oligonucleotide for detection of SNP TSC0043777
gatttacgaggat

SEQ ID NO: 176388 - DNA, 13 bp, Artificial Sequence
  Oligonucleotide for detection of SNP TSC0043777
atcctcgtaaatc

SEQ ID NO: 176389 - DNA, 13 bp, Artificial Sequence
  Oligonucleotide for detection of SNP TSC0043787
tttttttttcgtg

SEQ ID NO: 176390 - DNA, 13 bp, Artificial Sequence
  Oligonucleotide for detection of SNP TSC0043787
cacgaaaaaaaaa

SEQ ID NO: 176391 - DNA, 13 bp, Artificial Sequence
  Oligonucleotide for detection of SNP TSC0043787
ttttttgttcgtg

SEQ ID NO: 176392 - DNA, 13 bp, Artificial Sequence
  Oligonucleotide for detection of SNP TSC0043787
cacgaacaaaaaa

SEQ ID NO: 176393 - DNA, 13 bp, Artificial Sequence
  Oligonucleotide for detection of SNP TSC0043787
tttttcgttcgtg

SEQ ID NO: 176394 - DNA, 13 bp, Artificial Sequence
  Oligonucleotide for detection of SNP TSC0043787
cacgaacgaaaaa

SEQ ID NO: 176395 - DNA, 13 bp, Artificial Sequence
  Oligonucleotide for detection of SNP TSC0043787
tatgaaggagaga

SEQ ID NO: 176396 - DNA, 13 bp, Artificial Sequence
  Oligonucleotide for detection of SNP TSC0043787
tctctccttcata

SEQ ID NO: 176397 - DNA, 13 bp, Artificial Sequence
  Oligonucleotide for detection of SNP TSC0043787
tatgaatgagaga

SEQ ID NO: 176398 - DNA, 13 bp, Artificial Sequence
  Oligonucleotide for detection of SNP TSC0043787
tctctcattcata

SEQ ID NO: 176399 - DNA, 13 bp, Artificial Sequence
  Oligonucleotide for detection of SNP TSC0043787
tacgaaggagaga

SEQ ID NO: 176400 - DNA, 13 bp, Artificial Sequence
  Oligonucleotide for detection of SNP TSC0043787
tctctccttcgta

SEQ ID NO: 176401 - DNA, 13 bp, Artificial Sequence
  Oligonucleotide for detection of SNP TSC0043787
tacgaatgagaga

SEQ ID NO: 176402 - DNA, 13 bp, Artificial Sequence
  Oligonucleotide for detection of SNP TSC0043787
tctctcattcgta

SEQ ID NO: 176403 - DNA, 13 bp, Artificial Sequence
  Oligonucleotide for detection of SNP TSC0043787
tatgaacgagaga

SEQ ID NO: 176404 - DNA, 13 bp, Artificial Sequence
  Oligonucleotide for detection of SNP TSC0043787
tctctcgttcata

SEQ ID NO: 176405 - DNA, 13 bp, Artificial Sequence
  Oligonucleotide for detection of SNP TSC0043787
tacgaacgagaga

SEQ ID NO: 176406 - DNA, 13 bp, Artificial Sequence
  Oligonucleotide for detection of SNP TSC0043787
tctctcgttcgta

SEQ ID NO: 176407 - DNA, 13 bp, Artificial Sequence
  Oligonucleotide for detection of SNP TSC0043788
tttataattgagg

SEQ ID NO: 176408 - DNA, 13 bp, Artificial Sequence
  Oligonucleotide for detection of SNP TSC0043788
cctcaattataaa

SEQ ID NO: 176409 - DNA, 13 bp, Artificial Sequence
  Oligonucleotide for detection of SNP TSC0043788
tttatagttgagg

SEQ ID NO: 176410 - DNA, 13 bp, Artificial Sequence
  Oligonucleotide for detection of SNP TSC0043788
cctcaactataaa

SEQ ID NO: 176411 - DNA, 13 bp, Artificial Sequence
  Oligonucleotide for detection of SNP TSC0043790
aggaagtgggtty

SEQ ID NO: 176412 - DNA, 13 bp, Artificial Sequence
  Oligonucleotide for detection of SNP TSC0043790
raacccacttcct

SEQ ID NO: 176413 - DNA, 13 bp, Artificial Sequence
  Oligonucleotide for detection of SNP TSC0043790
aggaagcgggtty

SEQ ID NO: 176414 - DNA, 13 bp, Artificial Sequence
  Oligonucleotide for detection of SNP TSC0043790
raacccgcttcct

SEQ ID NO: 176415 - DNA, 13 bp, Artificial Sequence
  Oligonucleotide for detection of SNP TSC0043791
aatttaggagagy

SEQ ID NO: 176416 - DNA, 13 bp, Artificial Sequence
  Oligonucleotide for detection of SNP TSC0043791
rctctcctaaatt

SEQ ID NO: 176417 - DNA, 13 bp, Artificial Sequence
  Oligonucleotide for detection of SNP TSC0043791
aatttaagagagy

SEQ ID NO: 176418 - DNA, 13 bp, Artificial Sequence
  Oligonucleotide for detection of SNP TSC0043791
rctctcttaaatt

SEQ ID NO: 176419 - DNA, 13 bp, Artificial Sequence
  Oligonucleotide for detection of SNP TSC0043792
ttttattgggtty

SEQ ID NO: 176420 - DNA, 13 bp, Artificial Sequence
  Oligonucleotide for detection of SNP TSC0043792
raacccaataaaa

SEQ ID NO: 176421 - DNA, 13 bp, Artificial Sequence
  Oligonucleotide for detection of SNP TSC0043792
ttttatggggtty

SEQ ID NO: 176422 - DNA, 13 bp, Artificial Sequence
  Oligonucleotide for detection of SNP TSC0043792
raaccccataaaa

SEQ ID NO: 176423 - DNA, 13 bp, Artificial Sequence
  Oligonucleotide for detection of SNP TSC0043792
ttttatcgggtty

SEQ ID NO: 176424 - DNA, 13 bp, Artificial Sequence
  Oligonucleotide for detection of SNP TSC0043792
raacccgataaaa

SEQ ID NO: 176425 - DNA, 13 bp, Artificial Sequence
  Oligonucleotide for detection of SNP TSC0043792
ttttacggggtty

SEQ ID NO: 176426 - DNA, 13 bp, Artificial Sequence
  Oligonucleotide for detection of SNP TSC0043792
raaccccgtaaaa

SEQ ID NO: 176427 - DNA, 13 bp, Artificial Sequence
  Oligonucleotide for detection of SNP TSC0043792
ggatttggtggga

SEQ ID NO: 176428 - DNA, 13 bp, Artificial Sequence
  Oligonucleotide for detection of SNP TSC0043792
tcccaccaaatcc

SEQ ID NO: 176429 - DNA, 13 bp, Artificial Sequence
  Oligonucleotide for detection of SNP TSC0043792
ggatttagtggga

SEQ ID NO: 176430 - DNA, 13 bp, Artificial Sequence
  Oligonucleotide for detection of SNP TSC0043792
tcccactaaatcc

SEQ ID NO: 176431 - DNA, 13 bp, Artificial Sequence
  Oligonucleotide for detection of SNP TSC0043792
ggattttgtggga

SEQ ID NO: 176432 - DNA, 13 bp, Artificial Sequence
  Oligonucleotide for detection of SNP TSC0043792
tcccacaaaatcc

SEQ ID NO: 176433 - DNA, 13 bp, Artificial Sequence
  Oligonucleotide for detection of SNP TSC0043792
ggattcggtggga

SEQ ID NO: 176434 - DNA, 13 bp, Artificial Sequence
  Oligonucleotide for detection of SNP TSC0043792
tcccaccgaatcc

SEQ ID NO: 176435 - DNA, 13 bp, Artificial Sequence
  Oligonucleotide for detection of SNP TSC0043792
ggatttcgtggga

SEQ ID NO: 176436 - DNA, 13 bp, Artificial Sequence
  Oligonucleotide for detection of SNP TSC0043792
tcccacgaaatcc

SEQ ID NO: 176437 - DNA, 13 bp, Artificial Sequence
  Oligonucleotide for detection of SNP TSC0043793
tatagttgtattt

SEQ ID NO: 176438 - DNA, 13 bp, Artificial Sequence
  Oligonucleotide for detection of SNP TSC0043793
aaatacaactata

SEQ ID NO: 176439 - DNA, 13 bp, Artificial Sequence
  Oligonucleotide for detection of SNP TSC0043793
tatagtggtattt

SEQ ID NO: 176440 - DNA, 13 bp, Artificial Sequence
  Oligonucleotide for detection of SNP TSC0043793
aaataccactata

SEQ ID NO: 176441 - DNA, 13 bp, Artificial Sequence
  Oligonucleotide for detection of SNP TSC0043793
aaatataattgta

SEQ ID NO: 176442 - DNA, 13 bp, Artificial Sequence
  Oligonucleotide for detection of SNP TSC0043793
tacaattatattt

SEQ ID NO: 176443 - DNA, 13 bp, Artificial Sequence
  Oligonucleotide for detection of SNP TSC0043793
aaatattattgta

SEQ ID NO: 176444 - DNA, 13 bp, Artificial Sequence
  Oligonucleotide for detection of SNP TSC0043793
tacaataatattt

SEQ ID NO: 176445 - DNA, 13 bp, Artificial Sequence
  Oligonucleotide for detection of SNP TSC0043794
tttagttggttgg

SEQ ID NO: 176446 - DNA, 13 bp, Artificial Sequence
  Oligonucleotide for detection of SNP TSC0043794
ccaaccaactaaa

SEQ ID NO: 176447 - DNA, 13 bp, Artificial Sequence
  Oligonucleotide for detection of SNP TSC0043794
tttagtcggttgg

SEQ ID NO: 176448 - DNA, 13 bp, Artificial Sequence
  Oligonucleotide for detection of SNP TSC0043794
ccaaccgactaaa

SEQ ID NO: 176449 - DNA, 13 bp, Artificial Sequence
  Oligonucleotide for detection of SNP TSC0043794
ttaattggttggg

SEQ ID NO: 176450 - DNA, 13 bp, Artificial Sequence
  Oligonucleotide for detection of SNP TSC0043794
cccaaccaattaa

SEQ ID NO: 176451 - DNA, 13 bp, Artificial Sequence
  Oligonucleotide for detection of SNP TSC0043794
ttaattagttggg

SEQ ID NO: 176452 - DNA, 13 bp, Artificial Sequence
  Oligonucleotide for detection of SNP TSC0043794
cccaactaattaa

SEQ ID NO: 176453 - DNA, 13 bp, Artificial Sequence
  Oligonucleotide for detection of SNP TSC0043794
ttaatcggttggg

SEQ ID NO: 176454 - DNA, 13 bp, Artificial Sequence
  Oligonucleotide for detection of SNP TSC0043794
cccaaccgattaa

SEQ ID NO: 176455 - DNA, 13 bp, Artificial Sequence
  Oligonucleotide for detection of SNP TSC0043797
gattttatatagy

SEQ ID NO: 176456 - DNA, 13 bp, Artificial Sequence
  Oligonucleotide for detection of SNP TSC0043797
rctatataaaatc

SEQ ID NO: 176457 - DNA, 13 bp, Artificial Sequence
  Oligonucleotide for detection of SNP TSC0043797
gattttgtatagy

SEQ ID NO: 176458 - DNA, 13 bp, Artificial Sequence
  Oligonucleotide for detection of SNP TSC0043797
rctatacaaaatc

SEQ ID NO: 176459 - DNA, 13 bp, Artificial Sequence
  Oligonucleotide for detection of SNP TSC0043797
gatttcgtatagy

SEQ ID NO: 176460 - DNA, 13 bp, Artificial Sequence
  Oligonucleotide for detection of SNP TSC0043797
rctatacgaaatc

SEQ ID NO: 176461 - DNA, 13 bp, Artificial Sequence
  Oligonucleotide for detection of SNP TSC0043797
gttgtgtgaaaty

SEQ ID NO: 176462 - DNA, 13 bp, Artificial Sequence
  Oligonucleotide for detection of SNP TSC0043797
ratttcacacaac

SEQ ID NO: 176463 - DNA, 13 bp, Artificial Sequence
  Oligonucleotide for detection of SNP TSC0043797
gttgtgcgaaaty

SEQ ID NO: 176464 - DNA, 13 bp, Artificial Sequence
  Oligonucleotide for detection of SNP TSC0043797
ratttcgcacaac

SEQ ID NO: 176465 - DNA, 13 bp, Artificial Sequence
  Oligonucleotide for detection of SNP TSC0043798
aatttaaatttaa

SEQ ID NO: 176466 - DNA, 13 bp, Artificial Sequence
  Oligonucleotide for detection of SNP TSC0043798
ttaaatttaaatt

SEQ ID NO: 176467 - DNA, 13 bp, Artificial Sequence
  Oligonucleotide for detection of SNP TSC0043798
aatttagatttaa

SEQ ID NO: 176468 - DNA, 13 bp, Artificial Sequence
  Oligonucleotide for detection of SNP TSC0043798
ttaaatctaaatt

SEQ ID NO: 176469 - DNA, 13 bp, Artificial Sequence
  Oligonucleotide for detection of SNP TSC0043799
aattatggggtag

SEQ ID NO: 176470 - DNA, 13 bp, Artificial Sequence
  Oligonucleotide for detection of SNP TSC0043799
ctaccccataatt

SEQ ID NO: 176471 - DNA, 13 bp, Artificial Sequence
  Oligonucleotide for detection of SNP TSC0043799
aattatagggtag

SEQ ID NO: 176472 - DNA, 13 bp, Artificial Sequence
  Oligonucleotide for detection of SNP TSC0043799
ctaccctataatt

SEQ ID NO: 176473 - DNA, 13 bp, Artificial Sequence
  Oligonucleotide for detection of SNP TSC0043801
gaaaagttttaty

SEQ ID NO: 176474 - DNA, 13 bp, Artificial Sequence
  Oligonucleotide for detection of SNP TSC0043801
rataaaacttttc

SEQ ID NO: 176475 - DNA, 13 bp, Artificial Sequence
  Oligonucleotide for detection of SNP TSC0043801
gaaaaggtttaty

SEQ ID NO: 176476 - DNA, 13 bp, Artificial Sequence
  Oligonucleotide for detection of SNP TSC0043801
rataaaccttttc

SEQ ID NO: 176477 - DNA, 13 bp, Artificial Sequence
  Oligonucleotide for detection of SNP TSC0043801
gatgggattttty

SEQ ID NO: 176478 - DNA, 13 bp, Artificial Sequence
  Oligonucleotide for detection of SNP TSC0043801
raaaaatcccatc

SEQ ID NO: 176479 - DNA, 13 bp, Artificial Sequence
  Oligonucleotide for detection of SNP TSC0043801
gatgggtttttty

SEQ ID NO: 176480 - DNA, 13 bp, Artificial Sequence
  Oligonucleotide for detection of SNP TSC0043801
raaaaaacccatc

SEQ ID NO: 176481 - DNA, 13 bp, Artificial Sequence
  Oligonucleotide for detection of SNP TSC0043802
atttttattaagy

SEQ ID NO: 176482 - DNA, 13 bp, Artificial Sequence
  Oligonucleotide for detection of SNP TSC0043802
rcttaataaaaat

SEQ ID NO: 176483 - DNA, 13 bp, Artificial Sequence
  Oligonucleotide for detection of SNP TSC0043802
atttttgttaagy

SEQ ID NO: 176484 - DNA, 13 bp, Artificial Sequence
  Oligonucleotide for detection of SNP TSC0043802
rcttaacaaaaat

SEQ ID NO: 176485 - DNA, 13 bp, Artificial Sequence
  Oligonucleotide for detection of SNP TSC0043802
attttcgttaagy

SEQ ID NO: 176486 - DNA, 13 bp, Artificial Sequence
  Oligonucleotide for detection of SNP TSC0043802
rcttaacgaaaat

SEQ ID NO: 176487 - DNA, 13 bp, Artificial Sequence
  Oligonucleotide for detection of SNP TSC0043802
gtttagtgaaaat

SEQ ID NO: 176488 - DNA, 13 bp, Artificial Sequence
  Oligonucleotide for detection of SNP TSC0043802
attttcactaaac

SEQ ID NO: 176489 - DNA, 13 bp, Artificial Sequence
  Oligonucleotide for detection of SNP TSC0043802
gtttagcgaaaat

SEQ ID NO: 176490 - DNA, 13 bp, Artificial Sequence
  Oligonucleotide for detection of SNP TSC0043802
attttcgctaaac

SEQ ID NO: 176491 - DNA, 13 bp, Artificial Sequence
  Oligonucleotide for detection of SNP TSC0043803
ggttatgaagaaa

SEQ ID NO: 176492 - DNA, 13 bp, Artificial Sequence
  Oligonucleotide for detection of SNP TSC0043803
tttcttcataacc

SEQ ID NO: 176493 - DNA, 13 bp, Artificial Sequence
  Oligonucleotide for detection of SNP TSC0043803
ggttataaagaaa

SEQ ID NO: 176494 - DNA, 13 bp, Artificial Sequence
  Oligonucleotide for detection of SNP TSC0043803
tttctttataacc

SEQ ID NO: 176495 - DNA, 13 bp, Artificial Sequence
  Oligonucleotide for detection of SNP TSC0007632
gtgtgaatatttt

SEQ ID NO: 176496 - DNA, 13 bp, Artificial Sequence
  Oligonucleotide for detection of SNP TSC0007632
aaaatattcacac

SEQ ID NO: 176497 - DNA, 13 bp, Artificial Sequence
  Oligonucleotide for detection of SNP TSC0007632
gtgtgagtatttt

SEQ ID NO: 176498 - DNA, 13 bp, Artificial Sequence
  Oligonucleotide for detection of SNP TSC0007632
aaaatactcacac

SEQ ID NO: 176499 - DNA, 13 bp, Artificial Sequence
  Oligonucleotide for detection of SNP TSC0043804
tatatagaattaa

SEQ ID NO: 176500 - DNA, 13 bp, Artificial Sequence
  Oligonucleotide for detection of SNP TSC0043804
ttaattctatata

SEQ ID NO: 176501 - DNA, 13 bp, Artificial Sequence
  Oligonucleotide for detection of SNP TSC0043805
aattgtgttgaga

SEQ ID NO: 176502 - DNA, 13 bp, Artificial Sequence
  Oligonucleotide for detection of SNP TSC0043805
tctcaacacaatt

SEQ ID NO: 176503 - DNA, 13 bp, Artificial Sequence
  Oligonucleotide for detection of SNP TSC0043805
aattgtattgaga

SEQ ID NO: 176504 - DNA, 13 bp, Artificial Sequence
  Oligonucleotide for detection of SNP TSC0043805
tctcaatacaatt

SEQ ID NO: 176505 - DNA, 13 bp, Artificial Sequence
  Oligonucleotide for detection of SNP TSC0043805
aattgtgtcgaga

SEQ ID NO: 176506 - DNA, 13 bp, Artificial Sequence
  Oligonucleotide for detection of SNP TSC0043805
tctcgacacaatt

SEQ ID NO: 176507 - DNA, 13 bp, Artificial Sequence
  Oligonucleotide for detection of SNP TSC0043805
aattgtatcgaga

SEQ ID NO: 176508 - DNA, 13 bp, Artificial Sequence
  Oligonucleotide for detection of SNP TSC0043805
tctcgatacaatt

SEQ ID NO: 176509 - DNA, 13 bp, Artificial Sequence
  Oligonucleotide for detection of SNP TSC0043807
gagggttgtttga

SEQ ID NO: 176510 - DNA, 13 bp, Artificial Sequence
  Oligonucleotide for detection of SNP TSC0043807
tcaaacaaccctc

SEQ ID NO: 176511 - DNA, 13 bp, Artificial Sequence
  Oligonucleotide for detection of SNP TSC0043807
gagggtggtttga

SEQ ID NO: 176512 - DNA, 13 bp, Artificial Sequence
  Oligonucleotide for detection of SNP TSC0043807
tcaaaccaccctc

SEQ ID NO: 176513 - DNA, 13 bp, Artificial Sequence
  Oligonucleotide for detection of SNP TSC0005526
tatttagggggga

SEQ ID NO: 176514 - DNA, 13 bp, Artificial Sequence
  Oligonucleotide for detection of SNP TSC0005526
tcccccctaaata

SEQ ID NO: 176515 - DNA, 13 bp, Artificial Sequence
  Oligonucleotide for detection of SNP TSC0005526
tatttaaggggga

SEQ ID NO: 176516 - DNA, 13 bp, Artificial Sequence
  Oligonucleotide for detection of SNP TSC0005526
tcccccttaaata

SEQ ID NO: 176517 - DNA, 13 bp, Artificial Sequence
  Oligonucleotide for detection of SNP TSC0043808
tggttgttgtttt

SEQ ID NO: 176518 - DNA, 13 bp, Artificial Sequence
  Oligonucleotide for detection of SNP TSC0043808
aaaacaacaacca

SEQ ID NO: 176519 - DNA, 13 bp, Artificial Sequence
  Oligonucleotide for detection of SNP TSC0043808
tggttggtgtttt

SEQ ID NO: 176520 - DNA, 13 bp, Artificial Sequence
  Oligonucleotide for detection of SNP TSC0043808
aaaacaccaacca

SEQ ID NO: 176521 - DNA, 13 bp, Artificial Sequence
  Oligonucleotide for detection of SNP TSC0043808
agaatagtagtta

SEQ ID NO: 176522 - DNA, 13 bp, Artificial Sequence
  Oligonucleotide for detection of SNP TSC0043808
taactactattct

SEQ ID NO: 176523 - DNA, 13 bp, Artificial Sequence
  Oligonucleotide for detection of SNP TSC0043808
agaatattagtta

SEQ ID NO: 176524 - DNA, 13 bp, Artificial Sequence
  Oligonucleotide for detection of SNP TSC0043808
taactaatattct

SEQ ID NO: 176525 - DNA, 13 bp, Artificial Sequence
  Oligonucleotide for detection of SNP TSC0043810
taaagggatatty

SEQ ID NO: 176526 - DNA, 13 bp, Artificial Sequence
  Oligonucleotide for detection of SNP TSC0043810
raatatcccttta

SEQ ID NO: 176527 - DNA, 13 bp, Artificial Sequence
  Oligonucleotide for detection of SNP TSC0043810
taaaggaatatty

SEQ ID NO: 176528 - DNA, 13 bp, Artificial Sequence
  Oligonucleotide for detection of SNP TSC0043810
raatattccttta

SEQ ID NO: 176529 - DNA, 13 bp, Artificial Sequence
  Oligonucleotide for detection of SNP TSC0043811
ttttgtttagagt

SEQ ID NO: 176530 - DNA, 13 bp, Artificial Sequence
  Oligonucleotide for detection of SNP TSC0043811
actctaaacaaaa

SEQ ID NO: 176531 - DNA, 13 bp, Artificial Sequence
  Oligonucleotide for detection of SNP TSC0043811
ttttgtgtagagt

SEQ ID NO: 176532 - DNA, 13 bp, Artificial Sequence
  Oligonucleotide for detection of SNP TSC0043811
actctacacaaaa

SEQ ID NO: 176533 - DNA, 13 bp, Artificial Sequence
  Oligonucleotide for detection of SNP TSC0043811
ttttgcgtagagt

SEQ ID NO: 176534 - DNA, 13 bp, Artificial Sequence
  Oligonucleotide for detection of SNP TSC0043811
actctacgcaaaa

SEQ ID NO: 176535 - DNA, 13 bp, Artificial Sequence
  Oligonucleotide for detection of SNP TSC0043811
attttgggtaaaa

SEQ ID NO: 176536 - DNA, 13 bp, Artificial Sequence
  Oligonucleotide for detection of SNP TSC0043811
ttttacccaaaat

SEQ ID NO: 176537 - DNA, 13 bp, Artificial Sequence
  Oligonucleotide for detection of SNP TSC0043811
attttgtgtaaaa

SEQ ID NO: 176538 - DNA, 13 bp, Artificial Sequence
  Oligonucleotide for detection of SNP TSC0043811
ttttacacaaaat

SEQ ID NO: 176539 - DNA, 13 bp, Artificial Sequence
  Oligonucleotide for detection of SNP TSC0043811
attttgcgtaaaa

SEQ ID NO: 176540 - DNA, 13 bp, Artificial Sequence
  Oligonucleotide for detection of SNP TSC0043811
ttttacgcaaaat

SEQ ID NO: 176541 - DNA, 13 bp, Artificial Sequence
  Oligonucleotide for detection of SNP TSC0043812
agaaatagggtag

SEQ ID NO: 176542 - DNA, 13 bp, Artificial Sequence
  Oligonucleotide for detection of SNP TSC0043812
ctaccctatttct

SEQ ID NO: 176543 - DNA, 13 bp, Artificial Sequence
  Oligonucleotide for detection of SNP TSC0043812
agaaatggggtag

SEQ ID NO: 176544 - DNA, 13 bp, Artificial Sequence
  Oligonucleotide for detection of SNP TSC0043812
ctaccccatttct

SEQ ID NO: 176545 - DNA, 13 bp, Artificial Sequence
  Oligonucleotide for detection of SNP TSC0043812
agaaacggggtag

SEQ ID NO: 176546 - DNA, 13 bp, Artificial Sequence
  Oligonucleotide for detection of SNP TSC0043812
ctaccccgtttct

SEQ ID NO: 176547 - DNA, 13 bp, Artificial Sequence
  Oligonucleotide for detection of SNP TSC0010376
ggatattgtttta

SEQ ID NO: 176548 - DNA, 13 bp, Artificial Sequence
  Oligonucleotide for detection of SNP TSC0010376
taaaacaatatcc

SEQ ID NO: 176549 - DNA, 13 bp, Artificial Sequence
  Oligonucleotide for detection of SNP TSC0010376
ggatatcgtttta

SEQ ID NO: 176550 - DNA, 13 bp, Artificial Sequence
  Oligonucleotide for detection of SNP TSC0010376
taaaacgatatcc

SEQ ID NO: 176551 - DNA, 13 bp, Artificial Sequence
  Oligonucleotide for detection of SNP TSC0010376
tgagatggtgtty

SEQ ID NO: 176552 - DNA, 13 bp, Artificial Sequence
  Oligonucleotide for detection of SNP TSC0010376
raacaccatctca

SEQ ID NO: 176553 - DNA, 13 bp, Artificial Sequence
  Oligonucleotide for detection of SNP TSC0010376
tgagatagtgtty

SEQ ID NO: 176554 - DNA, 13 bp, Artificial Sequence
  Oligonucleotide for detection of SNP TSC0010376
raacactatctca

SEQ ID NO: 176555 - DNA, 13 bp, Artificial Sequence
  Oligonucleotide for detection of SNP TSC0010376
tgagacggtgtty

SEQ ID NO: 176556 - DNA, 13 bp, Artificial Sequence
  Oligonucleotide for detection of SNP TSC0010376
raacaccgtctca

SEQ ID NO: 176557 - DNA, 13 bp, Artificial Sequence
  Oligonucleotide for detection of SNP TSC0010377
gtaggtttttgta

SEQ ID NO: 176558 - DNA, 13 bp, Artificial Sequence
  Oligonucleotide for detection of SNP TSC0010377
tacaaaaacctac

SEQ ID NO: 176559 - DNA, 13 bp, Artificial Sequence
  Oligonucleotide for detection of SNP TSC0010377
tatagggatttgy

SEQ ID NO: 176560 - DNA, 13 bp, Artificial Sequence
  Oligonucleotide for detection of SNP TSC0010377
rcaaatccctata

SEQ ID NO: 176561 - DNA, 13 bp, Artificial Sequence
  Oligonucleotide for detection of SNP TSC0010377
tataggtatttgy

SEQ ID NO: 176562 - DNA, 13 bp, Artificial Sequence
  Oligonucleotide for detection of SNP TSC0010377
rcaaatacctata

SEQ ID NO: 176563 - DNA, 13 bp, Artificial Sequence
  Oligonucleotide for detection of SNP TSC0043814
atatgtatgttga

SEQ ID NO: 176564 - DNA, 13 bp, Artificial Sequence
  Oligonucleotide for detection of SNP TSC0043814
tcaacatacatat

SEQ ID NO: 176565 - DNA, 13 bp, Artificial Sequence
  Oligonucleotide for detection of SNP TSC0043814
atatgtgtgttga

SEQ ID NO: 176566 - DNA, 13 bp, Artificial Sequence
  Oligonucleotide for detection of SNP TSC0043814
tcaacacacatat

SEQ ID NO: 176567 - DNA, 13 bp, Artificial Sequence
  Oligonucleotide for detection of SNP TSC0043814
atatgcgtgttga

SEQ ID NO: 176568 - DNA, 13 bp, Artificial Sequence
  Oligonucleotide for detection of SNP TSC0043814
tcaacacgcatat

SEQ ID NO: 176569 - DNA, 13 bp, Artificial Sequence
  Oligonucleotide for detection of SNP TSC0043814
ttaatatgtatat

SEQ ID NO: 176570 - DNA, 13 bp, Artificial Sequence
  Oligonucleotide for detection of SNP TSC0043814
atatacatattaa

SEQ ID NO: 176571 - DNA, 13 bp, Artificial Sequence
  Oligonucleotide for detection of SNP TSC0043814
ttaatacgtatat

SEQ ID NO: 176572 - DNA, 13 bp, Artificial Sequence
  Oligonucleotide for detection of SNP TSC0043814
atatacgtattaa

SEQ ID NO: 176573 - DNA, 13 bp, Artificial Sequence
  Oligonucleotide for detection of SNP TSC0043815
ggtaagtgtgata

SEQ ID NO: 176574 - DNA, 13 bp, Artificial Sequence
  Oligonucleotide for detection of SNP TSC0043815
tatcacacttacc

SEQ ID NO: 176575 - DNA, 13 bp, Artificial Sequence
  Oligonucleotide for detection of SNP TSC0043815
ggtaagcgtgata

SEQ ID NO: 176576 - DNA, 13 bp, Artificial Sequence
  Oligonucleotide for detection of SNP TSC0043815
tatcacgcttacc

SEQ ID NO: 176577 - DNA, 13 bp, Artificial Sequence
  Oligonucleotide for detection of SNP TSC0043816
aagttgtgattta

SEQ ID NO: 176578 - DNA, 13 bp, Artificial Sequence
  Oligonucleotide for detection of SNP TSC0043816
taaatcacaactt

SEQ ID NO: 176579 - DNA, 13 bp, Artificial Sequence
  Oligonucleotide for detection of SNP TSC0043816
aagttgcgattta

SEQ ID NO: 176580 - DNA, 13 bp, Artificial Sequence
  Oligonucleotide for detection of SNP TSC0043816
taaatcgcaactt

SEQ ID NO: 176581 - DNA, 13 bp, Artificial Sequence
  Oligonucleotide for detection of SNP TSC0043816
tgagttgtaattt

SEQ ID NO: 176582 - DNA, 13 bp, Artificial Sequence
  Oligonucleotide for detection of SNP TSC0043816
aaattacaactca

SEQ ID NO: 176583 - DNA, 13 bp, Artificial Sequence
  Oligonucleotide for detection of SNP TSC0043816
tgagttataattt

SEQ ID NO: 176584 - DNA, 13 bp, Artificial Sequence
  Oligonucleotide for detection of SNP TSC0043816
aaattataactca

SEQ ID NO: 176585 - DNA, 13 bp, Artificial Sequence
  Oligonucleotide for detection of SNP TSC0043816
tgagtcgtaattt

SEQ ID NO: 176586 - DNA, 13 bp, Artificial Sequence
  Oligonucleotide for detection of SNP TSC0043816
aaattacgactca

SEQ ID NO: 176587 - DNA, 13 bp, Artificial Sequence
  Oligonucleotide for detection of SNP TSC0043817
gttgatattatag

SEQ ID NO: 176588 - DNA, 13 bp, Artificial Sequence
  Oligonucleotide for detection of SNP TSC0043817
ctataatatcaac

SEQ ID NO: 176589 - DNA, 13 bp, Artificial Sequence
  Oligonucleotide for detection of SNP TSC0043817
gttgatgttatag

SEQ ID NO: 176590 - DNA, 13 bp, Artificial Sequence
  Oligonucleotide for detection of SNP TSC0043817
ctataacatcaac

SEQ ID NO: 176591 - DNA, 13 bp, Artificial Sequence
  Oligonucleotide for detection of SNP TSC0043817
gttgacgttatag

SEQ ID NO: 176592 - DNA, 13 bp, Artificial Sequence
  Oligonucleotide for detection of SNP TSC0043817
ctataacgtcaac

SEQ ID NO: 176593 - DNA, 13 bp, Artificial Sequence
  Oligonucleotide for detection of SNP TSC0043817
ttgtgatgttagy

SEQ ID NO: 176594 - DNA, 13 bp, Artificial Sequence
  Oligonucleotide for detection of SNP TSC0043817
rctaacatcacaa

SEQ ID NO: 176595 - DNA, 13 bp, Artificial Sequence
  Oligonucleotide for detection of SNP TSC0043817
ttgtgacgttagy

SEQ ID NO: 176596 - DNA, 13 bp, Artificial Sequence
  Oligonucleotide for detection of SNP TSC0043817
rctaacgtcacaa

SEQ ID NO: 176597 - DNA, 13 bp, Artificial Sequence
  Oligonucleotide for detection of SNP TSC0043818
agttaagtttttg

SEQ ID NO: 176598 - DNA, 13 bp, Artificial Sequence
  Oligonucleotide for detection of SNP TSC0043818
caaaaacttaact

SEQ ID NO: 176599 - DNA, 13 bp, Artificial Sequence
  Oligonucleotide for detection of SNP TSC0043818
agttaaatttttg

SEQ ID NO: 176600 - DNA, 13 bp, Artificial Sequence
  Oligonucleotide for detection of SNP TSC0043818
caaaaatttaact

SEQ ID NO: 176601 - DNA, 13 bp, Artificial Sequence
  Oligonucleotide for detection of SNP TSC0043820
ggttttaaataty

SEQ ID NO: 176602 - DNA, 13 bp, Artificial Sequence
  Oligonucleotide for detection of SNP TSC0043820
ratatttaaaacc

SEQ ID NO: 176603 - DNA, 13 bp, Artificial Sequence
  Oligonucleotide for detection of SNP TSC0043820
ggttttgaataty

SEQ ID NO: 176604 - DNA, 13 bp, Artificial Sequence
  Oligonucleotide for detection of SNP TSC0043820
ratattcaaaacc

SEQ ID NO: 176605 - DNA, 13 bp, Artificial Sequence
  Oligonucleotide for detection of SNP TSC0043822
aatatagatttat

SEQ ID NO: 176606 - DNA, 13 bp, Artificial Sequence
  Oligonucleotide for detection of SNP TSC0043822
ataaatctatatt

SEQ ID NO: 176607 - DNA, 13 bp, Artificial Sequence
  Oligonucleotide for detection of SNP TSC0043822
aatataaatttat

SEQ ID NO: 176608 - DNA, 13 bp, Artificial Sequence
  Oligonucleotide for detection of SNP TSC0043822
ataaatttatatt

SEQ ID NO: 176609 - DNA, 13 bp, Artificial Sequence
  Oligonucleotide for detection of SNP TSC0043823
ttattttaaaaty

SEQ ID NO: 176610 - DNA, 13 bp, Artificial Sequence
  Oligonucleotide for detection of SNP TSC0043823
rattttaaaataa

SEQ ID NO: 176611 - DNA, 13 bp, Artificial Sequence
  Oligonucleotide for detection of SNP TSC0043823
ttatttgaaaaty

SEQ ID NO: 176612 - DNA, 13 bp, Artificial Sequence
  Oligonucleotide for detection of SNP TSC0043823
rattttcaaataa

SEQ ID NO: 176613 - DNA, 13 bp, Artificial Sequence
  Oligonucleotide for detection of SNP TSC0043823
gattttaagataa

SEQ ID NO: 176614 - DNA, 13 bp, Artificial Sequence
  Oligonucleotide for detection of SNP TSC0043823
ttatcttaaaatc

SEQ ID NO: 176615 - DNA, 13 bp, Artificial Sequence
  Oligonucleotide for detection of SNP TSC0043823
gatttttagataa

SEQ ID NO: 176616 - DNA, 13 bp, Artificial Sequence
  Oligonucleotide for detection of SNP TSC0043823
ttatctaaaaatc

SEQ ID NO: 176617 - DNA, 13 bp, Artificial Sequence
  Oligonucleotide for detection of SNP TSC0043824
gagtgtatgaata

SEQ ID NO: 176618 - DNA, 13 bp, Artificial Sequence
  Oligonucleotide for detection of SNP TSC0043824
tattcatacactc

SEQ ID NO: 176619 - DNA, 13 bp, Artificial Sequence
  Oligonucleotide for detection of SNP TSC0043824
gagtgtgtgaata

SEQ ID NO: 176620 - DNA, 13 bp, Artificial Sequence
  Oligonucleotide for detection of SNP TSC0043824
tattcacacactc

SEQ ID NO: 176621 - DNA, 13 bp, Artificial Sequence
  Oligonucleotide for detection of SNP TSC0043824
gagtgcgtgaata

SEQ ID NO: 176622 - DNA, 13 bp, Artificial Sequence
  Oligonucleotide for detection of SNP TSC0043824
tattcacgcactc

SEQ ID NO: 176623 - DNA, 13 bp, Artificial Sequence
  Oligonucleotide for detection of SNP TSC0043824
tatttatgtatty

SEQ ID NO: 176624 - DNA, 13 bp, Artificial Sequence
  Oligonucleotide for detection of SNP TSC0043824
raatacataaata

SEQ ID NO: 176625 - DNA, 13 bp, Artificial Sequence
  Oligonucleotide for detection of SNP TSC0043824
tatttacgtatty

SEQ ID NO: 176626 - DNA, 13 bp, Artificial Sequence
  Oligonucleotide for detection of SNP TSC0043824
raatacgtaaata

SEQ ID NO: 176627 - DNA, 13 bp, Artificial Sequence
  Oligonucleotide for detection of SNP TSC0043829
gtattaaagttty

SEQ ID NO: 176628 - DNA, 13 bp, Artificial Sequence
  Oligonucleotide for detection of SNP TSC0043829
raaactttaatac

SEQ ID NO: 176629 - DNA, 13 bp, Artificial Sequence
  Oligonucleotide for detection of SNP TSC0043829
gtattagagttty

SEQ ID NO: 176630 - DNA, 13 bp, Artificial Sequence
  Oligonucleotide for detection of SNP TSC0043829
raaactctaatac

SEQ ID NO: 176631 - DNA, 13 bp, Artificial Sequence
  Oligonucleotide for detection of SNP TSC0043830
ttatgtatgaagt

SEQ ID NO: 176632 - DNA, 13 bp, Artificial Sequence
  Oligonucleotide for detection of SNP TSC0043830
acttcatacataa

SEQ ID NO: 176633 - DNA, 13 bp, Artificial Sequence
  Oligonucleotide for detection of SNP TSC0043830
ttatgtttgaagt

SEQ ID NO: 176634 - DNA, 13 bp, Artificial Sequence
  Oligonucleotide for detection of SNP TSC0043830
acttcaaacataa

SEQ ID NO: 176635 - DNA, 13 bp, Artificial Sequence
  Oligonucleotide for detection of SNP TSC0043830
attttatatatga

SEQ ID NO: 176636 - DNA, 13 bp, Artificial Sequence
  Oligonucleotide for detection of SNP TSC0043830
tcatatataaaat

SEQ ID NO: 176637 - DNA, 13 bp, Artificial Sequence
  Oligonucleotide for detection of SNP TSC0043830
attttaaatatga

SEQ ID NO: 176638 - DNA, 13 bp, Artificial Sequence
  Oligonucleotide for detection of SNP TSC0043830
tcatatttaaaat

SEQ ID NO: 176639 - DNA, 13 bp, Artificial Sequence
  Oligonucleotide for detection of SNP TSC0043831
ttgtttgtaatat

SEQ ID NO: 176640 - DNA, 13 bp, Artificial Sequence
  Oligonucleotide for detection of SNP TSC0043831
atattacaaacaa

SEQ ID NO: 176641 - DNA, 13 bp, Artificial Sequence
  Oligonucleotide for detection of SNP TSC0043831
ttgtttataatat

SEQ ID NO: 176642 - DNA, 13 bp, Artificial Sequence
  Oligonucleotide for detection of SNP TSC0043831
atattataaacaa

SEQ ID NO: 176643 - DNA, 13 bp, Artificial Sequence
  Oligonucleotide for detection of SNP TSC0043832
ggtggttgttgaa

SEQ ID NO: 176644 - DNA, 13 bp, Artificial Sequence
  Oligonucleotide for detection of SNP TSC0043832
ttcaacaaccacc

SEQ ID NO: 176645 - DNA, 13 bp, Artificial Sequence
  Oligonucleotide for detection of SNP TSC0043832
ggtggtcgttgaa

SEQ ID NO: 176646 - DNA, 13 bp, Artificial Sequence
  Oligonucleotide for detection of SNP TSC0043832
ttcaacgaccacc

SEQ ID NO: 176647 - DNA, 13 bp, Artificial Sequence
  Oligonucleotide for detection of SNP TSC0043832
tttaataattaty

SEQ ID NO: 176648 - DNA, 13 bp, Artificial Sequence
  Oligonucleotide for detection of SNP TSC0043832
rataattattaaa

SEQ ID NO: 176649 - DNA, 13 bp, Artificial Sequence
  Oligonucleotide for detection of SNP TSC0043833
aattgtaagaaat

SEQ ID NO: 176650 - DNA, 13 bp, Artificial Sequence
  Oligonucleotide for detection of SNP TSC0043833
atttcttacaatt

SEQ ID NO: 176651 - DNA, 13 bp, Artificial Sequence
  Oligonucleotide for detection of SNP TSC0043833
aattgtgagaaat

SEQ ID NO: 176652 - DNA, 13 bp, Artificial Sequence
  Oligonucleotide for detection of SNP TSC0043833
atttctcacaatt

SEQ ID NO: 176653 - DNA, 13 bp, Artificial Sequence
  Oligonucleotide for detection of SNP TSC0043836
ttaagatgttatt

SEQ ID NO: 176654 - DNA, 13 bp, Artificial Sequence
  Oligonucleotide for detection of SNP TSC0043836
aataacatcttaa

SEQ ID NO: 176655 - DNA, 13 bp, Artificial Sequence
  Oligonucleotide for detection of SNP TSC0043836
ttaagacgttatt

SEQ ID NO: 176656 - DNA, 13 bp, Artificial Sequence
  Oligonucleotide for detection of SNP TSC0043836
aataacgtcttaa

SEQ ID NO: 176657 - DNA, 13 bp, Artificial Sequence
  Oligonucleotide for detection of SNP TSC0043836
aatgatgttttaa

SEQ ID NO: 176658 - DNA, 13 bp, Artificial Sequence
  Oligonucleotide for detection of SNP TSC0043836
ttaaaacatcatt

SEQ ID NO: 176659 - DNA, 13 bp, Artificial Sequence
  Oligonucleotide for detection of SNP TSC0043836
aatgatattttaa

SEQ ID NO: 176660 - DNA, 13 bp, Artificial Sequence
  Oligonucleotide for detection of SNP TSC0043836
ttaaaatatcatt

SEQ ID NO: 176661 - DNA, 13 bp, Artificial Sequence
  Oligonucleotide for detection of SNP TSC0043836
aatgacgttttaa

SEQ ID NO: 176662 - DNA, 13 bp, Artificial Sequence
  Oligonucleotide for detection of SNP TSC0043836
ttaaaacgtcatt

SEQ ID NO: 176663 - DNA, 13 bp, Artificial Sequence
  Oligonucleotide for detection of SNP TSC0043841
tattgaagtattt

SEQ ID NO: 176664 - DNA, 13 bp, Artificial Sequence
  Oligonucleotide for detection of SNP TSC0043841
aaatacttcaata

SEQ ID NO: 176665 - DNA, 13 bp, Artificial Sequence
  Oligonucleotide for detection of SNP TSC0043841
tattgaggtattt

SEQ ID NO: 176666 - DNA, 13 bp, Artificial Sequence
  Oligonucleotide for detection of SNP TSC0043841
aaatacctcaata

SEQ ID NO: 176667 - DNA, 13 bp, Artificial Sequence
  Oligonucleotide for detection of SNP TSC0043844
tatttttttttag

SEQ ID NO: 176668 - DNA, 13 bp, Artificial Sequence
  Oligonucleotide for detection of SNP TSC0043844
ctaaaaaaaaata

SEQ ID NO: 176669 - DNA, 13 bp, Artificial Sequence
  Oligonucleotide for detection of SNP TSC0043844
ttgaaagaggata

SEQ ID NO: 176670 - DNA, 13 bp, Artificial Sequence
  Oligonucleotide for detection of SNP TSC0043844
tatcctctttcaa

SEQ ID NO: 176671 - DNA, 13 bp, Artificial Sequence
  Oligonucleotide for detection of SNP TSC0043844
ttgaaataggata

SEQ ID NO: 176672 - DNA, 13 bp, Artificial Sequence
  Oligonucleotide for detection of SNP TSC0043844
tatcctatttcaa

SEQ ID NO: 176673 - DNA, 13 bp, Artificial Sequence
  Oligonucleotide for detection of SNP TSC0043845
tttaggtagtatt

SEQ ID NO: 176674 - DNA, 13 bp, Artificial Sequence
  Oligonucleotide for detection of SNP TSC0043845
aatactacctaaa

SEQ ID NO: 176675 - DNA, 13 bp, Artificial Sequence
  Oligonucleotide for detection of SNP TSC0043845
tttagggagtatt

SEQ ID NO: 176676 - DNA, 13 bp, Artificial Sequence
  Oligonucleotide for detection of SNP TSC0043845
aatactccctaaa

SEQ ID NO: 176677 - DNA, 13 bp, Artificial Sequence
  Oligonucleotide for detection of SNP TSC0043845
agtattgtttggg

SEQ ID NO: 176678 - DNA, 13 bp, Artificial Sequence
  Oligonucleotide for detection of SNP TSC0043845
cccaaacaatact

SEQ ID NO: 176679 - DNA, 13 bp, Artificial Sequence
  Oligonucleotide for detection of SNP TSC0043845
agtattttttggg

SEQ ID NO: 176680 - DNA, 13 bp, Artificial Sequence
  Oligonucleotide for detection of SNP TSC0043845
cccaaaaaatact

SEQ ID NO: 176681 - DNA, 13 bp, Artificial Sequence
  Oligonucleotide for detection of SNP TSC0043846
aaagggtaatttg

SEQ ID NO: 176682 - DNA, 13 bp, Artificial Sequence
  Oligonucleotide for detection of SNP TSC0043846
caaattacccttt

SEQ ID NO: 176683 - DNA, 13 bp, Artificial Sequence
  Oligonucleotide for detection of SNP TSC0043846
aaaggggaatttg

SEQ ID NO: 176684 - DNA, 13 bp, Artificial Sequence
  Oligonucleotide for detection of SNP TSC0043846
caaattccccttt

SEQ ID NO: 176685 - DNA, 13 bp, Artificial Sequence
  Oligonucleotide for detection of SNP TSC0043847
attgtgggattty

SEQ ID NO: 176686 - DNA, 13 bp, Artificial Sequence
  Oligonucleotide for detection of SNP TSC0043847
raaatcccacaat

SEQ ID NO: 176687 - DNA, 13 bp, Artificial Sequence
  Oligonucleotide for detection of SNP TSC0043847
attgtgagattty

SEQ ID NO: 176688 - DNA, 13 bp, Artificial Sequence
  Oligonucleotide for detection of SNP TSC0043847
raaatctcacaat

SEQ ID NO: 176689 - DNA, 13 bp, Artificial Sequence
  Oligonucleotide for detection of SNP TSC0043848
ggatgtattttta

SEQ ID NO: 176690 - DNA, 13 bp, Artificial Sequence
  Oligonucleotide for detection of SNP TSC0043848
taaaaatacatcc

SEQ ID NO: 176691 - DNA, 13 bp, Artificial Sequence
  Oligonucleotide for detection of SNP TSC0043848
ggatgttttttta

SEQ ID NO: 176692 - DNA, 13 bp, Artificial Sequence
  Oligonucleotide for detection of SNP TSC0043848
taaaaaaacatcc

SEQ ID NO: 176693 - DNA, 13 bp, Artificial Sequence
  Oligonucleotide for detection of SNP TSC0043848
tgaaaatatatty

SEQ ID NO: 176694 - DNA, 13 bp, Artificial Sequence
  Oligonucleotide for detection of SNP TSC0043848
raatatattttca

SEQ ID NO: 176695 - DNA, 13 bp, Artificial Sequence
  Oligonucleotide for detection of SNP TSC0043848
tgaaaagatatty

SEQ ID NO: 176696 - DNA, 13 bp, Artificial Sequence
  Oligonucleotide for detection of SNP TSC0043848
raatatcttttca

SEQ ID NO: 176697 - DNA, 13 bp, Artificial Sequence
  Oligonucleotide for detection of SNP TSC0043849
tgtgaaaatataa

SEQ ID NO: 176698 - DNA, 13 bp, Artificial Sequence
  Oligonucleotide for detection of SNP TSC0043849
ttatattttcaca

SEQ ID NO: 176699 - DNA, 13 bp, Artificial Sequence
  Oligonucleotide for detection of SNP TSC0043849
tgtgaagatataa

SEQ ID NO: 176700 - DNA, 13 bp, Artificial Sequence
  Oligonucleotide for detection of SNP TSC0043849
ttatatcttcaca

SEQ ID NO: 176701 - DNA, 13 bp, Artificial Sequence
  Oligonucleotide for detection of SNP TSC0043850
agaaatggaggta

SEQ ID NO: 176702 - DNA, 13 bp, Artificial Sequence
  Oligonucleotide for detection of SNP TSC0043850
tacctccatttct

SEQ ID NO: 176703 - DNA, 13 bp, Artificial Sequence
  Oligonucleotide for detection of SNP TSC0043850
agaaatagaggta

SEQ ID NO: 176704 - DNA, 13 bp, Artificial Sequence
  Oligonucleotide for detection of SNP TSC0043850
tacctctatttct

SEQ ID NO: 176705 - DNA, 13 bp, Artificial Sequence
  Oligonucleotide for detection of SNP TSC0043850
agaaacggaggta

SEQ ID NO: 176706 - DNA, 13 bp, Artificial Sequence
  Oligonucleotide for detection of SNP TSC0043850
tacctccgtttct

SEQ ID NO: 176707 - DNA, 13 bp, Artificial Sequence
  Oligonucleotide for detection of SNP TSC0043852
tattagggagatt

SEQ ID NO: 176708 - DNA, 13 bp, Artificial Sequence
  Oligonucleotide for detection of SNP TSC0043852
aatctccctaata

SEQ ID NO: 176709 - DNA, 13 bp, Artificial Sequence
  Oligonucleotide for detection of SNP TSC0043852
tattagagagatt

SEQ ID NO: 176710 - DNA, 13 bp, Artificial Sequence
  Oligonucleotide for detection of SNP TSC0043852
aatctctctaata

SEQ ID NO: 176711 - DNA, 13 bp, Artificial Sequence
  Oligonucleotide for detection of SNP TSC0043853
ggtgatgtggtag

SEQ ID NO: 176712 - DNA, 13 bp, Artificial Sequence
  Oligonucleotide for detection of SNP TSC0043853
ctaccacatcacc

SEQ ID NO: 176713 - DNA, 13 bp, Artificial Sequence
  Oligonucleotide for detection of SNP TSC0043853
ggtgatatggtag

SEQ ID NO: 176714 - DNA, 13 bp, Artificial Sequence
  Oligonucleotide for detection of SNP TSC0043853
ctaccatatcacc

SEQ ID NO: 176715 - DNA, 13 bp, Artificial Sequence
  Oligonucleotide for detection of SNP TSC0043855
ttaagtaaattaa

SEQ ID NO: 176716 - DNA, 13 bp, Artificial Sequence
  Oligonucleotide for detection of SNP TSC0043855
ttaatttacttaa

SEQ ID NO: 176717 - DNA, 13 bp, Artificial Sequence
  Oligonucleotide for detection of SNP TSC0043855
ttaagtgaattaa

SEQ ID NO: 176718 - DNA, 13 bp, Artificial Sequence
  Oligonucleotide for detection of SNP TSC0043855
ttaattcacttaa

SEQ ID NO: 176719 - DNA, 13 bp, Artificial Sequence
  Oligonucleotide for detection of SNP TSC0043856
tgatttatattaa

SEQ ID NO: 176720 - DNA, 13 bp, Artificial Sequence
  Oligonucleotide for detection of SNP TSC0043856
ttaatataaatca

SEQ ID NO: 176721 - DNA, 13 bp, Artificial Sequence
  Oligonucleotide for detection of SNP TSC0043856
tgatttttattaa

SEQ ID NO: 176722 - DNA, 13 bp, Artificial Sequence
  Oligonucleotide for detection of SNP TSC0043856
ttaataaaaatca

SEQ ID NO: 176723 - DNA, 13 bp, Artificial Sequence
  Oligonucleotide for detection of SNP TSC0043856
ttaatatgagtta

SEQ ID NO: 176724 - DNA, 13 bp, Artificial Sequence
  Oligonucleotide for detection of SNP TSC0043856
taactcatattaa

SEQ ID NO: 176725 - DNA, 13 bp, Artificial Sequence
  Oligonucleotide for detection of SNP TSC0043856
ttaataagagtta

SEQ ID NO: 176726 - DNA, 13 bp, Artificial Sequence
  Oligonucleotide for detection of SNP TSC0043856
taactcttattaa

SEQ ID NO: 176727 - DNA, 13 bp, Artificial Sequence
  Oligonucleotide for detection of SNP TSC0043857
tattaaatgaatt

SEQ ID NO: 176728 - DNA, 13 bp, Artificial Sequence
  Oligonucleotide for detection of SNP TSC0043857
aattcatttaata

SEQ ID NO: 176729 - DNA, 13 bp, Artificial Sequence
  Oligonucleotide for detection of SNP TSC0043857
tattaattgaatt

SEQ ID NO: 176730 - DNA, 13 bp, Artificial Sequence
  Oligonucleotide for detection of SNP TSC0043857
aattcaattaata

SEQ ID NO: 176731 - DNA, 13 bp, Artificial Sequence
  Oligonucleotide for detection of SNP TSC0043857
aatttatttggtg

SEQ ID NO: 176732 - DNA, 13 bp, Artificial Sequence
  Oligonucleotide for detection of SNP TSC0043857
caccaaataaatt

SEQ ID NO: 176733 - DNA, 13 bp, Artificial Sequence
  Oligonucleotide for detection of SNP TSC0043857
aatttaattggtg

SEQ ID NO: 176734 - DNA, 13 bp, Artificial Sequence
  Oligonucleotide for detection of SNP TSC0043857
caccaattaaatt

SEQ ID NO: 176735 - DNA, 13 bp, Artificial Sequence
  Oligonucleotide for detection of SNP TSC0043858
aaaattgagtttt

SEQ ID NO: 176736 - DNA, 13 bp, Artificial Sequence
  Oligonucleotide for detection of SNP TSC0043858
aaaactcaatttt

SEQ ID NO: 176737 - DNA, 13 bp, Artificial Sequence
  Oligonucleotide for detection of SNP TSC0043858
aaaattaagtttt

SEQ ID NO: 176738 - DNA, 13 bp, Artificial Sequence
  Oligonucleotide for detection of SNP TSC0043858
aaaacttaatttt

SEQ ID NO: 176739 - DNA, 13 bp, Artificial Sequence
  Oligonucleotide for detection of SNP TSC0043859
gttagtaagtgta

SEQ ID NO: 176740 - DNA, 13 bp, Artificial Sequence
  Oligonucleotide for detection of SNP TSC0043859
tacacttactaac

SEQ ID NO: 176741 - DNA, 13 bp, Artificial Sequence
  Oligonucleotide for detection of SNP TSC0043859
gttagtgagtgta

SEQ ID NO: 176742 - DNA, 13 bp, Artificial Sequence
  Oligonucleotide for detection of SNP TSC0043859
tacactcactaac

SEQ ID NO: 176743 - DNA, 13 bp, Artificial Sequence
  Oligonucleotide for detection of SNP TSC0043860
tgtagtagggtag

SEQ ID NO: 176744 - DNA, 13 bp, Artificial Sequence
  Oligonucleotide for detection of SNP TSC0043860
ctaccctactaca

SEQ ID NO: 176745 - DNA, 13 bp, Artificial Sequence
  Oligonucleotide for detection of SNP TSC0043860
tgtagtggggtag

SEQ ID NO: 176746 - DNA, 13 bp, Artificial Sequence
  Oligonucleotide for detection of SNP TSC0043860
ctaccccactaca

SEQ ID NO: 176747 - DNA, 13 bp, Artificial Sequence
  Oligonucleotide for detection of SNP TSC0043861
gtataaatattat

SEQ ID NO: 176748 - DNA, 13 bp, Artificial Sequence
  Oligonucleotide for detection of SNP TSC0043861
ataatatttatac

SEQ ID NO: 176749 - DNA, 13 bp, Artificial Sequence
  Oligonucleotide for detection of SNP TSC0043861
gtataattattat

SEQ ID NO: 176750 - DNA, 13 bp, Artificial Sequence
  Oligonucleotide for detection of SNP TSC0043861
ataataattatac

SEQ ID NO: 176751 - DNA, 13 bp, Artificial Sequence
  Oligonucleotide for detection of SNP TSC0043861
atagtgtttgtay

SEQ ID NO: 176752 - DNA, 13 bp, Artificial Sequence
  Oligonucleotide for detection of SNP TSC0043861
rtacaaacactat

SEQ ID NO: 176753 - DNA, 13 bp, Artificial Sequence
  Oligonucleotide for detection of SNP TSC0043861
atagtgattgtay

SEQ ID NO: 176754 - DNA, 13 bp, Artificial Sequence
  Oligonucleotide for detection of SNP TSC0043861
rtacaatcactat

SEQ ID NO: 176755 - DNA, 13 bp, Artificial Sequence
  Oligonucleotide for detection of SNP TSC0043862
tttttgatattgt

SEQ ID NO: 176756 - DNA, 13 bp, Artificial Sequence
  Oligonucleotide for detection of SNP TSC0043862
acaatatcaaaaa

SEQ ID NO: 176757 - DNA, 13 bp, Artificial Sequence
  Oligonucleotide for detection of SNP TSC0043862
tttttggtattgt

SEQ ID NO: 176758 - DNA, 13 bp, Artificial Sequence
  Oligonucleotide for detection of SNP TSC0043862
acaataccaaaaa

SEQ ID NO: 176759 - DNA, 13 bp, Artificial Sequence
  Oligonucleotide for detection of SNP TSC0043863
ggggatgggtgay

SEQ ID NO: 176760 - DNA, 13 bp, Artificial Sequence
  Oligonucleotide for detection of SNP TSC0043863
rtcacccatcccc

SEQ ID NO: 176761 - DNA, 13 bp, Artificial Sequence
  Oligonucleotide for detection of SNP TSC0043863
ggggataggtgay

SEQ ID NO: 176762 - DNA, 13 bp, Artificial Sequence
  Oligonucleotide for detection of SNP TSC0043863
rtcacctatcccc

SEQ ID NO: 176763 - DNA, 13 bp, Artificial Sequence
  Oligonucleotide for detection of SNP TSC0006887
aaggtatttattt

SEQ ID NO: 176764 - DNA, 13 bp, Artificial Sequence
  Oligonucleotide for detection of SNP TSC0006887
aaataaatacctt

SEQ ID NO: 176765 - DNA, 13 bp, Artificial Sequence
  Oligonucleotide for detection of SNP TSC0006887
aaggtagttattt

SEQ ID NO: 176766 - DNA, 13 bp, Artificial Sequence
  Oligonucleotide for detection of SNP TSC0006887
aaataactacctt

SEQ ID NO: 176767 - DNA, 13 bp, Artificial Sequence
  Oligonucleotide for detection of SNP TSC0006887
aagtaggtatttt

SEQ ID NO: 176768 - DNA, 13 bp, Artificial Sequence
  Oligonucleotide for detection of SNP TSC0006887
aaaatacctactt

SEQ ID NO: 176769 - DNA, 13 bp, Artificial Sequence
  Oligonucleotide for detection of SNP TSC0006887
aagtagttatttt

SEQ ID NO: 176770 - DNA, 13 bp, Artificial Sequence
  Oligonucleotide for detection of SNP TSC0006887
aaaataactactt

SEQ ID NO: 176771 - DNA, 13 bp, Artificial Sequence
  Oligonucleotide for detection of SNP TSC0043866
aattttttgatta

SEQ ID NO: 176772 - DNA, 13 bp, Artificial Sequence
  Oligonucleotide for detection of SNP TSC0043866
taatcaaaaaatt

SEQ ID NO: 176773 - DNA, 13 bp, Artificial Sequence
  Oligonucleotide for detection of SNP TSC0043866
aattttgtgatta

SEQ ID NO: 176774 - DNA, 13 bp, Artificial Sequence
  Oligonucleotide for detection of SNP TSC0043866
taatcacaaaatt

SEQ ID NO: 176775 - DNA, 13 bp, Artificial Sequence
  Oligonucleotide for detection of SNP TSC0043866
taattaaaaaatt

SEQ ID NO: 176776 - DNA, 13 bp, Artificial Sequence
  Oligonucleotide for detection of SNP TSC0043866
aattttttaatta

SEQ ID NO: 176777 - DNA, 13 bp, Artificial Sequence
  Oligonucleotide for detection of SNP TSC0008469
aaatgagtgtata

SEQ ID NO: 176778 - DNA, 13 bp, Artificial Sequence
  Oligonucleotide for detection of SNP TSC0008469
tatacactcattt

SEQ ID NO: 176779 - DNA, 13 bp, Artificial Sequence
  Oligonucleotide for detection of SNP TSC0008469
aaatgaatgtata

SEQ ID NO: 176780 - DNA, 13 bp, Artificial Sequence
  Oligonucleotide for detection of SNP TSC0008469
tatacattcattt
